United States Patent Application Publication US 2018/0305689 A1 - sequence listing, part 90

SEQ ID NO: 1253159 - RNA, 19 nt, Artificial Sequence
  Description of Artificial Sequence: Synthetic oligonucleotide
  Antisense strand to SEQ ID NO: 1253158
aguaagcaaaugauaaccu

SEQ ID NO: 1253160 - RNA, 19 nt, Artificial Sequence
  Description of Artificial Sequence: Synthetic oligonucleotide
  Sense strand starting at position 3199 of SEQ ID NO: 1241186
guuaucauuugcuuacugu

SEQ ID NO: 1253161 - RNA, 19 nt, Artificial Sequence
  Description of Artificial Sequence: Synthetic oligonucleotide
  Antisense strand to SEQ ID NO: 1253160
acaguaagcaaaugauaac

SEQ ID NO: 1253162 - RNA, 19 nt, Artificial Sequence
  Description of Artificial Sequence: Synthetic oligonucleotide
  Sense strand starting at position 3227 of SEQ ID NO: 1241186
uauggcaaagugugugauu

SEQ ID NO: 1253163 - RNA, 19 nt, Artificial Sequence
  Description of Artificial Sequence: Synthetic oligonucleotide
  Antisense strand to SEQ ID NO: 1253162
aaucacacacuuugccaua

SEQ ID NO: 1253164 - RNA, 19 nt, Artificial Sequence
  Description of Artificial Sequence: Synthetic oligonucleotide
  Sense strand starting at position 3228 of SEQ ID NO: 1241186
auggcaaagugugugauua

SEQ ID NO: 1253165 - RNA, 19 nt, Artificial Sequence
  Description of Artificial Sequence: Synthetic oligonucleotide
  Antisense strand to SEQ ID NO: 1253164
uaaucacacacuuugccau

SEQ ID NO: 1253166 - RNA, 19 nt, Artificial Sequence
  Description of Artificial Sequence: Synthetic oligonucleotide
  Sense strand starting at position 3229 of SEQ ID NO: 1241186
uggcaaagugugugauuaa

SEQ ID NO: 1253167 - RNA, 19 nt, Artificial Sequence
  Description of Artificial Sequence: Synthetic oligonucleotide
  Antisense strand to SEQ ID NO: 1253166
uuaaucacacacuuugcca

SEQ ID NO: 1253168 - RNA, 19 nt, Artificial Sequence
  Description of Artificial Sequence: Synthetic oligonucleotide
  Sense strand starting at position 3232 of SEQ ID NO: 1241186
caaagugugugauuaacau

SEQ ID NO: 1253169 - RNA, 19 nt, Artificial Sequence
  Description of Artificial Sequence: Synthetic oligonucleotide
  Antisense strand to SEQ ID NO: 1253168
auguuaaucacacacuuug

SEQ ID NO: 1253170 - RNA, 19 nt, Artificial Sequence
  Description of Artificial Sequence: Synthetic oligonucleotide
  Sense strand starting at position 3238 of SEQ ID NO: 1241186
gugugauuaacaugcugug

SEQ ID NO: 1253171 - RNA, 19 nt, Artificial Sequence
  Description of Artificial Sequence: Synthetic oligonucleotide
  Antisense strand to SEQ ID NO: 1253170
cacagcauguuaaucacac

SEQ ID NO: 1253172 - RNA, 19 nt, Artificial Sequence
  Description of Artificial Sequence: Synthetic oligonucleotide
  Sense strand starting at position 3243 of SEQ ID NO: 1241186
auuaacaugcugugcuaga

SEQ ID NO: 1253173 - RNA, 19 nt, Artificial Sequence
  Description of Artificial Sequence: Synthetic oligonucleotide
  Antisense strand to SEQ ID NO: 1253172
ucuagcacagcauguuaau

SEQ ID NO: 1253174 - RNA, 19 nt, Artificial Sequence
  Description of Artificial Sequence: Synthetic oligonucleotide
  Sense strand starting at position 3244 of SEQ ID NO: 1241186
uuaacaugcugugcuagaa

SEQ ID NO: 1253175 - RNA, 19 nt, Artificial Sequence
  Description of Artificial Sequence: Synthetic oligonucleotide
  Antisense strand to SEQ ID NO: 1253174
uucuagcacagcauguuaa

SEQ ID NO: 1253176 - RNA, 19 nt, Artificial Sequence
  Description of Artificial Sequence: Synthetic oligonucleotide
  Sense strand starting at position 3361 of SEQ ID NO: 1241186
caggacuucuugggauaac

SEQ ID NO: 1253177 - RNA, 19 nt, Artificial Sequence
  Description of Artificial Sequence: Synthetic oligonucleotide
  Antisense strand to SEQ ID NO: 1253176
guuaucccaagaaguccug

SEQ ID NO: 1253178 - RNA, 19 nt, Artificial Sequence
  Description of Artificial Sequence: Synthetic oligonucleotide
  Sense strand starting at position 3372 of SEQ ID NO: 1241186
gggauaaccuuagacaaga

SEQ ID NO: 1253179 - RNA, 19 nt, Artificial Sequence
  Description of Artificial Sequence: Synthetic oligonucleotide
  Antisense strand to SEQ ID NO: 1253178
ucuugucuaagguuauccc

SEQ ID NO: 1253180 - RNA, 19 nt, Artificial Sequence
  Description of Artificial Sequence: Synthetic oligonucleotide
  Sense strand starting at position 3449 of SEQ ID NO: 1241186
ugaaccugcuguuuaauuu

SEQ ID NO: 1253181 - RNA, 19 nt, Artificial Sequence
  Description of Artificial Sequence: Synthetic oligonucleotide
  Antisense strand to SEQ ID NO: 1253180
aaauuaaacagcagguuca

SEQ ID NO: 1253182 - RNA, 19 nt, Artificial Sequence
  Description of Artificial Sequence: Synthetic oligonucleotide
  Sense strand starting at position 3502 of SEQ ID NO: 1241186
gccuucccucugcagauua

SEQ ID NO: 1253183 - RNA, 19 nt, Artificial Sequence
  Description of Artificial Sequence: Synthetic oligonucleotide
  Antisense strand to SEQ ID NO: 1253182
uaaucugcagagggaaggc

SEQ ID NO: 1253184 - RNA, 19 nt, Artificial Sequence
  Description of Artificial Sequence: Synthetic oligonucleotide
  Sense strand starting at position 3504 of SEQ ID NO: 1241186
cuucccucugcagauuaga

SEQ ID NO: 1253185 - RNA, 19 nt, Artificial Sequence
  Description of Artificial Sequence: Synthetic oligonucleotide
  Antisense strand to SEQ ID NO: 1253184
ucuaaucugcagagggaag

SEQ ID NO: 1253186 - RNA, 19 nt, Artificial Sequence
  Description of Artificial Sequence: Synthetic oligonucleotide
  Sense strand starting at position 3575 of SEQ ID NO: 1241186
auaauacuccugggcucau

SEQ ID NO: 1253187 - RNA, 19 nt, Artificial Sequence
  Description of Artificial Sequence: Synthetic oligonucleotide
  Antisense strand to SEQ ID NO: 1253186
augagcccaggaguauuau

SEQ ID NO: 1253188 - RNA, 19 nt, Artificial Sequence
  Description of Artificial Sequence: Synthetic oligonucleotide
  Sense strand starting at position 3608 of SEQ ID NO: 1241186
guaggaauaaagcgugcau

SEQ ID NO: 1253189 - RNA, 19 nt, Artificial Sequence
  Description of Artificial Sequence: Synthetic oligonucleotide
  Antisense strand to SEQ ID NO: 1253188
augcacgcuuuauuccuac

SEQ ID NO: 1253190 - RNA, 19 nt, Artificial Sequence
  Description of Artificial Sequence: Synthetic oligonucleotide
  Sense strand starting at position 3612 of SEQ ID NO: 1241186
gaauaaagcgugcauacua

SEQ ID NO: 1253191 - RNA, 19 nt, Artificial Sequence
  Description of Artificial Sequence: Synthetic oligonucleotide
  Antisense strand to SEQ ID NO: 1253190
uaguaugcacgcuuuauuc

SEQ ID NO: 1253192 - RNA, 19 nt, Artificial Sequence
  Description of Artificial Sequence: Synthetic oligonucleotide
  Sense strand starting at position 3622 of SEQ ID NO: 1241186
ugcauacuaaugcgagagu

SEQ ID NO: 1253193 - RNA, 19 nt, Artificial Sequence
  Description of Artificial Sequence: Synthetic oligonucleotide
  Antisense strand to SEQ ID NO: 1253192
acucucgcauuaguaugca

SEQ ID NO: 1253194 - RNA, 19 nt, Artificial Sequence
  Description of Artificial Sequence: Synthetic oligonucleotide
  Sense strand starting at position 3699 of SEQ ID NO: 1241186
auaauccagucaguuacaa

SEQ ID NO: 1253195 - RNA, 19 nt, Artificial Sequence
  Description of Artificial Sequence: Synthetic oligonucleotide
  Antisense strand to SEQ ID NO: 1253194
uuguaacugacuggauuau

SEQ ID NO: 1253196 - RNA, 19 nt, Artificial Sequence
  Description of Artificial Sequence: Synthetic oligonucleotide
  Sense strand starting at position 72 of SEQ ID NO: 1241187
aggcaaucauguuuggaga

SEQ ID NO: 1253197 - RNA, 19 nt, Artificial Sequence
  Description of Artificial Sequence: Synthetic oligonucleotide
  Antisense strand to SEQ ID NO: 1253196
ucuccaaacaugauugccu

SEQ ID NO: 1253198 - RNA, 19 nt, Artificial Sequence
  Description of Artificial Sequence: Synthetic oligonucleotide
  Sense strand starting at position 73 of SEQ ID NO: 1241187
ggcaaucauguuuggagau

SEQ ID NO: 1253199 - RNA, 19 nt, Artificial Sequence
  Description of Artificial Sequence: Synthetic oligonucleotide
  Antisense strand to SEQ ID NO: 1253198
aucuccaaacaugauugcc

SEQ ID NO: 1253200 - RNA, 19 nt, Artificial Sequence
  Description of Artificial Sequence: Synthetic oligonucleotide
  Sense strand starting at position 215 of SEQ ID NO: 1241187
ggaagacauucagagggaa

SEQ ID NO: 1253201 - RNA, 19 nt, Artificial Sequence
  Description of Artificial Sequence: Synthetic oligonucleotide
  Antisense strand to SEQ ID NO: 1253200
uucccucugaaugucuucc

SEQ ID NO: 1253202 - RNA, 19 nt, Artificial Sequence
  Description of Artificial Sequence: Synthetic oligonucleotide
  Sense strand starting at position 622 of SEQ ID NO: 1241187
ugccaacucuaaguggaau

SEQ ID NO: 1253203 - RNA, 19 nt, Artificial Sequence
  Description of Artificial Sequence: Synthetic oligonucleotide
  Antisense strand to SEQ ID NO: 1253202
auuccacuuagaguuggca

SEQ ID NO: 1253204 - RNA, 19 nt, Artificial Sequence
  Description of Artificial Sequence: Synthetic oligonucleotide
  Sense strand starting at position 666 of SEQ ID NO: 1241187
cugacaacugcugaguaaa

SEQ ID NO: 1253205 - RNA, 19 nt, Artificial Sequence
  Description of Artificial Sequence: Synthetic oligonucleotide
  Antisense strand to SEQ ID NO: 1253204
uuuacucagcaguugucag

SEQ ID NO: 1253206 - RNA, 19 nt, Artificial Sequence
  Description of Artificial Sequence: Synthetic oligonucleotide
  Sense strand starting at position 668 of SEQ ID NO: 1241187
gacaacugcugaguaaauu

SEQ ID NO: 1253207 - RNA, 19 nt, Artificial Sequence
  Description of Artificial Sequence: Synthetic oligonucleotide
  Antisense strand to SEQ ID NO: 1253206
aauuuacucagcaguuguc

SEQ ID NO: 1253208 - RNA, 19 nt, Artificial Sequence
  Description of Artificial Sequence: Synthetic oligonucleotide
  Sense strand starting at position 669 of SEQ ID NO: 1241187
acaacugcugaguaaauua

SEQ ID NO: 1253209 - RNA, 19 nt, Artificial Sequence
  Description of Artificial Sequence: Synthetic oligonucleotide
  Antisense strand to SEQ ID NO: 1253208
uaauuuacucagcaguugu

SEQ ID NO: 1253210 - RNA, 19 nt, Artificial Sequence
  Description of Artificial Sequence: Synthetic oligonucleotide
  Sense strand starting at position 1091 of SEQ ID NO: 1241187
gugcaaacucgagagaguu

SEQ ID NO: 1253211 - RNA, 19 nt, Artificial Sequence
  Description of Artificial Sequence: Synthetic oligonucleotide
  Antisense strand to SEQ ID NO: 1253210
aacucucucgaguuugcac

SEQ ID NO: 1253212 - RNA, 19 nt, Artificial Sequence
  Description of Artificial Sequence: Synthetic oligonucleotide
  Sense strand starting at position 1097 of SEQ ID NO: 1241187
acucgagagaguuaguaug

SEQ ID NO: 1253213 - RNA, 19 nt, Artificial Sequence
  Description of Artificial Sequence: Synthetic oligonucleotide
  Antisense strand to SEQ ID NO: 1253212
cauacuaacucucucgagu

SEQ ID NO: 1253214 - RNA, 19 nt, Artificial Sequence
  Description of Artificial Sequence: Synthetic oligonucleotide
  Sense strand starting at position 1099 of SEQ ID NO: 1241187
ucgagagaguuaguaugaa

SEQ ID NO: 1253215 - RNA, 19 nt, Artificial Sequence
  Description of Artificial Sequence: Synthetic oligonucleotide
  Antisense strand to SEQ ID NO: 1253214
uucauacuaacucucucga

SEQ ID NO: 1253216 - RNA, 19 nt, Artificial Sequence
  Description of Artificial Sequence: Synthetic oligonucleotide
  Sense strand starting at position 1522 of SEQ ID NO: 1241187
ugacaaguauuacuucuga

SEQ ID NO: 1253217 - RNA, 19 nt, Artificial Sequence
  Description of Artificial Sequence: Synthetic oligonucleotide
  Antisense strand to SEQ ID NO: 1253216
ucagaaguaauacuuguca

SEQ ID NO: 1253218 - RNA, 19 nt, Artificial Sequence
  Description of Artificial Sequence: Synthetic oligonucleotide
  Sense strand starting at position 1789 of SEQ ID NO: 1241187
auggaauagugaucacauu

SEQ ID NO: 1253219 - RNA, 19 nt, Artificial Sequence
  Description of Artificial Sequence: Synthetic oligonucleotide
  Antisense strand to SEQ ID NO: 1253218
aaugugaucacuauuccau

SEQ ID NO: 1253220 - RNA, 19 nt, Artificial Sequence
  Description of Artificial Sequence: Synthetic oligonucleotide
  Sense strand starting at position 1853 of SEQ ID NO: 1241187
guaauuaccucuuuaggag

SEQ ID NO: 1253221 - RNA, 19 nt, Artificial Sequence
  Description of Artificial Sequence: Synthetic oligonucleotide
  Antisense strand to SEQ ID NO: 1253220
cuccuaaagagguaauuac

SEQ ID NO: 1253222 - RNA, 19 nt, Artificial Sequence
  Description of Artificial Sequence: Synthetic oligonucleotide
  Sense strand starting at position 2029 of SEQ ID NO: 1241187
acagaagcaugcuuagaaa

SEQ ID NO: 1253223 - RNA, 19 nt, Artificial Sequence
  Description of Artificial Sequence: Synthetic oligonucleotide
  Antisense strand to SEQ ID NO: 1253222
uuucuaagcaugcuucugu

SEQ ID NO: 1253224 - RNA, 19 nt, Artificial Sequence
  Description of Artificial Sequence: Synthetic oligonucleotide
  Sense strand starting at position 2166 of SEQ ID NO: 1241187
gcauuuaucuaggaaggau

SEQ ID NO: 1253225 - RNA, 19 nt, Artificial Sequence
  Description of Artificial Sequence: Synthetic oligonucleotide
  Antisense strand to SEQ ID NO: 1253224
auccuuccuagauaaaugc

SEQ ID NO: 1253226 - RNA, 19 nt, Artificial Sequence
  Description of Artificial Sequence: Synthetic oligonucleotide
  Sense strand starting at position 2224 of SEQ ID NO: 1241187
aucauacgaucauugaaug

SEQ ID NO: 1253227 - RNA, 19 nt, Artificial Sequence
  Description of Artificial Sequence: Synthetic oligonucleotide
  Antisense strand to SEQ ID NO: 1253226
cauucaaugaucguaugau

SEQ ID NO: 1253228 - RNA, 19 nt, Artificial Sequence
  Description of Artificial Sequence: Synthetic oligonucleotide
  Sense strand starting at position 2332 of SEQ ID NO: 1241187
auaacugggucuuuaagga

SEQ ID NO: 1253229 - RNA, 19 nt, Artificial Sequence
  Description of Artificial Sequence: Synthetic oligonucleotide
  Antisense strand to SEQ ID NO: 1253228
uccuuaaagacccaguuau

SEQ ID NO: 1253230 - RNA, 19 nt, Artificial Sequence
  Description of Artificial Sequence: Synthetic oligonucleotide
  Sense strand starting at position 2474 of SEQ ID NO: 1241187
ccaguuuguccuccguauu

SEQ ID NO: 1253231 - RNA, 19 nt, Artificial Sequence
  Description of Artificial Sequence: Synthetic oligonucleotide
  Antisense strand to SEQ ID NO: 1253230
aauacggaggacaaacugg

SEQ ID NO: 1253232 - RNA, 19 nt, Artificial Sequence
  Description of Artificial Sequence: Synthetic oligonucleotide
  Sense strand starting at position 2484 of SEQ ID NO: 1241187
cuccguauucauguugugu

SEQ ID NO: 1253233 - RNA, 19 nt, Artificial Sequence
  Description of Artificial Sequence: Synthetic oligonucleotide
  Antisense strand to SEQ ID NO: 1253232
acacaacaugaauacggag

SEQ ID NO: 1253234 - RNA, 19 nt, Artificial Sequence
  Description of Artificial Sequence: Synthetic oligonucleotide
  Sense strand starting at position 2598 of SEQ ID NO: 1241187
cugacuagucaugaauggu

SEQ ID NO: 1253235 - RNA, 19 nt, Artificial Sequence
  Description of Artificial Sequence: Synthetic oligonucleotide
  Antisense strand to SEQ ID NO: 1253234
accauucaugacuagucag

SEQ ID NO: 1253236 - RNA, 19 nt, Artificial Sequence
  Description of Artificial Sequence: Synthetic oligonucleotide
  Sense strand starting at position 2604 of SEQ ID NO: 1241187
agucaugaauggucacaga

SEQ ID NO: 1253237 - RNA, 19 nt, Artificial Sequence
  Description of Artificial Sequence: Synthetic oligonucleotide
  Antisense strand to SEQ ID NO: 1253236
ucugugaccauucaugacu

SEQ ID NO: 1253238 - RNA, 19 nt, Artificial Sequence
  Description of Artificial Sequence: Synthetic oligonucleotide
  Sense strand starting at position 2732 of SEQ ID NO: 1241187
ccugaaauaugucugguau

SEQ ID NO: 1253239 - RNA, 19 nt, Artificial Sequence
  Description of Artificial Sequence: Synthetic oligonucleotide
  Antisense strand to SEQ ID NO: 1253238
auaccagacauauuucagg

SEQ ID NO: 1253240 - RNA, 19 nt, Artificial Sequence
  Description of Artificial Sequence: Synthetic oligonucleotide
  Sense strand starting at position 2746 of SEQ ID NO: 1241187
gguaucuggguuuaaucua

SEQ ID NO: 1253241 - RNA, 19 nt, Artificial Sequence
  Description of Artificial Sequence: Synthetic oligonucleotide
  Antisense strand to SEQ ID NO: 1253240
uagauuaaacccagauacc

SEQ ID NO: 1253242 - RNA, 19 nt, Artificial Sequence
  Description of Artificial Sequence: Synthetic oligonucleotide
  Sense strand starting at position 2754 of SEQ ID NO: 1241187
gguuuaaucuauuccugga

SEQ ID NO: 1253243 - RNA, 19 nt, Artificial Sequence
  Description of Artificial Sequence: Synthetic oligonucleotide
  Antisense strand to SEQ ID NO: 1253242
uccaggaauagauuaaacc

SEQ ID NO: 1253244 - RNA, 19 nt, Artificial Sequence
  Description of Artificial Sequence: Synthetic oligonucleotide
  Sense strand starting at position 2808 of SEQ ID NO: 1241187
ucuggugaccuugaccuaa

SEQ ID NO: 1253245 - RNA, 19 nt, Artificial Sequence
  Description of Artificial Sequence: Synthetic oligonucleotide
  Antisense strand to SEQ ID NO: 1253244
uuaggucaaggucaccaga

SEQ ID NO: 1253246 - RNA, 19 nt, Artificial Sequence
  Description of Artificial Sequence: Synthetic oligonucleotide
  Sense strand starting at position 2919 of SEQ ID NO: 1241187
ccuguuucccacuagggaa

SEQ ID NO: 1253247 - RNA, 19 nt, Artificial Sequence
  Description of Artificial Sequence: Synthetic oligonucleotide
  Antisense strand to SEQ ID NO: 1253246
uucccuagugggaaacagg

SEQ ID NO: 1253248 - RNA, 19 nt, Artificial Sequence
  Description of Artificial Sequence: Synthetic oligonucleotide
  Sense strand starting at position 3054 of SEQ ID NO: 1241187
ugaugaagcaggugacauu

SEQ ID NO: 1253249 - RNA, 19 nt, Artificial Sequence
  Description of Artificial Sequence: Synthetic oligonucleotide
  Antisense strand to SEQ ID NO: 1253248
aaugucaccugcuucauca

SEQ ID NO: 1253250 - RNA, 19 nt, Artificial Sequence
  Description of Artificial Sequence: Synthetic oligonucleotide
  Sense strand starting at position 3064 of SEQ ID NO: 1241187
ggugacauuugccuucuuu

SEQ ID NO: 1253251 - RNA, 19 nt, Artificial Sequence
  Description of Artificial Sequence: Synthetic oligonucleotide
  Antisense strand to SEQ ID NO: 1253250
aaagaaggcaaaugucacc

SEQ ID NO: 1253252 - RNA, 19 nt, Artificial Sequence
  Description of Artificial Sequence: Synthetic oligonucleotide
  Sense strand starting at position 3193 of SEQ ID NO: 1241187
cuuugaugugaguaccaag

SEQ ID NO: 1253253 - RNA, 19 nt, Artificial Sequence
  Description of Artificial Sequence: Synthetic oligonucleotide
  Antisense strand to SEQ ID NO: 1253252
cuugguacucacaucaaag

SEQ ID NO: 1253254 - RNA, 19 nt, Artificial Sequence
  Description of Artificial Sequence: Synthetic oligonucleotide
  Sense strand starting at position 3235 of SEQ ID NO: 1241187
aucuguaacaguggaauga

SEQ ID NO: 1253255 - RNA, 19 nt, Artificial Sequence
  Description of Artificial Sequence: Synthetic oligonucleotide
  Antisense strand to SEQ ID NO: 1253254
ucauuccacuguuacagau

SEQ ID NO: 1253256 - RNA, 19 nt, Artificial Sequence
  Description of Artificial Sequence: Synthetic oligonucleotide
  Sense strand starting at position 3296 of SEQ ID NO: 1241187
ccgucuagucaggaggaua

SEQ ID NO: 1253257 - RNA, 19 nt, Artificial Sequence
  Description of Artificial Sequence: Synthetic oligonucleotide
  Antisense strand to SEQ ID NO: 1253256
uauccuccugacuagacgg

SEQ ID NO: 1253258 - RNA, 19 nt, Artificial Sequence
  Description of Artificial Sequence: Synthetic oligonucleotide
  Sense strand starting at position 3322 of SEQ ID NO: 1241187
aggcaaugggcugauugaa

SEQ ID NO: 1253259 - RNA, 19 nt, Artificial Sequence
  Description of Artificial Sequence: Synthetic oligonucleotide
  Antisense strand to SEQ ID NO: 1253258
uucaaucagcccauugccu

SEQ ID NO: 1253260 - RNA, 19 nt, Artificial Sequence
  Description of Artificial Sequence: Synthetic oligonucleotide
  Sense strand starting at position 3490 of SEQ ID NO: 1241187
ucuguuucuucugcauuua

SEQ ID NO: 1253261 - RNA, 19 nt, Artificial Sequence
  Description of Artificial Sequence: Synthetic oligonucleotide
  Antisense strand to SEQ ID NO: 1253260
uaaaugcagaagaaacaga

SEQ ID NO: 1253262 - RNA, 19 nt, Artificial Sequence
  Description of Artificial Sequence: Synthetic oligonucleotide
  Sense strand starting at position 3491 of SEQ ID NO: 1241187
cuguuucuucugcauuuau

SEQ ID NO: 1253263 - RNA, 19 nt, Artificial Sequence
  Description of Artificial Sequence: Synthetic oligonucleotide
  Antisense strand to SEQ ID NO: 1253262
auaaaugcagaagaaacag

SEQ ID NO: 1253264 - RNA, 19 nt, Artificial Sequence
  Description of Artificial Sequence: Synthetic oligonucleotide
  Sense strand starting at position 3502 of SEQ ID NO: 1241187
gcauuuauauguccuucuu

SEQ ID NO: 1253265 - RNA, 19 nt, Artificial Sequence
  Description of Artificial Sequence: Synthetic oligonucleotide
  Antisense strand to SEQ ID NO: 1253264
aagaaggacauauaaaugc

SEQ ID NO: 1253266 - RNA, 19 nt, Artificial Sequence
  Description of Artificial Sequence: Synthetic oligonucleotide
  Sense strand starting at position 3566 of SEQ ID NO: 1241187
uuauuuaagucuucgcagu

SEQ ID NO: 1253267 - RNA, 19 nt, Artificial Sequence
  Description of Artificial Sequence: Synthetic oligonucleotide
  Antisense strand to SEQ ID NO: 1253266
acugcgaagacuuaaauaa

SEQ ID NO: 1253268 - RNA, 19 nt, Artificial Sequence
  Description of Artificial Sequence: Synthetic oligonucleotide
  Sense strand starting at position 3567 of SEQ ID NO: 1241187
uauuuaagucuucgcaguu

SEQ ID NO: 1253269 - RNA, 19 nt, Artificial Sequence
  Description of Artificial Sequence: Synthetic oligonucleotide
  Antisense strand to SEQ ID NO: 1253268
aacugcgaagacuuaaaua

SEQ ID NO: 1253270 - RNA, 19 nt, Artificial Sequence
  Description of Artificial Sequence: Synthetic oligonucleotide
  Sense strand starting at position 3739 of SEQ ID NO: 1241187
aagacucuugaauguaugu

SEQ ID NO: 1253271 - RNA, 19 nt, Artificial Sequence
  Description of Artificial Sequence: Synthetic oligonucleotide
  Antisense strand to SEQ ID NO: 1253270
acauacauucaagagucuu

SEQ ID NO: 1253272 - RNA, 19 nt, Artificial Sequence
  Description of Artificial Sequence: Synthetic oligonucleotide
  Sense strand starting at position 3744 of SEQ ID NO: 1241187
ucuugaauguauguugaca

SEQ ID NO: 1253273 - RNA, 19 nt, Artificial Sequence
  Description of Artificial Sequence: Synthetic oligonucleotide
  Antisense strand to SEQ ID NO: 1253272
ugucaacauacauucaaga

SEQ ID NO: 1253274 - RNA, 19 nt, Artificial Sequence
  Description of Artificial Sequence: Synthetic oligonucleotide
  Sense strand starting at position 3903 of SEQ ID NO: 1241187
auaaauuaucugggcaugu

SEQ ID NO: 1253275 - RNA, 19 nt, Artificial Sequence
  Description of Artificial Sequence: Synthetic oligonucleotide
  Antisense strand to SEQ ID NO: 1253274
acaugcccagauaauuuau

SEQ ID NO: 1253276 - RNA, 19 nt, Artificial Sequence
  Description of Artificial Sequence: Synthetic oligonucleotide
  Sense strand starting at position 233 of SEQ ID NO: 1241188
cuggauucuugugcuugaa

SEQ ID NO: 1253277 - RNA, 19 nt, Artificial Sequence
  Description of Artificial Sequence: Synthetic oligonucleotide
  Antisense strand to SEQ ID NO: 1253276
uucaagcacaagaauccag

SEQ ID NO: 1253278 - RNA, 19 nt, Artificial Sequence
  Description of Artificial Sequence: Synthetic oligonucleotide
  Sense strand starting at position 235 of SEQ ID NO: 1241188
ggauucuugugcuugaaag

SEQ ID NO: 1253279 - RNA, 19 nt, Artificial Sequence
  Description of Artificial Sequence: Synthetic oligonucleotide
  Antisense strand to SEQ ID NO: 1253278
cuuucaagcacaagaaucc

SEQ ID NO: 1253280 - RNA, 19 nt, Artificial Sequence
  Description of Artificial Sequence: Synthetic oligonucleotide
  Sense strand starting at position 236 of SEQ ID NO: 1241188
gauucuugugcuugaaaga

SEQ ID NO: 1253281 - RNA, 19 nt, Artificial Sequence
  Description of Artificial Sequence: Synthetic oligonucleotide
  Antisense strand to SEQ ID NO: 1253280
ucuuucaagcacaagaauc

SEQ ID NO: 1253282 - RNA, 19 nt, Artificial Sequence
  Description of Artificial Sequence: Synthetic oligonucleotide
  Sense strand starting at position 237 of SEQ ID NO: 1241188
auucuugugcuugaaagac

SEQ ID NO: 1253283 - RNA, 19 nt, Artificial Sequence
  Description of Artificial Sequence: Synthetic oligonucleotide
  Antisense strand to SEQ ID NO: 1253282
gucuuucaagcacaagaau

SEQ ID NO: 1253284 - RNA, 19 nt, Artificial Sequence
  Description of Artificial Sequence: Synthetic oligonucleotide
  Sense strand starting at position 252 of SEQ ID NO: 1241188
agacuuggguccucagaga

SEQ ID NO: 1253285 - RNA, 19 nt, Artificial Sequence
  Description of Artificial Sequence: Synthetic oligonucleotide
  Antisense strand to SEQ ID NO: 1253284
ucucugaggacccaagucu

SEQ ID NO: 1253286 - RNA, 19 nt, Artificial Sequence
  Description of Artificial Sequence: Synthetic oligonucleotide
  Sense strand starting at position 285 of SEQ ID NO: 1241188
gccagagaaacuugaguau

SEQ ID NO: 1253287 - RNA, 19 nt, Artificial Sequence
  Description of Artificial Sequence: Synthetic oligonucleotide
  Antisense strand to SEQ ID NO: 1253286
auacucaaguuucucuggc

SEQ ID NO: 1253288 - RNA, 19 nt, Artificial Sequence
  Description of Artificial Sequence: Synthetic oligonucleotide
  Sense strand starting at position 398 of SEQ ID NO: 1241188
gggucacgucaggaucauu

SEQ ID NO: 1253289 - RNA, 19 nt, Artificial Sequence
  Description of Artificial Sequence: Synthetic oligonucleotide
  Antisense strand to SEQ ID NO: 1253288
aaugauccugacgugaccc

SEQ ID NO: 1253290 - RNA, 19 nt, Artificial Sequence
  Description of Artificial Sequence: Synthetic oligonucleotide
  Sense strand starting at position 588 of SEQ ID NO: 1241188
agcauuggacucugcacau

SEQ ID NO: 1253291 - RNA, 19 nt, Artificial Sequence
  Description of Artificial Sequence: Synthetic oligonucleotide
  Antisense strand to SEQ ID NO: 1253290
augugcagaguccaaugcu

SEQ ID NO: 1253292 - RNA, 19 nt, Artificial Sequence
  Description of Artificial Sequence: Synthetic oligonucleotide
  Sense strand starting at position 913 of SEQ ID NO: 1241188
aggaaaugcccauggcuca

SEQ ID NO: 1253293 - RNA, 19 nt, Artificial Sequence
  Description of Artificial Sequence: Synthetic oligonucleotide
  Antisense strand to SEQ ID NO: 1253292
ugagccaugggcauuuccu

SEQ ID NO: 1253294 - RNA, 19 nt, Artificial Sequence
  Description of Artificial Sequence: Synthetic oligonucleotide
  Sense strand starting at position 1093 of SEQ ID NO: 1241188
ggcaauaggccagauuagu

SEQ ID NO: 1253295 - RNA, 19 nt, Artificial Sequence
  Description of Artificial Sequence: Synthetic oligonucleotide
  Antisense strand to SEQ ID NO: 1253294
acuaaucuggccuauugcc

SEQ ID NO: 1253296 - RNA, 19 nt, Artificial Sequence
  Description of Artificial Sequence: Synthetic oligonucleotide
  Sense strand starting at position 1222 of SEQ ID NO: 1241188
gggauuaccuggucgaagu

SEQ ID NO: 1253297 - RNA, 19 nt, Artificial Sequence
  Description of Artificial Sequence: Synthetic oligonucleotide
  Antisense strand to SEQ ID NO: 1253296
acuucgaccagguaauccc

SEQ ID NO: 1253298 - RNA, 19 nt, Artificial Sequence
  Description of Artificial Sequence: Synthetic oligonucleotide
  Sense strand starting at position 1223 of SEQ ID NO: 1241188
ggauuaccuggucgaagua

SEQ ID NO: 1253299 - RNA, 19 nt, Artificial Sequence
  Description of Artificial Sequence: Synthetic oligonucleotide
  Antisense strand to SEQ ID NO: 1253298
uacuucgaccagguaaucc

SEQ ID NO: 1253300 - RNA, 19 nt, Artificial Sequence
  Description of Artificial Sequence: Synthetic oligonucleotide
  Sense strand starting at position 1748 of SEQ ID NO: 1241188
gcaguugggcuuugggaga

SEQ ID NO: 1253301 - RNA, 19 nt, Artificial Sequence
  Description of Artificial Sequence: Synthetic oligonucleotide
  Antisense strand to SEQ ID NO: 1253300
ucucccaaagcccaacugc

SEQ ID NO: 1253302 - RNA, 19 nt, Artificial Sequence
  Description of Artificial Sequence: Synthetic oligonucleotide
  Sense strand starting at position 2011 of SEQ ID NO: 1241188
caucuuuccguuuguugga

SEQ ID NO: 1253303 - RNA, 19 nt, Artificial Sequence
  Description of Artificial Sequence: Synthetic oligonucleotide
  Antisense strand to SEQ ID NO: 1253302
uccaacaaacggaaagaug

SEQ ID NO: 1253304 - RNA, 19 nt, Artificial Sequence
  Description of Artificial Sequence: Synthetic oligonucleotide
  Sense strand starting at position 2089 of SEQ ID NO: 1241188
ccacgauugcuuuggugga

SEQ ID NO: 1253305 - RNA, 19 nt, Artificial Sequence
  Description of Artificial Sequence: Synthetic oligonucleotide
  Antisense strand to SEQ ID NO: 1253304
uccaccaaagcaaucgugg

SEQ ID NO: 1253306 - RNA, 19 nt, Artificial Sequence
  Description of Artificial Sequence: Synthetic oligonucleotide
  Sense strand starting at position 2091 of SEQ ID NO: 1241188
acgauugcuuugguggaaa

SEQ ID NO: 1253307 - RNA, 19 nt, Artificial Sequence
  Description of Artificial Sequence: Synthetic oligonucleotide
  Antisense strand to SEQ ID NO: 1253306
uuuccaccaaagcaaucgu

SEQ ID NO: 1253308 - RNA, 19 nt, Artificial Sequence
  Description of Artificial Sequence: Synthetic oligonucleotide
  Sense strand starting at position 2093 of SEQ ID NO: 1241188
gauugcuuugguggaaagu

SEQ ID NO: 1253309 - RNA, 19 nt, Artificial Sequence
  Description of Artificial Sequence: Synthetic oligonucleotide
  Antisense strand to SEQ ID NO: 1253308
acuuuccaccaaagcaauc

SEQ ID NO: 1253310 - RNA, 19 nt, Artificial Sequence
  Description of Artificial Sequence: Synthetic oligonucleotide
  Sense strand starting at position 2104 of SEQ ID NO: 1241188
uggaaagugcuugggccua

SEQ ID NO: 1253311 - RNA, 19 nt, Artificial Sequence
  Description of Artificial Sequence: Synthetic oligonucleotide
  Antisense strand to SEQ ID NO: 1253310
uaggcccaagcacuuucca

SEQ ID NO: 1253312 - RNA, 19 nt, Artificial Sequence
  Description of Artificial Sequence: Synthetic oligonucleotide
  Sense strand starting at position 2106 of SEQ ID NO: 1241188
gaaagugcuugggccuaga

SEQ ID NO: 1253313 - RNA, 19 nt, Artificial Sequence
  Description of Artificial Sequence: Synthetic oligonucleotide
  Antisense strand to SEQ ID NO: 1253312
ucuaggcccaagcacuuuc

SEQ ID NO: 1253314 - RNA, 19 nt, Artificial Sequence
  Description of Artificial Sequence: Synthetic oligonucleotide
  Sense strand starting at position 2163 of SEQ ID NO: 1241188
acaucuuuauucgcgggaa

SEQ ID NO: 1253315 - RNA, 19 nt, Artificial Sequence
  Description of Artificial Sequence: Synthetic oligonucleotide
  Antisense strand to SEQ ID NO: 1253314
uucccgcgaauaaagaugu

SEQ ID NO: 1253316 - RNA, 19 nt, Artificial Sequence
  Description of Artificial Sequence: Synthetic oligonucleotide
  Sense strand starting at position 2165 of SEQ ID NO: 1241188
aucuuuauucgcgggaaac

SEQ ID NO: 1253317 - RNA, 19 nt, Artificial Sequence
  Description of Artificial Sequence: Synthetic oligonucleotide
  Antisense strand to SEQ ID NO: 1253316
guuucccgcgaauaaagau

SEQ ID NO: 1253318 - RNA, 19 nt, Artificial Sequence
  Description of Artificial Sequence: Synthetic oligonucleotide
  Sense strand starting at position 2166 of SEQ ID NO: 1241188
ucuuuauucgcgggaaaca

SEQ ID NO: 1253319 - RNA, 19 nt, Artificial Sequence
  Description of Artificial Sequence: Synthetic oligonucleotide
  Antisense strand to SEQ ID NO: 1253318
uguuucccgcgaauaaaga

SEQ ID NO: 1253320 - RNA, 19 nt, Artificial Sequence
  Description of Artificial Sequence: Synthetic oligonucleotide
  Sense strand starting at position 2167 of SEQ ID NO: 1241188
cuuuauucgcgggaaacaa

SEQ ID NO: 1253321 - RNA, 19 nt, Artificial Sequence
  Description of Artificial Sequence: Synthetic oligonucleotide
  Antisense strand to SEQ ID NO: 1253320
uuguuucccgcgaauaaag

SEQ ID NO: 1253322 - RNA, 19 nt, Artificial Sequence
  Description of Artificial Sequence: Synthetic oligonucleotide
  Sense strand starting at position 2212 of SEQ ID NO: 1241188
agaaguaacugcgcagaau

SEQ ID NO: 1253323 - RNA, 19 nt, Artificial Sequence
  Description of Artificial Sequence: Synthetic oligonucleotide
  Antisense strand to SEQ ID NO: 1253322
auucugcgcaguuacuucu

SEQ ID NO: 1253324 - RNA, 19 nt, Artificial Sequence
  Description of Artificial Sequence: Synthetic oligonucleotide
  Sense strand starting at position 2213 of SEQ ID NO: 1241188
gaaguaacugcgcagaaug

SEQ ID NO: 1253325 - RNA, 19 nt, Artificial Sequence
  Description of Artificial Sequence: Synthetic oligonucleotide
  Antisense strand to SEQ ID NO: 1253324
cauucugcgcaguuacuuc

SEQ ID NO: 1253326 - RNA, 19 nt, Artificial Sequence
  Description of Artificial Sequence: Synthetic oligonucleotide
  Sense strand starting at position 2779 of SEQ ID NO: 1241188
uggcuugaaccuuggaaau

SEQ ID NO: 1253327 - RNA, 19 nt, Artificial Sequence
  Description of Artificial Sequence: Synthetic oligonucleotide
  Antisense strand to SEQ ID NO: 1253326
auuuccaagguucaagcca

SEQ ID NO: 1253328 - RNA, 19 nt, Artificial Sequence
  Description of Artificial Sequence: Synthetic oligonucleotide
  Sense strand starting at position 2839 of SEQ ID NO: 1241188
ugcugaggauucguccuua

SEQ ID NO: 1253329 - RNA, 19 nt, Artificial Sequence
  Description of Artificial Sequence: Synthetic oligonucleotide
  Antisense strand to SEQ ID NO: 1253328
uaaggacgaauccucagca

SEQ ID NO: 1253330 - RNA, 19 nt, Artificial Sequence
  Description of Artificial Sequence: Synthetic oligonucleotide
  Sense strand starting at position 2843 of SEQ ID NO: 1241188
gaggauucguccuuaagaa

SEQ ID NO: 1253331 - RNA, 19 nt, Artificial Sequence
  Description of Artificial Sequence: Synthetic oligonucleotide
  Antisense strand to SEQ ID NO: 1253330
uucuuaaggacgaauccuc

SEQ ID NO: 1253332 - RNA, 19 nt, Artificial Sequence
  Description of Artificial Sequence: Synthetic oligonucleotide
  Sense strand starting at position 2975 of SEQ ID NO: 1241188
gauagacagccuuguuuac

SEQ ID NO: 1253333 - RNA, 19 nt, Artificial Sequence
  Description of Artificial Sequence: Synthetic oligonucleotide
  Antisense strand to SEQ ID NO: 1253332
guaaacaaggcugucuauc

SEQ ID NO: 1253334 - RNA, 19 nt, Artificial Sequence
  Description of Artificial Sequence: Synthetic oligonucleotide
  Sense strand starting at position 2995 of SEQ ID NO: 1241188
gggacuuccucuccggaga

SEQ ID NO: 1253335 - RNA, 19 nt, Artificial Sequence
  Description of Artificial Sequence: Synthetic oligonucleotide
  Antisense strand to SEQ ID NO: 1253334
ucuccggagaggaaguccc

SEQ ID NO: 1253336 - RNA, 19 nt, Artificial Sequence
  Description of Artificial Sequence: Synthetic oligonucleotide
  Sense strand starting at position 3074 of SEQ ID NO: 1241188
ggcuguuuaccagagccuu

SEQ ID NO: 1253337 - RNA, 19 nt, Artificial Sequence
  Description of Artificial Sequence: Synthetic oligonucleotide
  Antisense strand to SEQ ID NO: 1253336
aaggcucugguaaacagcc

SEQ ID NO: 1253338 - RNA, 19 nt, Artificial Sequence
  Description of Artificial Sequence: Synthetic oligonucleotide
  Sense strand starting at position 3105 of SEQ ID NO: 1241188
ccuguugauagcuggugua

SEQ ID NO: 1253339 - RNA, 19 nt, Artificial Sequence
  Description of Artificial Sequence: Synthetic oligonucleotide
  Antisense strand to SEQ ID NO: 1253338
uacaccagcuaucaacagg

SEQ ID NO: 1253340 - RNA, 19 nt, Artificial Sequence
  Description of Artificial Sequence: Synthetic oligonucleotide
  Sense strand starting at position 3118 of SEQ ID NO: 1241188
gguguagucccaggaacca

SEQ ID NO: 1253341 - RNA, 19 nt, Artificial Sequence
  Description of Artificial Sequence: Synthetic oligonucleotide
  Antisense strand to SEQ ID NO: 1253340
ugguuccugggacuacacc

SEQ ID NO: 1253342 - RNA, 19 nt, Artificial Sequence
  Description of Artificial Sequence: Synthetic oligonucleotide
  Sense strand starting at position 3524 of SEQ ID NO: 1241188
uugguugucucacuggcaa

SEQ ID NO: 1253343 - RNA, 19 nt, Artificial Sequence
  Description of Artificial Sequence: Synthetic oligonucleotide
  Antisense strand to SEQ ID NO: 1253342
uugccagugagacaaccaa

SEQ ID NO: 1253344 - RNA, 19 nt, Artificial Sequence
  Description of Artificial Sequence: Synthetic oligonucleotide
  Sense strand starting at position 3599 of SEQ ID NO: 1241188
agcuuaauuucuucuguga

SEQ ID NO: 1253345 - RNA, 19 nt, Artificial Sequence
  Description of Artificial Sequence: Synthetic oligonucleotide
  Antisense strand to SEQ ID NO: 1253344
ucacagaagaaauuaagcu

SEQ ID NO: 1253346 - RNA, 19 nt, Artificial Sequence
  Description of Artificial Sequence: Synthetic oligonucleotide
  Sense strand starting at position 3640 of SEQ ID NO: 1241188
uucugugcucuuugggaga

SEQ ID NO: 1253347 - RNA, 19 nt, Artificial Sequence
  Description of Artificial Sequence: Synthetic oligonucleotide
  Antisense strand to SEQ ID NO: 1253346
ucucccaaagagcacagaa

SEQ ID NO: 1253348 - RNA, 19 nt, Artificial Sequence
  Description of Artificial Sequence: Synthetic oligonucleotide
  Sense strand starting at position 3661 of SEQ ID NO: 1241188
agagauaucuggcugaaca

SEQ ID NO: 1253349 - RNA, 19 nt, Artificial Sequence
  Description of Artificial Sequence: Synthetic oligonucleotide
  Antisense strand to SEQ ID NO: 1253348
uguucagccagauaucucu

SEQ ID NO: 1253350 - RNA, 19 nt, Artificial Sequence
  Description of Artificial Sequence: Synthetic oligonucleotide
  Sense strand starting at position 3662 of SEQ ID NO: 1241188
gagauaucuggcugaacaa

SEQ ID NO: 1253351 - RNA, 19 nt, Artificial Sequence
  Description of Artificial Sequence: Synthetic oligonucleotide
  Antisense strand to SEQ ID NO: 1253350
uuguucagccagauaucuc

SEQ ID NO: 1253352 - RNA, 19 nt, Artificial Sequence
  Description of Artificial Sequence: Synthetic oligonucleotide
  Sense strand starting at position 3724 of SEQ ID NO: 1241188
cacauugcuuccuuuggga

SEQ ID NO: 1253353 - RNA, 19 nt, Artificial Sequence
  Description of Artificial Sequence: Synthetic oligonucleotide
  Antisense strand to SEQ ID NO: 1253352
ucccaaaggaagcaaugug

SEQ ID NO: 1253354 - RNA, 19 nt, Artificial Sequence
  Description of Artificial Sequence: Synthetic oligonucleotide
  Sense strand starting at position 3726 of SEQ ID NO: 1241188
cauugcuuccuuugggauu

SEQ ID NO: 1253355 - RNA, 19 nt, Artificial Sequence
  Description of Artificial Sequence: Synthetic oligonucleotide
  Antisense strand to SEQ ID NO: 1253354
aaucccaaaggaagcaaug

SEQ ID NO: 1253356 - RNA, 19 nt, Artificial Sequence
  Description of Artificial Sequence: Synthetic oligonucleotide
  Sense strand starting at position 128 of SEQ ID NO: 1241189
acagcaauguccuuaagaa

SEQ ID NO: 1253357 - RNA, 19 nt, Artificial Sequence
  Description of Artificial Sequence: Synthetic oligonucleotide
  Antisense strand to SEQ ID NO: 1253356
uucuuaaggacauugcugu

SEQ ID NO: 1253358 - RNA, 19 nt, Artificial Sequence
  Description of Artificial Sequence: Synthetic oligonucleotide
  Sense strand starting at position 392 of SEQ ID NO: 1241189
gcuccuugaggacaaaugu

SEQ ID NO: 1253359 - RNA, 19 nt, Artificial Sequence
  Description of Artificial Sequence: Synthetic oligonucleotide
  Antisense strand to SEQ ID NO: 1253358
acauuuguccucaaggagc

SEQ ID NO: 1253360 - RNA, 19 nt, Artificial Sequence
  Description of Artificial Sequence: Synthetic oligonucleotide
  Sense strand starting at position 402 of SEQ ID NO: 1241189
gacaaaugugcuggagauu

SEQ ID NO: 1253361 - RNA, 19 nt, Artificial Sequence
  Description of Artificial Sequence: Synthetic oligonucleotide
  Antisense strand to SEQ ID NO: 1253360
aaucuccagcacauuuguc

SEQ ID NO: 1253362 - RNA, 19 nt, Artificial Sequence
  Description of Artificial Sequence: Synthetic oligonucleotide
  Sense strand starting at position 411 of SEQ ID NO: 1241189
gcuggagauuuacauauua

SEQ ID NO: 1253363 - RNA, 19 nt, Artificial Sequence
  Description of Artificial Sequence: Synthetic oligonucleotide
  Antisense strand to SEQ ID NO: 1253362
uaauauguaaaucuccagc

SEQ ID NO: 1253364 - RNA, 19 nt, Artificial Sequence
  Description of Artificial Sequence: Synthetic oligonucleotide
  Sense strand starting at position 434 of SEQ ID NO: 1241189
uuuauaacucagggcaaga

SEQ ID NO: 1253365 - RNA, 19 nt, Artificial Sequence
  Description of Artificial Sequence: Synthetic oligonucleotide
  Antisense strand to SEQ ID NO: 1253364
ucuugcccugaguuauaaa

SEQ ID NO: 1253366 - RNA, 19 nt, Artificial Sequence
  Description of Artificial Sequence: Synthetic oligonucleotide
  Sense strand starting at position 475 of SEQ ID NO: 1241189
uaugaaauauguucugagu

SEQ ID NO: 1253367 - RNA, 19 nt, Artificial Sequence
  Description of Artificial Sequence: Synthetic oligonucleotide
  Antisense strand to SEQ ID NO: 1253366
acucagaacauauuucaua

SEQ ID NO: 1253368 - RNA, 19 nt, Artificial Sequence
  Description of Artificial Sequence: Synthetic oligonucleotide
  Sense strand starting at position 550 of SEQ ID NO: 1241189
ugccgaucuagagaucaag

SEQ ID NO: 1253369 - RNA, 19 nt, Artificial Sequence
  Description of Artificial Sequence: Synthetic oligonucleotide
  Antisense strand to SEQ ID NO: 1253368
cuugaucucuagaucggca

SEQ ID NO: 1253370 - RNA, 19 nt, Artificial Sequence
  Description of Artificial Sequence: Synthetic oligonucleotide
  Sense strand starting at position 589 of SEQ ID NO: 1241189
cuaggucugucauugacag

SEQ ID NO: 1253371 - RNA, 19 nt, Artificial Sequence
  Description of Artificial Sequence: Synthetic oligonucleotide
  Antisense strand to SEQ ID NO: 1253370
cugucaaugacagaccuag

SEQ ID NO: 1253372 - RNA, 19 nt, Artificial Sequence
  Description of Artificial Sequence: Synthetic oligonucleotide
  Sense strand starting at position 654 of SEQ ID NO: 1241189
cuccucaguggguaacauu

SEQ ID NO: 1253373 - RNA, 19 nt, Artificial Sequence
  Description of Artificial Sequence: Synthetic oligonucleotide
  Antisense strand to SEQ ID NO: 1253372
aauguuacccacugaggag

SEQ ID NO: 1253374 - RNA, 19 nt, Artificial Sequence
  Description of Artificial Sequence: Synthetic oligonucleotide
  Sense strand starting at position 1024 of SEQ ID NO: 1241189
gugaaauuaaccuagcgca

SEQ ID NO: 1253375 - RNA, 19 nt, Artificial Sequence
  Description of Artificial Sequence: Synthetic oligonucleotide
  Antisense strand to SEQ ID NO: 1253374
ugcgcuagguuaauuucac

SEQ ID NO: 1253376 - RNA, 19 nt, Artificial Sequence
  Description of Artificial Sequence: Synthetic oligonucleotide
  Sense strand starting at position 1097 of SEQ ID NO: 1241189
ucaauacgauuaucuugaa

SEQ ID NO: 1253377 - RNA, 19 nt, Artificial Sequence
  Description of Artificial Sequence: Synthetic oligonucleotide
  Antisense strand to SEQ ID NO: 1253376
uucaagauaaucguauuga

SEQ ID NO: 1253378 - RNA, 19 nt, Artificial Sequence
  Description of Artificial Sequence: Synthetic oligonucleotide
  Sense strand starting at position 1201 of SEQ ID NO: 1241189
uggauugucuuaccuuaag

SEQ ID NO: 1253379 - RNA, 19 nt, Artificial Sequence
  Description of Artificial Sequence: Synthetic oligonucleotide
  Antisense strand to SEQ ID NO: 1253378
cuuaagguaagacaaucca

SEQ ID NO: 1253380 - RNA, 19 nt, Artificial Sequence
  Description of Artificial Sequence: Synthetic oligonucleotide
  Sense strand starting at position 1210 of SEQ ID NO: 1241189
uuaccuuaagcuuaaguga

SEQ ID NO: 1253381 - RNA, 19 nt, Artificial Sequence
  Description of Artificial Sequence: Synthetic oligonucleotide
  Antisense strand to SEQ ID NO: 1253380
ucacuuaagcuuaagguaa

SEQ ID NO: 1253382 - RNA, 19 nt, Artificial Sequence
  Description of Artificial Sequence: Synthetic oligonucleotide
  Sense strand starting at position 1217 of SEQ ID NO: 1241189
aagcuuaagugacuugauu

SEQ ID NO: 1253383 - RNA, 19 nt, Artificial Sequence
  Description of Artificial Sequence: Synthetic oligonucleotide
  Antisense strand to SEQ ID NO: 1253382
aaucaagucacuuaagcuu

SEQ ID NO: 1253384 - RNA, 19 nt, Artificial Sequence
  Description of Artificial Sequence: Synthetic oligonucleotide
  Sense strand starting at position 1383 of SEQ ID NO: 1241189
uguuaaauucuccaguuug

SEQ ID NO: 1253385 - RNA, 19 nt, Artificial Sequence
  Description of Artificial Sequence: Synthetic oligonucleotide
  Antisense strand to SEQ ID NO: 1253384
caaacuggagaauuuaaca

SEQ ID NO: 1253386 - RNA, 19 nt, Artificial Sequence
  Description of Artificial Sequence: Synthetic oligonucleotide
  Sense strand starting at position 1417 of SEQ ID NO: 1241189
ggaggaaguuaacuuguaa

SEQ ID NO: 1253387 - RNA, 19 nt, Artificial Sequence
  Description of Artificial Sequence: Synthetic oligonucleotide
  Antisense strand to SEQ ID NO: 1253386
uuacaaguuaacuuccucc

SEQ ID NO: 1253388 - RNA, 19 nt, Artificial Sequence
  Description of Artificial Sequence: Synthetic oligonucleotide
  Sense strand starting at position 1454 of SEQ ID NO: 1241189
acugaaaucgaaggcauaa

SEQ ID NO: 1253389 - RNA, 19 nt, Artificial Sequence
  Description of Artificial Sequence: Synthetic oligonucleotide
  Antisense strand to SEQ ID NO: 1253388
uuaugccuucgauuucagu

SEQ ID NO: 1253390 - RNA, 19 nt, Artificial Sequence
  Description of Artificial Sequence: Synthetic oligonucleotide
  Sense strand starting at position 1527 of SEQ ID NO: 1241189
ccggauuugucaccucagu

SEQ ID NO: 1253391 - RNA, 19 nt, Artificial Sequence
  Description of Artificial Sequence: Synthetic oligonucleotide
  Antisense strand to SEQ ID NO: 1253390
acugaggugacaaauccgg

SEQ ID NO: 1253392 - RNA, 19 nt, Artificial Sequence
  Description of Artificial Sequence: Synthetic oligonucleotide
  Sense strand starting at position 1595 of SEQ ID NO: 1241189
gcaggagaucugggcacuu

SEQ ID NO: 1253393 - RNA, 19 nt, Artificial Sequence
  Description of Artificial Sequence: Synthetic oligonucleotide
  Antisense strand to SEQ ID NO: 1253392
aagugcccagaucuccugc

SEQ ID NO: 1253394 - RNA, 19 nt, Artificial Sequence
  Description of Artificial Sequence: Synthetic oligonucleotide
  Sense strand starting at position 1777 of SEQ ID NO: 1241189
gggcgucuuacccacaaca

SEQ ID NO: 1253395 - RNA, 19 nt, Artificial Sequence
  Description of Artificial Sequence: Synthetic oligonucleotide
  Antisense strand to SEQ ID NO: 1253394
uguuguggguaagacgccc

SEQ ID NO: 1253396 - RNA, 19 nt, Artificial Sequence
  Description of Artificial Sequence: Synthetic oligonucleotide
  Sense strand starting at position 1779 of SEQ ID NO: 1241189
gcgucuuacccacaacaaa

SEQ ID NO: 1253397 - RNA, 19 nt, Artificial Sequence
  Description of Artificial Sequence: Synthetic oligonucleotide
  Antisense strand to SEQ ID NO: 1253396
uuuguuguggguaagacgc

SEQ ID NO: 1253398 - RNA, 19 nt, Artificial Sequence
  Description of Artificial Sequence: Synthetic oligonucleotide
  Sense strand starting at position 1841 of SEQ ID NO: 1241189
gaggguaaggugcauaacu

SEQ ID NO: 1253399 - RNA, 19 nt, Artificial Sequence
  Description of Artificial Sequence: Synthetic oligonucleotide
  Antisense strand to SEQ ID NO: 1253398
aguuaugcaccuuacccuc

SEQ ID NO: 1253400 - RNA, 19 nt, Artificial Sequence
  Description of Artificial Sequence: Synthetic oligonucleotide
  Sense strand starting at position 2093 of SEQ ID NO: 1241189
uuaagcagucugggaagaa

SEQ ID NO: 1253401 - RNA, 19 nt, Artificial Sequence
  Description of Artificial Sequence: Synthetic oligonucleotide
  Antisense strand to SEQ ID NO: 1253400
uucuucccagacugcuuaa

SEQ ID NO: 1253402 - RNA, 19 nt, Artificial Sequence
  Description of Artificial Sequence: Synthetic oligonucleotide
  Sense strand starting at position 2154 of SEQ ID NO: 1241189
gcguuaguucaggccugua

SEQ ID NO: 1253403 - RNA, 19 nt, Artificial Sequence
  Description of Artificial Sequence: Synthetic oligonucleotide
  Antisense strand to SEQ ID NO: 1253402
uacaggccugaacuaacgc

SEQ ID NO: 1253404 - RNA, 19 nt, Artificial Sequence
  Description of Artificial Sequence: Synthetic oligonucleotide
  Sense strand starting at position 2218 of SEQ ID NO: 1241189
cgcaucuuugugccggaua

SEQ ID NO: 1253405 - RNA, 19 nt, Artificial Sequence
  Description of Artificial Sequence: Synthetic oligonucleotide
  Antisense strand to SEQ ID NO: 1253404
uauccggcacaaagaugcg

SEQ ID NO: 1253406 - RNA, 19 nt, Artificial Sequence
  Description of Artificial Sequence: Synthetic oligonucleotide
  Sense strand starting at position 2372 of SEQ ID NO: 1241189
agaggauaauauuggauuu

SEQ ID NO: 1253407 - RNA, 19 nt, Artificial Sequence
  Description of Artificial Sequence: Synthetic oligonucleotide
  Antisense strand to SEQ ID NO: 1253406
aaauccaauauuauccucu

SEQ ID NO: 1253408 - RNA, 19 nt, Artificial Sequence
  Description of Artificial Sequence: Synthetic oligonucleotide
  Sense strand starting at position 2459 of SEQ ID NO: 1241189
gaggaucaccuguggucau

SEQ ID NO: 1253409 - RNA, 19 nt, Artificial Sequence
  Description of Artificial Sequence: Synthetic oligonucleotide
  Antisense strand to SEQ ID NO: 1253408
augaccacaggugauccuc

SEQ ID NO: 1253410 - RNA, 19 nt, Artificial Sequence
  Description of Artificial Sequence: Synthetic oligonucleotide
  Sense strand starting at position 2462 of SEQ ID NO: 1241189
gaucaccuguggucaugaa

SEQ ID NO: 1253411 - RNA, 19 nt, Artificial Sequence
  Description of Artificial Sequence: Synthetic oligonucleotide
  Antisense strand to SEQ ID NO: 1253410
uucaugaccacaggugauc

SEQ ID NO: 1253412 - RNA, 19 nt, Artificial Sequence
  Description of Artificial Sequence: Synthetic oligonucleotide
  Sense strand starting at position 2463 of SEQ ID NO: 1241189
aucaccuguggucaugaau

SEQ ID NO: 1253413 - RNA, 19 nt, Artificial Sequence
  Description of Artificial Sequence: Synthetic oligonucleotide
  Antisense strand to SEQ ID NO: 1253412
auucaugaccacaggugau

SEQ ID NO: 1253414 - RNA, 19 nt, Artificial Sequence
  Description of Artificial Sequence: Synthetic oligonucleotide
  Sense strand starting at position 2707 of SEQ ID NO: 1241189
uaaagugaagucuguauga

SEQ ID NO: 1253415 - RNA, 19 nt, Artificial Sequence
  Description of Artificial Sequence: Synthetic oligonucleotide
  Antisense strand to SEQ ID NO: 1253414
ucauacagacuucacuuua

SEQ ID NO: 1253416 - RNA, 19 nt, Artificial Sequence
  Description of Artificial Sequence: Synthetic oligonucleotide
  Sense strand starting at position 2709 of SEQ ID NO: 1241189
aagugaagucuguaugacu

SEQ ID NO: 1253417 - RNA, 19 nt, Artificial Sequence
  Description of Artificial Sequence: Synthetic oligonucleotide
  Antisense strand to SEQ ID NO: 1253416
agucauacagacuucacuu

SEQ ID NO: 1253418 - RNA, 19 nt, Artificial Sequence
  Description of Artificial Sequence: Synthetic oligonucleotide
  Sense strand starting at position 2720 of SEQ ID NO: 1241189
guaugacucuuucuacuau

SEQ ID NO: 1253419 - RNA, 19 nt, Artificial Sequence
  Description of Artificial Sequence: Synthetic oligonucleotide
  Antisense strand to SEQ ID NO: 1253418
auaguagaaagagucauac

SEQ ID NO: 1253420 - RNA, 19 nt, Artificial Sequence
  Description of Artificial Sequence: Synthetic oligonucleotide
  Sense strand starting at position 2786 of SEQ ID NO: 1241189
guacaucacugagcacauu

SEQ ID NO: 1253421 - RNA, 19 nt, Artificial Sequence
  Description of Artificial Sequence: Synthetic oligonucleotide
  Antisense strand to SEQ ID NO: 1253420
aaugugcucagugauguac

SEQ ID NO: 1253422 - RNA, 19 nt, Artificial Sequence
  Description of Artificial Sequence: Synthetic oligonucleotide
  Sense strand starting at position 3500 of SEQ ID NO: 1241189
augcauuucugccuccaga

SEQ ID NO: 1253423 - RNA, 19 nt, Artificial Sequence
  Description of Artificial Sequence: Synthetic oligonucleotide
  Antisense strand to SEQ ID NO: 1253422
ucuggaggcagaaaugcau

SEQ ID NO: 1253424 - RNA, 19 nt, Artificial Sequence
  Description of Artificial Sequence: Synthetic oligonucleotide
  Sense strand starting at position 3629 of SEQ ID NO: 1241189
auaugugagcuugugcgua

SEQ ID NO: 1253425 - RNA, 19 nt, Artificial Sequence
  Description of Artificial Sequence: Synthetic oligonucleotide
  Antisense strand to SEQ ID NO: 1253424
uacgcacaagcucacauau

SEQ ID NO: 1253426 - RNA, 19 nt, Artificial Sequence
  Description of Artificial Sequence: Synthetic oligonucleotide
  Sense strand starting at position 3722 of SEQ ID NO: 1241189
guaacaaauuccuugugau

SEQ ID NO: 1253427 - RNA, 19 nt, Artificial Sequence
  Description of Artificial Sequence: Synthetic oligonucleotide
  Antisense strand to SEQ ID NO: 1253426
aucacaaggaauuuguuac

SEQ ID NO: 1253428 - RNA, 19 nt, Artificial Sequence
  Description of Artificial Sequence: Synthetic oligonucleotide
  Sense strand starting at position 3791 of SEQ ID NO: 1241189
uuaagcugucaccagaaga

SEQ ID NO: 1253429 - RNA, 19 nt, Artificial Sequence
  Description of Artificial Sequence: Synthetic oligonucleotide
  Antisense strand to SEQ ID NO: 1253428
ucuucuggugacagcuuaa

SEQ ID NO: 1253430 - RNA, 19 nt, Artificial Sequence
  Description of Artificial Sequence: Synthetic oligonucleotide
  Sense strand starting at position 3834 of SEQ ID NO: 1241189
ggaucacauugcucuccau

SEQ ID NO: 1253431 - RNA, 19 nt, Artificial Sequence
  Description of Artificial Sequence: Synthetic oligonucleotide
  Antisense strand to SEQ ID NO: 1253430
auggagagcaaugugaucc

SEQ ID NO: 1253432 - RNA, 19 nt, Artificial Sequence
  Description of Artificial Sequence: Synthetic oligonucleotide
  Sense strand starting at position 3969 of SEQ ID NO: 1241189
uucccugaacuuugugaga

SEQ ID NO: 1253433 - RNA, 19 nt, Artificial Sequence
  Description of Artificial Sequence: Synthetic oligonucleotide
  Antisense strand to SEQ ID NO: 1253432
ucucacaaaguucagggaa

SEQ ID NO: 1253434 - RNA, 19 nt, Artificial Sequence
  Description of Artificial Sequence: Synthetic oligonucleotide
  Sense strand starting at position 3980 of SEQ ID NO: 1241189
uugugagaaaguuacaugu

SEQ ID NO: 1253435 - RNA, 19 nt, Artificial Sequence
  Description of Artificial Sequence: Synthetic oligonucleotide
  Antisense strand to SEQ ID NO: 1253434
acauguaacuuucucacaa

SEQ ID NO: 1253436 - RNA, 19 nt, Artificial Sequence
  Description of Artificial Sequence: Synthetic oligonucleotide
  Sense strand starting at position 51 of SEQ ID NO: 1241190
gggcuuuaaggaugccuga

SEQ ID NO: 1253437 - RNA, 19 nt, Artificial Sequence
  Description of Artificial Sequence: Synthetic oligonucleotide
  Antisense strand to SEQ ID NO: 1253436
ucaggcauccuuaaagccc

SEQ ID NO: 1253438 - RNA, 19 nt, Artificial Sequence
  Description of Artificial Sequence: Synthetic oligonucleotide
  Sense strand starting at position 54 of SEQ ID NO: 1241190
cuuuaaggaugccugagaa

SEQ ID NO: 1253439 - RNA, 19 nt, Artificial Sequence
  Description of Artificial Sequence: Synthetic oligonucleotide
  Antisense strand to SEQ ID NO: 1253438
uucucaggcauccuuaaag

SEQ ID NO: 1253440 - RNA, 19 nt, Artificial Sequence
  Description of Artificial Sequence: Synthetic oligonucleotide
  Sense strand starting at position 360 of SEQ ID NO: 1241190
ggguuugcaguggagagaa

SEQ ID NO: 1253441 - RNA, 19 nt, Artificial Sequence
  Description of Artificial Sequence: Synthetic oligonucleotide
  Antisense strand to SEQ ID NO: 1253440
uucucuccacugcaaaccc

SEQ ID NO: 1253442 - RNA, 19 nt, Artificial Sequence
  Description of Artificial Sequence: Synthetic oligonucleotide
  Sense strand starting at position 490 of SEQ ID NO: 1241190
gugauacacugucucacua

SEQ ID NO: 1253443 - RNA, 19 nt, Artificial Sequence
  Description of Artificial Sequence: Synthetic oligonucleotide
  Antisense strand to SEQ ID NO: 1253442
uagugagacaguguaucac

SEQ ID NO: 1253444 - RNA, 19 nt, Artificial Sequence
  Description of Artificial Sequence: Synthetic oligonucleotide
  Sense strand starting at position 889 of SEQ ID NO: 1241190
acugauacucacuguagaa

SEQ ID NO: 1253445 - RNA, 19 nt, Artificial Sequence
  Description of Artificial Sequence: Synthetic oligonucleotide
  Antisense strand to SEQ ID NO: 1253444
uucuacagugaguaucagu

SEQ ID NO: 1253446 - RNA, 19 nt, Artificial Sequence
  Description of Artificial Sequence: Synthetic oligonucleotide
  Sense strand starting at position 990 of SEQ ID NO: 1241190
auguguacuguagaagcau

SEQ ID NO: 1253447 - RNA, 19 nt, Artificial Sequence
  Description of Artificial Sequence: Synthetic oligonucleotide
  Antisense strand to SEQ ID NO: 1253446
augcuucuacaguacacau

SEQ ID NO: 1253448 - RNA, 19 nt, Artificial Sequence
  Description of Artificial Sequence: Synthetic oligonucleotide
  Sense strand starting at position 996 of SEQ ID NO: 1241190
acuguagaagcauggucaa

SEQ ID NO: 1253449 - RNA, 19 nt, Artificial Sequence
  Description of Artificial Sequence: Synthetic oligonucleotide
  Antisense strand to SEQ ID NO: 1253448
uugaccaugcuucuacagu

SEQ ID NO: 1253450 - RNA, 19 nt, Artificial Sequence
  Description of Artificial Sequence: Synthetic oligonucleotide
  Sense strand starting at position 1024 of SEQ ID NO: 1241190
acauauguuagugaguucu

SEQ ID NO: 1253451 - RNA, 19 nt, Artificial Sequence
  Description of Artificial Sequence: Synthetic oligonucleotide
  Antisense strand to SEQ ID NO: 1253450
agaacucacuaacauaugu

SEQ ID NO: 1253452 - RNA, 19 nt, Artificial Sequence
  Description of Artificial Sequence: Synthetic oligonucleotide
  Sense strand starting at position 1026 of SEQ ID NO: 1241190
auauguuagugaguucuag

SEQ ID NO: 1253453 - RNA, 19 nt, Artificial Sequence
  Description of Artificial Sequence: Synthetic oligonucleotide
  Antisense strand to SEQ ID NO: 1253452
cuagaacucacuaacauau

SEQ ID NO: 1253454 - RNA, 19 nt, Artificial Sequence
  Description of Artificial Sequence: Synthetic oligonucleotide
  Sense strand starting at position 1032 of SEQ ID NO: 1241190
uagugaguucuaggaaugu

SEQ ID NO: 1253455 - RNA, 19 nt, Artificial Sequence
  Description of Artificial Sequence: Synthetic oligonucleotide
  Antisense strand to SEQ ID NO: 1253454
acauuccuagaacucacua

SEQ ID NO: 1253456 - RNA, 19 nt, Artificial Sequence
  Description of Artificial Sequence: Synthetic oligonucleotide
  Sense strand starting at position 1036 of SEQ ID NO: 1241190
gaguucuaggaaugugaua

SEQ ID NO: 1253457 - RNA, 19 nt, Artificial Sequence
  Description of Artificial Sequence: Synthetic oligonucleotide
  Antisense strand to SEQ ID NO: 1253456
uaucacauuccuagaacuc

SEQ ID NO: 1253458 - RNA, 19 nt, Artificial Sequence
  Description of Artificial Sequence: Synthetic oligonucleotide
  Sense strand starting at position 1038 of SEQ ID NO: 1241190
guucuaggaaugugauaag

SEQ ID NO: 1253459 - RNA, 19 nt, Artificial Sequence
  Description of Artificial Sequence: Synthetic oligonucleotide
  Antisense strand to SEQ ID NO: 1253458
cuuaucacauuccuagaac

SEQ ID NO: 1253460 - RNA, 19 nt, Artificial Sequence
  Description of Artificial Sequence: Synthetic oligonucleotide
  Sense strand starting at position 1076 of SEQ ID NO: 1241190
uagacuaacugugcaguua

SEQ ID NO: 1253461 - RNA, 19 nt, Artificial Sequence
  Description of Artificial Sequence: Synthetic oligonucleotide
  Antisense strand to SEQ ID NO: 1253460
uaacugcacaguuagucua

SEQ ID NO: 1253462 - RNA, 19 nt, Artificial Sequence
  Description of Artificial Sequence: Synthetic oligonucleotide
  Sense strand starting at position 1077 of SEQ ID NO: 1241190
agacuaacugugcaguuau

SEQ ID NO: 1253463 - RNA, 19 nt, Artificial Sequence
  Description of Artificial Sequence: Synthetic oligonucleotide
  Antisense strand to SEQ ID NO: 1253462
auaacugcacaguuagucu

SEQ ID NO: 1253464 - RNA, 19 nt, Artificial Sequence
  Description of Artificial Sequence: Synthetic oligonucleotide
  Sense strand starting at position 1294 of SEQ ID NO: 1241190
uucuguauugagcaugaau

SEQ ID NO: 1253465 - RNA, 19 nt, Artificial Sequence
  Description of Artificial Sequence: Synthetic oligonucleotide
  Antisense strand to SEQ ID NO: 1253464
auucaugcucaauacagaa

SEQ ID NO: 1253466 - RNA, 19 nt, Artificial Sequence
  Description of Artificial Sequence: Synthetic oligonucleotide
  Sense strand starting at position 1296 of SEQ ID NO: 1241190
cuguauugagcaugaauua

SEQ ID NO: 1253467 - RNA, 19 nt, Artificial Sequence
  Description of Artificial Sequence: Synthetic oligonucleotide
  Antisense strand to SEQ ID NO: 1253466
uaauucaugcucaauacag

SEQ ID NO: 1253468 - RNA, 19 nt, Artificial Sequence
  Description of Artificial Sequence: Synthetic oligonucleotide
  Sense strand starting at position 1297 of SEQ ID NO: 1241190
uguauugagcaugaauuac

SEQ ID NO: 1253469 - RNA, 19 nt, Artificial Sequence
  Description of Artificial Sequence: Synthetic oligonucleotide
  Antisense strand to SEQ ID NO: 1253468
guaauucaugcucaauaca

SEQ ID NO: 1253470 - RNA, 19 nt, Artificial Sequence
  Description of Artificial Sequence: Synthetic oligonucleotide
  Sense strand starting at position 1353 of SEQ ID NO: 1241190
ccaacucuguguucccaua

SEQ ID NO: 1253471 - RNA, 19 nt, Artificial Sequence
  Description of Artificial Sequence: Synthetic oligonucleotide
  Antisense strand to SEQ ID NO: 1253470
uaugggaacacagaguugg

SEQ ID NO: 1253472 - RNA, 19 nt, Artificial Sequence
  Description of Artificial Sequence: Synthetic oligonucleotide
  Sense strand starting at position 1401 of SEQ ID NO: 1241190
acuccaacguguccagaaa

SEQ ID NO: 1253473 - RNA, 19 nt, Artificial Sequence
  Description of Artificial Sequence: Synthetic oligonucleotide
  Antisense strand to SEQ ID NO: 1253472
uuucuggacacguuggagu

SEQ ID NO: 1253474 - RNA, 19 nt, Artificial Sequence
  Description of Artificial Sequence: Synthetic oligonucleotide
  Sense strand starting at position 1478 of SEQ ID NO: 1241190
ggguuagugcuagaacauu

SEQ ID NO: 1253475 - RNA, 19 nt, Artificial Sequence
  Description of Artificial Sequence: Synthetic oligonucleotide
  Antisense strand to SEQ ID NO: 1253474
aauguucuagcacuaaccc

SEQ ID NO: 1253476 - RNA, 19 nt, Artificial Sequence
  Description of Artificial Sequence: Synthetic oligonucleotide
  Sense strand starting at position 1511 of SEQ ID NO: 1241190
cucugaucaguuugggaaa

SEQ ID NO: 1253477 - RNA, 19 nt, Artificial Sequence
  Description of Artificial Sequence: Synthetic oligonucleotide
  Antisense strand to SEQ ID NO: 1253476
uuucccaaacugaucagag

SEQ ID NO: 1253478 - RNA, 19 nt, Artificial Sequence
  Description of Artificial Sequence: Synthetic oligonucleotide
  Sense strand starting at position 1624 of SEQ ID NO: 1241190
ccucuacacguuuaagaua

SEQ ID NO: 1253479 - RNA, 19 nt, Artificial Sequence
  Description of Artificial Sequence: Synthetic oligonucleotide
  Antisense strand to SEQ ID NO: 1253478
uaucuuaaacguguagagg

SEQ ID NO: 1253480 - RNA, 19 nt, Artificial Sequence
  Description of Artificial Sequence: Synthetic oligonucleotide
  Sense strand starting at position 1632 of SEQ ID NO: 1241190
cguuuaagauaaucugaac

SEQ ID NO: 1253481 - RNA, 19 nt, Artificial Sequence
  Description of Artificial Sequence: Synthetic oligonucleotide
  Antisense strand to SEQ ID NO: 1253480
guucagauuaucuuaaacg

SEQ ID NO: 1253482 - RNA, 19 nt, Artificial Sequence
  Description of Artificial Sequence: Synthetic oligonucleotide
  Sense strand starting at position 1653 of SEQ ID NO: 1241190
auaguagagaucugccaga

SEQ ID NO: 1253483 - RNA, 19 nt, Artificial Sequence
  Description of Artificial Sequence: Synthetic oligonucleotide
  Antisense strand to SEQ ID NO: 1253482
ucuggcagaucucuacuau

SEQ ID NO: 1253484 - RNA, 19 nt, Artificial Sequence
  Description of Artificial Sequence: Synthetic oligonucleotide
  Sense strand starting at position 1676 of SEQ ID NO: 1241190
ggacaugggagcuguaauc

SEQ ID NO: 1253485 - RNA, 19 nt, Artificial Sequence
  Description of Artificial Sequence: Synthetic oligonucleotide
  Antisense strand to SEQ ID NO: 1253484
gauuacagcucccaugucc

SEQ ID NO: 1253486 - RNA, 19 nt, Artificial Sequence
  Description of Artificial Sequence: Synthetic oligonucleotide
  Sense strand starting at position 2474 of SEQ ID NO: 1241190
ugauucuguaagggauagu

SEQ ID NO: 1253487 - RNA, 19 nt, Artificial Sequence
  Description of Artificial Sequence: Synthetic oligonucleotide
  Antisense strand to SEQ ID NO: 1253486
acuaucccuuacagaauca

SEQ ID NO: 1253488 - RNA, 19 nt, Artificial Sequence
  Description of Artificial Sequence: Synthetic oligonucleotide
  Sense strand starting at position 2737 of SEQ ID NO: 1241190
gccuucuuuccugaaaguu

SEQ ID NO: 1253489 - RNA, 19 nt, Artificial Sequence
  Description of Artificial Sequence: Synthetic oligonucleotide
  Antisense strand to SEQ ID NO: 1253488
aacuuucaggaaagaaggc

SEQ ID NO: 1253490 - RNA, 19 nt, Artificial Sequence
  Description of Artificial Sequence: Synthetic oligonucleotide
  Sense strand starting at position 2747 of SEQ ID NO: 1241190
cugaaaguugcauaaaguu

SEQ ID NO: 1253491 - RNA, 19 nt, Artificial Sequence
  Description of Artificial Sequence: Synthetic oligonucleotide
  Antisense strand to SEQ ID NO: 1253490
aacuuuaugcaacuuucag

SEQ ID NO: 1253492 - RNA, 19 nt, Artificial Sequence
  Description of Artificial Sequence: Synthetic oligonucleotide
  Sense strand starting at position 2819 of SEQ ID NO: 1241190
aaaggaguguacucacaag

SEQ ID NO: 1253493 - RNA, 19 nt, Artificial Sequence
  Description of Artificial Sequence: Synthetic oligonucleotide
  Antisense strand to SEQ ID NO: 1253492
cuugugaguacacuccuuu

SEQ ID NO: 1253494 - RNA, 19 nt, Artificial Sequence
  Description of Artificial Sequence: Synthetic oligonucleotide
  Sense strand starting at position 2857 of SEQ ID NO: 1241190
gagucagucagugagucau

SEQ ID NO: 1253495 - RNA, 19 nt, Artificial Sequence
  Description of Artificial Sequence: Synthetic oligonucleotide
  Antisense strand to SEQ ID NO: 1253494
augacucacugacugacuc

SEQ ID NO: 1253496 - RNA, 19 nt, Artificial Sequence
  Description of Artificial Sequence: Synthetic oligonucleotide
  Sense strand starting at position 2863 of SEQ ID NO: 1241190
gucagugagucauuaagga

SEQ ID NO: 1253497 - RNA, 19 nt, Artificial Sequence
  Description of Artificial Sequence: Synthetic oligonucleotide
  Antisense strand to SEQ ID NO: 1253496
uccuuaaugacucacugac

SEQ ID NO: 1253498 - RNA, 19 nt, Artificial Sequence
  Description of Artificial Sequence: Synthetic oligonucleotide
  Sense strand starting at position 2917 of SEQ ID NO: 1241190
gagacuugugguugaagcu

SEQ ID NO: 1253499 - RNA, 19 nt, Artificial Sequence
  Description of Artificial Sequence: Synthetic oligonucleotide
  Antisense strand to SEQ ID NO: 1253498
agcuucaaccacaagucuc

SEQ ID NO: 1253500 - RNA, 19 nt, Artificial Sequence
  Description of Artificial Sequence: Synthetic oligonucleotide
  Sense strand starting at position 2974 of SEQ ID NO: 1241190
uuuaaaugugguuguagau

SEQ ID NO: 1253501 - RNA, 19 nt, Artificial Sequence
  Description of Artificial Sequence: Synthetic oligonucleotide
  Antisense strand to SEQ ID NO: 1253500
aucuacaaccacauuuaaa

SEQ ID NO: 1253502 - RNA, 19 nt, Artificial Sequence
  Description of Artificial Sequence: Synthetic oligonucleotide
  Sense strand starting at position 3002 of SEQ ID NO: 1241190
ccauuucucuagggaggac

SEQ ID NO: 1253503 - RNA, 19 nt, Artificial Sequence
  Description of Artificial Sequence: Synthetic oligonucleotide
  Antisense strand to SEQ ID NO: 1253502
guccucccuagagaaaugg

SEQ ID NO: 1253504 - RNA, 19 nt, Artificial Sequence
  Description of Artificial Sequence: Synthetic oligonucleotide
  Sense strand starting at position 3016 of SEQ ID NO: 1241190
aggacuuaauccguacacu

SEQ ID NO: 1253505 - RNA, 19 nt, Artificial Sequence
  Description of Artificial Sequence: Synthetic oligonucleotide
  Antisense strand to SEQ ID NO: 1253504
aguguacggauuaaguccu

SEQ ID NO: 1253506 - RNA, 19 nt, Artificial Sequence
  Description of Artificial Sequence: Synthetic oligonucleotide
  Sense strand starting at position 3017 of SEQ ID NO: 1241190
ggacuuaauccguacacuc

SEQ ID NO: 1253507 - RNA, 19 nt, Artificial Sequence
  Description of Artificial Sequence: Synthetic oligonucleotide
  Antisense strand to SEQ ID NO: 1253506
gaguguacggauuaagucc

SEQ ID NO: 1253508 - RNA, 19 nt, Artificial Sequence
  Description of Artificial Sequence: Synthetic oligonucleotide
  Sense strand starting at position 3041 of SEQ ID NO: 1241190
cgaugucuuugaccucuaa

SEQ ID NO: 1253509 - RNA, 19 nt, Artificial Sequence
  Description of Artificial Sequence: Synthetic oligonucleotide
  Antisense strand to SEQ ID NO: 1253508
uuagaggucaaagacaucg

SEQ ID NO: 1253510 - RNA, 19 nt, Artificial Sequence
  Description of Artificial Sequence: Synthetic oligonucleotide
  Sense strand starting at position 3113 of SEQ ID NO: 1241190
guuucuucugagggaacau

SEQ ID NO: 1253511 - RNA, 19 nt, Artificial Sequence
  Description of Artificial Sequence: Synthetic oligonucleotide
  Antisense strand to SEQ ID NO: 1253510
auguucccucagaagaaac

SEQ ID NO: 1253512 - RNA, 19 nt, Artificial Sequence
  Description of Artificial Sequence: Synthetic oligonucleotide
  Sense strand starting at position 3973 of SEQ ID NO: 1241190
uggcguaaaccuuauuaua

SEQ ID NO: 1253513 - RNA, 19 nt, Artificial Sequence
  Description of Artificial Sequence: Synthetic oligonucleotide
  Antisense strand to SEQ ID NO: 1253512
uauaauaagguuuacgcca

SEQ ID NO: 1253514 - RNA, 19 nt, Artificial Sequence
  Description of Artificial Sequence: Synthetic oligonucleotide
  Sense strand starting at position 3975 of SEQ ID NO: 1241190
gcguaaaccuuauuauaca

SEQ ID NO: 1253515 - RNA, 19 nt, Artificial Sequence
  Description of Artificial Sequence: Synthetic oligonucleotide
  Antisense strand to SEQ ID NO: 1253514
uguauaauaagguuuacgc

SEQ ID NO: 1253516 - RNA, 19 nt, Artificial Sequence
  Description of Artificial Sequence: Synthetic oligonucleotide
  Sense strand starting at position 758 of SEQ ID NO: 1241191
guuggaaucucugcagauc

SEQ ID NO: 1253517 - RNA, 19 nt, Artificial Sequence
  Description of Artificial Sequence: Synthetic oligonucleotide
  Antisense strand to SEQ ID NO: 1253516
gaucugcagagauuccaac

SEQ ID NO: 1253518 - RNA, 19 nt, Artificial Sequence
  Description of Artificial Sequence: Synthetic oligonucleotide
  Sense strand starting at position 759 of SEQ ID NO: 1241191
uuggaaucucugcagauca

SEQ ID NO: 1253519 - RNA, 19 nt, Artificial Sequence
  Description of Artificial Sequence: Synthetic oligonucleotide
  Antisense strand to SEQ ID NO: 1253518
ugaucugcagagauuccaa

SEQ ID NO: 1253520 - RNA, 19 nt, Artificial Sequence
  Description of Artificial Sequence: Synthetic oligonucleotide
  Sense strand starting at position 792 of SEQ ID NO: 1241191
gaggaauacgucugagagc

SEQ ID NO: 1253521 - RNA, 19 nt, Artificial Sequence
  Description of Artificial Sequence: Synthetic oligonucleotide
  Antisense strand to SEQ ID NO: 1253520
gcucucagacguauuccuc

SEQ ID NO: 1253522 - RNA, 19 nt, Artificial Sequence
  Description of Artificial Sequence: Synthetic oligonucleotide
  Sense strand starting at position 874 of SEQ ID NO: 1241191
gaggcuuugguggaacgua

SEQ ID NO: 1253523 - RNA, 19 nt, Artificial Sequence
  Description of Artificial Sequence: Synthetic oligonucleotide
  Antisense strand to SEQ ID NO: 1253522
uacguuccaccaaagccuc

SEQ ID NO: 1253524 - RNA, 19 nt, Artificial Sequence
  Description of Artificial Sequence: Synthetic oligonucleotide
  Sense strand starting at position 954 of SEQ ID NO: 1241191
ggacacucguguucagaga

SEQ ID NO: 1253525 - RNA, 19 nt, Artificial Sequence
  Description of Artificial Sequence: Synthetic oligonucleotide
  Antisense strand to SEQ ID NO: 1253524
ucucugaacacgagugucc

SEQ ID NO: 1253526 - RNA, 19 nt, Artificial Sequence
  Description of Artificial Sequence: Synthetic oligonucleotide
  Sense strand starting at position 1181 of SEQ ID NO: 1241191
gcagcuuugcaggaacaaa

SEQ ID NO: 1253527 - RNA, 19 nt, Artificial Sequence
  Description of Artificial Sequence: Synthetic oligonucleotide
  Antisense strand to SEQ ID NO: 1253526
uuuguuccugcaaagcugc

SEQ ID NO: 1253528 - RNA, 19 nt, Artificial Sequence
  Description of Artificial Sequence: Synthetic oligonucleotide
  Sense strand starting at position 1231 of SEQ ID NO: 1241191
ccauuugccuaagggaaga

SEQ ID NO: 1253529 - RNA, 19 nt, Artificial Sequence
  Description of Artificial Sequence: Synthetic oligonucleotide
  Antisense strand to SEQ ID NO: 1253528
ucuucccuuaggcaaaugg

SEQ ID NO: 1253530 - RNA, 19 nt, Artificial Sequence
  Description of Artificial Sequence: Synthetic oligonucleotide
  Sense strand starting at position 1351 of SEQ ID NO: 1241191
auggauucuugcuccagca

SEQ ID NO: 1253531 - RNA, 19 nt, Artificial Sequence
  Description of Artificial Sequence: Synthetic oligonucleotide
  Antisense strand to SEQ ID NO: 1253530
ugcuggagcaagaauccau

SEQ ID NO: 1253532 - RNA, 19 nt, Artificial Sequence
  Description of Artificial Sequence: Synthetic oligonucleotide
  Sense strand starting at position 1447 of SEQ ID NO: 1241191
uggagaaggugccuggaua

SEQ ID NO: 1253533 - RNA, 19 nt, Artificial Sequence
  Description of Artificial Sequence: Synthetic oligonucleotide
  Antisense strand to SEQ ID NO: 1253532
uauccaggcaccuucucca

SEQ ID NO: 1253534 - RNA, 19 nt, Artificial Sequence
  Description of Artificial Sequence: Synthetic oligonucleotide
  Sense strand starting at position 1455 of SEQ ID NO: 1241191
gugccuggauacucucaga

SEQ ID NO: 1253535 - RNA, 19 nt, Artificial Sequence
  Description of Artificial Sequence: Synthetic oligonucleotide
  Antisense strand to SEQ ID NO: 1253534
ucugagaguauccaggcac

SEQ ID NO: 1253536 - RNA, 19 nt, Artificial Sequence
  Description of Artificial Sequence: Synthetic oligonucleotide
  Sense strand starting at position 1871 of SEQ ID NO: 1241191
gcgacaaugucucccuaaa

SEQ ID NO: 1253537 - RNA, 19 nt, Artificial Sequence
  Description of Artificial Sequence: Synthetic oligonucleotide
  Antisense strand to SEQ ID NO: 1253536
uuuagggagacauugucgc

SEQ ID NO: 1253538 - RNA, 19 nt, Artificial Sequence
  Description of Artificial Sequence: Synthetic oligonucleotide
  Sense strand starting at position 2144 of SEQ ID NO: 1241191
gguagauguagguauagau

SEQ ID NO: 1253539 - RNA, 19 nt, Artificial Sequence
  Description of Artificial Sequence: Synthetic oligonucleotide
  Antisense strand to SEQ ID NO: 1253538
aucuauaccuacaucuacc

SEQ ID NO: 1253540 - RNA, 19 nt, Artificial Sequence
  Description of Artificial Sequence: Synthetic oligonucleotide
  Sense strand starting at position 2211 of SEQ ID NO: 1241191
cagccuaacuggguagaau

SEQ ID NO: 1253541 - RNA, 19 nt, Artificial Sequence
  Description of Artificial Sequence: Synthetic oligonucleotide
  Antisense strand to SEQ ID NO: 1253540
auucuacccaguuaggcug

SEQ ID NO: 1253542 - RNA, 19 nt, Artificial Sequence
  Description of Artificial Sequence: Synthetic oligonucleotide
  Sense strand starting at position 2230 of SEQ ID NO: 1241191
gaaggaauugcucagcuug

SEQ ID NO: 1253543 - RNA, 19 nt, Artificial Sequence
  Description of Artificial Sequence: Synthetic oligonucleotide
  Antisense strand to SEQ ID NO: 1253542
caagcugagcaauuccuuc

SEQ ID NO: 1253544 - RNA, 19 nt, Artificial Sequence
  Description of Artificial Sequence: Synthetic oligonucleotide
  Sense strand starting at position 2287 of SEQ ID NO: 1241191
gcgaauaauuggguggaaa

SEQ ID NO: 1253545 - RNA, 19 nt, Artificial Sequence
  Description of Artificial Sequence: Synthetic oligonucleotide
  Antisense strand to SEQ ID NO: 1253544
uuuccacccaauuauucgc

SEQ ID NO: 1253546 - RNA, 19 nt, Artificial Sequence
  Description of Artificial Sequence: Synthetic oligonucleotide
  Sense strand starting at position 2288 of SEQ ID NO: 1241191
cgaauaauuggguggaaau

SEQ ID NO: 1253547 - RNA, 19 nt, Artificial Sequence
  Description of Artificial Sequence: Synthetic oligonucleotide
  Antisense strand to SEQ ID NO: 1253546
auuuccacccaauuauucg

SEQ ID NO: 1253548 - RNA, 19 nt, Artificial Sequence
  Description of Artificial Sequence: Synthetic oligonucleotide
  Sense strand starting at position 2700 of SEQ ID NO: 1241191
gcagguggaacauauguaa

SEQ ID NO: 1253549 - RNA, 19 nt, Artificial Sequence
  Description of Artificial Sequence: Synthetic oligonucleotide
  Antisense strand to SEQ ID NO: 1253548
uuacauauguuccaccugc

SEQ ID NO: 1253550 - RNA, 19 nt, Artificial Sequence
  Description of Artificial Sequence: Synthetic oligonucleotide
  Sense strand starting at position 2709 of SEQ ID NO: 1241191
acauauguaacugguguuu

SEQ ID NO: 1253551 - RNA, 19 nt, Artificial Sequence
  Description of Artificial Sequence: Synthetic oligonucleotide
  Antisense strand to SEQ ID NO: 1253550
aaacaccaguuacauaugu

SEQ ID NO: 1253552 - RNA, 19 nt, Artificial Sequence
  Description of Artificial Sequence: Synthetic oligonucleotide
  Sense strand starting at position 2715 of SEQ ID NO: 1241191
guaacugguguuuaaugca

SEQ ID NO: 1253553 - RNA, 19 nt, Artificial Sequence
  Description of Artificial Sequence: Synthetic oligonucleotide
  Antisense strand to SEQ ID NO: 1253552
ugcauuaaacaccaguuac

SEQ ID NO: 1253554 - RNA, 19 nt, Artificial Sequence
  Description of Artificial Sequence: Synthetic oligonucleotide
  Sense strand starting at position 2739 of SEQ ID NO: 1241191
uuaugacuuccugguuaua

SEQ ID NO: 1253555 - RNA, 19 nt, Artificial Sequence
  Description of Artificial Sequence: Synthetic oligonucleotide
  Antisense strand to SEQ ID NO: 1253554
uauaaccaggaagucauaa

SEQ ID NO: 1253556 - RNA, 19 nt, Artificial Sequence
  Description of Artificial Sequence: Synthetic oligonucleotide
  Sense strand starting at position 2741 of SEQ ID NO: 1241191
augacuuccugguuauaga

SEQ ID NO: 1253557 - RNA, 19 nt, Artificial Sequence
  Description of Artificial Sequence: Synthetic oligonucleotide
  Antisense strand to SEQ ID NO: 1253556
ucuauaaccaggaagucau

SEQ ID NO: 1253558 - RNA, 19 nt, Artificial Sequence
  Description of Artificial Sequence: Synthetic oligonucleotide
  Sense strand starting at position 2742 of SEQ ID NO: 1241191
ugacuuccugguuauagau

SEQ ID NO: 1253559 - RNA, 19 nt, Artificial Sequence
  Description of Artificial Sequence: Synthetic oligonucleotide
  Antisense strand to SEQ ID NO: 1253558
aucuauaaccaggaaguca

SEQ ID NO: 1253560 - RNA, 19 nt, Artificial Sequence
  Description of Artificial Sequence: Synthetic oligonucleotide
  Sense strand starting at position 2776 of SEQ ID NO: 1241191
caguuagugccauacaaug

SEQ ID NO: 1253561 - RNA, 19 nt, Artificial Sequence
  Description of Artificial Sequence: Synthetic oligonucleotide
  Antisense strand to SEQ ID NO: 1253560
cauuguauggcacuaacug

SEQ ID NO: 1253562 - RNA, 19 nt, Artificial Sequence
  Description of Artificial Sequence: Synthetic oligonucleotide
  Sense strand starting at position 2782 of SEQ ID NO: 1241191
gugccauacaaugaguguu

SEQ ID NO: 1253563 - RNA, 19 nt, Artificial Sequence
  Description of Artificial Sequence: Synthetic oligonucleotide
  Antisense strand to SEQ ID NO: 1253562
aacacucauuguauggcac

SEQ ID NO: 1253564 - RNA, 19 nt, Artificial Sequence
  Description of Artificial Sequence: Synthetic oligonucleotide
  Sense strand starting at position 2784 of SEQ ID NO: 1241191
gccauacaaugaguguuau

SEQ ID NO: 1253565 - RNA, 19 nt, Artificial Sequence
  Description of Artificial Sequence: Synthetic oligonucleotide
  Antisense strand to SEQ ID NO: 1253564
auaacacucauuguauggc

SEQ ID NO: 1253566 - RNA, 19 nt, Artificial Sequence
  Description of Artificial Sequence: Synthetic oligonucleotide
  Sense strand starting at position 2785 of SEQ ID NO: 1241191
ccauacaaugaguguuauu

SEQ ID NO: 1253567 - RNA, 19 nt, Artificial Sequence
  Description of Artificial Sequence: Synthetic oligonucleotide
  Antisense strand to SEQ ID NO: 1253566
aauaacacucauuguaugg

SEQ ID NO: 1253568 - RNA, 19 nt, Artificial Sequence
  Description of Artificial Sequence: Synthetic oligonucleotide
  Sense strand starting at position 2841 of SEQ ID NO: 1241191
ugauaguggccguaggaga

SEQ ID NO: 1253569 - RNA, 19 nt, Artificial Sequence
  Description of Artificial Sequence: Synthetic oligonucleotide
  Antisense strand to SEQ ID NO: 1253568
ucuccuacggccacuauca

SEQ ID NO: 1253570 - RNA, 19 nt, Artificial Sequence
  Description of Artificial Sequence: Synthetic oligonucleotide
  Sense strand starting at position 2865 of SEQ ID NO: 1241191
cggaggagugcuugaugga

SEQ ID NO: 1253571 - RNA, 19 nt, Artificial Sequence
  Description of Artificial Sequence: Synthetic oligonucleotide
  Antisense strand to SEQ ID NO: 1253570
uccaucaagcacuccuccg

SEQ ID NO: 1253572 - RNA, 19 nt, Artificial Sequence
  Description of Artificial Sequence: Synthetic oligonucleotide
  Sense strand starting at position 2905 of SEQ ID NO: 1241191
gacauaacauuagagggaa

SEQ ID NO: 1253573 - RNA, 19 nt, Artificial Sequence
  Description of Artificial Sequence: Synthetic oligonucleotide
  Antisense strand to SEQ ID NO: 1253572
uucccucuaauguuauguc

SEQ ID NO: 1253574 - RNA, 19 nt, Artificial Sequence
  Description of Artificial Sequence: Synthetic oligonucleotide
  Sense strand starting at position 3265 of SEQ ID NO: 1241191
gacauugucagguagacug

SEQ ID NO: 1253575 - RNA, 19 nt, Artificial Sequence
  Description of Artificial Sequence: Synthetic oligonucleotide
  Antisense strand to SEQ ID NO: 1253574
cagucuaccugacaauguc

SEQ ID NO: 1253576 - RNA, 19 nt, Artificial Sequence
  Description of Artificial Sequence: Synthetic oligonucleotide
  Sense strand starting at position 3341 of SEQ ID NO: 1241191
ggaacauaacucuggcaac

SEQ ID NO: 1253577 - RNA, 19 nt, Artificial Sequence
  Description of Artificial Sequence: Synthetic oligonucleotide
  Antisense strand to SEQ ID NO: 1253576
guugccagaguuauguucc

SEQ ID NO: 1253578 - RNA, 19 nt, Artificial Sequence
  Description of Artificial Sequence: Synthetic oligonucleotide
  Sense strand starting at position 3359 of SEQ ID NO: 1241191
cagugaaguggaggcuuua

SEQ ID NO: 1253579 - RNA, 19 nt, Artificial Sequence
  Description of Artificial Sequence: Synthetic oligonucleotide
  Antisense strand to SEQ ID NO: 1253578
uaaagccuccacuucacug

SEQ ID NO: 1253580 - RNA, 19 nt, Artificial Sequence
  Description of Artificial Sequence: Synthetic oligonucleotide
  Sense strand starting at position 3566 of SEQ ID NO: 1241191
cugauaaguugugucagag

SEQ ID NO: 1253581 - RNA, 19 nt, Artificial Sequence
  Description of Artificial Sequence: Synthetic oligonucleotide
  Antisense strand to SEQ ID NO: 1253580
cucugacacaacuuaucag

SEQ ID NO: 1253582 - RNA, 19 nt, Artificial Sequence
  Description of Artificial Sequence: Synthetic oligonucleotide
  Sense strand starting at position 3576 of SEQ ID NO: 1241191
gugucagagaucuggacug

SEQ ID NO: 1253583 - RNA, 19 nt, Artificial Sequence
  Description of Artificial Sequence: Synthetic oligonucleotide
  Antisense strand to SEQ ID NO: 1253582
caguccagaucucugacac

SEQ ID NO: 1253584 - RNA, 19 nt, Artificial Sequence
  Description of Artificial Sequence: Synthetic oligonucleotide
  Sense strand starting at position 3606 of SEQ ID NO: 1241191
aggacaucgugacccuaua

SEQ ID NO: 1253585 - RNA, 19 nt, Artificial Sequence
  Description of Artificial Sequence: Synthetic oligonucleotide
  Antisense strand to SEQ ID NO: 1253584
uauagggucacgauguccu

SEQ ID NO: 1253586 - RNA, 19 nt, Artificial Sequence
  Description of Artificial Sequence: Synthetic oligonucleotide
  Sense strand starting at position 3639 of SEQ ID NO: 1241191
ccaacagugugagugagau

SEQ ID NO: 1253587 - RNA, 19 nt, Artificial Sequence
  Description of Artificial Sequence: Synthetic oligonucleotide
  Antisense strand to SEQ ID NO: 1253586
aucucacucacacuguugg

SEQ ID NO: 1253588 - RNA, 19 nt, Artificial Sequence
  Description of Artificial Sequence: Synthetic oligonucleotide
  Sense strand starting at position 3641 of SEQ ID NO: 1241191
aacagugugagugagauca

SEQ ID NO: 1253589 - RNA, 19 nt, Artificial Sequence
  Description of Artificial Sequence: Synthetic oligonucleotide
  Antisense strand to SEQ ID NO: 1253588
ugaucucacucacacuguu

SEQ ID NO: 1253590 - RNA, 19 nt, Artificial Sequence
  Description of Artificial Sequence: Synthetic oligonucleotide
  Sense strand starting at position 3884 of SEQ ID NO: 1241191
gaaacuggcaguuaugagu

SEQ ID NO: 1253591 - RNA, 19 nt, Artificial Sequence
  Description of Artificial Sequence: Synthetic oligonucleotide
  Antisense strand to SEQ ID NO: 1253590
acucauaacugccaguuuc

SEQ ID NO: 1253592 - RNA, 19 nt, Artificial Sequence
  Description of Artificial Sequence: Synthetic oligonucleotide
  Sense strand starting at position 3897 of SEQ ID NO: 1241191
augagucuugggugacauu

SEQ ID NO: 1253593 - RNA, 19 nt, Artificial Sequence
  Description of Artificial Sequence: Synthetic oligonucleotide
  Antisense strand to SEQ ID NO: 1253592
aaugucacccaagacucau

SEQ ID NO: 1253594 - RNA, 19 nt, Artificial Sequence
  Description of Artificial Sequence: Synthetic oligonucleotide
  Sense strand starting at position 3971 of SEQ ID NO: 1241191
ugcaaugggaggugagaau

SEQ ID NO: 1253595 - RNA, 19 nt, Artificial Sequence
  Description of Artificial Sequence: Synthetic oligonucleotide
  Antisense strand to SEQ ID NO: 1253594
auucucaccucccauugca

SEQ ID NO: 1253596 - RNA, 19 nt, Artificial Sequence
  Description of Artificial Sequence: Synthetic oligonucleotide
  Sense strand starting at position 1 of SEQ ID NO: 1241192
cuguaaggcgaucaacagu

SEQ ID NO: 1253597 - RNA, 19 nt, Artificial Sequence
  Description of Artificial Sequence: Synthetic oligonucleotide
  Antisense strand to SEQ ID NO: 1253596
acuguugaucgccuuacag

SEQ ID NO: 1253598 - RNA, 19 nt, Artificial Sequence
  Description of Artificial Sequence: Synthetic oligonucleotide
  Sense strand starting at position 4 of SEQ ID NO: 1241192
uaaggcgaucaacaguuua

SEQ ID NO: 1253599 - RNA, 19 nt, Artificial Sequence
  Description of Artificial Sequence: Synthetic oligonucleotide
  Antisense strand to SEQ ID NO: 1253598
uaaacuguugaucgccuua

SEQ ID NO: 1253600 - RNA, 19 nt, Artificial Sequence
  Description of Artificial Sequence: Synthetic oligonucleotide
  Sense strand starting at position 140 of SEQ ID NO: 1241192
auacaucucccucgggaaa

SEQ ID NO: 1253601 - RNA, 19 nt, Artificial Sequence
  Description of Artificial Sequence: Synthetic oligonucleotide
  Antisense strand to SEQ ID NO: 1253600
uuucccgagggagauguau

SEQ ID NO: 1253602 - RNA, 19 nt, Artificial Sequence
  Description of Artificial Sequence: Synthetic oligonucleotide
  Sense strand starting at position 142 of SEQ ID NO: 1241192
acaucucccucgggaaagu

SEQ ID NO: 1253603 - RNA, 19 nt, Artificial Sequence
  Description of Artificial Sequence: Synthetic oligonucleotide
  Antisense strand to SEQ ID NO: 1253602
acuuucccgagggagaugu

SEQ ID NO: 1253604 - RNA, 19 nt, Artificial Sequence
  Description of Artificial Sequence: Synthetic oligonucleotide
  Sense strand starting at position 151 of SEQ ID NO: 1241192
ucgggaaagucuuagaguc

SEQ ID NO: 1253605 - RNA, 19 nt, Artificial Sequence
  Description of Artificial Sequence: Synthetic oligonucleotide
  Antisense strand to SEQ ID NO: 1253604
gacucuaagacuuucccga

SEQ ID NO: 1253606 - RNA, 19 nt, Artificial Sequence
  Description of Artificial Sequence: Synthetic oligonucleotide
  Sense strand starting at position 153 of SEQ ID NO: 1241192
gggaaagucuuagagucuc

SEQ ID NO: 1253607 - RNA, 19 nt, Artificial Sequence
  Description of Artificial Sequence: Synthetic oligonucleotide
  Antisense strand to SEQ ID NO: 1253606
gagacucuaagacuuuccc

SEQ ID NO: 1253608 - RNA, 19 nt, Artificial Sequence
  Description of Artificial Sequence: Synthetic oligonucleotide
  Sense strand starting at position 161 of SEQ ID NO: 1241192
cuuagagucucggcugaga

SEQ ID NO: 1253609 - RNA, 19 nt, Artificial Sequence
  Description of Artificial Sequence: Synthetic oligonucleotide
  Antisense strand to SEQ ID NO: 1253608
ucucagccgagacucuaag

SEQ ID NO: 1253610 - RNA, 19 nt, Artificial Sequence
  Description of Artificial Sequence: Synthetic oligonucleotide
  Sense strand starting at position 163 of SEQ ID NO: 1241192
uagagucucggcugagaaa

SEQ ID NO: 1253611 - RNA, 19 nt, Artificial Sequence
  Description of Artificial Sequence: Synthetic oligonucleotide
  Antisense strand to SEQ ID NO: 1253610
uuucucagccgagacucua

SEQ ID NO: 1253612 - RNA, 19 nt, Artificial Sequence
  Description of Artificial Sequence: Synthetic oligonucleotide
  Sense strand starting at position 175 of SEQ ID NO: 1241192
ugagaaaggucccaggacu

SEQ ID NO: 1253613 - RNA, 19 nt, Artificial Sequence
  Description of Artificial Sequence: Synthetic oligonucleotide
  Antisense strand to SEQ ID NO: 1253612
aguccugggaccuuucuca

SEQ ID NO: 1253614 - RNA, 19 nt, Artificial Sequence
  Description of Artificial Sequence: Synthetic oligonucleotide
  Sense strand starting at position 199 of SEQ ID NO: 1241192
ggcggaauuuauggcaaac

SEQ ID NO: 1253615 - RNA, 19 nt, Artificial Sequence
  Description of Artificial Sequence: Synthetic oligonucleotide
  Antisense strand to SEQ ID NO: 1253614
guuugccauaaauuccgcc

SEQ ID NO: 1253616 - RNA, 19 nt, Artificial Sequence
  Description of Artificial Sequence: Synthetic oligonucleotide
  Sense strand starting at position 201 of SEQ ID NO: 1241192
cggaauuuauggcaaacaa

SEQ ID NO: 1253617 - RNA, 19 nt, Artificial Sequence
  Description of Artificial Sequence: Synthetic oligonucleotide
  Antisense strand to SEQ ID NO: 1253616
uuguuugccauaaauuccg

SEQ ID NO: 1253618 - RNA, 19 nt, Artificial Sequence
  Description of Artificial Sequence: Synthetic oligonucleotide
  Sense strand starting at position 354 of SEQ ID NO: 1241192
gacaccuguugcugcaaga

SEQ ID NO: 1253619 - RNA, 19 nt, Artificial Sequence
  Description of Artificial Sequence: Synthetic oligonucleotide
  Antisense strand to SEQ ID NO: 1253618
ucuugcagcaacagguguc

SEQ ID NO: 1253620 - RNA, 19 nt, Artificial Sequence
  Description of Artificial Sequence: Synthetic oligonucleotide
  Sense strand starting at position 399 of SEQ ID NO: 1241192
ccuuguauccuuugcuguu

SEQ ID NO: 1253621 - RNA, 19 nt, Artificial Sequence
  Description of Artificial Sequence: Synthetic oligonucleotide
  Antisense strand to SEQ ID NO: 1253620
aacagcaaaggauacaagg

SEQ ID NO: 1253622 - RNA, 19 nt, Artificial Sequence
  Description of Artificial Sequence: Synthetic oligonucleotide
  Sense strand starting at position 405 of SEQ ID NO: 1241192
auccuuugcuguuuagaac

SEQ ID NO: 1253623 - RNA, 19 nt, Artificial Sequence
  Description of Artificial Sequence: Synthetic oligonucleotide
  Antisense strand to SEQ ID NO: 1253622
guucuaaacagcaaaggau

SEQ ID NO: 1253624 - RNA, 19 nt, Artificial Sequence
  Description of Artificial Sequence: Synthetic oligonucleotide
  Sense strand starting at position 406 of SEQ ID NO: 1241192
uccuuugcuguuuagaacu

SEQ ID NO: 1253625 - RNA, 19 nt, Artificial Sequence
  Description of Artificial Sequence: Synthetic oligonucleotide
  Antisense strand to SEQ ID NO: 1253624
aguucuaaacagcaaagga

SEQ ID NO: 1253626 - RNA, 19 nt, Artificial Sequence
  Description of Artificial Sequence: Synthetic oligonucleotide
  Sense strand starting at position 416 of SEQ ID NO: 1241192
uuuagaacuucccgcuacu

SEQ ID NO: 1253627 - RNA, 19 nt, Artificial Sequence
  Description of Artificial Sequence: Synthetic oligonucleotide
  Antisense strand to SEQ ID NO: 1253626
aguagcgggaaguucuaaa

SEQ ID NO: 1253628 - RNA, 19 nt, Artificial Sequence
  Description of Artificial Sequence: Synthetic oligonucleotide
  Sense strand starting at position 547 of SEQ ID NO: 1241192
agguucugagcuggacaaa

SEQ ID NO: 1253629 - RNA, 19 nt, Artificial Sequence
  Description of Artificial Sequence: Synthetic oligonucleotide
  Antisense strand to SEQ ID NO: 1253628
uuuguccagcucagaaccu

SEQ ID NO: 1253630 - RNA, 19 nt, Artificial Sequence
  Description of Artificial Sequence: Synthetic oligonucleotide
  Sense strand starting at position 1805 of SEQ ID NO: 1241192
cucucaggguucuggagaa

SEQ ID NO: 1253631 - RNA, 19 nt, Artificial Sequence
  Description of Artificial Sequence: Synthetic oligonucleotide
  Antisense strand to SEQ ID NO: 1253630
uucuccagaacccugagag

SEQ ID NO: 1253632 - RNA, 19 nt, Artificial Sequence
  Description of Artificial Sequence: Synthetic oligonucleotide
  Sense strand starting at position 2747 of SEQ ID NO: 1241192
ccgcuaaaucccugggauu

SEQ ID NO: 1253633 - RNA, 19 nt, Artificial Sequence
  Description of Artificial Sequence: Synthetic oligonucleotide
  Antisense strand to SEQ ID NO: 1253632
aaucccagggauuuagcgg

SEQ ID NO: 1253634 - RNA, 19 nt, Artificial Sequence
  Description of Artificial Sequence: Synthetic oligonucleotide
  Sense strand starting at position 2748 of SEQ ID NO: 1241192
cgcuaaaucccugggauuc

SEQ ID NO: 1253635 - RNA, 19 nt, Artificial Sequence
  Description of Artificial Sequence: Synthetic oligonucleotide
  Antisense strand to SEQ ID NO: 1253634
gaaucccagggauuuagcg

SEQ ID NO: 1253636 - RNA, 19 nt, Artificial Sequence
  Description of Artificial Sequence: Synthetic oligonucleotide
  Sense strand starting at position 2767 of SEQ ID NO: 1241192
gggagauaaucugcaauuc

SEQ ID NO: 1253637 - RNA, 19 nt, Artificial Sequence
  Description of Artificial Sequence: Synthetic oligonucleotide
  Antisense strand to SEQ ID NO: 1253636
gaauugcagauuaucuccc

SEQ ID NO: 1253638 - RNA, 19 nt, Artificial Sequence
  Description of Artificial Sequence: Synthetic oligonucleotide
  Sense strand starting at position 2915 of SEQ ID NO: 1241192
ccuguaagucugucucguu

SEQ ID NO: 1253639 - RNA, 19 nt, Artificial Sequence
  Description of Artificial Sequence: Synthetic oligonucleotide
  Antisense strand to SEQ ID NO: 1253638
aacgagacagacuuacagg

SEQ ID NO: 1253640 - RNA, 19 nt, Artificial Sequence
  Description of Artificial Sequence: Synthetic oligonucleotide
  Sense strand starting at position 2916 of SEQ ID NO: 1241192
cuguaagucugucucguua

SEQ ID NO: 1253641 - RNA, 19 nt, Artificial Sequence
  Description of Artificial Sequence: Synthetic oligonucleotide
  Antisense strand to SEQ ID NO: 1253640
uaacgagacagacuuacag

SEQ ID NO: 1253642 - RNA, 19 nt, Artificial Sequence
  Description of Artificial Sequence: Synthetic oligonucleotide
  Sense strand starting at position 2918 of SEQ ID NO: 1241192
guaagucugucucguuauc

SEQ ID NO: 1253643 - RNA, 19 nt, Artificial Sequence
  Description of Artificial Sequence: Synthetic oligonucleotide
  Antisense strand to SEQ ID NO: 1253642
gauaacgagacagacuuac

SEQ ID NO: 1253644 - RNA, 19 nt, Artificial Sequence
  Description of Artificial Sequence: Synthetic oligonucleotide
  Sense strand starting at position 3254 of SEQ ID NO: 1241192
gcuagaucaggaugagacu

SEQ ID NO: 1253645 - RNA, 19 nt, Artificial Sequence
  Description of Artificial Sequence: Synthetic oligonucleotide
  Antisense strand to SEQ ID NO: 1253644
agucucauccugaucuagc

SEQ ID NO: 1253646 - RNA, 19 nt, Artificial Sequence
  Description of Artificial Sequence: Synthetic oligonucleotide
  Sense strand starting at position 3263 of SEQ ID NO: 1241192
ggaugagacuugucuuaag

SEQ ID NO: 1253647 - RNA, 19 nt, Artificial Sequence
  Description of Artificial Sequence: Synthetic oligonucleotide
  Antisense strand to SEQ ID NO: 1253646
cuuaagacaagucucaucc

SEQ ID NO: 1253648 - RNA, 19 nt, Artificial Sequence
  Description of Artificial Sequence: Synthetic oligonucleotide
  Sense strand starting at position 3301 of SEQ ID NO: 1241192
ucgagcugcugucauagaa

SEQ ID NO: 1253649 - RNA, 19 nt, Artificial Sequence
  Description of Artificial Sequence: Synthetic oligonucleotide
  Antisense strand to SEQ ID NO: 1253648
uucuaugacagcagcucga

SEQ ID NO: 1253650 - RNA, 19 nt, Artificial Sequence
  Description of Artificial Sequence: Synthetic oligonucleotide
  Sense strand starting at position 3305 of SEQ ID NO: 1241192
gcugcugucauagaaagca

SEQ ID NO: 1253651 - RNA, 19 nt, Artificial Sequence
  Description of Artificial Sequence: Synthetic oligonucleotide
  Antisense strand to SEQ ID NO: 1253650
ugcuuucuaugacagcagc

SEQ ID NO: 1253652 - RNA, 19 nt, Artificial Sequence
  Description of Artificial Sequence: Synthetic oligonucleotide
  Sense strand starting at position 3323 of SEQ ID NO: 1241192
auaaucaguugcuuuagau

SEQ ID NO: 1253653 - RNA, 19 nt, Artificial Sequence
  Description of Artificial Sequence: Synthetic oligonucleotide
  Antisense strand to SEQ ID NO: 1253652
aucuaaagcaacugauuau

SEQ ID NO: 1253654 - RNA, 19 nt, Artificial Sequence
  Description of Artificial Sequence: Synthetic oligonucleotide
  Sense strand starting at position 3375 of SEQ ID NO: 1241192
gcugaagucugauuggcaa

SEQ ID NO: 1253655 - RNA, 19 nt, Artificial Sequence
  Description of Artificial Sequence: Synthetic oligonucleotide
  Antisense strand to SEQ ID NO: 1253654
uugccaaucagacuucagc

SEQ ID NO: 1253656 - RNA, 19 nt, Artificial Sequence
  Description of Artificial Sequence: Synthetic oligonucleotide
  Sense strand starting at position 3379 of SEQ ID NO: 1241192
aagucugauuggcaaggua

SEQ ID NO: 1253657 - RNA, 19 nt, Artificial Sequence
  Description of Artificial Sequence: Synthetic oligonucleotide
  Antisense strand to SEQ ID NO: 1253656
uaccuugccaaucagacuu

SEQ ID NO: 1253658 - RNA, 19 nt, Artificial Sequence
  Description of Artificial Sequence: Synthetic oligonucleotide
  Sense strand starting at position 3382 of SEQ ID NO: 1241192
ucugauuggcaagguacaa

SEQ ID NO: 1253659 - RNA, 19 nt, Artificial Sequence
  Description of Artificial Sequence: Synthetic oligonucleotide
  Antisense strand to SEQ ID NO: 1253658
uuguaccuugccaaucaga

SEQ ID NO: 1253660 - RNA, 19 nt, Artificial Sequence
  Description of Artificial Sequence: Synthetic oligonucleotide
  Sense strand starting at position 3552 of SEQ ID NO: 1241192
gaucauguaugauuccaag

SEQ ID NO: 1253661 - RNA, 19 nt, Artificial Sequence
  Description of Artificial Sequence: Synthetic oligonucleotide
  Antisense strand to SEQ ID NO: 1253660
cuuggaaucauacaugauc

SEQ ID NO: 1253662 - RNA, 19 nt, Artificial Sequence
  Description of Artificial Sequence: Synthetic oligonucleotide
  Sense strand starting at position 3558 of SEQ ID NO: 1241192
guaugauuccaagacagcu

SEQ ID NO: 1253663 - RNA, 19 nt, Artificial Sequence
  Description of Artificial Sequence: Synthetic oligonucleotide
  Antisense strand to SEQ ID NO: 1253662
agcugucuuggaaucauac

SEQ ID NO: 1253664 - RNA, 19 nt, Artificial Sequence
  Description of Artificial Sequence: Synthetic oligonucleotide
  Sense strand starting at position 3646 of SEQ ID NO: 1241192
cccacauguugagaagaga

SEQ ID NO: 1253665 - RNA, 19 nt, Artificial Sequence
  Description of Artificial Sequence: Synthetic oligonucleotide
  Antisense strand to SEQ ID NO: 1253664
ucucuucucaacauguggg

SEQ ID NO: 1253666 - RNA, 19 nt, Artificial Sequence
  Description of Artificial Sequence: Synthetic oligonucleotide
  Sense strand starting at position 3896 of SEQ ID NO: 1241192
agcucaguuuggguuuaga

SEQ ID NO: 1253667 - RNA, 19 nt, Artificial Sequence
  Description of Artificial Sequence: Synthetic oligonucleotide
  Antisense strand to SEQ ID NO: 1253666
ucuaaacccaaacugagcu

SEQ ID NO: 1253668 - RNA, 19 nt, Artificial Sequence
  Description of Artificial Sequence: Synthetic oligonucleotide
  Sense strand starting at position 1 of SEQ ID NO: 1241193
cgaagcugaucucucauua

SEQ ID NO: 1253669 - RNA, 19 nt, Artificial Sequence
  Description of Artificial Sequence: Synthetic oligonucleotide
  Antisense strand to SEQ ID NO: 1253668
uaaugagagaucagcuucg

SEQ ID NO: 1253670 - RNA, 19 nt, Artificial Sequence
  Description of Artificial Sequence: Synthetic oligonucleotide
  Sense strand starting at position 5 of SEQ ID NO: 1241193
gcugaucucucauuagcua

SEQ ID NO: 1253671 - RNA, 19 nt, Artificial Sequence
  Description of Artificial Sequence: Synthetic oligonucleotide
  Antisense strand to SEQ ID NO: 1253670
uagcuaaugagagaucagc

SEQ ID NO: 1253672 - RNA, 19 nt, Artificial Sequence
  Description of Artificial Sequence: Synthetic oligonucleotide
  Sense strand starting at position 51 of SEQ ID NO: 1241193
ugcucagucguaggugaau

SEQ ID NO: 1253673 - RNA, 19 nt, Artificial Sequence
  Description of Artificial Sequence: Synthetic oligonucleotide
  Antisense strand to SEQ ID NO: 1253672
auucaccuacgacugagca

SEQ ID NO: 1253674 - RNA, 19 nt, Artificial Sequence
  Description of Artificial Sequence: Synthetic oligonucleotide
  Sense strand starting at position 94 of SEQ ID NO: 1241193
cagagaacauuaggauguu

SEQ ID NO: 1253675 - RNA, 19 nt, Artificial Sequence
  Description of Artificial Sequence: Synthetic oligonucleotide
  Antisense strand to SEQ ID NO: 1253674
aacauccuaauguucucug

SEQ ID NO: 1253676 - RNA, 19 nt, Artificial Sequence
  Description of Artificial Sequence: Synthetic oligonucleotide
  Sense strand starting at position 95 of SEQ ID NO: 1241193
agagaacauuaggauguuu

SEQ ID NO: 1253677 - RNA, 19 nt, Artificial Sequence
  Description of Artificial Sequence: Synthetic oligonucleotide
  Antisense strand to SEQ ID NO: 1253676
aaacauccuaauguucucu

SEQ ID NO: 1253678 - RNA, 19 nt, Artificial Sequence
  Description of Artificial Sequence: Synthetic oligonucleotide
  Sense strand starting at position 133 of SEQ ID NO: 1241193
gugaaucaucccgacacuc

SEQ ID NO: 1253679 - RNA, 19 nt, Artificial Sequence
  Description of Artificial Sequence: Synthetic oligonucleotide
  Antisense strand to SEQ ID NO: 1253678
gagugucgggaugauucac

SEQ ID NO: 1253680 - RNA, 19 nt, Artificial Sequence
  Description of Artificial Sequence: Synthetic oligonucleotide
  Sense strand starting at position 154 of SEQ ID NO: 1241193
uuccaauguucccugcagu

SEQ ID NO: 1253681 - RNA, 19 nt, Artificial Sequence
  Description of Artificial Sequence: Synthetic oligonucleotide
  Antisense strand to SEQ ID NO: 1253680
acugcagggaacauuggaa

SEQ ID NO: 1253682 - RNA, 19 nt, Artificial Sequence
  Description of Artificial Sequence: Synthetic oligonucleotide
  Sense strand starting at position 155 of SEQ ID NO: 1241193
uccaauguucccugcaguu

SEQ ID NO: 1253683 - RNA, 19 nt, Artificial Sequence
  Description of Artificial Sequence: Synthetic oligonucleotide
  Antisense strand to SEQ ID NO: 1253682
aacugcagggaacauugga

SEQ ID NO: 1253684 - RNA, 19 nt, Artificial Sequence
  Description of Artificial Sequence: Synthetic oligonucleotide
  Sense strand starting at position 257 of SEQ ID NO: 1241193
aggaaaggauguggucaga

SEQ ID NO: 1253685 - RNA, 19 nt, Artificial Sequence
  Description of Artificial Sequence: Synthetic oligonucleotide
  Antisense strand to SEQ ID NO: 1253684
ucugaccacauccuuuccu

SEQ ID NO: 1253686 - RNA, 19 nt, Artificial Sequence
  Description of Artificial Sequence: Synthetic oligonucleotide
  Sense strand starting at position 260 of SEQ ID NO: 1241193
aaaggauguggucagaugu

SEQ ID NO: 1253687 - RNA, 19 nt, Artificial Sequence
  Description of Artificial Sequence: Synthetic oligonucleotide
  Antisense strand to SEQ ID NO: 1253686
acaucugaccacauccuuu

SEQ ID NO: 1253688 - RNA, 19 nt, Artificial Sequence
  Description of Artificial Sequence: Synthetic oligonucleotide
  Sense strand starting at position 274 of SEQ ID NO: 1241193
gauguacucgcuggcaaga

SEQ ID NO: 1253689 - RNA, 19 nt, Artificial Sequence
  Description of Artificial Sequence: Synthetic oligonucleotide
  Antisense strand to SEQ ID NO: 1253688
ucuugccagcgaguacauc

SEQ ID NO: 1253690 - RNA, 19 nt, Artificial Sequence
  Description of Artificial Sequence: Synthetic oligonucleotide
  Sense strand starting at position 539 of SEQ ID NO: 1241193
gacacucuccguuacaguu

SEQ ID NO: 1253691 - RNA, 19 nt, Artificial Sequence
  Description of Artificial Sequence: Synthetic oligonucleotide
  Antisense strand to SEQ ID NO: 1253690
aacuguaacggagaguguc

SEQ ID NO: 1253692 - RNA, 19 nt, Artificial Sequence
  Description of Artificial Sequence: Synthetic oligonucleotide
  Sense strand starting at position 602 of SEQ ID NO: 1241193
acaauuaaguccuugaguc

SEQ ID NO: 1253693 - RNA, 19 nt, Artificial Sequence
  Description of Artificial Sequence: Synthetic oligonucleotide
  Antisense strand to SEQ ID NO: 1253692
gacucaaggacuuaauugu

SEQ ID NO: 1253694 - RNA, 19 nt, Artificial Sequence
  Description of Artificial Sequence: Synthetic oligonucleotide
  Sense strand starting at position 606 of SEQ ID NO: 1241193
uuaaguccuugagucugaa

SEQ ID NO: 1253695 - RNA, 19 nt, Artificial Sequence
  Description of Artificial Sequence: Synthetic oligonucleotide
  Antisense strand to SEQ ID NO: 1253694
uucagacucaaggacuuaa

SEQ ID NO: 1253696 - RNA, 19 nt, Artificial Sequence
  Description of Artificial Sequence: Synthetic oligonucleotide
  Sense strand starting at position 747 of SEQ ID NO: 1241193
cguuaauacugagauacca

SEQ ID NO: 1253697 - RNA, 19 nt, Artificial Sequence
  Description of Artificial Sequence: Synthetic oligonucleotide
  Antisense strand to SEQ ID NO: 1253696
ugguaucucaguauuaacg

SEQ ID NO: 1253698 - RNA, 19 nt, Artificial Sequence
  Description of Artificial Sequence: Synthetic oligonucleotide
  Sense strand starting at position 861 of SEQ ID NO: 1241193
uucuuuccuuccuccgaga

SEQ ID NO: 1253699 - RNA, 19 nt, Artificial Sequence
  Description of Artificial Sequence: Synthetic oligonucleotide
  Antisense strand to SEQ ID NO: 1253698
ucucggaggaaggaaagaa

SEQ ID NO: 1253700 - RNA, 19 nt, Artificial Sequence
  Description of Artificial Sequence: Synthetic oligonucleotide
  Sense strand starting at position 917 of SEQ ID NO: 1241193
aaagaugccguccacuaaa

SEQ ID NO: 1253701 - RNA, 19 nt, Artificial Sequence
  Description of Artificial Sequence: Synthetic oligonucleotide
  Antisense strand to SEQ ID NO: 1253700
uuuaguggacggcaucuuu

SEQ ID NO: 1253702 - RNA, 19 nt, Artificial Sequence
  Description of Artificial Sequence: Synthetic oligonucleotide
  Sense strand starting at position 1321 of SEQ ID NO: 1241193
gucuguucgcuuucccauu

SEQ ID NO: 1253703 - RNA, 19 nt, Artificial Sequence
  Description of Artificial Sequence: Synthetic oligonucleotide
  Antisense strand to SEQ ID NO: 1253702
aaugggaaagcgaacagac

SEQ ID NO: 1253704 - RNA, 19 nt, Artificial Sequence
  Description of Artificial Sequence: Synthetic oligonucleotide
  Sense strand starting at position 1411 of SEQ ID NO: 1241193
gauauuugguugggaagaa

SEQ ID NO: 1253705 - RNA, 19 nt, Artificial Sequence
  Description of Artificial Sequence: Synthetic oligonucleotide
  Antisense strand to SEQ ID NO: 1253704
uucuucccaaccaaauauc

SEQ ID NO: 1253706 - RNA, 19 nt, Artificial Sequence
  Description of Artificial Sequence: Synthetic oligonucleotide
  Sense strand starting at position 1412 of SEQ ID NO: 1241193
auauuugguugggaagaau

SEQ ID NO: 1253707 - RNA, 19 nt, Artificial Sequence
  Description of Artificial Sequence: Synthetic oligonucleotide
  Antisense strand to SEQ ID NO: 1253706
auucuucccaaccaaauau

SEQ ID NO: 1253708 - RNA, 19 nt, Artificial Sequence
  Description of Artificial Sequence: Synthetic oligonucleotide
  Sense strand starting at position 2590 of SEQ ID NO: 1241193
gaagaaacuuuauguugag

SEQ ID NO: 1253709 - RNA, 19 nt, Artificial Sequence
  Description of Artificial Sequence: Synthetic oligonucleotide
  Antisense strand to SEQ ID NO: 1253708
cucaacauaaaguuucuuc

SEQ ID NO: 1253710 - RNA, 19 nt, Artificial Sequence
  Description of Artificial Sequence: Synthetic oligonucleotide
  Sense strand starting at position 2591 of SEQ ID NO: 1241193
aagaaacuuuauguugagu

SEQ ID NO: 1253711 - RNA, 19 nt, Artificial Sequence
  Description of Artificial Sequence: Synthetic oligonucleotide
  Antisense strand to SEQ ID NO: 1253710
acucaacauaaaguuucuu

SEQ ID NO: 1253712 - RNA, 19 nt, Artificial Sequence
  Description of Artificial Sequence: Synthetic oligonucleotide
  Sense strand starting at position 2896 of SEQ ID NO: 1241193
uggucucggccugguaaua

SEQ ID NO: 1253713 - RNA, 19 nt, Artificial Sequence
  Description of Artificial Sequence: Synthetic oligonucleotide
  Antisense strand to SEQ ID NO: 1253712
uauuaccaggccgagacca

SEQ ID NO: 1253714 - RNA, 19 nt, Artificial Sequence
  Description of Artificial Sequence: Synthetic oligonucleotide
  Sense strand starting at position 3077 of SEQ ID NO: 1241193
cgacaggcucggugguaau

SEQ ID NO: 1253715 - RNA, 19 nt, Artificial Sequence
  Description of Artificial Sequence: Synthetic oligonucleotide
  Antisense strand to SEQ ID NO: 1253714
auuaccaccgagccugucg

SEQ ID NO: 1253716 - RNA, 19 nt, Artificial Sequence
  Description of Artificial Sequence: Synthetic oligonucleotide
  Sense strand starting at position 3189 of SEQ ID NO: 1241193
ggaggguugugagauuaug

SEQ ID NO: 1253717 - RNA, 19 nt, Artificial Sequence
  Description of Artificial Sequence: Synthetic oligonucleotide
  Antisense strand to SEQ ID NO: 1253716
cauaaucucacaacccucc

SEQ ID NO: 1253718 - RNA, 19 nt, Artificial Sequence
  Description of Artificial Sequence: Synthetic oligonucleotide
  Sense strand starting at position 3197 of SEQ ID NO: 1241193
gugagauuauggccugaga

SEQ ID NO: 1253719 - RNA, 19 nt, Artificial Sequence
  Description of Artificial Sequence: Synthetic oligonucleotide
  Antisense strand to SEQ ID NO: 1253718
ucucaggccauaaucucac

SEQ ID NO: 1253720 - RNA, 19 nt, Artificial Sequence
  Description of Artificial Sequence: Synthetic oligonucleotide
  Sense strand starting at position 3199 of SEQ ID NO: 1241193
gagauuauggccugagagc

SEQ ID NO: 1253721 - RNA, 19 nt, Artificial Sequence
  Description of Artificial Sequence: Synthetic oligonucleotide
  Antisense strand to SEQ ID NO: 1253720
gcucucaggccauaaucuc

SEQ ID NO: 1253722 - RNA, 19 nt, Artificial Sequence
  Description of Artificial Sequence: Synthetic oligonucleotide
  Sense strand starting at position 3318 of SEQ ID NO: 1241193
uuuguugugcaccagaagu

SEQ ID NO: 1253723 - RNA, 19 nt, Artificial Sequence
  Description of Artificial Sequence: Synthetic oligonucleotide
  Antisense strand to SEQ ID NO: 1253722
acuucuggugcacaacaaa

SEQ ID NO: 1253724 - RNA, 19 nt, Artificial Sequence
  Description of Artificial Sequence: Synthetic oligonucleotide
  Sense strand starting at position 3341 of SEQ ID NO: 1241193
uagagaaguuccuuaauug

SEQ ID NO: 1253725 - RNA, 19 nt, Artificial Sequence
  Description of Artificial Sequence: Synthetic oligonucleotide
  Antisense strand to SEQ ID NO: 1253724
caauuaaggaacuucucua

SEQ ID NO: 1253726 - RNA, 19 nt, Artificial Sequence
  Description of Artificial Sequence: Synthetic oligonucleotide
  Sense strand starting at position 3342 of SEQ ID NO: 1241193
agagaaguuccuuaauugc

SEQ ID NO: 1253727 - RNA, 19 nt, Artificial Sequence
  Description of Artificial Sequence: Synthetic oligonucleotide
  Antisense strand to SEQ ID NO: 1253726
gcaauuaaggaacuucucu

SEQ ID NO: 1253728 - RNA, 19 nt, Artificial Sequence
  Description of Artificial Sequence: Synthetic oligonucleotide
  Sense strand starting at position 3401 of SEQ ID NO: 1241193
uuuaacaacucugaugguu

SEQ ID NO: 1253729 - RNA, 19 nt, Artificial Sequence
  Description of Artificial Sequence: Synthetic oligonucleotide
  Antisense strand to SEQ ID NO: 1253728
aaccaucagaguuguuaaa

SEQ ID NO: 1253730 - RNA, 19 nt, Artificial Sequence
  Description of Artificial Sequence: Synthetic oligonucleotide
  Sense strand starting at position 3431 of SEQ ID NO: 1241193
uuuaaagaacagugguuua

SEQ ID NO: 1253731 - RNA, 19 nt, Artificial Sequence
  Description of Artificial Sequence: Synthetic oligonucleotide
  Antisense strand to SEQ ID NO: 1253730
uaaaccacuguucuuuaaa

SEQ ID NO: 1253732 - RNA, 19 nt, Artificial Sequence
  Description of Artificial Sequence: Synthetic oligonucleotide
  Sense strand starting at position 3436 of SEQ ID NO: 1241193
agaacagugguuuaagcaa

SEQ ID NO: 1253733 - RNA, 19 nt, Artificial Sequence
  Description of Artificial Sequence: Synthetic oligonucleotide
  Antisense strand to SEQ ID NO: 1253732
uugcuuaaaccacuguucu

SEQ ID NO: 1253734 - RNA, 19 nt, Artificial Sequence
  Description of Artificial Sequence: Synthetic oligonucleotide
  Sense strand starting at position 3507 of SEQ ID NO: 1241193
ggaggaguuucaguuguga

SEQ ID NO: 1253735 - RNA, 19 nt, Artificial Sequence
  Description of Artificial Sequence: Synthetic oligonucleotide
  Antisense strand to SEQ ID NO: 1253734
ucacaacugaaacuccucc

SEQ ID NO: 1253736 - RNA, 19 nt, Artificial Sequence
  Description of Artificial Sequence: Synthetic oligonucleotide
  Sense strand starting at position 3530 of SEQ ID NO: 1241193
ugaaauguccuguaaacca

SEQ ID NO: 1253737 - RNA, 19 nt, Artificial Sequence
  Description of Artificial Sequence: Synthetic oligonucleotide
  Antisense strand to SEQ ID NO: 1253736
ugguuuacaggacauuuca

SEQ ID NO: 1253738 - RNA, 19 nt, Artificial Sequence
  Description of Artificial Sequence: Synthetic oligonucleotide
  Sense strand starting at position 3722 of SEQ ID NO: 1241193
gaauccuuaugguaguaaa

SEQ ID NO: 1253739 - RNA, 19 nt, Artificial Sequence
  Description of Artificial Sequence: Synthetic oligonucleotide
  Antisense strand to SEQ ID NO: 1253738
uuuacuaccauaaggauuc

SEQ ID NO: 1253740 - RNA, 19 nt, Artificial Sequence
  Description of Artificial Sequence: Synthetic oligonucleotide
  Sense strand starting at position 3893 of SEQ ID NO: 1241193
cccacaaguguguagacaa

SEQ ID NO: 1253741 - RNA, 19 nt, Artificial Sequence
  Description of Artificial Sequence: Synthetic oligonucleotide
  Antisense strand to SEQ ID NO: 1253740
uugucuacacacuuguggg

SEQ ID NO: 1253742 - RNA, 19 nt, Artificial Sequence
  Description of Artificial Sequence: Synthetic oligonucleotide
  Sense strand starting at position 3945 of SEQ ID NO: 1241193
auggaagucguuuauagaa

SEQ ID NO: 1253743 - RNA, 19 nt, Artificial Sequence
  Description of Artificial Sequence: Synthetic oligonucleotide
  Antisense strand to SEQ ID NO: 1253742
uucuauaaacgacuuccau

SEQ ID NO: 1253744 - RNA, 19 nt, Artificial Sequence
  Description of Artificial Sequence: Synthetic oligonucleotide
  Sense strand starting at position 3947 of SEQ ID NO: 1241193
ggaagucguuuauagaaua

SEQ ID NO: 1253745 - RNA, 19 nt, Artificial Sequence
  Description of Artificial Sequence: Synthetic oligonucleotide
  Antisense strand to SEQ ID NO: 1253744
uauucuauaaacgacuucc

SEQ ID NO: 1253746 - RNA, 19 nt, Artificial Sequence
  Description of Artificial Sequence: Synthetic oligonucleotide
  Sense strand starting at position 3952 of SEQ ID NO: 1241193
ucguuuauagaauaaaccu

SEQ ID NO: 1253747 - RNA, 19 nt, Artificial Sequence
  Description of Artificial Sequence: Synthetic oligonucleotide
  Antisense strand to SEQ ID NO: 1253746
agguuuauucuauaaacga

SEQ ID NO: 1253748 - RNA, 19 nt, Artificial Sequence
  Description of Artificial Sequence: Synthetic oligonucleotide
  Sense strand starting at position 106 of SEQ ID NO: 1241194
cucaaucaaguuuagagua

SEQ ID NO: 1253749 - RNA, 19 nt, Artificial Sequence
  Description of Artificial Sequence: Synthetic oligonucleotide
  Antisense strand to SEQ ID NO: 1253748
uacucuaaacuugauugag

SEQ ID NO: 1253750 - RNA, 19 nt, Artificial Sequence
  Description of Artificial Sequence: Synthetic oligonucleotide
  Sense strand starting at position 111 of SEQ ID NO: 1241194
ucaaguuuagaguauugau

SEQ ID NO: 1253751 - RNA, 19 nt, Artificial Sequence
  Description of Artificial Sequence: Synthetic oligonucleotide
  Antisense strand to SEQ ID NO: 1253750
aucaauacucuaaacuuga

SEQ ID NO: 1253752 - RNA, 19 nt, Artificial Sequence
  Description of Artificial Sequence: Synthetic oligonucleotide
  Sense strand starting at position 119 of SEQ ID NO: 1241194
agaguauugauugguuucu

SEQ ID NO: 1253753 - RNA, 19 nt, Artificial Sequence
  Description of Artificial Sequence: Synthetic oligonucleotide
  Antisense strand to SEQ ID NO: 1253752
agaaaccaaucaauacucu

SEQ ID NO: 1253754 - RNA, 19 nt, Artificial Sequence
  Description of Artificial Sequence: Synthetic oligonucleotide
  Sense strand starting at position 120 of SEQ ID NO: 1241194
gaguauugauugguuucua

SEQ ID NO: 1253755 - RNA, 19 nt, Artificial Sequence
  Description of Artificial Sequence: Synthetic oligonucleotide
  Antisense strand to SEQ ID NO: 1253754
uagaaaccaaucaauacuc

SEQ ID NO: 1253756 - RNA, 19 nt, Artificial Sequence
  Description of Artificial Sequence: Synthetic oligonucleotide
  Sense strand starting at position 121 of SEQ ID NO: 1241194
aguauugauugguuucuaa

SEQ ID NO: 1253757 - RNA, 19 nt, Artificial Sequence
  Description of Artificial Sequence: Synthetic oligonucleotide
  Antisense strand to SEQ ID NO: 1253756
uuagaaaccaaucaauacu

SEQ ID NO: 1253758 - RNA, 19 nt, Artificial Sequence
  Description of Artificial Sequence: Synthetic oligonucleotide
  Sense strand starting at position 124 of SEQ ID NO: 1241194
auugauugguuucuaauca

SEQ ID NO: 1253759 - RNA, 19 nt, Artificial Sequence
  Description of Artificial Sequence: Synthetic oligonucleotide
  Antisense strand to SEQ ID NO: 1253758
ugauuagaaaccaaucaau

SEQ ID NO: 1253760 - RNA, 19 nt, Artificial Sequence
  Description of Artificial Sequence: Synthetic oligonucleotide
  Sense strand starting at position 225 of SEQ ID NO: 1241194
uugaaaugccuuuaugcca

SEQ ID NO: 1253761 - RNA, 19 nt, Artificial Sequence
  Description of Artificial Sequence: Synthetic oligonucleotide
  Antisense strand to SEQ ID NO: 1253760
uggcauaaaggcauuucaa

SEQ ID NO: 1253762 - RNA, 19 nt, Artificial Sequence
  Description of Artificial Sequence: Synthetic oligonucleotide
  Sense strand starting at position 349 of SEQ ID NO: 1241194
uuagaauacugaguuacca

SEQ ID NO: 1253763 - RNA, 19 nt, Artificial Sequence
  Description of Artificial Sequence: Synthetic oligonucleotide
  Antisense strand to SEQ ID NO: 1253762
ugguaacucaguauucuaa

SEQ ID NO: 1253764 - RNA, 19 nt, Artificial Sequence
  Description of Artificial Sequence: Synthetic oligonucleotide
  Sense strand starting at position 492 of SEQ ID NO: 1241194
cacauaguagaguagguau

SEQ ID NO: 1253765 - RNA, 19 nt, Artificial Sequence
  Description of Artificial Sequence: Synthetic oligonucleotide
  Antisense strand to SEQ ID NO: 1253764
auaccuacucuacuaugug

SEQ ID NO: 1253766 - RNA, 19 nt, Artificial Sequence
  Description of Artificial Sequence: Synthetic oligonucleotide
  Sense strand starting at position 495 of SEQ ID NO: 1241194
auaguagaguagguauagu

SEQ ID NO: 1253767 - RNA, 19 nt, Artificial Sequence
  Description of Artificial Sequence: Synthetic oligonucleotide
  Antisense strand to SEQ ID NO: 1253766
acuauaccuacucuacuau

SEQ ID NO: 1253768 - RNA, 19 nt, Artificial Sequence
  Description of Artificial Sequence: Synthetic oligonucleotide
  Sense strand starting at position 582 of SEQ ID NO: 1241194
agaggaauuggauggcuua

SEQ ID NO: 1253769 - RNA, 19 nt, Artificial Sequence
  Description of Artificial Sequence: Synthetic oligonucleotide
  Antisense strand to SEQ ID NO: 1253768
uaagccauccaauuccucu

SEQ ID NO: 1253770 - RNA, 19 nt, Artificial Sequence
  Description of Artificial Sequence: Synthetic oligonucleotide
  Sense strand starting at position 896 of SEQ ID NO: 1241194
uuuaacaaugcuugagaau

SEQ ID NO: 1253771 - RNA, 19 nt, Artificial Sequence
  Description of Artificial Sequence: Synthetic oligonucleotide
  Antisense strand to SEQ ID NO: 1253770
auucucaagcauuguuaaa

SEQ ID NO: 1253772 - RNA, 19 nt, Artificial Sequence
  Description of Artificial Sequence: Synthetic oligonucleotide
  Sense strand starting at position 956 of SEQ ID NO: 1241194
ucgauuaacugguuuauua

SEQ ID NO: 1253773 - RNA, 19 nt, Artificial Sequence
  Description of Artificial Sequence: Synthetic oligonucleotide
  Antisense strand to SEQ ID NO: 1253772
uaauaaaccaguuaaucga

SEQ ID NO: 1253774 - RNA, 19 nt, Artificial Sequence
  Description of Artificial Sequence: Synthetic oligonucleotide
  Sense strand starting at position 1061 of SEQ ID NO: 1241194
gugaaaugacauugaaggu

SEQ ID NO: 1253775 - RNA, 19 nt, Artificial Sequence
  Description of Artificial Sequence: Synthetic oligonucleotide
  Antisense strand to SEQ ID NO: 1253774
accuucaaugucauuucac

SEQ ID NO: 1253776 - RNA, 19 nt, Artificial Sequence
  Description of Artificial Sequence: Synthetic oligonucleotide
  Sense strand starting at position 1299 of SEQ ID NO: 1241194
gaggcuugcccugaacuaa

SEQ ID NO: 1253777 - RNA, 19 nt, Artificial Sequence
  Description of Artificial Sequence: Synthetic oligonucleotide
  Antisense strand to SEQ ID NO: 1253776
uuaguucagggcaagccuc

SEQ ID NO: 1253778 - RNA, 19 nt, Artificial Sequence
  Description of Artificial Sequence: Synthetic oligonucleotide
  Sense strand starting at position 1605 of SEQ ID NO: 1241194
acagcauuaggaugauaau

SEQ ID NO: 1253779 - RNA, 19 nt, Artificial Sequence
  Description of Artificial Sequence: Synthetic oligonucleotide
  Antisense strand to SEQ ID NO: 1253778
auuaucauccuaaugcugu

SEQ ID NO: 1253780 - RNA, 19 nt, Artificial Sequence
  Description of Artificial Sequence: Synthetic oligonucleotide
  Sense strand starting at position 1808 of SEQ ID NO: 1241194
agccgaaauuaaucuccuu

SEQ ID NO: 1253781 - RNA, 19 nt, Artificial Sequence
  Description of Artificial Sequence: Synthetic oligonucleotide
  Antisense strand to SEQ ID NO: 1253780
aaggagauuaauuucggcu

SEQ ID NO: 1253782 - RNA, 19 nt, Artificial Sequence
  Description of Artificial Sequence: Synthetic oligonucleotide
  Sense strand starting at position 1844 of SEQ ID NO: 1241194
cuaugccgacuugaaauaa

SEQ ID NO: 1253783 - RNA, 19 nt, Artificial Sequence
  Description of Artificial Sequence: Synthetic oligonucleotide
  Antisense strand to SEQ ID NO: 1253782
uuauuucaagucggcauag

SEQ ID NO: 1253784 - RNA, 19 nt, Artificial Sequence
  Description of Artificial Sequence: Synthetic oligonucleotide
  Sense strand starting at position 1867 of SEQ ID NO: 1241194
cugccaccuggguauauaa

SEQ ID NO: 1253785 - RNA, 19 nt, Artificial Sequence
  Description of Artificial Sequence: Synthetic oligonucleotide
  Antisense strand to SEQ ID NO: 1253784
uuauauacccagguggcag

SEQ ID NO: 1253786 - RNA, 19 nt, Artificial Sequence
  Description of Artificial Sequence: Synthetic oligonucleotide
  Sense strand starting at position 1874 of SEQ ID NO: 1241194
cuggguauauaacucaaau

SEQ ID NO: 1253787 - RNA, 19 nt, Artificial Sequence
  Description of Artificial Sequence: Synthetic oligonucleotide
  Antisense strand to SEQ ID NO: 1253786
auuugaguuauauacccag

SEQ ID NO: 1253788 - RNA, 19 nt, Artificial Sequence
  Description of Artificial Sequence: Synthetic oligonucleotide
  Sense strand starting at position 1993 of SEQ ID NO: 1241194
ugggaagugucuucagaac

SEQ ID NO: 1253789 - RNA, 19 nt, Artificial Sequence
  Description of Artificial Sequence: Synthetic oligonucleotide
  Antisense strand to SEQ ID NO: 1253788
guucugaagacacuuccca

SEQ ID NO: 1253790 - RNA, 19 nt, Artificial Sequence
  Description of Artificial Sequence: Synthetic oligonucleotide
  Sense strand starting at position 2008 of SEQ ID NO: 1241194
gaaccugauuggcuaauga

SEQ ID NO: 1253791 - RNA, 19 nt, Artificial Sequence
  Description of Artificial Sequence: Synthetic oligonucleotide
  Antisense strand to SEQ ID NO: 1253790
ucauuagccaaucagguuc

SEQ ID NO: 1253792 - RNA, 19 nt, Artificial Sequence
  Description of Artificial Sequence: Synthetic oligonucleotide
  Sense strand starting at position 2064 of SEQ ID NO: 1241194
gcugaaaugacguaaccca

SEQ ID NO: 1253793 - RNA, 19 nt, Artificial Sequence
  Description of Artificial Sequence: Synthetic oligonucleotide
  Antisense strand to SEQ ID NO: 1253792
uggguuacgucauuucagc

SEQ ID NO: 1253794 - RNA, 19 nt, Artificial Sequence
  Description of Artificial Sequence: Synthetic oligonucleotide
  Sense strand starting at position 2091 of SEQ ID NO: 1241194
cucuuuauggaccagugau

SEQ ID NO: 1253795 - RNA, 19 nt, Artificial Sequence
  Description of Artificial Sequence: Synthetic oligonucleotide
  Antisense strand to SEQ ID NO: 1253794
aucacugguccauaaagag

SEQ ID NO: 1253796 - RNA, 19 nt, Artificial Sequence
  Description of Artificial Sequence: Synthetic oligonucleotide
  Sense strand starting at position 2159 of SEQ ID NO: 1241194
gaguuaauguacuuaggca

SEQ ID NO: 1253797 - RNA, 19 nt, Artificial Sequence
  Description of Artificial Sequence: Synthetic oligonucleotide
  Antisense strand to SEQ ID NO: 1253796
ugccuaaguacauuaacuc

SEQ ID NO: 1253798 - RNA, 19 nt, Artificial Sequence
  Description of Artificial Sequence: Synthetic oligonucleotide
  Sense strand starting at position 2265 of SEQ ID NO: 1241194
guaauuucuuauccuuugu

SEQ ID NO: 1253799 - RNA, 19 nt, Artificial Sequence
  Description of Artificial Sequence: Synthetic oligonucleotide
  Antisense strand to SEQ ID NO: 1253798
acaaaggauaagaaauuac

SEQ ID NO: 1253800 - RNA, 19 nt, Artificial Sequence
  Description of Artificial Sequence: Synthetic oligonucleotide
  Sense strand starting at position 2280 of SEQ ID NO: 1241194
uugugaccucaacaugcuu

SEQ ID NO: 1253801 - RNA, 19 nt, Artificial Sequence
  Description of Artificial Sequence: Synthetic oligonucleotide
  Antisense strand to SEQ ID NO: 1253800
aagcauguugaggucacaa

SEQ ID NO: 1253802 - RNA, 19 nt, Artificial Sequence
  Description of Artificial Sequence: Synthetic oligonucleotide
  Sense strand starting at position 2380 of SEQ ID NO: 1241194
auccaaagcuggccugaua

SEQ ID NO: 1253803 - RNA, 19 nt, Artificial Sequence
  Description of Artificial Sequence: Synthetic oligonucleotide
  Antisense strand to SEQ ID NO: 1253802
uaucaggccagcuuuggau

SEQ ID NO: 1253804 - RNA, 19 nt, Artificial Sequence
  Description of Artificial Sequence: Synthetic oligonucleotide
  Sense strand starting at position 2409 of SEQ ID NO: 1241194
ucagguaaucuuugaacua

SEQ ID NO: 1253805 - RNA, 19 nt, Artificial Sequence
  Description of Artificial Sequence: Synthetic oligonucleotide
  Antisense strand to SEQ ID NO: 1253804
uaguucaaagauuaccuga

SEQ ID NO: 1253806 - RNA, 19 nt, Artificial Sequence
  Description of Artificial Sequence: Synthetic oligonucleotide
  Sense strand starting at position 2425 of SEQ ID NO: 1241194
cuaacaggcuuaguagaua

SEQ ID NO: 1253807 - RNA, 19 nt, Artificial Sequence
  Description of Artificial Sequence: Synthetic oligonucleotide
  Antisense strand to SEQ ID NO: 1253806
uaucuacuaagccuguuag

SEQ ID NO: 1253808 - RNA, 19 nt, Artificial Sequence
  Description of Artificial Sequence: Synthetic oligonucleotide
  Sense strand starting at position 2639 of SEQ ID NO: 1241194
gguacacaguacucaacaa

SEQ ID NO: 1253809 - RNA, 19 nt, Artificial Sequence
  Description of Artificial Sequence: Synthetic oligonucleotide
  Antisense strand to SEQ ID NO: 1253808
uuguugaguacuguguacc

SEQ ID NO: 1253810 - RNA, 19 nt, Artificial Sequence
  Description of Artificial Sequence: Synthetic oligonucleotide
  Sense strand starting at position 2729 of SEQ ID NO: 1241194
gagaucaaaguguacguuu

SEQ ID NO: 1253811 - RNA, 19 nt, Artificial Sequence
  Description of Artificial Sequence: Synthetic oligonucleotide
  Antisense strand to SEQ ID NO: 1253810
aaacguacacuuugaucuc

SEQ ID NO: 1253812 - RNA, 19 nt, Artificial Sequence
  Description of Artificial Sequence: Synthetic oligonucleotide
  Sense strand starting at position 2835 of SEQ ID NO: 1241194
guuaaaguauagguucuua

SEQ ID NO: 1253813 - RNA, 19 nt, Artificial Sequence
  Description of Artificial Sequence: Synthetic oligonucleotide
  Antisense strand to SEQ ID NO: 1253812
uaagaaccuauacuuuaac

SEQ ID NO: 1253814 - RNA, 19 nt, Artificial Sequence
  Description of Artificial Sequence: Synthetic oligonucleotide
  Sense strand starting at position 2845 of SEQ ID NO: 1241194
agguucuuacucuguuaaa

SEQ ID NO: 1253815 - RNA, 19 nt, Artificial Sequence
  Description of Artificial Sequence: Synthetic oligonucleotide
  Antisense strand to SEQ ID NO: 1253814
uuuaacagaguaagaaccu

SEQ ID NO: 1253816 - RNA, 19 nt, Artificial Sequence
  Description of Artificial Sequence: Synthetic oligonucleotide
  Sense strand starting at position 3192 of SEQ ID NO: 1241194
acauguaaugugcaaaugu

SEQ ID NO: 1253817 - RNA, 19 nt, Artificial Sequence
  Description of Artificial Sequence: Synthetic oligonucleotide
  Antisense strand to SEQ ID NO: 1253816
acauuugcacauuacaugu

SEQ ID NO: 1253818 - RNA, 19 nt, Artificial Sequence
  Description of Artificial Sequence: Synthetic oligonucleotide
  Sense strand starting at position 3413 of SEQ ID NO: 1241194
uuguaacuucuagagucaa

SEQ ID NO: 1253819 - RNA, 19 nt, Artificial Sequence
  Description of Artificial Sequence: Synthetic oligonucleotide
  Antisense strand to SEQ ID NO: 1253818
uugacucuagaaguuacaa

SEQ ID NO: 1253820 - RNA, 19 nt, Artificial Sequence
  Description of Artificial Sequence: Synthetic oligonucleotide
  Sense strand starting at position 3506 of SEQ ID NO: 1241194
ccaagaauguaagcacuuu

SEQ ID NO: 1253821 - RNA, 19 nt, Artificial Sequence
  Description of Artificial Sequence: Synthetic oligonucleotide
  Antisense strand to SEQ ID NO: 1253820
aaagugcuuacauucuugg

SEQ ID NO: 1253822 - RNA, 19 nt, Artificial Sequence
  Description of Artificial Sequence: Synthetic oligonucleotide
  Sense strand starting at position 3738 of SEQ ID NO: 1241194
cccuaaaguggcugaaacu

SEQ ID NO: 1253823 - RNA, 19 nt, Artificial Sequence
  Description of Artificial Sequence: Synthetic oligonucleotide
  Antisense strand to SEQ ID NO: 1253822
aguuucagccacuuuaggg

SEQ ID NO: 1253824 - RNA, 19 nt, Artificial Sequence
  Description of Artificial Sequence: Synthetic oligonucleotide
  Sense strand starting at position 3739 of SEQ ID NO: 1241194
ccuaaaguggcugaaacuu

SEQ ID NO: 1253825 - RNA, 19 nt, Artificial Sequence
  Description of Artificial Sequence: Synthetic oligonucleotide
  Antisense strand to SEQ ID NO: 1253824
aaguuucagccacuuuagg

SEQ ID NO: 1253826 - RNA, 19 nt, Artificial Sequence
  Description of Artificial Sequence: Synthetic oligonucleotide
  Sense strand starting at position 3861 of SEQ ID NO: 1241194
gggaacuaguggcuuuaaa

SEQ ID NO: 1253827 - RNA, 19 nt, Artificial Sequence
  Description of Artificial Sequence: Synthetic oligonucleotide
  Antisense strand to SEQ ID NO: 1253826
uuuaaagccacuaguuccc

SEQ ID NO: 1253828 - RNA, 19 nt, Artificial Sequence
  Description of Artificial Sequence: Synthetic oligonucleotide
  Sense strand starting at position 214 of SEQ ID NO: 1241195
uggcucuuccaacaagauu

SEQ ID NO: 1253829 - RNA, 19 nt, Artificial Sequence
  Description of Artificial Sequence: Synthetic oligonucleotide
  Antisense strand to SEQ ID NO: 1253828
aaucuuguuggaagagcca

SEQ ID NO: 1253830 - RNA, 19 nt, Artificial Sequence
  Description of Artificial Sequence: Synthetic oligonucleotide
  Sense strand starting at position 264 of SEQ ID NO: 1241195
ccaagagccaucgaauggu

SEQ ID NO: 1253831 - RNA, 19 nt, Artificial Sequence
  Description of Artificial Sequence: Synthetic oligonucleotide
  Antisense strand to SEQ ID NO: 1253830
accauucgauggcucuugg

SEQ ID NO: 1253832 - RNA, 19 nt, Artificial Sequence
  Description of Artificial Sequence: Synthetic oligonucleotide
  Sense strand starting at position 304 of SEQ ID NO: 1241195
accagauucuagucuucua

SEQ ID NO: 1253833 - RNA, 19 nt, Artificial Sequence
  Description of Artificial Sequence: Synthetic oligonucleotide
  Antisense strand to SEQ ID NO: 1253832
uagaagacuagaaucuggu

SEQ ID NO: 1253834 - RNA, 19 nt, Artificial Sequence
  Description of Artificial Sequence: Synthetic oligonucleotide
  Sense strand starting at position 307 of SEQ ID NO: 1241195
agauucuagucuucuauca

SEQ ID NO: 1253835 - RNA, 19 nt, Artificial Sequence
  Description of Artificial Sequence: Synthetic oligonucleotide
  Antisense strand to SEQ ID NO: 1253834
ugauagaagacuagaaucu

SEQ ID NO: 1253836 - RNA, 19 nt, Artificial Sequence
  Description of Artificial Sequence: Synthetic oligonucleotide
  Sense strand starting at position 315 of SEQ ID NO: 1241195
gucuucuaucauuaacugu

SEQ ID NO: 1253837 - RNA, 19 nt, Artificial Sequence
  Description of Artificial Sequence: Synthetic oligonucleotide
  Antisense strand to SEQ ID NO: 1253836
acaguuaaugauagaagac

SEQ ID NO: 1253838 - RNA, 19 nt, Artificial Sequence
  Description of Artificial Sequence: Synthetic oligonucleotide
  Sense strand starting at position 382 of SEQ ID NO: 1241195
cugcaaauacucugguaua

SEQ ID NO: 1253839 - RNA, 19 nt, Artificial Sequence
  Description of Artificial Sequence: Synthetic oligonucleotide
  Antisense strand to SEQ ID NO: 1253838
uauaccagaguauuugcag

SEQ ID NO: 1253840 - RNA, 19 nt, Artificial Sequence
  Description of Artificial Sequence: Synthetic oligonucleotide
  Sense strand starting at position 908 of SEQ ID NO: 1241195
agggcacuuuaauccaaau

SEQ ID NO: 1253841 - RNA, 19 nt, Artificial Sequence
  Description of Artificial Sequence: Synthetic oligonucleotide
  Antisense strand to SEQ ID NO: 1253840
auuuggauuaaagugcccu

SEQ ID NO: 1253842 - RNA, 19 nt, Artificial Sequence
  Description of Artificial Sequence: Synthetic oligonucleotide
  Sense strand starting at position 1017 of SEQ ID NO: 1241195
cgcugaaagcuccucgcuu

SEQ ID NO: 1253843 - RNA, 19 nt, Artificial Sequence
  Description of Artificial Sequence: Synthetic oligonucleotide
  Antisense strand to SEQ ID NO: 1253842
aagcgaggagcuuucagcg

SEQ ID NO: 1253844 - RNA, 19 nt, Artificial Sequence
  Description of Artificial Sequence: Synthetic oligonucleotide
  Sense strand starting at position 1209 of SEQ ID NO: 1241195
ucagaugacuuagcgaaag

SEQ ID NO: 1253845 - RNA, 19 nt, Artificial Sequence
  Description of Artificial Sequence: Synthetic oligonucleotide
  Antisense strand to SEQ ID NO: 1253844
cuuucgcuaagucaucuga

SEQ ID NO: 1253846 - RNA, 19 nt, Artificial Sequence
  Description of Artificial Sequence: Synthetic oligonucleotide
  Sense strand starting at position 1211 of SEQ ID NO: 1241195
agaugacuuagcgaaagcu

SEQ ID NO: 1253847 - RNA, 19 nt, Artificial Sequence
  Description of Artificial Sequence: Synthetic oligonucleotide
  Antisense strand to SEQ ID NO: 1253846
agcuuucgcuaagucaucu

SEQ ID NO: 1253848 - RNA, 19 nt, Artificial Sequence
  Description of Artificial Sequence: Synthetic oligonucleotide
  Sense strand starting at position 1221 of SEQ ID NO: 1241195
gcgaaagcuccguuuaacu

SEQ ID NO: 1253849 - RNA, 19 nt, Artificial Sequence
  Description of Artificial Sequence: Synthetic oligonucleotide
  Antisense strand to SEQ ID NO: 1253848
aguuaaacggagcuuucgc

SEQ ID NO: 1253850 - RNA, 19 nt, Artificial Sequence
  Description of Artificial Sequence: Synthetic oligonucleotide
  Sense strand starting at position 1255 of SEQ ID NO: 1241195
gggagcauuaccgagccua

SEQ ID NO: 1253851 - RNA, 19 nt, Artificial Sequence
  Description of Artificial Sequence: Synthetic oligonucleotide
  Antisense strand to SEQ ID NO: 1253850
uaggcucgguaaugcuccc

SEQ ID NO: 1253852 - RNA, 19 nt, Artificial Sequence
  Description of Artificial Sequence: Synthetic oligonucleotide
  Sense strand starting at position 1268 of SEQ ID NO: 1241195
agccuaucuugggcagaca

SEQ ID NO: 1253853 - RNA, 19 nt, Artificial Sequence
  Description of Artificial Sequence: Synthetic oligonucleotide
  Antisense strand to SEQ ID NO: 1253852
ugucugcccaagauaggcu

SEQ ID NO: 1253854 - RNA, 19 nt, Artificial Sequence
  Description of Artificial Sequence: Synthetic oligonucleotide
  Sense strand starting at position 1269 of SEQ ID NO: 1241195
gccuaucuugggcagacaa

SEQ ID NO: 1253855 - RNA, 19 nt, Artificial Sequence
  Description of Artificial Sequence: Synthetic oligonucleotide
  Antisense strand to SEQ ID NO: 1253854
uugucugcccaagauaggc

SEQ ID NO: 1253856 - RNA, 19 nt, Artificial Sequence
  Description of Artificial Sequence: Synthetic oligonucleotide
  Sense strand starting at position 1279 of SEQ ID NO: 1241195
ggcagacaaucguuuagga

SEQ ID NO: 1253857 - RNA, 19 nt, Artificial Sequence
  Description of Artificial Sequence: Synthetic oligonucleotide
  Antisense strand to SEQ ID NO: 1253856
uccuaaacgauugucugcc

SEQ ID NO: 1253858 - RNA, 19 nt, Artificial Sequence
  Description of Artificial Sequence: Synthetic oligonucleotide
  Sense strand starting at position 1391 of SEQ ID NO: 1241195
agacgaugucugggcaaga

SEQ ID NO: 1253859 - RNA, 19 nt, Artificial Sequence
  Description of Artificial Sequence: Synthetic oligonucleotide
  Antisense strand to SEQ ID NO: 1253858
ucuugcccagacaucgucu

SEQ ID NO: 1253860 - RNA, 19 nt, Artificial Sequence
  Description of Artificial Sequence: Synthetic oligonucleotide
  Sense strand starting at position 1392 of SEQ ID NO: 1241195
gacgaugucugggcaagaa

SEQ ID NO: 1253861 - RNA, 19 nt, Artificial Sequence
  Description of Artificial Sequence: Synthetic oligonucleotide
  Antisense strand to SEQ ID NO: 1253860
uucuugcccagacaucguc

SEQ ID NO: 1253862 - RNA, 19 nt, Artificial Sequence
  Description of Artificial Sequence: Synthetic oligonucleotide
  Sense strand starting at position 1458 of SEQ ID NO: 1241195
cguuacguggcucuccaaa

SEQ ID NO: 1253863 - RNA, 19 nt, Artificial Sequence
  Description of Artificial Sequence: Synthetic oligonucleotide
  Antisense strand to SEQ ID NO: 1253862
uuuggagagccacguaacg

SEQ ID NO: 1253864 - RNA, 19 nt, Artificial Sequence
  Description of Artificial Sequence: Synthetic oligonucleotide
  Sense strand starting at position 1485 of SEQ ID NO: 1241195
gucggaguacccuagacau

SEQ ID NO: 1253865 - RNA, 19 nt, Artificial Sequence
  Description of Artificial Sequence: Synthetic oligonucleotide
  Antisense strand to SEQ ID NO: 1253864
augucuaggguacuccgac

SEQ ID NO: 1253866 - RNA, 19 nt, Artificial Sequence
  Description of Artificial Sequence: Synthetic oligonucleotide
  Sense strand starting at position 1546 of SEQ ID NO: 1241195
cuaauacgccgcgaaauaa

SEQ ID NO: 1253867 - RNA, 19 nt, Artificial Sequence
  Description of Artificial Sequence: Synthetic oligonucleotide
  Antisense strand to SEQ ID NO: 1253866
uuauuucgcggcguauuag

SEQ ID NO: 1253868 - RNA, 19 nt, Artificial Sequence
  Description of Artificial Sequence: Synthetic oligonucleotide
  Sense strand starting at position 1573 of SEQ ID NO: 1241195
auaugagaagucuguggcu

SEQ ID NO: 1253869 - RNA, 19 nt, Artificial Sequence
  Description of Artificial Sequence: Synthetic oligonucleotide
  Antisense strand to SEQ ID NO: 1253868
agccacagacuucucauau

SEQ ID NO: 1253870 - RNA, 19 nt, Artificial Sequence
  Description of Artificial Sequence: Synthetic oligonucleotide
  Sense strand starting at position 1779 of SEQ ID NO: 1241195
caauguguaccggagguua

SEQ ID NO: 1253871 - RNA, 19 nt, Artificial Sequence
  Description of Artificial Sequence: Synthetic oligonucleotide
  Antisense strand to SEQ ID NO: 1253870
uaaccuccgguacacauug

SEQ ID NO: 1253872 - RNA, 19 nt, Artificial Sequence
  Description of Artificial Sequence: Synthetic oligonucleotide
  Sense strand starting at position 1845 of SEQ ID NO: 1241195
ggcgguuggccauaaccua

SEQ ID NO: 1253873 - RNA, 19 nt, Artificial Sequence
  Description of Artificial Sequence: Synthetic oligonucleotide
  Antisense strand to SEQ ID NO: 1253872
uagguuauggccaaccgcc

SEQ ID NO: 1253874 - RNA, 19 nt, Artificial Sequence
  Description of Artificial Sequence: Synthetic oligonucleotide
  Sense strand starting at position 2054 of SEQ ID NO: 1241195
agaguaggaugccugucaa

SEQ ID NO: 1253875 - RNA, 19 nt, Artificial Sequence
  Description of Artificial Sequence: Synthetic oligonucleotide
  Antisense strand to SEQ ID NO: 1253874
uugacaggcauccuacucu

SEQ ID NO: 1253876 - RNA, 19 nt, Artificial Sequence
  Description of Artificial Sequence: Synthetic oligonucleotide
  Sense strand starting at position 2276 of SEQ ID NO: 1241195
ucgagauucguccaaucaa

SEQ ID NO: 1253877 - RNA, 19 nt, Artificial Sequence
  Description of Artificial Sequence: Synthetic oligonucleotide
  Antisense strand to SEQ ID NO: 1253876
uugauuggacgaaucucga

SEQ ID NO: 1253878 - RNA, 19 nt, Artificial Sequence
  Description of Artificial Sequence: Synthetic oligonucleotide
  Sense strand starting at position 3285 of SEQ ID NO: 1241195
uaggaaauaggucgucuuu

SEQ ID NO: 1253879 - RNA, 19 nt, Artificial Sequence
  Description of Artificial Sequence: Synthetic oligonucleotide
  Antisense strand to SEQ ID NO: 1253878
aaagacgaccuauuuccua

SEQ ID NO: 1253880 - RNA, 19 nt, Artificial Sequence
  Description of Artificial Sequence: Synthetic oligonucleotide
  Sense strand starting at position 3287 of SEQ ID NO: 1241195
ggaaauaggucgucuuucu

SEQ ID NO: 1253881 - RNA, 19 nt, Artificial Sequence
  Description of Artificial Sequence: Synthetic oligonucleotide
  Antisense strand to SEQ ID NO: 1253880
agaaagacgaccuauuucc

SEQ ID NO: 1253882 - RNA, 19 nt, Artificial Sequence
  Description of Artificial Sequence: Synthetic oligonucleotide
  Sense strand starting at position 3377 of SEQ ID NO: 1241195
uuugucauuccggcguuaa

SEQ ID NO: 1253883 - RNA, 19 nt, Artificial Sequence
  Description of Artificial Sequence: Synthetic oligonucleotide
  Antisense strand to SEQ ID NO: 1253882
uuaacgccggaaugacaaa

SEQ ID NO: 1253884 - RNA, 19 nt, Artificial Sequence
  Description of Artificial Sequence: Synthetic oligonucleotide
  Sense strand starting at position 3379 of SEQ ID NO: 1241195
ugucauuccggcguuaacu

SEQ ID NO: 1253885 - RNA, 19 nt, Artificial Sequence
  Description of Artificial Sequence: Synthetic oligonucleotide
  Antisense strand to SEQ ID NO: 1253884
aguuaacgccggaaugaca

SEQ ID NO: 1253886 - RNA, 19 nt, Artificial Sequence
  Description of Artificial Sequence: Synthetic oligonucleotide
  Sense strand starting at position 3444 of SEQ ID NO: 1241195
ccggucuccacuugggaaa

SEQ ID NO: 1253887 - RNA, 19 nt, Artificial Sequence
  Description of Artificial Sequence: Synthetic oligonucleotide
  Antisense strand to SEQ ID NO: 1253886
uuucccaaguggagaccgg

SEQ ID NO: 1253888 - RNA, 19 nt, Artificial Sequence
  Description of Artificial Sequence: Synthetic oligonucleotide
  Sense strand starting at position 3528 of SEQ ID NO: 1241195
agggcauuucaguguugca

SEQ ID NO: 1253889 - RNA, 19 nt, Artificial Sequence
  Description of Artificial Sequence: Synthetic oligonucleotide
  Antisense strand to SEQ ID NO: 1253888
ugcaacacugaaaugcccu

SEQ ID NO: 1253890 - RNA, 19 nt, Artificial Sequence
  Description of Artificial Sequence: Synthetic oligonucleotide
  Sense strand starting at position 3709 of SEQ ID NO: 1241195
ugcugaugaggccacuaua

SEQ ID NO: 1253891 - RNA, 19 nt, Artificial Sequence
  Description of Artificial Sequence: Synthetic oligonucleotide
  Antisense strand to SEQ ID NO: 1253890
uauaguggccucaucagca

SEQ ID NO: 1253892 - RNA, 19 nt, Artificial Sequence
  Description of Artificial Sequence: Synthetic oligonucleotide
  Sense strand starting at position 3725 of SEQ ID NO: 1241195
auaaaugcguuugucagaa

SEQ ID NO: 1253893 - RNA, 19 nt, Artificial Sequence
  Description of Artificial Sequence: Synthetic oligonucleotide
  Antisense strand to SEQ ID NO: 1253892
uucugacaaacgcauuuau

SEQ ID NO: 1253894 - RNA, 19 nt, Artificial Sequence
  Description of Artificial Sequence: Synthetic oligonucleotide
  Sense strand starting at position 3817 of SEQ ID NO: 1241195
uugaaaugaccuugccagu

SEQ ID NO: 1253895 - RNA, 19 nt, Artificial Sequence
  Description of Artificial Sequence: Synthetic oligonucleotide
  Antisense strand to SEQ ID NO: 1253894
acuggcaaggucauuucaa

SEQ ID NO: 1253896 - RNA, 19 nt, Artificial Sequence
  Description of Artificial Sequence: Synthetic oligonucleotide
  Sense strand starting at position 3856 of SEQ ID NO: 1241195
aguaauaaucucggagaag

SEQ ID NO: 1253897 - RNA, 19 nt, Artificial Sequence
  Description of Artificial Sequence: Synthetic oligonucleotide
  Antisense strand to SEQ ID NO: 1253896
cuucuccgagauuauuacu

SEQ ID NO: 1253898 - RNA, 19 nt, Artificial Sequence
  Description of Artificial Sequence: Synthetic oligonucleotide
  Sense strand starting at position 3859 of SEQ ID NO: 1241195
aauaaucucggagaagugu

SEQ ID NO: 1253899 - RNA, 19 nt, Artificial Sequence
  Description of Artificial Sequence: Synthetic oligonucleotide
  Antisense strand to SEQ ID NO: 1253898
acacuucuccgagauuauu

SEQ ID NO: 1253900 - RNA, 19 nt, Artificial Sequence
  Description of Artificial Sequence: Synthetic oligonucleotide
  Sense strand starting at position 3867 of SEQ ID NO: 1241195
cggagaaguguuuauuauu

SEQ ID NO: 1253901 - RNA, 19 nt, Artificial Sequence
  Description of Artificial Sequence: Synthetic oligonucleotide
  Antisense strand to SEQ ID NO: 1253900
aauaauaaacacuucuccg

SEQ ID NO: 1253902 - RNA, 19 nt, Artificial Sequence
  Description of Artificial Sequence: Synthetic oligonucleotide
  Sense strand starting at position 3953 of SEQ ID NO: 1241195
ugccaagacuugcuugaac

SEQ ID NO: 1253903 - RNA, 19 nt, Artificial Sequence
  Description of Artificial Sequence: Synthetic oligonucleotide
  Antisense strand to SEQ ID NO: 1253902
guucaagcaagucuuggca

SEQ ID NO: 1253904 - RNA, 19 nt, Artificial Sequence
  Description of Artificial Sequence: Synthetic oligonucleotide
  Sense strand starting at position 3955 of SEQ ID NO: 1241195
ccaagacuugcuugaaccu

SEQ ID NO: 1253905 - RNA, 19 nt, Artificial Sequence
  Description of Artificial Sequence: Synthetic oligonucleotide
  Antisense strand to SEQ ID NO: 1253904
agguucaagcaagucuugg

SEQ ID NO: 1253906 - RNA, 19 nt, Artificial Sequence
  Description of Artificial Sequence: Synthetic oligonucleotide
  Sense strand starting at position 3975 of SEQ ID NO: 1241195
gcuguauguacuguguuua

SEQ ID NO: 1253907 - RNA, 19 nt, Artificial Sequence
  Description of Artificial Sequence: Synthetic oligonucleotide
  Antisense strand to SEQ ID NO: 1253906
uaaacacaguacauacagc

SEQ ID NO: 1253908 - RNA, 19 nt, Artificial Sequence
  Description of Artificial Sequence: Synthetic oligonucleotide
  Sense strand starting at position 4 of SEQ ID NO: 1241196
ugagacucgucuccaaaga

SEQ ID NO: 1253909 - RNA, 19 nt, Artificial Sequence
  Description of Artificial Sequence: Synthetic oligonucleotide
  Antisense strand to SEQ ID NO: 1253908
ucuuuggagacgagucuca

SEQ ID NO: 1253910 - RNA, 19 nt, Artificial Sequence
  Description of Artificial Sequence: Synthetic oligonucleotide
  Sense strand starting at position 117 of SEQ ID NO: 1241196
gaaaucgugucacugacaa

SEQ ID NO: 1253911 - RNA, 19 nt, Artificial Sequence
  Description of Artificial Sequence: Synthetic oligonucleotide
  Antisense strand to SEQ ID NO: 1253910
uugucagugacacgauuuc

SEQ ID NO: 1253912 - RNA, 19 nt, Artificial Sequence
  Description of Artificial Sequence: Synthetic oligonucleotide
  Sense strand starting at position 191 of SEQ ID NO: 1241196
ggugguucccacggaaaua

SEQ ID NO: 1253913 - RNA, 19 nt, Artificial Sequence
  Description of Artificial Sequence: Synthetic oligonucleotide
  Antisense strand to SEQ ID NO: 1253912
uauuuccgugggaaccacc

SEQ ID NO: 1253914 - RNA, 19 nt, Artificial Sequence
  Description of Artificial Sequence: Synthetic oligonucleotide
  Sense strand starting at position 192 of SEQ ID NO: 1241196
gugguucccacggaaauaa

SEQ ID NO: 1253915 - RNA, 19 nt, Artificial Sequence
  Description of Artificial Sequence: Synthetic oligonucleotide
  Antisense strand to SEQ ID NO: 1253914
uuauuuccgugggaaccac

SEQ ID NO: 1253916 - RNA, 19 nt, Artificial Sequence
  Description of Artificial Sequence: Synthetic oligonucleotide
  Sense strand starting at position 262 of SEQ ID NO: 1241196
caagauaccguguaacauu

SEQ ID NO: 1253917 - RNA, 19 nt, Artificial Sequence
  Description of Artificial Sequence: Synthetic oligonucleotide
  Antisense strand to SEQ ID NO: 1253916
aauguuacacgguaucuug

SEQ ID NO: 1253918 - RNA, 19 nt, Artificial Sequence
  Description of Artificial Sequence: Synthetic oligonucleotide
  Sense strand starting at position 418 of SEQ ID NO: 1241196
ucauuuguuucuucguaua

SEQ ID NO: 1253919 - RNA, 19 nt, Artificial Sequence
  Description of Artificial Sequence: Synthetic oligonucleotide
  Antisense strand to SEQ ID NO: 1253918
uauacgaagaaacaaauga

SEQ ID NO: 1253920 - RNA, 19 nt, Artificial Sequence
  Description of Artificial Sequence: Synthetic oligonucleotide
  Sense strand starting at position 463 of SEQ ID NO: 1241196
uuagaaauuacugguucga

SEQ ID NO: 1253921 - RNA, 19 nt, Artificial Sequence
  Description of Artificial Sequence: Synthetic oligonucleotide
  Antisense strand to SEQ ID NO: 1253920
ucgaaccaguaauuucuaa

SEQ ID NO: 1253922 - RNA, 19 nt, Artificial Sequence
  Description of Artificial Sequence: Synthetic oligonucleotide
  Sense strand starting at position 465 of SEQ ID NO: 1241196
agaaauuacugguucgaac

SEQ ID NO: 1253923 - RNA, 19 nt, Artificial Sequence
  Description of Artificial Sequence: Synthetic oligonucleotide
  Antisense strand to SEQ ID NO: 1253922
guucgaaccaguaauuucu

SEQ ID NO: 1253924 - RNA, 19 nt, Artificial Sequence
  Description of Artificial Sequence: Synthetic oligonucleotide
  Sense strand starting at position 532 of SEQ ID NO: 1241196
auagguuuggccugaacau

SEQ ID NO: 1253925 - RNA, 19 nt, Artificial Sequence
  Description of Artificial Sequence: Synthetic oligonucleotide
  Antisense strand to SEQ ID NO: 1253924
auguucaggccaaaccuau

SEQ ID NO: 1253926 - RNA, 19 nt, Artificial Sequence
  Description of Artificial Sequence: Synthetic oligonucleotide
  Sense strand starting at position 533 of SEQ ID NO: 1241196
uagguuuggccugaacaua

SEQ ID NO: 1253927 - RNA, 19 nt, Artificial Sequence
  Description of Artificial Sequence: Synthetic oligonucleotide
  Antisense strand to SEQ ID NO: 1253926
uauguucaggccaaaccua

SEQ ID NO: 1253928 - RNA, 19 nt, Artificial Sequence
  Description of Artificial Sequence: Synthetic oligonucleotide
  Sense strand starting at position 667 of SEQ ID NO: 1241196
uuaggauccuaauuaucgu

SEQ ID NO: 1253929 - RNA, 19 nt, Artificial Sequence
  Description of Artificial Sequence: Synthetic oligonucleotide
  Antisense strand to SEQ ID NO: 1253928
acgauaauuaggauccuaa

SEQ ID NO: 1253930 - RNA, 19 nt, Artificial Sequence
  Description of Artificial Sequence: Synthetic oligonucleotide
  Sense strand starting at position 670 of SEQ ID NO: 1241196
ggauccuaauuaucguuaa

SEQ ID NO: 1253931 - RNA, 19 nt, Artificial Sequence
  Description of Artificial Sequence: Synthetic oligonucleotide
  Antisense strand to SEQ ID NO: 1253930
uuaacgauaauuaggaucc

SEQ ID NO: 1253932 - RNA, 19 nt, Artificial Sequence
  Description of Artificial Sequence: Synthetic oligonucleotide
  Sense strand starting at position 673 of SEQ ID NO: 1241196
uccuaauuaucguuaaaug

SEQ ID NO: 1253933 - RNA, 19 nt, Artificial Sequence
  Description of Artificial Sequence: Synthetic oligonucleotide
  Antisense strand to SEQ ID NO: 1253932
cauuuaacgauaauuagga

SEQ ID NO: 1253934 - RNA, 19 nt, Artificial Sequence
  Description of Artificial Sequence: Synthetic oligonucleotide
  Sense strand starting at position 674 of SEQ ID NO: 1241196
ccuaauuaucguuaaaugg

SEQ ID NO: 1253935 - RNA, 19 nt, Artificial Sequence
  Description of Artificial Sequence: Synthetic oligonucleotide
  Antisense strand to SEQ ID NO: 1253934
ccauuuaacgauaauuagg

SEQ ID NO: 1253936 - RNA, 19 nt, Artificial Sequence
  Description of Artificial Sequence: Synthetic oligonucleotide
  Sense strand starting at position 681 of SEQ ID NO: 1241196
aucguuaaaugguuuaauc

SEQ ID NO: 1253937 - RNA, 19 nt, Artificial Sequence
  Description of Artificial Sequence: Synthetic oligonucleotide
  Antisense strand to SEQ ID NO: 1253936
gauuaaaccauuuaacgau

SEQ ID NO: 1253938 - RNA, 19 nt, Artificial Sequence
  Description of Artificial Sequence: Synthetic oligonucleotide
  Sense strand starting at position 683 of SEQ ID NO: 1241196
cguuaaaugguuuaaucaa

SEQ ID NO: 1253939 - RNA, 19 nt, Artificial Sequence
  Description of Artificial Sequence: Synthetic oligonucleotide
  Antisense strand to SEQ ID NO: 1253938
uugauuaaaccauuuaacg

SEQ ID NO: 1253940 - RNA, 19 nt, Artificial Sequence
  Description of Artificial Sequence: Synthetic oligonucleotide
  Sense strand starting at position 725 of SEQ ID NO: 1241196
uagguuagcugaccaauga

SEQ ID NO: 1253941 - RNA, 19 nt, Artificial Sequence
  Description of Artificial Sequence: Synthetic oligonucleotide
  Antisense strand to SEQ ID NO: 1253940
ucauuggucagcuaaccua

SEQ ID NO: 1253942 - RNA, 19 nt, Artificial Sequence
  Description of Artificial Sequence: Synthetic oligonucleotide
  Sense strand starting at position 726 of SEQ ID NO: 1241196
agguuagcugaccaaugau

SEQ ID NO: 1253943 - RNA, 19 nt, Artificial Sequence
  Description of Artificial Sequence: Synthetic oligonucleotide
  Antisense strand to SEQ ID NO: 1253942
aucauuggucagcuaaccu

SEQ ID NO: 1253944 - RNA, 19 nt, Artificial Sequence
  Description of Artificial Sequence: Synthetic oligonucleotide
  Sense strand starting at position 729 of SEQ ID NO: 1241196
uuagcugaccaaugauuaa

SEQ ID NO: 1253945 - RNA, 19 nt, Artificial Sequence
  Description of Artificial Sequence: Synthetic oligonucleotide
  Antisense strand to SEQ ID NO: 1253944
uuaaucauuggucagcuaa

SEQ ID NO: 1253946 - RNA, 19 nt, Artificial Sequence
  Description of Artificial Sequence: Synthetic oligonucleotide
  Sense strand starting at position 794 of SEQ ID NO: 1241196
augagaaaguuucuaagug

SEQ ID NO: 1253947 - RNA, 19 nt, Artificial Sequence
  Description of Artificial Sequence: Synthetic oligonucleotide
  Antisense strand to SEQ ID NO: 1253946
cacuuagaaacuuucucau

SEQ ID NO: 1253948 - RNA, 19 nt, Artificial Sequence
  Description of Artificial Sequence: Synthetic oligonucleotide
  Sense strand starting at position 798 of SEQ ID NO: 1241196
gaaaguuucuaagugauag

SEQ ID NO: 1253949 - RNA, 19 nt, Artificial Sequence
  Description of Artificial Sequence: Synthetic oligonucleotide
  Antisense strand to SEQ ID NO: 1253948
cuaucacuuagaaacuuuc

SEQ ID NO: 1253950 - RNA, 19 nt, Artificial Sequence
  Description of Artificial Sequence: Synthetic oligonucleotide
  Sense strand starting at position 808 of SEQ ID NO: 1241196
aagugauagcuccagcuac

SEQ ID NO: 1253951 - RNA, 19 nt, Artificial Sequence
  Description of Artificial Sequence: Synthetic oligonucleotide
  Antisense strand to SEQ ID NO: 1253950
guagcuggagcuaucacuu

SEQ ID NO: 1253952 - RNA, 19 nt, Artificial Sequence
  Description of Artificial Sequence: Synthetic oligonucleotide
  Sense strand starting at position 1194 of SEQ ID NO: 1241196
cagugagugcugcaggaaa

SEQ ID NO: 1253953 - RNA, 19 nt, Artificial Sequence
  Description of Artificial Sequence: Synthetic oligonucleotide
  Antisense strand to SEQ ID NO: 1253952
uuuccugcagcacucacug

SEQ ID NO: 1253954 - RNA, 19 nt, Artificial Sequence
  Description of Artificial Sequence: Synthetic oligonucleotide
  Sense strand starting at position 2397 of SEQ ID NO: 1241196
gcgagugggccgcugagau

SEQ ID NO: 1253955 - RNA, 19 nt, Artificial Sequence
  Description of Artificial Sequence: Synthetic oligonucleotide
  Antisense strand to SEQ ID NO: 1253954
aucucagcggcccacucgc

SEQ ID NO: 1253956 - RNA, 19 nt, Artificial Sequence
  Description of Artificial Sequence: Synthetic oligonucleotide
  Sense strand starting at position 2709 of SEQ ID NO: 1241196
cggcuugucccagcucgaa

SEQ ID NO: 1253957 - RNA, 19 nt, Artificial Sequence
  Description of Artificial Sequence: Synthetic oligonucleotide
  Antisense strand to SEQ ID NO: 1253956
uucgagcugggacaagccg

SEQ ID NO: 1253958 - RNA, 19 nt, Artificial Sequence
  Description of Artificial Sequence: Synthetic oligonucleotide
  Sense strand starting at position 2757 of SEQ ID NO: 1241196
ugacuuuaccgaugagaga

SEQ ID NO: 1253959 - RNA, 19 nt, Artificial Sequence
  Description of Artificial Sequence: Synthetic oligonucleotide
  Antisense strand to SEQ ID NO: 1253958
ucucucaucgguaaaguca

SEQ ID NO: 1253960 - RNA, 19 nt, Artificial Sequence
  Description of Artificial Sequence: Synthetic oligonucleotide
  Sense strand starting at position 2914 of SEQ ID NO: 1241196
gaccaaugccuagguguga

SEQ ID NO: 1253961 - RNA, 19 nt, Artificial Sequence
  Description of Artificial Sequence: Synthetic oligonucleotide
  Antisense strand to SEQ ID NO: 1253960
ucacaccuaggcauugguc

SEQ ID NO: 1253962 - RNA, 19 nt, Artificial Sequence
  Description of Artificial Sequence: Synthetic oligonucleotide
  Sense strand starting at position 2928 of SEQ ID NO: 1241196
ugugacaguuugguaggaa

SEQ ID NO: 1253963 - RNA, 19 nt, Artificial Sequence
  Description of Artificial Sequence: Synthetic oligonucleotide
  Antisense strand to SEQ ID NO: 1253962
uuccuaccaaacugucaca

SEQ ID NO: 1253964 - RNA, 19 nt, Artificial Sequence
  Description of Artificial Sequence: Synthetic oligonucleotide
  Sense strand starting at position 2951 of SEQ ID NO: 1241196
gccggauauuugucuccag

SEQ ID NO: 1253965 - RNA, 19 nt, Artificial Sequence
  Description of Artificial Sequence: Synthetic oligonucleotide
  Antisense strand to SEQ ID NO: 1253964
cuggagacaaauauccggc

SEQ ID NO: 1253966 - RNA, 19 nt, Artificial Sequence
  Description of Artificial Sequence: Synthetic oligonucleotide
  Sense strand starting at position 2971 of SEQ ID NO: 1241196
cuggguuugccuagcgagu

SEQ ID NO: 1253967 - RNA, 19 nt, Artificial Sequence
  Description of Artificial Sequence: Synthetic oligonucleotide
  Antisense strand to SEQ ID NO: 1253966
acucgcuaggcaaacccag

SEQ ID NO: 1253968 - RNA, 19 nt, Artificial Sequence
  Description of Artificial Sequence: Synthetic oligonucleotide
  Sense strand starting at position 2998 of SEQ ID NO: 1241196
uuacuaagauuguugguua

SEQ ID NO: 1253969 - RNA, 19 nt, Artificial Sequence
  Description of Artificial Sequence: Synthetic oligonucleotide
  Antisense strand to SEQ ID NO: 1253968
uaaccaacaaucuuaguaa

SEQ ID NO: 1253970 - RNA, 19 nt, Artificial Sequence
  Description of Artificial Sequence: Synthetic oligonucleotide
  Sense strand starting at position 3001 of SEQ ID NO: 1241196
cuaagauuguugguuaauu

SEQ ID NO: 1253971 - RNA, 19 nt, Artificial Sequence
  Description of Artificial Sequence: Synthetic oligonucleotide
  Antisense strand to SEQ ID NO: 1253970
aauuaaccaacaaucuuag

SEQ ID NO: 1253972 - RNA, 19 nt, Artificial Sequence
  Description of Artificial Sequence: Synthetic oligonucleotide
  Sense strand starting at position 3637 of SEQ ID NO: 1241196
ggaguuguugacuggaaca

SEQ ID NO: 1253973 - RNA, 19 nt, Artificial Sequence
  Description of Artificial Sequence: Synthetic oligonucleotide
  Antisense strand to SEQ ID NO: 1253972
uguuccagucaacaacucc

SEQ ID NO: 1253974 - RNA, 19 nt, Artificial Sequence
  Description of Artificial Sequence: Synthetic oligonucleotide
  Sense strand starting at position 3683 of SEQ ID NO: 1241196
aauguucuaugccuggauu

SEQ ID NO: 1253975 - RNA, 19 nt, Artificial Sequence
  Description of Artificial Sequence: Synthetic oligonucleotide
  Antisense strand to SEQ ID NO: 1253974
aauccaggcauagaacauu

SEQ ID NO: 1253976 - RNA, 19 nt, Artificial Sequence
  Description of Artificial Sequence: Synthetic oligonucleotide
  Sense strand starting at position 3684 of SEQ ID NO: 1241196
auguucuaugccuggauuu

SEQ ID NO: 1253977 - RNA, 19 nt, Artificial Sequence
  Description of Artificial Sequence: Synthetic oligonucleotide
  Antisense strand to SEQ ID NO: 1253976
aaauccaggcauagaacau

SEQ ID NO: 1253978 - RNA, 19 nt, Artificial Sequence
  Description of Artificial Sequence: Synthetic oligonucleotide
  Sense strand starting at position 3756 of SEQ ID NO: 1241196
uuaagaugagugcauguca

SEQ ID NO: 1253979 - RNA, 19 nt, Artificial Sequence
  Description of Artificial Sequence: Synthetic oligonucleotide
  Antisense strand to SEQ ID NO: 1253978
ugacaugcacucaucuuaa

SEQ ID NO: 1253980 - RNA, 19 nt, Artificial Sequence
  Description of Artificial Sequence: Synthetic oligonucleotide
  Sense strand starting at position 3765 of SEQ ID NO: 1241196
gugcaugucacugugugua

SEQ ID NO: 1253981 - RNA, 19 nt, Artificial Sequence
  Description of Artificial Sequence: Synthetic oligonucleotide
  Antisense strand to SEQ ID NO: 1253980
uacacacagugacaugcac

SEQ ID NO: 1253982 - RNA, 19 nt, Artificial Sequence
  Description of Artificial Sequence: Synthetic oligonucleotide
  Sense strand starting at position 3830 of SEQ ID NO: 1241196
ggcguuagaggugagagua

SEQ ID NO: 1253983 - RNA, 19 nt, Artificial Sequence
  Description of Artificial Sequence: Synthetic oligonucleotide
  Antisense strand to SEQ ID NO: 1253982
uacucucaccucuaacgcc

SEQ ID NO: 1253984 - RNA, 19 nt, Artificial Sequence
  Description of Artificial Sequence: Synthetic oligonucleotide
  Sense strand starting at position 3907 of SEQ ID NO: 1241196
gggaacauucuguaucuuc

SEQ ID NO: 1253985 - RNA, 19 nt, Artificial Sequence
  Description of Artificial Sequence: Synthetic oligonucleotide
  Antisense strand to SEQ ID NO: 1253984
gaagauacagaauguuccc

SEQ ID NO: 1253986 - RNA, 19 nt, Artificial Sequence
  Description of Artificial Sequence: Synthetic oligonucleotide
  Sense strand starting at position 3950 of SEQ ID NO: 1241196
gucuguaaauguguauaaa

SEQ ID NO: 1253987 - RNA, 19 nt, Artificial Sequence
  Description of Artificial Sequence: Synthetic oligonucleotide
  Antisense strand to SEQ ID NO: 1253986
uuuauacacauuuacagac

SEQ ID NO: 1253988 - RNA, 19 nt, Artificial Sequence
  Description of Artificial Sequence: Synthetic oligonucleotide
  Sense strand starting at position 123 of SEQ ID NO: 1241197
ggacauguccgacauggca

SEQ ID NO: 1253989 - RNA, 19 nt, Artificial Sequence
  Description of Artificial Sequence: Synthetic oligonucleotide
  Antisense strand to SEQ ID NO: 1253988
ugccaugucggacaugucc

SEQ ID NO: 1253990 - RNA, 19 nt, Artificial Sequence
  Description of Artificial Sequence: Synthetic oligonucleotide
  Sense strand starting at position 332 of SEQ ID NO: 1241197
cccagauucugaucaguag

SEQ ID NO: 1253991 - RNA, 19 nt, Artificial Sequence
  Description of Artificial Sequence: Synthetic oligonucleotide
  Antisense strand to SEQ ID NO: 1253990
cuacugaucagaaucuggg

SEQ ID NO: 1253992 - RNA, 19 nt, Artificial Sequence
  Description of Artificial Sequence: Synthetic oligonucleotide
  Sense strand starting at position 474 of SEQ ID NO: 1241197
ucagauaagcuuugaaaua

SEQ ID NO: 1253993 - RNA, 19 nt, Artificial Sequence
  Description of Artificial Sequence: Synthetic oligonucleotide
  Antisense strand to SEQ ID NO: 1253992
uauuucaaagcuuaucuga

SEQ ID NO: 1253994 - RNA, 19 nt, Artificial Sequence
  Description of Artificial Sequence: Synthetic oligonucleotide
  Sense strand starting at position 519 of SEQ ID NO: 1241197
gagcaaggucugcagucuu

SEQ ID NO: 1253995 - RNA, 19 nt, Artificial Sequence
  Description of Artificial Sequence: Synthetic oligonucleotide
  Antisense strand to SEQ ID NO: 1253994
aagacugcagaccuugcuc

SEQ ID NO: 1253996 - RNA, 19 nt, Artificial Sequence
  Description of Artificial Sequence: Synthetic oligonucleotide
  Sense strand starting at position 526 of SEQ ID NO: 1241197
gucugcagucuugaguacu

SEQ ID NO: 1253997 - RNA, 19 nt, Artificial Sequence
  Description of Artificial Sequence: Synthetic oligonucleotide
  Antisense strand to SEQ ID NO: 1253996
aguacucaagacugcagac

SEQ ID NO: 1253998 - RNA, 19 nt, Artificial Sequence
  Description of Artificial Sequence: Synthetic oligonucleotide
  Sense strand starting at position 576 of SEQ ID NO: 1241197
ccuggaggcuguucaugaa

SEQ ID NO: 1253999 - RNA, 19 nt, Artificial Sequence
  Description of Artificial Sequence: Synthetic oligonucleotide
  Antisense strand to SEQ ID NO: 1253998
uucaugaacagccuccagg

SEQ ID NO: 1254000 - RNA, 19 nt, Artificial Sequence
  Description of Artificial Sequence: Synthetic oligonucleotide
  Sense strand starting at position 742 of SEQ ID NO: 1241197
cccacauagcuaggauuau

SEQ ID NO: 1254001 - RNA, 19 nt, Artificial Sequence
  Description of Artificial Sequence: Synthetic oligonucleotide
  Antisense strand to SEQ ID NO: 1254000
auaauccuagcuauguggg

SEQ ID NO: 1254002 - RNA, 19 nt, Artificial Sequence
  Description of Artificial Sequence: Synthetic oligonucleotide
  Sense strand starting at position 938 of SEQ ID NO: 1241197
uguuacuuggaacgaaaca

SEQ ID NO: 1254003 - RNA, 19 nt, Artificial Sequence
  Description of Artificial Sequence: Synthetic oligonucleotide
  Antisense strand to SEQ ID NO: 1254002
uguuucguuccaaguaaca

SEQ ID NO: 1254004 - RNA, 19 nt, Artificial Sequence
  Description of Artificial Sequence: Synthetic oligonucleotide
  Sense strand starting at position 1055 of SEQ ID NO: 1241197
ggguguaacucacuuugua

SEQ ID NO: 1254005 - RNA, 19 nt, Artificial Sequence
  Description of Artificial Sequence: Synthetic oligonucleotide
  Antisense strand to SEQ ID NO: 1254004
uacaaagugaguuacaccc

SEQ ID NO: 1254006 - RNA, 19 nt, Artificial Sequence
  Description of Artificial Sequence: Synthetic oligonucleotide
  Sense strand starting at position 1063 of SEQ ID NO: 1241197
cucacuuuguauucuggau

SEQ ID NO: 1254007 - RNA, 19 nt, Artificial Sequence
  Description of Artificial Sequence: Synthetic oligonucleotide
  Antisense strand to SEQ ID NO: 1254006
auccagaauacaaagugag

SEQ ID NO: 1254008 - RNA, 19 nt, Artificial Sequence
  Description of Artificial Sequence: Synthetic oligonucleotide
  Sense strand starting at position 1122 of SEQ ID NO: 1241197
agugguuguacguagaaag

SEQ ID NO: 1254009 - RNA, 19 nt, Artificial Sequence
  Description of Artificial Sequence: Synthetic oligonucleotide
  Antisense strand to SEQ ID NO: 1254008
cuuucuacguacaaccacu

SEQ ID NO: 1254010 - RNA, 19 nt, Artificial Sequence
  Description of Artificial Sequence: Synthetic oligonucleotide
  Sense strand starting at position 1123 of SEQ ID NO: 1241197
gugguuguacguagaaagu

SEQ ID NO: 1254011 - RNA, 19 nt, Artificial Sequence
  Description of Artificial Sequence: Synthetic oligonucleotide
  Antisense strand to SEQ ID NO: 1254010
acuuucuacguacaaccac

SEQ ID NO: 1254012 - RNA, 19 nt, Artificial Sequence
  Description of Artificial Sequence: Synthetic oligonucleotide
  Sense strand starting at position 1353 of SEQ ID NO: 1241197
uugcgucugacuucugcaa

SEQ ID NO: 1254013 - RNA, 19 nt, Artificial Sequence
  Description of Artificial Sequence: Synthetic oligonucleotide
  Antisense strand to SEQ ID NO: 1254012
uugcagaagucagacgcaa

SEQ ID NO: 1254014 - RNA, 19 nt, Artificial Sequence
  Description of Artificial Sequence: Synthetic oligonucleotide
  Sense strand starting at position 1357 of SEQ ID NO: 1241197
gucugacuucugcaagugu

SEQ ID NO: 1254015 - RNA, 19 nt, Artificial Sequence
  Description of Artificial Sequence: Synthetic oligonucleotide
  Antisense strand to SEQ ID NO: 1254014
acacuugcagaagucagac

SEQ ID NO: 1254016 - RNA, 19 nt, Artificial Sequence
  Description of Artificial Sequence: Synthetic oligonucleotide
  Sense strand starting at position 2531 of SEQ ID NO: 1241197
aaggcuuccuagguuuaca

SEQ ID NO: 1254017 - RNA, 19 nt, Artificial Sequence
  Description of Artificial Sequence: Synthetic oligonucleotide
  Antisense strand to SEQ ID NO: 1254016
uguaaaccuaggaagccuu

SEQ ID NO: 1254018 - RNA, 19 nt, Artificial Sequence
  Description of Artificial Sequence: Synthetic oligonucleotide
  Sense strand starting at position 2554 of SEQ ID NO: 1241197
agaaauguaacgugaaagu

SEQ ID NO: 1254019 - RNA, 19 nt, Artificial Sequence
  Description of Artificial Sequence: Synthetic oligonucleotide
  Antisense strand to SEQ ID NO: 1254018
acuuucacguuacauuucu

SEQ ID NO: 1254020 - RNA, 19 nt, Artificial Sequence
  Description of Artificial Sequence: Synthetic oligonucleotide
  Sense strand starting at position 2638 of SEQ ID NO: 1241197
ugcaaucauugacuuaagu

SEQ ID NO: 1254021 - RNA, 19 nt, Artificial Sequence
  Description of Artificial Sequence: Synthetic oligonucleotide
  Antisense strand to SEQ ID NO: 1254020
acuuaagucaaugauugca

SEQ ID NO: 1254022 - RNA, 19 nt, Artificial Sequence
  Description of Artificial Sequence: Synthetic oligonucleotide
  Sense strand starting at position 2783 of SEQ ID NO: 1241197
ugaaaugcugucgggaaac

SEQ ID NO: 1254023 - RNA, 19 nt, Artificial Sequence
  Description of Artificial Sequence: Synthetic oligonucleotide
  Antisense strand to SEQ ID NO: 1254022
guuucccgacagcauuuca

SEQ ID NO: 1254024 - RNA, 19 nt, Artificial Sequence
  Description of Artificial Sequence: Synthetic oligonucleotide
  Sense strand starting at position 2785 of SEQ ID NO: 1241197
aaaugcugucgggaaaccu

SEQ ID NO: 1254025 - RNA, 19 nt, Artificial Sequence
  Description of Artificial Sequence: Synthetic oligonucleotide
  Antisense strand to SEQ ID NO: 1254024
agguuucccgacagcauuu

SEQ ID NO: 1254026 - RNA, 19 nt, Artificial Sequence
  Description of Artificial Sequence: Synthetic oligonucleotide
  Sense strand starting at position 2826 of SEQ ID NO: 1241197
ucacauaggucucuaggau

SEQ ID NO: 1254027 - RNA, 19 nt, Artificial Sequence
  Description of Artificial Sequence: Synthetic oligonucleotide
  Antisense strand to SEQ ID NO: 1254026
auccuagagaccuauguga

SEQ ID NO: 1254028 - RNA, 19 nt, Artificial Sequence
  Description of Artificial Sequence: Synthetic oligonucleotide
  Sense strand starting at position 2839 of SEQ ID NO: 1241197
uaggauaaggagcgucuua

SEQ ID NO: 1254029 - RNA, 19 nt, Artificial Sequence
  Description of Artificial Sequence: Synthetic oligonucleotide
  Antisense strand to SEQ ID NO: 1254028
uaagacgcuccuuauccua

SEQ ID NO: 1254030 - RNA, 19 nt, Artificial Sequence
  Description of Artificial Sequence: Synthetic oligonucleotide
  Sense strand starting at position 2942 of SEQ ID NO: 1241197
gucucagugcagugagaaa

SEQ ID NO: 1254031 - RNA, 19 nt, Artificial Sequence
  Description of Artificial Sequence: Synthetic oligonucleotide
  Antisense strand to SEQ ID NO: 1254030
uuucucacugcacugagac

SEQ ID NO: 1254032 - RNA, 19 nt, Artificial Sequence
  Description of Artificial Sequence: Synthetic oligonucleotide
  Sense strand starting at position 2957 of SEQ ID NO: 1241197
gaaagaacccugugaucuc

SEQ ID NO: 1254033 - RNA, 19 nt, Artificial Sequence
  Description of Artificial Sequence: Synthetic oligonucleotide
  Antisense strand to SEQ ID NO: 1254032
gagaucacaggguucuuuc

SEQ ID NO: 1254034 - RNA, 19 nt, Artificial Sequence
  Description of Artificial Sequence: Synthetic oligonucleotide
  Sense strand starting at position 2966 of SEQ ID NO: 1241197
cugugaucucgugggaaag

SEQ ID NO: 1254035 - RNA, 19 nt, Artificial Sequence
  Description of Artificial Sequence: Synthetic oligonucleotide
  Antisense strand to SEQ ID NO: 1254034
cuuucccacgagaucacag

SEQ ID NO: 1254036 - RNA, 19 nt, Artificial Sequence
  Description of Artificial Sequence: Synthetic oligonucleotide
  Sense strand starting at position 2967 of SEQ ID NO: 1241197
ugugaucucgugggaaagu

SEQ ID NO: 1254037 - RNA, 19 nt, Artificial Sequence
  Description of Artificial Sequence: Synthetic oligonucleotide
  Antisense strand to SEQ ID NO: 1254036
acuuucccacgagaucaca

SEQ ID NO: 1254038 - RNA, 19 nt, Artificial Sequence
  Description of Artificial Sequence: Synthetic oligonucleotide
  Sense strand starting at position 3043 of SEQ ID NO: 1241197
cuggcauggucagcagaga

SEQ ID NO: 1254039 - RNA, 19 nt, Artificial Sequence
  Description of Artificial Sequence: Synthetic oligonucleotide
  Antisense strand to SEQ ID NO: 1254038
ucucugcugaccaugccag

SEQ ID NO: 1254040 - RNA, 19 nt, Artificial Sequence
  Description of Artificial Sequence: Synthetic oligonucleotide
  Sense strand starting at position 3044 of SEQ ID NO: 1241197
uggcauggucagcagagaa

SEQ ID NO: 1254041 - RNA, 19 nt, Artificial Sequence
  Description of Artificial Sequence: Synthetic oligonucleotide
  Antisense strand to SEQ ID NO: 1254040
uucucugcugaccaugcca

SEQ ID NO: 1254042 - RNA, 19 nt, Artificial Sequence
  Description of Artificial Sequence: Synthetic oligonucleotide
  Sense strand starting at position 3068 of SEQ ID NO: 1241197
uggaaucugaauugugcuu

SEQ ID NO: 1254043 - RNA, 19 nt, Artificial Sequence
  Description of Artificial Sequence: Synthetic oligonucleotide
  Antisense strand to SEQ ID NO: 1254042
aagcacaauucagauucca

SEQ ID NO: 1254044 - RNA, 19 nt, Artificial Sequence
  Description of Artificial Sequence: Synthetic oligonucleotide
  Sense strand starting at position 3148 of SEQ ID NO: 1241197
acaacaguggcgugauuau

SEQ ID NO: 1254045 - RNA, 19 nt, Artificial Sequence
  Description of Artificial Sequence: Synthetic oligonucleotide
  Antisense strand to SEQ ID NO: 1254044
auaaucacgccacuguugu

SEQ ID NO: 1254046 - RNA, 19 nt, Artificial Sequence
  Description of Artificial Sequence: Synthetic oligonucleotide
  Sense strand starting at position 3182 of SEQ ID NO: 1241197
cgaacucuugugcucgagu

SEQ ID NO: 1254047 - RNA, 19 nt, Artificial Sequence
  Description of Artificial Sequence: Synthetic oligonucleotide
  Antisense strand to SEQ ID NO: 1254046
acucgagcacaagaguucg

SEQ ID NO: 1254048 - RNA, 19 nt, Artificial Sequence
  Description of Artificial Sequence: Synthetic oligonucleotide
  Sense strand starting at position 3185 of SEQ ID NO: 1241197
acucuugugcucgagugau

SEQ ID NO: 1254049 - RNA, 19 nt, Artificial Sequence
  Description of Artificial Sequence: Synthetic oligonucleotide
  Antisense strand to SEQ ID NO: 1254048
aucacucgagcacaagagu

SEQ ID NO: 1254050 - RNA, 19 nt, Artificial Sequence
  Description of Artificial Sequence: Synthetic oligonucleotide
  Sense strand starting at position 3300 of SEQ ID NO: 1241197
gguauugucuuguuacaca

SEQ ID NO: 1254051 - RNA, 19 nt, Artificial Sequence
  Description of Artificial Sequence: Synthetic oligonucleotide
  Antisense strand to SEQ ID NO: 1254050
uguguaacaagacaauacc

SEQ ID NO: 1254052 - RNA, 19 nt, Artificial Sequence
  Description of Artificial Sequence: Synthetic oligonucleotide
  Sense strand starting at position 3409 of SEQ ID NO: 1241197
agaaucacuguugguaaua

SEQ ID NO: 1254053 - RNA, 19 nt, Artificial Sequence
  Description of Artificial Sequence: Synthetic oligonucleotide
  Antisense strand to SEQ ID NO: 1254052
uauuaccaacagugauucu

SEQ ID NO: 1254054 - RNA, 19 nt, Artificial Sequence
  Description of Artificial Sequence: Synthetic oligonucleotide
  Sense strand starting at position 3410 of SEQ ID NO: 1241197
gaaucacuguugguaauag

SEQ ID NO: 1254055 - RNA, 19 nt, Artificial Sequence
  Description of Artificial Sequence: Synthetic oligonucleotide
  Antisense strand to SEQ ID NO: 1254054
cuauuaccaacagugauuc

SEQ ID NO: 1254056 - RNA, 19 nt, Artificial Sequence
  Description of Artificial Sequence: Synthetic oligonucleotide
  Sense strand starting at position 3414 of SEQ ID NO: 1241197
cacuguugguaauagauuu

SEQ ID NO: 1254057 - RNA, 19 nt, Artificial Sequence
  Description of Artificial Sequence: Synthetic oligonucleotide
  Antisense strand to SEQ ID NO: 1254056
aaaucuauuaccaacagug

SEQ ID NO: 1254058 - RNA, 19 nt, Artificial Sequence
  Description of Artificial Sequence: Synthetic oligonucleotide
  Sense strand starting at position 3471 of SEQ ID NO: 1241197
uuagguuacugcccaggua

SEQ ID NO: 1254059 - RNA, 19 nt, Artificial Sequence
  Description of Artificial Sequence: Synthetic oligonucleotide
  Antisense strand to SEQ ID NO: 1254058
uaccugggcaguaaccuaa

SEQ ID NO: 1254060 - RNA, 19 nt, Artificial Sequence
  Description of Artificial Sequence: Synthetic oligonucleotide
  Sense strand starting at position 3472 of SEQ ID NO: 1241197
uagguuacugcccagguaa

SEQ ID NO: 1254061 - RNA, 19 nt, Artificial Sequence
  Description of Artificial Sequence: Synthetic oligonucleotide
  Antisense strand to SEQ ID NO: 1254060
uuaccugggcaguaaccua

SEQ ID NO: 1254062 - RNA, 19 nt, Artificial Sequence
  Description of Artificial Sequence: Synthetic oligonucleotide
  Sense strand starting at position 3513 of SEQ ID NO: 1241197
gugacuaccugagaauuua

SEQ ID NO: 1254063 - RNA, 19 nt, Artificial Sequence
  Description of Artificial Sequence: Synthetic oligonucleotide
  Antisense strand to SEQ ID NO: 1254062
uaaauucucagguagucac

SEQ ID NO: 1254064 - RNA, 19 nt, Artificial Sequence
  Description of Artificial Sequence: Synthetic oligonucleotide
  Sense strand starting at position 3583 of SEQ ID NO: 1241197
ggcuguaucccacauaaag

SEQ ID NO: 1254065 - RNA, 19 nt, Artificial Sequence
  Description of Artificial Sequence: Synthetic oligonucleotide
  Antisense strand to SEQ ID NO: 1254064
cuuuaugugggauacagcc

SEQ ID NO: 1254066 - RNA, 19 nt, Artificial Sequence
  Description of Artificial Sequence: Synthetic oligonucleotide
  Sense strand starting at position 3945 of SEQ ID NO: 1241197
gcuggagugcuguuugcca

SEQ ID NO: 1254067 - RNA, 19 nt, Artificial Sequence
  Description of Artificial Sequence: Synthetic oligonucleotide
  Antisense strand to SEQ ID NO: 1254066
uggcaaacagcacuccagc

SEQ ID NO: 1254068 - RNA, 19 nt, Artificial Sequence
  Description of Artificial Sequence: Synthetic oligonucleotide
  Sense strand starting at position 285 of SEQ ID NO: 1241198
ggcagaugcguugaggcua

SEQ ID NO: 1254069 - RNA, 19 nt, Artificial Sequence
  Description of Artificial Sequence: Synthetic oligonucleotide
  Antisense strand to SEQ ID NO: 1254068
uagccucaacgcaucugcc

SEQ ID NO: 1254070 - RNA, 19 nt, Artificial Sequence
  Description of Artificial Sequence: Synthetic oligonucleotide
  Sense strand starting at position 509 of SEQ ID NO: 1241198
gcugauaaaucucugguca

SEQ ID NO: 1254071 - RNA, 19 nt, Artificial Sequence
  Description of Artificial Sequence: Synthetic oligonucleotide
  Antisense strand to SEQ ID NO: 1254070
ugaccagagauuuaucagc

SEQ ID NO: 1254072 - RNA, 19 nt, Artificial Sequence
  Description of Artificial Sequence: Synthetic oligonucleotide
  Sense strand starting at position 510 of SEQ ID NO: 1241198
cugauaaaucucuggucag

SEQ ID NO: 1254073 - RNA, 19 nt, Artificial Sequence
  Description of Artificial Sequence: Synthetic oligonucleotide
  Antisense strand to SEQ ID NO: 1254072
cugaccagagauuuaucag

SEQ ID NO: 1254074 - RNA, 19 nt, Artificial Sequence
  Description of Artificial Sequence: Synthetic oligonucleotide
  Sense strand starting at position 511 of SEQ ID NO: 1241198
ugauaaaucucuggucagu

SEQ ID NO: 1254075 - RNA, 19 nt, Artificial Sequence
  Description of Artificial Sequence: Synthetic oligonucleotide
  Antisense strand to SEQ ID NO: 1254074
acugaccagagauuuauca

SEQ ID NO: 1254076 - RNA, 19 nt, Artificial Sequence
  Description of Artificial Sequence: Synthetic oligonucleotide
  Sense strand starting at position 513 of SEQ ID NO: 1241198
auaaaucucuggucaguca

SEQ ID NO: 1254077 - RNA, 19 nt, Artificial Sequence
  Description of Artificial Sequence: Synthetic oligonucleotide
  Antisense strand to SEQ ID NO: 1254076
ugacugaccagagauuuau

SEQ ID NO: 1254078 - RNA, 19 nt, Artificial Sequence
  Description of Artificial Sequence: Synthetic oligonucleotide
  Sense strand starting at position 524 of SEQ ID NO: 1241198
gucagucaacucugaguag

SEQ ID NO: 1254079 - RNA, 19 nt, Artificial Sequence
  Description of Artificial Sequence: Synthetic oligonucleotide
  Antisense strand to SEQ ID NO: 1254078
cuacucagaguugacugac

SEQ ID NO: 1254080 - RNA, 19 nt, Artificial Sequence
  Description of Artificial Sequence: Synthetic oligonucleotide
  Sense strand starting at position 525 of SEQ ID NO: 1241198
ucagucaacucugaguaga

SEQ ID NO: 1254081 - RNA, 19 nt, Artificial Sequence
  Description of Artificial Sequence: Synthetic oligonucleotide
  Antisense strand to SEQ ID NO: 1254080
ucuacucagaguugacuga

SEQ ID NO: 1254082 - RNA, 19 nt, Artificial Sequence
  Description of Artificial Sequence: Synthetic oligonucleotide
  Sense strand starting at position 527 of SEQ ID NO: 1241198
agucaacucugaguagaga

SEQ ID NO: 1254083 - RNA, 19 nt, Artificial Sequence
  Description of Artificial Sequence: Synthetic oligonucleotide
  Antisense strand to SEQ ID NO: 1254082
ucucuacucagaguugacu

SEQ ID NO: 1254084 - RNA, 19 nt, Artificial Sequence
  Description of Artificial Sequence: Synthetic oligonucleotide
  Sense strand starting at position 590 of SEQ ID NO: 1241198
ucccaaaucuggucucugu

SEQ ID NO: 1254085 - RNA, 19 nt, Artificial Sequence
  Description of Artificial Sequence: Synthetic oligonucleotide
  Antisense strand to SEQ ID NO: 1254084
acagagaccagauuuggga

SEQ ID NO: 1254086 - RNA, 19 nt, Artificial Sequence
  Description of Artificial Sequence: Synthetic oligonucleotide
  Sense strand starting at position 671 of SEQ ID NO: 1241198
aaauuacggaguugggauu

SEQ ID NO: 1254087 - RNA, 19 nt, Artificial Sequence
  Description of Artificial Sequence: Synthetic oligonucleotide
  Antisense strand to SEQ ID NO: 1254086
aaucccaacuccguaauuu

SEQ ID NO: 1254088 - RNA, 19 nt, Artificial Sequence
  Description of Artificial Sequence: Synthetic oligonucleotide
  Sense strand starting at position 682 of SEQ ID NO: 1241198
uugggauucauggaggugu

SEQ ID NO: 1254089 - RNA, 19 nt, Artificial Sequence
  Description of Artificial Sequence: Synthetic oligonucleotide
  Antisense strand to SEQ ID NO: 1254088
acaccuccaugaaucccaa

SEQ ID NO: 1254090 - RNA, 19 nt, Artificial Sequence
  Description of Artificial Sequence: Synthetic oligonucleotide
  Sense strand starting at position 756 of SEQ ID NO: 1241198
ggcugagagucugugaaag

SEQ ID NO: 1254091 - RNA, 19 nt, Artificial Sequence
  Description of Artificial Sequence: Synthetic oligonucleotide
  Antisense strand to SEQ ID NO: 1254090
cuuucacagacucucagcc

SEQ ID NO: 1254092 - RNA, 19 nt, Artificial Sequence
  Description of Artificial Sequence: Synthetic oligonucleotide
  Sense strand starting at position 758 of SEQ ID NO: 1241198
cugagagucugugaaaguc

SEQ ID NO: 1254093 - RNA, 19 nt, Artificial Sequence
  Description of Artificial Sequence: Synthetic oligonucleotide
  Antisense strand to SEQ ID NO: 1254092
gacuuucacagacucucag

SEQ ID NO: 1254094 - RNA, 19 nt, Artificial Sequence
  Description of Artificial Sequence: Synthetic oligonucleotide
  Sense strand starting at position 989 of SEQ ID NO: 1241198
gggacuguccggcagagaa

SEQ ID NO: 1254095 - RNA, 19 nt, Artificial Sequence
  Description of Artificial Sequence: Synthetic oligonucleotide
  Antisense strand to SEQ ID NO: 1254094
uucucugccggacaguccc

SEQ ID NO: 1254096 - RNA, 19 nt, Artificial Sequence
  Description of Artificial Sequence: Synthetic oligonucleotide
  Sense strand starting at position 991 of SEQ ID NO: 1241198
gacuguccggcagagaaau

SEQ ID NO: 1254097 - RNA, 19 nt, Artificial Sequence
  Description of Artificial Sequence: Synthetic oligonucleotide
  Antisense strand to SEQ ID NO: 1254096
auuucucugccggacaguc

SEQ ID NO: 1254098 - RNA, 19 nt, Artificial Sequence
  Description of Artificial Sequence: Synthetic oligonucleotide
  Sense strand starting at position 1192 of SEQ ID NO: 1241198
ggaacuuaauucugggaga

SEQ ID NO: 1254099 - RNA, 19 nt, Artificial Sequence
  Description of Artificial Sequence: Synthetic oligonucleotide
  Antisense strand to SEQ ID NO: 1254098
ucucccagaauuaaguucc

SEQ ID NO: 1254100 - RNA, 19 nt, Artificial Sequence
  Description of Artificial Sequence: Synthetic oligonucleotide
  Sense strand starting at position 1193 of SEQ ID NO: 1241198
gaacuuaauucugggagaa

SEQ ID NO: 1254101 - RNA, 19 nt, Artificial Sequence
  Description of Artificial Sequence: Synthetic oligonucleotide
  Antisense strand to SEQ ID NO: 1254100
uucucccagaauuaaguuc

SEQ ID NO: 1254102 - RNA, 19 nt, Artificial Sequence
  Description of Artificial Sequence: Synthetic oligonucleotide
  Sense strand starting at position 1195 of SEQ ID NO: 1241198
acuuaauucugggagaagg

SEQ ID NO: 1254103 - RNA, 19 nt, Artificial Sequence
  Description of Artificial Sequence: Synthetic oligonucleotide
  Antisense strand to SEQ ID NO: 1254102
ccuucucccagaauuaagu

SEQ ID NO: 1254104 - RNA, 19 nt, Artificial Sequence
  Description of Artificial Sequence: Synthetic oligonucleotide
  Sense strand starting at position 1373 of SEQ ID NO: 1241198
ucccuuugcucccgaggga

SEQ ID NO: 1254105 - RNA, 19 nt, Artificial Sequence
  Description of Artificial Sequence: Synthetic oligonucleotide
  Antisense strand to SEQ ID NO: 1254104
ucccucgggagcaaaggga

SEQ ID NO: 1254106 - RNA, 19 nt, Artificial Sequence
  Description of Artificial Sequence: Synthetic oligonucleotide
  Sense strand starting at position 1374 of SEQ ID NO: 1241198
cccuuugcucccgagggaa

SEQ ID NO: 1254107 - RNA, 19 nt, Artificial Sequence
  Description of Artificial Sequence: Synthetic oligonucleotide
  Antisense strand to SEQ ID NO: 1254106
uucccucgggagcaaaggg

SEQ ID NO: 1254108 - RNA, 19 nt, Artificial Sequence
  Description of Artificial Sequence: Synthetic oligonucleotide
  Sense strand starting at position 2530 of SEQ ID NO: 1241198
gcagaaggguccagagagu

SEQ ID NO: 1254109 - RNA, 19 nt, Artificial Sequence
  Description of Artificial Sequence: Synthetic oligonucleotide
  Antisense strand to SEQ ID NO: 1254108
acucucuggacccuucugc

SEQ ID NO: 1254110 - RNA, 19 nt, Artificial Sequence
  Description of Artificial Sequence: Synthetic oligonucleotide
  Sense strand starting at position 2618 of SEQ ID NO: 1241198
guggaacccuucuugggaa

SEQ ID NO: 1254111 - RNA, 19 nt, Artificial Sequence
  Description of Artificial Sequence: Synthetic oligonucleotide
  Antisense strand to SEQ ID NO: 1254110
uucccaagaaggguuccac

SEQ ID NO: 1254112 - RNA, 19 nt, Artificial Sequence
  Description of Artificial Sequence: Synthetic oligonucleotide
  Sense strand starting at position 2817 of SEQ ID NO: 1241198
ugccuucccgaaugaggaa

SEQ ID NO: 1254113 - RNA, 19 nt, Artificial Sequence
  Description of Artificial Sequence: Synthetic oligonucleotide
  Antisense strand to SEQ ID NO: 1254112
uuccucauucgggaaggca

SEQ ID NO: 1254114 - RNA, 19 nt, Artificial Sequence
  Description of Artificial Sequence: Synthetic oligonucleotide
  Sense strand starting at position 2830 of SEQ ID NO: 1241198
gaggaagguccacagcuuu

SEQ ID NO: 1254115 - RNA, 19 nt, Artificial Sequence
  Description of Artificial Sequence: Synthetic oligonucleotide
  Antisense strand to SEQ ID NO: 1254114
aaagcuguggaccuuccuc

SEQ ID NO: 1254116 - RNA, 19 nt, Artificial Sequence
  Description of Artificial Sequence: Synthetic oligonucleotide
  Sense strand starting at position 2949 of SEQ ID NO: 1241198
uccagauauccucagaugu

SEQ ID NO: 1254117 - RNA, 19 nt, Artificial Sequence
  Description of Artificial Sequence: Synthetic oligonucleotide
  Antisense strand to SEQ ID NO: 1254116
acaucugaggauaucugga

SEQ ID NO: 1254118 - RNA, 19 nt, Artificial Sequence
  Description of Artificial Sequence: Synthetic oligonucleotide
  Sense strand starting at position 2963 of SEQ ID NO: 1241198
gauguccacgcucagauau

SEQ ID NO: 1254119 - RNA, 19 nt, Artificial Sequence
  Description of Artificial Sequence: Synthetic oligonucleotide
  Antisense strand to SEQ ID NO: 1254118
auaucugagcguggacauc

SEQ ID NO: 1254120 - RNA, 19 nt, Artificial Sequence
  Description of Artificial Sequence: Synthetic oligonucleotide
  Sense strand starting at position 3244 of SEQ ID NO: 1241198
cccggcuguucccaagaga

SEQ ID NO: 1254121 - RNA, 19 nt, Artificial Sequence
  Description of Artificial Sequence: Synthetic oligonucleotide
  Antisense strand to SEQ ID NO: 1254120
ucucuugggaacagccggg

SEQ ID NO: 1254122 - RNA, 19 nt, Artificial Sequence
  Description of Artificial Sequence: Synthetic oligonucleotide
  Sense strand starting at position 3255 of SEQ ID NO: 1241198
ccaagagaaggcuguaagu

SEQ ID NO: 1254123 - RNA, 19 nt, Artificial Sequence
  Description of Artificial Sequence: Synthetic oligonucleotide
  Antisense strand to SEQ ID NO: 1254122
acuuacagccuucucuugg

SEQ ID NO: 1254124 - RNA, 19 nt, Artificial Sequence
  Description of Artificial Sequence: Synthetic oligonucleotide
  Sense strand starting at position 3370 of SEQ ID NO: 1241198
gcucuugccucucagacuu

SEQ ID NO: 1254125 - RNA, 19 nt, Artificial Sequence
  Description of Artificial Sequence: Synthetic oligonucleotide
  Antisense strand to SEQ ID NO: 1254124
aagucugagaggcaagagc

SEQ ID NO: 1254126 - RNA, 19 nt, Artificial Sequence
  Description of Artificial Sequence: Synthetic oligonucleotide
  Sense strand starting at position 3382 of SEQ ID NO: 1241198
cagacuuaaugggaaauga

SEQ ID NO: 1254127 - RNA, 19 nt, Artificial Sequence
  Description of Artificial Sequence: Synthetic oligonucleotide
  Antisense strand to SEQ ID NO: 1254126
ucauuucccauuaagucug

SEQ ID NO: 1254128 - RNA, 19 nt, Artificial Sequence
  Description of Artificial Sequence: Synthetic oligonucleotide
  Sense strand starting at position 3411 of SEQ ID NO: 1241198
cgggcuaagucccaagaga

SEQ ID NO: 1254129 - RNA, 19 nt, Artificial Sequence
  Description of Artificial Sequence: Synthetic oligonucleotide
  Antisense strand to SEQ ID NO: 1254128
ucucuugggacuuagcccg

SEQ ID NO: 1254130 - RNA, 19 nt, Artificial Sequence
  Description of Artificial Sequence: Synthetic oligonucleotide
  Sense strand starting at position 3472 of SEQ ID NO: 1241198
uuccauuugguauguaugu

SEQ ID NO: 1254131 - RNA, 19 nt, Artificial Sequence
  Description of Artificial Sequence: Synthetic oligonucleotide
  Antisense strand to SEQ ID NO: 1254130
acauacauaccaaauggaa

SEQ ID NO: 1254132 - RNA, 19 nt, Artificial Sequence
  Description of Artificial Sequence: Synthetic oligonucleotide
  Sense strand starting at position 3473 of SEQ ID NO: 1241198
uccauuugguauguaugua

SEQ ID NO: 1254133 - RNA, 19 nt, Artificial Sequence
  Description of Artificial Sequence: Synthetic oligonucleotide
  Antisense strand to SEQ ID NO: 1254132
uacauacauaccaaaugga

SEQ ID NO: 1254134 - RNA, 19 nt, Artificial Sequence
  Description of Artificial Sequence: Synthetic oligonucleotide
  Sense strand starting at position 3478 of SEQ ID NO: 1241198
uugguauguauguagggau

SEQ ID NO: 1254135 - RNA, 19 nt, Artificial Sequence
  Description of Artificial Sequence: Synthetic oligonucleotide
  Antisense strand to SEQ ID NO: 1254134
aucccuacauacauaccaa

SEQ ID NO: 1254136 - RNA, 19 nt, Artificial Sequence
  Description of Artificial Sequence: Synthetic oligonucleotide
  Sense strand starting at position 3491 of SEQ ID NO: 1241198
agggauaggugaugugaaa

SEQ ID NO: 1254137 - RNA, 19 nt, Artificial Sequence
  Description of Artificial Sequence: Synthetic oligonucleotide
  Antisense strand to SEQ ID NO: 1254136
uuucacaucaccuaucccu

SEQ ID NO: 1254138 - RNA, 19 nt, Artificial Sequence
  Description of Artificial Sequence: Synthetic oligonucleotide
  Sense strand starting at position 3783 of SEQ ID NO: 1241198
gacugugcucccgacguuu

SEQ ID NO: 1254139 - RNA, 19 nt, Artificial Sequence
  Description of Artificial Sequence: Synthetic oligonucleotide
  Antisense strand to SEQ ID NO: 1254138
aaacgucgggagcacaguc

SEQ ID NO: 1254140 - RNA, 19 nt, Artificial Sequence
  Description of Artificial Sequence: Synthetic oligonucleotide
  Sense strand starting at position 3914 of SEQ ID NO: 1241198
cgcucugccucuuucugaa

SEQ ID NO: 1254141 - RNA, 19 nt, Artificial Sequence
  Description of Artificial Sequence: Synthetic oligonucleotide
  Antisense strand to SEQ ID NO: 1254140
uucagaaagaggcagagcg

SEQ ID NO: 1254142 - RNA, 19 nt, Artificial Sequence
  Description of Artificial Sequence: Synthetic oligonucleotide
  Sense strand starting at position 3918 of SEQ ID NO: 1241198
cugccucuuucugaacgau

SEQ ID NO: 1254143 - RNA, 19 nt, Artificial Sequence
  Description of Artificial Sequence: Synthetic oligonucleotide
  Antisense strand to SEQ ID NO: 1254142
aucguucagaaagaggcag

SEQ ID NO: 1254144 - RNA, 19 nt, Artificial Sequence
  Description of Artificial Sequence: Synthetic oligonucleotide
  Sense strand starting at position 3968 of SEQ ID NO: 1241198
cagcucaguccuggucaca

SEQ ID NO: 1254145 - RNA, 19 nt, Artificial Sequence
  Description of Artificial Sequence: Synthetic oligonucleotide
  Antisense strand to SEQ ID NO: 1254144
ugugaccaggacugagcug

SEQ ID NO: 1254146 - RNA, 19 nt, Artificial Sequence
  Description of Artificial Sequence: Synthetic oligonucleotide
  Sense strand starting at position 127 of SEQ ID NO: 1241199
guggcuagaaccuguaauc

SEQ ID NO: 1254147 - RNA, 19 nt, Artificial Sequence
  Description of Artificial Sequence: Synthetic oligonucleotide
  Antisense strand to SEQ ID NO: 1254146
gauuacagguucuagccac

SEQ ID NO: 1254148 - RNA, 19 nt, Artificial Sequence
  Description of Artificial Sequence: Synthetic oligonucleotide
  Sense strand starting at position 342 of SEQ ID NO: 1241199
gucaucuucugauuccaga

SEQ ID NO: 1254149 - RNA, 19 nt, Artificial Sequence
  Description of Artificial Sequence: Synthetic oligonucleotide
  Antisense strand to SEQ ID NO: 1254148
ucuggaaucagaagaugac

SEQ ID NO: 1254150 - RNA, 19 nt, Artificial Sequence
  Description of Artificial Sequence: Synthetic oligonucleotide
  Sense strand starting at position 362 of SEQ ID NO: 1241199
acuucuugauggccacaau

SEQ ID NO: 1254151 - RNA, 19 nt, Artificial Sequence
  Description of Artificial Sequence: Synthetic oligonucleotide
  Antisense strand to SEQ ID NO: 1254150
auuguggccaucaagaagu

SEQ ID NO: 1254152 - RNA, 19 nt, Artificial Sequence
  Description of Artificial Sequence: Synthetic oligonucleotide
  Sense strand starting at position 384 of SEQ ID NO: 1241199
acccgugucccuguuucua

SEQ ID NO: 1254153 - RNA, 19 nt, Artificial Sequence
  Description of Artificial Sequence: Synthetic oligonucleotide
  Antisense strand to SEQ ID NO: 1254152
uagaaacagggacacgggu

SEQ ID NO: 1254154 - RNA, 19 nt, Artificial Sequence
  Description of Artificial Sequence: Synthetic oligonucleotide
  Sense strand starting at position 491 of SEQ ID NO: 1241199
ggaucuucagccgagaaug

SEQ ID NO: 1254155 - RNA, 19 nt, Artificial Sequence
  Description of Artificial Sequence: Synthetic oligonucleotide
  Antisense strand to SEQ ID NO: 1254154
cauucucggcugaagaucc

SEQ ID NO: 1254156 - RNA, 19 nt, Artificial Sequence
  Description of Artificial Sequence: Synthetic oligonucleotide
  Sense strand starting at position 992 of SEQ ID NO: 1241199
ggaguaacagccuagaguu

SEQ ID NO: 1254157 - RNA, 19 nt, Artificial Sequence
  Description of Artificial Sequence: Synthetic oligonucleotide
  Antisense strand to SEQ ID NO: 1254156
aacucuaggcuguuacucc

SEQ ID NO: 1254158 - RNA, 19 nt, Artificial Sequence
  Description of Artificial Sequence: Synthetic oligonucleotide
  Sense strand starting at position 1040 of SEQ ID NO: 1241199
cccguuaaauacccuguaa

SEQ ID NO: 1254159 - RNA, 19 nt, Artificial Sequence
  Description of Artificial Sequence: Synthetic oligonucleotide
  Antisense strand to SEQ ID NO: 1254158
uuacaggguauuuaacggg

SEQ ID NO: 1254160 - RNA, 19 nt, Artificial Sequence
  Description of Artificial Sequence: Synthetic oligonucleotide
  Sense strand starting at position 1042 of SEQ ID NO: 1241199
cguuaaauacccuguaagu

SEQ ID NO: 1254161 - RNA, 19 nt, Artificial Sequence
  Description of Artificial Sequence: Synthetic oligonucleotide
  Antisense strand to SEQ ID NO: 1254160
acuuacaggguauuuaacg

SEQ ID NO: 1254162 - RNA, 19 nt, Artificial Sequence
  Description of Artificial Sequence: Synthetic oligonucleotide
  Sense strand starting at position 1044 of SEQ ID NO: 1241199
uuaaauacccuguaaguua

SEQ ID NO: 1254163 - RNA, 19 nt, Artificial Sequence
  Description of Artificial Sequence: Synthetic oligonucleotide
  Antisense strand to SEQ ID NO: 1254162
uaacuuacaggguauuuaa

SEQ ID NO: 1254164 - RNA, 19 nt, Artificial Sequence
  Description of Artificial Sequence: Synthetic oligonucleotide
  Sense strand starting at position 1086 of SEQ ID NO: 1241199
cgagccgagcuguaagaua

SEQ ID NO: 1254165 - RNA, 19 nt, Artificial Sequence
  Description of Artificial Sequence: Synthetic oligonucleotide
  Antisense strand to SEQ ID NO: 1254164
uaucuuacagcucggcucg

SEQ ID NO: 1254166 - RNA, 19 nt, Artificial Sequence
  Description of Artificial Sequence: Synthetic oligonucleotide
  Sense strand starting at position 1091 of SEQ ID NO: 1241199
cgagcuguaagauaagcua

SEQ ID NO: 1254167 - RNA, 19 nt, Artificial Sequence
  Description of Artificial Sequence: Synthetic oligonucleotide
  Antisense strand to SEQ ID NO: 1254166
uagcuuaucuuacagcucg

SEQ ID NO: 1254168 - RNA, 19 nt, Artificial Sequence
  Description of Artificial Sequence: Synthetic oligonucleotide
  Sense strand starting at position 1094 of SEQ ID NO: 1241199
gcuguaagauaagcuaucu

SEQ ID NO: 1254169 - RNA, 19 nt, Artificial Sequence
  Description of Artificial Sequence: Synthetic oligonucleotide
  Antisense strand to SEQ ID NO: 1254168
agauagcuuaucuuacagc

SEQ ID NO: 1254170 - RNA, 19 nt, Artificial Sequence
  Description of Artificial Sequence: Synthetic oligonucleotide
  Sense strand starting at position 1496 of SEQ ID NO: 1241199
ccgcgaucccuaugggaac

SEQ ID NO: 1254171 - RNA, 19 nt, Artificial Sequence
  Description of Artificial Sequence: Synthetic oligonucleotide
  Antisense strand to SEQ ID NO: 1254170
guucccauagggaucgcgg

SEQ ID NO: 1254172 - RNA, 19 nt, Artificial Sequence
  Description of Artificial Sequence: Synthetic oligonucleotide
  Sense strand starting at position 1881 of SEQ ID NO: 1241199
cggcgucagugaaugaaug

SEQ ID NO: 1254173 - RNA, 19 nt, Artificial Sequence
  Description of Artificial Sequence: Synthetic oligonucleotide
  Antisense strand to SEQ ID NO: 1254172
cauucauucacugacgccg

SEQ ID NO: 1254174 - RNA, 19 nt, Artificial Sequence
  Description of Artificial Sequence: Synthetic oligonucleotide
  Sense strand starting at position 1882 of SEQ ID NO: 1241199
ggcgucagugaaugaauga

SEQ ID NO: 1254175 - RNA, 19 nt, Artificial Sequence
  Description of Artificial Sequence: Synthetic oligonucleotide
  Antisense strand to SEQ ID NO: 1254174
ucauucauucacugacgcc

SEQ ID NO: 1254176 - RNA, 19 nt, Artificial Sequence
  Description of Artificial Sequence: Synthetic oligonucleotide
  Sense strand starting at position 1933 of SEQ ID NO: 1241199
ugcagaaauugcuuaaagu

SEQ ID NO: 1254177 - RNA, 19 nt, Artificial Sequence
  Description of Artificial Sequence: Synthetic oligonucleotide
  Antisense strand to SEQ ID NO: 1254176
acuuuaagcaauuucugca

SEQ ID NO: 1254178 - RNA, 19 nt, Artificial Sequence
  Description of Artificial Sequence: Synthetic oligonucleotide
  Sense strand starting at position 1934 of SEQ ID NO: 1241199
gcagaaauugcuuaaaguc

SEQ ID NO: 1254179 - RNA, 19 nt, Artificial Sequence
  Description of Artificial Sequence: Synthetic oligonucleotide
  Antisense strand to SEQ ID NO: 1254178
gacuuuaagcaauuucugc

SEQ ID NO: 1254180 - RNA, 19 nt, Artificial Sequence
  Description of Artificial Sequence: Synthetic oligonucleotide
  Sense strand starting at position 1942 of SEQ ID NO: 1241199
ugcuuaaagucagcacuuu

SEQ ID NO: 1254181 - RNA, 19 nt, Artificial Sequence
  Description of Artificial Sequence: Synthetic oligonucleotide
  Antisense strand to SEQ ID NO: 1254180
aaagugcugacuuuaagca

SEQ ID NO: 1254182 - RNA, 19 nt, Artificial Sequence
  Description of Artificial Sequence: Synthetic oligonucleotide
  Sense strand starting at position 1953 of SEQ ID NO: 1241199
agcacuuuccucuacagua

SEQ ID NO: 1254183 - RNA, 19 nt, Artificial Sequence
  Description of Artificial Sequence: Synthetic oligonucleotide
  Antisense strand to SEQ ID NO: 1254182
uacuguagaggaaagugcu

SEQ ID NO: 1254184 - RNA, 19 nt, Artificial Sequence
  Description of Artificial Sequence: Synthetic oligonucleotide
  Sense strand starting at position 2029 of SEQ ID NO: 1241199
cuuacagagucugccuuaa

SEQ ID NO: 1254185 - RNA, 19 nt, Artificial Sequence
  Description of Artificial Sequence: Synthetic oligonucleotide
  Antisense strand to SEQ ID NO: 1254184
uuaaggcagacucuguaag

SEQ ID NO: 1254186 - RNA, 19 nt, Artificial Sequence
  Description of Artificial Sequence: Synthetic oligonucleotide
  Sense strand starting at position 2033 of SEQ ID NO: 1241199
cagagucugccuuaauugu

SEQ ID NO: 1254187 - RNA, 19 nt, Artificial Sequence
  Description of Artificial Sequence: Synthetic oligonucleotide
  Antisense strand to SEQ ID NO: 1254186
acaauuaaggcagacucug

SEQ ID NO: 1254188 - RNA, 19 nt, Artificial Sequence
  Description of Artificial Sequence: Synthetic oligonucleotide
  Sense strand starting at position 2095 of SEQ ID NO: 1241199
gcucaaaucugagcacacu

SEQ ID NO: 1254189 - RNA, 19 nt, Artificial Sequence
  Description of Artificial Sequence: Synthetic oligonucleotide
  Antisense strand to SEQ ID NO: 1254188
agugugcucagauuugagc

SEQ ID NO: 1254190 - RNA, 19 nt, Artificial Sequence
  Description of Artificial Sequence: Synthetic oligonucleotide
  Sense strand starting at position 2145 of SEQ ID NO: 1241199
gaaaucaugucaguugcca

SEQ ID NO: 1254191 - RNA, 19 nt, Artificial Sequence
  Description of Artificial Sequence: Synthetic oligonucleotide
  Antisense strand to SEQ ID NO: 1254190
uggcaacugacaugauuuc

SEQ ID NO: 1254192 - RNA, 19 nt, Artificial Sequence
  Description of Artificial Sequence: Synthetic oligonucleotide
  Sense strand starting at position 2167 of SEQ ID NO: 1241199
ggcagagugccucacacuu

SEQ ID NO: 1254193 - RNA, 19 nt, Artificial Sequence
  Description of Artificial Sequence: Synthetic oligonucleotide
  Antisense strand to SEQ ID NO: 1254192
aagugugaggcacucugcc

SEQ ID NO: 1254194 - RNA, 19 nt, Artificial Sequence
  Description of Artificial Sequence: Synthetic oligonucleotide
  Sense strand starting at position 2223 of SEQ ID NO: 1241199
gguacuuguccuggaagca

SEQ ID NO: 1254195 - RNA, 19 nt, Artificial Sequence
  Description of Artificial Sequence: Synthetic oligonucleotide
  Antisense strand to SEQ ID NO: 1254194
ugcuuccaggacaaguacc

SEQ ID NO: 1254196 - RNA, 19 nt, Artificial Sequence
  Description of Artificial Sequence: Synthetic oligonucleotide
  Sense strand starting at position 2224 of SEQ ID NO: 1241199
guacuuguccuggaagcag

SEQ ID NO: 1254197 - RNA, 19 nt, Artificial Sequence
  Description of Artificial Sequence: Synthetic oligonucleotide
  Antisense strand to SEQ ID NO: 1254196
cugcuuccaggacaaguac

SEQ ID NO: 1254198 - RNA, 19 nt, Artificial Sequence
  Description of Artificial Sequence: Synthetic oligonucleotide
  Sense strand starting at position 2283 of SEQ ID NO: 1241199
gggccaaucccgugucaag

SEQ ID NO: 1254199 - RNA, 19 nt, Artificial Sequence
  Description of Artificial Sequence: Synthetic oligonucleotide
  Antisense strand to SEQ ID NO: 1254198
cuugacacgggauuggccc

SEQ ID NO: 1254200 - RNA, 19 nt, Artificial Sequence
  Description of Artificial Sequence: Synthetic oligonucleotide
  Sense strand starting at position 2405 of SEQ ID NO: 1241199
agagguggucugugaacag

SEQ ID NO: 1254201 - RNA, 19 nt, Artificial Sequence
  Description of Artificial Sequence: Synthetic oligonucleotide
  Antisense strand to SEQ ID NO: 1254200
cuguucacagaccaccucu

SEQ ID NO: 1254202 - RNA, 19 nt, Artificial Sequence
  Description of Artificial Sequence: Synthetic oligonucleotide
  Sense strand starting at position 2409 of SEQ ID NO: 1241199
guggucugugaacagaaau

SEQ ID NO: 1254203 - RNA, 19 nt, Artificial Sequence
  Description of Artificial Sequence: Synthetic oligonucleotide
  Antisense strand to SEQ ID NO: 1254202
auuucuguucacagaccac

SEQ ID NO: 1254204 - RNA, 19 nt, Artificial Sequence
  Description of Artificial Sequence: Synthetic oligonucleotide
  Sense strand starting at position 2421 of SEQ ID NO: 1241199
cagaaauuguuugcaaaug

SEQ ID NO: 1254205 - RNA, 19 nt, Artificial Sequence
  Description of Artificial Sequence: Synthetic oligonucleotide
  Antisense strand to SEQ ID NO: 1254204
cauuugcaaacaauuucug

SEQ ID NO: 1254206 - RNA, 19 nt, Artificial Sequence
  Description of Artificial Sequence: Synthetic oligonucleotide
  Sense strand starting at position 2585 of SEQ ID NO: 1241199
cccagaugacaauguaagu

SEQ ID NO: 1254207 - RNA, 19 nt, Artificial Sequence
  Description of Artificial Sequence: Synthetic oligonucleotide
  Antisense strand to SEQ ID NO: 1254206
acuuacauugucaucuggg

SEQ ID NO: 1254208 - RNA, 19 nt, Artificial Sequence
  Description of Artificial Sequence: Synthetic oligonucleotide
  Sense strand starting at position 2656 of SEQ ID NO: 1241199
guuccugaccucuagaaac

SEQ ID NO: 1254209 - RNA, 19 nt, Artificial Sequence
  Description of Artificial Sequence: Synthetic oligonucleotide
  Antisense strand to SEQ ID NO: 1254208
guuucuagaggucaggaac

SEQ ID NO: 1254210 - RNA, 19 nt, Artificial Sequence
  Description of Artificial Sequence: Synthetic oligonucleotide
  Sense strand starting at position 2673 of SEQ ID NO: 1241199
acugaaauauguuugcuau

SEQ ID NO: 1254211 - RNA, 19 nt, Artificial Sequence
  Description of Artificial Sequence: Synthetic oligonucleotide
  Antisense strand to SEQ ID NO: 1254210
auagcaaacauauuucagu

SEQ ID NO: 1254212 - RNA, 19 nt, Artificial Sequence
  Description of Artificial Sequence: Synthetic oligonucleotide
  Sense strand starting at position 2674 of SEQ ID NO: 1241199
cugaaauauguuugcuauu

SEQ ID NO: 1254213 - RNA, 19 nt, Artificial Sequence
  Description of Artificial Sequence: Synthetic oligonucleotide
  Antisense strand to SEQ ID NO: 1254212
aauagcaaacauauuucag

SEQ ID NO: 1254214 - RNA, 19 nt, Artificial Sequence
  Description of Artificial Sequence: Synthetic oligonucleotide
  Sense strand starting at position 2949 of SEQ ID NO: 1241199
guuaucacugcucacugua

SEQ ID NO: 1254215 - RNA, 19 nt, Artificial Sequence
  Description of Artificial Sequence: Synthetic oligonucleotide
  Antisense strand to SEQ ID NO: 1254214
uacagugagcagugauaac

SEQ ID NO: 1254216 - RNA, 19 nt, Artificial Sequence
  Description of Artificial Sequence: Synthetic oligonucleotide
  Sense strand starting at position 3009 of SEQ ID NO: 1241199
aggccugaguagcuagaau

SEQ ID NO: 1254217 - RNA, 19 nt, Artificial Sequence
  Description of Artificial Sequence: Synthetic oligonucleotide
  Antisense strand to SEQ ID NO: 1254216
auucuagcuacucaggccu

SEQ ID NO: 1254218 - RNA, 19 nt, Artificial Sequence
  Description of Artificial Sequence: Synthetic oligonucleotide
  Sense strand starting at position 3064 of SEQ ID NO: 1241199
uguugauacggugaauuau

SEQ ID NO: 1254219 - RNA, 19 nt, Artificial Sequence
  Description of Artificial Sequence: Synthetic oligonucleotide
  Antisense strand to SEQ ID NO: 1254218
auaauucaccguaucaaca

SEQ ID NO: 1254220 - RNA, 19 nt, Artificial Sequence
  Description of Artificial Sequence: Synthetic oligonucleotide
  Sense strand starting at position 3264 of SEQ ID NO: 1241199
ggauaaugcugaucucaga

SEQ ID NO: 1254221 - RNA, 19 nt, Artificial Sequence
  Description of Artificial Sequence: Synthetic oligonucleotide
  Antisense strand to SEQ ID NO: 1254220
ucugagaucagcauuaucc

SEQ ID NO: 1254222 - RNA, 19 nt, Artificial Sequence
  Description of Artificial Sequence: Synthetic oligonucleotide
  Sense strand starting at position 3290 of SEQ ID NO: 1241199
uugggaaguguuuaucuuc

SEQ ID NO: 1254223 - RNA, 19 nt, Artificial Sequence
  Description of Artificial Sequence: Synthetic oligonucleotide
  Antisense strand to SEQ ID NO: 1254222
gaagauaaacacuucccaa

SEQ ID NO: 1254224 - RNA, 19 nt, Artificial Sequence
  Description of Artificial Sequence: Synthetic oligonucleotide
  Sense strand starting at position 3293 of SEQ ID NO: 1241199
ggaaguguuuaucuucccu

SEQ ID NO: 1254225 - RNA, 19 nt, Artificial Sequence
  Description of Artificial Sequence: Synthetic oligonucleotide
  Antisense strand to SEQ ID NO: 1254224
agggaagauaaacacuucc

SEQ ID NO: 1254226 - RNA, 19 nt, Artificial Sequence
  Description of Artificial Sequence: Synthetic oligonucleotide
  Sense strand starting at position 120 of SEQ ID NO: 1241200
gggagcuaucacuguuaau

SEQ ID NO: 1254227 - RNA, 19 nt, Artificial Sequence
  Description of Artificial Sequence: Synthetic oligonucleotide
  Antisense strand to SEQ ID NO: 1254226
auuaacagugauagcuccc

SEQ ID NO: 1254228 - RNA, 19 nt, Artificial Sequence
  Description of Artificial Sequence: Synthetic oligonucleotide
  Sense strand starting at position 208 of SEQ ID NO: 1241200
aagaguaucuuucugcaag

SEQ ID NO: 1254229 - RNA, 19 nt, Artificial Sequence
  Description of Artificial Sequence: Synthetic oligonucleotide
  Antisense strand to SEQ ID NO: 1254228
cuugcagaaagauacucuu

SEQ ID NO: 1254230 - RNA, 19 nt, Artificial Sequence
  Description of Artificial Sequence: Synthetic oligonucleotide
  Sense strand starting at position 210 of SEQ ID NO: 1241200
gaguaucuuucugcaagaa

SEQ ID NO: 1254231 - RNA, 19 nt, Artificial Sequence
  Description of Artificial Sequence: Synthetic oligonucleotide
  Antisense strand to SEQ ID NO: 1254230
uucuugcagaaagauacuc

SEQ ID NO: 1254232 - RNA, 19 nt, Artificial Sequence
  Description of Artificial Sequence: Synthetic oligonucleotide
  Sense strand starting at position 211 of SEQ ID NO: 1241200
aguaucuuucugcaagaaa

SEQ ID NO: 1254233 - RNA, 19 nt, Artificial Sequence
  Description of Artificial Sequence: Synthetic oligonucleotide
  Antisense strand to SEQ ID NO: 1254232
uuucuugcagaaagauacu

SEQ ID NO: 1254234 - RNA, 19 nt, Artificial Sequence
  Description of Artificial Sequence: Synthetic oligonucleotide
  Sense strand starting at position 428 of SEQ ID NO: 1241200
ggaagcaucuccucucaau

SEQ ID NO: 1254235 - RNA, 19 nt, Artificial Sequence
  Description of Artificial Sequence: Synthetic oligonucleotide
  Antisense strand to SEQ ID NO: 1254234
auugagaggagaugcuucc

SEQ ID NO: 1254236 - RNA, 19 nt, Artificial Sequence
  Description of Artificial Sequence: Synthetic oligonucleotide
  Sense strand starting at position 451 of SEQ ID NO: 1241200
aauauccuguugguuaaga

SEQ ID NO: 1254237 - RNA, 19 nt, Artificial Sequence
  Description of Artificial Sequence: Synthetic oligonucleotide
  Antisense strand to SEQ ID NO: 1254236
ucuuaaccaacaggauauu

SEQ ID NO: 1254238 - RNA, 19 nt, Artificial Sequence
  Description of Artificial Sequence: Synthetic oligonucleotide
  Sense strand starting at position 452 of SEQ ID NO: 1241200
auauccuguugguuaagaa

SEQ ID NO: 1254239 - RNA, 19 nt, Artificial Sequence
  Description of Artificial Sequence: Synthetic oligonucleotide
  Antisense strand to SEQ ID NO: 1254238
uucuuaaccaacaggauau

SEQ ID NO: 1254240 - RNA, 19 nt, Artificial Sequence
  Description of Artificial Sequence: Synthetic oligonucleotide
  Sense strand starting at position 545 of SEQ ID NO: 1241200
uuagguuccuuaucuagaa

SEQ ID NO: 1254241 - RNA, 19 nt, Artificial Sequence
  Description of Artificial Sequence: Synthetic oligonucleotide
  Antisense strand to SEQ ID NO: 1254240
uucuagauaaggaaccuaa

SEQ ID NO: 1254242 - RNA, 19 nt, Artificial Sequence
  Description of Artificial Sequence: Synthetic oligonucleotide
  Sense strand starting at position 549 of SEQ ID NO: 1241200
guuccuuaucuagaaguga

SEQ ID NO: 1254243 - RNA, 19 nt, Artificial Sequence
  Description of Artificial Sequence: Synthetic oligonucleotide
  Antisense strand to SEQ ID NO: 1254242
ucacuucuagauaaggaac

SEQ ID NO: 1254244 - RNA, 19 nt, Artificial Sequence
  Description of Artificial Sequence: Synthetic oligonucleotide
  Sense strand starting at position 574 of SEQ ID NO: 1241200
acacuuauccaugggcaca

SEQ ID NO: 1254245 - RNA, 19 nt, Artificial Sequence
  Description of Artificial Sequence: Synthetic oligonucleotide
  Antisense strand to SEQ ID NO: 1254244
ugugcccauggauaagugu

SEQ ID NO: 1254246 - RNA, 19 nt, Artificial Sequence
  Description of Artificial Sequence: Synthetic oligonucleotide
  Sense strand starting at position 596 of SEQ ID NO: 1241200
uuuguagagugaucuggag

SEQ ID NO: 1254247 - RNA, 19 nt, Artificial Sequence
  Description of Artificial Sequence: Synthetic oligonucleotide
  Antisense strand to SEQ ID NO: 1254246
cuccagaucacucuacaaa

SEQ ID NO: 1254248 - RNA, 19 nt, Artificial Sequence
  Description of Artificial Sequence: Synthetic oligonucleotide
  Sense strand starting at position 598 of SEQ ID NO: 1241200
uguagagugaucuggagaa

SEQ ID NO: 1254249 - RNA, 19 nt, Artificial Sequence
  Description of Artificial Sequence: Synthetic oligonucleotide
  Antisense strand to SEQ ID NO: 1254248
uucuccagaucacucuaca

SEQ ID NO: 1254250 - RNA, 19 nt, Artificial Sequence
  Description of Artificial Sequence: Synthetic oligonucleotide
  Sense strand starting at position 692 of SEQ ID NO: 1241200
gucacauaguaguuauaca

SEQ ID NO: 1254251 - RNA, 19 nt, Artificial Sequence
  Description of Artificial Sequence: Synthetic oligonucleotide
  Antisense strand to SEQ ID NO: 1254250
uguauaacuacuaugugac

SEQ ID NO: 1254252 - RNA, 19 nt, Artificial Sequence
  Description of Artificial Sequence: Synthetic oligonucleotide
  Sense strand starting at position 699 of SEQ ID NO: 1241200
aguaguuauacaggucaga

SEQ ID NO: 1254253 - RNA, 19 nt, Artificial Sequence
  Description of Artificial Sequence: Synthetic oligonucleotide
  Antisense strand to SEQ ID NO: 1254252
ucugaccuguauaacuacu

SEQ ID NO: 1254254 - RNA, 19 nt, Artificial Sequence
  Description of Artificial Sequence: Synthetic oligonucleotide
  Sense strand starting at position 803 of SEQ ID NO: 1241200
cacagaaguucuguaaagu

SEQ ID NO: 1254255 - RNA, 19 nt, Artificial Sequence
  Description of Artificial Sequence: Synthetic oligonucleotide
  Antisense strand to SEQ ID NO: 1254254
acuuuacagaacuucugug

SEQ ID NO: 1254256 - RNA, 19 nt, Artificial Sequence
  Description of Artificial Sequence: Synthetic oligonucleotide
  Sense strand starting at position 821 of SEQ ID NO: 1241200
uagucucuccauuagcgaa

SEQ ID NO: 1254257 - RNA, 19 nt, Artificial Sequence
  Description of Artificial Sequence: Synthetic oligonucleotide
  Antisense strand to SEQ ID NO: 1254256
uucgcuaauggagagacua

SEQ ID NO: 1254258 - RNA, 19 nt, Artificial Sequence
  Description of Artificial Sequence: Synthetic oligonucleotide
  Sense strand starting at position 1124 of SEQ ID NO: 1241200
gaugaugcucagcaguaaa

SEQ ID NO: 1254259 - RNA, 19 nt, Artificial Sequence
  Description of Artificial Sequence: Synthetic oligonucleotide
  Antisense strand to SEQ ID NO: 1254258
uuuacugcugagcaucauc

SEQ ID NO: 1254260 - RNA, 19 nt, Artificial Sequence
  Description of Artificial Sequence: Synthetic oligonucleotide
  Sense strand starting at position 1142 of SEQ ID NO: 1241200
auacauaugagguguaaug

SEQ ID NO: 1254261 - RNA, 19 nt, Artificial Sequence
  Description of Artificial Sequence: Synthetic oligonucleotide
  Antisense strand to SEQ ID NO: 1254260
cauuacaccucauauguau

SEQ ID NO: 1254262 - RNA, 19 nt, Artificial Sequence
  Description of Artificial Sequence: Synthetic oligonucleotide
  Sense strand starting at position 1156 of SEQ ID NO: 1241200
uaaugagaaucugugagcu

SEQ ID NO: 1254263 - RNA, 19 nt, Artificial Sequence
  Description of Artificial Sequence: Synthetic oligonucleotide
  Antisense strand to SEQ ID NO: 1254262
agcucacagauucucauua

SEQ ID NO: 1254264 - RNA, 19 nt, Artificial Sequence
  Description of Artificial Sequence: Synthetic oligonucleotide
  Sense strand starting at position 1194 of SEQ ID NO: 1241200
gguaaauguuaauucucuu

SEQ ID NO: 1254265 - RNA, 19 nt, Artificial Sequence
  Description of Artificial Sequence: Synthetic oligonucleotide
  Antisense strand to SEQ ID NO: 1254264
aagagaauuaacauuuacc

SEQ ID NO: 1254266 - RNA, 19 nt, Artificial Sequence
  Description of Artificial Sequence: Synthetic oligonucleotide
  Sense strand starting at position 1208 of SEQ ID NO: 1241200
cucuuaauagacugaguau

SEQ ID NO: 1254267 - RNA, 19 nt, Artificial Sequence
  Description of Artificial Sequence: Synthetic oligonucleotide
  Antisense strand to SEQ ID NO: 1254266
auacucagucuauuaagag

SEQ ID NO: 1254268 - RNA, 19 nt, Artificial Sequence
  Description of Artificial Sequence: Synthetic oligonucleotide
  Sense strand starting at position 1447 of SEQ ID NO: 1241200
uagugacuugugcacagau

SEQ ID NO: 1254269 - RNA, 19 nt, Artificial Sequence
  Description of Artificial Sequence: Synthetic oligonucleotide
  Antisense strand to SEQ ID NO: 1254268
aucugugcacaagucacua

SEQ ID NO: 1254270 - RNA, 19 nt, Artificial Sequence
  Description of Artificial Sequence: Synthetic oligonucleotide
  Sense strand starting at position 1449 of SEQ ID NO: 1241200
gugacuugugcacagauau

SEQ ID NO: 1254271 - RNA, 19 nt, Artificial Sequence
  Description of Artificial Sequence: Synthetic oligonucleotide
  Antisense strand to SEQ ID NO: 1254270
auaucugugcacaagucac

SEQ ID NO: 1254272 - RNA, 19 nt, Artificial Sequence
  Description of Artificial Sequence: Synthetic oligonucleotide
  Sense strand starting at position 1469 of SEQ ID NO: 1241200
ccauuugugucacugaagu

SEQ ID NO: 1254273 - RNA, 19 nt, Artificial Sequence
  Description of Artificial Sequence: Synthetic oligonucleotide
  Antisense strand to SEQ ID NO: 1254272
acuucagugacacaaaugg

SEQ ID NO: 1254274 - RNA, 19 nt, Artificial Sequence
  Description of Artificial Sequence: Synthetic oligonucleotide
  Sense strand starting at position 1822 of SEQ ID NO: 1241200
gucaucuucugauuccaga

SEQ ID NO: 1254275 - RNA, 19 nt, Artificial Sequence
  Description of Artificial Sequence: Synthetic oligonucleotide
  Antisense strand to SEQ ID NO: 1254274
ucuggaaucagaagaugac

SEQ ID NO: 1254276 - RNA, 19 nt, Artificial Sequence
  Description of Artificial Sequence: Synthetic oligonucleotide
  Sense strand starting at position 1842 of SEQ ID NO: 1241200
acuucuugauggccacaau

SEQ ID NO: 1254277 - RNA, 19 nt, Artificial Sequence
  Description of Artificial Sequence: Synthetic oligonucleotide
  Antisense strand to SEQ ID NO: 1254276
auuguggccaucaagaagu

SEQ ID NO: 1254278 - RNA, 19 nt, Artificial Sequence
  Description of Artificial Sequence: Synthetic oligonucleotide
  Sense strand starting at position 1864 of SEQ ID NO: 1241200
acccgugucccuguuucua

SEQ ID NO: 1254279 - RNA, 19 nt, Artificial Sequence
  Description of Artificial Sequence: Synthetic oligonucleotide
  Antisense strand to SEQ ID NO: 1254278
uagaaacagggacacgggu

SEQ ID NO: 1254280 - RNA, 19 nt, Artificial Sequence
  Description of Artificial Sequence: Synthetic oligonucleotide
  Sense strand starting at position 1971 of SEQ ID NO: 1241200
ggaucuucagccgagaaug

SEQ ID NO: 1254281 - RNA, 19 nt, Artificial Sequence
  Description of Artificial Sequence: Synthetic oligonucleotide
  Antisense strand to SEQ ID NO: 1254280
cauucucggcugaagaucc

SEQ ID NO: 1254282 - RNA, 19 nt, Artificial Sequence
  Description of Artificial Sequence: Synthetic oligonucleotide
  Sense strand starting at position 2472 of SEQ ID NO: 1241200
ggaguaacagccuagaguu

SEQ ID NO: 1254283 - RNA, 19 nt, Artificial Sequence
  Description of Artificial Sequence: Synthetic oligonucleotide
  Antisense strand to SEQ ID NO: 1254282
aacucuaggcuguuacucc

SEQ ID NO: 1254284 - RNA, 19 nt, Artificial Sequence
  Description of Artificial Sequence: Synthetic oligonucleotide
  Sense strand starting at position 2524 of SEQ ID NO: 1241200
uuaaauacccuguaaguua

SEQ ID NO: 1254285 - RNA, 19 nt, Artificial Sequence
  Description of Artificial Sequence: Synthetic oligonucleotide
  Antisense strand to SEQ ID NO: 1254284
uaacuuacaggguauuuaa

SEQ ID NO: 1254286 - RNA, 19 nt, Artificial Sequence
  Description of Artificial Sequence: Synthetic oligonucleotide
  Sense strand starting at position 2571 of SEQ ID NO: 1241200
cgagcuguaagauaagcua

SEQ ID NO: 1254287 - RNA, 19 nt, Artificial Sequence
  Description of Artificial Sequence: Synthetic oligonucleotide
  Antisense strand to SEQ ID NO: 1254286
uagcuuaucuuacagcucg

SEQ ID NO: 1254288 - RNA, 19 nt, Artificial Sequence
  Description of Artificial Sequence: Synthetic oligonucleotide
  Sense strand starting at position 3361 of SEQ ID NO: 1241200
cggcgucagugaaugaaug

SEQ ID NO: 1254289 - RNA, 19 nt, Artificial Sequence
  Description of Artificial Sequence: Synthetic oligonucleotide
  Antisense strand to SEQ ID NO: 1254288
cauucauucacugacgccg

SEQ ID NO: 1254290 - RNA, 19 nt, Artificial Sequence
  Description of Artificial Sequence: Synthetic oligonucleotide
  Sense strand starting at position 3414 of SEQ ID NO: 1241200
gcagaaauugcuuaaaguc

SEQ ID NO: 1254291 - RNA, 19 nt, Artificial Sequence
  Description of Artificial Sequence: Synthetic oligonucleotide
  Antisense strand to SEQ ID NO: 1254290
gacuuuaagcaauuucugc

SEQ ID NO: 1254292 - RNA, 19 nt, Artificial Sequence
  Description of Artificial Sequence: Synthetic oligonucleotide
  Sense strand starting at position 3433 of SEQ ID NO: 1241200
agcacuuuccucuacagua

SEQ ID NO: 1254293 - RNA, 19 nt, Artificial Sequence
  Description of Artificial Sequence: Synthetic oligonucleotide
  Antisense strand to SEQ ID NO: 1254292
uacuguagaggaaagugcu

SEQ ID NO: 1254294 - RNA, 19 nt, Artificial Sequence
  Description of Artificial Sequence: Synthetic oligonucleotide
  Sense strand starting at position 3513 of SEQ ID NO: 1241200
cagagucugccuuaauugu

SEQ ID NO: 1254295 - RNA, 19 nt, Artificial Sequence
  Description of Artificial Sequence: Synthetic oligonucleotide
  Antisense strand to SEQ ID NO: 1254294
acaauuaaggcagacucug

SEQ ID NO: 1254296 - RNA, 19 nt, Artificial Sequence
  Description of Artificial Sequence: Synthetic oligonucleotide
  Sense strand starting at position 3575 of SEQ ID NO: 1241200
gcucaaaucugagcacacu

SEQ ID NO: 1254297 - RNA, 19 nt, Artificial Sequence
  Description of Artificial Sequence: Synthetic oligonucleotide
  Antisense strand to SEQ ID NO: 1254296
agugugcucagauuugagc

SEQ ID NO: 1254298 - RNA, 19 nt, Artificial Sequence
  Description of Artificial Sequence: Synthetic oligonucleotide
  Sense strand starting at position 3704 of SEQ ID NO: 1241200
guacuuguccuggaagcag

SEQ ID NO: 1254299 - RNA, 19 nt, Artificial Sequence
  Description of Artificial Sequence: Synthetic oligonucleotide
  Antisense strand to SEQ ID NO: 1254298
cugcuuccaggacaaguac

SEQ ID NO: 1254300 - RNA, 19 nt, Artificial Sequence
  Description of Artificial Sequence: Synthetic oligonucleotide
  Sense strand starting at position 3885 of SEQ ID NO: 1241200
agagguggucugugaacag

SEQ ID NO: 1254301 - RNA, 19 nt, Artificial Sequence
  Description of Artificial Sequence: Synthetic oligonucleotide
  Antisense strand to SEQ ID NO: 1254300
cuguucacagaccaccucu

SEQ ID NO: 1254302 - RNA, 19 nt, Artificial Sequence
  Description of Artificial Sequence: Synthetic oligonucleotide
  Sense strand starting at position 3889 of SEQ ID NO: 1241200
guggucugugaacagaaau

SEQ ID NO: 1254303 - RNA, 19 nt, Artificial Sequence
  Description of Artificial Sequence: Synthetic oligonucleotide
  Antisense strand to SEQ ID NO: 1254302
auuucuguucacagaccac

SEQ ID NO: 1254304 - RNA, 19 nt, Artificial Sequence
  Description of Artificial Sequence: Synthetic oligonucleotide
  Sense strand starting at position 3901 of SEQ ID NO: 1241200
cagaaauuguuugcaaaug

SEQ ID NO: 1254305 - RNA, 19 nt, Artificial Sequence
  Description of Artificial Sequence: Synthetic oligonucleotide
  Antisense strand to SEQ ID NO: 1254304
cauuugcaaacaauuucug

SEQ ID NO: 1254306 - RNA, 19 nt, Artificial Sequence
  Description of Artificial Sequence: Synthetic oligonucleotide
  Sense strand starting at position 9 of SEQ ID NO: 1241201
uuguguauugaggaacugu

SEQ ID NO: 1254307 - RNA, 19 nt, Artificial Sequence
  Description of Artificial Sequence: Synthetic oligonucleotide
  Antisense strand to SEQ ID NO: 1254306
acaguuccucaauacacaa

SEQ ID NO: 1254308 - RNA, 19 nt, Artificial Sequence
  Description of Artificial Sequence: Synthetic oligonucleotide
  Sense strand starting at position 122 of SEQ ID NO: 1241201
ggugguguaggugaaauaa

SEQ ID NO: 1254309 - RNA, 19 nt, Artificial Sequence
  Description of Artificial Sequence: Synthetic oligonucleotide
  Antisense strand to SEQ ID NO: 1254308
uuauuucaccuacaccacc

SEQ ID NO: 1254310 - RNA, 19 nt, Artificial Sequence
  Description of Artificial Sequence: Synthetic oligonucleotide
  Sense strand starting at position 694 of SEQ ID NO: 1241201
gggauuagcaauuguaagc

SEQ ID NO: 1254311 - RNA, 19 nt, Artificial Sequence
  Description of Artificial Sequence: Synthetic oligonucleotide
  Antisense strand to SEQ ID NO: 1254310
gcuuacaauugcuaauccc

SEQ ID NO: 1254312 - RNA, 19 nt, Artificial Sequence
  Description of Artificial Sequence: Synthetic oligonucleotide
  Sense strand starting at position 737 of SEQ ID NO: 1241201
agcuauauucuacaacggu

SEQ ID NO: 1254313 - RNA, 19 nt, Artificial Sequence
  Description of Artificial Sequence: Synthetic oligonucleotide
  Antisense strand to SEQ ID NO: 1254312
accguuguagaauauagcu

SEQ ID NO: 1254314 - RNA, 19 nt, Artificial Sequence
  Description of Artificial Sequence: Synthetic oligonucleotide
  Sense strand starting at position 1202 of SEQ ID NO: 1241201
uaggaaauauggguuaggu

SEQ ID NO: 1254315 - RNA, 19 nt, Artificial Sequence
  Description of Artificial Sequence: Synthetic oligonucleotide
  Antisense strand to SEQ ID NO: 1254314
accuaacccauauuuccua

SEQ ID NO: 1254316 - RNA, 19 nt, Artificial Sequence
  Description of Artificial Sequence: Synthetic oligonucleotide
  Sense strand starting at position 2092 of SEQ ID NO: 1241201
gcugacugguuccuagaag

SEQ ID NO: 1254317 - RNA, 19 nt, Artificial Sequence
  Description of Artificial Sequence: Synthetic oligonucleotide
  Antisense strand to SEQ ID NO: 1254316
cuucuaggaaccagucagc

SEQ ID NO: 1254318 - RNA, 19 nt, Artificial Sequence
  Description of Artificial Sequence: Synthetic oligonucleotide
  Sense strand starting at position 2834 of SEQ ID NO: 1241201
uuuaucguuccagaaacua

SEQ ID NO: 1254319 - RNA, 19 nt, Artificial Sequence
  Description of Artificial Sequence: Synthetic oligonucleotide
  Antisense strand to SEQ ID NO: 1254318
uaguuucuggaacgauaaa

SEQ ID NO: 1254320 - RNA, 19 nt, Artificial Sequence
  Description of Artificial Sequence: Synthetic oligonucleotide
  Sense strand starting at position 2855 of SEQ ID NO: 1241201
caaguuacaguguagauca

SEQ ID NO: 1254321 - RNA, 19 nt, Artificial Sequence
  Description of Artificial Sequence: Synthetic oligonucleotide
  Antisense strand to SEQ ID NO: 1254320
ugaucuacacuguaacuug

SEQ ID NO: 1254322 - RNA, 19 nt, Artificial Sequence
  Description of Artificial Sequence: Synthetic oligonucleotide
  Sense strand starting at position 2857 of SEQ ID NO: 1241201
aguuacaguguagaucaau

SEQ ID NO: 1254323 - RNA, 19 nt, Artificial Sequence
  Description of Artificial Sequence: Synthetic oligonucleotide
  Antisense strand to SEQ ID NO: 1254322
auugaucuacacuguaacu

SEQ ID NO: 1254324 - RNA, 19 nt, Artificial Sequence
  Description of Artificial Sequence: Synthetic oligonucleotide
  Sense strand starting at position 2863 of SEQ ID NO: 1241201
aguguagaucaauauuccu

SEQ ID NO: 1254325 - RNA, 19 nt, Artificial Sequence
  Description of Artificial Sequence: Synthetic oligonucleotide
  Antisense strand to SEQ ID NO: 1254324
aggaauauugaucuacacu

SEQ ID NO: 1254326 - RNA, 19 nt, Artificial Sequence
  Description of Artificial Sequence: Synthetic oligonucleotide
  Sense strand starting at position 2901 of SEQ ID NO: 1241201
aauuauauugugugaaagg

SEQ ID NO: 1254327 - RNA, 19 nt, Artificial Sequence
  Description of Artificial Sequence: Synthetic oligonucleotide
  Antisense strand to SEQ ID NO: 1254326
ccuuucacacaauauaauu

SEQ ID NO: 1254328 - RNA, 19 nt, Artificial Sequence
  Description of Artificial Sequence: Synthetic oligonucleotide
  Sense strand starting at position 2934 of SEQ ID NO: 1241201
ccagguaagauaggucuaa

SEQ ID NO: 1254329 - RNA, 19 nt, Artificial Sequence
  Description of Artificial Sequence: Synthetic oligonucleotide
  Antisense strand to SEQ ID NO: 1254328
uuagaccuaucuuaccugg

SEQ ID NO: 1254330 - RNA, 19 nt, Artificial Sequence
  Description of Artificial Sequence: Synthetic oligonucleotide
  Sense strand starting at position 2995 of SEQ ID NO: 1241201
gugaguauuucuccgccuu

SEQ ID NO: 1254331 - RNA, 19 nt, Artificial Sequence
  Description of Artificial Sequence: Synthetic oligonucleotide
  Antisense strand to SEQ ID NO: 1254330
aaggcggagaaauacucac

SEQ ID NO: 1254332 - RNA, 19 nt, Artificial Sequence
  Description of Artificial Sequence: Synthetic oligonucleotide
  Sense strand starting at position 2996 of SEQ ID NO: 1241201
ugaguauuucuccgccuuc

SEQ ID NO: 1254333 - RNA, 19 nt, Artificial Sequence
  Description of Artificial Sequence: Synthetic oligonucleotide
  Antisense strand to SEQ ID NO: 1254332
gaaggcggagaaauacuca

SEQ ID NO: 1254334 - RNA, 19 nt, Artificial Sequence
  Description of Artificial Sequence: Synthetic oligonucleotide
  Sense strand starting at position 2997 of SEQ ID NO: 1241201
gaguauuucuccgccuucu

SEQ ID NO: 1254335 - RNA, 19 nt, Artificial Sequence
  Description of Artificial Sequence: Synthetic oligonucleotide
  Antisense strand to SEQ ID NO: 1254334
agaaggcggagaaauacuc

SEQ ID NO: 1254336 - RNA, 19 nt, Artificial Sequence
  Description of Artificial Sequence: Synthetic oligonucleotide
  Sense strand starting at position 3026 of SEQ ID NO: 1241201
uuuaacuagccaugggaaa

SEQ ID NO: 1254337 - RNA, 19 nt, Artificial Sequence
  Description of Artificial Sequence: Synthetic oligonucleotide
  Antisense strand to SEQ ID NO: 1254336
uuucccauggcuaguuaaa

SEQ ID NO: 1254338 - RNA, 19 nt, Artificial Sequence
  Description of Artificial Sequence: Synthetic oligonucleotide
  Sense strand starting at position 3105 of SEQ ID NO: 1241201
ugugaaagccaauggguau

SEQ ID NO: 1254339 - RNA, 19 nt, Artificial Sequence
  Description of Artificial Sequence: Synthetic oligonucleotide
  Antisense strand to SEQ ID NO: 1254338
auacccauuggcuuucaca

SEQ ID NO: 1254340 - RNA, 19 nt, Artificial Sequence
  Description of Artificial Sequence: Synthetic oligonucleotide
  Sense strand starting at position 3106 of SEQ ID NO: 1241201
gugaaagccaauggguaua

SEQ ID NO: 1254341 - RNA, 19 nt, Artificial Sequence
  Description of Artificial Sequence: Synthetic oligonucleotide
  Antisense strand to SEQ ID NO: 1254340
uauacccauuggcuuucac

SEQ ID NO: 1254342 - RNA, 19 nt, Artificial Sequence
  Description of Artificial Sequence: Synthetic oligonucleotide
  Sense strand starting at position 3125 of SEQ ID NO: 1241201
gagcuauuagaaggaauuc

SEQ ID NO: 1254343 - RNA, 19 nt, Artificial Sequence
  Description of Artificial Sequence: Synthetic oligonucleotide
  Antisense strand to SEQ ID NO: 1254342
gaauuccuucuaauagcuc

SEQ ID NO: 1254344 - RNA, 19 nt, Artificial Sequence
  Description of Artificial Sequence: Synthetic oligonucleotide
  Sense strand starting at position 3190 of SEQ ID NO: 1241201
agucaugguugcccagaga

SEQ ID NO: 1254345 - RNA, 19 nt, Artificial Sequence
  Description of Artificial Sequence: Synthetic oligonucleotide
  Antisense strand to SEQ ID NO: 1254344
ucucugggcaaccaugacu

SEQ ID NO: 1254346 - RNA, 19 nt, Artificial Sequence
  Description of Artificial Sequence: Synthetic oligonucleotide
  Sense strand starting at position 3193 of SEQ ID NO: 1241201
caugguugcccagagauaa

SEQ ID NO: 1254347 - RNA, 19 nt, Artificial Sequence
  Description of Artificial Sequence: Synthetic oligonucleotide
  Antisense strand to SEQ ID NO: 1254346
uuaucucugggcaaccaug

SEQ ID NO: 1254348 - RNA, 19 nt, Artificial Sequence
  Description of Artificial Sequence: Synthetic oligonucleotide
  Sense strand starting at position 3213 of SEQ ID NO: 1241201
gaaugaauaggauguguau

SEQ ID NO: 1254349 - RNA, 19 nt, Artificial Sequence
  Description of Artificial Sequence: Synthetic oligonucleotide
  Antisense strand to SEQ ID NO: 1254348
auacacauccuauucauuc

SEQ ID NO: 1254350 - RNA, 19 nt, Artificial Sequence
  Description of Artificial Sequence: Synthetic oligonucleotide
  Sense strand starting at position 3360 of SEQ ID NO: 1241201
aaagcuguuguagaacaaa

SEQ ID NO: 1254351 - RNA, 19 nt, Artificial Sequence
  Description of Artificial Sequence: Synthetic oligonucleotide
  Antisense strand to SEQ ID NO: 1254350
uuuguucuacaacagcuuu

SEQ ID NO: 1254352 - RNA, 19 nt, Artificial Sequence
  Description of Artificial Sequence: Synthetic oligonucleotide
  Sense strand starting at position 3363 of SEQ ID NO: 1241201
gcuguuguagaacaaagaa

SEQ ID NO: 1254353 - RNA, 19 nt, Artificial Sequence
  Description of Artificial Sequence: Synthetic oligonucleotide
  Antisense strand to SEQ ID NO: 1254352
uucuuuguucuacaacagc

SEQ ID NO: 1254354 - RNA, 19 nt, Artificial Sequence
  Description of Artificial Sequence: Synthetic oligonucleotide
  Sense strand starting at position 3384 of SEQ ID NO: 1241201
gccaauauugcauguaaag

SEQ ID NO: 1254355 - RNA, 19 nt, Artificial Sequence
  Description of Artificial Sequence: Synthetic oligonucleotide
  Antisense strand to SEQ ID NO: 1254354
cuuuacaugcaauauuggc

SEQ ID NO: 1254356 - RNA, 19 nt, Artificial Sequence
  Description of Artificial Sequence: Synthetic oligonucleotide
  Sense strand starting at position 3412 of SEQ ID NO: 1241201
ugucuacuggcagaauuac

SEQ ID NO: 1254357 - RNA, 19 nt, Artificial Sequence
  Description of Artificial Sequence: Synthetic oligonucleotide
  Antisense strand to SEQ ID NO: 1254356
guaauucugccaguagaca

SEQ ID NO: 1254358 - RNA, 19 nt, Artificial Sequence
  Description of Artificial Sequence: Synthetic oligonucleotide
  Sense strand starting at position 3458 of SEQ ID NO: 1241201
uguuguauucagcucguca

SEQ ID NO: 1254359 - RNA, 19 nt, Artificial Sequence
  Description of Artificial Sequence: Synthetic oligonucleotide
  Antisense strand to SEQ ID NO: 1254358
ugacgagcugaauacaaca

SEQ ID NO: 1254360 - RNA, 19 nt, Artificial Sequence
  Description of Artificial Sequence: Synthetic oligonucleotide
  Sense strand starting at position 3471 of SEQ ID NO: 1241201
ucgucaacugauuggauga

SEQ ID NO: 1254361 - RNA, 19 nt, Artificial Sequence
  Description of Artificial Sequence: Synthetic oligonucleotide
  Antisense strand to SEQ ID NO: 1254360
ucauccaaucaguugacga

SEQ ID NO: 1254362 - RNA, 19 nt, Artificial Sequence
  Description of Artificial Sequence: Synthetic oligonucleotide
  Sense strand starting at position 3497 of SEQ ID NO: 1241201
ccauauuauggauggcagu

SEQ ID NO: 1254363 - RNA, 19 nt, Artificial Sequence
  Description of Artificial Sequence: Synthetic oligonucleotide
  Antisense strand to SEQ ID NO: 1254362
acugccauccauaauaugg

SEQ ID NO: 1254364 - RNA, 19 nt, Artificial Sequence
  Description of Artificial Sequence: Synthetic oligonucleotide
  Sense strand starting at position 3704 of SEQ ID NO: 1241201
ucaauauggugaccauauu

SEQ ID NO: 1254365 - RNA, 19 nt, Artificial Sequence
  Description of Artificial Sequence: Synthetic oligonucleotide
  Antisense strand to SEQ ID NO: 1254364
aauauggucaccauauuga

SEQ ID NO: 1254366 - RNA, 19 nt, Artificial Sequence
  Description of Artificial Sequence: Synthetic oligonucleotide
  Sense strand starting at position 3713 of SEQ ID NO: 1241201
ugaccauauuggcugauua

SEQ ID NO: 1254367 - RNA, 19 nt, Artificial Sequence
  Description of Artificial Sequence: Synthetic oligonucleotide
  Antisense strand to SEQ ID NO: 1254366
uaaucagccaauaugguca

SEQ ID NO: 1254368 - RNA, 19 nt, Artificial Sequence
  Description of Artificial Sequence: Synthetic oligonucleotide
  Sense strand starting at position 3714 of SEQ ID NO: 1241201
gaccauauuggcugauuau

SEQ ID NO: 1254369 - RNA, 19 nt, Artificial Sequence
  Description of Artificial Sequence: Synthetic oligonucleotide
  Antisense strand to SEQ ID NO: 1254368
auaaucagccaauaugguc

SEQ ID NO: 1254370 - RNA, 19 nt, Artificial Sequence
  Description of Artificial Sequence: Synthetic oligonucleotide
  Sense strand starting at position 3715 of SEQ ID NO: 1241201
accauauuggcugauuauc

SEQ ID NO: 1254371 - RNA, 19 nt, Artificial Sequence
  Description of Artificial Sequence: Synthetic oligonucleotide
  Antisense strand to SEQ ID NO: 1254370
gauaaucagccaauauggu

SEQ ID NO: 1254372 - RNA, 19 nt, Artificial Sequence
  Description of Artificial Sequence: Synthetic oligonucleotide
  Sense strand starting at position 3813 of SEQ ID NO: 1241201
gggaaauacugcucucuuu

SEQ ID NO: 1254373 - RNA, 19 nt, Artificial Sequence
  Description of Artificial Sequence: Synthetic oligonucleotide
  Antisense strand to SEQ ID NO: 1254372
aaagagagcaguauuuccc

SEQ ID NO: 1254374 - RNA, 19 nt, Artificial Sequence
  Description of Artificial Sequence: Synthetic oligonucleotide
  Sense strand starting at position 3838 of SEQ ID NO: 1241201
agaucugcuuccucagaug

SEQ ID NO: 1254375 - RNA, 19 nt, Artificial Sequence
  Description of Artificial Sequence: Synthetic oligonucleotide
  Antisense strand to SEQ ID NO: 1254374
caucugaggaagcagaucu

SEQ ID NO: 1254376 - RNA, 19 nt, Artificial Sequence
  Description of Artificial Sequence: Synthetic oligonucleotide
  Sense strand starting at position 3914 of SEQ ID NO: 1241201
uuugauauguagguuucca

SEQ ID NO: 1254377 - RNA, 19 nt, Artificial Sequence
  Description of Artificial Sequence: Synthetic oligonucleotide
  Antisense strand to SEQ ID NO: 1254376
uggaaaccuacauaucaaa

SEQ ID NO: 1254378 - RNA, 19 nt, Artificial Sequence
  Description of Artificial Sequence: Synthetic oligonucleotide
  Sense strand starting at position 3951 of SEQ ID NO: 1241201
caugguacuguguacaaga

SEQ ID NO: 1254379 - RNA, 19 nt, Artificial Sequence
  Description of Artificial Sequence: Synthetic oligonucleotide
  Antisense strand to SEQ ID NO: 1254378
ucuuguacacaguaccaug

SEQ ID NO: 1254380 - RNA, 19 nt, Artificial Sequence
  Description of Artificial Sequence: Synthetic oligonucleotide
  Sense strand starting at position 3953 of SEQ ID NO: 1241201
ugguacuguguacaagaga

SEQ ID NO: 1254381 - RNA, 19 nt, Artificial Sequence
  Description of Artificial Sequence: Synthetic oligonucleotide
  Antisense strand to SEQ ID NO: 1254380
ucucuuguacacaguacca

SEQ ID NO: 1254382 - RNA, 19 nt, Artificial Sequence
  Description of Artificial Sequence: Synthetic oligonucleotide
  Sense strand starting at position 3958 of SEQ ID NO: 1241201
cuguguacaagagaaugua

SEQ ID NO: 1254383 - RNA, 19 nt, Artificial Sequence
  Description of Artificial Sequence: Synthetic oligonucleotide
  Antisense strand to SEQ ID NO: 1254382
uacauucucuuguacacag

SEQ ID NO: 1254384 - RNA, 19 nt, Artificial Sequence
  Description of Artificial Sequence: Synthetic oligonucleotide
  Sense strand starting at position 3967 of SEQ ID NO: 1241201
agagaauguagguggguau

SEQ ID NO: 1254385 - RNA, 19 nt, Artificial Sequence
  Description of Artificial Sequence: Synthetic oligonucleotide
  Antisense strand to SEQ ID NO: 1254384
auacccaccuacauucucu

SEQ ID NO: 1254386 - RNA, 19 nt, Artificial Sequence
  Description of Artificial Sequence: Synthetic oligonucleotide
  Sense strand starting at position 126 of SEQ ID NO: 1241202
gccuucuugcccuugugua

SEQ ID NO: 1254387 - RNA, 19 nt, Artificial Sequence
  Description of Artificial Sequence: Synthetic oligonucleotide
  Antisense strand to SEQ ID NO: 1254386
uacacaagggcaagaaggc

SEQ ID NO: 1254388 - RNA, 19 nt, Artificial Sequence
  Description of Artificial Sequence: Synthetic oligonucleotide
  Sense strand starting at position 588 of SEQ ID NO: 1241202
cucucacacuuucugagua

SEQ ID NO: 1254389 - RNA, 19 nt, Artificial Sequence
  Description of Artificial Sequence: Synthetic oligonucleotide
  Antisense strand to SEQ ID NO: 1254388
uacucagaaagugugagag

SEQ ID NO: 1254390 - RNA, 19 nt, Artificial Sequence
  Description of Artificial Sequence: Synthetic oligonucleotide
  Sense strand starting at position 593 of SEQ ID NO: 1241202
acacuuucugaguacacuu

SEQ ID NO: 1254391 - RNA, 19 nt, Artificial Sequence
  Description of Artificial Sequence: Synthetic oligonucleotide
  Antisense strand to SEQ ID NO: 1254390
aaguguacucagaaagugu

SEQ ID NO: 1254392 - RNA, 19 nt, Artificial Sequence
  Description of Artificial Sequence: Synthetic oligonucleotide
  Sense strand starting at position 613 of SEQ ID NO: 1241202
cccucaaucugccuugagu

SEQ ID NO: 1254393 - RNA, 19 nt, Artificial Sequence
  Description of Artificial Sequence: Synthetic oligonucleotide
  Antisense strand to SEQ ID NO: 1254392
acucaaggcagauugaggg

SEQ ID NO: 1254394 - RNA, 19 nt, Artificial Sequence
  Description of Artificial Sequence: Synthetic oligonucleotide
  Sense strand starting at position 635 of SEQ ID NO: 1241202
ccguucuaugaccaguaga

SEQ ID NO: 1254395 - RNA, 19 nt, Artificial Sequence
  Description of Artificial Sequence: Synthetic oligonucleotide
  Antisense strand to SEQ ID NO: 1254394
ucuacuggucauagaacgg

SEQ ID NO: 1254396 - RNA, 19 nt, Artificial Sequence
  Description of Artificial Sequence: Synthetic oligonucleotide
  Sense strand starting at position 649 of SEQ ID NO: 1241202
guagacauuucucacagaa

SEQ ID NO: 1254397 - RNA, 19 nt, Artificial Sequence
  Description of Artificial Sequence: Synthetic oligonucleotide
  Antisense strand to SEQ ID NO: 1254396
uucugugagaaaugucuac

SEQ ID NO: 1254398 - RNA, 19 nt, Artificial Sequence
  Description of Artificial Sequence: Synthetic oligonucleotide
  Sense strand starting at position 651 of SEQ ID NO: 1241202
agacauuucucacagaagc

SEQ ID NO: 1254399 - RNA, 19 nt, Artificial Sequence
  Description of Artificial Sequence: Synthetic oligonucleotide
  Antisense strand to SEQ ID NO: 1254398
gcuucugugagaaaugucu

SEQ ID NO: 1254400 - RNA, 19 nt, Artificial Sequence
  Description of Artificial Sequence: Synthetic oligonucleotide
  Sense strand starting at position 959 of SEQ ID NO: 1241202
gccugcucuuaccuugaga

SEQ ID NO: 1254401 - RNA, 19 nt, Artificial Sequence
  Description of Artificial Sequence: Synthetic oligonucleotide
  Antisense strand to SEQ ID NO: 1254400
ucucaagguaagagcaggc

SEQ ID NO: 1254402 - RNA, 19 nt, Artificial Sequence
  Description of Artificial Sequence: Synthetic oligonucleotide
  Sense strand starting at position 961 of SEQ ID NO: 1241202
cugcucuuaccuugagaac

SEQ ID NO: 1254403 - RNA, 19 nt, Artificial Sequence
  Description of Artificial Sequence: Synthetic oligonucleotide
  Antisense strand to SEQ ID NO: 1254402
guucucaagguaagagcag

SEQ ID NO: 1254404 - RNA, 19 nt, Artificial Sequence
  Description of Artificial Sequence: Synthetic oligonucleotide
  Sense strand starting at position 1676 of SEQ ID NO: 1241202
uuccuuccucuguagucaa

SEQ ID NO: 1254405 - RNA, 19 nt, Artificial Sequence
  Description of Artificial Sequence: Synthetic oligonucleotide
  Antisense strand to SEQ ID NO: 1254404
uugacuacagaggaaggaa

SEQ ID NO: 1254406 - RNA, 19 nt, Artificial Sequence
  Description of Artificial Sequence: Synthetic oligonucleotide
  Sense strand starting at position 2151 of SEQ ID NO: 1241202
cccagagcauucucugagu

SEQ ID NO: 1254407 - RNA, 19 nt, Artificial Sequence
  Description of Artificial Sequence: Synthetic oligonucleotide
  Antisense strand to SEQ ID NO: 1254406
acucagagaaugcucuggg

SEQ ID NO: 1254408 - RNA, 19 nt, Artificial Sequence
  Description of Artificial Sequence: Synthetic oligonucleotide
  Sense strand starting at position 2153 of SEQ ID NO: 1241202
cagagcauucucugagugu

SEQ ID NO: 1254409 - RNA, 19 nt, Artificial Sequence
  Description of Artificial Sequence: Synthetic oligonucleotide
  Antisense strand to SEQ ID NO: 1254408
acacucagagaaugcucug

SEQ ID NO: 1254410 - RNA, 19 nt, Artificial Sequence
  Description of Artificial Sequence: Synthetic oligonucleotide
  Sense strand starting at position 2194 of SEQ ID NO: 1241202
gggucuagggaguagugau

SEQ ID NO: 1254411 - RNA, 19 nt, Artificial Sequence
  Description of Artificial Sequence: Synthetic oligonucleotide
  Antisense strand to SEQ ID NO: 1254410
aucacuacucccuagaccc

SEQ ID NO: 1254412 - RNA, 19 nt, Artificial Sequence
  Description of Artificial Sequence: Synthetic oligonucleotide
  Sense strand starting at position 2202 of SEQ ID NO: 1241202
ggaguagugauagguccua

SEQ ID NO: 1254413 - RNA, 19 nt, Artificial Sequence
  Description of Artificial Sequence: Synthetic oligonucleotide
  Antisense strand to SEQ ID NO: 1254412
uaggaccuaucacuacucc

SEQ ID NO: 1254414 - RNA, 19 nt, Artificial Sequence
  Description of Artificial Sequence: Synthetic oligonucleotide
  Sense strand starting at position 2295 of SEQ ID NO: 1241202
ugcaauagcccacauguua

SEQ ID NO: 1254415 - RNA, 19 nt, Artificial Sequence
  Description of Artificial Sequence: Synthetic oligonucleotide
  Antisense strand to SEQ ID NO: 1254414
uaacaugugggcuauugca

SEQ ID NO: 1254416 - RNA, 19 nt, Artificial Sequence
  Description of Artificial Sequence: Synthetic oligonucleotide
  Sense strand starting at position 2667 of SEQ ID NO: 1241202
ucuugugagguuugagaag

SEQ ID NO: 1254417 - RNA, 19 nt, Artificial Sequence
  Description of Artificial Sequence: Synthetic oligonucleotide
  Antisense strand to SEQ ID NO: 1254416
cuucucaaaccucacaaga

SEQ ID NO: 1254418 - RNA, 19 nt, Artificial Sequence
  Description of Artificial Sequence: Synthetic oligonucleotide
  Sense strand starting at position 2880 of SEQ ID NO: 1241202
aagggauuguagguccagu

SEQ ID NO: 1254419 - RNA, 19 nt, Artificial Sequence
  Description of Artificial Sequence: Synthetic oligonucleotide
  Antisense strand to SEQ ID NO: 1254418
acuggaccuacaaucccuu

SEQ ID NO: 1254420 - RNA, 19 nt, Artificial Sequence
  Description of Artificial Sequence: Synthetic oligonucleotide
  Sense strand starting at position 3061 of SEQ ID NO: 1241202
ugucgcauugaacauuaaa

SEQ ID NO: 1254421 - RNA, 19 nt, Artificial Sequence
  Description of Artificial Sequence: Synthetic oligonucleotide
  Antisense strand to SEQ ID NO: 1254420
uuuaauguucaaugcgaca

SEQ ID NO: 1254422 - RNA, 19 nt, Artificial Sequence
  Description of Artificial Sequence: Synthetic oligonucleotide
  Sense strand starting at position 3090 of SEQ ID NO: 1241202
ugcauauucugauuagcau

SEQ ID NO: 1254423 - RNA, 19 nt, Artificial Sequence
  Description of Artificial Sequence: Synthetic oligonucleotide
  Antisense strand to SEQ ID NO: 1254422
augcuaaucagaauaugca

SEQ ID NO: 1254424 - RNA, 19 nt, Artificial Sequence
  Description of Artificial Sequence: Synthetic oligonucleotide
  Sense strand starting at position 3091 of SEQ ID NO: 1241202
gcauauucugauuagcaua

SEQ ID NO: 1254425 - RNA, 19 nt, Artificial Sequence
  Description of Artificial Sequence: Synthetic oligonucleotide
  Antisense strand to SEQ ID NO: 1254424
uaugcuaaucagaauaugc

SEQ ID NO: 1254426 - RNA, 19 nt, Artificial Sequence
  Description of Artificial Sequence: Synthetic oligonucleotide
  Sense strand starting at position 3105 of SEQ ID NO: 1241202
gcauauuccgguuagcaua

SEQ ID NO: 1254427 - RNA, 19 nt, Artificial Sequence
  Description of Artificial Sequence: Synthetic oligonucleotide
  Antisense strand to SEQ ID NO: 1254426
uaugcuaaccggaauaugc

SEQ ID NO: 1254428 - RNA, 19 nt, Artificial Sequence
  Description of Artificial Sequence: Synthetic oligonucleotide
  Sense strand starting at position 3115 of SEQ ID NO: 1241202
guuagcauauuccuuacau

SEQ ID NO: 1254429 - RNA, 19 nt, Artificial Sequence
  Description of Artificial Sequence: Synthetic oligonucleotide
  Antisense strand to SEQ ID NO: 1254428
auguaaggaauaugcuaac

SEQ ID NO: 1254430 - RNA, 19 nt, Artificial Sequence
  Description of Artificial Sequence: Synthetic oligonucleotide
  Sense strand starting at position 3167 of SEQ ID NO: 1241202
cugugcaugacuugagaca

SEQ ID NO: 1254431 - RNA, 19 nt, Artificial Sequence
  Description of Artificial Sequence: Synthetic oligonucleotide
  Antisense strand to SEQ ID NO: 1254430
ugucucaagucaugcacag

SEQ ID NO: 1254432 - RNA, 19 nt, Artificial Sequence
  Description of Artificial Sequence: Synthetic oligonucleotide
  Sense strand starting at position 3168 of SEQ ID NO: 1241202
ugugcaugacuugagacau

SEQ ID NO: 1254433 - RNA, 19 nt, Artificial Sequence
  Description of Artificial Sequence: Synthetic oligonucleotide
  Antisense strand to SEQ ID NO: 1254432
augucucaagucaugcaca

SEQ ID NO: 1254434 - RNA, 19 nt, Artificial Sequence
  Description of Artificial Sequence: Synthetic oligonucleotide
  Sense strand starting at position 3189 of SEQ ID NO: 1241202
ccagauaugcuuuaucuga

SEQ ID NO: 1254435 - RNA, 19 nt, Artificial Sequence
  Description of Artificial Sequence: Synthetic oligonucleotide
  Antisense strand to SEQ ID NO: 1254434
ucagauaaagcauaucugg

SEQ ID NO: 1254436 - RNA, 19 nt, Artificial Sequence
  Description of Artificial Sequence: Synthetic oligonucleotide
  Sense strand starting at position 3191 of SEQ ID NO: 1241202
agauaugcuuuaucugaaa

SEQ ID NO: 1254437 - RNA, 19 nt, Artificial Sequence
  Description of Artificial Sequence: Synthetic oligonucleotide
  Antisense strand to SEQ ID NO: 1254436
uuucagauaaagcauaucu

SEQ ID NO: 1254438 - RNA, 19 nt, Artificial Sequence
  Description of Artificial Sequence: Synthetic oligonucleotide
  Sense strand starting at position 3228 of SEQ ID NO: 1241202
gggagaucugcguguaacc

SEQ ID NO: 1254439 - RNA, 19 nt, Artificial Sequence
  Description of Artificial Sequence: Synthetic oligonucleotide
  Antisense strand to SEQ ID NO: 1254438
gguuacacgcagaucuccc

SEQ ID NO: 1254440 - RNA, 19 nt, Artificial Sequence
  Description of Artificial Sequence: Synthetic oligonucleotide
  Sense strand starting at position 3230 of SEQ ID NO: 1241202
gagaucugcguguaaccca

SEQ ID NO: 1254441 - RNA, 19 nt, Artificial Sequence
  Description of Artificial Sequence: Synthetic oligonucleotide
  Antisense strand to SEQ ID NO: 1254440
uggguuacacgcagaucuc

SEQ ID NO: 1254442 - RNA, 19 nt, Artificial Sequence
  Description of Artificial Sequence: Synthetic oligonucleotide
  Sense strand starting at position 3248 of SEQ ID NO: 1241202
agagacagaugucaggaau

SEQ ID NO: 1254443 - RNA, 19 nt, Artificial Sequence
  Description of Artificial Sequence: Synthetic oligonucleotide
  Antisense strand to SEQ ID NO: 1254442
auuccugacaucugucucu

SEQ ID NO: 1254444 - RNA, 19 nt, Artificial Sequence
  Description of Artificial Sequence: Synthetic oligonucleotide
  Sense strand starting at position 3462 of SEQ ID NO: 1241202
gaggaaaccuggcugggau

SEQ ID NO: 1254445 - RNA, 19 nt, Artificial Sequence
  Description of Artificial Sequence: Synthetic oligonucleotide
  Antisense strand to SEQ ID NO: 1254444
aucccagccagguuuccuc

SEQ ID NO: 1254446 - RNA, 19 nt, Artificial Sequence
  Description of Artificial Sequence: Synthetic oligonucleotide
  Sense strand starting at position 3491 of SEQ ID NO: 1241202
agugcaguuccagggagaa

SEQ ID NO: 1254447 - RNA, 19 nt, Artificial Sequence
  Description of Artificial Sequence: Synthetic oligonucleotide
  Antisense strand to SEQ ID NO: 1254446
uucucccuggaacugcacu

SEQ ID NO: 1254448 - RNA, 19 nt, Artificial Sequence
  Description of Artificial Sequence: Synthetic oligonucleotide
  Sense strand starting at position 3552 of SEQ ID NO: 1241202
aggagaaauucuguucccu

SEQ ID NO: 1254449 - RNA, 19 nt, Artificial Sequence
  Description of Artificial Sequence: Synthetic oligonucleotide
  Antisense strand to SEQ ID NO: 1254448
agggaacagaauuucuccu

SEQ ID NO: 1254450 - RNA, 19 nt, Artificial Sequence
  Description of Artificial Sequence: Synthetic oligonucleotide
  Sense strand starting at position 3593 of SEQ ID NO: 1241202
augaauaggccuugugcuu

SEQ ID NO: 1254451 - RNA, 19 nt, Artificial Sequence
  Description of Artificial Sequence: Synthetic oligonucleotide
  Antisense strand to SEQ ID NO: 1254450
aagcacaaggccuauucau

SEQ ID NO: 1254452 - RNA, 19 nt, Artificial Sequence
  Description of Artificial Sequence: Synthetic oligonucleotide
  Sense strand starting at position 3672 of SEQ ID NO: 1241202
uggguuaugcgggaaggua

SEQ ID NO: 1254453 - RNA, 19 nt, Artificial Sequence
  Description of Artificial Sequence: Synthetic oligonucleotide
  Antisense strand to SEQ ID NO: 1254452
uaccuucccgcauaaccca

SEQ ID NO: 1254454 - RNA, 19 nt, Artificial Sequence
  Description of Artificial Sequence: Synthetic oligonucleotide
  Sense strand starting at position 3817 of SEQ ID NO: 1241202
ugcuaugugacucggagaa

SEQ ID NO: 1254455 - RNA, 19 nt, Artificial Sequence
  Description of Artificial Sequence: Synthetic oligonucleotide
  Antisense strand to SEQ ID NO: 1254454
uucuccgagucacauagca

SEQ ID NO: 1254456 - RNA, 19 nt, Artificial Sequence
  Description of Artificial Sequence: Synthetic oligonucleotide
  Sense strand starting at position 3821 of SEQ ID NO: 1241202
augugacucggagaaccuu

SEQ ID NO: 1254457 - RNA, 19 nt, Artificial Sequence
  Description of Artificial Sequence: Synthetic oligonucleotide
  Antisense strand to SEQ ID NO: 1254456
aagguucuccgagucacau

SEQ ID NO: 1254458 - RNA, 19 nt, Artificial Sequence
  Description of Artificial Sequence: Synthetic oligonucleotide
  Sense strand starting at position 3911 of SEQ ID NO: 1241202
ggaugugggagguaugcaa

SEQ ID NO: 1254459 - RNA, 19 nt, Artificial Sequence
  Description of Artificial Sequence: Synthetic oligonucleotide
  Antisense strand to SEQ ID NO: 1254458
uugcauaccucccacaucc

SEQ ID NO: 1254460 - RNA, 19 nt, Artificial Sequence
  Description of Artificial Sequence: Synthetic oligonucleotide
  Sense strand starting at position 3946 of SEQ ID NO: 1241202
ugagaaagucagcagcuuu

SEQ ID NO: 1254461 - RNA, 19 nt, Artificial Sequence
  Description of Artificial Sequence: Synthetic oligonucleotide
  Antisense strand to SEQ ID NO: 1254460
aaagcugcugacuuucuca

SEQ ID NO: 1254462 - RNA, 19 nt, Artificial Sequence
  Description of Artificial Sequence: Synthetic oligonucleotide
  Sense strand starting at position 3959 of SEQ ID NO: 1241202
agcuuuagccauggugaga

SEQ ID NO: 1254463 - RNA, 19 nt, Artificial Sequence
  Description of Artificial Sequence: Synthetic oligonucleotide
  Antisense strand to SEQ ID NO: 1254462
ucucaccauggcuaaagcu

SEQ ID NO: 1254464 - RNA, 19 nt, Artificial Sequence
  Description of Artificial Sequence: Synthetic oligonucleotide
  Sense strand starting at position 3962 of SEQ ID NO: 1241202
uuuagccauggugagauaa

SEQ ID NO: 1254465 - RNA, 19 nt, Artificial Sequence
  Description of Artificial Sequence: Synthetic oligonucleotide
  Antisense strand to SEQ ID NO: 1254464
uuaucucaccauggcuaaa

SEQ ID NO: 1254466 - RNA, 19 nt, Artificial Sequence
  Description of Artificial Sequence: Synthetic oligonucleotide
  Sense strand starting at position 51 of SEQ ID NO: 1241203
uguaucuaaucacugggau

SEQ ID NO: 1254467 - RNA, 19 nt, Artificial Sequence
  Description of Artificial Sequence: Synthetic oligonucleotide
  Antisense strand to SEQ ID NO: 1254466
aucccagugauuagauaca

SEQ ID NO: 1254468 - RNA, 19 nt, Artificial Sequence
  Description of Artificial Sequence: Synthetic oligonucleotide
  Sense strand starting at position 52 of SEQ ID NO: 1241203
guaucuaaucacugggaua

SEQ ID NO: 1254469 - RNA, 19 nt, Artificial Sequence
  Description of Artificial Sequence: Synthetic oligonucleotide
  Antisense strand to SEQ ID NO: 1254468
uaucccagugauuagauac

SEQ ID NO: 1254470 - RNA, 19 nt, Artificial Sequence
  Description of Artificial Sequence: Synthetic oligonucleotide
  Sense strand starting at position 54 of SEQ ID NO: 1241203
aucuaaucacugggauacu

SEQ ID NO: 1254471 - RNA, 19 nt, Artificial Sequence
  Description of Artificial Sequence: Synthetic oligonucleotide
  Antisense strand to SEQ ID NO: 1254470
aguaucccagugauuagau

SEQ ID NO: 1254472 - RNA, 19 nt, Artificial Sequence
  Description of Artificial Sequence: Synthetic oligonucleotide
  Sense strand starting at position 55 of SEQ ID NO: 1241203
ucuaaucacugggauacua

SEQ ID NO: 1254473 - RNA, 19 nt, Artificial Sequence
  Description of Artificial Sequence: Synthetic oligonucleotide
  Antisense strand to SEQ ID NO: 1254472
uaguaucccagugauuaga

SEQ ID NO: 1254474 - RNA, 19 nt, Artificial Sequence
  Description of Artificial Sequence: Synthetic oligonucleotide
  Sense strand starting at position 107 of SEQ ID NO: 1241203
agugcugaccuguaacaau

SEQ ID NO: 1254475 - RNA, 19 nt, Artificial Sequence
  Description of Artificial Sequence: Synthetic oligonucleotide
  Antisense strand to SEQ ID NO: 1254474
auuguuacaggucagcacu

SEQ ID NO: 1254476 - RNA, 19 nt, Artificial Sequence
  Description of Artificial Sequence: Synthetic oligonucleotide
  Sense strand starting at position 214 of SEQ ID NO: 1241203
uggauaguguauucuauaa

SEQ ID NO: 1254477 - RNA, 19 nt, Artificial Sequence
  Description of Artificial Sequence: Synthetic oligonucleotide
  Antisense strand to SEQ ID NO: 1254476
uuauagaauacacuaucca

SEQ ID NO: 1254478 - RNA, 19 nt, Artificial Sequence
  Description of Artificial Sequence: Synthetic oligonucleotide
  Sense strand starting at position 407 of SEQ ID NO: 1241203
cauguaguagugugaucac

SEQ ID NO: 1254479 - RNA, 19 nt, Artificial Sequence
  Description of Artificial Sequence: Synthetic oligonucleotide
  Antisense strand to SEQ ID NO: 1254478
gugaucacacuacuacaug

SEQ ID NO: 1254480 - RNA, 19 nt, Artificial Sequence
  Description of Artificial Sequence: Synthetic oligonucleotide
  Sense strand starting at position 670 of SEQ ID NO: 1241203
uuuguacaccacugaucuu

SEQ ID NO: 1254481 - RNA, 19 nt, Artificial Sequence
  Description of Artificial Sequence: Synthetic oligonucleotide
  Antisense strand to SEQ ID NO: 1254480
aagaucagugguguacaaa

SEQ ID NO: 1254482 - RNA, 19 nt, Artificial Sequence
  Description of Artificial Sequence: Synthetic oligonucleotide
  Sense strand starting at position 1064 of SEQ ID NO: 1241203
uuaucuaucgagcacaaua

SEQ ID NO: 1254483 - RNA, 19 nt, Artificial Sequence
  Description of Artificial Sequence: Synthetic oligonucleotide
  Antisense strand to SEQ ID NO: 1254482
uauugugcucgauagauaa

SEQ ID NO: 1254484 - RNA, 19 nt, Artificial Sequence
  Description of Artificial Sequence: Synthetic oligonucleotide
  Sense strand starting at position 1314 of SEQ ID NO: 1241203
ugccauauaugguccacuu

SEQ ID NO: 1254485 - RNA, 19 nt, Artificial Sequence
  Description of Artificial Sequence: Synthetic oligonucleotide
  Antisense strand to SEQ ID NO: 1254484
aaguggaccauauauggca

SEQ ID NO: 1254486 - RNA, 19 nt, Artificial Sequence
  Description of Artificial Sequence: Synthetic oligonucleotide
  Sense strand starting at position 1340 of SEQ ID NO: 1241203
aaauguuaagugugaauca

SEQ ID NO: 1254487 - RNA, 19 nt, Artificial Sequence
  Description of Artificial Sequence: Synthetic oligonucleotide
  Antisense strand to SEQ ID NO: 1254486
ugauucacacuuaacauuu

SEQ ID NO: 1254488 - RNA, 19 nt, Artificial Sequence
  Description of Artificial Sequence: Synthetic oligonucleotide
  Sense strand starting at position 1362 of SEQ ID NO: 1241203
ucuauuagagggcacuuau

SEQ ID NO: 1254489 - RNA, 19 nt, Artificial Sequence
  Description of Artificial Sequence: Synthetic oligonucleotide
  Antisense strand to SEQ ID NO: 1254488
auaagugcccucuaauaga

SEQ ID NO: 1254490 - RNA, 19 nt, Artificial Sequence
  Description of Artificial Sequence: Synthetic oligonucleotide
  Sense strand starting at position 1497 of SEQ ID NO: 1241203
ucaacugucuccuuuguaa

SEQ ID NO: 1254491 - RNA, 19 nt, Artificial Sequence
  Description of Artificial Sequence: Synthetic oligonucleotide
  Antisense strand to SEQ ID NO: 1254490
uuacaaaggagacaguuga

SEQ ID NO: 1254492 - RNA, 19 nt, Artificial Sequence
  Description of Artificial Sequence: Synthetic oligonucleotide
  Sense strand starting at position 1553 of SEQ ID NO: 1241203
aaaggugucugacagaaug

SEQ ID NO: 1254493 - RNA, 19 nt, Artificial Sequence
  Description of Artificial Sequence: Synthetic oligonucleotide
  Antisense strand to SEQ ID NO: 1254492
cauucugucagacaccuuu

SEQ ID NO: 1254494 - RNA, 19 nt, Artificial Sequence
  Description of Artificial Sequence: Synthetic oligonucleotide
  Sense strand starting at position 1565 of SEQ ID NO: 1241203
cagaaugccugagacaaag

SEQ ID NO: 1254495 - RNA, 19 nt, Artificial Sequence
  Description of Artificial Sequence: Synthetic oligonucleotide
  Antisense strand to SEQ ID NO: 1254494
cuuugucucaggcauucug

SEQ ID NO: 1254496 - RNA, 19 nt, Artificial Sequence
  Description of Artificial Sequence: Synthetic oligonucleotide
  Sense strand starting at position 1762 of SEQ ID NO: 1241203
cucuauuucuuggcauagu

SEQ ID NO: 1254497 - RNA, 19 nt, Artificial Sequence
  Description of Artificial Sequence: Synthetic oligonucleotide
  Antisense strand to SEQ ID NO: 1254496
acuaugccaagaaauagag

SEQ ID NO: 1254498 - RNA, 19 nt, Artificial Sequence
  Description of Artificial Sequence: Synthetic oligonucleotide
  Sense strand starting at position 1815 of SEQ ID NO: 1241203
cucagaaacucagggagaa

SEQ ID NO: 1254499 - RNA, 19 nt, Artificial Sequence
  Description of Artificial Sequence: Synthetic oligonucleotide
  Antisense strand to SEQ ID NO: 1254498
uucucccugaguuucugag

SEQ ID NO: 1254500 - RNA, 19 nt, Artificial Sequence
  Description of Artificial Sequence: Synthetic oligonucleotide
  Sense strand starting at position 1903 of SEQ ID NO: 1241203
acauaugucugccuccuau

SEQ ID NO: 1254501 - RNA, 19 nt, Artificial Sequence
  Description of Artificial Sequence: Synthetic oligonucleotide
  Antisense strand to SEQ ID NO: 1254500
auaggaggcagacauaugu

SEQ ID NO: 1254502 - RNA, 19 nt, Artificial Sequence
  Description of Artificial Sequence: Synthetic oligonucleotide
  Sense strand starting at position 1953 of SEQ ID NO: 1241203
uagucaagccgaugaucuu

SEQ ID NO: 1254503 - RNA, 19 nt, Artificial Sequence
  Description of Artificial Sequence: Synthetic oligonucleotide
  Antisense strand to SEQ ID NO: 1254502
aagaucaucggcuugacua

SEQ ID NO: 1254504 - RNA, 19 nt, Artificial Sequence
  Description of Artificial Sequence: Synthetic oligonucleotide
  Sense strand starting at position 2186 of SEQ ID NO: 1241203
cacauauugucacugguga

SEQ ID NO: 1254505 - RNA, 19 nt, Artificial Sequence
  Description of Artificial Sequence: Synthetic oligonucleotide
  Antisense strand to SEQ ID NO: 1254504
ucaccagugacaauaugug

SEQ ID NO: 1254506 - RNA, 19 nt, Artificial Sequence
  Description of Artificial Sequence: Synthetic oligonucleotide
  Sense strand starting at position 2286 of SEQ ID NO: 1241203
aaguacuauguaugagcau

SEQ ID NO: 1254507 - RNA, 19 nt, Artificial Sequence
  Description of Artificial Sequence: Synthetic oligonucleotide
  Antisense strand to SEQ ID NO: 1254506
augcucauacauaguacuu

SEQ ID NO: 1254508 - RNA, 19 nt, Artificial Sequence
  Description of Artificial Sequence: Synthetic oligonucleotide
  Sense strand starting at position 2292 of SEQ ID NO: 1241203
uauguaugagcaugucuaa

SEQ ID NO: 1254509 - RNA, 19 nt, Artificial Sequence
  Description of Artificial Sequence: Synthetic oligonucleotide
  Antisense strand to SEQ ID NO: 1254508
uuagacaugcucauacaua

SEQ ID NO: 1254510 - RNA, 19 nt, Artificial Sequence
  Description of Artificial Sequence: Synthetic oligonucleotide
  Sense strand starting at position 2431 of SEQ ID NO: 1241203
ucccauacucagugcuaca

SEQ ID NO: 1254511 - RNA, 19 nt, Artificial Sequence
  Description of Artificial Sequence: Synthetic oligonucleotide
  Antisense strand to SEQ ID NO: 1254510
uguagcacugaguauggga

SEQ ID NO: 1254512 - RNA, 19 nt, Artificial Sequence
  Description of Artificial Sequence: Synthetic oligonucleotide
  Sense strand starting at position 2469 of SEQ ID NO: 1241203
aaugccuuugguuguagaa

SEQ ID NO: 1254513 - RNA, 19 nt, Artificial Sequence
  Description of Artificial Sequence: Synthetic oligonucleotide
  Antisense strand to SEQ ID NO: 1254512
uucuacaaccaaaggcauu

SEQ ID NO: 1254514 - RNA, 19 nt, Artificial Sequence
  Description of Artificial Sequence: Synthetic oligonucleotide
  Sense strand starting at position 2573 of SEQ ID NO: 1241203
cugggaguugucuacauaa

SEQ ID NO: 1254515 - RNA, 19 nt, Artificial Sequence
  Description of Artificial Sequence: Synthetic oligonucleotide
  Antisense strand to SEQ ID NO: 1254514
uuauguagacaacucccag

SEQ ID NO: 1254516 - RNA, 19 nt, Artificial Sequence
  Description of Artificial Sequence: Synthetic oligonucleotide
  Sense strand starting at position 2591 of SEQ ID NO: 1241203
aaagguagaucugggaaua

SEQ ID NO: 1254517 - RNA, 19 nt, Artificial Sequence
  Description of Artificial Sequence: Synthetic oligonucleotide
  Antisense strand to SEQ ID NO: 1254516
uauucccagaucuaccuuu

SEQ ID NO: 1254518 - RNA, 19 nt, Artificial Sequence
  Description of Artificial Sequence: Synthetic oligonucleotide
  Sense strand starting at position 2695 of SEQ ID NO: 1241203
cagguuaugcaauggcaga

SEQ ID NO: 1254519 - RNA, 19 nt, Artificial Sequence
  Description of Artificial Sequence: Synthetic oligonucleotide
  Antisense strand to SEQ ID NO: 1254518
ucugccauugcauaaccug

SEQ ID NO: 1254520 - RNA, 19 nt, Artificial Sequence
  Description of Artificial Sequence: Synthetic oligonucleotide
  Sense strand starting at position 2853 of SEQ ID NO: 1241203
ucuagugcuguccaguaca

SEQ ID NO: 1254521 - RNA, 19 nt, Artificial Sequence
  Description of Artificial Sequence: Synthetic oligonucleotide
  Antisense strand to SEQ ID NO: 1254520
uguacuggacagcacuaga

SEQ ID NO: 1254522 - RNA, 19 nt, Artificial Sequence
  Description of Artificial Sequence: Synthetic oligonucleotide
  Sense strand starting at position 2902 of SEQ ID NO: 1241203
uagcucuugccaggucaaa

SEQ ID NO: 1254523 - RNA, 19 nt, Artificial Sequence
  Description of Artificial Sequence: Synthetic oligonucleotide
  Antisense strand to SEQ ID NO: 1254522
uuugaccuggcaagagcua

SEQ ID NO: 1254524 - RNA, 19 nt, Artificial Sequence
  Description of Artificial Sequence: Synthetic oligonucleotide
  Sense strand starting at position 2922 of SEQ ID NO: 1241203
ugacaugugcuauacaugu

SEQ ID NO: 1254525 - RNA, 19 nt, Artificial Sequence
  Description of Artificial Sequence: Synthetic oligonucleotide
  Antisense strand to SEQ ID NO: 1254524
acauguauagcacauguca

SEQ ID NO: 1254526 - RNA, 19 nt, Artificial Sequence
  Description of Artificial Sequence: Synthetic oligonucleotide
  Sense strand starting at position 3192 of SEQ ID NO: 1241203
uuucuauauugcgcuaaau

SEQ ID NO: 1254527 - RNA, 19 nt, Artificial Sequence
  Description of Artificial Sequence: Synthetic oligonucleotide
  Antisense strand to SEQ ID NO: 1254526
auuuagcgcaauauagaaa

SEQ ID NO: 1254528 - RNA, 19 nt, Artificial Sequence
  Description of Artificial Sequence: Synthetic oligonucleotide
  Sense strand starting at position 3194 of SEQ ID NO: 1241203
ucuauauugcgcuaaauaa

SEQ ID NO: 1254529 - RNA, 19 nt, Artificial Sequence
  Description of Artificial Sequence: Synthetic oligonucleotide
  Antisense strand to SEQ ID NO: 1254528
uuauuuagcgcaauauaga

SEQ ID NO: 1254530 - RNA, 19 nt, Artificial Sequence
  Description of Artificial Sequence: Synthetic oligonucleotide
  Sense strand starting at position 3294 of SEQ ID NO: 1241203
cuguauuuguauuagacaa

SEQ ID NO: 1254531 - RNA, 19 nt, Artificial Sequence
  Description of Artificial Sequence: Synthetic oligonucleotide
  Antisense strand to SEQ ID NO: 1254530
uugucuaauacaaauacag

SEQ ID NO: 1254532 - RNA, 19 nt, Artificial Sequence
  Description of Artificial Sequence: Synthetic oligonucleotide
  Sense strand starting at position 3296 of SEQ ID NO: 1241203
guauuuguauuagacaaca

SEQ ID NO: 1254533 - RNA, 19 nt, Artificial Sequence
  Description of Artificial Sequence: Synthetic oligonucleotide
  Antisense strand to SEQ ID NO: 1254532
uguugucuaauacaaauac

SEQ ID NO: 1254534 - RNA, 19 nt, Artificial Sequence
  Description of Artificial Sequence: Synthetic oligonucleotide
  Sense strand starting at position 3412 of SEQ ID NO: 1241203
gcugcaauuaaugguaaag

SEQ ID NO: 1254535 - RNA, 19 nt, Artificial Sequence
  Description of Artificial Sequence: Synthetic oligonucleotide
  Antisense strand to SEQ ID NO: 1254534
cuuuaccauuaauugcagc

SEQ ID NO: 1254536 - RNA, 19 nt, Artificial Sequence
  Description of Artificial Sequence: Synthetic oligonucleotide
  Sense strand starting at position 3592 of SEQ ID NO: 1241203
uaaagcguucccgagagua

SEQ ID NO: 1254537 - RNA, 19 nt, Artificial Sequence
  Description of Artificial Sequence: Synthetic oligonucleotide
  Antisense strand to SEQ ID NO: 1254536
uacucucgggaacgcuuua

SEQ ID NO: 1254538 - RNA, 19 nt, Artificial Sequence
  Description of Artificial Sequence: Synthetic oligonucleotide
  Sense strand starting at position 3614 of SEQ ID NO: 1241203
cgcuuucugugacuacaaa

SEQ ID NO: 1254539 - RNA, 19 nt, Artificial Sequence
  Description of Artificial Sequence: Synthetic oligonucleotide
  Antisense strand to SEQ ID NO: 1254538
uuuguagucacagaaagcg

SEQ ID NO: 1254540 - RNA, 19 nt, Artificial Sequence
  Description of Artificial Sequence: Synthetic oligonucleotide
  Sense strand starting at position 3780 of SEQ ID NO: 1241203
aggacaauguaguccagau

SEQ ID NO: 1254541 - RNA, 19 nt, Artificial Sequence
  Description of Artificial Sequence: Synthetic oligonucleotide
  Antisense strand to SEQ ID NO: 1254540
aucuggacuacauuguccu

SEQ ID NO: 1254542 - RNA, 19 nt, Artificial Sequence
  Description of Artificial Sequence: Synthetic oligonucleotide
  Sense strand starting at position 3790 of SEQ ID NO: 1241203
aguccagauucgcugggua

SEQ ID NO: 1254543 - RNA, 19 nt, Artificial Sequence
  Description of Artificial Sequence: Synthetic oligonucleotide
  Antisense strand to SEQ ID NO: 1254542
uacccagcgaaucuggacu

SEQ ID NO: 1254544 - RNA, 19 nt, Artificial Sequence
  Description of Artificial Sequence: Synthetic oligonucleotide
  Sense strand starting at position 3792 of SEQ ID NO: 1241203
uccagauucgcuggguaac

SEQ ID NO: 1254545 - RNA, 19 nt, Artificial Sequence
  Description of Artificial Sequence: Synthetic oligonucleotide
  Antisense strand to SEQ ID NO: 1254544
guuacccagcgaaucugga

SEQ ID NO: 1254546 - RNA, 19 nt, Artificial Sequence
  Description of Artificial Sequence: Synthetic oligonucleotide
  Sense strand starting at position 1018 of SEQ ID NO: 1241204
guccacggucccuguuuaa

SEQ ID NO: 1254547 - RNA, 19 nt, Artificial Sequence
  Description of Artificial Sequence: Synthetic oligonucleotide
  Antisense strand to SEQ ID NO: 1254546
uuaaacagggaccguggac

SEQ ID NO: 1254548 - RNA, 19 nt, Artificial Sequence
  Description of Artificial Sequence: Synthetic oligonucleotide
  Sense strand starting at position 1025 of SEQ ID NO: 1241204
gucccuguuuaaggcgaaa

SEQ ID NO: 1254549 - RNA, 19 nt, Artificial Sequence
  Description of Artificial Sequence: Synthetic oligonucleotide
  Antisense strand to SEQ ID NO: 1254548
uuucgccuuaaacagggac

SEQ ID NO: 1254550 - RNA, 19 nt, Artificial Sequence
  Description of Artificial Sequence: Synthetic oligonucleotide
  Sense strand starting at position 1027 of SEQ ID NO: 1241204
cccuguuuaaggcgaaaug

SEQ ID NO: 1254551 - RNA, 19 nt, Artificial Sequence
  Description of Artificial Sequence: Synthetic oligonucleotide
  Antisense strand to SEQ ID NO: 1254550
cauuucgccuuaaacaggg

SEQ ID NO: 1254552 - RNA, 19 nt, Artificial Sequence
  Description of Artificial Sequence: Synthetic oligonucleotide
  Sense strand starting at position 1028 of SEQ ID NO: 1241204
ccuguuuaaggcgaaauga

SEQ ID NO: 1254553 - RNA, 19 nt, Artificial Sequence
  Description of Artificial Sequence: Synthetic oligonucleotide
  Antisense strand to SEQ ID NO: 1254552
ucauuucgccuuaaacagg

SEQ ID NO: 1254554 - RNA, 19 nt, Artificial Sequence
  Description of Artificial Sequence: Synthetic oligonucleotide
  Sense strand starting at position 1184 of SEQ ID NO: 1241204
cguugcuaggaggaagaau

SEQ ID NO: 1254555 - RNA, 19 nt, Artificial Sequence
  Description of Artificial Sequence: Synthetic oligonucleotide
  Antisense strand to SEQ ID NO: 1254554
auucuuccuccuagcaacg

SEQ ID NO: 1254556 - RNA, 19 nt, Artificial Sequence
  Description of Artificial Sequence: Synthetic oligonucleotide
  Sense strand starting at position 2432 of SEQ ID NO: 1241204
cggguuaacgcuuaacuac

SEQ ID NO: 1254557 - RNA, 19 nt, Artificial Sequence
  Description of Artificial Sequence: Synthetic oligonucleotide
  Antisense strand to SEQ ID NO: 1254556
guaguuaagcguuaacccg

SEQ ID NO: 1254558 - RNA, 19 nt, Artificial Sequence
  Description of Artificial Sequence: Synthetic oligonucleotide
  Sense strand starting at position 2593 of SEQ ID NO: 1241204
gggcguauguccgacaucu

SEQ ID NO: 1254559 - RNA, 19 nt, Artificial Sequence
  Description of Artificial Sequence: Synthetic oligonucleotide
  Antisense strand to SEQ ID NO: 1254558
agaugucggacauacgccc

SEQ ID NO: 1254560 - RNA, 19 nt, Artificial Sequence
  Description of Artificial Sequence: Synthetic oligonucleotide
  Sense strand starting at position 3134 of SEQ ID NO: 1241204
gcgaguucagagggaguca

SEQ ID NO: 1254561 - RNA, 19 nt, Artificial Sequence
  Description of Artificial Sequence: Synthetic oligonucleotide
  Antisense strand to SEQ ID NO: 1254560
ugacucccucugaacucgc

SEQ ID NO: 1254562 - RNA, 19 nt, Artificial Sequence
  Description of Artificial Sequence: Synthetic oligonucleotide
  Sense strand starting at position 3135 of SEQ ID NO: 1241204
cgaguucagagggagucaa

SEQ ID NO: 1254563 - RNA, 19 nt, Artificial Sequence
  Description of Artificial Sequence: Synthetic oligonucleotide
  Antisense strand to SEQ ID NO: 1254562
uugacucccucugaacucg

SEQ ID NO: 1254564 - RNA, 19 nt, Artificial Sequence
  Description of Artificial Sequence: Synthetic oligonucleotide
  Sense strand starting at position 3344 of SEQ ID NO: 1241204
uguauuucuucccaaggau

SEQ ID NO: 1254565 - RNA, 19 nt, Artificial Sequence
  Description of Artificial Sequence: Synthetic oligonucleotide
  Antisense strand to SEQ ID NO: 1254564
auccuugggaagaaauaca

SEQ ID NO: 1254566 - RNA, 19 nt, Artificial Sequence
  Description of Artificial Sequence: Synthetic oligonucleotide
  Sense strand starting at position 3356 of SEQ ID NO: 1241204
caaggauaaugugaguuga

SEQ ID NO: 1254567 - RNA, 19 nt, Artificial Sequence
  Description of Artificial Sequence: Synthetic oligonucleotide
  Antisense strand to SEQ ID NO: 1254566
ucaacucacauuauccuug

SEQ ID NO: 1254568 - RNA, 19 nt, Artificial Sequence
  Description of Artificial Sequence: Synthetic oligonucleotide
  Sense strand starting at position 3358 of SEQ ID NO: 1241204
aggauaaugugaguugaug

SEQ ID NO: 1254569 - RNA, 19 nt, Artificial Sequence
  Description of Artificial Sequence: Synthetic oligonucleotide
  Antisense strand to SEQ ID NO: 1254568
caucaacucacauuauccu

SEQ ID NO: 1254570 - RNA, 19 nt, Artificial Sequence
  Description of Artificial Sequence: Synthetic oligonucleotide
  Sense strand starting at position 3360 of SEQ ID NO: 1241204
gauaaugugaguugaugcu

SEQ ID NO: 1254571 - RNA, 19 nt, Artificial Sequence
  Description of Artificial Sequence: Synthetic oligonucleotide
  Antisense strand to SEQ ID NO: 1254570
agcaucaacucacauuauc

SEQ ID NO: 1254572 - RNA, 19 nt, Artificial Sequence
  Description of Artificial Sequence: Synthetic oligonucleotide
  Sense strand starting at position 3366 of SEQ ID NO: 1241204
gugaguugaugcuggcuga

SEQ ID NO: 1254573 - RNA, 19 nt, Artificial Sequence
  Description of Artificial Sequence: Synthetic oligonucleotide
  Antisense strand to SEQ ID NO: 1254572
ucagccagcaucaacucac

SEQ ID NO: 1254574 - RNA, 19 nt, Artificial Sequence
  Description of Artificial Sequence: Synthetic oligonucleotide
  Sense strand starting at position 3369 of SEQ ID NO: 1241204
aguugaugcuggcugagau

SEQ ID NO: 1254575 - RNA, 19 nt, Artificial Sequence
  Description of Artificial Sequence: Synthetic oligonucleotide
  Antisense strand to SEQ ID NO: 1254574
aucucagccagcaucaacu

SEQ ID NO: 1254576 - RNA, 19 nt, Artificial Sequence
  Description of Artificial Sequence: Synthetic oligonucleotide
  Sense strand starting at position 3370 of SEQ ID NO: 1241204
guugaugcuggcugagauc

SEQ ID NO: 1254577 - RNA, 19 nt, Artificial Sequence
  Description of Artificial Sequence: Synthetic oligonucleotide
  Antisense strand to SEQ ID NO: 1254576
gaucucagccagcaucaac

SEQ ID NO: 1254578 - RNA, 19 nt, Artificial Sequence
  Description of Artificial Sequence: Synthetic oligonucleotide
  Sense strand starting at position 3382 of SEQ ID NO: 1241204
ugagaucugcuccgaugag

SEQ ID NO: 1254579 - RNA, 19 nt, Artificial Sequence
  Description of Artificial Sequence: Synthetic oligonucleotide
  Antisense strand to SEQ ID NO: 1254578
cucaucggagcagaucuca

SEQ ID NO: 1254580 - RNA, 19 nt, Artificial Sequence
  Description of Artificial Sequence: Synthetic oligonucleotide
  Sense strand starting at position 3410 of SEQ ID NO: 1241204
gagagagcuccggguguca

SEQ ID NO: 1254581 - RNA, 19 nt, Artificial Sequence
  Description of Artificial Sequence: Synthetic oligonucleotide
  Antisense strand to SEQ ID NO: 1254580
ugacacccggagcucucuc

SEQ ID NO: 1254582 - RNA, 19 nt, Artificial Sequence
  Description of Artificial Sequence: Synthetic oligonucleotide
  Sense strand starting at position 3412 of SEQ ID NO: 1241204
gagagcuccgggugucaaa

SEQ ID NO: 1254583 - RNA, 19 nt, Artificial Sequence
  Description of Artificial Sequence: Synthetic oligonucleotide
  Antisense strand to SEQ ID NO: 1254582
uuugacacccggagcucuc

SEQ ID NO: 1254584 - RNA, 19 nt, Artificial Sequence
  Description of Artificial Sequence: Synthetic oligonucleotide
  Sense strand starting at position 3665 of SEQ ID NO: 1241204
uuaggaauuucccaggcuu

SEQ ID NO: 1254585 - RNA, 19 nt, Artificial Sequence
  Description of Artificial Sequence: Synthetic oligonucleotide
  Antisense strand to SEQ ID NO: 1254584
aagccugggaaauuccuaa

SEQ ID NO: 1254586 - RNA, 19 nt, Artificial Sequence
  Description of Artificial Sequence: Synthetic oligonucleotide
  Sense strand starting at position 3858 of SEQ ID NO: 1241204
acgcuugacuuucucgaca

SEQ ID NO: 1254587 - RNA, 19 nt, Artificial Sequence
  Description of Artificial Sequence: Synthetic oligonucleotide
  Antisense strand to SEQ ID NO: 1254586
ugucgagaaagucaagcgu

SEQ ID NO: 1254588 - RNA, 19 nt, Artificial Sequence
  Description of Artificial Sequence: Synthetic oligonucleotide
  Sense strand starting at position 28 of SEQ ID NO: 1241205
auuguagugcuugcugcaa

SEQ ID NO: 1254589 - RNA, 19 nt, Artificial Sequence
  Description of Artificial Sequence: Synthetic oligonucleotide
  Antisense strand to SEQ ID NO: 1254588
uugcagcaagcacuacaau

SEQ ID NO: 1254590 - RNA, 19 nt, Artificial Sequence
  Description of Artificial Sequence: Synthetic oligonucleotide
  Sense strand starting at position 146 of SEQ ID NO: 1241205
cugauaggcugcuuaaaua

SEQ ID NO: 1254591 - RNA, 19 nt, Artificial Sequence
  Description of Artificial Sequence: Synthetic oligonucleotide
  Antisense strand to SEQ ID NO: 1254590
uauuuaagcagccuaucag

SEQ ID NO: 1254592 - RNA, 19 nt, Artificial Sequence
  Description of Artificial Sequence: Synthetic oligonucleotide
  Sense strand starting at position 240 of SEQ ID NO: 1241205
auacuauuccaauggacug

SEQ ID NO: 1254593 - RNA, 19 nt, Artificial Sequence
  Description of Artificial Sequence: Synthetic oligonucleotide
  Antisense strand to SEQ ID NO: 1254592
caguccauuggaauaguau

SEQ ID NO: 1254594 - RNA, 19 nt, Artificial Sequence
  Description of Artificial Sequence: Synthetic oligonucleotide
  Sense strand starting at position 369 of SEQ ID NO: 1241205
ucgaacgguccuuaauauc

SEQ ID NO: 1254595 - RNA, 19 nt, Artificial Sequence
  Description of Artificial Sequence: Synthetic oligonucleotide
  Antisense strand to SEQ ID NO: 1254594
gauauuaaggaccguucga

SEQ ID NO: 1254596 - RNA, 19 nt, Artificial Sequence
  Description of Artificial Sequence: Synthetic oligonucleotide
  Sense strand starting at position 741 of SEQ ID NO: 1241205
ucguauguggcaucguaca

SEQ ID NO: 1254597 - RNA, 19 nt, Artificial Sequence
  Description of Artificial Sequence: Synthetic oligonucleotide
  Antisense strand to SEQ ID NO: 1254596
uguacgaugccacauacga

SEQ ID NO: 1254598 - RNA, 19 nt, Artificial Sequence
  Description of Artificial Sequence: Synthetic oligonucleotide
  Sense strand starting at position 925 of SEQ ID NO: 1241205
ucuccucuuguguagaaga

SEQ ID NO: 1254599 - RNA, 19 nt, Artificial Sequence
  Description of Artificial Sequence: Synthetic oligonucleotide
  Antisense strand to SEQ ID NO: 1254598
ucuucuacacaagaggaga

SEQ ID NO: 1254600 - RNA, 19 nt, Artificial Sequence
  Description of Artificial Sequence: Synthetic oligonucleotide
  Sense strand starting at position 927 of SEQ ID NO: 1241205
uccucuuguguagaagauu

SEQ ID NO: 1254601 - RNA, 19 nt, Artificial Sequence
  Description of Artificial Sequence: Synthetic oligonucleotide
  Antisense strand to SEQ ID NO: 1254600
aaucuucuacacaagagga

SEQ ID NO: 1254602 - RNA, 19 nt, Artificial Sequence
  Description of Artificial Sequence: Synthetic oligonucleotide
  Sense strand starting at position 1064 of SEQ ID NO: 1241205
acuguuugccuagagaaga

SEQ ID NO: 1254603 - RNA, 19 nt, Artificial Sequence
  Description of Artificial Sequence: Synthetic oligonucleotide
  Antisense strand to SEQ ID NO: 1254602
ucuucucuaggcaaacagu

SEQ ID NO: 1254604 - RNA, 19 nt, Artificial Sequence
  Description of Artificial Sequence: Synthetic oligonucleotide
  Sense strand starting at position 1075 of SEQ ID NO: 1241205
agagaagacucacuuuagu

SEQ ID NO: 1254605 - RNA, 19 nt, Artificial Sequence
  Description of Artificial Sequence: Synthetic oligonucleotide
  Antisense strand to SEQ ID NO: 1254604
acuaaagugagucuucucu

SEQ ID NO: 1254606 - RNA, 19 nt, Artificial Sequence
  Description of Artificial Sequence: Synthetic oligonucleotide
  Sense strand starting at position 1083 of SEQ ID NO: 1241205
cucacuuuagucuggacau

SEQ ID NO: 1254607 - RNA, 19 nt, Artificial Sequence
  Description of Artificial Sequence: Synthetic oligonucleotide
  Antisense strand to SEQ ID NO: 1254606
auguccagacuaaagugag

SEQ ID NO: 1254608 - RNA, 19 nt, Artificial Sequence
  Description of Artificial Sequence: Synthetic oligonucleotide
  Sense strand starting at position 1120 of SEQ ID NO: 1241205
auguaagucguccaaucag

SEQ ID NO: 1254609 - RNA, 19 nt, Artificial Sequence
  Description of Artificial Sequence: Synthetic oligonucleotide
  Antisense strand to SEQ ID NO: 1254608
cugauuggacgacuuacau

SEQ ID NO: 1254610 - RNA, 19 nt, Artificial Sequence
  Description of Artificial Sequence: Synthetic oligonucleotide
  Sense strand starting at position 1252 of SEQ ID NO: 1241205
uugucccaucccugaaaug

SEQ ID NO: 1254611 - RNA, 19 nt, Artificial Sequence
  Description of Artificial Sequence: Synthetic oligonucleotide
  Antisense strand to SEQ ID NO: 1254610
cauuucagggaugggacaa

SEQ ID NO: 1254612 - RNA, 19 nt, Artificial Sequence
  Description of Artificial Sequence: Synthetic oligonucleotide
  Sense strand starting at position 1253 of SEQ ID NO: 1241205
ugucccaucccugaaaugu

SEQ ID NO: 1254613 - RNA, 19 nt, Artificial Sequence
  Description of Artificial Sequence: Synthetic oligonucleotide
  Antisense strand to SEQ ID NO: 1254612
acauuucagggaugggaca

SEQ ID NO: 1254614 - RNA, 19 nt, Artificial Sequence
  Description of Artificial Sequence: Synthetic oligonucleotide
  Sense strand starting at position 1290 of SEQ ID NO: 1241205
augucagagcuucaggagu

SEQ ID NO: 1254615 - RNA, 19 nt, Artificial Sequence
  Description of Artificial Sequence: Synthetic oligonucleotide
  Antisense strand to SEQ ID NO: 1254614
acuccugaagcucugacau

SEQ ID NO: 1254616 - RNA, 19 nt, Artificial Sequence
  Description of Artificial Sequence: Synthetic oligonucleotide
  Sense strand starting at position 1417 of SEQ ID NO: 1241205
acugacguuuccucauaag

SEQ ID NO: 1254617 - RNA, 19 nt, Artificial Sequence
  Description of Artificial Sequence: Synthetic oligonucleotide
  Antisense strand to SEQ ID NO: 1254616
cuuaugaggaaacgucagu

SEQ ID NO: 1254618 - RNA, 19 nt, Artificial Sequence
  Description of Artificial Sequence: Synthetic oligonucleotide
  Sense strand starting at position 1503 of SEQ ID NO: 1241205
aaacuaacugaucgagugu

SEQ ID NO: 1254619 - RNA, 19 nt, Artificial Sequence
  Description of Artificial Sequence: Synthetic oligonucleotide
  Antisense strand to SEQ ID NO: 1254618
acacucgaucaguuaguuu

SEQ ID NO: 1254620 - RNA, 19 nt, Artificial Sequence
  Description of Artificial Sequence: Synthetic oligonucleotide
  Sense strand starting at position 1649 of SEQ ID NO: 1241205
aagccucgcguguuaagua

SEQ ID NO: 1254621 - RNA, 19 nt, Artificial Sequence
  Description of Artificial Sequence: Synthetic oligonucleotide
  Antisense strand to SEQ ID NO: 1254620
uacuuaacacgcgaggcuu

SEQ ID NO: 1254622 - RNA, 19 nt, Artificial Sequence
  Description of Artificial Sequence: Synthetic oligonucleotide
  Sense strand starting at position 2456 of SEQ ID NO: 1241205
aggugucuuuccuuauuua

SEQ ID NO: 1254623 - RNA, 19 nt, Artificial Sequence
  Description of Artificial Sequence: Synthetic oligonucleotide
  Antisense strand to SEQ ID NO: 1254622
uaaauaaggaaagacaccu

SEQ ID NO: 1254624 - RNA, 19 nt, Artificial Sequence
  Description of Artificial Sequence: Synthetic oligonucleotide
  Sense strand starting at position 2568 of SEQ ID NO: 1241205
acgagauugcuccaguuga

SEQ ID NO: 1254625 - RNA, 19 nt, Artificial Sequence
  Description of Artificial Sequence: Synthetic oligonucleotide
  Antisense strand to SEQ ID NO: 1254624
ucaacuggagcaaucucgu

SEQ ID NO: 1254626 - RNA, 19 nt, Artificial Sequence
  Description of Artificial Sequence: Synthetic oligonucleotide
  Sense strand starting at position 2676 of SEQ ID NO: 1241205
cgugguagcauuccuuagu

SEQ ID NO: 1254627 - RNA, 19 nt, Artificial Sequence
  Description of Artificial Sequence: Synthetic oligonucleotide
  Antisense strand to SEQ ID NO: 1254626
acuaaggaaugcuaccacg

SEQ ID NO: 1254628 - RNA, 19 nt, Artificial Sequence
  Description of Artificial Sequence: Synthetic oligonucleotide
  Sense strand starting at position 2679 of SEQ ID NO: 1241205
gguagcauuccuuaguaau

SEQ ID NO: 1254629 - RNA, 19 nt, Artificial Sequence
  Description of Artificial Sequence: Synthetic oligonucleotide
  Antisense strand to SEQ ID NO: 1254628
auuacuaaggaaugcuacc

SEQ ID NO: 1254630 - RNA, 19 nt, Artificial Sequence
  Description of Artificial Sequence: Synthetic oligonucleotide
  Sense strand starting at position 2939 of SEQ ID NO: 1241205
ucaguuucugaguauauca

SEQ ID NO: 1254631 - RNA, 19 nt, Artificial Sequence
  Description of Artificial Sequence: Synthetic oligonucleotide
  Antisense strand to SEQ ID NO: 1254630
ugauauacucagaaacuga

SEQ ID NO: 1254632 - RNA, 19 nt, Artificial Sequence
  Description of Artificial Sequence: Synthetic oligonucleotide
  Sense strand starting at position 2941 of SEQ ID NO: 1241205
aguuucugaguauaucaau

SEQ ID NO: 1254633 - RNA, 19 nt, Artificial Sequence
  Description of Artificial Sequence: Synthetic oligonucleotide
  Antisense strand to SEQ ID NO: 1254632
auugauauacucagaaacu

SEQ ID NO: 1254634 - RNA, 19 nt, Artificial Sequence
  Description of Artificial Sequence: Synthetic oligonucleotide
  Sense strand starting at position 2987 of SEQ ID NO: 1241205
uggucucaggauugagguu

SEQ ID NO: 1254635 - RNA, 19 nt, Artificial Sequence
  Description of Artificial Sequence: Synthetic oligonucleotide
  Antisense strand to SEQ ID NO: 1254634
aaccucaauccugagacca

SEQ ID NO: 1254636 - RNA, 19 nt, Artificial Sequence
  Description of Artificial Sequence: Synthetic oligonucleotide
  Sense strand starting at position 2988 of SEQ ID NO: 1241205
ggucucaggauugagguua

SEQ ID NO: 1254637 - RNA, 19 nt, Artificial Sequence
  Description of Artificial Sequence: Synthetic oligonucleotide
  Antisense strand to SEQ ID NO: 1254636
uaaccucaauccugagacc

SEQ ID NO: 1254638 - RNA, 19 nt, Artificial Sequence
  Description of Artificial Sequence: Synthetic oligonucleotide
  Sense strand starting at position 2999 of SEQ ID NO: 1241205
ugagguuaggcaggaaagu

SEQ ID NO: 1254639 - RNA, 19 nt, Artificial Sequence
  Description of Artificial Sequence: Synthetic oligonucleotide
  Antisense strand to SEQ ID NO: 1254638
acuuuccugccuaaccuca

SEQ ID NO: 1254640 - RNA, 19 nt, Artificial Sequence
  Description of Artificial Sequence: Synthetic oligonucleotide
  Sense strand starting at position 3013 of SEQ ID NO: 1241205
aaagucaugagaugguguu

SEQ ID NO: 1254641 - RNA, 19 nt, Artificial Sequence
  Description of Artificial Sequence: Synthetic oligonucleotide
  Antisense strand to SEQ ID NO: 1254640
aacaccaucucaugacuuu

SEQ ID NO: 1254642 - RNA, 19 nt, Artificial Sequence
  Description of Artificial Sequence: Synthetic oligonucleotide
  Sense strand starting at position 3085 of SEQ ID NO: 1241205
ggaacaugcuaggcauuga

SEQ ID NO: 1254643 - RNA, 19 nt, Artificial Sequence
  Description of Artificial Sequence: Synthetic oligonucleotide
  Antisense strand to SEQ ID NO: 1254642
ucaaugccuagcauguucc

SEQ ID NO: 1254644 - RNA, 19 nt, Artificial Sequence
  Description of Artificial Sequence: Synthetic oligonucleotide
  Sense strand starting at position 3151 of SEQ ID NO: 1241205
gaagauagacuucguuuag

SEQ ID NO: 1254645 - RNA, 19 nt, Artificial Sequence
  Description of Artificial Sequence: Synthetic oligonucleotide
  Antisense strand to SEQ ID NO: 1254644
cuaaacgaagucuaucuuc

SEQ ID NO: 1254646 - RNA, 19 nt, Artificial Sequence
  Description of Artificial Sequence: Synthetic oligonucleotide
  Sense strand starting at position 3152 of SEQ ID NO: 1241205
aagauagacuucguuuaga

SEQ ID NO: 1254647 - RNA, 19 nt, Artificial Sequence
  Description of Artificial Sequence: Synthetic oligonucleotide
  Antisense strand to SEQ ID NO: 1254646
ucuaaacgaagucuaucuu

SEQ ID NO: 1254648 - RNA, 19 nt, Artificial Sequence
  Description of Artificial Sequence: Synthetic oligonucleotide
  Sense strand starting at position 3155 of SEQ ID NO: 1241205
auagacuucguuuagagac

SEQ ID NO: 1254649 - RNA, 19 nt, Artificial Sequence
  Description of Artificial Sequence: Synthetic oligonucleotide
  Antisense strand to SEQ ID NO: 1254648
gucucuaaacgaagucuau

SEQ ID NO: 1254650 - RNA, 19 nt, Artificial Sequence
  Description of Artificial Sequence: Synthetic oligonucleotide
  Sense strand starting at position 3193 of SEQ ID NO: 1241205
cccaaugucuaagcaugaa

SEQ ID NO: 1254651 - RNA, 19 nt, Artificial Sequence
  Description of Artificial Sequence: Synthetic oligonucleotide
  Antisense strand to SEQ ID NO: 1254650
uucaugcuuagacauuggg

SEQ ID NO: 1254652 - RNA, 19 nt, Artificial Sequence
  Description of Artificial Sequence: Synthetic oligonucleotide
  Sense strand starting at position 3302 of SEQ ID NO: 1241205
uggagaaugucucuccaga

SEQ ID NO: 1254653 - RNA, 19 nt, Artificial Sequence
  Description of Artificial Sequence: Synthetic oligonucleotide
  Antisense strand to SEQ ID NO: 1254652
ucuggagagacauucucca

SEQ ID NO: 1254654 - RNA, 19 nt, Artificial Sequence
  Description of Artificial Sequence: Synthetic oligonucleotide
  Sense strand starting at position 3363 of SEQ ID NO: 1241205
ucgcuucaucuugcgguua

SEQ ID NO: 1254655 - RNA, 19 nt, Artificial Sequence
  Description of Artificial Sequence: Synthetic oligonucleotide
  Antisense strand to SEQ ID NO: 1254654
uaaccgcaagaugaagcga

SEQ ID NO: 1254656 - RNA, 19 nt, Artificial Sequence
  Description of Artificial Sequence: Synthetic oligonucleotide
  Sense strand starting at position 3678 of SEQ ID NO: 1241205
cuguaagcuccuuaaggau

SEQ ID NO: 1254657 - RNA, 19 nt, Artificial Sequence
  Description of Artificial Sequence: Synthetic oligonucleotide
  Antisense strand to SEQ ID NO: 1254656
auccuuaaggagcuuacag

SEQ ID NO: 1254658 - RNA, 19 nt, Artificial Sequence
  Description of Artificial Sequence: Synthetic oligonucleotide
  Sense strand starting at position 3697 of SEQ ID NO: 1241205
cugaguccugguuaucuuu

SEQ ID NO: 1254659 - RNA, 19 nt, Artificial Sequence
  Description of Artificial Sequence: Synthetic oligonucleotide
  Antisense strand to SEQ ID NO: 1254658
aaagauaaccaggacucag

SEQ ID NO: 1254660 - RNA, 19 nt, Artificial Sequence
  Description of Artificial Sequence: Synthetic oligonucleotide
  Sense strand starting at position 3735 of SEQ ID NO: 1241205
gauaguaggugcuuaauag

SEQ ID NO: 1254661 - RNA, 19 nt, Artificial Sequence
  Description of Artificial Sequence: Synthetic oligonucleotide
  Antisense strand to SEQ ID NO: 1254660
cuauuaagcaccuacuauc

SEQ ID NO: 1254662 - RNA, 19 nt, Artificial Sequence
  Description of Artificial Sequence: Synthetic oligonucleotide
  Sense strand starting at position 3847 of SEQ ID NO: 1241205
gagcauggcacugagaaug

SEQ ID NO: 1254663 - RNA, 19 nt, Artificial Sequence
  Description of Artificial Sequence: Synthetic oligonucleotide
  Antisense strand to SEQ ID NO: 1254662
cauucucagugccaugcuc

SEQ ID NO: 1254664 - RNA, 19 nt, Artificial Sequence
  Description of Artificial Sequence: Synthetic oligonucleotide
  Sense strand starting at position 3892 of SEQ ID NO: 1241205
ucaccucugugaguuauaa

SEQ ID NO: 1254665 - RNA, 19 nt, Artificial Sequence
  Description of Artificial Sequence: Synthetic oligonucleotide
  Antisense strand to SEQ ID NO: 1254664
uuauaacucacagagguga

SEQ ID NO: 1254666 - RNA, 19 nt, Artificial Sequence
  Description of Artificial Sequence: Synthetic oligonucleotide
  Sense strand starting at position 3951 of SEQ ID NO: 1241205
aucauugcugcaugaauuu

SEQ ID NO: 1254667 - RNA, 19 nt, Artificial Sequence
  Description of Artificial Sequence: Synthetic oligonucleotide
  Antisense strand to SEQ ID NO: 1254666
aaauucaugcagcaaugau

SEQ ID NO: 1254668 - RNA, 19 nt, Artificial Sequence
  Description of Artificial Sequence: Synthetic oligonucleotide
  Sense strand starting at position 3 of SEQ ID NO: 1241206
auuaguuggccuuaagaua

SEQ ID NO: 1254669 - RNA, 19 nt, Artificial Sequence
  Description of Artificial Sequence: Synthetic oligonucleotide
  Antisense strand to SEQ ID NO: 1254668
uaucuuaaggccaacuaau

SEQ ID NO: 1254670 - RNA, 19 nt, Artificial Sequence
  Description of Artificial Sequence: Synthetic oligonucleotide
  Sense strand starting at position 104 of SEQ ID NO: 1241206
cagugcagagauuaguaau

SEQ ID NO: 1254671 - RNA, 19 nt, Artificial Sequence
  Description of Artificial Sequence: Synthetic oligonucleotide
  Antisense strand to SEQ ID NO: 1254670
auuacuaaucucugcacug

SEQ ID NO: 1254672 - RNA, 19 nt, Artificial Sequence
  Description of Artificial Sequence: Synthetic oligonucleotide
  Sense strand starting at position 294 of SEQ ID NO: 1241206
uugccaucaugacugauau

SEQ ID NO: 1254673 - RNA, 19 nt, Artificial Sequence
  Description of Artificial Sequence: Synthetic oligonucleotide
  Antisense strand to SEQ ID NO: 1254672
auaucagucaugauggcaa

SEQ ID NO: 1254674 - RNA, 19 nt, Artificial Sequence
  Description of Artificial Sequence: Synthetic oligonucleotide
  Sense strand starting at position 295 of SEQ ID NO: 1241206
ugccaucaugacugauauu

SEQ ID NO: 1254675 - RNA, 19 nt, Artificial Sequence
  Description of Artificial Sequence: Synthetic oligonucleotide
  Antisense strand to SEQ ID NO: 1254674
aauaucagucaugauggca

SEQ ID NO: 1254676 - RNA, 19 nt, Artificial Sequence
  Description of Artificial Sequence: Synthetic oligonucleotide
  Sense strand starting at position 332 of SEQ ID NO: 1241206
gcaggacucacaugguaaa

SEQ ID NO: 1254677 - RNA, 19 nt, Artificial Sequence
  Description of Artificial Sequence: Synthetic oligonucleotide
  Antisense strand to SEQ ID NO: 1254676
uuuaccaugugaguccugc

SEQ ID NO: 1254678 - RNA, 19 nt, Artificial Sequence
  Description of Artificial Sequence: Synthetic oligonucleotide
  Sense strand starting at position 425 of SEQ ID NO: 1241206
uuaagaagauaugcaggua

SEQ ID NO: 1254679 - RNA, 19 nt, Artificial Sequence
  Description of Artificial Sequence: Synthetic oligonucleotide
  Antisense strand to SEQ ID NO: 1254678
uaccugcauaucuucuuaa

SEQ ID NO: 1254680 - RNA, 19 nt, Artificial Sequence
  Description of Artificial Sequence: Synthetic oligonucleotide
  Sense strand starting at position 428 of SEQ ID NO: 1241206
agaagauaugcagguaaca

SEQ ID NO: 1254681 - RNA, 19 nt, Artificial Sequence
  Description of Artificial Sequence: Synthetic oligonucleotide
  Antisense strand to SEQ ID NO: 1254680
uguuaccugcauaucuucu

SEQ ID NO: 1254682 - RNA, 19 nt, Artificial Sequence
  Description of Artificial Sequence: Synthetic oligonucleotide
  Sense strand starting at position 556 of SEQ ID NO: 1241206
uguuauauccgugcugcca

SEQ ID NO: 1254683 - RNA, 19 nt, Artificial Sequence
  Description of Artificial Sequence: Synthetic oligonucleotide
  Antisense strand to SEQ ID NO: 1254682
uggcagcacggauauaaca

SEQ ID NO: 1254684 - RNA, 19 nt, Artificial Sequence
  Description of Artificial Sequence: Synthetic oligonucleotide
  Sense strand starting at position 557 of SEQ ID NO: 1241206
guuauauccgugcugccau

SEQ ID NO: 1254685 - RNA, 19 nt, Artificial Sequence
  Description of Artificial Sequence: Synthetic oligonucleotide
  Antisense strand to SEQ ID NO: 1254684
auggcagcacggauauaac

SEQ ID NO: 1254686 - RNA, 19 nt, Artificial Sequence
  Description of Artificial Sequence: Synthetic oligonucleotide
  Sense strand starting at position 599 of SEQ ID NO: 1241206
gcaggugagguguaugaau

SEQ ID NO: 1254687 - RNA, 19 nt, Artificial Sequence
  Description of Artificial Sequence: Synthetic oligonucleotide
  Antisense strand to SEQ ID NO: 1254686
auucauacaccucaccugc

SEQ ID NO: 1254688 - RNA, 19 nt, Artificial Sequence
  Description of Artificial Sequence: Synthetic oligonucleotide
  Sense strand starting at position 678 of SEQ ID NO: 1241206
ccaucugaccaguggauaa

SEQ ID NO: 1254689 - RNA, 19 nt, Artificial Sequence
  Description of Artificial Sequence: Synthetic oligonucleotide
  Antisense strand to SEQ ID NO: 1254688
uuauccacuggucagaugg

SEQ ID NO: 1254690 - RNA, 19 nt, Artificial Sequence
  Description of Artificial Sequence: Synthetic oligonucleotide
  Sense strand starting at position 766 of SEQ ID NO: 1241206
auuguagugcuugcugcaa

SEQ ID NO: 1254691 - RNA, 19 nt, Artificial Sequence
  Description of Artificial Sequence: Synthetic oligonucleotide
  Antisense strand to SEQ ID NO: 1254690
uugcagcaagcacuacaau

SEQ ID NO: 1254692 - RNA, 19 nt, Artificial Sequence
  Description of Artificial Sequence: Synthetic oligonucleotide
  Sense strand starting at position 978 of SEQ ID NO: 1241206
auacuauuccaauggacug

SEQ ID NO: 1254693 - RNA, 19 nt, Artificial Sequence
  Description of Artificial Sequence: Synthetic oligonucleotide
  Antisense strand to SEQ ID NO: 1254692
caguccauuggaauaguau

SEQ ID NO: 1254694 - RNA, 19 nt, Artificial Sequence
  Description of Artificial Sequence: Synthetic oligonucleotide
  Sense strand starting at position 1107 of SEQ ID NO: 1241206
ucgaacgguccuuaauauc

SEQ ID NO: 1254695 - RNA, 19 nt, Artificial Sequence
  Description of Artificial Sequence: Synthetic oligonucleotide
  Antisense strand to SEQ ID NO: 1254694
gauauuaaggaccguucga

SEQ ID NO: 1254696 - RNA, 19 nt, Artificial Sequence
  Description of Artificial Sequence: Synthetic oligonucleotide
  Sense strand starting at position 1479 of SEQ ID NO: 1241206
ucguauguggcaucguaca

SEQ ID NO: 1254697 - RNA, 19 nt, Artificial Sequence
  Description of Artificial Sequence: Synthetic oligonucleotide
  Antisense strand to SEQ ID NO: 1254696
uguacgaugccacauacga

SEQ ID NO: 1254698 - RNA, 19 nt, Artificial Sequence
  Description of Artificial Sequence: Synthetic oligonucleotide
  Sense strand starting at position 1663 of SEQ ID NO: 1241206
ucuccucuuguguagaaga

SEQ ID NO: 1254699 - RNA, 19 nt, Artificial Sequence
  Description of Artificial Sequence: Synthetic oligonucleotide
  Antisense strand to SEQ ID NO: 1254698
ucuucuacacaagaggaga

SEQ ID NO: 1254700 - RNA, 19 nt, Artificial Sequence
  Description of Artificial Sequence: Synthetic oligonucleotide
  Sense strand starting at position 1665 of SEQ ID NO: 1241206
uccucuuguguagaagauu

SEQ ID NO: 1254701 - RNA, 19 nt, Artificial Sequence
  Description of Artificial Sequence: Synthetic oligonucleotide
  Antisense strand to SEQ ID NO: 1254700
aaucuucuacacaagagga

SEQ ID NO: 1254702 - RNA, 19 nt, Artificial Sequence
  Description of Artificial Sequence: Synthetic oligonucleotide
  Sense strand starting at position 1802 of SEQ ID NO: 1241206
acuguuugccuagagaaga

SEQ ID NO: 1254703 - RNA, 19 nt, Artificial Sequence
  Description of Artificial Sequence: Synthetic oligonucleotide
  Antisense strand to SEQ ID NO: 1254702
ucuucucuaggcaaacagu

SEQ ID NO: 1254704 - RNA, 19 nt, Artificial Sequence
  Description of Artificial Sequence: Synthetic oligonucleotide
  Sense strand starting at position 1813 of SEQ ID NO: 1241206
agagaagacucacuuuagu

SEQ ID NO: 1254705 - RNA, 19 nt, Artificial Sequence
  Description of Artificial Sequence: Synthetic oligonucleotide
  Antisense strand to SEQ ID NO: 1254704
acuaaagugagucuucucu

SEQ ID NO: 1254706 - RNA, 19 nt, Artificial Sequence
  Description of Artificial Sequence: Synthetic oligonucleotide
  Sense strand starting at position 1821 of SEQ ID NO: 1241206
cucacuuuagucuggacau

SEQ ID NO: 1254707 - RNA, 19 nt, Artificial Sequence
  Description of Artificial Sequence: Synthetic oligonucleotide
  Antisense strand to SEQ ID NO: 1254706
auguccagacuaaagugag

SEQ ID NO: 1254708 - RNA, 19 nt, Artificial Sequence
  Description of Artificial Sequence: Synthetic oligonucleotide
  Sense strand starting at position 1990 of SEQ ID NO: 1241206
uugucccaucccugaaaug

SEQ ID NO: 1254709 - RNA, 19 nt, Artificial Sequence
  Description of Artificial Sequence: Synthetic oligonucleotide
  Antisense strand to SEQ ID NO: 1254708
cauuucagggaugggacaa

SEQ ID NO: 1254710 - RNA, 19 nt, Artificial Sequence
  Description of Artificial Sequence: Synthetic oligonucleotide
  Sense strand starting at position 1991 of SEQ ID NO: 1241206
ugucccaucccugaaaugu

SEQ ID NO: 1254711 - RNA, 19 nt, Artificial Sequence
  Description of Artificial Sequence: Synthetic oligonucleotide
  Antisense strand to SEQ ID NO: 1254710
acauuucagggaugggaca

SEQ ID NO: 1254712 - RNA, 19 nt, Artificial Sequence
  Description of Artificial Sequence: Synthetic oligonucleotide
  Sense strand starting at position 2028 of SEQ ID NO: 1241206
augucagagcuucaggagu

SEQ ID NO: 1254713 - RNA, 19 nt, Artificial Sequence
  Description of Artificial Sequence: Synthetic oligonucleotide
  Antisense strand to SEQ ID NO: 1254712
acuccugaagcucugacau

SEQ ID NO: 1254714 - RNA, 19 nt, Artificial Sequence
  Description of Artificial Sequence: Synthetic oligonucleotide
  Sense strand starting at position 2241 of SEQ ID NO: 1241206
aaacuaacugaucgagugu

SEQ ID NO: 1254715 - RNA, 19 nt, Artificial Sequence
  Description of Artificial Sequence: Synthetic oligonucleotide
  Antisense strand to SEQ ID NO: 1254714
acacucgaucaguuaguuu

SEQ ID NO: 1254716 - RNA, 19 nt, Artificial Sequence
  Description of Artificial Sequence: Synthetic oligonucleotide
  Sense strand starting at position 2387 of SEQ ID NO: 1241206
aagccucgcguguuaagua

SEQ ID NO: 1254717 - RNA, 19 nt, Artificial Sequence
  Description of Artificial Sequence: Synthetic oligonucleotide
  Antisense strand to SEQ ID NO: 1254716
uacuuaacacgcgaggcuu

SEQ ID NO: 1254718 - RNA, 19 nt, Artificial Sequence
  Description of Artificial Sequence: Synthetic oligonucleotide
  Sense strand starting at position 3194 of SEQ ID NO: 1241206
aggugucuuuccuuauuua

SEQ ID NO: 1254719 - RNA, 19 nt, Artificial Sequence
  Description of Artificial Sequence: Synthetic oligonucleotide
  Antisense strand to SEQ ID NO: 1254718
uaaauaaggaaagacaccu

SEQ ID NO: 1254720 - RNA, 19 nt, Artificial Sequence
  Description of Artificial Sequence: Synthetic oligonucleotide
  Sense strand starting at position 3306 of SEQ ID NO: 1241206
acgagauugcuccaguuga

SEQ ID NO: 1254721 - RNA, 19 nt, Artificial Sequence
  Description of Artificial Sequence: Synthetic oligonucleotide
  Antisense strand to SEQ ID NO: 1254720
ucaacuggagcaaucucgu

SEQ ID NO: 1254722 - RNA, 19 nt, Artificial Sequence
  Description of Artificial Sequence: Synthetic oligonucleotide
  Sense strand starting at position 3414 of SEQ ID NO: 1241206
cgugguagcauuccuuagu

SEQ ID NO: 1254723 - RNA, 19 nt, Artificial Sequence
  Description of Artificial Sequence: Synthetic oligonucleotide
  Antisense strand to SEQ ID NO: 1254722
acuaaggaaugcuaccacg

SEQ ID NO: 1254724 - RNA, 19 nt, Artificial Sequence
  Description of Artificial Sequence: Synthetic oligonucleotide
  Sense strand starting at position 3417 of SEQ ID NO: 1241206
gguagcauuccuuaguaau

SEQ ID NO: 1254725 - RNA, 19 nt, Artificial Sequence
  Description of Artificial Sequence: Synthetic oligonucleotide
  Antisense strand to SEQ ID NO: 1254724
auuacuaaggaaugcuacc

SEQ ID NO: 1254726 - RNA, 19 nt, Artificial Sequence
  Description of Artificial Sequence: Synthetic oligonucleotide
  Sense strand starting at position 3677 of SEQ ID NO: 1241206
ucaguuucugaguauauca

SEQ ID NO: 1254727 - RNA, 19 nt, Artificial Sequence
  Description of Artificial Sequence: Synthetic oligonucleotide
  Antisense strand to SEQ ID NO: 1254726
ugauauacucagaaacuga

SEQ ID NO: 1254728 - RNA, 19 nt, Artificial Sequence
  Description of Artificial Sequence: Synthetic oligonucleotide
  Sense strand starting at position 3679 of SEQ ID NO: 1241206
aguuucugaguauaucaau

SEQ ID NO: 1254729 - RNA, 19 nt, Artificial Sequence
  Description of Artificial Sequence: Synthetic oligonucleotide
  Antisense strand to SEQ ID NO: 1254728
auugauauacucagaaacu

SEQ ID NO: 1254730 - RNA, 19 nt, Artificial Sequence
  Description of Artificial Sequence: Synthetic oligonucleotide
  Sense strand starting at position 3725 of SEQ ID NO: 1241206
uggucucaggauugagguu

SEQ ID NO: 1254731 - RNA, 19 nt, Artificial Sequence
  Description of Artificial Sequence: Synthetic oligonucleotide
  Antisense strand to SEQ ID NO: 1254730
aaccucaauccugagacca

SEQ ID NO: 1254732 - RNA, 19 nt, Artificial Sequence
  Description of Artificial Sequence: Synthetic oligonucleotide
  Sense strand starting at position 3726 of SEQ ID NO: 1241206
ggucucaggauugagguua

SEQ ID NO: 1254733 - RNA, 19 nt, Artificial Sequence
  Description of Artificial Sequence: Synthetic oligonucleotide
  Antisense strand to SEQ ID NO: 1254732
uaaccucaauccugagacc

SEQ ID NO: 1254734 - RNA, 19 nt, Artificial Sequence
  Description of Artificial Sequence: Synthetic oligonucleotide
  Sense strand starting at position 3737 of SEQ ID NO: 1241206
ugagguuaggcaggaaagu

SEQ ID NO: 1254735 - RNA, 19 nt, Artificial Sequence
  Description of Artificial Sequence: Synthetic oligonucleotide
  Antisense strand to SEQ ID NO: 1254734
acuuuccugccuaaccuca

SEQ ID NO: 1254736 - RNA, 19 nt, Artificial Sequence
  Description of Artificial Sequence: Synthetic oligonucleotide
  Sense strand starting at position 3751 of SEQ ID NO: 1241206
aaagucaugagaugguguu

SEQ ID NO: 1254737 - RNA, 19 nt, Artificial Sequence
  Description of Artificial Sequence: Synthetic oligonucleotide
  Antisense strand to SEQ ID NO: 1254736
aacaccaucucaugacuuu

SEQ ID NO: 1254738 - RNA, 19 nt, Artificial Sequence
  Description of Artificial Sequence: Synthetic oligonucleotide
  Sense strand starting at position 3823 of SEQ ID NO: 1241206
ggaacaugcuaggcauuga

SEQ ID NO: 1254739 - RNA, 19 nt, Artificial Sequence
  Description of Artificial Sequence: Synthetic oligonucleotide
  Antisense strand to SEQ ID NO: 1254738
ucaaugccuagcauguucc

SEQ ID NO: 1254740 - RNA, 19 nt, Artificial Sequence
  Description of Artificial Sequence: Synthetic oligonucleotide
  Sense strand starting at position 3889 of SEQ ID NO: 1241206
gaagauagacuucguuuag

SEQ ID NO: 1254741 - RNA, 19 nt, Artificial Sequence
  Description of Artificial Sequence: Synthetic oligonucleotide
  Antisense strand to SEQ ID NO: 1254740
cuaaacgaagucuaucuuc

SEQ ID NO: 1254742 - RNA, 19 nt, Artificial Sequence
  Description of Artificial Sequence: Synthetic oligonucleotide
  Sense strand starting at position 3890 of SEQ ID NO: 1241206
aagauagacuucguuuaga

SEQ ID NO: 1254743 - RNA, 19 nt, Artificial Sequence
  Description of Artificial Sequence: Synthetic oligonucleotide
  Antisense strand to SEQ ID NO: 1254742
ucuaaacgaagucuaucuu

SEQ ID NO: 1254744 - RNA, 19 nt, Artificial Sequence
  Description of Artificial Sequence: Synthetic oligonucleotide
  Sense strand starting at position 3893 of SEQ ID NO: 1241206
auagacuucguuuagagac

SEQ ID NO: 1254745 - RNA, 19 nt, Artificial Sequence
  Description of Artificial Sequence: Synthetic oligonucleotide
  Antisense strand to SEQ ID NO: 1254744
gucucuaaacgaagucuau

SEQ ID NO: 1254746 - RNA, 19 nt, Artificial Sequence
  Description of Artificial Sequence: Synthetic oligonucleotide
  Sense strand starting at position 3931 of SEQ ID NO: 1241206
cccaaugucuaagcaugaa

SEQ ID NO: 1254747 - RNA, 19 nt, Artificial Sequence
  Description of Artificial Sequence: Synthetic oligonucleotide
  Antisense strand to SEQ ID NO: 1254746
uucaugcuuagacauuggg

SEQ ID NO: 1254748 - RNA, 19 nt, Artificial Sequence
  Description of Artificial Sequence: Synthetic oligonucleotide
  Sense strand starting at position 101 of SEQ ID NO: 1241207
ucgaacgguccuuaauauc

SEQ ID NO: 1254749 - RNA, 19 nt, Artificial Sequence
  Description of Artificial Sequence: Synthetic oligonucleotide
  Antisense strand to SEQ ID NO: 1254748
gauauuaaggaccguucga

SEQ ID NO: 1254750 - RNA, 19 nt, Artificial Sequence
  Description of Artificial Sequence: Synthetic oligonucleotide
  Sense strand starting at position 473 of SEQ ID NO: 1241207
ucguauguggcaucguaca

SEQ ID NO: 1254751 - RNA, 19 nt, Artificial Sequence
  Description of Artificial Sequence: Synthetic oligonucleotide
  Antisense strand to SEQ ID NO: 1254750
uguacgaugccacauacga

SEQ ID NO: 1254752 - RNA, 19 nt, Artificial Sequence
  Description of Artificial Sequence: Synthetic oligonucleotide
  Sense strand starting at position 657 of SEQ ID NO: 1241207
ucuccucuuguguagaaga

SEQ ID NO: 1254753 - RNA, 19 nt, Artificial Sequence
  Description of Artificial Sequence: Synthetic oligonucleotide
  Antisense strand to SEQ ID NO: 1254752
ucuucuacacaagaggaga

SEQ ID NO: 1254754 - RNA, 19 nt, Artificial Sequence
  Description of Artificial Sequence: Synthetic oligonucleotide
  Sense strand starting at position 659 of SEQ ID NO: 1241207
uccucuuguguagaagauu

SEQ ID NO: 1254755 - RNA, 19 nt, Artificial Sequence
  Description of Artificial Sequence: Synthetic oligonucleotide
  Antisense strand to SEQ ID NO: 1254754
aaucuucuacacaagagga

SEQ ID NO: 1254756 - RNA, 19 nt, Artificial Sequence
  Description of Artificial Sequence: Synthetic oligonucleotide
  Sense strand starting at position 796 of SEQ ID NO: 1241207
acuguuugccuagagaaga

SEQ ID NO: 1254757 - RNA, 19 nt, Artificial Sequence
  Description of Artificial Sequence: Synthetic oligonucleotide
  Antisense strand to SEQ ID NO: 1254756
ucuucucuaggcaaacagu

SEQ ID NO: 1254758 - RNA, 19 nt, Artificial Sequence
  Description of Artificial Sequence: Synthetic oligonucleotide
  Sense strand starting at position 807 of SEQ ID NO: 1241207
agagaagacucacuuuagu

SEQ ID NO: 1254759 - RNA, 19 nt, Artificial Sequence
  Description of Artificial Sequence: Synthetic oligonucleotide
  Antisense strand to SEQ ID NO: 1254758
acuaaagugagucuucucu

SEQ ID NO: 1254760 - RNA, 19 nt, Artificial Sequence
  Description of Artificial Sequence: Synthetic oligonucleotide
  Sense strand starting at position 815 of SEQ ID NO: 1241207
cucacuuuagucuggacau

SEQ ID NO: 1254761 - RNA, 19 nt, Artificial Sequence
  Description of Artificial Sequence: Synthetic oligonucleotide
  Antisense strand to SEQ ID NO: 1254760
auguccagacuaaagugag

SEQ ID NO: 1254762 - RNA, 19 nt, Artificial Sequence
  Description of Artificial Sequence: Synthetic oligonucleotide
  Sense strand starting at position 852 of SEQ ID NO: 1241207
auguaagucguccaaucag

SEQ ID NO: 1254763 - RNA, 19 nt, Artificial Sequence
  Description of Artificial Sequence: Synthetic oligonucleotide
  Antisense strand to SEQ ID NO: 1254762
cugauuggacgacuuacau

SEQ ID NO: 1254764 - RNA, 19 nt, Artificial Sequence
  Description of Artificial Sequence: Synthetic oligonucleotide
  Sense strand starting at position 984 of SEQ ID NO: 1241207
uugucccaucccugaaaug

SEQ ID NO: 1254765 - RNA, 19 nt, Artificial Sequence
  Description of Artificial Sequence: Synthetic oligonucleotide
  Antisense strand to SEQ ID NO: 1254764
cauuucagggaugggacaa

SEQ ID NO: 1254766 - RNA, 19 nt, Artificial Sequence
  Description of Artificial Sequence: Synthetic oligonucleotide
  Sense strand starting at position 985 of SEQ ID NO: 1241207
ugucccaucccugaaaugu

SEQ ID NO: 1254767 - RNA, 19 nt, Artificial Sequence
  Description of Artificial Sequence: Synthetic oligonucleotide
  Antisense strand to SEQ ID NO: 1254766
acauuucagggaugggaca

SEQ ID NO: 1254768 - RNA, 19 nt, Artificial Sequence
  Description of Artificial Sequence: Synthetic oligonucleotide
  Sense strand starting at position 1022 of SEQ ID NO: 1241207
augucagagcuucaggagu

SEQ ID NO: 1254769 - RNA, 19 nt, Artificial Sequence
  Description of Artificial Sequence: Synthetic oligonucleotide
  Antisense strand to SEQ ID NO: 1254768
acuccugaagcucugacau

SEQ ID NO: 1254770 - RNA, 19 nt, Artificial Sequence
  Description of Artificial Sequence: Synthetic oligonucleotide
  Sense strand starting at position 1235 of SEQ ID NO: 1241207
aaacuaacugaucgagugu

SEQ ID NO: 1254771 - RNA, 19 nt, Artificial Sequence
  Description of Artificial Sequence: Synthetic oligonucleotide
  Antisense strand to SEQ ID NO: 1254770
acacucgaucaguuaguuu

SEQ ID NO: 1254772 - RNA, 19 nt, Artificial Sequence
  Description of Artificial Sequence: Synthetic oligonucleotide
  Sense strand starting at position 1381 of SEQ ID NO: 1241207
aagccucgcguguuaagua

SEQ ID NO: 1254773 - RNA, 19 nt, Artificial Sequence
  Description of Artificial Sequence: Synthetic oligonucleotide
  Antisense strand to SEQ ID NO: 1254772
uacuuaacacgcgaggcuu

SEQ ID NO: 1254774 - RNA, 19 nt, Artificial Sequence
  Description of Artificial Sequence: Synthetic oligonucleotide
  Sense strand starting at position 2188 of SEQ ID NO: 1241207
aggugucuuuccuuauuua

SEQ ID NO: 1254775 - RNA, 19 nt, Artificial Sequence
  Description of Artificial Sequence: Synthetic oligonucleotide
  Antisense strand to SEQ ID NO: 1254774
uaaauaaggaaagacaccu

SEQ ID NO: 1254776 - RNA, 19 nt, Artificial Sequence
  Description of Artificial Sequence: Synthetic oligonucleotide
  Sense strand starting at position 2300 of SEQ ID NO: 1241207
acgagauugcuccaguuga

SEQ ID NO: 1254777 - RNA, 19 nt, Artificial Sequence
  Description of Artificial Sequence: Synthetic oligonucleotide
  Antisense strand to SEQ ID NO: 1254776
ucaacuggagcaaucucgu

SEQ ID NO: 1254778 - RNA, 19 nt, Artificial Sequence
  Description of Artificial Sequence: Synthetic oligonucleotide
  Sense strand starting at position 2408 of SEQ ID NO: 1241207
cgugguagcauuccuuagu

SEQ ID NO: 1254779 - RNA, 19 nt, Artificial Sequence
  Description of Artificial Sequence: Synthetic oligonucleotide
  Antisense strand to SEQ ID NO: 1254778
acuaaggaaugcuaccacg

SEQ ID NO: 1254780 - RNA, 19 nt, Artificial Sequence
  Description of Artificial Sequence: Synthetic oligonucleotide
  Sense strand starting at position 2411 of SEQ ID NO: 1241207
gguagcauuccuuaguaau

SEQ ID NO: 1254781 - RNA, 19 nt, Artificial Sequence
  Description of Artificial Sequence: Synthetic oligonucleotide
  Antisense strand to SEQ ID NO: 1254780
auuacuaaggaaugcuacc

SEQ ID NO: 1254782 - RNA, 19 nt, Artificial Sequence
  Description of Artificial Sequence: Synthetic oligonucleotide
  Sense strand starting at position 2671 of SEQ ID NO: 1241207
ucaguuucugaguauauca

SEQ ID NO: 1254783 - RNA, 19 nt, Artificial Sequence
  Description of Artificial Sequence: Synthetic oligonucleotide
  Antisense strand to SEQ ID NO: 1254782
ugauauacucagaaacuga

SEQ ID NO: 1254784 - RNA, 19 nt, Artificial Sequence
  Description of Artificial Sequence: Synthetic oligonucleotide
  Sense strand starting at position 2673 of SEQ ID NO: 1241207
aguuucugaguauaucaau

SEQ ID NO: 1254785 - RNA, 19 nt, Artificial Sequence
  Description of Artificial Sequence: Synthetic oligonucleotide
  Antisense strand to SEQ ID NO: 1254784
auugauauacucagaaacu

SEQ ID NO: 1254786 - RNA, 19 nt, Artificial Sequence
  Description of Artificial Sequence: Synthetic oligonucleotide
  Sense strand starting at position 2719 of SEQ ID NO: 1241207
uggucucaggauugagguu

SEQ ID NO: 1254787 - RNA, 19 nt, Artificial Sequence
  Description of Artificial Sequence: Synthetic oligonucleotide
  Antisense strand to SEQ ID NO: 1254786
aaccucaauccugagacca

SEQ ID NO: 1254788 - RNA, 19 nt, Artificial Sequence
  Description of Artificial Sequence: Synthetic oligonucleotide
  Sense strand starting at position 2720 of SEQ ID NO: 1241207
ggucucaggauugagguua

SEQ ID NO: 1254789 - RNA, 19 nt, Artificial Sequence
  Description of Artificial Sequence: Synthetic oligonucleotide
  Antisense strand to SEQ ID NO: 1254788
uaaccucaauccugagacc

SEQ ID NO: 1254790 - RNA, 19 nt, Artificial Sequence
  Description of Artificial Sequence: Synthetic oligonucleotide
  Sense strand starting at position 2731 of SEQ ID NO: 1241207
ugagguuaggcaggaaagu

SEQ ID NO: 1254791 - RNA, 19 nt, Artificial Sequence
  Description of Artificial Sequence: Synthetic oligonucleotide
  Antisense strand to SEQ ID NO: 1254790
acuuuccugccuaaccuca

SEQ ID NO: 1254792 - RNA, 19 nt, Artificial Sequence
  Description of Artificial Sequence: Synthetic oligonucleotide
  Sense strand starting at position 2745 of SEQ ID NO: 1241207
aaagucaugagaugguguu

SEQ ID NO: 1254793 - RNA, 19 nt, Artificial Sequence
  Description of Artificial Sequence: Synthetic oligonucleotide
  Antisense strand to SEQ ID NO: 1254792
aacaccaucucaugacuuu

SEQ ID NO: 1254794 - RNA, 19 nt, Artificial Sequence
  Description of Artificial Sequence: Synthetic oligonucleotide
  Sense strand starting at position 2817 of SEQ ID NO: 1241207
ggaacaugcuaggcauuga

SEQ ID NO: 1254795 - RNA, 19 nt, Artificial Sequence
  Description of Artificial Sequence: Synthetic oligonucleotide
  Antisense strand to SEQ ID NO: 1254794
ucaaugccuagcauguucc

SEQ ID NO: 1254796 - RNA, 19 nt, Artificial Sequence
  Description of Artificial Sequence: Synthetic oligonucleotide
  Sense strand starting at position 2883 of SEQ ID NO: 1241207
gaagauagacuucguuuag

SEQ ID NO: 1254797 - RNA, 19 nt, Artificial Sequence
  Description of Artificial Sequence: Synthetic oligonucleotide
  Antisense strand to SEQ ID NO: 1254796
cuaaacgaagucuaucuuc

SEQ ID NO: 1254798 - RNA, 19 nt, Artificial Sequence
  Description of Artificial Sequence: Synthetic oligonucleotide
  Sense strand starting at position 2884 of SEQ ID NO: 1241207
aagauagacuucguuuaga

SEQ ID NO: 1254799 - RNA, 19 nt, Artificial Sequence
  Description of Artificial Sequence: Synthetic oligonucleotide
  Antisense strand to SEQ ID NO: 1254798
ucuaaacgaagucuaucuu

SEQ ID NO: 1254800 - RNA, 19 nt, Artificial Sequence
  Description of Artificial Sequence: Synthetic oligonucleotide
  Sense strand starting at position 2887 of SEQ ID NO: 1241207
auagacuucguuuagagac

SEQ ID NO: 1254801 - RNA, 19 nt, Artificial Sequence
  Description of Artificial Sequence: Synthetic oligonucleotide
  Antisense strand to SEQ ID NO: 1254800
gucucuaaacgaagucuau

SEQ ID NO: 1254802 - RNA, 19 nt, Artificial Sequence
  Description of Artificial Sequence: Synthetic oligonucleotide
  Sense strand starting at position 2925 of SEQ ID NO: 1241207
cccaaugucuaagcaugaa

SEQ ID NO: 1254803 - RNA, 19 nt, Artificial Sequence
  Description of Artificial Sequence: Synthetic oligonucleotide
  Antisense strand to SEQ ID NO: 1254802
uucaugcuuagacauuggg

SEQ ID NO: 1254804 - RNA, 19 nt, Artificial Sequence
  Description of Artificial Sequence: Synthetic oligonucleotide
  Sense strand starting at position 3034 of SEQ ID NO: 1241207
uggagaaugucucuccaga

SEQ ID NO: 1254805 - RNA, 19 nt, Artificial Sequence
  Description of Artificial Sequence: Synthetic oligonucleotide
  Antisense strand to SEQ ID NO: 1254804
ucuggagagacauucucca

SEQ ID NO: 1254806 - RNA, 19 nt, Artificial Sequence
  Description of Artificial Sequence: Synthetic oligonucleotide
  Sense strand starting at position 3095 of SEQ ID NO: 1241207
ucgcuucaucuugcgguua

SEQ ID NO: 1254807 - RNA, 19 nt, Artificial Sequence
  Description of Artificial Sequence: Synthetic oligonucleotide
  Antisense strand to SEQ ID NO: 1254806
uaaccgcaagaugaagcga

SEQ ID NO: 1254808 - RNA, 19 nt, Artificial Sequence
  Description of Artificial Sequence: Synthetic oligonucleotide
  Sense strand starting at position 3410 of SEQ ID NO: 1241207
cuguaagcuccuuaaggau

SEQ ID NO: 1254809 - RNA, 19 nt, Artificial Sequence
  Description of Artificial Sequence: Synthetic oligonucleotide
  Antisense strand to SEQ ID NO: 1254808
auccuuaaggagcuuacag

SEQ ID NO: 1254810 - RNA, 19 nt, Artificial Sequence
  Description of Artificial Sequence: Synthetic oligonucleotide
  Sense strand starting at position 3429 of SEQ ID NO: 1241207
cugaguccugguuaucuuu

SEQ ID NO: 1254811 - RNA, 19 nt, Artificial Sequence
  Description of Artificial Sequence: Synthetic oligonucleotide
  Antisense strand to SEQ ID NO: 1254810
aaagauaaccaggacucag

SEQ ID NO: 1254812 - RNA, 19 nt, Artificial Sequence
  Description of Artificial Sequence: Synthetic oligonucleotide
  Sense strand starting at position 3467 of SEQ ID NO: 1241207
gauaguaggugcuuaauag

SEQ ID NO: 1254813 - RNA, 19 nt, Artificial Sequence
  Description of Artificial Sequence: Synthetic oligonucleotide
  Antisense strand to SEQ ID NO: 1254812
cuauuaagcaccuacuauc

SEQ ID NO: 1254814 - RNA, 19 nt, Artificial Sequence
  Description of Artificial Sequence: Synthetic oligonucleotide
  Sense strand starting at position 3579 of SEQ ID NO: 1241207
gagcauggcacugagaaug

SEQ ID NO: 1254815 - RNA, 19 nt, Artificial Sequence
  Description of Artificial Sequence: Synthetic oligonucleotide
  Antisense strand to SEQ ID NO: 1254814
cauucucagugccaugcuc

SEQ ID NO: 1254816 - RNA, 19 nt, Artificial Sequence
  Description of Artificial Sequence: Synthetic oligonucleotide
  Sense strand starting at position 3683 of SEQ ID NO: 1241207
aucauugcugcaugaauuu

SEQ ID NO: 1254817 - RNA, 19 nt, Artificial Sequence
  Description of Artificial Sequence: Synthetic oligonucleotide
  Antisense strand to SEQ ID NO: 1254816
aaauucaugcagcaaugau

SEQ ID NO: 1254818 - RNA, 19 nt, Artificial Sequence
  Description of Artificial Sequence: Synthetic oligonucleotide
  Sense strand starting at position 3744 of SEQ ID NO: 1241207
cauguauuagcguucgacu

SEQ ID NO: 1254819 - RNA, 19 nt, Artificial Sequence
  Description of Artificial Sequence: Synthetic oligonucleotide
  Antisense strand to SEQ ID NO: 1254818
agucgaacgcuaauacaug

SEQ ID NO: 1254820 - RNA, 19 nt, Artificial Sequence
  Description of Artificial Sequence: Synthetic oligonucleotide
  Sense strand starting at position 3751 of SEQ ID NO: 1241207
uagcguucgacuguugcua

SEQ ID NO: 1254821 - RNA, 19 nt, Artificial Sequence
  Description of Artificial Sequence: Synthetic oligonucleotide
  Antisense strand to SEQ ID NO: 1254820
uagcaacagucgaacgcua

SEQ ID NO: 1254822 - RNA, 19 nt, Artificial Sequence
  Description of Artificial Sequence: Synthetic oligonucleotide
  Sense strand starting at position 3752 of SEQ ID NO: 1241207
agcguucgacuguugcuau

SEQ ID NO: 1254823 - RNA, 19 nt, Artificial Sequence
  Description of Artificial Sequence: Synthetic oligonucleotide
  Antisense strand to SEQ ID NO: 1254822
auagcaacagucgaacgcu

SEQ ID NO: 1254824 - RNA, 19 nt, Artificial Sequence
  Description of Artificial Sequence: Synthetic oligonucleotide
  Sense strand starting at position 3816 of SEQ ID NO: 1241207
uauuuauggucuuacagag

SEQ ID NO: 1254825 - RNA, 19 nt, Artificial Sequence
  Description of Artificial Sequence: Synthetic oligonucleotide
  Antisense strand to SEQ ID NO: 1254824
cucuguaagaccauaaaua

SEQ ID NO: 1254826 - RNA, 19 nt, Artificial Sequence
  Description of Artificial Sequence: Synthetic oligonucleotide
  Sense strand starting at position 3873 of SEQ ID NO: 1241207
aagagauagucucugguuc

SEQ ID NO: 1254827 - RNA, 19 nt, Artificial Sequence
  Description of Artificial Sequence: Synthetic oligonucleotide
  Antisense strand to SEQ ID NO: 1254826
gaaccagagacuaucucuu

SEQ ID NO: 1254828 - RNA, 19 nt, Artificial Sequence
  Description of Artificial Sequence: Synthetic oligonucleotide
  Sense strand starting at position 165 of SEQ ID NO: 1241208
ugaaccuaugucugacuga

SEQ ID NO: 1254829 - RNA, 19 nt, Artificial Sequence
  Description of Artificial Sequence: Synthetic oligonucleotide
  Antisense strand to SEQ ID NO: 1254828
ucagucagacauagguuca

SEQ ID NO: 1254830 - RNA, 19 nt, Artificial Sequence
  Description of Artificial Sequence: Synthetic oligonucleotide
  Sense strand starting at position 172 of SEQ ID NO: 1241208
augucugacugacuccaaa

SEQ ID NO: 1254831 - RNA, 19 nt, Artificial Sequence
  Description of Artificial Sequence: Synthetic oligonucleotide
  Antisense strand to SEQ ID NO: 1254830
uuuggagucagucagacau

SEQ ID NO: 1254832 - RNA, 19 nt, Artificial Sequence
  Description of Artificial Sequence: Synthetic oligonucleotide
  Sense strand starting at position 266 of SEQ ID NO: 1241208
aucuaauuaguuggccuau

SEQ ID NO: 1254833 - RNA, 19 nt, Artificial Sequence
  Description of Artificial Sequence: Synthetic oligonucleotide
  Antisense strand to SEQ ID NO: 1254832
auaggccaacuaauuagau

SEQ ID NO: 1254834 - RNA, 19 nt, Artificial Sequence
  Description of Artificial Sequence: Synthetic oligonucleotide
  Sense strand starting at position 267 of SEQ ID NO: 1241208
ucuaauuaguuggccuauu

SEQ ID NO: 1254835 - RNA, 19 nt, Artificial Sequence
  Description of Artificial Sequence: Synthetic oligonucleotide
  Antisense strand to SEQ ID NO: 1254834
aauaggccaacuaauuaga

SEQ ID NO: 1254836 - RNA, 19 nt, Artificial Sequence
  Description of Artificial Sequence: Synthetic oligonucleotide
  Sense strand starting at position 463 of SEQ ID NO: 1241208
uguaaugaacauuagcaau

SEQ ID NO: 1254837 - RNA, 19 nt, Artificial Sequence
  Description of Artificial Sequence: Synthetic oligonucleotide
  Antisense strand to SEQ ID NO: 1254836
auugcuaauguucauuaca

SEQ ID NO: 1254838 - RNA, 19 nt, Artificial Sequence
  Description of Artificial Sequence: Synthetic oligonucleotide
  Sense strand starting at position 501 of SEQ ID NO: 1241208
auaaccaauuguguaagau

SEQ ID NO: 1254839 - RNA, 19 nt, Artificial Sequence
  Description of Artificial Sequence: Synthetic oligonucleotide
  Antisense strand to SEQ ID NO: 1254838
aucuuacacaauugguuau

SEQ ID NO: 1254840 - RNA, 19 nt, Artificial Sequence
  Description of Artificial Sequence: Synthetic oligonucleotide
  Sense strand starting at position 594 of SEQ ID NO: 1241208
ggaauucuaugcucuauug

SEQ ID NO: 1254841 - RNA, 19 nt, Artificial Sequence
  Description of Artificial Sequence: Synthetic oligonucleotide
  Antisense strand to SEQ ID NO: 1254840
caauagagcauagaauucc

SEQ ID NO: 1254842 - RNA, 19 nt, Artificial Sequence
  Description of Artificial Sequence: Synthetic oligonucleotide
  Sense strand starting at position 950 of SEQ ID NO: 1241208
agaacugcuguuugaucuu

SEQ ID NO: 1254843 - RNA, 19 nt, Artificial Sequence
  Description of Artificial Sequence: Synthetic oligonucleotide
  Antisense strand to SEQ ID NO: 1254842
aagaucaaacagcaguucu

SEQ ID NO: 1254844 - RNA, 19 nt, Artificial Sequence
  Description of Artificial Sequence: Synthetic oligonucleotide
  Sense strand starting at position 1057 of SEQ ID NO: 1241208
uuacaaggcuugucuaaac

SEQ ID NO: 1254845 - RNA, 19 nt, Artificial Sequence
  Description of Artificial Sequence: Synthetic oligonucleotide
  Antisense strand to SEQ ID NO: 1254844
guuuagacaagccuuguaa

SEQ ID NO: 1254846 - RNA, 19 nt, Artificial Sequence
  Description of Artificial Sequence: Synthetic oligonucleotide
  Sense strand starting at position 1122 of SEQ ID NO: 1241208
agaagaauugcucagcggu

SEQ ID NO: 1254847 - RNA, 19 nt, Artificial Sequence
  Description of Artificial Sequence: Synthetic oligonucleotide
  Antisense strand to SEQ ID NO: 1254846
accgcugagcaauucuucu

SEQ ID NO: 1254848 - RNA, 19 nt, Artificial Sequence
  Description of Artificial Sequence: Synthetic oligonucleotide
  Sense strand starting at position 1159 of SEQ ID NO: 1241208
ccuugucuccaauaggcaa

SEQ ID NO: 1254849 - RNA, 19 nt, Artificial Sequence
  Description of Artificial Sequence: Synthetic oligonucleotide
  Antisense strand to SEQ ID NO: 1254848
uugccuauuggagacaagg

SEQ ID NO: 1254850 - RNA, 19 nt, Artificial Sequence
  Description of Artificial Sequence: Synthetic oligonucleotide
  Sense strand starting at position 1320 of SEQ ID NO: 1241208
guuacaaguuacucugaaa

SEQ ID NO: 1254851 - RNA, 19 nt, Artificial Sequence
  Description of Artificial Sequence: Synthetic oligonucleotide
  Antisense strand to SEQ ID NO: 1254850
uuucagaguaacuuguaac

SEQ ID NO: 1254852 - RNA, 19 nt, Artificial Sequence
  Description of Artificial Sequence: Synthetic oligonucleotide
  Sense strand starting at position 1331 of SEQ ID NO: 1241208
cucugaaagaucugaggcu

SEQ ID NO: 1254853 - RNA, 19 nt, Artificial Sequence
  Description of Artificial Sequence: Synthetic oligonucleotide
  Antisense strand to SEQ ID NO: 1254852
agccucagaucuuucagag

SEQ ID NO: 1254854 - RNA, 19 nt, Artificial Sequence
  Description of Artificial Sequence: Synthetic oligonucleotide
  Sense strand starting at position 1450 of SEQ ID NO: 1241208
gcccgaauccgggacagaa

SEQ ID NO: 1254855 - RNA, 19 nt, Artificial Sequence
  Description of Artificial Sequence: Synthetic oligonucleotide
  Antisense strand to SEQ ID NO: 1254854
uucugucccggauucgggc

SEQ ID NO: 1254856 - RNA, 19 nt, Artificial Sequence
  Description of Artificial Sequence: Synthetic oligonucleotide
  Sense strand starting at position 1523 of SEQ ID NO: 1241208
ggcugcuuuaucgccuaga

SEQ ID NO: 1254857 - RNA, 19 nt, Artificial Sequence
  Description of Artificial Sequence: Synthetic oligonucleotide
  Antisense strand to SEQ ID NO: 1254856
ucuaggcgauaaagcagcc

SEQ ID NO: 1254858 - RNA, 19 nt, Artificial Sequence
  Description of Artificial Sequence: Synthetic oligonucleotide
  Sense strand starting at position 1526 of SEQ ID NO: 1241208
ugcuuuaucgccuagaaac

SEQ ID NO: 1254859 - RNA, 19 nt, Artificial Sequence
  Description of Artificial Sequence: Synthetic oligonucleotide
  Antisense strand to SEQ ID NO: 1254858
guuucuaggcgauaaagca

SEQ ID NO: 1254860 - RNA, 19 nt, Artificial Sequence
  Description of Artificial Sequence: Synthetic oligonucleotide
  Sense strand starting at position 1528 of SEQ ID NO: 1241208
cuuuaucgccuagaaacaa

SEQ ID NO: 1254861 - RNA, 19 nt, Artificial Sequence
  Description of Artificial Sequence: Synthetic oligonucleotide
  Antisense strand to SEQ ID NO: 1254860
uuguuucuaggcgauaaag

SEQ ID NO: 1254862 - RNA, 19 nt, Artificial Sequence
  Description of Artificial Sequence: Synthetic oligonucleotide
  Sense strand starting at position 2052 of SEQ ID NO: 1241208
ucucaugagcuagacuuua

SEQ ID NO: 1254863 - RNA, 19 nt, Artificial Sequence
  Description of Artificial Sequence: Synthetic oligonucleotide
  Antisense strand to SEQ ID NO: 1254862
uaaagucuagcucaugaga

SEQ ID NO: 1254864 - RNA, 19 nt, Artificial Sequence
  Description of Artificial Sequence: Synthetic oligonucleotide
  Sense strand starting at position 2265 of SEQ ID NO: 1241208
gcuguuccgccggcaaauu

SEQ ID NO: 1254865 - RNA, 19 nt, Artificial Sequence
  Description of Artificial Sequence: Synthetic oligonucleotide
  Antisense strand to SEQ ID NO: 1254864
aauuugccggcggaacagc

SEQ ID NO: 1254866 - RNA, 19 nt, Artificial Sequence
  Description of Artificial Sequence: Synthetic oligonucleotide
  Sense strand starting at position 2276 of SEQ ID NO: 1241208
ggcaaauucuaaguagacu

SEQ ID NO: 1254867 - RNA, 19 nt, Artificial Sequence
  Description of Artificial Sequence: Synthetic oligonucleotide
  Antisense strand to SEQ ID NO: 1254866
agucuacuuagaauuugcc

SEQ ID NO: 1254868 - RNA, 19 nt, Artificial Sequence
  Description of Artificial Sequence: Synthetic oligonucleotide
  Sense strand starting at position 2524 of SEQ ID NO: 1241208
acaagcaauuuauacgaga

SEQ ID NO: 1254869 - RNA, 19 nt, Artificial Sequence
  Description of Artificial Sequence: Synthetic oligonucleotide
  Antisense strand to SEQ ID NO: 1254868
ucucguauaaauugcuugu

SEQ ID NO: 1254870 - RNA, 19 nt, Artificial Sequence
  Description of Artificial Sequence: Synthetic oligonucleotide
  Sense strand starting at position 2527 of SEQ ID NO: 1241208
agcaauuuauacgagacuu

SEQ ID NO: 1254871 - RNA, 19 nt, Artificial Sequence
  Description of Artificial Sequence: Synthetic oligonucleotide
  Antisense strand to SEQ ID NO: 1254870
aagucucguauaaauugcu

SEQ ID NO: 1254872 - RNA, 19 nt, Artificial Sequence
  Description of Artificial Sequence: Synthetic oligonucleotide
  Sense strand starting at position 2562 of SEQ ID NO: 1241208
uggacuuaaucauagagga

SEQ ID NO: 1254873 - RNA, 19 nt, Artificial Sequence
  Description of Artificial Sequence: Synthetic oligonucleotide
  Antisense strand to SEQ ID NO: 1254872
uccucuaugauuaagucca

SEQ ID NO: 1254874 - RNA, 19 nt, Artificial Sequence
  Description of Artificial Sequence: Synthetic oligonucleotide
  Sense strand starting at position 2586 of SEQ ID NO: 1241208
agcauugcuuauccaagau

SEQ ID NO: 1254875 - RNA, 19 nt, Artificial Sequence
  Description of Artificial Sequence: Synthetic oligonucleotide
  Antisense strand to SEQ ID NO: 1254874
aucuuggauaagcaaugcu

SEQ ID NO: 1254876 - RNA, 19 nt, Artificial Sequence
  Description of Artificial Sequence: Synthetic oligonucleotide
  Sense strand starting at position 2699 of SEQ ID NO: 1241208
cuguauuuguuuccacuuu

SEQ ID NO: 1254877 - RNA, 19 nt, Artificial Sequence
  Description of Artificial Sequence: Synthetic oligonucleotide
  Antisense strand to SEQ ID NO: 1254876
aaaguggaaacaaauacag

SEQ ID NO: 1254878 - RNA, 19 nt, Artificial Sequence
  Description of Artificial Sequence: Synthetic oligonucleotide
  Sense strand starting at position 2810 of SEQ ID NO: 1241208
gugagucagcuccaucaag

SEQ ID NO: 1254879 - RNA, 19 nt, Artificial Sequence
  Description of Artificial Sequence: Synthetic oligonucleotide
  Antisense strand to SEQ ID NO: 1254878
cuugauggagcugacucac

SEQ ID NO: 1254880 - RNA, 19 nt, Artificial Sequence
  Description of Artificial Sequence: Synthetic oligonucleotide
  Sense strand starting at position 3074 of SEQ ID NO: 1241208
augaacuaaguuuguccua

SEQ ID NO: 1254881 - RNA, 19 nt, Artificial Sequence
  Description of Artificial Sequence: Synthetic oligonucleotide
  Antisense strand to SEQ ID NO: 1254880
uaggacaaacuuaguucau

SEQ ID NO: 1254882 - RNA, 19 nt, Artificial Sequence
  Description of Artificial Sequence: Synthetic oligonucleotide
  Sense strand starting at position 3075 of SEQ ID NO: 1241208
ugaacuaaguuuguccuau

SEQ ID NO: 1254883 - RNA, 19 nt, Artificial Sequence
  Description of Artificial Sequence: Synthetic oligonucleotide
  Antisense strand to SEQ ID NO: 1254882
auaggacaaacuuaguuca

SEQ ID NO: 1254884 - RNA, 19 nt, Artificial Sequence
  Description of Artificial Sequence: Synthetic oligonucleotide
  Sense strand starting at position 3076 of SEQ ID NO: 1241208
gaacuaaguuuguccuaug

SEQ ID NO: 1254885 - RNA, 19 nt, Artificial Sequence
  Description of Artificial Sequence: Synthetic oligonucleotide
  Antisense strand to SEQ ID NO: 1254884
cauaggacaaacuuaguuc

SEQ ID NO: 1254886 - RNA, 19 nt, Artificial Sequence
  Description of Artificial Sequence: Synthetic oligonucleotide
  Sense strand starting at position 3087 of SEQ ID NO: 1241208
guccuauggccucacauau

SEQ ID NO: 1254887 - RNA, 19 nt, Artificial Sequence
  Description of Artificial Sequence: Synthetic oligonucleotide
  Antisense strand to SEQ ID NO: 1254886
auaugugaggccauaggac

SEQ ID NO: 1254888 - RNA, 19 nt, Artificial Sequence
  Description of Artificial Sequence: Synthetic oligonucleotide
  Sense strand starting at position 3100 of SEQ ID NO: 1241208
acauauuccuuggcaaaug

SEQ ID NO: 1254889 - RNA, 19 nt, Artificial Sequence
  Description of Artificial Sequence: Synthetic oligonucleotide
  Antisense strand to SEQ ID NO: 1254888
cauuugccaaggaauaugu

SEQ ID NO: 1254890 - RNA, 19 nt, Artificial Sequence
  Description of Artificial Sequence: Synthetic oligonucleotide
  Sense strand starting at position 3147 of SEQ ID NO: 1241208
ugagaagcuugcuucuaca

SEQ ID NO: 1254891 - RNA, 19 nt, Artificial Sequence
  Description of Artificial Sequence: Synthetic oligonucleotide
  Antisense strand to SEQ ID NO: 1254890
uguagaagcaagcuucuca

SEQ ID NO: 1254892 - RNA, 19 nt, Artificial Sequence
  Description of Artificial Sequence: Synthetic oligonucleotide
  Sense strand starting at position 3220 of SEQ ID NO: 1241208
cccucaacuguuggagaau

SEQ ID NO: 1254893 - RNA, 19 nt, Artificial Sequence
  Description of Artificial Sequence: Synthetic oligonucleotide
  Antisense strand to SEQ ID NO: 1254892
auucuccaacaguugaggg

SEQ ID NO: 1254894 - RNA, 19 nt, Artificial Sequence
  Description of Artificial Sequence: Synthetic oligonucleotide
  Sense strand starting at position 3510 of SEQ ID NO: 1241208
ggagaugccucucccaaag

SEQ ID NO: 1254895 - RNA, 19 nt, Artificial Sequence
  Description of Artificial Sequence: Synthetic oligonucleotide
  Antisense strand to SEQ ID NO: 1254894
cuuugggagaggcaucucc

SEQ ID NO: 1254896 - RNA, 19 nt, Artificial Sequence
  Description of Artificial Sequence: Synthetic oligonucleotide
  Sense strand starting at position 3586 of SEQ ID NO: 1241208
uaguguauuuagccugcua

SEQ ID NO: 1254897 - RNA, 19 nt, Artificial Sequence
  Description of Artificial Sequence: Synthetic oligonucleotide
  Antisense strand to SEQ ID NO: 1254896
uagcaggcuaaauacacua

SEQ ID NO: 1254898 - RNA, 19 nt, Artificial Sequence
  Description of Artificial Sequence: Synthetic oligonucleotide
  Sense strand starting at position 3613 of SEQ ID NO: 1241208
gcucucugagcacaggaau

SEQ ID NO: 1254899 - RNA, 19 nt, Artificial Sequence
  Description of Artificial Sequence: Synthetic oligonucleotide
  Antisense strand to SEQ ID NO: 1254898
auuccugugcucagagagc

SEQ ID NO: 1254900 - RNA, 19 nt, Artificial Sequence
  Description of Artificial Sequence: Synthetic oligonucleotide
  Sense strand starting at position 3677 of SEQ ID NO: 1241208
guagucauauuacugaauu

SEQ ID NO: 1254901 - RNA, 19 nt, Artificial Sequence
  Description of Artificial Sequence: Synthetic oligonucleotide
  Antisense strand to SEQ ID NO: 1254900
aauucaguaauaugacuac

SEQ ID NO: 1254902 - RNA, 19 nt, Artificial Sequence
  Description of Artificial Sequence: Synthetic oligonucleotide
  Sense strand starting at position 3724 of SEQ ID NO: 1241208
augagauuacuuggaagca

SEQ ID NO: 1254903 - RNA, 19 nt, Artificial Sequence
  Description of Artificial Sequence: Synthetic oligonucleotide
  Antisense strand to SEQ ID NO: 1254902
ugcuuccaaguaaucucau

SEQ ID NO: 1254904 - RNA, 19 nt, Artificial Sequence
  Description of Artificial Sequence: Synthetic oligonucleotide
  Sense strand starting at position 3827 of SEQ ID NO: 1241208
ugaucuaguuuagcuugaa

SEQ ID NO: 1254905 - RNA, 19 nt, Artificial Sequence
  Description of Artificial Sequence: Synthetic oligonucleotide
  Antisense strand to SEQ ID NO: 1254904
uucaagcuaaacuagauca

SEQ ID NO: 1254906 - RNA, 19 nt, Artificial Sequence
  Description of Artificial Sequence: Synthetic oligonucleotide
  Sense strand starting at position 3828 of SEQ ID NO: 1241208
gaucuaguuuagcuugaaa

SEQ ID NO: 1254907 - RNA, 19 nt, Artificial Sequence
  Description of Artificial Sequence: Synthetic oligonucleotide
  Antisense strand to SEQ ID NO: 1254906
uuucaagcuaaacuagauc

SEQ ID NO: 1254908 - RNA, 19 nt, Artificial Sequence
  Description of Artificial Sequence: Synthetic oligonucleotide
  Sense strand starting at position 122 of SEQ ID NO: 1241209
agagaugaggucuauguuu

SEQ ID NO: 1254909 - RNA, 19 nt, Artificial Sequence
  Description of Artificial Sequence: Synthetic oligonucleotide
  Antisense strand to SEQ ID NO: 1254908
aaacauagaccucaucucu

SEQ ID NO: 1254910 - RNA, 19 nt, Artificial Sequence
  Description of Artificial Sequence: Synthetic oligonucleotide
  Sense strand starting at position 209 of SEQ ID NO: 1241209
aucagcuguccugauagaa

SEQ ID NO: 1254911 - RNA, 19 nt, Artificial Sequence
  Description of Artificial Sequence: Synthetic oligonucleotide
  Antisense strand to SEQ ID NO: 1254910
uucuaucaggacagcugau

SEQ ID NO: 1254912 - RNA, 19 nt, Artificial Sequence
  Description of Artificial Sequence: Synthetic oligonucleotide
  Sense strand starting at position 284 of SEQ ID NO: 1241209
auggaaggcuaucuucuaa

SEQ ID NO: 1254913 - RNA, 19 nt, Artificial Sequence
  Description of Artificial Sequence: Synthetic oligonucleotide
  Antisense strand to SEQ ID NO: 1254912
uuagaagauagccuuccau

SEQ ID NO: 1254914 - RNA, 19 nt, Artificial Sequence
  Description of Artificial Sequence: Synthetic oligonucleotide
  Sense strand starting at position 595 of SEQ ID NO: 1241209
accuucuuacgcuagaaac

SEQ ID NO: 1254915 - RNA, 19 nt, Artificial Sequence
  Description of Artificial Sequence: Synthetic oligonucleotide
  Antisense strand to SEQ ID NO: 1254914
guuucuagcguaagaaggu

SEQ ID NO: 1254916 - RNA, 19 nt, Artificial Sequence
  Description of Artificial Sequence: Synthetic oligonucleotide
  Sense strand starting at position 597 of SEQ ID NO: 1241209
cuucuuacgcuagaaacua

SEQ ID NO: 1254917 - RNA, 19 nt, Artificial Sequence
  Description of Artificial Sequence: Synthetic oligonucleotide
  Antisense strand to SEQ ID NO: 1254916
uaguuucuagcguaagaag

SEQ ID NO: 1254918 - RNA, 19 nt, Artificial Sequence
  Description of Artificial Sequence: Synthetic oligonucleotide
  Sense strand starting at position 843 of SEQ ID NO: 1241209
gacuguguuugccuuauuu

SEQ ID NO: 1254919 - RNA, 19 nt, Artificial Sequence
  Description of Artificial Sequence: Synthetic oligonucleotide
  Antisense strand to SEQ ID NO: 1254918
aaauaaggcaaacacaguc

SEQ ID NO: 1254920 - RNA, 19 nt, Artificial Sequence
  Description of Artificial Sequence: Synthetic oligonucleotide
  Sense strand starting at position 845 of SEQ ID NO: 1241209
cuguguuugccuuauuuag

SEQ ID NO: 1254921 - RNA, 19 nt, Artificial Sequence
  Description of Artificial Sequence: Synthetic oligonucleotide
  Antisense strand to SEQ ID NO: 1254920
cuaaauaaggcaaacacag

SEQ ID NO: 1254922 - RNA, 19 nt, Artificial Sequence
  Description of Artificial Sequence: Synthetic oligonucleotide
  Sense strand starting at position 878 of SEQ ID NO: 1241209
aauguaaauguguaguaag

SEQ ID NO: 1254923 - RNA, 19 nt, Artificial Sequence
  Description of Artificial Sequence: Synthetic oligonucleotide
  Antisense strand to SEQ ID NO: 1254922
cuuacuacacauuuacauu

SEQ ID NO: 1254924 - RNA, 19 nt, Artificial Sequence
  Description of Artificial Sequence: Synthetic oligonucleotide
  Sense strand starting at position 996 of SEQ ID NO: 1241209
ggcuuucccagagaaagcu

SEQ ID NO: 1254925 - RNA, 19 nt, Artificial Sequence
  Description of Artificial Sequence: Synthetic oligonucleotide
  Antisense strand to SEQ ID NO: 1254924
agcuuucucugggaaagcc

SEQ ID NO: 1254926 - RNA, 19 nt, Artificial Sequence
  Description of Artificial Sequence: Synthetic oligonucleotide
  Sense strand starting at position 1312 of SEQ ID NO: 1241209
gccgguuagcacuuuggua

SEQ ID NO: 1254927 - RNA, 19 nt, Artificial Sequence
  Description of Artificial Sequence: Synthetic oligonucleotide
  Antisense strand to SEQ ID NO: 1254926
uaccaaagugcuaaccggc

SEQ ID NO: 1254928 - RNA, 19 nt, Artificial Sequence
  Description of Artificial Sequence: Synthetic oligonucleotide
  Sense strand starting at position 1397 of SEQ ID NO: 1241209
gccugaauuugugccacau

SEQ ID NO: 1254929 - RNA, 19 nt, Artificial Sequence
  Description of Artificial Sequence: Synthetic oligonucleotide
  Antisense strand to SEQ ID NO: 1254928
auguggcacaaauucaggc

SEQ ID NO: 1254930 - RNA, 19 nt, Artificial Sequence
  Description of Artificial Sequence: Synthetic oligonucleotide
  Sense strand starting at position 1640 of SEQ ID NO: 1241209
ggcugagugguauaaucau

SEQ ID NO: 1254931 - RNA, 19 nt, Artificial Sequence
  Description of Artificial Sequence: Synthetic oligonucleotide
  Antisense strand to SEQ ID NO: 1254930
augauuauaccacucagcc

SEQ ID NO: 1254932 - RNA, 19 nt, Artificial Sequence
  Description of Artificial Sequence: Synthetic oligonucleotide
  Sense strand starting at position 1648 of SEQ ID NO: 1241209
gguauaaucaugcaagguu

SEQ ID NO: 1254933 - RNA, 19 nt, Artificial Sequence
  Description of Artificial Sequence: Synthetic oligonucleotide
  Antisense strand to SEQ ID NO: 1254932
aaccuugcaugauuauacc

SEQ ID NO: 1254934 - RNA, 19 nt, Artificial Sequence
  Description of Artificial Sequence: Synthetic oligonucleotide
  Sense strand starting at position 1864 of SEQ ID NO: 1241209
gcugucaucagucagagag

SEQ ID NO: 1254935 - RNA, 19 nt, Artificial Sequence
  Description of Artificial Sequence: Synthetic oligonucleotide
  Antisense strand to SEQ ID NO: 1254934
cucucugacugaugacagc

SEQ ID NO: 1254936 - RNA, 19 nt, Artificial Sequence
  Description of Artificial Sequence: Synthetic oligonucleotide
  Sense strand starting at position 1902 of SEQ ID NO: 1241209
ggucaucgaacagauccau

SEQ ID NO: 1254937 - RNA, 19 nt, Artificial Sequence
  Description of Artificial Sequence: Synthetic oligonucleotide
  Antisense strand to SEQ ID NO: 1254936
auggaucuguucgaugacc

SEQ ID NO: 1254938 - RNA, 19 nt, Artificial Sequence
  Description of Artificial Sequence: Synthetic oligonucleotide
  Sense strand starting at position 1941 of SEQ ID NO: 1241209
gaaaguaauggaggguacu

SEQ ID NO: 1254939 - RNA, 19 nt, Artificial Sequence
  Description of Artificial Sequence: Synthetic oligonucleotide
  Antisense strand to SEQ ID NO: 1254938
aguacccuccauuacuuuc

SEQ ID NO: 1254940 - RNA, 19 nt, Artificial Sequence
  Description of Artificial Sequence: Synthetic oligonucleotide
  Sense strand starting at position 1942 of SEQ ID NO: 1241209
aaaguaauggaggguacuu

SEQ ID NO: 1254941 - RNA, 19 nt, Artificial Sequence
  Description of Artificial Sequence: Synthetic oligonucleotide
  Antisense strand to SEQ ID NO: 1254940
aaguacccuccauuacuuu

SEQ ID NO: 1254942 - RNA, 19 nt, Artificial Sequence
  Description of Artificial Sequence: Synthetic oligonucleotide
  Sense strand starting at position 2074 of SEQ ID NO: 1241209
gaaacaagugcaugucaga

SEQ ID NO: 1254943 - RNA, 19 nt, Artificial Sequence
  Description of Artificial Sequence: Synthetic oligonucleotide
  Antisense strand to SEQ ID NO: 1254942
ucugacaugcacuuguuuc

SEQ ID NO: 1254944 - RNA, 19 nt, Artificial Sequence
  Description of Artificial Sequence: Synthetic oligonucleotide
  Sense strand starting at position 2382 of SEQ ID NO: 1241209
cuuuaaagacucugucaag

SEQ ID NO: 1254945 - RNA, 19 nt, Artificial Sequence
  Description of Artificial Sequence: Synthetic oligonucleotide
  Antisense strand to SEQ ID NO: 1254944
cuugacagagucuuuaaag

SEQ ID NO: 1254946 - RNA, 19 nt, Artificial Sequence
  Description of Artificial Sequence: Synthetic oligonucleotide
  Sense strand starting at position 2383 of SEQ ID NO: 1241209
uuuaaagacucugucaaga

SEQ ID NO: 1254947 - RNA, 19 nt, Artificial Sequence
  Description of Artificial Sequence: Synthetic oligonucleotide
  Antisense strand to SEQ ID NO: 1254946
ucuugacagagucuuuaaa

SEQ ID NO: 1254948 - RNA, 19 nt, Artificial Sequence
  Description of Artificial Sequence: Synthetic oligonucleotide
  Sense strand starting at position 2388 of SEQ ID NO: 1241209
agacucugucaagagcauu

SEQ ID NO: 1254949 - RNA, 19 nt, Artificial Sequence
  Description of Artificial Sequence: Synthetic oligonucleotide
  Antisense strand to SEQ ID NO: 1254948
aaugcucuugacagagucu

SEQ ID NO: 1254950 - RNA, 19 nt, Artificial Sequence
  Description of Artificial Sequence: Synthetic oligonucleotide
  Sense strand starting at position 2522 of SEQ ID NO: 1241209
ccagaauuacagugacucu

SEQ ID NO: 1254951 - RNA, 19 nt, Artificial Sequence
  Description of Artificial Sequence: Synthetic oligonucleotide
  Antisense strand to SEQ ID NO: 1254950
agagucacuguaauucugg

SEQ ID NO: 1254952 - RNA, 19 nt, Artificial Sequence
  Description of Artificial Sequence: Synthetic oligonucleotide
  Sense strand starting at position 2630 of SEQ ID NO: 1241209
uuaaccaaggcuuauagua

SEQ ID NO: 1254953 - RNA, 19 nt, Artificial Sequence
  Description of Artificial Sequence: Synthetic oligonucleotide
  Antisense strand to SEQ ID NO: 1254952
uacuauaagccuugguuaa

SEQ ID NO: 1254954 - RNA, 19 nt, Artificial Sequence
  Description of Artificial Sequence: Synthetic oligonucleotide
  Sense strand starting at position 2645 of SEQ ID NO: 1241209
aguacaaucucaccaaagu

SEQ ID NO: 1254955 - RNA, 19 nt, Artificial Sequence
  Description of Artificial Sequence: Synthetic oligonucleotide
  Antisense strand to SEQ ID NO: 1254954
acuuuggugagauuguacu

SEQ ID NO: 1254956 - RNA, 19 nt, Artificial Sequence
  Description of Artificial Sequence: Synthetic oligonucleotide
  Sense strand starting at position 2646 of SEQ ID NO: 1241209
guacaaucucaccaaagug

SEQ ID NO: 1254957 - RNA, 19 nt, Artificial Sequence
  Description of Artificial Sequence: Synthetic oligonucleotide
  Antisense strand to SEQ ID NO: 1254956
cacuuuggugagauuguac

SEQ ID NO: 1254958 - RNA, 19 nt, Artificial Sequence
  Description of Artificial Sequence: Synthetic oligonucleotide
  Sense strand starting at position 3012 of SEQ ID NO: 1241209
ggucuucuacuccauuaag

SEQ ID NO: 1254959 - RNA, 19 nt, Artificial Sequence
  Description of Artificial Sequence: Synthetic oligonucleotide
  Antisense strand to SEQ ID NO: 1254958
cuuaauggaguagaagacc

SEQ ID NO: 1254960 - RNA, 19 nt, Artificial Sequence
  Description of Artificial Sequence: Synthetic oligonucleotide
  Sense strand starting at position 3064 of SEQ ID NO: 1241209
gcaacuugugaugacuuga

SEQ ID NO: 1254961 - RNA, 19 nt, Artificial Sequence
  Description of Artificial Sequence: Synthetic oligonucleotide
  Antisense strand to SEQ ID NO: 1254960
ucaagucaucacaaguugc

SEQ ID NO: 1254962 - RNA, 19 nt, Artificial Sequence
  Description of Artificial Sequence: Synthetic oligonucleotide
  Sense strand starting at position 3155 of SEQ ID NO: 1241209
augaccuaagucuguaaua

SEQ ID NO: 1254963 - RNA, 19 nt, Artificial Sequence
  Description of Artificial Sequence: Synthetic oligonucleotide
  Antisense strand to SEQ ID NO: 1254962
uauuacagacuuaggucau

SEQ ID NO: 1254964 - RNA, 19 nt, Artificial Sequence
  Description of Artificial Sequence: Synthetic oligonucleotide
  Sense strand starting at position 3167 of SEQ ID NO: 1241209
uguaauauauccucugaag

SEQ ID NO: 1254965 - RNA, 19 nt, Artificial Sequence
  Description of Artificial Sequence: Synthetic oligonucleotide
  Antisense strand to SEQ ID NO: 1254964
cuucagaggauauauuaca

SEQ ID NO: 1254966 - RNA, 19 nt, Artificial Sequence
  Description of Artificial Sequence: Synthetic oligonucleotide
  Sense strand starting at position 3228 of SEQ ID NO: 1241209
uucucaagaugccuggaaa

SEQ ID NO: 1254967 - RNA, 19 nt, Artificial Sequence
  Description of Artificial Sequence: Synthetic oligonucleotide
  Antisense strand to SEQ ID NO: 1254966
uuuccaggcaucuugagaa

SEQ ID NO: 1254968 - RNA, 19 nt, Artificial Sequence
  Description of Artificial Sequence: Synthetic oligonucleotide
  Sense strand starting at position 3325 of SEQ ID NO: 1241209
cuccucuuucucugggaga

SEQ ID NO: 1254969 - RNA, 19 nt, Artificial Sequence
  Description of Artificial Sequence: Synthetic oligonucleotide
  Antisense strand to SEQ ID NO: 1254968
ucucccagagaaagaggag

SEQ ID NO: 1254970 - RNA, 19 nt, Artificial Sequence
  Description of Artificial Sequence: Synthetic oligonucleotide
  Sense strand starting at position 3327 of SEQ ID NO: 1241209
ccucuuucucugggagaaa

SEQ ID NO: 1254971 - RNA, 19 nt, Artificial Sequence
  Description of Artificial Sequence: Synthetic oligonucleotide
  Antisense strand to SEQ ID NO: 1254970
uuucucccagagaaagagg

SEQ ID NO: 1254972 - RNA, 19 nt, Artificial Sequence
  Description of Artificial Sequence: Synthetic oligonucleotide
  Sense strand starting at position 3340 of SEQ ID NO: 1241209
gagaaaguucuuggauggu

SEQ ID NO: 1254973 - RNA, 19 nt, Artificial Sequence
  Description of Artificial Sequence: Synthetic oligonucleotide
  Antisense strand to SEQ ID NO: 1254972
accauccaagaacuuucuc

SEQ ID NO: 1254974 - RNA, 19 nt, Artificial Sequence
  Description of Artificial Sequence: Synthetic oligonucleotide
  Sense strand starting at position 3456 of SEQ ID NO: 1241209
ucgcauuaucuggaguaaa

SEQ ID NO: 1254975 - RNA, 19 nt, Artificial Sequence
  Description of Artificial Sequence: Synthetic oligonucleotide
  Antisense strand to SEQ ID NO: 1254974
uuuacuccagauaaugcga

SEQ ID NO: 1254976 - RNA, 19 nt, Artificial Sequence
  Description of Artificial Sequence: Synthetic oligonucleotide
  Sense strand starting at position 3474 of SEQ ID NO: 1241209
accauucgauccucacaga

SEQ ID NO: 1254977 - RNA, 19 nt, Artificial Sequence
  Description of Artificial Sequence: Synthetic oligonucleotide
  Antisense strand to SEQ ID NO: 1254976
ucugugaggaucgaauggu

SEQ ID NO: 1254978 - RNA, 19 nt, Artificial Sequence
  Description of Artificial Sequence: Synthetic oligonucleotide
  Sense strand starting at position 3699 of SEQ ID NO: 1241209
uuuguauaugaugacagua

SEQ ID NO: 1254979 - RNA, 19 nt, Artificial Sequence
  Description of Artificial Sequence: Synthetic oligonucleotide
  Antisense strand to SEQ ID NO: 1254978
uacugucaucauauacaaa

SEQ ID NO: 1254980 - RNA, 19 nt, Artificial Sequence
  Description of Artificial Sequence: Synthetic oligonucleotide
  Sense strand starting at position 3709 of SEQ ID NO: 1241209
augacaguauuugacaaua

SEQ ID NO: 1254981 - RNA, 19 nt, Artificial Sequence
  Description of Artificial Sequence: Synthetic oligonucleotide
  Antisense strand to SEQ ID NO: 1254980
uauugucaaauacugucau

SEQ ID NO: 1254982 - RNA, 19 nt, Artificial Sequence
  Description of Artificial Sequence: Synthetic oligonucleotide
  Sense strand starting at position 3800 of SEQ ID NO: 1241209
cacaguccugacugaagga

SEQ ID NO: 1254983 - RNA, 19 nt, Artificial Sequence
  Description of Artificial Sequence: Synthetic oligonucleotide
  Antisense strand to SEQ ID NO: 1254982
uccuucagucaggacugug

SEQ ID NO: 1254984 - RNA, 19 nt, Artificial Sequence
  Description of Artificial Sequence: Synthetic oligonucleotide
  Sense strand starting at position 3932 of SEQ ID NO: 1241209
agaacaaacacgugaguca

SEQ ID NO: 1254985 - RNA, 19 nt, Artificial Sequence
  Description of Artificial Sequence: Synthetic oligonucleotide
  Antisense strand to SEQ ID NO: 1254984
ugacucacguguuuguucu

SEQ ID NO: 1254986 - RNA, 19 nt, Artificial Sequence
  Description of Artificial Sequence: Synthetic oligonucleotide
  Sense strand starting at position 3968 of SEQ ID NO: 1241209
ugguaucuccaacaauguu

SEQ ID NO: 1254987 - RNA, 19 nt, Artificial Sequence
  Description of Artificial Sequence: Synthetic oligonucleotide
  Antisense strand to SEQ ID NO: 1254986
aacauuguuggagauacca

SEQ ID NO: 1254988 - RNA, 19 nt, Artificial Sequence
  Description of Artificial Sequence: Synthetic oligonucleotide
  Sense strand starting at position 236 of SEQ ID NO: 1241210
cugucuguccuaugauaaa

SEQ ID NO: 1254989 - RNA, 19 nt, Artificial Sequence
  Description of Artificial Sequence: Synthetic oligonucleotide
  Antisense strand to SEQ ID NO: 1254988
uuuaucauaggacagacag

SEQ ID NO: 1254990 - RNA, 19 nt, Artificial Sequence
  Description of Artificial Sequence: Synthetic oligonucleotide
  Sense strand starting at position 309 of SEQ ID NO: 1241210
ucaacaaagcagugauucu

SEQ ID NO: 1254991 - RNA, 19 nt, Artificial Sequence
  Description of Artificial Sequence: Synthetic oligonucleotide
  Antisense strand to SEQ ID NO: 1254990
agaaucacugcuuuguuga

SEQ ID NO: 1254992 - RNA, 19 nt, Artificial Sequence
  Description of Artificial Sequence: Synthetic oligonucleotide
  Sense strand starting at position 383 of SEQ ID NO: 1241210
gagauaaaugugcaguucu

SEQ ID NO: 1254993 - RNA, 19 nt, Artificial Sequence
  Description of Artificial Sequence: Synthetic oligonucleotide
  Antisense strand to SEQ ID NO: 1254992
agaacugcacauuuaucuc

SEQ ID NO: 1254994 - RNA, 19 nt, Artificial Sequence
  Description of Artificial Sequence: Synthetic oligonucleotide
  Sense strand starting at position 394 of SEQ ID NO: 1241210
gcaguucuuaaagguguau

SEQ ID NO: 1254995 - RNA, 19 nt, Artificial Sequence
  Description of Artificial Sequence: Synthetic oligonucleotide
  Antisense strand to SEQ ID NO: 1254994
auacaccuuuaagaacugc

SEQ ID NO: 1254996 - RNA, 19 nt, Artificial Sequence
  Description of Artificial Sequence: Synthetic oligonucleotide
  Sense strand starting at position 448 of SEQ ID NO: 1241210
acuacaucucauuguuuag

SEQ ID NO: 1254997 - RNA, 19 nt, Artificial Sequence
  Description of Artificial Sequence: Synthetic oligonucleotide
  Antisense strand to SEQ ID NO: 1254996
cuaaacaaugagauguagu

SEQ ID NO: 1254998 - RNA, 19 nt, Artificial Sequence
  Description of Artificial Sequence: Synthetic oligonucleotide
  Sense strand starting at position 494 of SEQ ID NO: 1241210
aagccuucuuggccaguga

SEQ ID NO: 1254999 - RNA, 19 nt, Artificial Sequence
  Description of Artificial Sequence: Synthetic oligonucleotide
  Antisense strand to SEQ ID NO: 1254998
ucacuggccaagaaggcuu

SEQ ID NO: 1255000 - RNA, 19 nt, Artificial Sequence
  Description of Artificial Sequence: Synthetic oligonucleotide
  Sense strand starting at position 495 of SEQ ID NO: 1241210
agccuucuuggccagugaa

SEQ ID NO: 1255001 - RNA, 19 nt, Artificial Sequence
  Description of Artificial Sequence: Synthetic oligonucleotide
  Antisense strand to SEQ ID NO: 1255000
uucacuggccaagaaggcu

SEQ ID NO: 1255002 - RNA, 19 nt, Artificial Sequence
  Description of Artificial Sequence: Synthetic oligonucleotide
  Sense strand starting at position 498 of SEQ ID NO: 1241210
cuucuuggccagugaagau

SEQ ID NO: 1255003 - RNA, 19 nt, Artificial Sequence
  Description of Artificial Sequence: Synthetic oligonucleotide
  Antisense strand to SEQ ID NO: 1255002
aucuucacuggccaagaag

SEQ ID NO: 1255004 - RNA, 19 nt, Artificial Sequence
  Description of Artificial Sequence: Synthetic oligonucleotide
  Sense strand starting at position 567 of SEQ ID NO: 1241210
uuggcagaguuaccaguau

SEQ ID NO: 1255005 - RNA, 19 nt, Artificial Sequence
  Description of Artificial Sequence: Synthetic oligonucleotide
  Antisense strand to SEQ ID NO: 1255004
auacugguaacucugccaa

SEQ ID NO: 1255006 - RNA, 19 nt, Artificial Sequence
  Description of Artificial Sequence: Synthetic oligonucleotide
  Sense strand starting at position 576 of SEQ ID NO: 1241210
uuaccaguaucuuugggau

SEQ ID NO: 1255007 - RNA, 19 nt, Artificial Sequence
  Description of Artificial Sequence: Synthetic oligonucleotide
  Antisense strand to SEQ ID NO: 1255006
aucccaaagauacugguaa

SEQ ID NO: 1255008 - RNA, 19 nt, Artificial Sequence
  Description of Artificial Sequence: Synthetic oligonucleotide
  Sense strand starting at position 582 of SEQ ID NO: 1241210
guaucuuugggaugggaua

SEQ ID NO: 1255009 - RNA, 19 nt, Artificial Sequence
  Description of Artificial Sequence: Synthetic oligonucleotide
  Antisense strand to SEQ ID NO: 1255008
uaucccaucccaaagauac

SEQ ID NO: 1255010 - RNA, 19 nt, Artificial Sequence
  Description of Artificial Sequence: Synthetic oligonucleotide
  Sense strand starting at position 637 of SEQ ID NO: 1241210
auuuacuguuuaugaugga

SEQ ID NO: 1255011 - RNA, 19 nt, Artificial Sequence
  Description of Artificial Sequence: Synthetic oligonucleotide
  Antisense strand to SEQ ID NO: 1255010
uccaucauaaacaguaaau

SEQ ID NO: 1255012 - RNA, 19 nt, Artificial Sequence
  Description of Artificial Sequence: Synthetic oligonucleotide
  Sense strand starting at position 667 of SEQ ID NO: 1241210
gcaagagauuaguucuguc

SEQ ID NO: 1255013 - RNA, 19 nt, Artificial Sequence
  Description of Artificial Sequence: Synthetic oligonucleotide
  Antisense strand to SEQ ID NO: 1255012
gacagaacuaaucucuugc

SEQ ID NO: 1255014 - RNA, 19 nt, Artificial Sequence
  Description of Artificial Sequence: Synthetic oligonucleotide
  Sense strand starting at position 677 of SEQ ID NO: 1241210
aguucugucgucuaauaga

SEQ ID NO: 1255015 - RNA, 19 nt, Artificial Sequence
  Description of Artificial Sequence: Synthetic oligonucleotide
  Antisense strand to SEQ ID NO: 1255014
ucuauuagacgacagaacu

SEQ ID NO: 1255016 - RNA, 19 nt, Artificial Sequence
  Description of Artificial Sequence: Synthetic oligonucleotide
  Sense strand starting at position 737 of SEQ ID NO: 1241210
uauagauuucuccguagug

SEQ ID NO: 1255017 - RNA, 19 nt, Artificial Sequence
  Description of Artificial Sequence: Synthetic oligonucleotide
  Antisense strand to SEQ ID NO: 1255016
cacuacggagaaaucuaua

SEQ ID NO: 1255018 - RNA, 19 nt, Artificial Sequence
  Description of Artificial Sequence: Synthetic oligonucleotide
  Sense strand starting at position 776 of SEQ ID NO: 1241210
gaacgaaugcaguauugag

SEQ ID NO: 1255019 - RNA, 19 nt, Artificial Sequence
  Description of Artificial Sequence: Synthetic oligonucleotide
  Antisense strand to SEQ ID NO: 1255018
cucaauacugcauucguuc

SEQ ID NO: 1255020 - RNA, 19 nt, Artificial Sequence
  Description of Artificial Sequence: Synthetic oligonucleotide
  Sense strand starting at position 784 of SEQ ID NO: 1241210
gcaguauugagccaugcug

SEQ ID NO: 1255021 - RNA, 19 nt, Artificial Sequence
  Description of Artificial Sequence: Synthetic oligonucleotide
  Antisense strand to SEQ ID NO: 1255020
cagcauggcucaauacugc

SEQ ID NO: 1255022 - RNA, 19 nt, Artificial Sequence
  Description of Artificial Sequence: Synthetic oligonucleotide
  Sense strand starting at position 799 of SEQ ID NO: 1241210
gcugaccucuuucuguaau

SEQ ID NO: 1255023 - RNA, 19 nt, Artificial Sequence
  Description of Artificial Sequence: Synthetic oligonucleotide
  Antisense strand to SEQ ID NO: 1255022
auuacagaaagaggucagc

SEQ ID NO: 1255024 - RNA, 19 nt, Artificial Sequence
  Description of Artificial Sequence: Synthetic oligonucleotide
  Sense strand starting at position 910 of SEQ ID NO: 1241210
caaaucuuguuguuggaaa

SEQ ID NO: 1255025 - RNA, 19 nt, Artificial Sequence
  Description of Artificial Sequence: Synthetic oligonucleotide
  Antisense strand to SEQ ID NO: 1255024
uuuccaacaacaagauuug

SEQ ID NO: 1255026 - RNA, 19 nt, Artificial Sequence
  Description of Artificial Sequence: Synthetic oligonucleotide
  Sense strand starting at position 912 of SEQ ID NO: 1241210
aaucuuguuguuggaaacu

SEQ ID NO: 1255027 - RNA, 19 nt, Artificial Sequence
  Description of Artificial Sequence: Synthetic oligonucleotide
  Antisense strand to SEQ ID NO: 1255026
aguuuccaacaacaagauu

SEQ ID NO: 1255028 - RNA, 19 nt, Artificial Sequence
  Description of Artificial Sequence: Synthetic oligonucleotide
  Sense strand starting at position 1363 of SEQ ID NO: 1241210
caaucaaggguauggucau

SEQ ID NO: 1255029 - RNA, 19 nt, Artificial Sequence
  Description of Artificial Sequence: Synthetic oligonucleotide
  Antisense strand to SEQ ID NO: 1255028
augaccauacccuugauug

SEQ ID NO: 1255030 - RNA, 19 nt, Artificial Sequence
  Description of Artificial Sequence: Synthetic oligonucleotide
  Sense strand starting at position 1387 of SEQ ID NO: 1241210
ggaauauaaggcugguaaa

SEQ ID NO: 1255031 - RNA, 19 nt, Artificial Sequence
  Description of Artificial Sequence: Synthetic oligonucleotide
  Antisense strand to SEQ ID NO: 1255030
uuuaccagccuuauauucc

SEQ ID NO: 1255032 - RNA, 19 nt, Artificial Sequence
  Description of Artificial Sequence: Synthetic oligonucleotide
  Sense strand starting at position 1388 of SEQ ID NO: 1241210
gaauauaaggcugguaaag

SEQ ID NO: 1255033 - RNA, 19 nt, Artificial Sequence
  Description of Artificial Sequence: Synthetic oligonucleotide
  Antisense strand to SEQ ID NO: 1255032
cuuuaccagccuuauauuc

SEQ ID NO: 1255034 - RNA, 19 nt, Artificial Sequence
  Description of Artificial Sequence: Synthetic oligonucleotide
  Sense strand starting at position 1403 of SEQ ID NO: 1241210
aaaguaagaccuugugaau

SEQ ID NO: 1255035 - RNA, 19 nt, Artificial Sequence
  Description of Artificial Sequence: Synthetic oligonucleotide
  Antisense strand to SEQ ID NO: 1255034
auucacaaggucuuacuuu

SEQ ID NO: 1255036 - RNA, 19 nt, Artificial Sequence
  Description of Artificial Sequence: Synthetic oligonucleotide
  Sense strand starting at position 1491 of SEQ ID NO: 1241210
uagagagauucugcacuca

SEQ ID NO: 1255037 - RNA, 19 nt, Artificial Sequence
  Description of Artificial Sequence: Synthetic oligonucleotide
  Antisense strand to SEQ ID NO: 1255036
ugagugcagaaucucucua

SEQ ID NO: 1255038 - RNA, 19 nt, Artificial Sequence
  Description of Artificial Sequence: Synthetic oligonucleotide
  Sense strand starting at position 1653 of SEQ ID NO: 1241210
gaagauuucugguaacugg

SEQ ID NO: 1255039 - RNA, 19 nt, Artificial Sequence
  Description of Artificial Sequence: Synthetic oligonucleotide
  Antisense strand to SEQ ID NO: 1255038
ccaguuaccagaaaucuuc

SEQ ID NO: 1255040 - RNA, 19 nt, Artificial Sequence
  Description of Artificial Sequence: Synthetic oligonucleotide
  Sense strand starting at position 1692 of SEQ ID NO: 1241210
gguacaugcacuugaggua

SEQ ID NO: 1255041 - RNA, 19 nt, Artificial Sequence
  Description of Artificial Sequence: Synthetic oligonucleotide
  Antisense strand to SEQ ID NO: 1255040
uaccucaagugcauguacc

SEQ ID NO: 1255042 - RNA, 19 nt, Artificial Sequence
  Description of Artificial Sequence: Synthetic oligonucleotide
  Sense strand starting at position 1786 of SEQ ID NO: 1241210
ccgggauaggagcaauguu

SEQ ID NO: 1255043 - RNA, 19 nt, Artificial Sequence
  Description of Artificial Sequence: Synthetic oligonucleotide
  Antisense strand to SEQ ID NO: 1255042
aacauugcuccuaucccgg

SEQ ID NO: 1255044 - RNA, 19 nt, Artificial Sequence
  Description of Artificial Sequence: Synthetic oligonucleotide
  Sense strand starting at position 2194 of SEQ ID NO: 1241210
agucucauaguacgcgaaa

SEQ ID NO: 1255045 - RNA, 19 nt, Artificial Sequence
  Description of Artificial Sequence: Synthetic oligonucleotide
  Antisense strand to SEQ ID NO: 1255044
uuucgcguacuaugagacu

SEQ ID NO: 1255046 - RNA, 19 nt, Artificial Sequence
  Description of Artificial Sequence: Synthetic oligonucleotide
  Sense strand starting at position 2209 of SEQ ID NO: 1241210
gaaaccaguccuggagauu

SEQ ID NO: 1255047 - RNA, 19 nt, Artificial Sequence
  Description of Artificial Sequence: Synthetic oligonucleotide
  Antisense strand to SEQ ID NO: 1255046
aaucuccaggacugguuuc

SEQ ID NO: 1255048 - RNA, 19 nt, Artificial Sequence
  Description of Artificial Sequence: Synthetic oligonucleotide
  Sense strand starting at position 2675 of SEQ ID NO: 1241210
ugcgaugucacuugaaauc

SEQ ID NO: 1255049 - RNA, 19 nt, Artificial Sequence
  Description of Artificial Sequence: Synthetic oligonucleotide
  Antisense strand to SEQ ID NO: 1255048
gauuucaagugacaucgca

SEQ ID NO: 1255050 - RNA, 19 nt, Artificial Sequence
  Description of Artificial Sequence: Synthetic oligonucleotide
  Sense strand starting at position 2696 of SEQ ID NO: 1241210
ucuaauucccagugagacu

SEQ ID NO: 1255051 - RNA, 19 nt, Artificial Sequence
  Description of Artificial Sequence: Synthetic oligonucleotide
  Antisense strand to SEQ ID NO: 1255050
agucucacugggaauuaga

SEQ ID NO: 1255052 - RNA, 19 nt, Artificial Sequence
  Description of Artificial Sequence: Synthetic oligonucleotide
  Sense strand starting at position 2726 of SEQ ID NO: 1241210
gaaugauggugugcaagcu

SEQ ID NO: 1255053 - RNA, 19 nt, Artificial Sequence
  Description of Artificial Sequence: Synthetic oligonucleotide
  Antisense strand to SEQ ID NO: 1255052
agcuugcacaccaucauuc

SEQ ID NO: 1255054 - RNA, 19 nt, Artificial Sequence
  Description of Artificial Sequence: Synthetic oligonucleotide
  Sense strand starting at position 3058 of SEQ ID NO: 1241210
cagccaggacacuguuauu

SEQ ID NO: 1255055 - RNA, 19 nt, Artificial Sequence
  Description of Artificial Sequence: Synthetic oligonucleotide
  Antisense strand to SEQ ID NO: 1255054
aauaacaguguccuggcug

SEQ ID NO: 1255056 - RNA, 19 nt, Artificial Sequence
  Description of Artificial Sequence: Synthetic oligonucleotide
  Sense strand starting at position 3086 of SEQ ID NO: 1241210
aguuuaguccgggugcagu

SEQ ID NO: 1255057 - RNA, 19 nt, Artificial Sequence
  Description of Artificial Sequence: Synthetic oligonucleotide
  Antisense strand to SEQ ID NO: 1255056
acugcacccggacuaaacu

SEQ ID NO: 1255058 - RNA, 19 nt, Artificial Sequence
  Description of Artificial Sequence: Synthetic oligonucleotide
  Sense strand starting at position 3197 of SEQ ID NO: 1241210
aguaacaccuagucucuua

SEQ ID NO: 1255059 - RNA, 19 nt, Artificial Sequence
  Description of Artificial Sequence: Synthetic oligonucleotide
  Antisense strand to SEQ ID NO: 1255058
uaagagacuagguguuacu

SEQ ID NO: 1255060 - RNA, 19 nt, Artificial Sequence
  Description of Artificial Sequence: Synthetic oligonucleotide
  Sense strand starting at position 3849 of SEQ ID NO: 1241210
ggcuuaucuccugaccauu

SEQ ID NO: 1255061 - RNA, 19 nt, Artificial Sequence
  Description of Artificial Sequence: Synthetic oligonucleotide
  Antisense strand to SEQ ID NO: 1255060
aauggucaggagauaagcc

SEQ ID NO: 1255062 - RNA, 19 nt, Artificial Sequence
  Description of Artificial Sequence: Synthetic oligonucleotide
  Sense strand starting at position 3865 of SEQ ID NO: 1241210
auuaguuuccucugaaagu

SEQ ID NO: 1255063 - RNA, 19 nt, Artificial Sequence
  Description of Artificial Sequence: Synthetic oligonucleotide
  Antisense strand to SEQ ID NO: 1255062
acuuucagaggaaacuaau

SEQ ID NO: 1255064 - RNA, 19 nt, Artificial Sequence
  Description of Artificial Sequence: Synthetic oligonucleotide
  Sense strand starting at position 3906 of SEQ ID NO: 1241210
uuucuuauacucugaggac

SEQ ID NO: 1255065 - RNA, 19 nt, Artificial Sequence
  Description of Artificial Sequence: Synthetic oligonucleotide
  Antisense strand to SEQ ID NO: 1255064
guccucagaguauaagaaa

SEQ ID NO: 1255066 - RNA, 19 nt, Artificial Sequence
  Description of Artificial Sequence: Synthetic oligonucleotide
  Sense strand starting at position 3938 of SEQ ID NO: 1241210
aucaacuugcuuuagaugu

SEQ ID NO: 1255067 - RNA, 19 nt, Artificial Sequence
  Description of Artificial Sequence: Synthetic oligonucleotide
  Antisense strand to SEQ ID NO: 1255066
acaucuaaagcaaguugau

SEQ ID NO: 1255068 - RNA, 19 nt, Artificial Sequence
  Description of Artificial Sequence: Synthetic oligonucleotide
  Sense strand starting at position 2 of SEQ ID NO: 1241211
augagugguagagguuuaa

SEQ ID NO: 1255069 - RNA, 19 nt, Artificial Sequence
  Description of Artificial Sequence: Synthetic oligonucleotide
  Antisense strand to SEQ ID NO: 1255068
uuaaaccucuaccacucau

SEQ ID NO: 1255070 - RNA, 19 nt, Artificial Sequence
  Description of Artificial Sequence: Synthetic oligonucleotide
  Sense strand starting at position 6 of SEQ ID NO: 1241211
gugguagagguuuaaauuc

SEQ ID NO: 1255071 - RNA, 19 nt, Artificial Sequence
  Description of Artificial Sequence: Synthetic oligonucleotide
  Antisense strand to SEQ ID NO: 1255070
gaauuuaaaccucuaccac

SEQ ID NO: 1255072 - RNA, 19 nt, Artificial Sequence
  Description of Artificial Sequence: Synthetic oligonucleotide
  Sense strand starting at position 14 of SEQ ID NO: 1241211
gguuuaaauucuguccuau

SEQ ID NO: 1255073 - RNA, 19 nt, Artificial Sequence
  Description of Artificial Sequence: Synthetic oligonucleotide
  Antisense strand to SEQ ID NO: 1255072
auaggacagaauuuaaacc

SEQ ID NO: 1255074 - RNA, 19 nt, Artificial Sequence
  Description of Artificial Sequence: Synthetic oligonucleotide
  Sense strand starting at position 74 of SEQ ID NO: 1241211
uuggaaucucuuggauggu

SEQ ID NO: 1255075 - RNA, 19 nt, Artificial Sequence
  Description of Artificial Sequence: Synthetic oligonucleotide
  Antisense strand to SEQ ID NO: 1255074
accauccaagagauuccaa

SEQ ID NO: 1255076 - RNA, 19 nt, Artificial Sequence
  Description of Artificial Sequence: Synthetic oligonucleotide
  Sense strand starting at position 107 of SEQ ID NO: 1241211
uggugucuaguggaagaga

SEQ ID NO: 1255077 - RNA, 19 nt, Artificial Sequence
  Description of Artificial Sequence: Synthetic oligonucleotide
  Antisense strand to SEQ ID NO: 1255076
ucucuuccacuagacacca

SEQ ID NO: 1255078 - RNA, 19 nt, Artificial Sequence
  Description of Artificial Sequence: Synthetic oligonucleotide
  Sense strand starting at position 108 of SEQ ID NO: 1241211
ggugucuaguggaagagaa

SEQ ID NO: 1255079 - RNA, 19 nt, Artificial Sequence
  Description of Artificial Sequence: Synthetic oligonucleotide
  Antisense strand to SEQ ID NO: 1255078
uucucuuccacuagacacc

SEQ ID NO: 1255080 - RNA, 19 nt, Artificial Sequence
  Description of Artificial Sequence: Synthetic oligonucleotide
  Sense strand starting at position 122 of SEQ ID NO: 1241211
gagaauaguuucugggaag

SEQ ID NO: 1255081 - RNA, 19 nt, Artificial Sequence
  Description of Artificial Sequence: Synthetic oligonucleotide
  Antisense strand to SEQ ID NO: 1255080
cuucccagaaacuauucuc

SEQ ID NO: 1255082 - RNA, 19 nt, Artificial Sequence
  Description of Artificial Sequence: Synthetic oligonucleotide
  Sense strand starting at position 123 of SEQ ID NO: 1241211
agaauaguuucugggaagg

SEQ ID NO: 1255083 - RNA, 19 nt, Artificial Sequence
  Description of Artificial Sequence: Synthetic oligonucleotide
  Antisense strand to SEQ ID NO: 1255082
ccuucccagaaacuauucu

SEQ ID NO: 1255084 - RNA, 19 nt, Artificial Sequence
  Description of Artificial Sequence: Synthetic oligonucleotide
  Sense strand starting at position 125 of SEQ ID NO: 1241211
aauaguuucugggaaggug

SEQ ID NO: 1255085 - RNA, 19 nt, Artificial Sequence
  Description of Artificial Sequence: Synthetic oligonucleotide
  Antisense strand to SEQ ID NO: 1255084
caccuucccagaaacuauu

SEQ ID NO: 1255086 - RNA, 19 nt, Artificial Sequence
  Description of Artificial Sequence: Synthetic oligonucleotide
  Sense strand starting at position 213 of SEQ ID NO: 1241211
ccagcucagccaugaauga

SEQ ID NO: 1255087 - RNA, 19 nt, Artificial Sequence
  Description of Artificial Sequence: Synthetic oligonucleotide
  Antisense strand to SEQ ID NO: 1255086
ucauucauggcugagcugg

SEQ ID NO: 1255088 - RNA, 19 nt, Artificial Sequence
  Description of Artificial Sequence: Synthetic oligonucleotide
  Sense strand starting at position 357 of SEQ ID NO: 1241211
agccaugaucaagauguuu

SEQ ID NO: 1255089 - RNA, 19 nt, Artificial Sequence
  Description of Artificial Sequence: Synthetic oligonucleotide
  Antisense strand to SEQ ID NO: 1255088
aaacaucuugaucauggcu

SEQ ID NO: 1255090 - RNA, 19 nt, Artificial Sequence
  Description of Artificial Sequence: Synthetic oligonucleotide
  Sense strand starting at position 499 of SEQ ID NO: 1241211
uuuacaggucuguggacaa

SEQ ID NO: 1255091 - RNA, 19 nt, Artificial Sequence
  Description of Artificial Sequence: Synthetic oligonucleotide
  Antisense strand to SEQ ID NO: 1255090
uuguccacagaccuguaaa

SEQ ID NO: 1255092 - RNA, 19 nt, Artificial Sequence
  Description of Artificial Sequence: Synthetic oligonucleotide
  Sense strand starting at position 693 of SEQ ID NO: 1241211
gcaagcaaucuuugauauc

SEQ ID NO: 1255093 - RNA, 19 nt, Artificial Sequence
  Description of Artificial Sequence: Synthetic oligonucleotide
  Antisense strand to SEQ ID NO: 1255092
gauaucaaagauugcuugc

SEQ ID NO: 1255094 - RNA, 19 nt, Artificial Sequence
  Description of Artificial Sequence: Synthetic oligonucleotide
  Sense strand starting at position 759 of SEQ ID NO: 1241211
uggcuuuaugccgaacuua

SEQ ID NO: 1255095 - RNA, 19 nt, Artificial Sequence
  Description of Artificial Sequence: Synthetic oligonucleotide
  Antisense strand to SEQ ID NO: 1255094
uaaguucggcauaaagcca

SEQ ID NO: 1255096 - RNA, 19 nt, Artificial Sequence
  Description of Artificial Sequence: Synthetic oligonucleotide
  Sense strand starting at position 791 of SEQ ID NO: 1241211
ccaagaacuggcugugaag

SEQ ID NO: 1255097 - RNA, 19 nt, Artificial Sequence
  Description of Artificial Sequence: Synthetic oligonucleotide
  Antisense strand to SEQ ID NO: 1255096
cuucacagccaguucuugg

SEQ ID NO: 1255098 - RNA, 19 nt, Artificial Sequence
  Description of Artificial Sequence: Synthetic oligonucleotide
  Sense strand starting at position 802 of SEQ ID NO: 1241211
cugugaaguguccacugga

SEQ ID NO: 1255099 - RNA, 19 nt, Artificial Sequence
  Description of Artificial Sequence: Synthetic oligonucleotide
  Antisense strand to SEQ ID NO: 1255098
uccaguggacacuucacag

SEQ ID NO: 1255100 - RNA, 19 nt, Artificial Sequence
  Description of Artificial Sequence: Synthetic oligonucleotide
  Sense strand starting at position 1277 of SEQ ID NO: 1241211
gagggaugauauggagaag

SEQ ID NO: 1255101 - RNA, 19 nt, Artificial Sequence
  Description of Artificial Sequence: Synthetic oligonucleotide
  Antisense strand to SEQ ID NO: 1255100
cuucuccauaucaucccuc

SEQ ID NO: 1255102 - RNA, 19 nt, Artificial Sequence
  Description of Artificial Sequence: Synthetic oligonucleotide
  Sense strand starting at position 1295 of SEQ ID NO: 1241211
guagaagucaagggcagaa

SEQ ID NO: 1255103 - RNA, 19 nt, Artificial Sequence
  Description of Artificial Sequence: Synthetic oligonucleotide
  Antisense strand to SEQ ID NO: 1255102
uucugcccuugacuucuac

SEQ ID NO: 1255104 - RNA, 19 nt, Artificial Sequence
  Description of Artificial Sequence: Synthetic oligonucleotide
  Sense strand starting at position 2132 of SEQ ID NO: 1241211
gcggguaucugguuuccaa

SEQ ID NO: 1255105 - RNA, 19 nt, Artificial Sequence
  Description of Artificial Sequence: Synthetic oligonucleotide
  Antisense strand to SEQ ID NO: 1255104
uuggaaaccagauacccgc

SEQ ID NO: 1255106 - RNA, 19 nt, Artificial Sequence
  Description of Artificial Sequence: Synthetic oligonucleotide
  Sense strand starting at position 2196 of SEQ ID NO: 1241211
cgacgauuccaccgauuug

SEQ ID NO: 1255107 - RNA, 19 nt, Artificial Sequence
  Description of Artificial Sequence: Synthetic oligonucleotide
  Antisense strand to SEQ ID NO: 1255106
caaaucgguggaaucgucg

SEQ ID NO: 1255108 - RNA, 19 nt, Artificial Sequence
  Description of Artificial Sequence: Synthetic oligonucleotide
  Sense strand starting at position 2476 of SEQ ID NO: 1241211
uuuguuguugaauguguau

SEQ ID NO: 1255109 - RNA, 19 nt, Artificial Sequence
  Description of Artificial Sequence: Synthetic oligonucleotide
  Antisense strand to SEQ ID NO: 1255108
auacacauucaacaacaaa

SEQ ID NO: 1255110 - RNA, 19 nt, Artificial Sequence
  Description of Artificial Sequence: Synthetic oligonucleotide
  Sense strand starting at position 2478 of SEQ ID NO: 1241211
uguuguugaauguguauuu

SEQ ID NO: 1255111 - RNA, 19 nt, Artificial Sequence
  Description of Artificial Sequence: Synthetic oligonucleotide
  Antisense strand to SEQ ID NO: 1255110
aaauacacauucaacaaca

SEQ ID NO: 1255112 - RNA, 19 nt, Artificial Sequence
  Description of Artificial Sequence: Synthetic oligonucleotide
  Sense strand starting at position 2479 of SEQ ID NO: 1241211
guuguugaauguguauuua

SEQ ID NO: 1255113 - RNA, 19 nt, Artificial Sequence
  Description of Artificial Sequence: Synthetic oligonucleotide
  Antisense strand to SEQ ID NO: 1255112
uaaauacacauucaacaac

SEQ ID NO: 1255114 - RNA, 19 nt, Artificial Sequence
  Description of Artificial Sequence: Synthetic oligonucleotide
  Sense strand starting at position 2506 of SEQ ID NO: 1241211
auguuuagucaucauuacu

SEQ ID NO: 1255115 - RNA, 19 nt, Artificial Sequence
  Description of Artificial Sequence: Synthetic oligonucleotide
  Antisense strand to SEQ ID NO: 1255114
aguaaugaugacuaaacau

SEQ ID NO: 1255116 - RNA, 19 nt, Artificial Sequence
  Description of Artificial Sequence: Synthetic oligonucleotide
  Sense strand starting at position 2566 of SEQ ID NO: 1241211
gcacuugacagguaacuga

SEQ ID NO: 1255117 - RNA, 19 nt, Artificial Sequence
  Description of Artificial Sequence: Synthetic oligonucleotide
  Antisense strand to SEQ ID NO: 1255116
ucaguuaccugucaagugc

SEQ ID NO: 1255118 - RNA, 19 nt, Artificial Sequence
  Description of Artificial Sequence: Synthetic oligonucleotide
  Sense strand starting at position 2582 of SEQ ID NO: 1241211
ugaugaauguauccauuaa

SEQ ID NO: 1255119 - RNA, 19 nt, Artificial Sequence
  Description of Artificial Sequence: Synthetic oligonucleotide
  Antisense strand to SEQ ID NO: 1255118
uuaauggauacauucauca

SEQ ID NO: 1255120 - RNA, 19 nt, Artificial Sequence
  Description of Artificial Sequence: Synthetic oligonucleotide
  Sense strand starting at position 2618 of SEQ ID NO: 1241211
gagugaauccugggcucug

SEQ ID NO: 1255121 - RNA, 19 nt, Artificial Sequence
  Description of Artificial Sequence: Synthetic oligonucleotide
  Antisense strand to SEQ ID NO: 1255120
cagagcccaggauucacuc

SEQ ID NO: 1255122 - RNA, 19 nt, Artificial Sequence
  Description of Artificial Sequence: Synthetic oligonucleotide
  Sense strand starting at position 2674 of SEQ ID NO: 1241211
agcuuaagccacuguugga

SEQ ID NO: 1255123 - RNA, 19 nt, Artificial Sequence
  Description of Artificial Sequence: Synthetic oligonucleotide
  Antisense strand to SEQ ID NO: 1255122
uccaacaguggcuuaagcu

SEQ ID NO: 1255124 - RNA, 19 nt, Artificial Sequence
  Description of Artificial Sequence: Synthetic oligonucleotide
  Sense strand starting at position 2690 of SEQ ID NO: 1241211
ggacaccucuuguuaggua

SEQ ID NO: 1255125 - RNA, 19 nt, Artificial Sequence
  Description of Artificial Sequence: Synthetic oligonucleotide
  Antisense strand to SEQ ID NO: 1255124
uaccuaacaagaggugucc

SEQ ID NO: 1255126 - RNA, 19 nt, Artificial Sequence
  Description of Artificial Sequence: Synthetic oligonucleotide
  Sense strand starting at position 2822 of SEQ ID NO: 1241211
ccaucugaauuugagaaca

SEQ ID NO: 1255127 - RNA, 19 nt, Artificial Sequence
  Description of Artificial Sequence: Synthetic oligonucleotide
  Antisense strand to SEQ ID NO: 1255126
uguucucaaauucagaugg

SEQ ID NO: 1255128 - RNA, 19 nt, Artificial Sequence
  Description of Artificial Sequence: Synthetic oligonucleotide
  Sense strand starting at position 2904 of SEQ ID NO: 1241211
guuggcuucccuuauuucu

SEQ ID NO: 1255129 - RNA, 19 nt, Artificial Sequence
  Description of Artificial Sequence: Synthetic oligonucleotide
  Antisense strand to SEQ ID NO: 1255128
agaaauaagggaagccaac

SEQ ID NO: 1255130 - RNA, 19 nt, Artificial Sequence
  Description of Artificial Sequence: Synthetic oligonucleotide
  Sense strand starting at position 3132 of SEQ ID NO: 1241211
cacgccugucccuaaauga

SEQ ID NO: 1255131 - RNA, 19 nt, Artificial Sequence
  Description of Artificial Sequence: Synthetic oligonucleotide
  Antisense strand to SEQ ID NO: 1255130
ucauuuagggacaggcgug

SEQ ID NO: 1255132 - RNA, 19 nt, Artificial Sequence
  Description of Artificial Sequence: Synthetic oligonucleotide
  Sense strand starting at position 3201 of SEQ ID NO: 1241211
acauauuugcuuugcuaag

SEQ ID NO: 1255133 - RNA, 19 nt, Artificial Sequence
  Description of Artificial Sequence: Synthetic oligonucleotide
  Antisense strand to SEQ ID NO: 1255132
cuuagcaaagcaaauaugu

SEQ ID NO: 1255134 - RNA, 19 nt, Artificial Sequence
  Description of Artificial Sequence: Synthetic oligonucleotide
  Sense strand starting at position 3203 of SEQ ID NO: 1241211
auauuugcuuugcuaagca

SEQ ID NO: 1255135 - RNA, 19 nt, Artificial Sequence
  Description of Artificial Sequence: Synthetic oligonucleotide
  Antisense strand to SEQ ID NO: 1255134
ugcuuagcaaagcaaauau

SEQ ID NO: 1255136 - RNA, 19 nt, Artificial Sequence
  Description of Artificial Sequence: Synthetic oligonucleotide
  Sense strand starting at position 3222 of SEQ ID NO: 1241211
ccuacuaugugcuuagaac

SEQ ID NO: 1255137 - RNA, 19 nt, Artificial Sequence
  Description of Artificial Sequence: Synthetic oligonucleotide
  Antisense strand to SEQ ID NO: 1255136
guucuaagcacauaguagg

SEQ ID NO: 1255138 - RNA, 19 nt, Artificial Sequence
  Description of Artificial Sequence: Synthetic oligonucleotide
  Sense strand starting at position 3223 of SEQ ID NO: 1241211
cuacuaugugcuuagaaca

SEQ ID NO: 1255139 - RNA, 19 nt, Artificial Sequence
  Description of Artificial Sequence: Synthetic oligonucleotide
  Antisense strand to SEQ ID NO: 1255138
uguucuaagcacauaguag

SEQ ID NO: 1255140 - RNA, 19 nt, Artificial Sequence
  Description of Artificial Sequence: Synthetic oligonucleotide
  Sense strand starting at position 3342 of SEQ ID NO: 1241211
cacaguuugucagcacgga

SEQ ID NO: 1255141 - RNA, 19 nt, Artificial Sequence
  Description of Artificial Sequence: Synthetic oligonucleotide
  Antisense strand to SEQ ID NO: 1255140
uccgugcugacaaacugug

SEQ ID NO: 1255142 - RNA, 19 nt, Artificial Sequence
  Description of Artificial Sequence: Synthetic oligonucleotide
  Sense strand starting at position 3343 of SEQ ID NO: 1241211
acaguuugucagcacggaa

SEQ ID NO: 1255143 - RNA, 19 nt, Artificial Sequence
  Description of Artificial Sequence: Synthetic oligonucleotide
  Antisense strand to SEQ ID NO: 1255142
uuccgugcugacaaacugu

SEQ ID NO: 1255144 - RNA, 19 nt, Artificial Sequence
  Description of Artificial Sequence: Synthetic oligonucleotide
  Sense strand starting at position 3773 of SEQ ID NO: 1241211
ggaggaaacaguuaguguu

SEQ ID NO: 1255145 - RNA, 19 nt, Artificial Sequence
  Description of Artificial Sequence: Synthetic oligonucleotide
  Antisense strand to SEQ ID NO: 1255144
aacacuaacuguuuccucc

SEQ ID NO: 1255146 - RNA, 19 nt, Artificial Sequence
  Description of Artificial Sequence: Synthetic oligonucleotide
  Sense strand starting at position 3856 of SEQ ID NO: 1241211
gcaacauaauuggacuuaa

SEQ ID NO: 1255147 - RNA, 19 nt, Artificial Sequence
  Description of Artificial Sequence: Synthetic oligonucleotide
  Antisense strand to SEQ ID NO: 1255146
uuaaguccaauuauguugc

SEQ ID NO: 1255148 - RNA, 19 nt, Artificial Sequence
  Description of Artificial Sequence: Synthetic oligonucleotide
  Sense strand starting at position 1 of SEQ ID NO: 1241212
ugaggaguccaguggagua

SEQ ID NO: 1255149 - RNA, 19 nt, Artificial Sequence
  Description of Artificial Sequence: Synthetic oligonucleotide
  Antisense strand to SEQ ID NO: 1255148
uacuccacuggacuccuca

SEQ ID NO: 1255150 - RNA, 19 nt, Artificial Sequence
  Description of Artificial Sequence: Synthetic oligonucleotide
  Sense strand starting at position 62 of SEQ ID NO: 1241212
gaauacauaguaugugcua

SEQ ID NO: 1255151 - RNA, 19 nt, Artificial Sequence
  Description of Artificial Sequence: Synthetic oligonucleotide
  Antisense strand to SEQ ID NO: 1255150
uagcacauacuauguauuc

SEQ ID NO: 1255152 - RNA, 19 nt, Artificial Sequence
  Description of Artificial Sequence: Synthetic oligonucleotide
  Sense strand starting at position 71 of SEQ ID NO: 1241212
guaugugcuagagaccuga

SEQ ID NO: 1255153 - RNA, 19 nt, Artificial Sequence
  Description of Artificial Sequence: Synthetic oligonucleotide
  Antisense strand to SEQ ID NO: 1255152
ucaggucucuagcacauac

SEQ ID NO: 1255154 - RNA, 19 nt, Artificial Sequence
  Description of Artificial Sequence: Synthetic oligonucleotide
  Sense strand starting at position 75 of SEQ ID NO: 1241212
gugcuagagaccugacugu

SEQ ID NO: 1255155 - RNA, 19 nt, Artificial Sequence
  Description of Artificial Sequence: Synthetic oligonucleotide
  Antisense strand to SEQ ID NO: 1255154
acagucaggucucuagcac

SEQ ID NO: 1255156 - RNA, 19 nt, Artificial Sequence
  Description of Artificial Sequence: Synthetic oligonucleotide
  Sense strand starting at position 79 of SEQ ID NO: 1241212
uagagaccugacuguguua

SEQ ID NO: 1255157 - RNA, 19 nt, Artificial Sequence
  Description of Artificial Sequence: Synthetic oligonucleotide
  Antisense strand to SEQ ID NO: 1255156
uaacacagucaggucucua

SEQ ID NO: 1255158 - RNA, 19 nt, Artificial Sequence
  Description of Artificial Sequence: Synthetic oligonucleotide
  Sense strand starting at position 81 of SEQ ID NO: 1241212
gagaccugacuguguuauu

SEQ ID NO: 1255159 - RNA, 19 nt, Artificial Sequence
  Description of Artificial Sequence: Synthetic oligonucleotide
  Antisense strand to SEQ ID NO: 1255158
aauaacacagucaggucuc

SEQ ID NO: 1255160 - RNA, 19 nt, Artificial Sequence
  Description of Artificial Sequence: Synthetic oligonucleotide
  Sense strand starting at position 188 of SEQ ID NO: 1241212
auaagagauugugcaggaa

SEQ ID NO: 1255161 - RNA, 19 nt, Artificial Sequence
  Description of Artificial Sequence: Synthetic oligonucleotide
  Antisense strand to SEQ ID NO: 1255160
uuccugcacaaucucuuau

SEQ ID NO: 1255162 - RNA, 19 nt, Artificial Sequence
  Description of Artificial Sequence: Synthetic oligonucleotide
  Sense strand starting at position 191 of SEQ ID NO: 1241212
agagauugugcaggaauca

SEQ ID NO: 1255163 - RNA, 19 nt, Artificial Sequence
  Description of Artificial Sequence: Synthetic oligonucleotide
  Antisense strand to SEQ ID NO: 1255162
ugauuccugcacaaucucu

SEQ ID NO: 1255164 - RNA, 19 nt, Artificial Sequence
  Description of Artificial Sequence: Synthetic oligonucleotide
  Sense strand starting at position 214 of SEQ ID NO: 1241212
guggcaguaugaguucuaa

SEQ ID NO: 1255165 - RNA, 19 nt, Artificial Sequence
  Description of Artificial Sequence: Synthetic oligonucleotide
  Antisense strand to SEQ ID NO: 1255164
uuagaacucauacugccac

SEQ ID NO: 1255166 - RNA, 19 nt, Artificial Sequence
  Description of Artificial Sequence: Synthetic oligonucleotide
  Sense strand starting at position 1339 of SEQ ID NO: 1241212
aguucuucccucugagagu

SEQ ID NO: 1255167 - RNA, 19 nt, Artificial Sequence
  Description of Artificial Sequence: Synthetic oligonucleotide
  Antisense strand to SEQ ID NO: 1255166
acucucagagggaagaacu

SEQ ID NO: 1255168 - RNA, 19 nt, Artificial Sequence
  Description of Artificial Sequence: Synthetic oligonucleotide
  Sense strand starting at position 1675 of SEQ ID NO: 1241212
ggugaugucucaucacaca

SEQ ID NO: 1255169 - RNA, 19 nt, Artificial Sequence
  Description of Artificial Sequence: Synthetic oligonucleotide
  Antisense strand to SEQ ID NO: 1255168
ugugugaugagacaucacc

SEQ ID NO: 1255170 - RNA, 19 nt, Artificial Sequence
  Description of Artificial Sequence: Synthetic oligonucleotide
  Sense strand starting at position 1870 of SEQ ID NO: 1241212
gcuuguucuccggaaggaa

SEQ ID NO: 1255171 - RNA, 19 nt, Artificial Sequence
  Description of Artificial Sequence: Synthetic oligonucleotide
  Antisense strand to SEQ ID NO: 1255170
uuccuuccggagaacaagc

SEQ ID NO: 1255172 - RNA, 19 nt, Artificial Sequence
  Description of Artificial Sequence: Synthetic oligonucleotide
  Sense strand starting at position 1885 of SEQ ID NO: 1241212
ggaaaugugcagugugaug

SEQ ID NO: 1255173 - RNA, 19 nt, Artificial Sequence
  Description of Artificial Sequence: Synthetic oligonucleotide
  Antisense strand to SEQ ID NO: 1255172
caucacacugcacauuucc

SEQ ID NO: 1255174 - RNA, 19 nt, Artificial Sequence
  Description of Artificial Sequence: Synthetic oligonucleotide
  Sense strand starting at position 2021 of SEQ ID NO: 1241212
gcagucuaaugucucacau

SEQ ID NO: 1255175 - RNA, 19 nt, Artificial Sequence
  Description of Artificial Sequence: Synthetic oligonucleotide
  Antisense strand to SEQ ID NO: 1255174
augugagacauuagacugc

SEQ ID NO: 1255176 - RNA, 19 nt, Artificial Sequence
  Description of Artificial Sequence: Synthetic oligonucleotide
  Sense strand starting at position 2251 of SEQ ID NO: 1241212
cgcaaaugucucuaacccu

SEQ ID NO: 1255177 - RNA, 19 nt, Artificial Sequence
  Description of Artificial Sequence: Synthetic oligonucleotide
  Antisense strand to SEQ ID NO: 1255176
aggguuagagacauuugcg

SEQ ID NO: 1255178 - RNA, 19 nt, Artificial Sequence
  Description of Artificial Sequence: Synthetic oligonucleotide
  Sense strand starting at position 2292 of SEQ ID NO: 1241212
uuccauucuggaugugaau

SEQ ID NO: 1255179 - RNA, 19 nt, Artificial Sequence
  Description of Artificial Sequence: Synthetic oligonucleotide
  Antisense strand to SEQ ID NO: 1255178
auucacauccagaauggaa

SEQ ID NO: 1255180 - RNA, 19 nt, Artificial Sequence
  Description of Artificial Sequence: Synthetic oligonucleotide
  Sense strand starting at position 2358 of SEQ ID NO: 1241212
aggguucuccauuauuacu

SEQ ID NO: 1255181 - RNA, 19 nt, Artificial Sequence
  Description of Artificial Sequence: Synthetic oligonucleotide
  Antisense strand to SEQ ID NO: 1255180
aguaauaauggagaacccu

SEQ ID NO: 1255182 - RNA, 19 nt, Artificial Sequence
  Description of Artificial Sequence: Synthetic oligonucleotide
  Sense strand starting at position 2373 of SEQ ID NO: 1241212
uacucugaccuuugugagu

SEQ ID NO: 1255183 - RNA, 19 nt, Artificial Sequence
  Description of Artificial Sequence: Synthetic oligonucleotide
  Antisense strand to SEQ ID NO: 1255182
acucacaaaggucagagua

SEQ ID NO: 1255184 - RNA, 19 nt, Artificial Sequence
  Description of Artificial Sequence: Synthetic oligonucleotide
  Sense strand starting at position 2409 of SEQ ID NO: 1241212
cuauccaaccuguauguau

SEQ ID NO: 1255185 - RNA, 19 nt, Artificial Sequence
  Description of Artificial Sequence: Synthetic oligonucleotide
  Antisense strand to SEQ ID NO: 1255184
auacauacagguuggauag

SEQ ID NO: 1255186 - RNA, 19 nt, Artificial Sequence
  Description of Artificial Sequence: Synthetic oligonucleotide
  Sense strand starting at position 2416 of SEQ ID NO: 1241212
accuguauguaucuaccua

SEQ ID NO: 1255187 - RNA, 19 nt, Artificial Sequence
  Description of Artificial Sequence: Synthetic oligonucleotide
  Antisense strand to SEQ ID NO: 1255186
uagguagauacauacaggu

SEQ ID NO: 1255188 - RNA, 19 nt, Artificial Sequence
  Description of Artificial Sequence: Synthetic oligonucleotide
  Sense strand starting at position 2457 of SEQ ID NO: 1241212
ggcuguuccucaucacuca

SEQ ID NO: 1255189 - RNA, 19 nt, Artificial Sequence
  Description of Artificial Sequence: Synthetic oligonucleotide
  Antisense strand to SEQ ID NO: 1255188
ugagugaugaggaacagcc

SEQ ID NO: 1255190 - RNA, 19 nt, Artificial Sequence
  Description of Artificial Sequence: Synthetic oligonucleotide
  Sense strand starting at position 2484 of SEQ ID NO: 1241212
uuugcugacgucuacaaua

SEQ ID NO: 1255191 - RNA, 19 nt, Artificial Sequence
  Description of Artificial Sequence: Synthetic oligonucleotide
  Antisense strand to SEQ ID NO: 1255190
uauuguagacgucagcaaa

SEQ ID NO: 1255192 - RNA, 19 nt, Artificial Sequence
  Description of Artificial Sequence: Synthetic oligonucleotide
  Sense strand starting at position 2486 of SEQ ID NO: 1241212
ugcugacgucuacaauauu

SEQ ID NO: 1255193 - RNA, 19 nt, Artificial Sequence
  Description of Artificial Sequence: Synthetic oligonucleotide
  Antisense strand to SEQ ID NO: 1255192
aauauuguagacgucagca

SEQ ID NO: 1255194 - RNA, 19 nt, Artificial Sequence
  Description of Artificial Sequence: Synthetic oligonucleotide
  Sense strand starting at position 2506 of SEQ ID NO: 1241212
cgccucucaucaucaaaga

SEQ ID NO: 1255195 - RNA, 19 nt, Artificial Sequence
  Description of Artificial Sequence: Synthetic oligonucleotide
  Antisense strand to SEQ ID NO: 1255194
ucuuugaugaugagaggcg

SEQ ID NO: 1255196 - RNA, 19 nt, Artificial Sequence
  Description of Artificial Sequence: Synthetic oligonucleotide
  Sense strand starting at position 2522 of SEQ ID NO: 1241212
agaagaucaucugggagaa

SEQ ID NO: 1255197 - RNA, 19 nt, Artificial Sequence
  Description of Artificial Sequence: Synthetic oligonucleotide
  Antisense strand to SEQ ID NO: 1255196
uucucccagaugaucuucu

SEQ ID NO: 1255198 - RNA, 19 nt, Artificial Sequence
  Description of Artificial Sequence: Synthetic oligonucleotide
  Sense strand starting at position 2524 of SEQ ID NO: 1241212
aagaucaucugggagaaag

SEQ ID NO: 1255199 - RNA, 19 nt, Artificial Sequence
  Description of Artificial Sequence: Synthetic oligonucleotide
  Antisense strand to SEQ ID NO: 1255198
cuuucucccagaugaucuu

SEQ ID NO: 1255200 - RNA, 19 nt, Artificial Sequence
  Description of Artificial Sequence: Synthetic oligonucleotide
  Sense strand starting at position 2550 of SEQ ID NO: 1241212
agucuucugcugcaaccua

SEQ ID NO: 1255201 - RNA, 19 nt, Artificial Sequence
  Description of Artificial Sequence: Synthetic oligonucleotide
  Antisense strand to SEQ ID NO: 1255200
uagguugcagcagaagacu

SEQ ID NO: 1255202 - RNA, 19 nt, Artificial Sequence
  Description of Artificial Sequence: Synthetic oligonucleotide
  Sense strand starting at position 2595 of SEQ ID NO: 1241212
cuaguaucuugguuuccca

SEQ ID NO: 1255203 - RNA, 19 nt, Artificial Sequence
  Description of Artificial Sequence: Synthetic oligonucleotide
  Antisense strand to SEQ ID NO: 1255202
ugggaaaccaagauacuag

SEQ ID NO: 1255204 - RNA, 19 nt, Artificial Sequence
  Description of Artificial Sequence: Synthetic oligonucleotide
  Sense strand starting at position 2663 of SEQ ID NO: 1241212
ucucaaagugugugaucuu

SEQ ID NO: 1255205 - RNA, 19 nt, Artificial Sequence
  Description of Artificial Sequence: Synthetic oligonucleotide
  Antisense strand to SEQ ID NO: 1255204
aagaucacacacuuugaga

SEQ ID NO: 1255206 - RNA, 19 nt, Artificial Sequence
  Description of Artificial Sequence: Synthetic oligonucleotide
  Sense strand starting at position 2675 of SEQ ID NO: 1241212
ugaucuugcugccuggaua

SEQ ID NO: 1255207 - RNA, 19 nt, Artificial Sequence
  Description of Artificial Sequence: Synthetic oligonucleotide
  Antisense strand to SEQ ID NO: 1255206
uauccaggcagcaagauca

SEQ ID NO: 1255208 - RNA, 19 nt, Artificial Sequence
  Description of Artificial Sequence: Synthetic oligonucleotide
  Sense strand starting at position 2678 of SEQ ID NO: 1241212
ucuugcugccuggauagau

SEQ ID NO: 1255209 - RNA, 19 nt, Artificial Sequence
  Description of Artificial Sequence: Synthetic oligonucleotide
  Antisense strand to SEQ ID NO: 1255208
aucuauccaggcagcaaga

SEQ ID NO: 1255210 - RNA, 19 nt, Artificial Sequence
  Description of Artificial Sequence: Synthetic oligonucleotide
  Sense strand starting at position 2814 of SEQ ID NO: 1241212
gggcuacguuaacuuauua

SEQ ID NO: 1255211 - RNA, 19 nt, Artificial Sequence
  Description of Artificial Sequence: Synthetic oligonucleotide
  Antisense strand to SEQ ID NO: 1255210
uaauaaguuaacguagccc

SEQ ID NO: 1255212 - RNA, 19 nt, Artificial Sequence
  Description of Artificial Sequence: Synthetic oligonucleotide
  Sense strand starting at position 2831 of SEQ ID NO: 1241212
uaagcaaaguuaguaagua

SEQ ID NO: 1255213 - RNA, 19 nt, Artificial Sequence
  Description of Artificial Sequence: Synthetic oligonucleotide
  Antisense strand to SEQ ID NO: 1255212
uacuuacuaacuuugcuua

SEQ ID NO: 1255214 - RNA, 19 nt, Artificial Sequence
  Description of Artificial Sequence: Synthetic oligonucleotide
  Sense strand starting at position 2856 of SEQ ID NO: 1241212
gggaaaucaacuugcuguu

SEQ ID NO: 1255215 - RNA, 19 nt, Artificial Sequence
  Description of Artificial Sequence: Synthetic oligonucleotide
  Antisense strand to SEQ ID NO: 1255214
aacagcaaguugauuuccc

SEQ ID NO: 1255216 - RNA, 19 nt, Artificial Sequence
  Description of Artificial Sequence: Synthetic oligonucleotide
  Sense strand starting at position 3702 of SEQ ID NO: 1241212
uugucagucgcucuucuua

SEQ ID NO: 1255217 - RNA, 19 nt, Artificial Sequence
  Description of Artificial Sequence: Synthetic oligonucleotide
  Antisense strand to SEQ ID NO: 1255216
uaagaagagcgacugacaa

SEQ ID NO: 1255218 - RNA, 19 nt, Artificial Sequence
  Description of Artificial Sequence: Synthetic oligonucleotide
  Sense strand starting at position 3821 of SEQ ID NO: 1241212
acaguuccaucacuggaga

SEQ ID NO: 1255219 - RNA, 19 nt, Artificial Sequence
  Description of Artificial Sequence: Synthetic oligonucleotide
  Antisense strand to SEQ ID NO: 1255218
ucuccagugauggaacugu

SEQ ID NO: 1255220 - RNA, 19 nt, Artificial Sequence
  Description of Artificial Sequence: Synthetic oligonucleotide
  Sense strand starting at position 3955 of SEQ ID NO: 1241212
cagagaguguaaucugcga

SEQ ID NO: 1255221 - RNA, 19 nt, Artificial Sequence
  Description of Artificial Sequence: Synthetic oligonucleotide
  Antisense strand to SEQ ID NO: 1255220
ucgcagauuacacucucug

SEQ ID NO: 1255222 - RNA, 19 nt, Artificial Sequence
  Description of Artificial Sequence: Synthetic oligonucleotide
  Sense strand starting at position 3957 of SEQ ID NO: 1241212
gagaguguaaucugcgaga

SEQ ID NO: 1255223 - RNA, 19 nt, Artificial Sequence
  Description of Artificial Sequence: Synthetic oligonucleotide
  Antisense strand to SEQ ID NO: 1255222
ucucgcagauuacacucuc

SEQ ID NO: 1255224 - RNA, 19 nt, Artificial Sequence
  Description of Artificial Sequence: Synthetic oligonucleotide
  Sense strand starting at position 3959 of SEQ ID NO: 1241212
gaguguaaucugcgagagg

SEQ ID NO: 1255225 - RNA, 19 nt, Artificial Sequence
  Description of Artificial Sequence: Synthetic oligonucleotide
  Antisense strand to SEQ ID NO: 1255224
ccucucgcagauuacacuc

SEQ ID NO: 1255226 - RNA, 19 nt, Artificial Sequence
  Description of Artificial Sequence: Synthetic oligonucleotide
  Sense strand starting at position 3962 of SEQ ID NO: 1241212
uguaaucugcgagaggaag

SEQ ID NO: 1255227 - RNA, 19 nt, Artificial Sequence
  Description of Artificial Sequence: Synthetic oligonucleotide
  Antisense strand to SEQ ID NO: 1255226
cuuccucucgcagauuaca

SEQ ID NO: 1255228 - RNA, 19 nt, Artificial Sequence
  Description of Artificial Sequence: Synthetic oligonucleotide
  Sense strand starting at position 37 of SEQ ID NO: 1241213
gugacccuucuugaucaca

SEQ ID NO: 1255229 - RNA, 19 nt, Artificial Sequence
  Description of Artificial Sequence: Synthetic oligonucleotide
  Antisense strand to SEQ ID NO: 1255228
ugugaucaagaagggucac

SEQ ID NO: 1255230 - RNA, 19 nt, Artificial Sequence
  Description of Artificial Sequence: Synthetic oligonucleotide
  Sense strand starting at position 55 of SEQ ID NO: 1241213
acccuaaucccuuaggagu

SEQ ID NO: 1255231 - RNA, 19 nt, Artificial Sequence
  Description of Artificial Sequence: Synthetic oligonucleotide
  Antisense strand to SEQ ID NO: 1255230
acuccuaagggauuagggu

SEQ ID NO: 1255232 - RNA, 19 nt, Artificial Sequence
  Description of Artificial Sequence: Synthetic oligonucleotide
  Sense strand starting at position 84 of SEQ ID NO: 1241213
ucgacuuaacaguaauugu

SEQ ID NO: 1255233 - RNA, 19 nt, Artificial Sequence
  Description of Artificial Sequence: Synthetic oligonucleotide
  Antisense strand to SEQ ID NO: 1255232
acaauuacuguuaagucga

SEQ ID NO: 1255234 - RNA, 19 nt, Artificial Sequence
  Description of Artificial Sequence: Synthetic oligonucleotide
  Sense strand starting at position 127 of SEQ ID NO: 1241213
ccagguacauccuugaaua

SEQ ID NO: 1255235 - RNA, 19 nt, Artificial Sequence
  Description of Artificial Sequence: Synthetic oligonucleotide
  Antisense strand to SEQ ID NO: 1255234
uauucaaggauguaccugg

SEQ ID NO: 1255236 - RNA, 19 nt, Artificial Sequence
  Description of Artificial Sequence: Synthetic oligonucleotide
  Sense strand starting at position 279 of SEQ ID NO: 1241213
cacuauugacauugggagu

SEQ ID NO: 1255237 - RNA, 19 nt, Artificial Sequence
  Description of Artificial Sequence: Synthetic oligonucleotide
  Antisense strand to SEQ ID NO: 1255236
acucccaaugucaauagug

SEQ ID NO: 1255238 - RNA, 19 nt, Artificial Sequence
  Description of Artificial Sequence: Synthetic oligonucleotide
  Sense strand starting at position 285 of SEQ ID NO: 1241213
ugacauugggagugauacu

SEQ ID NO: 1255239 - RNA, 19 nt, Artificial Sequence
  Description of Artificial Sequence: Synthetic oligonucleotide
  Antisense strand to SEQ ID NO: 1255238
aguaucacucccaauguca

SEQ ID NO: 1255240 - RNA, 19 nt, Artificial Sequence
  Description of Artificial Sequence: Synthetic oligonucleotide
  Sense strand starting at position 517 of SEQ ID NO: 1241213
augaauguaucaguuacuu

SEQ ID NO: 1255241 - RNA, 19 nt, Artificial Sequence
  Description of Artificial Sequence: Synthetic oligonucleotide
  Antisense strand to SEQ ID NO: 1255240
aaguaacugauacauucau

SEQ ID NO: 1255242 - RNA, 19 nt, Artificial Sequence
  Description of Artificial Sequence: Synthetic oligonucleotide
  Sense strand starting at position 558 of SEQ ID NO: 1241213
ugcuguuaugaacacuuau

SEQ ID NO: 1255243 - RNA, 19 nt, Artificial Sequence
  Description of Artificial Sequence: Synthetic oligonucleotide
  Antisense strand to SEQ ID NO: 1255242
auaaguguucauaacagca

SEQ ID NO: 1255244 - RNA, 19 nt, Artificial Sequence
  Description of Artificial Sequence: Synthetic oligonucleotide
  Sense strand starting at position 620 of SEQ ID NO: 1241213
augggaaucacugggucau

SEQ ID NO: 1255245 - RNA, 19 nt, Artificial Sequence
  Description of Artificial Sequence: Synthetic oligonucleotide
  Antisense strand to SEQ ID NO: 1255244
augacccagugauucccau

SEQ ID NO: 1255246 - RNA, 19 nt, Artificial Sequence
  Description of Artificial Sequence: Synthetic oligonucleotide
  Sense strand starting at position 621 of SEQ ID NO: 1241213
ugggaaucacugggucaug

SEQ ID NO: 1255247 - RNA, 19 nt, Artificial Sequence
  Description of Artificial Sequence: Synthetic oligonucleotide
  Antisense strand to SEQ ID NO: 1255246
caugacccagugauuccca

SEQ ID NO: 1255248 - RNA, 19 nt, Artificial Sequence
  Description of Artificial Sequence: Synthetic oligonucleotide
  Sense strand starting at position 622 of SEQ ID NO: 1241213
gggaaucacugggucaugu

SEQ ID NO: 1255249 - RNA, 19 nt, Artificial Sequence
  Description of Artificial Sequence: Synthetic oligonucleotide
  Antisense strand to SEQ ID NO: 1255248
acaugacccagugauuccc

SEQ ID NO: 1255250 - RNA, 19 nt, Artificial Sequence
  Description of Artificial Sequence: Synthetic oligonucleotide
  Sense strand starting at position 630 of SEQ ID NO: 1241213
cugggucaugucuguauuu

SEQ ID NO: 1255251 - RNA, 19 nt, Artificial Sequence
  Description of Artificial Sequence: Synthetic oligonucleotide
  Antisense strand to SEQ ID NO: 1255250
aaauacagacaugacccag

SEQ ID NO: 1255252 - RNA, 19 nt, Artificial Sequence
  Description of Artificial Sequence: Synthetic oligonucleotide
  Sense strand starting at position 674 of SEQ ID NO: 1241213
guaguuguacuacaggaga

SEQ ID NO: 1255253 - RNA, 19 nt, Artificial Sequence
  Description of Artificial Sequence: Synthetic oligonucleotide
  Antisense strand to SEQ ID NO: 1255252
ucuccuguaguacaacuac

SEQ ID NO: 1255254 - RNA, 19 nt, Artificial Sequence
  Description of Artificial Sequence: Synthetic oligonucleotide
  Sense strand starting at position 676 of SEQ ID NO: 1241213
aguuguacuacaggagaau

SEQ ID NO: 1255255 - RNA, 19 nt, Artificial Sequence
  Description of Artificial Sequence: Synthetic oligonucleotide
  Antisense strand to SEQ ID NO: 1255254
auucuccuguaguacaacu

SEQ ID NO: 1255256 - RNA, 19 nt, Artificial Sequence
  Description of Artificial Sequence: Synthetic oligonucleotide
  Sense strand starting at position 1250 of SEQ ID NO: 1241213
ggaugccuugaaugaauga

SEQ ID NO: 1255257 - RNA, 19 nt, Artificial Sequence
  Description of Artificial Sequence: Synthetic oligonucleotide
  Antisense strand to SEQ ID NO: 1255256
ucauucauucaaggcaucc

SEQ ID NO: 1255258 - RNA, 19 nt, Artificial Sequence
  Description of Artificial Sequence: Synthetic oligonucleotide
  Sense strand starting at position 1472 of SEQ ID NO: 1241213
gcuagaauucgguaagaaa

SEQ ID NO: 1255259 - RNA, 19 nt, Artificial Sequence
  Description of Artificial Sequence: Synthetic oligonucleotide
  Antisense strand to SEQ ID NO: 1255258
uuucuuaccgaauucuagc

SEQ ID NO: 1255260 - RNA, 19 nt, Artificial Sequence
  Description of Artificial Sequence: Synthetic oligonucleotide
  Sense strand starting at position 1502 of SEQ ID NO: 1241213
ucaaaucgagcuugaggau

SEQ ID NO: 1255261 - RNA, 19 nt, Artificial Sequence
  Description of Artificial Sequence: Synthetic oligonucleotide
  Antisense strand to SEQ ID NO: 1255260
auccucaagcucgauuuga

SEQ ID NO: 1255262 - RNA, 19 nt, Artificial Sequence
  Description of Artificial Sequence: Synthetic oligonucleotide
  Sense strand starting at position 1763 of SEQ ID NO: 1241213
gccagccuuggauaugaga

SEQ ID NO: 1255263 - RNA, 19 nt, Artificial Sequence
  Description of Artificial Sequence: Synthetic oligonucleotide
  Antisense strand to SEQ ID NO: 1255262
ucucauauccaaggcuggc

SEQ ID NO: 1255264 - RNA, 19 nt, Artificial Sequence
  Description of Artificial Sequence: Synthetic oligonucleotide
  Sense strand starting at position 2138 of SEQ ID NO: 1241213
ggaucuugggcugagcgaa

SEQ ID NO: 1255265 - RNA, 19 nt, Artificial Sequence
  Description of Artificial Sequence: Synthetic oligonucleotide
  Antisense strand to SEQ ID NO: 1255264
uucgcucagcccaagaucc

SEQ ID NO: 1255266 - RNA, 19 nt, Artificial Sequence
  Description of Artificial Sequence: Synthetic oligonucleotide
  Sense strand starting at position 2165 of SEQ ID NO: 1241213
agacaccuuccugagcuua

SEQ ID NO: 1255267 - RNA, 19 nt, Artificial Sequence
  Description of Artificial Sequence: Synthetic oligonucleotide
  Antisense strand to SEQ ID NO: 1255266
uaagcucaggaaggugucu

SEQ ID NO: 1255268 - RNA, 19 nt, Artificial Sequence
  Description of Artificial Sequence: Synthetic oligonucleotide
  Sense strand starting at position 2176 of SEQ ID NO: 1241213
ugagcuuaggcugacaaga

SEQ ID NO: 1255269 - RNA, 19 nt, Artificial Sequence
  Description of Artificial Sequence: Synthetic oligonucleotide
  Antisense strand to SEQ ID NO: 1255268
ucuugucagccuaagcuca

SEQ ID NO: 1255270 - RNA, 19 nt, Artificial Sequence
  Description of Artificial Sequence: Synthetic oligonucleotide
  Sense strand starting at position 2224 of SEQ ID NO: 1241213
auuauuucucgcuaccgca

SEQ ID NO: 1255271 - RNA, 19 nt, Artificial Sequence
  Description of Artificial Sequence: Synthetic oligonucleotide
  Antisense strand to SEQ ID NO: 1255270
ugcgguagcgagaaauaau

SEQ ID NO: 1255272 - RNA, 19 nt, Artificial Sequence
  Description of Artificial Sequence: Synthetic oligonucleotide
  Sense strand starting at position 2284 of SEQ ID NO: 1241213
uucuuaaggcaaugagagu

SEQ ID NO: 1255273 - RNA, 19 nt, Artificial Sequence
  Description of Artificial Sequence: Synthetic oligonucleotide
  Antisense strand to SEQ ID NO: 1255272
acucucauugccuuaagaa

SEQ ID NO: 1255274 - RNA, 19 nt, Artificial Sequence
  Description of Artificial Sequence: Synthetic oligonucleotide
  Sense strand starting at position 2312 of SEQ ID NO: 1241213
accagaucucagcagguga

SEQ ID NO: 1255275 - RNA, 19 nt, Artificial Sequence
  Description of Artificial Sequence: Synthetic oligonucleotide
  Antisense strand to SEQ ID NO: 1255274
ucaccugcugagaucuggu

SEQ ID NO: 1255276 - RNA, 19 nt, Artificial Sequence
  Description of Artificial Sequence: Synthetic oligonucleotide
  Sense strand starting at position 2314 of SEQ ID NO: 1241213
cagaucucagcaggugaau

SEQ ID NO: 1255277 - RNA, 19 nt, Artificial Sequence
  Description of Artificial Sequence: Synthetic oligonucleotide
  Antisense strand to SEQ ID NO: 1255276
auucaccugcugagaucug

SEQ ID NO: 1255278 - RNA, 19 nt, Artificial Sequence
  Description of Artificial Sequence: Synthetic oligonucleotide
  Sense strand starting at position 2410 of SEQ ID NO: 1241213
guaauaauuggucauucca

SEQ ID NO: 1255279 - RNA, 19 nt, Artificial Sequence
  Description of Artificial Sequence: Synthetic oligonucleotide
  Antisense strand to SEQ ID NO: 1255278
uggaaugaccaauuauuac

SEQ ID NO: 1255280 - RNA, 19 nt, Artificial Sequence
  Description of Artificial Sequence: Synthetic oligonucleotide
  Sense strand starting at position 2425 of SEQ ID NO: 1241213
uccagaguccucuggagga

SEQ ID NO: 1255281 - RNA, 19 nt, Artificial Sequence
  Description of Artificial Sequence: Synthetic oligonucleotide
  Antisense strand to SEQ ID NO: 1255280
uccuccagaggacucugga

SEQ ID NO: 1255282 - RNA, 19 nt, Artificial Sequence
  Description of Artificial Sequence: Synthetic oligonucleotide
  Sense strand starting at position 2429 of SEQ ID NO: 1241213
gaguccucuggaggacaua

SEQ ID NO: 1255283 - RNA, 19 nt, Artificial Sequence
  Description of Artificial Sequence: Synthetic oligonucleotide
  Antisense strand to SEQ ID NO: 1255282
uauguccuccagaggacuc

SEQ ID NO: 1255284 - RNA, 19 nt, Artificial Sequence
  Description of Artificial Sequence: Synthetic oligonucleotide
  Sense strand starting at position 3310 of SEQ ID NO: 1241213
gcaucuuauuuauucgcaa

SEQ ID NO: 1255285 - RNA, 19 nt, Artificial Sequence
  Description of Artificial Sequence: Synthetic oligonucleotide
  Antisense strand to SEQ ID NO: 1255284
uugcgaauaaauaagaugc

SEQ ID NO: 1255286 - RNA, 19 nt, Artificial Sequence
  Description of Artificial Sequence: Synthetic oligonucleotide
  Sense strand starting at position 3313 of SEQ ID NO: 1241213
ucuuauuuauucgcaacga

SEQ ID NO: 1255287 - RNA, 19 nt, Artificial Sequence
  Description of Artificial Sequence: Synthetic oligonucleotide
  Antisense strand to SEQ ID NO: 1255286
ucguugcgaauaaauaaga

SEQ ID NO: 1255288 - RNA, 19 nt, Artificial Sequence
  Description of Artificial Sequence: Synthetic oligonucleotide
  Sense strand starting at position 3317 of SEQ ID NO: 1241213
auuuauucgcaacgaccua

SEQ ID NO: 1255289 - RNA, 19 nt, Artificial Sequence
  Description of Artificial Sequence: Synthetic oligonucleotide
  Antisense strand to SEQ ID NO: 1255288
uaggucguugcgaauaaau

SEQ ID NO: 1255290 - RNA, 19 nt, Artificial Sequence
  Description of Artificial Sequence: Synthetic oligonucleotide
  Sense strand starting at position 3440 of SEQ ID NO: 1241213
ugcuuuauugcugucaugu

SEQ ID NO: 1255291 - RNA, 19 nt, Artificial Sequence
  Description of Artificial Sequence: Synthetic oligonucleotide
  Antisense strand to SEQ ID NO: 1255290
acaugacagcaauaaagca

SEQ ID NO: 1255292 - RNA, 19 nt, Artificial Sequence
  Description of Artificial Sequence: Synthetic oligonucleotide
  Sense strand starting at position 3441 of SEQ ID NO: 1241213
gcuuuauugcugucauguc

SEQ ID NO: 1255293 - RNA, 19 nt, Artificial Sequence
  Description of Artificial Sequence: Synthetic oligonucleotide
  Antisense strand to SEQ ID NO: 1255292
gacaugacagcaauaaagc

SEQ ID NO: 1255294 - RNA, 19 nt, Artificial Sequence
  Description of Artificial Sequence: Synthetic oligonucleotide
  Sense strand starting at position 3450 of SEQ ID NO: 1241213
cugucaugucagggaagaa

SEQ ID NO: 1255295 - RNA, 19 nt, Artificial Sequence
  Description of Artificial Sequence: Synthetic oligonucleotide
  Antisense strand to SEQ ID NO: 1255294
uucuucccugacaugacag

SEQ ID NO: 1255296 - RNA, 19 nt, Artificial Sequence
  Description of Artificial Sequence: Synthetic oligonucleotide
  Sense strand starting at position 3688 of SEQ ID NO: 1241213
aucagaguuuaccuuauuc

SEQ ID NO: 1255297 - RNA, 19 nt, Artificial Sequence
  Description of Artificial Sequence: Synthetic oligonucleotide
  Antisense strand to SEQ ID NO: 1255296
gaauaagguaaacucugau

SEQ ID NO: 1255298 - RNA, 19 nt, Artificial Sequence
  Description of Artificial Sequence: Synthetic oligonucleotide
  Sense strand starting at position 3693 of SEQ ID NO: 1241213
aguuuaccuuauucuuaga

SEQ ID NO: 1255299 - RNA, 19 nt, Artificial Sequence
  Description of Artificial Sequence: Synthetic oligonucleotide
  Antisense strand to SEQ ID NO: 1255298
ucuaagaauaagguaaacu

SEQ ID NO: 1255300 - RNA, 19 nt, Artificial Sequence
  Description of Artificial Sequence: Synthetic oligonucleotide
  Sense strand starting at position 3726 of SEQ ID NO: 1241213
ucccauuuguaugacauuu

SEQ ID NO: 1255301 - RNA, 19 nt, Artificial Sequence
  Description of Artificial Sequence: Synthetic oligonucleotide
  Antisense strand to SEQ ID NO: 1255300
aaaugucauacaaauggga

SEQ ID NO: 1255302 - RNA, 19 nt, Artificial Sequence
  Description of Artificial Sequence: Synthetic oligonucleotide
  Sense strand starting at position 3849 of SEQ ID NO: 1241213
acagaagugagugguuaaa

SEQ ID NO: 1255303 - RNA, 19 nt, Artificial Sequence
  Description of Artificial Sequence: Synthetic oligonucleotide
  Antisense strand to SEQ ID NO: 1255302
uuuaaccacucacuucugu

SEQ ID NO: 1255304 - RNA, 19 nt, Artificial Sequence
  Description of Artificial Sequence: Synthetic oligonucleotide
  Sense strand starting at position 3865 of SEQ ID NO: 1241213
aaaggucuugucuauggua

SEQ ID NO: 1255305 - RNA, 19 nt, Artificial Sequence
  Description of Artificial Sequence: Synthetic oligonucleotide
  Antisense strand to SEQ ID NO: 1255304
uaccauagacaagaccuuu

SEQ ID NO: 1255306 - RNA, 19 nt, Artificial Sequence
  Description of Artificial Sequence: Synthetic oligonucleotide
  Sense strand starting at position 3964 of SEQ ID NO: 1241213
gccacuuauggcuauaaag

SEQ ID NO: 1255307 - RNA, 19 nt, Artificial Sequence
  Description of Artificial Sequence: Synthetic oligonucleotide
  Antisense strand to SEQ ID NO: 1255306
cuuuauagccauaaguggc

SEQ ID NO: 1255308 - RNA, 19 nt, Artificial Sequence
  Description of Artificial Sequence: Synthetic oligonucleotide
  Sense strand starting at position 37 of SEQ ID NO: 1241214
gugacccuucuugaucaca

SEQ ID NO: 1255309 - RNA, 19 nt, Artificial Sequence
  Description of Artificial Sequence: Synthetic oligonucleotide
  Antisense strand to SEQ ID NO: 1255308
ugugaucaagaagggucac

SEQ ID NO: 1255310 - RNA, 19 nt, Artificial Sequence
  Description of Artificial Sequence: Synthetic oligonucleotide
  Sense strand starting at position 55 of SEQ ID NO: 1241214
acccuaaucccuuaggagu

SEQ ID NO: 1255311 - RNA, 19 nt, Artificial Sequence
  Description of Artificial Sequence: Synthetic oligonucleotide
  Antisense strand to SEQ ID NO: 1255310
acuccuaagggauuagggu

SEQ ID NO: 1255312 - RNA, 19 nt, Artificial Sequence
  Description of Artificial Sequence: Synthetic oligonucleotide
  Sense strand starting at position 84 of SEQ ID NO: 1241214
ucgacuuaacaguaauugu

SEQ ID NO: 1255313 - RNA, 19 nt, Artificial Sequence
  Description of Artificial Sequence: Synthetic oligonucleotide
  Antisense strand to SEQ ID NO: 1255312
acaauuacuguuaagucga

SEQ ID NO: 1255314 - RNA, 19 nt, Artificial Sequence
  Description of Artificial Sequence: Synthetic oligonucleotide
  Sense strand starting at position 127 of SEQ ID NO: 1241214
ccagguacauccuugaaua

SEQ ID NO: 1255315 - RNA, 19 nt, Artificial Sequence
  Description of Artificial Sequence: Synthetic oligonucleotide
  Antisense strand to SEQ ID NO: 1255314
uauucaaggauguaccugg

SEQ ID NO: 1255316 - RNA, 19 nt, Artificial Sequence
  Description of Artificial Sequence: Synthetic oligonucleotide
  Sense strand starting at position 279 of SEQ ID NO: 1241214
cacuauugacauugggagu

SEQ ID NO: 1255317 - RNA, 19 nt, Artificial Sequence
  Description of Artificial Sequence: Synthetic oligonucleotide
  Antisense strand to SEQ ID NO: 1255316
acucccaaugucaauagug

SEQ ID NO: 1255318 - RNA, 19 nt, Artificial Sequence
  Description of Artificial Sequence: Synthetic oligonucleotide
  Sense strand starting at position 285 of SEQ ID NO: 1241214
ugacauugggagugauacu

SEQ ID NO: 1255319 - RNA, 19 nt, Artificial Sequence
  Description of Artificial Sequence: Synthetic oligonucleotide
  Antisense strand to SEQ ID NO: 1255318
aguaucacucccaauguca

SEQ ID NO: 1255320 - RNA, 19 nt, Artificial Sequence
  Description of Artificial Sequence: Synthetic oligonucleotide
  Sense strand starting at position 517 of SEQ ID NO: 1241214
augaauguaucaguuacuu

SEQ ID NO: 1255321 - RNA, 19 nt, Artificial Sequence
  Description of Artificial Sequence: Synthetic oligonucleotide
  Antisense strand to SEQ ID NO: 1255320
aaguaacugauacauucau

SEQ ID NO: 1255322 - RNA, 19 nt, Artificial Sequence
  Description of Artificial Sequence: Synthetic oligonucleotide
  Sense strand starting at position 558 of SEQ ID NO: 1241214
ugcuguuaugaacacuuau

SEQ ID NO: 1255323 - RNA, 19 nt, Artificial Sequence
  Description of Artificial Sequence: Synthetic oligonucleotide
  Antisense strand to SEQ ID NO: 1255322
auaaguguucauaacagca

SEQ ID NO: 1255324 - RNA, 19 nt, Artificial Sequence
  Description of Artificial Sequence: Synthetic oligonucleotide
  Sense strand starting at position 620 of SEQ ID NO: 1241214
augggaaucacugggucau

SEQ ID NO: 1255325 - RNA, 19 nt, Artificial Sequence
  Description of Artificial Sequence: Synthetic oligonucleotide
  Antisense strand to SEQ ID NO: 1255324
augacccagugauucccau

SEQ ID NO: 1255326 - RNA, 19 nt, Artificial Sequence
  Description of Artificial Sequence: Synthetic oligonucleotide
  Sense strand starting at position 621 of SEQ ID NO: 1241214
ugggaaucacugggucaug

SEQ ID NO: 1255327 - RNA, 19 nt, Artificial Sequence
  Description of Artificial Sequence: Synthetic oligonucleotide
  Antisense strand to SEQ ID NO: 1255326
caugacccagugauuccca

SEQ ID NO: 1255328 - RNA, 19 nt, Artificial Sequence
  Description of Artificial Sequence: Synthetic oligonucleotide
  Sense strand starting at position 622 of SEQ ID NO: 1241214
gggaaucacugggucaugu

SEQ ID NO: 1255329 - RNA, 19 nt, Artificial Sequence
  Description of Artificial Sequence: Synthetic oligonucleotide
  Antisense strand to SEQ ID NO: 1255328
acaugacccagugauuccc

SEQ ID NO: 1255330 - RNA, 19 nt, Artificial Sequence
  Description of Artificial Sequence: Synthetic oligonucleotide
  Sense strand starting at position 630 of SEQ ID NO: 1241214
cugggucaugucuguauuu

SEQ ID NO: 1255331 - RNA, 19 nt, Artificial Sequence
  Description of Artificial Sequence: Synthetic oligonucleotide
  Antisense strand to SEQ ID NO: 1255330
aaauacagacaugacccag

SEQ ID NO: 1255332 - RNA, 19 nt, Artificial Sequence
  Description of Artificial Sequence: Synthetic oligonucleotide
  Sense strand starting at position 674 of SEQ ID NO: 1241214
guaguuguacuacaggaga

SEQ ID NO: 1255333 - RNA, 19 nt, Artificial Sequence
  Description of Artificial Sequence: Synthetic oligonucleotide
  Antisense strand to SEQ ID NO: 1255332
ucuccuguaguacaacuac

SEQ ID NO: 1255334 - RNA, 19 nt, Artificial Sequence
  Description of Artificial Sequence: Synthetic oligonucleotide
  Sense strand starting at position 676 of SEQ ID NO: 1241214
aguuguacuacaggagaau

SEQ ID NO: 1255335 - RNA, 19 nt, Artificial Sequence
  Description of Artificial Sequence: Synthetic oligonucleotide
  Antisense strand to SEQ ID NO: 1255334
auucuccuguaguacaacu

SEQ ID NO: 1255336 - RNA, 19 nt, Artificial Sequence
  Description of Artificial Sequence: Synthetic oligonucleotide
  Sense strand starting at position 1250 of SEQ ID NO: 1241214
ggaugccuugaaugaauga

SEQ ID NO: 1255337 - RNA, 19 nt, Artificial Sequence
  Description of Artificial Sequence: Synthetic oligonucleotide
  Antisense strand to SEQ ID NO: 1255336
ucauucauucaaggcaucc

SEQ ID NO: 1255338 - RNA, 19 nt, Artificial Sequence
  Description of Artificial Sequence: Synthetic oligonucleotide
  Sense strand starting at position 1472 of SEQ ID NO: 1241214
gcuagaauucgguaagaaa

SEQ ID NO: 1255339 - RNA, 19 nt, Artificial Sequence
  Description of Artificial Sequence: Synthetic oligonucleotide
  Antisense strand to SEQ ID NO: 1255338
uuucuuaccgaauucuagc

SEQ ID NO: 1255340 - RNA, 19 nt, Artificial Sequence
  Description of Artificial Sequence: Synthetic oligonucleotide
  Sense strand starting at position 1502 of SEQ ID NO: 1241214
ucaaaucgagcuugaggau

SEQ ID NO: 1255341 - RNA, 19 nt, Artificial Sequence
  Description of Artificial Sequence: Synthetic oligonucleotide
  Antisense strand to SEQ ID NO: 1255340
auccucaagcucgauuuga

SEQ ID NO: 1255342 - RNA, 19 nt, Artificial Sequence
  Description of Artificial Sequence: Synthetic oligonucleotide
  Sense strand starting at position 1763 of SEQ ID NO: 1241214
gccagccuuggauaugaga

SEQ ID NO: 1255343 - RNA, 19 nt, Artificial Sequence
  Description of Artificial Sequence: Synthetic oligonucleotide
  Antisense strand to SEQ ID NO: 1255342
ucucauauccaaggcuggc

SEQ ID NO: 1255344 - RNA, 19 nt, Artificial Sequence
  Description of Artificial Sequence: Synthetic oligonucleotide
  Sense strand starting at position 2138 of SEQ ID NO: 1241214
ggaucuugggcugagcgaa

SEQ ID NO: 1255345 - RNA, 19 nt, Artificial Sequence
  Description of Artificial Sequence: Synthetic oligonucleotide
  Antisense strand to SEQ ID NO: 1255344
uucgcucagcccaagaucc

SEQ ID NO: 1255346 - RNA, 19 nt, Artificial Sequence
  Description of Artificial Sequence: Synthetic oligonucleotide
  Sense strand starting at position 2165 of SEQ ID NO: 1241214
agacaccuuccugagcuua

SEQ ID NO: 1255347 - RNA, 19 nt, Artificial Sequence
  Description of Artificial Sequence: Synthetic oligonucleotide
  Antisense strand to SEQ ID NO: 1255346
uaagcucaggaaggugucu

SEQ ID NO: 1255348 - RNA, 19 nt, Artificial Sequence
  Description of Artificial Sequence: Synthetic oligonucleotide
  Sense strand starting at position 2176 of SEQ ID NO: 1241214
ugagcuuaggcugacaaga

SEQ ID NO: 1255349 - RNA, 19 nt, Artificial Sequence
  Description of Artificial Sequence: Synthetic oligonucleotide
  Antisense strand to SEQ ID NO: 1255348
ucuugucagccuaagcuca

SEQ ID NO: 1255350 - RNA, 19 nt, Artificial Sequence
  Description of Artificial Sequence: Synthetic oligonucleotide
  Sense strand starting at position 2224 of SEQ ID NO: 1241214
auuauuucucgcuaccgca

SEQ ID NO: 1255351 - RNA, 19 nt, Artificial Sequence
  Description of Artificial Sequence: Synthetic oligonucleotide
  Antisense strand to SEQ ID NO: 1255350
ugcgguagcgagaaauaau

SEQ ID NO: 1255352 - RNA, 19 nt, Artificial Sequence
  Description of Artificial Sequence: Synthetic oligonucleotide
  Sense strand starting at position 2284 of SEQ ID NO: 1241214
uucuuaaggcaaugagagu

SEQ ID NO: 1255353 - RNA, 19 nt, Artificial Sequence
  Description of Artificial Sequence: Synthetic oligonucleotide
  Antisense strand to SEQ ID NO: 1255352
acucucauugccuuaagaa

SEQ ID NO: 1255354 - RNA, 19 nt, Artificial Sequence
  Description of Artificial Sequence: Synthetic oligonucleotide
  Sense strand starting at position 2312 of SEQ ID NO: 1241214
accagaucucagcagguga

SEQ ID NO: 1255355 - RNA, 19 nt, Artificial Sequence
  Description of Artificial Sequence: Synthetic oligonucleotide
  Antisense strand to SEQ ID NO: 1255354
ucaccugcugagaucuggu

SEQ ID NO: 1255356 - RNA, 19 nt, Artificial Sequence
  Description of Artificial Sequence: Synthetic oligonucleotide
  Sense strand starting at position 2314 of SEQ ID NO: 1241214
cagaucucagcaggugaau

SEQ ID NO: 1255357 - RNA, 19 nt, Artificial Sequence
  Description of Artificial Sequence: Synthetic oligonucleotide
  Antisense strand to SEQ ID NO: 1255356
auucaccugcugagaucug

SEQ ID NO: 1255358 - RNA, 19 nt, Artificial Sequence
  Description of Artificial Sequence: Synthetic oligonucleotide
  Sense strand starting at position 2410 of SEQ ID NO: 1241214
guaauaauuggucauucca

SEQ ID NO: 1255359 - RNA, 19 nt, Artificial Sequence
  Description of Artificial Sequence: Synthetic oligonucleotide
  Antisense strand to SEQ ID NO: 1255358
uggaaugaccaauuauuac

SEQ ID NO: 1255360 - RNA, 19 nt, Artificial Sequence
  Description of Artificial Sequence: Synthetic oligonucleotide
  Sense strand starting at position 2425 of SEQ ID NO: 1241214
uccagaguccucuggagga

SEQ ID NO: 1255361 - RNA, 19 nt, Artificial Sequence
  Description of Artificial Sequence: Synthetic oligonucleotide
  Antisense strand to SEQ ID NO: 1255360
uccuccagaggacucugga

SEQ ID NO: 1255362 - RNA, 19 nt, Artificial Sequence
  Description of Artificial Sequence: Synthetic oligonucleotide
  Sense strand starting at position 2429 of SEQ ID NO: 1241214
gaguccucuggaggacaua

SEQ ID NO: 1255363 - RNA, 19 nt, Artificial Sequence
  Description of Artificial Sequence: Synthetic oligonucleotide
  Antisense strand to SEQ ID NO: 1255362
uauguccuccagaggacuc

SEQ ID NO: 1255364 - RNA, 19 nt, Artificial Sequence
  Description of Artificial Sequence: Synthetic oligonucleotide
  Sense strand starting at position 3310 of SEQ ID NO: 1241214
gcaucuuauuuauucgcaa

SEQ ID NO: 1255365 - RNA, 19 nt, Artificial Sequence
  Description of Artificial Sequence: Synthetic oligonucleotide
  Antisense strand to SEQ ID NO: 1255364
uugcgaauaaauaagaugc

SEQ ID NO: 1255366 - RNA, 19 nt, Artificial Sequence
  Description of Artificial Sequence: Synthetic oligonucleotide
  Sense strand starting at position 3313 of SEQ ID NO: 1241214
ucuuauuuauucgcaacga

SEQ ID NO: 1255367 - RNA, 19 nt, Artificial Sequence
  Description of Artificial Sequence: Synthetic oligonucleotide
  Antisense strand to SEQ ID NO: 1255366
ucguugcgaauaaauaaga

SEQ ID NO: 1255368 - RNA, 19 nt, Artificial Sequence
  Description of Artificial Sequence: Synthetic oligonucleotide
  Sense strand starting at position 3317 of SEQ ID NO: 1241214
auuuauucgcaacgaccua

SEQ ID NO: 1255369 - RNA, 19 nt, Artificial Sequence
  Description of Artificial Sequence: Synthetic oligonucleotide
  Antisense strand to SEQ ID NO: 1255368
uaggucguugcgaauaaau

SEQ ID NO: 1255370 - RNA, 19 nt, Artificial Sequence
  Description of Artificial Sequence: Synthetic oligonucleotide
  Sense strand starting at position 3440 of SEQ ID NO: 1241214
ugcuuuauugcugucaugu

SEQ ID NO: 1255371 - RNA, 19 nt, Artificial Sequence
  Description of Artificial Sequence: Synthetic oligonucleotide
  Antisense strand to SEQ ID NO: 1255370
acaugacagcaauaaagca

SEQ ID NO: 1255372 - RNA, 19 nt, Artificial Sequence
  Description of Artificial Sequence: Synthetic oligonucleotide
  Sense strand starting at position 3441 of SEQ ID NO: 1241214
gcuuuauugcugucauguc

SEQ ID NO: 1255373 - RNA, 19 nt, Artificial Sequence
  Description of Artificial Sequence: Synthetic oligonucleotide
  Antisense strand to SEQ ID NO: 1255372
gacaugacagcaauaaagc

SEQ ID NO: 1255374 - RNA, 19 nt, Artificial Sequence
  Description of Artificial Sequence: Synthetic oligonucleotide
  Sense strand starting at position 3450 of SEQ ID NO: 1241214
cugucaugucagggaagaa

SEQ ID NO: 1255375 - RNA, 19 nt, Artificial Sequence
  Description of Artificial Sequence: Synthetic oligonucleotide
  Antisense strand to SEQ ID NO: 1255374
uucuucccugacaugacag

SEQ ID NO: 1255376 - RNA, 19 nt, Artificial Sequence
  Description of Artificial Sequence: Synthetic oligonucleotide
  Sense strand starting at position 3688 of SEQ ID NO: 1241214
aucagaguuuaccuuauuc

SEQ ID NO: 1255377 - RNA, 19 nt, Artificial Sequence
  Description of Artificial Sequence: Synthetic oligonucleotide
  Antisense strand to SEQ ID NO: 1255376
gaauaagguaaacucugau

SEQ ID NO: 1255378 - RNA, 19 nt, Artificial Sequence
  Description of Artificial Sequence: Synthetic oligonucleotide
  Sense strand starting at position 3693 of SEQ ID NO: 1241214
aguuuaccuuauucuuaga

SEQ ID NO: 1255379 - RNA, 19 nt, Artificial Sequence
  Description of Artificial Sequence: Synthetic oligonucleotide
  Antisense strand to SEQ ID NO: 1255378
ucuaagaauaagguaaacu

SEQ ID NO: 1255380 - RNA, 19 nt, Artificial Sequence
  Description of Artificial Sequence: Synthetic oligonucleotide
  Sense strand starting at position 3726 of SEQ ID NO: 1241214
ucccauuuguaugacauuu

SEQ ID NO: 1255381 - RNA, 19 nt, Artificial Sequence
  Description of Artificial Sequence: Synthetic oligonucleotide
  Antisense strand to SEQ ID NO: 1255380
aaaugucauacaaauggga

SEQ ID NO: 1255382 - RNA, 19 nt, Artificial Sequence
  Description of Artificial Sequence: Synthetic oligonucleotide
  Sense strand starting at position 3849 of SEQ ID NO: 1241214
acagaagugagugguuaaa

SEQ ID NO: 1255383 - RNA, 19 nt, Artificial Sequence
  Description of Artificial Sequence: Synthetic oligonucleotide
  Antisense strand to SEQ ID NO: 1255382
uuuaaccacucacuucugu

SEQ ID NO: 1255384 - RNA, 19 nt, Artificial Sequence
  Description of Artificial Sequence: Synthetic oligonucleotide
  Sense strand starting at position 3865 of SEQ ID NO: 1241214
aaaggucuugucuauggua

SEQ ID NO: 1255385 - RNA, 19 nt, Artificial Sequence
  Description of Artificial Sequence: Synthetic oligonucleotide
  Antisense strand to SEQ ID NO: 1255384
uaccauagacaagaccuuu

SEQ ID NO: 1255386 - RNA, 19 nt, Artificial Sequence
  Description of Artificial Sequence: Synthetic oligonucleotide
  Sense strand starting at position 3964 of SEQ ID NO: 1241214
gccacuuauggcuauaaag

SEQ ID NO: 1255387 - RNA, 19 nt, Artificial Sequence
  Description of Artificial Sequence: Synthetic oligonucleotide
  Antisense strand to SEQ ID NO: 1255386
cuuuauagccauaaguggc

SEQ ID NO: 1255388 - RNA, 19 nt, Artificial Sequence
  Description of Artificial Sequence: Synthetic oligonucleotide
  Sense strand starting at position 28 of SEQ ID NO: 1241215
ucaaguucuggcuguuacu

SEQ ID NO: 1255389 - RNA, 19 nt, Artificial Sequence
  Description of Artificial Sequence: Synthetic oligonucleotide
  Antisense strand to SEQ ID NO: 1255388
aguaacagccagaacuuga

SEQ ID NO: 1255390 - RNA, 19 nt, Artificial Sequence
  Description of Artificial Sequence: Synthetic oligonucleotide
  Sense strand starting at position 148 of SEQ ID NO: 1241215
gagggcugcuucuuaguau

SEQ ID NO: 1255391 - RNA, 19 nt, Artificial Sequence
  Description of Artificial Sequence: Synthetic oligonucleotide
  Antisense strand to SEQ ID NO: 1255390
auacuaagaagcagcccuc

SEQ ID NO: 1255392 - RNA, 19 nt, Artificial Sequence
  Description of Artificial Sequence: Synthetic oligonucleotide
  Sense strand starting at position 159 of SEQ ID NO: 1241215
cuuaguaugucccuacuca

SEQ ID NO: 1255393 - RNA, 19 nt, Artificial Sequence
  Description of Artificial Sequence: Synthetic oligonucleotide
  Antisense strand to SEQ ID NO: 1255392
ugaguagggacauacuaag

SEQ ID NO: 1255394 - RNA, 19 nt, Artificial Sequence
  Description of Artificial Sequence: Synthetic oligonucleotide
  Sense strand starting at position 160 of SEQ ID NO: 1241215
uuaguaugucccuacucau

SEQ ID NO: 1255395 - RNA, 19 nt, Artificial Sequence
  Description of Artificial Sequence: Synthetic oligonucleotide
  Antisense strand to SEQ ID NO: 1255394
augaguagggacauacuaa

SEQ ID NO: 1255396 - RNA, 19 nt, Artificial Sequence
  Description of Artificial Sequence: Synthetic oligonucleotide
  Sense strand starting at position 181 of SEQ ID NO: 1241215
uuuccuuucuugucuugua

SEQ ID NO: 1255397 - RNA, 19 nt, Artificial Sequence
  Description of Artificial Sequence: Synthetic oligonucleotide
  Antisense strand to SEQ ID NO: 1255396
uacaagacaagaaaggaaa

SEQ ID NO: 1255398 - RNA, 19 nt, Artificial Sequence
  Description of Artificial Sequence: Synthetic oligonucleotide
  Sense strand starting at position 226 of SEQ ID NO: 1241215
ucuucaugguuguguguca

SEQ ID NO: 1255399 - RNA, 19 nt, Artificial Sequence
  Description of Artificial Sequence: Synthetic oligonucleotide
  Antisense strand to SEQ ID NO: 1255398
ugacacacaaccaugaaga

SEQ ID NO: 1255400 - RNA, 19 nt, Artificial Sequence
  Description of Artificial Sequence: Synthetic oligonucleotide
  Sense strand starting at position 231 of SEQ ID NO: 1241215
augguugugugucaugacu

SEQ ID NO: 1255401 - RNA, 19 nt, Artificial Sequence
  Description of Artificial Sequence: Synthetic oligonucleotide
  Antisense strand to SEQ ID NO: 1255400
agucaugacacacaaccau

SEQ ID NO: 1255402 - RNA, 19 nt, Artificial Sequence
  Description of Artificial Sequence: Synthetic oligonucleotide
  Sense strand starting at position 459 of SEQ ID NO: 1241215
gacugaguuguuuggguca

SEQ ID NO: 1255403 - RNA, 19 nt, Artificial Sequence
  Description of Artificial Sequence: Synthetic oligonucleotide
  Antisense strand to SEQ ID NO: 1255402
ugacccaaacaacucaguc

SEQ ID NO: 1255404 - RNA, 19 nt, Artificial Sequence
  Description of Artificial Sequence: Synthetic oligonucleotide
  Sense strand starting at position 584 of SEQ ID NO: 1241215
ucagcagaguccuccuauu

SEQ ID NO: 1255405 - RNA, 19 nt, Artificial Sequence
  Description of Artificial Sequence: Synthetic oligonucleotide
  Antisense strand to SEQ ID NO: 1255404
aauaggaggacucugcuga

SEQ ID NO: 1255406 - RNA, 19 nt, Artificial Sequence
  Description of Artificial Sequence: Synthetic oligonucleotide
  Sense strand starting at position 646 of SEQ ID NO: 1241215
gcuguuuccuggcaaggca

SEQ ID NO: 1255407 - RNA, 19 nt, Artificial Sequence
  Description of Artificial Sequence: Synthetic oligonucleotide
  Antisense strand to SEQ ID NO: 1255406
ugccuugccaggaaacagc

SEQ ID NO: 1255408 - RNA, 19 nt, Artificial Sequence
  Description of Artificial Sequence: Synthetic oligonucleotide
  Sense strand starting at position 744 of SEQ ID NO: 1241215
ggaugagccucaucuuguc

SEQ ID NO: 1255409 - RNA, 19 nt, Artificial Sequence
  Description of Artificial Sequence: Synthetic oligonucleotide
  Antisense strand to SEQ ID NO: 1255408
gacaagaugaggcucaucc

SEQ ID NO: 1255410 - RNA, 19 nt, Artificial Sequence
  Description of Artificial Sequence: Synthetic oligonucleotide
  Sense strand starting at position 776 of SEQ ID NO: 1241215
gucuuacccucugcaaaug

SEQ ID NO: 1255411 - RNA, 19 nt, Artificial Sequence
  Description of Artificial Sequence: Synthetic oligonucleotide
  Antisense strand to SEQ ID NO: 1255410
cauuugcagaggguaagac

SEQ ID NO: 1255412 - RNA, 19 nt, Artificial Sequence
  Description of Artificial Sequence: Synthetic oligonucleotide
  Sense strand starting at position 1012 of SEQ ID NO: 1241215
gggugaugacuuuaugccu

SEQ ID NO: 1255413 - RNA, 19 nt, Artificial Sequence
  Description of Artificial Sequence: Synthetic oligonucleotide
  Antisense strand to SEQ ID NO: 1255412
aggcauaaagucaucaccc

SEQ ID NO: 1255414 - RNA, 19 nt, Artificial Sequence
  Description of Artificial Sequence: Synthetic oligonucleotide
  Sense strand starting at position 1017 of SEQ ID NO: 1241215
augacuuuaugccuguuua

SEQ ID NO: 1255415 - RNA, 19 nt, Artificial Sequence
  Description of Artificial Sequence: Synthetic oligonucleotide
  Antisense strand to SEQ ID NO: 1255414
uaaacaggcauaaagucau

SEQ ID NO: 1255416 - RNA, 19 nt, Artificial Sequence
  Description of Artificial Sequence: Synthetic oligonucleotide
  Sense strand starting at position 1018 of SEQ ID NO: 1241215
ugacuuuaugccuguuuac

SEQ ID NO: 1255417 - RNA, 19 nt, Artificial Sequence
  Description of Artificial Sequence: Synthetic oligonucleotide
  Antisense strand to SEQ ID NO: 1255416
guaaacaggcauaaaguca

SEQ ID NO: 1255418 - RNA, 19 nt, Artificial Sequence
  Description of Artificial Sequence: Synthetic oligonucleotide
  Sense strand starting at position 1104 of SEQ ID NO: 1241215
ccaagaaggaguuguguuu

SEQ ID NO: 1255419 - RNA, 19 nt, Artificial Sequence
  Description of Artificial Sequence: Synthetic oligonucleotide
  Antisense strand to SEQ ID NO: 1255418
aaacacaacuccuucuugg

SEQ ID NO: 1255420 - RNA, 19 nt, Artificial Sequence
  Description of Artificial Sequence: Synthetic oligonucleotide
  Sense strand starting at position 1110 of SEQ ID NO: 1241215
aggaguuguguuugaggug

SEQ ID NO: 1255421 - RNA, 19 nt, Artificial Sequence
  Description of Artificial Sequence: Synthetic oligonucleotide
  Antisense strand to SEQ ID NO: 1255420
caccucaaacacaacuccu

SEQ ID NO: 1255422 - RNA, 19 nt, Artificial Sequence
  Description of Artificial Sequence: Synthetic oligonucleotide
  Sense strand starting at position 1130 of SEQ ID NO: 1241215
ggucuggguccucguggaa

SEQ ID NO: 1255423 - RNA, 19 nt, Artificial Sequence
  Description of Artificial Sequence: Synthetic oligonucleotide
  Antisense strand to SEQ ID NO: 1255422
uuccacgaggacccagacc

SEQ ID NO: 1255424 - RNA, 19 nt, Artificial Sequence
  Description of Artificial Sequence: Synthetic oligonucleotide
  Sense strand starting at position 2671 of SEQ ID NO: 1241215
ugaugacuuaagugugcuu

SEQ ID NO: 1255425 - RNA, 19 nt, Artificial Sequence
  Description of Artificial Sequence: Synthetic oligonucleotide
  Antisense strand to SEQ ID NO: 1255424
aagcacacuuaagucauca

SEQ ID NO: 1255426 - RNA, 19 nt, Artificial Sequence
  Description of Artificial Sequence: Synthetic oligonucleotide
  Sense strand starting at position 2695 of SEQ ID NO: 1241215
ggugguucuucaugccuga

SEQ ID NO: 1255427 - RNA, 19 nt, Artificial Sequence
  Description of Artificial Sequence: Synthetic oligonucleotide
  Antisense strand to SEQ ID NO: 1255426
ucaggcaugaagaaccacc

SEQ ID NO: 1255428 - RNA, 19 nt, Artificial Sequence
  Description of Artificial Sequence: Synthetic oligonucleotide
  Sense strand starting at position 2706 of SEQ ID NO: 1241215
augccugaguuguacugaa

SEQ ID NO: 1255429 - RNA, 19 nt, Artificial Sequence
  Description of Artificial Sequence: Synthetic oligonucleotide
  Antisense strand to SEQ ID NO: 1255428
uucaguacaacucaggcau

SEQ ID NO: 1255430 - RNA, 19 nt, Artificial Sequence
  Description of Artificial Sequence: Synthetic oligonucleotide
  Sense strand starting at position 2710 of SEQ ID NO: 1241215
cugaguuguacugaagcca

SEQ ID NO: 1255431 - RNA, 19 nt, Artificial Sequence
  Description of Artificial Sequence: Synthetic oligonucleotide
  Antisense strand to SEQ ID NO: 1255430
uggcuucaguacaacucag

SEQ ID NO: 1255432 - RNA, 19 nt, Artificial Sequence
  Description of Artificial Sequence: Synthetic oligonucleotide
  Sense strand starting at position 2903 of SEQ ID NO: 1241215
ggauccauucucugaggcu

SEQ ID NO: 1255433 - RNA, 19 nt, Artificial Sequence
  Description of Artificial Sequence: Synthetic oligonucleotide
  Antisense strand to SEQ ID NO: 1255432
agccucagagaauggaucc

SEQ ID NO: 1255434 - RNA, 19 nt, Artificial Sequence
  Description of Artificial Sequence: Synthetic oligonucleotide
  Sense strand starting at position 2904 of SEQ ID NO: 1241215
gauccauucucugaggcuu

SEQ ID NO: 1255435 - RNA, 19 nt, Artificial Sequence
  Description of Artificial Sequence: Synthetic oligonucleotide
  Antisense strand to SEQ ID NO: 1255434
aagccucagagaauggauc

SEQ ID NO: 1255436 - RNA, 19 nt, Artificial Sequence
  Description of Artificial Sequence: Synthetic oligonucleotide
  Sense strand starting at position 2906 of SEQ ID NO: 1241215
uccauucucugaggcuuau

SEQ ID NO: 1255437 - RNA, 19 nt, Artificial Sequence
  Description of Artificial Sequence: Synthetic oligonucleotide
  Antisense strand to SEQ ID NO: 1255436
auaagccucagagaaugga

SEQ ID NO: 1255438 - RNA, 19 nt, Artificial Sequence
  Description of Artificial Sequence: Synthetic oligonucleotide
  Sense strand starting at position 3010 of SEQ ID NO: 1241215
ugguccagugaguaugaga

SEQ ID NO: 1255439 - RNA, 19 nt, Artificial Sequence
  Description of Artificial Sequence: Synthetic oligonucleotide
  Antisense strand to SEQ ID NO: 1255438
ucucauacucacuggacca

SEQ ID NO: 1255440 - RNA, 19 nt, Artificial Sequence
  Description of Artificial Sequence: Synthetic oligonucleotide
  Sense strand starting at position 3148 of SEQ ID NO: 1241215
gcacucagucagggaaguu

SEQ ID NO: 1255441 - RNA, 19 nt, Artificial Sequence
  Description of Artificial Sequence: Synthetic oligonucleotide
  Antisense strand to SEQ ID NO: 1255440
aacuucccugacugagugc

SEQ ID NO: 1255442 - RNA, 19 nt, Artificial Sequence
  Description of Artificial Sequence: Synthetic oligonucleotide
  Sense strand starting at position 3230 of SEQ ID NO: 1241215
agagaagugccacauauuc

SEQ ID NO: 1255443 - RNA, 19 nt, Artificial Sequence
  Description of Artificial Sequence: Synthetic oligonucleotide
  Antisense strand to SEQ ID NO: 1255442
gaauauguggcacuucucu

SEQ ID NO: 1255444 - RNA, 19 nt, Artificial Sequence
  Description of Artificial Sequence: Synthetic oligonucleotide
  Sense strand starting at position 3278 of SEQ ID NO: 1241215
cuaagaugcugcuagcuau

SEQ ID NO: 1255445 - RNA, 19 nt, Artificial Sequence
  Description of Artificial Sequence: Synthetic oligonucleotide
  Antisense strand to SEQ ID NO: 1255444
auagcuagcagcaucuuag

SEQ ID NO: 1255446 - RNA, 19 nt, Artificial Sequence
  Description of Artificial Sequence: Synthetic oligonucleotide
  Sense strand starting at position 3335 of SEQ ID NO: 1241215
uuggaauccuuaucuaggu

SEQ ID NO: 1255447 - RNA, 19 nt, Artificial Sequence
  Description of Artificial Sequence: Synthetic oligonucleotide
  Antisense strand to SEQ ID NO: 1255446
accuagauaaggauuccaa

SEQ ID NO: 1255448 - RNA, 19 nt, Artificial Sequence
  Description of Artificial Sequence: Synthetic oligonucleotide
  Sense strand starting at position 3391 of SEQ ID NO: 1241215
ggauguagaaugggauucu

SEQ ID NO: 1255449 - RNA, 19 nt, Artificial Sequence
  Description of Artificial Sequence: Synthetic oligonucleotide
  Antisense strand to SEQ ID NO: 1255448
agaaucccauucuacaucc

SEQ ID NO: 1255450 - RNA, 19 nt, Artificial Sequence
  Description of Artificial Sequence: Synthetic oligonucleotide
  Sense strand starting at position 3392 of SEQ ID NO: 1241215
gauguagaaugggauucuu

SEQ ID NO: 1255451 - RNA, 19 nt, Artificial Sequence
  Description of Artificial Sequence: Synthetic oligonucleotide
  Antisense strand to SEQ ID NO: 1255450
aagaaucccauucuacauc

SEQ ID NO: 1255452 - RNA, 19 nt, Artificial Sequence
  Description of Artificial Sequence: Synthetic oligonucleotide
  Sense strand starting at position 3429 of SEQ ID NO: 1241215
guacacaucuguggucacu

SEQ ID NO: 1255453 - RNA, 19 nt, Artificial Sequence
  Description of Artificial Sequence: Synthetic oligonucleotide
  Antisense strand to SEQ ID NO: 1255452
agugaccacagauguguac

SEQ ID NO: 1255454 - RNA, 19 nt, Artificial Sequence
  Description of Artificial Sequence: Synthetic oligonucleotide
  Sense strand starting at position 3431 of SEQ ID NO: 1241215
acacaucuguggucacuaa

SEQ ID NO: 1255455 - RNA, 19 nt, Artificial Sequence
  Description of Artificial Sequence: Synthetic oligonucleotide
  Antisense strand to SEQ ID NO: 1255454
uuagugaccacagaugugu

SEQ ID NO: 1255456 - RNA, 19 nt, Artificial Sequence
  Description of Artificial Sequence: Synthetic oligonucleotide
  Sense strand starting at position 3474 of SEQ ID NO: 1241215
cuggaacuuucccaguuua

SEQ ID NO: 1255457 - RNA, 19 nt, Artificial Sequence
  Description of Artificial Sequence: Synthetic oligonucleotide
  Antisense strand to SEQ ID NO: 1255456
uaaacugggaaaguuccag

SEQ ID NO: 1255458 - RNA, 19 nt, Artificial Sequence
  Description of Artificial Sequence: Synthetic oligonucleotide
  Sense strand starting at position 3530 of SEQ ID NO: 1241215
ccaacaaacugagaugguu

SEQ ID NO: 1255459 - RNA, 19 nt, Artificial Sequence
  Description of Artificial Sequence: Synthetic oligonucleotide
  Antisense strand to SEQ ID NO: 1255458
aaccaucucaguuuguugg

SEQ ID NO: 1255460 - RNA, 19 nt, Artificial Sequence
  Description of Artificial Sequence: Synthetic oligonucleotide
  Sense strand starting at position 3611 of SEQ ID NO: 1241215
cccugcuucccagacagaa

SEQ ID NO: 1255461 - RNA, 19 nt, Artificial Sequence
  Description of Artificial Sequence: Synthetic oligonucleotide
  Antisense strand to SEQ ID NO: 1255460
uucugucugggaagcaggg

SEQ ID NO: 1255462 - RNA, 19 nt, Artificial Sequence
  Description of Artificial Sequence: Synthetic oligonucleotide
  Sense strand starting at position 3716 of SEQ ID NO: 1241215
cagggaguaugcuuagagu

SEQ ID NO: 1255463 - RNA, 19 nt, Artificial Sequence
  Description of Artificial Sequence: Synthetic oligonucleotide
  Antisense strand to SEQ ID NO: 1255462
acucuaagcauacucccug

SEQ ID NO: 1255464 - RNA, 19 nt, Artificial Sequence
  Description of Artificial Sequence: Synthetic oligonucleotide
  Sense strand starting at position 147 of SEQ ID NO: 1241216
ucagaucaugauuaagugu

SEQ ID NO: 1255465 - RNA, 19 nt, Artificial Sequence
  Description of Artificial Sequence: Synthetic oligonucleotide
  Antisense strand to SEQ ID NO: 1255464
acacuuaaucaugaucuga

SEQ ID NO: 1255466 - RNA, 19 nt, Artificial Sequence
  Description of Artificial Sequence: Synthetic oligonucleotide
  Sense strand starting at position 183 of SEQ ID NO: 1241216
gggucuuguguuaguguga

SEQ ID NO: 1255467 - RNA, 19 nt, Artificial Sequence
  Description of Artificial Sequence: Synthetic oligonucleotide
  Antisense strand to SEQ ID NO: 1255466
ucacacuaacacaagaccc

SEQ ID NO: 1255468 - RNA, 19 nt, Artificial Sequence
  Description of Artificial Sequence: Synthetic oligonucleotide
  Sense strand starting at position 216 of SEQ ID NO: 1241216
gucguuuaggcugagauuu

SEQ ID NO: 1255469 - RNA, 19 nt, Artificial Sequence
  Description of Artificial Sequence: Synthetic oligonucleotide
  Antisense strand to SEQ ID NO: 1255468
aaaucucagccuaaacgac

SEQ ID NO: 1255470 - RNA, 19 nt, Artificial Sequence
  Description of Artificial Sequence: Synthetic oligonucleotide
  Sense strand starting at position 256 of SEQ ID NO: 1241216
aggguaggucaguaguaug

SEQ ID NO: 1255471 - RNA, 19 nt, Artificial Sequence
  Description of Artificial Sequence: Synthetic oligonucleotide
  Antisense strand to SEQ ID NO: 1255470
cauacuacugaccuacccu

SEQ ID NO: 1255472 - RNA, 19 nt, Artificial Sequence
  Description of Artificial Sequence: Synthetic oligonucleotide
  Sense strand starting at position 292 of SEQ ID NO: 1241216
ugagguuggugaguucaaa

SEQ ID NO: 1255473 - RNA, 19 nt, Artificial Sequence
  Description of Artificial Sequence: Synthetic oligonucleotide
  Antisense strand to SEQ ID NO: 1255472
uuugaacucaccaaccuca

SEQ ID NO: 1255474 - RNA, 19 nt, Artificial Sequence
  Description of Artificial Sequence: Synthetic oligonucleotide
  Sense strand starting at position 350 of SEQ ID NO: 1241216
accagugugcuggaaugaa

SEQ ID NO: 1255475 - RNA, 19 nt, Artificial Sequence
  Description of Artificial Sequence: Synthetic oligonucleotide
  Antisense strand to SEQ ID NO: 1255474
uucauuccagcacacuggu

SEQ ID NO: 1255476 - RNA, 19 nt, Artificial Sequence
  Description of Artificial Sequence: Synthetic oligonucleotide
  Sense strand starting at position 391 of SEQ ID NO: 1241216
gugaguaggugaucagaca

SEQ ID NO: 1255477 - RNA, 19 nt, Artificial Sequence
  Description of Artificial Sequence: Synthetic oligonucleotide
  Antisense strand to SEQ ID NO: 1255476
ugucugaucaccuacucac

SEQ ID NO: 1255478 - RNA, 19 nt, Artificial Sequence
  Description of Artificial Sequence: Synthetic oligonucleotide
  Sense strand starting at position 880 of SEQ ID NO: 1241216
agcaaugagcucuggauag

SEQ ID NO: 1255479 - RNA, 19 nt, Artificial Sequence
  Description of Artificial Sequence: Synthetic oligonucleotide
  Antisense strand to SEQ ID NO: 1255478
cuauccagagcucauugcu

SEQ ID NO: 1255480 - RNA, 19 nt, Artificial Sequence
  Description of Artificial Sequence: Synthetic oligonucleotide
  Sense strand starting at position 892 of SEQ ID NO: 1241216
uggauagggcagugaaauu

SEQ ID NO: 1255481 - RNA, 19 nt, Artificial Sequence
  Description of Artificial Sequence: Synthetic oligonucleotide
  Antisense strand to SEQ ID NO: 1255480
aauuucacugcccuaucca

SEQ ID NO: 1255482 - RNA, 19 nt, Artificial Sequence
  Description of Artificial Sequence: Synthetic oligonucleotide
  Sense strand starting at position 903 of SEQ ID NO: 1241216
gugaaauuaucugauuuag

SEQ ID NO: 1255483 - RNA, 19 nt, Artificial Sequence
  Description of Artificial Sequence: Synthetic oligonucleotide
  Antisense strand to SEQ ID NO: 1255482
cuaaaucagauaauuucac

SEQ ID NO: 1255484 - RNA, 19 nt, Artificial Sequence
  Description of Artificial Sequence: Synthetic oligonucleotide
  Sense strand starting at position 929 of SEQ ID NO: 1241216
gaaagucauuuccacagag

SEQ ID NO: 1255485 - RNA, 19 nt, Artificial Sequence
  Description of Artificial Sequence: Synthetic oligonucleotide
  Antisense strand to SEQ ID NO: 1255484
cucuguggaaaugacuuuc

SEQ ID NO: 1255486 - RNA, 19 nt, Artificial Sequence
  Description of Artificial Sequence: Synthetic oligonucleotide
  Sense strand starting at position 990 of SEQ ID NO: 1241216
agauaugugguacacccua

SEQ ID NO: 1255487 - RNA, 19 nt, Artificial Sequence
  Description of Artificial Sequence: Synthetic oligonucleotide
  Antisense strand to SEQ ID NO: 1255486
uaggguguaccacauaucu

SEQ ID NO: 1255488 - RNA, 19 nt, Artificial Sequence
  Description of Artificial Sequence: Synthetic oligonucleotide
  Sense strand starting at position 995 of SEQ ID NO: 1241216
ugugguacacccuauaauu

SEQ ID NO: 1255489 - RNA, 19 nt, Artificial Sequence
  Description of Artificial Sequence: Synthetic oligonucleotide
  Antisense strand to SEQ ID NO: 1255488
aauuauaggguguaccaca

SEQ ID NO: 1255490 - RNA, 19 nt, Artificial Sequence
  Description of Artificial Sequence: Synthetic oligonucleotide
  Sense strand starting at position 1038 of SEQ ID NO: 1241216
gaguguauuugcuuguuua

SEQ ID NO: 1255491 - RNA, 19 nt, Artificial Sequence
  Description of Artificial Sequence: Synthetic oligonucleotide
  Antisense strand to SEQ ID NO: 1255490
uaaacaagcaaauacacuc

SEQ ID NO: 1255492 - RNA, 19 nt, Artificial Sequence
  Description of Artificial Sequence: Synthetic oligonucleotide
  Sense strand starting at position 1039 of SEQ ID NO: 1241216
aguguauuugcuuguuuaa

SEQ ID NO: 1255493 - RNA, 19 nt, Artificial Sequence
  Description of Artificial Sequence: Synthetic oligonucleotide
  Antisense strand to SEQ ID NO: 1255492
uuaaacaagcaaauacacu

SEQ ID NO: 1255494 - RNA, 19 nt, Artificial Sequence
  Description of Artificial Sequence: Synthetic oligonucleotide
  Sense strand starting at position 1041 of SEQ ID NO: 1241216
uguauuugcuuguuuaaug

SEQ ID NO: 1255495 - RNA, 19 nt, Artificial Sequence
  Description of Artificial Sequence: Synthetic oligonucleotide
  Antisense strand to SEQ ID NO: 1255494
cauuaaacaagcaaauaca

SEQ ID NO: 1255496 - RNA, 19 nt, Artificial Sequence
  Description of Artificial Sequence: Synthetic oligonucleotide
  Sense strand starting at position 1134 of SEQ ID NO: 1241216
auaggaggcuuugcauaaa

SEQ ID NO: 1255497 - RNA, 19 nt, Artificial Sequence
  Description of Artificial Sequence: Synthetic oligonucleotide
  Antisense strand to SEQ ID NO: 1255496
uuuaugcaaagccuccuau

SEQ ID NO: 1255498 - RNA, 19 nt, Artificial Sequence
  Description of Artificial Sequence: Synthetic oligonucleotide
  Sense strand starting at position 1180 of SEQ ID NO: 1241216
ccaccuguucuauaauugu

SEQ ID NO: 1255499 - RNA, 19 nt, Artificial Sequence
  Description of Artificial Sequence: Synthetic oligonucleotide
  Antisense strand to SEQ ID NO: 1255498
acaauuauagaacaggugg

SEQ ID NO: 1255500 - RNA, 19 nt, Artificial Sequence
  Description of Artificial Sequence: Synthetic oligonucleotide
  Sense strand starting at position 1186 of SEQ ID NO: 1241216
guucuauaauugucuaagg

SEQ ID NO: 1255501 - RNA, 19 nt, Artificial Sequence
  Description of Artificial Sequence: Synthetic oligonucleotide
  Antisense strand to SEQ ID NO: 1255500
ccuuagacaauuauagaac

SEQ ID NO: 1255502 - RNA, 19 nt, Artificial Sequence
  Description of Artificial Sequence: Synthetic oligonucleotide
  Sense strand starting at position 1188 of SEQ ID NO: 1241216
ucuauaauugucuaagggu

SEQ ID NO: 1255503 - RNA, 19 nt, Artificial Sequence
  Description of Artificial Sequence: Synthetic oligonucleotide
  Antisense strand to SEQ ID NO: 1255502
acccuuagacaauuauaga

SEQ ID NO: 1255504 - RNA, 19 nt, Artificial Sequence
  Description of Artificial Sequence: Synthetic oligonucleotide
  Sense strand starting at position 1251 of SEQ ID NO: 1241216
cauggucagccugacucau

SEQ ID NO: 1255505 - RNA, 19 nt, Artificial Sequence
  Description of Artificial Sequence: Synthetic oligonucleotide
  Antisense strand to SEQ ID NO: 1255504
augagucaggcugaccaug

SEQ ID NO: 1255506 - RNA, 19 nt, Artificial Sequence
  Description of Artificial Sequence: Synthetic oligonucleotide
  Sense strand starting at position 1275 of SEQ ID NO: 1241216
gcacauauuuaggaaccaa

SEQ ID NO: 1255507 - RNA, 19 nt, Artificial Sequence
  Description of Artificial Sequence: Synthetic oligonucleotide
  Antisense strand to SEQ ID NO: 1255506
uugguuccuaaauaugugc

SEQ ID NO: 1255508 - RNA, 19 nt, Artificial Sequence
  Description of Artificial Sequence: Synthetic oligonucleotide
  Sense strand starting at position 1492 of SEQ ID NO: 1241216
uggagcaguacucagcaaa

SEQ ID NO: 1255509 - RNA, 19 nt, Artificial Sequence
  Description of Artificial Sequence: Synthetic oligonucleotide
  Antisense strand to SEQ ID NO: 1255508
uuugcugaguacugcucca

SEQ ID NO: 1255510 - RNA, 19 nt, Artificial Sequence
  Description of Artificial Sequence: Synthetic oligonucleotide
  Sense strand starting at position 1536 of SEQ ID NO: 1241216
ucauuacaagcagaauguu

SEQ ID NO: 1255511 - RNA, 19 nt, Artificial Sequence
  Description of Artificial Sequence: Synthetic oligonucleotide
  Antisense strand to SEQ ID NO: 1255510
aacauucugcuuguaauga

SEQ ID NO: 1255512 - RNA, 19 nt, Artificial Sequence
  Description of Artificial Sequence: Synthetic oligonucleotide
  Sense strand starting at position 1542 of SEQ ID NO: 1241216
caagcagaauguucugacu

SEQ ID NO: 1255513 - RNA, 19 nt, Artificial Sequence
  Description of Artificial Sequence: Synthetic oligonucleotide
  Antisense strand to SEQ ID NO: 1255512
agucagaacauucugcuug

SEQ ID NO: 1255514 - RNA, 19 nt, Artificial Sequence
  Description of Artificial Sequence: Synthetic oligonucleotide
  Sense strand starting at position 1577 of SEQ ID NO: 1241216
ggaguuucuggacgagaug

SEQ ID NO: 1255515 - RNA, 19 nt, Artificial Sequence
  Description of Artificial Sequence: Synthetic oligonucleotide
  Antisense strand to SEQ ID NO: 1255514
caucucguccagaaacucc

SEQ ID NO: 1255516 - RNA, 19 nt, Artificial Sequence
  Description of Artificial Sequence: Synthetic oligonucleotide
  Sense strand starting at position 1604 of SEQ ID NO: 1241216
aggcuugguacccagugaa

SEQ ID NO: 1255517 - RNA, 19 nt, Artificial Sequence
  Description of Artificial Sequence: Synthetic oligonucleotide
  Antisense strand to SEQ ID NO: 1255516
uucacuggguaccaagccu

SEQ ID NO: 1255518 - RNA, 19 nt, Artificial Sequence
  Description of Artificial Sequence: Synthetic oligonucleotide
  Sense strand starting at position 1619 of SEQ ID NO: 1241216
ugaacucuguuaguacuaa

SEQ ID NO: 1255519 - RNA, 19 nt, Artificial Sequence
  Description of Artificial Sequence: Synthetic oligonucleotide
  Antisense strand to SEQ ID NO: 1255518
uuaguacuaacagaguuca

SEQ ID NO: 1255520 - RNA, 19 nt, Artificial Sequence
  Description of Artificial Sequence: Synthetic oligonucleotide
  Sense strand starting at position 1678 of SEQ ID NO: 1241216
ugacacucauuugcguaua

SEQ ID NO: 1255521 - RNA, 19 nt, Artificial Sequence
  Description of Artificial Sequence: Synthetic oligonucleotide
  Antisense strand to SEQ ID NO: 1255520
uauacgcaaaugaguguca

SEQ ID NO: 1255522 - RNA, 19 nt, Artificial Sequence
  Description of Artificial Sequence: Synthetic oligonucleotide
  Sense strand starting at position 2662 of SEQ ID NO: 1241216
guucgaugaguggauaagu

SEQ ID NO: 1255523 - RNA, 19 nt, Artificial Sequence
  Description of Artificial Sequence: Synthetic oligonucleotide
  Antisense strand to SEQ ID NO: 1255522
acuuauccacucaucgaac

SEQ ID NO: 1255524 - RNA, 19 nt, Artificial Sequence
  Description of Artificial Sequence: Synthetic oligonucleotide
  Sense strand starting at position 2679 of SEQ ID NO: 1241216
gugaaugacuccuuuccca

SEQ ID NO: 1255525 - RNA, 19 nt, Artificial Sequence
  Description of Artificial Sequence: Synthetic oligonucleotide
  Antisense strand to SEQ ID NO: 1255524
ugggaaaggagucauucac

SEQ ID NO: 1255526 - RNA, 19 nt, Artificial Sequence
  Description of Artificial Sequence: Synthetic oligonucleotide
  Sense strand starting at position 2857 of SEQ ID NO: 1241216
agaugagaauaguuucuac

SEQ ID NO: 1255527 - RNA, 19 nt, Artificial Sequence
  Description of Artificial Sequence: Synthetic oligonucleotide
  Antisense strand to SEQ ID NO: 1255526
guagaaacuauucucaucu

SEQ ID NO: 1255528 - RNA, 19 nt, Artificial Sequence
  Description of Artificial Sequence: Synthetic oligonucleotide
  Sense strand starting at position 2860 of SEQ ID NO: 1241216
ugagaauaguuucuaccuc

SEQ ID NO: 1255529 - RNA, 19 nt, Artificial Sequence
  Description of Artificial Sequence: Synthetic oligonucleotide
  Antisense strand to SEQ ID NO: 1255528
gagguagaaacuauucuca

SEQ ID NO: 1255530 - RNA, 19 nt, Artificial Sequence
  Description of Artificial Sequence: Synthetic oligonucleotide
  Sense strand starting at position 2893 of SEQ ID NO: 1241216
gauuaaaugggucagugca

SEQ ID NO: 1255531 - RNA, 19 nt, Artificial Sequence
  Description of Artificial Sequence: Synthetic oligonucleotide
  Antisense strand to SEQ ID NO: 1255530
ugcacugacccauuuaauc

SEQ ID NO: 1255532 - RNA, 19 nt, Artificial Sequence
  Description of Artificial Sequence: Synthetic oligonucleotide
  Sense strand starting at position 3231 of SEQ ID NO: 1241216
aggucuuguagacagaguu

SEQ ID NO: 1255533 - RNA, 19 nt, Artificial Sequence
  Description of Artificial Sequence: Synthetic oligonucleotide
  Antisense strand to SEQ ID NO: 1255532
aacucugucuacaagaccu

SEQ ID NO: 1255534 - RNA, 19 nt, Artificial Sequence
  Description of Artificial Sequence: Synthetic oligonucleotide
  Sense strand starting at position 3667 of SEQ ID NO: 1241216
ggauaacccucuucugaag

SEQ ID NO: 1255535 - RNA, 19 nt, Artificial Sequence
  Description of Artificial Sequence: Synthetic oligonucleotide
  Antisense strand to SEQ ID NO: 1255534
cuucagaagaggguuaucc

SEQ ID NO: 1255536 - RNA, 19 nt, Artificial Sequence
  Description of Artificial Sequence: Synthetic oligonucleotide
  Sense strand starting at position 3673 of SEQ ID NO: 1241216
cccucuucugaaggaguga

SEQ ID NO: 1255537 - RNA, 19 nt, Artificial Sequence
  Description of Artificial Sequence: Synthetic oligonucleotide
  Antisense strand to SEQ ID NO: 1255536
ucacuccuucagaagaggg

SEQ ID NO: 1255538 - RNA, 19 nt, Artificial Sequence
  Description of Artificial Sequence: Synthetic oligonucleotide
  Sense strand starting at position 3711 of SEQ ID NO: 1241216
aggcaucagcuauauuaua

SEQ ID NO: 1255539 - RNA, 19 nt, Artificial Sequence
  Description of Artificial Sequence: Synthetic oligonucleotide
  Antisense strand to SEQ ID NO: 1255538
uauaauauagcugaugccu

SEQ ID NO: 1255540 - RNA, 19 nt, Artificial Sequence
  Description of Artificial Sequence: Synthetic oligonucleotide
  Sense strand starting at position 3909 of SEQ ID NO: 1241216
gaggcaguugauugaacuu

SEQ ID NO: 1255541 - RNA, 19 nt, Artificial Sequence
  Description of Artificial Sequence: Synthetic oligonucleotide
  Antisense strand to SEQ ID NO: 1255540
aaguucaaucaacugccuc

SEQ ID NO: 1255542 - RNA, 19 nt, Artificial Sequence
  Description of Artificial Sequence: Synthetic oligonucleotide
  Sense strand starting at position 3915 of SEQ ID NO: 1241216
guugauugaacuugggaag

SEQ ID NO: 1255543 - RNA, 19 nt, Artificial Sequence
  Description of Artificial Sequence: Synthetic oligonucleotide
  Antisense strand to SEQ ID NO: 1255542
cuucccaaguucaaucaac

SEQ ID NO: 1255544 - RNA, 19 nt, Artificial Sequence
  Description of Artificial Sequence: Synthetic oligonucleotide
  Sense strand starting at position 280 of SEQ ID NO: 1241217
cagcuugaaggucaagauu

SEQ ID NO: 1255545 - RNA, 19 nt, Artificial Sequence
  Description of Artificial Sequence: Synthetic oligonucleotide
  Antisense strand to SEQ ID NO: 1255544
aaucuugaccuucaagcug

SEQ ID NO: 1255546 - RNA, 19 nt, Artificial Sequence
  Description of Artificial Sequence: Synthetic oligonucleotide
  Sense strand starting at position 392 of SEQ ID NO: 1241217
uugaaacgucagggacaaa

SEQ ID NO: 1255547 - RNA, 19 nt, Artificial Sequence
  Description of Artificial Sequence: Synthetic oligonucleotide
  Antisense strand to SEQ ID NO: 1255546
uuugucccugacguuucaa

SEQ ID NO: 1255548 - RNA, 19 nt, Artificial Sequence
  Description of Artificial Sequence: Synthetic oligonucleotide
  Sense strand starting at position 420 of SEQ ID NO: 1241217
caaauuaaggguugaucua

SEQ ID NO: 1255549 - RNA, 19 nt, Artificial Sequence
  Description of Artificial Sequence: Synthetic oligonucleotide
  Antisense strand to SEQ ID NO: 1255548
uagaucaacccuuaauuug

SEQ ID NO: 1255550 - RNA, 19 nt, Artificial Sequence
  Description of Artificial Sequence: Synthetic oligonucleotide
  Sense strand starting at position 550 of SEQ ID NO: 1241217
ggcaacauuccuggaagcu

SEQ ID NO: 1255551 - RNA, 19 nt, Artificial Sequence
  Description of Artificial Sequence: Synthetic oligonucleotide
  Antisense strand to SEQ ID NO: 1255550
agcuuccaggaauguugcc

SEQ ID NO: 1255552 - RNA, 19 nt, Artificial Sequence
  Description of Artificial Sequence: Synthetic oligonucleotide
  Sense strand starting at position 551 of SEQ ID NO: 1241217
gcaacauuccuggaagcuc

SEQ ID NO: 1255553 - RNA, 19 nt, Artificial Sequence
  Description of Artificial Sequence: Synthetic oligonucleotide
  Antisense strand to SEQ ID NO: 1255552
gagcuuccaggaauguugc

SEQ ID NO: 1255554 - RNA, 19 nt, Artificial Sequence
  Description of Artificial Sequence: Synthetic oligonucleotide
  Sense strand starting at position 600 of SEQ ID NO: 1241217
acaugugugccuggacaga

SEQ ID NO: 1255555 - RNA, 19 nt, Artificial Sequence
  Description of Artificial Sequence: Synthetic oligonucleotide
  Antisense strand to SEQ ID NO: 1255554
ucuguccaggcacacaugu

SEQ ID NO: 1255556 - RNA, 19 nt, Artificial Sequence
  Description of Artificial Sequence: Synthetic oligonucleotide
  Sense strand starting at position 774 of SEQ ID NO: 1241217
cugggagaaugucugggua

SEQ ID NO: 1255557 - RNA, 19 nt, Artificial Sequence
  Description of Artificial Sequence: Synthetic oligonucleotide
  Antisense strand to SEQ ID NO: 1255556
uacccagacauucucccag

SEQ ID NO: 1255558 - RNA, 19 nt, Artificial Sequence
  Description of Artificial Sequence: Synthetic oligonucleotide
  Sense strand starting at position 777 of SEQ ID NO: 1241217
ggagaaugucuggguaucu

SEQ ID NO: 1255559 - RNA, 19 nt, Artificial Sequence
  Description of Artificial Sequence: Synthetic oligonucleotide
  Antisense strand to SEQ ID NO: 1255558
agauacccagacauucucc

SEQ ID NO: 1255560 - RNA, 19 nt, Artificial Sequence
  Description of Artificial Sequence: Synthetic oligonucleotide
  Sense strand starting at position 778 of SEQ ID NO: 1241217
gagaaugucuggguaucuu

SEQ ID NO: 1255561 - RNA, 19 nt, Artificial Sequence
  Description of Artificial Sequence: Synthetic oligonucleotide
  Antisense strand to SEQ ID NO: 1255560
aagauacccagacauucuc

SEQ ID NO: 1255562 - RNA, 19 nt, Artificial Sequence
  Description of Artificial Sequence: Synthetic oligonucleotide
  Sense strand starting at position 782 of SEQ ID NO: 1241217
augucuggguaucuuaaca

SEQ ID NO: 1255563 - RNA, 19 nt, Artificial Sequence
  Description of Artificial Sequence: Synthetic oligonucleotide
  Antisense strand to SEQ ID NO: 1255562
uguuaagauacccagacau

SEQ ID NO: 1255564 - RNA, 19 nt, Artificial Sequence
  Description of Artificial Sequence: Synthetic oligonucleotide
  Sense strand starting at position 931 of SEQ ID NO: 1241217
agaccaguuuggcucuauu

SEQ ID NO: 1255565 - RNA, 19 nt, Artificial Sequence
  Description of Artificial Sequence: Synthetic oligonucleotide
  Antisense strand to SEQ ID NO: 1255564
aauagagccaaacuggucu

SEQ ID NO: 1255566 - RNA, 19 nt, Artificial Sequence
  Description of Artificial Sequence: Synthetic oligonucleotide
  Sense strand starting at position 1196 of SEQ ID NO: 1241217
cugccaggacuugagcaau

SEQ ID NO: 1255567 - RNA, 19 nt, Artificial Sequence
  Description of Artificial Sequence: Synthetic oligonucleotide
  Antisense strand to SEQ ID NO: 1255566
auugcucaaguccuggcag

SEQ ID NO: 1255568 - RNA, 19 nt, Artificial Sequence
  Description of Artificial Sequence: Synthetic oligonucleotide
  Sense strand starting at position 1389 of SEQ ID NO: 1241217
gacggcaggucucuggaaa

SEQ ID NO: 1255569 - RNA, 19 nt, Artificial Sequence
  Description of Artificial Sequence: Synthetic oligonucleotide
  Antisense strand to SEQ ID NO: 1255568
uuuccagagaccugccguc

SEQ ID NO: 1255570 - RNA, 19 nt, Artificial Sequence
  Description of Artificial Sequence: Synthetic oligonucleotide
  Sense strand starting at position 2643 of SEQ ID NO: 1241217
accuuugauguuugacuga

SEQ ID NO: 1255571 - RNA, 19 nt, Artificial Sequence
  Description of Artificial Sequence: Synthetic oligonucleotide
  Antisense strand to SEQ ID NO: 1255570
ucagucaaacaucaaaggu

SEQ ID NO: 1255572 - RNA, 19 nt, Artificial Sequence
  Description of Artificial Sequence: Synthetic oligonucleotide
  Sense strand starting at position 2646 of SEQ ID NO: 1241217
uuugauguuugacugacuu

SEQ ID NO: 1255573 - RNA, 19 nt, Artificial Sequence
  Description of Artificial Sequence: Synthetic oligonucleotide
  Antisense strand to SEQ ID NO: 1255572
aagucagucaaacaucaaa

SEQ ID NO: 1255574 - RNA, 19 nt, Artificial Sequence
  Description of Artificial Sequence: Synthetic oligonucleotide
  Sense strand starting at position 2694 of SEQ ID NO: 1241217
cuguuucuuggugaagguu

SEQ ID NO: 1255575 - RNA, 19 nt, Artificial Sequence
  Description of Artificial Sequence: Synthetic oligonucleotide
  Antisense strand to SEQ ID NO: 1255574
aaccuucaccaagaaacag

SEQ ID NO: 1255576 - RNA, 19 nt, Artificial Sequence
  Description of Artificial Sequence: Synthetic oligonucleotide
  Sense strand starting at position 2727 of SEQ ID NO: 1241217
guguguaacagcuaaagaa

SEQ ID NO: 1255577 - RNA, 19 nt, Artificial Sequence
  Description of Artificial Sequence: Synthetic oligonucleotide
  Antisense strand to SEQ ID NO: 1255576
uucuuuagcuguuacacac

SEQ ID NO: 1255578 - RNA, 19 nt, Artificial Sequence
  Description of Artificial Sequence: Synthetic oligonucleotide
  Sense strand starting at position 2771 of SEQ ID NO: 1241217
uucugaugccuugaaucag

SEQ ID NO: 1255579 - RNA, 19 nt, Artificial Sequence
  Description of Artificial Sequence: Synthetic oligonucleotide
  Antisense strand to SEQ ID NO: 1255578
cugauucaaggcaucagaa

SEQ ID NO: 1255580 - RNA, 19 nt, Artificial Sequence
  Description of Artificial Sequence: Synthetic oligonucleotide
  Sense strand starting at position 2779 of SEQ ID NO: 1241217
ccuugaaucagugaagguu

SEQ ID NO: 1255581 - RNA, 19 nt, Artificial Sequence
  Description of Artificial Sequence: Synthetic oligonucleotide
  Antisense strand to SEQ ID NO: 1255580
aaccuucacugauucaagg

SEQ ID NO: 1255582 - RNA, 19 nt, Artificial Sequence
  Description of Artificial Sequence: Synthetic oligonucleotide
  Sense strand starting at position 2787 of SEQ ID NO: 1241217
cagugaagguuacuuagaa

SEQ ID NO: 1255583 - RNA, 19 nt, Artificial Sequence
  Description of Artificial Sequence: Synthetic oligonucleotide
  Antisense strand to SEQ ID NO: 1255582
uucuaaguaaccuucacug

SEQ ID NO: 1255584 - RNA, 19 nt, Artificial Sequence
  Description of Artificial Sequence: Synthetic oligonucleotide
  Sense strand starting at position 2788 of SEQ ID NO: 1241217
agugaagguuacuuagaaa

SEQ ID NO: 1255585 - RNA, 19 nt, Artificial Sequence
  Description of Artificial Sequence: Synthetic oligonucleotide
  Antisense strand to SEQ ID NO: 1255584
uuucuaaguaaccuucacu

SEQ ID NO: 1255586 - RNA, 19 nt, Artificial Sequence
  Description of Artificial Sequence: Synthetic oligonucleotide
  Sense strand starting at position 2831 of SEQ ID NO: 1241217
gaggacaugggcgaguuua

SEQ ID NO: 1255587 - RNA, 19 nt, Artificial Sequence
  Description of Artificial Sequence: Synthetic oligonucleotide
  Antisense strand to SEQ ID NO: 1255586
uaaacucgcccauguccuc

SEQ ID NO: 1255588 - RNA, 19 nt, Artificial Sequence
  Description of Artificial Sequence: Synthetic oligonucleotide
  Sense strand starting at position 2882 of SEQ ID NO: 1241217
ugagcuguccaguaagaug

SEQ ID NO: 1255589 - RNA, 19 nt, Artificial Sequence
  Description of Artificial Sequence: Synthetic oligonucleotide
  Antisense strand to SEQ ID NO: 1255588
caucuuacuggacagcuca

SEQ ID NO: 1255590 - RNA, 19 nt, Artificial Sequence
  Description of Artificial Sequence: Synthetic oligonucleotide
  Sense strand starting at position 2890 of SEQ ID NO: 1241217
ccaguaagauggucacuaa

SEQ ID NO: 1255591 - RNA, 19 nt, Artificial Sequence
  Description of Artificial Sequence: Synthetic oligonucleotide
  Antisense strand to SEQ ID NO: 1255590
uuagugaccaucuuacugg

SEQ ID NO: 1255592 - RNA, 19 nt, Artificial Sequence
  Description of Artificial Sequence: Synthetic oligonucleotide
  Sense strand starting at position 2893 of SEQ ID NO: 1241217
guaagauggucacuaacga

SEQ ID NO: 1255593 - RNA, 19 nt, Artificial Sequence
  Description of Artificial Sequence: Synthetic oligonucleotide
  Antisense strand to SEQ ID NO: 1255592
ucguuagugaccaucuuac

SEQ ID NO: 1255594 - RNA, 19 nt, Artificial Sequence
  Description of Artificial Sequence: Synthetic oligonucleotide
  Sense strand starting at position 2901 of SEQ ID NO: 1241217
gucacuaacgacuggauaa

SEQ ID NO: 1255595 - RNA, 19 nt, Artificial Sequence
  Description of Artificial Sequence: Synthetic oligonucleotide
  Antisense strand to SEQ ID NO: 1255594
uuauccagucguuagugac

SEQ ID NO: 1255596 - RNA, 19 nt, Artificial Sequence
  Description of Artificial Sequence: Synthetic oligonucleotide
  Sense strand starting at position 2912 of SEQ ID NO: 1241217
cuggauaaguuucucaguu

SEQ ID NO: 1255597 - RNA, 19 nt, Artificial Sequence
  Description of Artificial Sequence: Synthetic oligonucleotide
  Antisense strand to SEQ ID NO: 1255596
aacugagaaacuuauccag

SEQ ID NO: 1255598 - RNA, 19 nt, Artificial Sequence
  Description of Artificial Sequence: Synthetic oligonucleotide
  Sense strand starting at position 2913 of SEQ ID NO: 1241217
uggauaaguuucucaguug

SEQ ID NO: 1255599 - RNA, 19 nt, Artificial Sequence
  Description of Artificial Sequence: Synthetic oligonucleotide
  Antisense strand to SEQ ID NO: 1255598
caacugagaaacuuaucca

SEQ ID NO: 1255600 - RNA, 19 nt, Artificial Sequence
  Description of Artificial Sequence: Synthetic oligonucleotide
  Sense strand starting at position 2954 of SEQ ID NO: 1241217
cagugaccucuuuauugga

SEQ ID NO: 1255601 - RNA, 19 nt, Artificial Sequence
  Description of Artificial Sequence: Synthetic oligonucleotide
  Antisense strand to SEQ ID NO: 1255600
uccaauaaagaggucacug

SEQ ID NO: 1255602 - RNA, 19 nt, Artificial Sequence
  Description of Artificial Sequence: Synthetic oligonucleotide
  Sense strand starting at position 2956 of SEQ ID NO: 1241217
gugaccucuuuauuggaca

SEQ ID NO: 1255603 - RNA, 19 nt, Artificial Sequence
  Description of Artificial Sequence: Synthetic oligonucleotide
  Antisense strand to SEQ ID NO: 1255602
uguccaauaaagaggucac

SEQ ID NO: 1255604 - RNA, 19 nt, Artificial Sequence
  Description of Artificial Sequence: Synthetic oligonucleotide
  Sense strand starting at position 2968 of SEQ ID NO: 1241217
uuggacagugcagauuaua

SEQ ID NO: 1255605 - RNA, 19 nt, Artificial Sequence
  Description of Artificial Sequence: Synthetic oligonucleotide
  Antisense strand to SEQ ID NO: 1255604
uauaaucugcacuguccaa

SEQ ID NO: 1255606 - RNA, 19 nt, Artificial Sequence
  Description of Artificial Sequence: Synthetic oligonucleotide
  Sense strand starting at position 2971 of SEQ ID NO: 1241217
gacagugcagauuauauau

SEQ ID NO: 1255607 - RNA, 19 nt, Artificial Sequence
  Description of Artificial Sequence: Synthetic oligonucleotide
  Antisense strand to SEQ ID NO: 1255606
auauauaaucugcacuguc

SEQ ID NO: 1255608 - RNA, 19 nt, Artificial Sequence
  Description of Artificial Sequence: Synthetic oligonucleotide
  Sense strand starting at position 3072 of SEQ ID NO: 1241217
gccuuuguaagugcugcua

SEQ ID NO: 1255609 - RNA, 19 nt, Artificial Sequence
  Description of Artificial Sequence: Synthetic oligonucleotide
  Antisense strand to SEQ ID NO: 1255608
uagcagcacuuacaaaggc

SEQ ID NO: 1255610 - RNA, 19 nt, Artificial Sequence
  Description of Artificial Sequence: Synthetic oligonucleotide
  Sense strand starting at position 3105 of SEQ ID NO: 1241217
acguuaguccucuagacac

SEQ ID NO: 1255611 - RNA, 19 nt, Artificial Sequence
  Description of Artificial Sequence: Synthetic oligonucleotide
  Antisense strand to SEQ ID NO: 1255610
gugucuagaggacuaacgu

SEQ ID NO: 1255612 - RNA, 19 nt, Artificial Sequence
  Description of Artificial Sequence: Synthetic oligonucleotide
  Sense strand starting at position 3185 of SEQ ID NO: 1241217
guaauaugccuacaccaug

SEQ ID NO: 1255613 - RNA, 19 nt, Artificial Sequence
  Description of Artificial Sequence: Synthetic oligonucleotide
  Antisense strand to SEQ ID NO: 1255612
caugguguaggcauauuac

SEQ ID NO: 1255614 - RNA, 19 nt, Artificial Sequence
  Description of Artificial Sequence: Synthetic oligonucleotide
  Sense strand starting at position 3772 of SEQ ID NO: 1241217
uaagacgcgcuguaauaaa

SEQ ID NO: 1255615 - RNA, 19 nt, Artificial Sequence
  Description of Artificial Sequence: Synthetic oligonucleotide
  Antisense strand to SEQ ID NO: 1255614
uuuauuacagcgcgucuua

SEQ ID NO: 1255616 - RNA, 19 nt, Artificial Sequence
  Description of Artificial Sequence: Synthetic oligonucleotide
  Sense strand starting at position 3797 of SEQ ID NO: 1241217
gaaagagaaugggauaagu

SEQ ID NO: 1255617 - RNA, 19 nt, Artificial Sequence
  Description of Artificial Sequence: Synthetic oligonucleotide
  Antisense strand to SEQ ID NO: 1255616
acuuaucccauucucuuuc

SEQ ID NO: 1255618 - RNA, 19 nt, Artificial Sequence
  Description of Artificial Sequence: Synthetic oligonucleotide
  Sense strand starting at position 3814 of SEQ ID NO: 1241217
guaccagaagauugugaac

SEQ ID NO: 1255619 - RNA, 19 nt, Artificial Sequence
  Description of Artificial Sequence: Synthetic oligonucleotide
  Antisense strand to SEQ ID NO: 1255618
guucacaaucuucugguac

SEQ ID NO: 1255620 - RNA, 19 nt, Artificial Sequence
  Description of Artificial Sequence: Synthetic oligonucleotide
  Sense strand starting at position 3899 of SEQ ID NO: 1241217
agagaucaguagguaaauc

SEQ ID NO: 1255621 - RNA, 19 nt, Artificial Sequence
  Description of Artificial Sequence: Synthetic oligonucleotide
  Antisense strand to SEQ ID NO: 1255620
gauuuaccuacugaucucu

SEQ ID NO: 1255622 - RNA, 19 nt, Artificial Sequence
  Description of Artificial Sequence: Synthetic oligonucleotide
  Sense strand starting at position 3907 of SEQ ID NO: 1241217
guagguaaaucuuuaagga

SEQ ID NO: 1255623 - RNA, 19 nt, Artificial Sequence
  Description of Artificial Sequence: Synthetic oligonucleotide
  Antisense strand to SEQ ID NO: 1255622
uccuuaaagauuuaccuac

SEQ ID NO: 1255624 - RNA, 19 nt, Artificial Sequence
  Description of Artificial Sequence: Synthetic oligonucleotide
  Sense strand starting at position 18 of SEQ ID NO: 1241218
uggagaagcuuuggcguca

SEQ ID NO: 1255625 - RNA, 19 nt, Artificial Sequence
  Description of Artificial Sequence: Synthetic oligonucleotide
  Antisense strand to SEQ ID NO: 1255624
ugacgccaaagcuucucca

SEQ ID NO: 1255626 - RNA, 19 nt, Artificial Sequence
  Description of Artificial Sequence: Synthetic oligonucleotide
  Sense strand starting at position 160 of SEQ ID NO: 1241218
agguguugcugaguccuga

SEQ ID NO: 1255627 - RNA, 19 nt, Artificial Sequence
  Description of Artificial Sequence: Synthetic oligonucleotide
  Antisense strand to SEQ ID NO: 1255626
ucaggacucagcaacaccu

SEQ ID NO: 1255628 - RNA, 19 nt, Artificial Sequence
  Description of Artificial Sequence: Synthetic oligonucleotide
  Sense strand starting at position 477 of SEQ ID NO: 1241218
agaggaaguggucgucgau

SEQ ID NO: 1255629 - RNA, 19 nt, Artificial Sequence
  Description of Artificial Sequence: Synthetic oligonucleotide
  Antisense strand to SEQ ID NO: 1255628
aucgacgaccacuuccucu

SEQ ID NO: 1255630 - RNA, 19 nt, Artificial Sequence
  Description of Artificial Sequence: Synthetic oligonucleotide
  Sense strand starting at position 479 of SEQ ID NO: 1241218
aggaaguggucgucgauga

SEQ ID NO: 1255631 - RNA, 19 nt, Artificial Sequence
  Description of Artificial Sequence: Synthetic oligonucleotide
  Antisense strand to SEQ ID NO: 1255630
ucaucgacgaccacuuccu

SEQ ID NO: 1255632 - RNA, 19 nt, Artificial Sequence
  Description of Artificial Sequence: Synthetic oligonucleotide
  Sense strand starting at position 522 of SEQ ID NO: 1241218
ugcucuugagcgcguagua

SEQ ID NO: 1255633 - RNA, 19 nt, Artificial Sequence
  Description of Artificial Sequence: Synthetic oligonucleotide
  Antisense strand to SEQ ID NO: 1255632
uacuacgcgcucaagagca

SEQ ID NO: 1255634 - RNA, 19 nt, Artificial Sequence
  Description of Artificial Sequence: Synthetic oligonucleotide
  Sense strand starting at position 523 of SEQ ID NO: 1241218
gcucuugagcgcguaguau

SEQ ID NO: 1255635 - RNA, 19 nt, Artificial Sequence
  Description of Artificial Sequence: Synthetic oligonucleotide
  Antisense strand to SEQ ID NO: 1255634
auacuacgcgcucaagagc

SEQ ID NO: 1255636 - RNA, 19 nt, Artificial Sequence
  Description of Artificial Sequence: Synthetic oligonucleotide
  Sense strand starting at position 1253 of SEQ ID NO: 1241218
ccuugaacacuucguagga

SEQ ID NO: 1255637 - RNA, 19 nt, Artificial Sequence
  Description of Artificial Sequence: Synthetic oligonucleotide
  Antisense strand to SEQ ID NO: 1255636
uccuacgaaguguucaagg

SEQ ID NO: 1255638 - RNA, 19 nt, Artificial Sequence
  Description of Artificial Sequence: Synthetic oligonucleotide
  Sense strand starting at position 1609 of SEQ ID NO: 1241218
gcguuguggcuguuggaga

SEQ ID NO: 1255639 - RNA, 19 nt, Artificial Sequence
  Description of Artificial Sequence: Synthetic oligonucleotide
  Antisense strand to SEQ ID NO: 1255638
ucuccaacagccacaacgc

SEQ ID NO: 1255640 - RNA, 19 nt, Artificial Sequence
  Description of Artificial Sequence: Synthetic oligonucleotide
  Sense strand starting at position 1610 of SEQ ID NO: 1241218
cguuguggcuguuggagaa

SEQ ID NO: 1255641 - RNA, 19 nt, Artificial Sequence
  Description of Artificial Sequence: Synthetic oligonucleotide
  Antisense strand to SEQ ID NO: 1255640
uucuccaacagccacaacg

SEQ ID NO: 1255642 - RNA, 19 nt, Artificial Sequence
  Description of Artificial Sequence: Synthetic oligonucleotide
  Sense strand starting at position 2193 of SEQ ID NO: 1241218
aaccucagguccuuggaua

SEQ ID NO: 1255643 - RNA, 19 nt, Artificial Sequence
  Description of Artificial Sequence: Synthetic oligonucleotide
  Antisense strand to SEQ ID NO: 1255642
uauccaaggaccugagguu

SEQ ID NO: 1255644 - RNA, 19 nt, Artificial Sequence
  Description of Artificial Sequence: Synthetic oligonucleotide
  Sense strand starting at position 2194 of SEQ ID NO: 1241218
accucagguccuuggauau

SEQ ID NO: 1255645 - RNA, 19 nt, Artificial Sequence
  Description of Artificial Sequence: Synthetic oligonucleotide
  Antisense strand to SEQ ID NO: 1255644
auauccaaggaccugaggu

SEQ ID NO: 1255646 - RNA, 19 nt, Artificial Sequence
  Description of Artificial Sequence: Synthetic oligonucleotide
  Sense strand starting at position 2276 of SEQ ID NO: 1241218
cgaggacgcuuggguucau

SEQ ID NO: 1255647 - RNA, 19 nt, Artificial Sequence
  Description of Artificial Sequence: Synthetic oligonucleotide
  Antisense strand to SEQ ID NO: 1255646
augaacccaagcguccucg

SEQ ID NO: 1255648 - RNA, 19 nt, Artificial Sequence
  Description of Artificial Sequence: Synthetic oligonucleotide
  Sense strand starting at position 2466 of SEQ ID NO: 1241218
gggcgauccuggugcaaag

SEQ ID NO: 1255649 - RNA, 19 nt, Artificial Sequence
  Description of Artificial Sequence: Synthetic oligonucleotide
  Antisense strand to SEQ ID NO: 1255648
cuuugcaccaggaucgccc

SEQ ID NO: 1255650 - RNA, 19 nt, Artificial Sequence
  Description of Artificial Sequence: Synthetic oligonucleotide
  Sense strand starting at position 2750 of SEQ ID NO: 1241218
uaagcauaagugcgauuaa

SEQ ID NO: 1255651 - RNA, 19 nt, Artificial Sequence
  Description of Artificial Sequence: Synthetic oligonucleotide
  Antisense strand to SEQ ID NO: 1255650
uuaaucgcacuuaugcuua

SEQ ID NO: 1255652 - RNA, 19 nt, Artificial Sequence
  Description of Artificial Sequence: Synthetic oligonucleotide
  Sense strand starting at position 2751 of SEQ ID NO: 1241218
aagcauaagugcgauuaaa

SEQ ID NO: 1255653 - RNA, 19 nt, Artificial Sequence
  Description of Artificial Sequence: Synthetic oligonucleotide
  Antisense strand to SEQ ID NO: 1255652
uuuaaucgcacuuaugcuu

SEQ ID NO: 1255654 - RNA, 19 nt, Artificial Sequence
  Description of Artificial Sequence: Synthetic oligonucleotide
  Sense strand starting at position 2941 of SEQ ID NO: 1241218
gcaagauaauuuggcagaa

SEQ ID NO: 1255655 - RNA, 19 nt, Artificial Sequence
  Description of Artificial Sequence: Synthetic oligonucleotide
  Antisense strand to SEQ ID NO: 1255654
uucugccaaauuaucuugc

SEQ ID NO: 1255656 - RNA, 19 nt, Artificial Sequence
  Description of Artificial Sequence: Synthetic oligonucleotide
  Sense strand starting at position 2953 of SEQ ID NO: 1241218
ggcagaaucuauuaacguu

SEQ ID NO: 1255657 - RNA, 19 nt, Artificial Sequence
  Description of Artificial Sequence: Synthetic oligonucleotide
  Antisense strand to SEQ ID NO: 1255656
aacguuaauagauucugcc

SEQ ID NO: 1255658 - RNA, 19 nt, Artificial Sequence
  Description of Artificial Sequence: Synthetic oligonucleotide
  Sense strand starting at position 2965 of SEQ ID NO: 1241218
uaacguuaacaauguucga

SEQ ID NO: 1255659 - RNA, 19 nt, Artificial Sequence
  Description of Artificial Sequence: Synthetic oligonucleotide
  Antisense strand to SEQ ID NO: 1255658
ucgaacauuguuaacguua

SEQ ID NO: 1255660 - RNA, 19 nt, Artificial Sequence
  Description of Artificial Sequence: Synthetic oligonucleotide
  Sense strand starting at position 2968 of SEQ ID NO: 1241218
cguuaacaauguucgaacu

SEQ ID NO: 1255661 - RNA, 19 nt, Artificial Sequence
  Description of Artificial Sequence: Synthetic oligonucleotide
  Antisense strand to SEQ ID NO: 1255660
aguucgaacauuguuaacg

SEQ ID NO: 1255662 - RNA, 19 nt, Artificial Sequence
  Description of Artificial Sequence: Synthetic oligonucleotide
  Sense strand starting at position 2978 of SEQ ID NO: 1241218
guucgaacuccgugaccca

SEQ ID NO: 1255663 - RNA, 19 nt, Artificial Sequence
  Description of Artificial Sequence: Synthetic oligonucleotide
  Antisense strand to SEQ ID NO: 1255662
ugggucacggaguucgaac

SEQ ID NO: 1255664 - RNA, 19 nt, Artificial Sequence
  Description of Artificial Sequence: Synthetic oligonucleotide
  Sense strand starting at position 3026 of SEQ ID NO: 1241218
uagaaaggaugucucaguu

SEQ ID NO: 1255665 - RNA, 19 nt, Artificial Sequence
  Description of Artificial Sequence: Synthetic oligonucleotide
  Antisense strand to SEQ ID NO: 1255664
aacugagacauccuuucua

SEQ ID NO: 1255666 - RNA, 19 nt, Artificial Sequence
  Description of Artificial Sequence: Synthetic oligonucleotide
  Sense strand starting at position 3041 of SEQ ID NO: 1241218
aguucucuccacuaaugga

SEQ ID NO: 1255667 - RNA, 19 nt, Artificial Sequence
  Description of Artificial Sequence: Synthetic oligonucleotide
  Antisense strand to SEQ ID NO: 1255666
uccauuaguggagagaacu

SEQ ID NO: 1255668 - RNA, 19 nt, Artificial Sequence
  Description of Artificial Sequence: Synthetic oligonucleotide
  Sense strand starting at position 3063 of SEQ ID NO: 1241218
agagaucuguggagggaaa

SEQ ID NO: 1255669 - RNA, 19 nt, Artificial Sequence
  Description of Artificial Sequence: Synthetic oligonucleotide
  Antisense strand to SEQ ID NO: 1255668
uuucccuccacagaucucu

SEQ ID NO: 1255670 - RNA, 19 nt, Artificial Sequence
  Description of Artificial Sequence: Synthetic oligonucleotide
  Sense strand starting at position 3143 of SEQ ID NO: 1241218
gcaucugcuugcuguggaa

SEQ ID NO: 1255671 - RNA, 19 nt, Artificial Sequence
  Description of Artificial Sequence: Synthetic oligonucleotide
  Antisense strand to SEQ ID NO: 1255670
uuccacagcaagcagaugc

SEQ ID NO: 1255672 - RNA, 19 nt, Artificial Sequence
  Description of Artificial Sequence: Synthetic oligonucleotide
  Sense strand starting at position 3145 of SEQ ID NO: 1241218
aucugcuugcuguggaaua

SEQ ID NO: 1255673 - RNA, 19 nt, Artificial Sequence
  Description of Artificial Sequence: Synthetic oligonucleotide
  Antisense strand to SEQ ID NO: 1255672
uauuccacagcaagcagau

SEQ ID NO: 1255674 - RNA, 19 nt, Artificial Sequence
  Description of Artificial Sequence: Synthetic oligonucleotide
  Sense strand starting at position 3146 of SEQ ID NO: 1241218
ucugcuugcuguggaauau

SEQ ID NO: 1255675 - RNA, 19 nt, Artificial Sequence
  Description of Artificial Sequence: Synthetic oligonucleotide
  Antisense strand to SEQ ID NO: 1255674
auauuccacagcaagcaga

SEQ ID NO: 1255676 - RNA, 19 nt, Artificial Sequence
  Description of Artificial Sequence: Synthetic oligonucleotide
  Sense strand starting at position 3230 of SEQ ID NO: 1241218
uugcucugugaauaaagca

SEQ ID NO: 1255677 - RNA, 19 nt, Artificial Sequence
  Description of Artificial Sequence: Synthetic oligonucleotide
  Antisense strand to SEQ ID NO: 1255676
ugcuuuauucacagagcaa

SEQ ID NO: 1255678 - RNA, 19 nt, Artificial Sequence
  Description of Artificial Sequence: Synthetic oligonucleotide
  Sense strand starting at position 3259 of SEQ ID NO: 1241218
gaacucuuaucugugggua

SEQ ID NO: 1255679 - RNA, 19 nt, Artificial Sequence
  Description of Artificial Sequence: Synthetic oligonucleotide
  Antisense strand to SEQ ID NO: 1255678
uacccacagauaagaguuc

SEQ ID NO: 1255680 - RNA, 19 nt, Artificial Sequence
  Description of Artificial Sequence: Synthetic oligonucleotide
  Sense strand starting at position 3260 of SEQ ID NO: 1241218
aacucuuaucuguggguau

SEQ ID NO: 1255681 - RNA, 19 nt, Artificial Sequence
  Description of Artificial Sequence: Synthetic oligonucleotide
  Antisense strand to SEQ ID NO: 1255680
auacccacagauaagaguu

SEQ ID NO: 1255682 - RNA, 19 nt, Artificial Sequence
  Description of Artificial Sequence: Synthetic oligonucleotide
  Sense strand starting at position 3261 of SEQ ID NO: 1241218
acucuuaucuguggguaua

SEQ ID NO: 1255683 - RNA, 19 nt, Artificial Sequence
  Description of Artificial Sequence: Synthetic oligonucleotide
  Antisense strand to SEQ ID NO: 1255682
uauacccacagauaagagu

SEQ ID NO: 1255684 - RNA, 19 nt, Artificial Sequence
  Description of Artificial Sequence: Synthetic oligonucleotide
  Sense strand starting at position 3262 of SEQ ID NO: 1241218
cucuuaucuguggguauau

SEQ ID NO: 1255685 - RNA, 19 nt, Artificial Sequence
  Description of Artificial Sequence: Synthetic oligonucleotide
  Antisense strand to SEQ ID NO: 1255684
auauacccacagauaagag

SEQ ID NO: 1255686 - RNA, 19 nt, Artificial Sequence
  Description of Artificial Sequence: Synthetic oligonucleotide
  Sense strand starting at position 3263 of SEQ ID NO: 1241218
ucuuaucuguggguauauu

SEQ ID NO: 1255687 - RNA, 19 nt, Artificial Sequence
  Description of Artificial Sequence: Synthetic oligonucleotide
  Antisense strand to SEQ ID NO: 1255686
aauauacccacagauaaga

SEQ ID NO: 1255688 - RNA, 19 nt, Artificial Sequence
  Description of Artificial Sequence: Synthetic oligonucleotide
  Sense strand starting at position 3271 of SEQ ID NO: 1241218
guggguauauuugauacaa

SEQ ID NO: 1255689 - RNA, 19 nt, Artificial Sequence
  Description of Artificial Sequence: Synthetic oligonucleotide
  Antisense strand to SEQ ID NO: 1255688
uuguaucaaauauacccac

SEQ ID NO: 1255690 - RNA, 19 nt, Artificial Sequence
  Description of Artificial Sequence: Synthetic oligonucleotide
  Sense strand starting at position 3460 of SEQ ID NO: 1241218
aguggcguuccagguauaa

SEQ ID NO: 1255691 - RNA, 19 nt, Artificial Sequence
  Description of Artificial Sequence: Synthetic oligonucleotide
  Antisense strand to SEQ ID NO: 1255690
uuauaccuggaacgccacu

SEQ ID NO: 1255692 - RNA, 19 nt, Artificial Sequence
  Description of Artificial Sequence: Synthetic oligonucleotide
  Sense strand starting at position 3735 of SEQ ID NO: 1241218
gcaggugucccuuaagccu

SEQ ID NO: 1255693 - RNA, 19 nt, Artificial Sequence
  Description of Artificial Sequence: Synthetic oligonucleotide
  Antisense strand to SEQ ID NO: 1255692
aggcuuaagggacaccugc

SEQ ID NO: 1255694 - RNA, 19 nt, Artificial Sequence
  Description of Artificial Sequence: Synthetic oligonucleotide
  Sense strand starting at position 3741 of SEQ ID NO: 1241218
gucccuuaagccuggaauu

SEQ ID NO: 1255695 - RNA, 19 nt, Artificial Sequence
  Description of Artificial Sequence: Synthetic oligonucleotide
  Antisense strand to SEQ ID NO: 1255694
aauuccaggcuuaagggac

SEQ ID NO: 1255696 - RNA, 19 nt, Artificial Sequence
  Description of Artificial Sequence: Synthetic oligonucleotide
  Sense strand starting at position 3797 of SEQ ID NO: 1241218
uuuagaaauuucugcagcu

SEQ ID NO: 1255697 - RNA, 19 nt, Artificial Sequence
  Description of Artificial Sequence: Synthetic oligonucleotide
  Antisense strand to SEQ ID NO: 1255696
agcugcagaaauuucuaaa

SEQ ID NO: 1255698 - RNA, 19 nt, Artificial Sequence
  Description of Artificial Sequence: Synthetic oligonucleotide
  Sense strand starting at position 3837 of SEQ ID NO: 1241218
accugaagggcuuaaguuu

SEQ ID NO: 1255699 - RNA, 19 nt, Artificial Sequence
  Description of Artificial Sequence: Synthetic oligonucleotide
  Antisense strand to SEQ ID NO: 1255698
aaacuuaagcccuucaggu

SEQ ID NO: 1255700 - RNA, 19 nt, Artificial Sequence
  Description of Artificial Sequence: Synthetic oligonucleotide
  Sense strand starting at position 3845 of SEQ ID NO: 1241218
ggcuuaaguuucuguuucu

SEQ ID NO: 1255701 - RNA, 19 nt, Artificial Sequence
  Description of Artificial Sequence: Synthetic oligonucleotide
  Antisense strand to SEQ ID NO: 1255700
agaaacagaaacuuaagcc

SEQ ID NO: 1255702 - RNA, 19 nt, Artificial Sequence
  Description of Artificial Sequence: Synthetic oligonucleotide
  Sense strand starting at position 3848 of SEQ ID NO: 1241218
uuaaguuucuguuucugga

SEQ ID NO: 1255703 - RNA, 19 nt, Artificial Sequence
  Description of Artificial Sequence: Synthetic oligonucleotide
  Antisense strand to SEQ ID NO: 1255702
uccagaaacagaaacuuaa

SEQ ID NO: 1255704 - RNA, 19 nt, Artificial Sequence
  Description of Artificial Sequence: Synthetic oligonucleotide
  Sense strand starting at position 402 of SEQ ID NO: 1241219
uacugucauggucaagauc

SEQ ID NO: 1255705 - RNA, 19 nt, Artificial Sequence
  Description of Artificial Sequence: Synthetic oligonucleotide
  Antisense strand to SEQ ID NO: 1255704
gaucuugaccaugacagua

SEQ ID NO: 1255706 - RNA, 19 nt, Artificial Sequence
  Description of Artificial Sequence: Synthetic oligonucleotide
  Sense strand starting at position 473 of SEQ ID NO: 1241219
agucgaaagccugaggagu

SEQ ID NO: 1255707 - RNA, 19 nt, Artificial Sequence
  Description of Artificial Sequence: Synthetic oligonucleotide
  Antisense strand to SEQ ID NO: 1255706
acuccucaggcuuucgacu

SEQ ID NO: 1255708 - RNA, 19 nt, Artificial Sequence
  Description of Artificial Sequence: Synthetic oligonucleotide
  Sense strand starting at position 492 of SEQ ID NO: 1241219
ggcagaggaagucguagaa

SEQ ID NO: 1255709 - RNA, 19 nt, Artificial Sequence
  Description of Artificial Sequence: Synthetic oligonucleotide
  Antisense strand to SEQ ID NO: 1255708
uucuacgacuuccucugcc

SEQ ID NO: 1255710 - RNA, 19 nt, Artificial Sequence
  Description of Artificial Sequence: Synthetic oligonucleotide
  Sense strand starting at position 641 of SEQ ID NO: 1241219
ugucuuguucagggacaag

SEQ ID NO: 1255711 - RNA, 19 nt, Artificial Sequence
  Description of Artificial Sequence: Synthetic oligonucleotide
  Antisense strand to SEQ ID NO: 1255710
cuugucccugaacaagaca

SEQ ID NO: 1255712 - RNA, 19 nt, Artificial Sequence
  Description of Artificial Sequence: Synthetic oligonucleotide
  Sense strand starting at position 872 of SEQ ID NO: 1241219
uagggagcucugcgcauuu

SEQ ID NO: 1255713 - RNA, 19 nt, Artificial Sequence
  Description of Artificial Sequence: Synthetic oligonucleotide
  Antisense strand to SEQ ID NO: 1255712
aaaugcgcagagcucccua

SEQ ID NO: 1255714 - RNA, 19 nt, Artificial Sequence
  Description of Artificial Sequence: Synthetic oligonucleotide
  Sense strand starting at position 925 of SEQ ID NO: 1241219
aacacaucgcccgagaguu

SEQ ID NO: 1255715 - RNA, 19 nt, Artificial Sequence
  Description of Artificial Sequence: Synthetic oligonucleotide
  Antisense strand to SEQ ID NO: 1255714
aacucucgggcgauguguu

SEQ ID NO: 1255716 - RNA, 19 nt, Artificial Sequence
  Description of Artificial Sequence: Synthetic oligonucleotide
  Sense strand starting at position 956 of SEQ ID NO: 1241219
cgccgauuucguccgcgau

SEQ ID NO: 1255717 - RNA, 19 nt, Artificial Sequence
  Description of Artificial Sequence: Synthetic oligonucleotide
  Antisense strand to SEQ ID NO: 1255716
aucgcggacgaaaucggcg

SEQ ID NO: 1255718 - RNA, 19 nt, Artificial Sequence
  Description of Artificial Sequence: Synthetic oligonucleotide
  Sense strand starting at position 960 of SEQ ID NO: 1241219
gauuucguccgcgaugcaa

SEQ ID NO: 1255719 - RNA, 19 nt, Artificial Sequence
  Description of Artificial Sequence: Synthetic oligonucleotide
  Antisense strand to SEQ ID NO: 1255718
uugcaucgcggacgaaauc

SEQ ID NO: 1255720 - RNA, 19 nt, Artificial Sequence
  Description of Artificial Sequence: Synthetic oligonucleotide
  Sense strand starting at position 1072 of SEQ ID NO: 1241219
gcgcgauagcucaaguuag

SEQ ID NO: 1255721 - RNA, 19 nt, Artificial Sequence
  Description of Artificial Sequence: Synthetic oligonucleotide
  Antisense strand to SEQ ID NO: 1255720
cuaacuugagcuaucgcgc

SEQ ID NO: 1255722 - RNA, 19 nt, Artificial Sequence
  Description of Artificial Sequence: Synthetic oligonucleotide
  Sense strand starting at position 1269 of SEQ ID NO: 1241219
cagcgugucgcuuucgaga

SEQ ID NO: 1255723 - RNA, 19 nt, Artificial Sequence
  Description of Artificial Sequence: Synthetic oligonucleotide
  Antisense strand to SEQ ID NO: 1255722
ucucgaaagcgacacgcug

SEQ ID NO: 1255724 - RNA, 19 nt, Artificial Sequence
  Description of Artificial Sequence: Synthetic oligonucleotide
  Sense strand starting at position 2166 of SEQ ID NO: 1241219
uggaguuagcgucagaaua

SEQ ID NO: 1255725 - RNA, 19 nt, Artificial Sequence
  Description of Artificial Sequence: Synthetic oligonucleotide
  Antisense strand to SEQ ID NO: 1255724
uauucugacgcuaacucca

SEQ ID NO: 1255726 - RNA, 19 nt, Artificial Sequence
  Description of Artificial Sequence: Synthetic oligonucleotide
  Sense strand starting at position 2176 of SEQ ID NO: 1241219
gucagaauaauucguagac

SEQ ID NO: 1255727 - RNA, 19 nt, Artificial Sequence
  Description of Artificial Sequence: Synthetic oligonucleotide
  Antisense strand to SEQ ID NO: 1255726
gucuacgaauuauucugac

SEQ ID NO: 1255728 - RNA, 19 nt, Artificial Sequence
  Description of Artificial Sequence: Synthetic oligonucleotide
  Sense strand starting at position 2180 of SEQ ID NO: 1241219
gaauaauucguagacggcu

SEQ ID NO: 1255729 - RNA, 19 nt, Artificial Sequence
  Description of Artificial Sequence: Synthetic oligonucleotide
  Antisense strand to SEQ ID NO: 1255728
agccgucuacgaauuauuc

SEQ ID NO: 1255730 - RNA, 19 nt, Artificial Sequence
  Description of Artificial Sequence: Synthetic oligonucleotide
  Sense strand starting at position 2278 of SEQ ID NO: 1241219
agcacuauuuaaccgcaua

SEQ ID NO: 1255731 - RNA, 19 nt, Artificial Sequence
  Description of Artificial Sequence: Synthetic oligonucleotide
  Antisense strand to SEQ ID NO: 1255730
uaugcgguuaaauagugcu

SEQ ID NO: 1255732 - RNA, 19 nt, Artificial Sequence
  Description of Artificial Sequence: Synthetic oligonucleotide
  Sense strand starting at position 2407 of SEQ ID NO: 1241219
aucagcacuugcuuuagaa

SEQ ID NO: 1255733 - RNA, 19 nt, Artificial Sequence
  Description of Artificial Sequence: Synthetic oligonucleotide
  Antisense strand to SEQ ID NO: 1255732
uucuaaagcaagugcugau

SEQ ID NO: 1255734 - RNA, 19 nt, Artificial Sequence
  Description of Artificial Sequence: Synthetic oligonucleotide
  Sense strand starting at position 2619 of SEQ ID NO: 1241219
ccuuauaaauauucgagaa

SEQ ID NO: 1255735 - RNA, 19 nt, Artificial Sequence
  Description of Artificial Sequence: Synthetic oligonucleotide
  Antisense strand to SEQ ID NO: 1255734
uucucgaauauuuauaagg

SEQ ID NO: 1255736 - RNA, 19 nt, Artificial Sequence
  Description of Artificial Sequence: Synthetic oligonucleotide
  Sense strand starting at position 2725 of SEQ ID NO: 1241219
guaaacaucuccuuuaagg

SEQ ID NO: 1255737 - RNA, 19 nt, Artificial Sequence
  Description of Artificial Sequence: Synthetic oligonucleotide
  Antisense strand to SEQ ID NO: 1255736
ccuuaaaggagauguuuac

SEQ ID NO: 1255738 - RNA, 19 nt, Artificial Sequence
  Description of Artificial Sequence: Synthetic oligonucleotide
  Sense strand starting at position 2827 of SEQ ID NO: 1241219
aaagaugggugagccaauu

SEQ ID NO: 1255739 - RNA, 19 nt, Artificial Sequence
  Description of Artificial Sequence: Synthetic oligonucleotide
  Antisense strand to SEQ ID NO: 1255738
aauuggcucacccaucuuu

SEQ ID NO: 1255740 - RNA, 19 nt, Artificial Sequence
  Description of Artificial Sequence: Synthetic oligonucleotide
  Sense strand starting at position 3039 of SEQ ID NO: 1241219
auacguugccaucagaaau

SEQ ID NO: 1255741 - RNA, 19 nt, Artificial Sequence
  Description of Artificial Sequence: Synthetic oligonucleotide
  Antisense strand to SEQ ID NO: 1255740
auuucugauggcaacguau

SEQ ID NO: 1255742 - RNA, 19 nt, Artificial Sequence
  Description of Artificial Sequence: Synthetic oligonucleotide
  Sense strand starting at position 3083 of SEQ ID NO: 1241219
cuuagagaugucugaugcu

SEQ ID NO: 1255743 - RNA, 19 nt, Artificial Sequence
  Description of Artificial Sequence: Synthetic oligonucleotide
  Antisense strand to SEQ ID NO: 1255742
agcaucagacaucucuaag

SEQ ID NO: 1255744 - RNA, 19 nt, Artificial Sequence
  Description of Artificial Sequence: Synthetic oligonucleotide
  Sense strand starting at position 3128 of SEQ ID NO: 1241219
guugccauuccauggauaa

SEQ ID NO: 1255745 - RNA, 19 nt, Artificial Sequence
  Description of Artificial Sequence: Synthetic oligonucleotide
  Antisense strand to SEQ ID NO: 1255744
uuauccauggaauggcaac

SEQ ID NO: 1255746 - RNA, 19 nt, Artificial Sequence
  Description of Artificial Sequence: Synthetic oligonucleotide
  Sense strand starting at position 3129 of SEQ ID NO: 1241219
uugccauuccauggauaau

SEQ ID NO: 1255747 - RNA, 19 nt, Artificial Sequence
  Description of Artificial Sequence: Synthetic oligonucleotide
  Antisense strand to SEQ ID NO: 1255746
auuauccauggaauggcaa

SEQ ID NO: 1255748 - RNA, 19 nt, Artificial Sequence
  Description of Artificial Sequence: Synthetic oligonucleotide
  Sense strand starting at position 3210 of SEQ ID NO: 1241219
ggaucacaucuguaugcuu

SEQ ID NO: 1255749 - RNA, 19 nt, Artificial Sequence
  Description of Artificial Sequence: Synthetic oligonucleotide
  Antisense strand to SEQ ID NO: 1255748
aagcauacagaugugaucc

SEQ ID NO: 1255750 - RNA, 19 nt, Artificial Sequence
  Description of Artificial Sequence: Synthetic oligonucleotide
  Sense strand starting at position 3268 of SEQ ID NO: 1241219
cuggaaauuccauguaucu

SEQ ID NO: 1255751 - RNA, 19 nt, Artificial Sequence
  Description of Artificial Sequence: Synthetic oligonucleotide
  Antisense strand to SEQ ID NO: 1255750
agauacauggaauuuccag

SEQ ID NO: 1255752 - RNA, 19 nt, Artificial Sequence
  Description of Artificial Sequence: Synthetic oligonucleotide
  Sense strand starting at position 3296 of SEQ ID NO: 1241219
acaguaagccuaugaguca

SEQ ID NO: 1255753 - RNA, 19 nt, Artificial Sequence
  Description of Artificial Sequence: Synthetic oligonucleotide
  Antisense strand to SEQ ID NO: 1255752
ugacucauaggcuuacugu

SEQ ID NO: 1255754 - RNA, 19 nt, Artificial Sequence
  Description of Artificial Sequence: Synthetic oligonucleotide
  Sense strand starting at position 3346 of SEQ ID NO: 1241219
ggagcuuugcacuaggauu

SEQ ID NO: 1255755 - RNA, 19 nt, Artificial Sequence
  Description of Artificial Sequence: Synthetic oligonucleotide
  Antisense strand to SEQ ID NO: 1255754
aauccuagugcaaagcucc

SEQ ID NO: 1255756 - RNA, 19 nt, Artificial Sequence
  Description of Artificial Sequence: Synthetic oligonucleotide
  Sense strand starting at position 3420 of SEQ ID NO: 1241219
gucugagaaucaccuuaaa

SEQ ID NO: 1255757 - RNA, 19 nt, Artificial Sequence
  Description of Artificial Sequence: Synthetic oligonucleotide
  Antisense strand to SEQ ID NO: 1255756
uuuaaggugauucucagac

SEQ ID NO: 1255758 - RNA, 19 nt, Artificial Sequence
  Description of Artificial Sequence: Synthetic oligonucleotide
  Sense strand starting at position 3423 of SEQ ID NO: 1241219
ugagaaucaccuuaaacgu

SEQ ID NO: 1255759 - RNA, 19 nt, Artificial Sequence
  Description of Artificial Sequence: Synthetic oligonucleotide
  Antisense strand to SEQ ID NO: 1255758
acguuuaaggugauucuca

SEQ ID NO: 1255760 - RNA, 19 nt, Artificial Sequence
  Description of Artificial Sequence: Synthetic oligonucleotide
  Sense strand starting at position 3439 of SEQ ID NO: 1241219
cguggcuuugcguuuaaau

SEQ ID NO: 1255761 - RNA, 19 nt, Artificial Sequence
  Description of Artificial Sequence: Synthetic oligonucleotide
  Antisense strand to SEQ ID NO: 1255760
auuuaaacgcaaagccacg

SEQ ID NO: 1255762 - RNA, 19 nt, Artificial Sequence
  Description of Artificial Sequence: Synthetic oligonucleotide
  Sense strand starting at position 3440 of SEQ ID NO: 1241219
guggcuuugcguuuaaauu

SEQ ID NO: 1255763 - RNA, 19 nt, Artificial Sequence
  Description of Artificial Sequence: Synthetic oligonucleotide
  Antisense strand to SEQ ID NO: 1255762
aauuuaaacgcaaagccac

SEQ ID NO: 1255764 - RNA, 19 nt, Artificial Sequence
  Description of Artificial Sequence: Synthetic oligonucleotide
  Sense strand starting at position 3446 of SEQ ID NO: 1241219
uugcguuuaaauuagguaa

SEQ ID NO: 1255765 - RNA, 19 nt, Artificial Sequence
  Description of Artificial Sequence: Synthetic oligonucleotide
  Antisense strand to SEQ ID NO: 1255764
uuaccuaauuuaaacgcaa

SEQ ID NO: 1255766 - RNA, 19 nt, Artificial Sequence
  Description of Artificial Sequence: Synthetic oligonucleotide
  Sense strand starting at position 3572 of SEQ ID NO: 1241219
augacuguguuuguaaaug

SEQ ID NO: 1255767 - RNA, 19 nt, Artificial Sequence
  Description of Artificial Sequence: Synthetic oligonucleotide
  Antisense strand to SEQ ID NO: 1255766
cauuuacaaacacagucau

SEQ ID NO: 1255768 - RNA, 19 nt, Artificial Sequence
  Description of Artificial Sequence: Synthetic oligonucleotide
  Sense strand starting at position 3583 of SEQ ID NO: 1241219
uguaaauguguccauguag

SEQ ID NO: 1255769 - RNA, 19 nt, Artificial Sequence
  Description of Artificial Sequence: Synthetic oligonucleotide
  Antisense strand to SEQ ID NO: 1255768
cuacauggacacauuuaca

SEQ ID NO: 1255770 - RNA, 19 nt, Artificial Sequence
  Description of Artificial Sequence: Synthetic oligonucleotide
  Sense strand starting at position 3633 of SEQ ID NO: 1241219
uuaaguagucaauggaaau

SEQ ID NO: 1255771 - RNA, 19 nt, Artificial Sequence
  Description of Artificial Sequence: Synthetic oligonucleotide
  Antisense strand to SEQ ID NO: 1255770
auuuccauugacuacuuaa

SEQ ID NO: 1255772 - RNA, 19 nt, Artificial Sequence
  Description of Artificial Sequence: Synthetic oligonucleotide
  Sense strand starting at position 3644 of SEQ ID NO: 1241219
auggaaauuucuuagauag

SEQ ID NO: 1255773 - RNA, 19 nt, Artificial Sequence
  Description of Artificial Sequence: Synthetic oligonucleotide
  Antisense strand to SEQ ID NO: 1255772
cuaucuaagaaauuuccau

SEQ ID NO: 1255774 - RNA, 19 nt, Artificial Sequence
  Description of Artificial Sequence: Synthetic oligonucleotide
  Sense strand starting at position 3646 of SEQ ID NO: 1241219
ggaaauuucuuagauagcu

SEQ ID NO: 1255775 - RNA, 19 nt, Artificial Sequence
  Description of Artificial Sequence: Synthetic oligonucleotide
  Antisense strand to SEQ ID NO: 1255774
agcuaucuaagaaauuucc

SEQ ID NO: 1255776 - RNA, 19 nt, Artificial Sequence
  Description of Artificial Sequence: Synthetic oligonucleotide
  Sense strand starting at position 3670 of SEQ ID NO: 1241219
aaucguuugggaugagaug

SEQ ID NO: 1255777 - RNA, 19 nt, Artificial Sequence
  Description of Artificial Sequence: Synthetic oligonucleotide
  Antisense strand to SEQ ID NO: 1255776
caucucaucccaaacgauu

SEQ ID NO: 1255778 - RNA, 19 nt, Artificial Sequence
  Description of Artificial Sequence: Synthetic oligonucleotide
  Sense strand starting at position 3684 of SEQ ID NO: 1241219
agaugaggugucuacagua

SEQ ID NO: 1255779 - RNA, 19 nt, Artificial Sequence
  Description of Artificial Sequence: Synthetic oligonucleotide
  Antisense strand to SEQ ID NO: 1255778
uacuguagacaccucaucu

SEQ ID NO: 1255780 - RNA, 19 nt, Artificial Sequence
  Description of Artificial Sequence: Synthetic oligonucleotide
  Sense strand starting at position 3797 of SEQ ID NO: 1241219
ggccauaacgacuauauga

SEQ ID NO: 1255781 - RNA, 19 nt, Artificial Sequence
  Description of Artificial Sequence: Synthetic oligonucleotide
  Antisense strand to SEQ ID NO: 1255780
ucauauagucguuauggcc

SEQ ID NO: 1255782 - RNA, 19 nt, Artificial Sequence
  Description of Artificial Sequence: Synthetic oligonucleotide
  Sense strand starting at position 3816 of SEQ ID NO: 1241219
gaguacugaccaugaccau

SEQ ID NO: 1255783 - RNA, 19 nt, Artificial Sequence
  Description of Artificial Sequence: Synthetic oligonucleotide
  Antisense strand to SEQ ID NO: 1255782
auggucauggucaguacuc

SEQ ID NO: 1255784 - RNA, 19 nt, Artificial Sequence
  Description of Artificial Sequence: Synthetic oligonucleotide
  Sense strand starting at position 50 of SEQ ID NO: 1241220
ggagccuacucagugaacu

SEQ ID NO: 1255785 - RNA, 19 nt, Artificial Sequence
  Description of Artificial Sequence: Synthetic oligonucleotide
  Antisense strand to SEQ ID NO: 1255784
aguucacugaguaggcucc

SEQ ID NO: 1255786 - RNA, 19 nt, Artificial Sequence
  Description of Artificial Sequence: Synthetic oligonucleotide
  Sense strand starting at position 51 of SEQ ID NO: 1241220
gagccuacucagugaacuc

SEQ ID NO: 1255787 - RNA, 19 nt, Artificial Sequence
  Description of Artificial Sequence: Synthetic oligonucleotide
  Antisense strand to SEQ ID NO: 1255786
gaguucacugaguaggcuc

SEQ ID NO: 1255788 - RNA, 19 nt, Artificial Sequence
  Description of Artificial Sequence: Synthetic oligonucleotide
  Sense strand starting at position 221 of SEQ ID NO: 1241220
gaacuuguugcacgaagca

SEQ ID NO: 1255789 - RNA, 19 nt, Artificial Sequence
  Description of Artificial Sequence: Synthetic oligonucleotide
  Antisense strand to SEQ ID NO: 1255788
ugcuucgugcaacaaguuc

SEQ ID NO: 1255790 - RNA, 19 nt, Artificial Sequence
  Description of Artificial Sequence: Synthetic oligonucleotide
  Sense strand starting at position 231 of SEQ ID NO: 1241220
cacgaagcauugguuagua

SEQ ID NO: 1255791 - RNA, 19 nt, Artificial Sequence
  Description of Artificial Sequence: Synthetic oligonucleotide
  Antisense strand to SEQ ID NO: 1255790
uacuaaccaaugcuucgug

SEQ ID NO: 1255792 - RNA, 19 nt, Artificial Sequence
  Description of Artificial Sequence: Synthetic oligonucleotide
  Sense strand starting at position 262 of SEQ ID NO: 1241220
acacucaaugguugccuaa

SEQ ID NO: 1255793 - RNA, 19 nt, Artificial Sequence
  Description of Artificial Sequence: Synthetic oligonucleotide
  Antisense strand to SEQ ID NO: 1255792
uuaggcaaccauugagugu

SEQ ID NO: 1255794 - RNA, 19 nt, Artificial Sequence
  Description of Artificial Sequence: Synthetic oligonucleotide
  Sense strand starting at position 264 of SEQ ID NO: 1241220
acucaaugguugccuaaga

SEQ ID NO: 1255795 - RNA, 19 nt, Artificial Sequence
  Description of Artificial Sequence: Synthetic oligonucleotide
  Antisense strand to SEQ ID NO: 1255794
ucuuaggcaaccauugagu

SEQ ID NO: 1255796 - RNA, 19 nt, Artificial Sequence
  Description of Artificial Sequence: Synthetic oligonucleotide
  Sense strand starting at position 377 of SEQ ID NO: 1241220
ccaggcacuuggcuuauua

SEQ ID NO: 1255797 - RNA, 19 nt, Artificial Sequence
  Description of Artificial Sequence: Synthetic oligonucleotide
  Antisense strand to SEQ ID NO: 1255796
uaauaagccaagugccugg

SEQ ID NO: 1255798 - RNA, 19 nt, Artificial Sequence
  Description of Artificial Sequence: Synthetic oligonucleotide
  Sense strand starting at position 381 of SEQ ID NO: 1241220
gcacuuggcuuauuaucaa

SEQ ID NO: 1255799 - RNA, 19 nt, Artificial Sequence
  Description of Artificial Sequence: Synthetic oligonucleotide
  Antisense strand to SEQ ID NO: 1255798
uugauaauaagccaagugc

SEQ ID NO: 1255800 - RNA, 19 nt, Artificial Sequence
  Description of Artificial Sequence: Synthetic oligonucleotide
  Sense strand starting at position 605 of SEQ ID NO: 1241220
agguguaauguuuaaacuu

SEQ ID NO: 1255801 - RNA, 19 nt, Artificial Sequence
  Description of Artificial Sequence: Synthetic oligonucleotide
  Antisense strand to SEQ ID NO: 1255800
aaguuuaaacauuacaccu

SEQ ID NO: 1255802 - RNA, 19 nt, Artificial Sequence
  Description of Artificial Sequence: Synthetic oligonucleotide
  Sense strand starting at position 820 of SEQ ID NO: 1241220
aggucaaugugggugaaga

SEQ ID NO: 1255803 - RNA, 19 nt, Artificial Sequence
  Description of Artificial Sequence: Synthetic oligonucleotide
  Antisense strand to SEQ ID NO: 1255802
ucuucacccacauugaccu

SEQ ID NO: 1255804 - RNA, 19 nt, Artificial Sequence
  Description of Artificial Sequence: Synthetic oligonucleotide
  Sense strand starting at position 821 of SEQ ID NO: 1241220
ggucaaugugggugaagaa

SEQ ID NO: 1255805 - RNA, 19 nt, Artificial Sequence
  Description of Artificial Sequence: Synthetic oligonucleotide
  Antisense strand to SEQ ID NO: 1255804
uucuucacccacauugacc

SEQ ID NO: 1255806 - RNA, 19 nt, Artificial Sequence
  Description of Artificial Sequence: Synthetic oligonucleotide
  Sense strand starting at position 848 of SEQ ID NO: 1241220
agugguguucugucuaguu

SEQ ID NO: 1255807 - RNA, 19 nt, Artificial Sequence
  Description of Artificial Sequence: Synthetic oligonucleotide
  Antisense strand to SEQ ID NO: 1255806
aacuagacagaacaccacu

SEQ ID NO: 1255808 - RNA, 19 nt, Artificial Sequence
  Description of Artificial Sequence: Synthetic oligonucleotide
  Sense strand starting at position 867 of SEQ ID NO: 1241220
cugcaaagcccauauauga

SEQ ID NO: 1255809 - RNA, 19 nt, Artificial Sequence
  Description of Artificial Sequence: Synthetic oligonucleotide
  Antisense strand to SEQ ID NO: 1255808
ucauauaugggcuuugcag

SEQ ID NO: 1255810 - RNA, 19 nt, Artificial Sequence
  Description of Artificial Sequence: Synthetic oligonucleotide
  Sense strand starting at position 900 of SEQ ID NO: 1241220
gagauacaguuccaugaag

SEQ ID NO: 1255811 - RNA, 19 nt, Artificial Sequence
  Description of Artificial Sequence: Synthetic oligonucleotide
  Antisense strand to SEQ ID NO: 1255810
cuucauggaacuguaucuc

SEQ ID NO: 1255812 - RNA, 19 nt, Artificial Sequence
  Description of Artificial Sequence: Synthetic oligonucleotide
  Sense strand starting at position 923 of SEQ ID NO: 1241220
ccugucuguuggguggaua

SEQ ID NO: 1255813 - RNA, 19 nt, Artificial Sequence
  Description of Artificial Sequence: Synthetic oligonucleotide
  Antisense strand to SEQ ID NO: 1255812
uauccacccaacagacagg

SEQ ID NO: 1255814 - RNA, 19 nt, Artificial Sequence
  Description of Artificial Sequence: Synthetic oligonucleotide
  Sense strand starting at position 953 of SEQ ID NO: 1241220
ggaaauuaugggugacuuu

SEQ ID NO: 1255815 - RNA, 19 nt, Artificial Sequence
  Description of Artificial Sequence: Synthetic oligonucleotide
  Antisense strand to SEQ ID NO: 1255814
aaagucacccauaauuucc

SEQ ID NO: 1255816 - RNA, 19 nt, Artificial Sequence
  Description of Artificial Sequence: Synthetic oligonucleotide
  Sense strand starting at position 1118 of SEQ ID NO: 1241220
gguagaagccuugguccca

SEQ ID NO: 1255817 - RNA, 19 nt, Artificial Sequence
  Description of Artificial Sequence: Synthetic oligonucleotide
  Antisense strand to SEQ ID NO: 1255816
ugggaccaaggcuucuacc

SEQ ID NO: 1255818 - RNA, 19 nt, Artificial Sequence
  Description of Artificial Sequence: Synthetic oligonucleotide
  Sense strand starting at position 2257 of SEQ ID NO: 1241220
ggguguuuguagguuggau

SEQ ID NO: 1255819 - RNA, 19 nt, Artificial Sequence
  Description of Artificial Sequence: Synthetic oligonucleotide
  Antisense strand to SEQ ID NO: 1255818
auccaaccuacaaacaccc

SEQ ID NO: 1255820 - RNA, 19 nt, Artificial Sequence
  Description of Artificial Sequence: Synthetic oligonucleotide
  Sense strand starting at position 2270 of SEQ ID NO: 1241220
uuggauuguuugguuacaa

SEQ ID NO: 1255821 - RNA, 19 nt, Artificial Sequence
  Description of Artificial Sequence: Synthetic oligonucleotide
  Antisense strand to SEQ ID NO: 1255820
uuguaaccaaacaauccaa

SEQ ID NO: 1255822 - RNA, 19 nt, Artificial Sequence
  Description of Artificial Sequence: Synthetic oligonucleotide
  Sense strand starting at position 2271 of SEQ ID NO: 1241220
uggauuguuugguuacaaa

SEQ ID NO: 1255823 - RNA, 19 nt, Artificial Sequence
  Description of Artificial Sequence: Synthetic oligonucleotide
  Antisense strand to SEQ ID NO: 1255822
uuuguaaccaaacaaucca

SEQ ID NO: 1255824 - RNA, 19 nt, Artificial Sequence
  Description of Artificial Sequence: Synthetic oligonucleotide
  Sense strand starting at position 2563 of SEQ ID NO: 1241220
caaacuaguguggagguaa

SEQ ID NO: 1255825 - RNA, 19 nt, Artificial Sequence
  Description of Artificial Sequence: Synthetic oligonucleotide
  Antisense strand to SEQ ID NO: 1255824
uuaccuccacacuaguuug

SEQ ID NO: 1255826 - RNA, 19 nt, Artificial Sequence
  Description of Artificial Sequence: Synthetic oligonucleotide
  Sense strand starting at position 2577 of SEQ ID NO: 1241220
gguaaaguugugggagucu

SEQ ID NO: 1255827 - RNA, 19 nt, Artificial Sequence
  Description of Artificial Sequence: Synthetic oligonucleotide
  Antisense strand to SEQ ID NO: 1255826
agacucccacaacuuuacc

SEQ ID NO: 1255828 - RNA, 19 nt, Artificial Sequence
  Description of Artificial Sequence: Synthetic oligonucleotide
  Sense strand starting at position 2884 of SEQ ID NO: 1241220
ucuagagaauuccaggauc

SEQ ID NO: 1255829 - RNA, 19 nt, Artificial Sequence
  Description of Artificial Sequence: Synthetic oligonucleotide
  Antisense strand to SEQ ID NO: 1255828
gauccuggaauucucuaga

SEQ ID NO: 1255830 - RNA, 19 nt, Artificial Sequence
  Description of Artificial Sequence: Synthetic oligonucleotide
  Sense strand starting at position 2895 of SEQ ID NO: 1241220
ccaggaucuuauccuguuu

SEQ ID NO: 1255831 - RNA, 19 nt, Artificial Sequence
  Description of Artificial Sequence: Synthetic oligonucleotide
  Antisense strand to SEQ ID NO: 1255830
aaacaggauaagauccugg

SEQ ID NO: 1255832 - RNA, 19 nt, Artificial Sequence
  Description of Artificial Sequence: Synthetic oligonucleotide
  Sense strand starting at position 3035 of SEQ ID NO: 1241220
gggcccuuucugugacaac

SEQ ID NO: 1255833 - RNA, 19 nt, Artificial Sequence
  Description of Artificial Sequence: Synthetic oligonucleotide
  Antisense strand to SEQ ID NO: 1255832
guugucacagaaagggccc

SEQ ID NO: 1255834 - RNA, 19 nt, Artificial Sequence
  Description of Artificial Sequence: Synthetic oligonucleotide
  Sense strand starting at position 3311 of SEQ ID NO: 1241220
ucguguggcccuuaaacaa

SEQ ID NO: 1255835 - RNA, 19 nt, Artificial Sequence
  Description of Artificial Sequence: Synthetic oligonucleotide
  Antisense strand to SEQ ID NO: 1255834
uuguuuaagggccacacga

SEQ ID NO: 1255836 - RNA, 19 nt, Artificial Sequence
  Description of Artificial Sequence: Synthetic oligonucleotide
  Sense strand starting at position 3332 of SEQ ID NO: 1241220
aaaggagauuucuaaagug

SEQ ID NO: 1255837 - RNA, 19 nt, Artificial Sequence
  Description of Artificial Sequence: Synthetic oligonucleotide
  Antisense strand to SEQ ID NO: 1255836
cacuuuagaaaucuccuuu

SEQ ID NO: 1255838 - RNA, 19 nt, Artificial Sequence
  Description of Artificial Sequence: Synthetic oligonucleotide
  Sense strand starting at position 3365 of SEQ ID NO: 1241220
gaaagucaauuuggguuaa

SEQ ID NO: 1255839 - RNA, 19 nt, Artificial Sequence
  Description of Artificial Sequence: Synthetic oligonucleotide
  Antisense strand to SEQ ID NO: 1255838
uuaacccaaauugacuuuc

SEQ ID NO: 1255840 - RNA, 19 nt, Artificial Sequence
  Description of Artificial Sequence: Synthetic oligonucleotide
  Sense strand starting at position 3377 of SEQ ID NO: 1241220
ggguuaaggaacugugaau

SEQ ID NO: 1255841 - RNA, 19 nt, Artificial Sequence
  Description of Artificial Sequence: Synthetic oligonucleotide
  Antisense strand to SEQ ID NO: 1255840
auucacaguuccuuaaccc

SEQ ID NO: 1255842 - RNA, 19 nt, Artificial Sequence
  Description of Artificial Sequence: Synthetic oligonucleotide
  Sense strand starting at position 3497 of SEQ ID NO: 1241220
ugggaucaguggagacaga

SEQ ID NO: 1255843 - RNA, 19 nt, Artificial Sequence
  Description of Artificial Sequence: Synthetic oligonucleotide
  Antisense strand to SEQ ID NO: 1255842
ucugucuccacugauccca

SEQ ID NO: 1255844 - RNA, 19 nt, Artificial Sequence
  Description of Artificial Sequence: Synthetic oligonucleotide
  Sense strand starting at position 3619 of SEQ ID NO: 1241220
gcaggaucucuuucugcgu

SEQ ID NO: 1255845 - RNA, 19 nt, Artificial Sequence
  Description of Artificial Sequence: Synthetic oligonucleotide
  Antisense strand to SEQ ID NO: 1255844
acgcagaaagagauccugc

SEQ ID NO: 1255846 - RNA, 19 nt, Artificial Sequence
  Description of Artificial Sequence: Synthetic oligonucleotide
  Sense strand starting at position 3739 of SEQ ID NO: 1241220
gggugaaguugugcugaaa

SEQ ID NO: 1255847 - RNA, 19 nt, Artificial Sequence
  Description of Artificial Sequence: Synthetic oligonucleotide
  Antisense strand to SEQ ID NO: 1255846
uuucagcacaacuucaccc

SEQ ID NO: 1255848 - RNA, 19 nt, Artificial Sequence
  Description of Artificial Sequence: Synthetic oligonucleotide
  Sense strand starting at position 3823 of SEQ ID NO: 1241220
cagggaaucugucuuuaag

SEQ ID NO: 1255849 - RNA, 19 nt, Artificial Sequence
  Description of Artificial Sequence: Synthetic oligonucleotide
  Antisense strand to SEQ ID NO: 1255848
cuuaaagacagauucccug

SEQ ID NO: 1255850 - RNA, 19 nt, Artificial Sequence
  Description of Artificial Sequence: Synthetic oligonucleotide
  Sense strand starting at position 3825 of SEQ ID NO: 1241220
gggaaucugucuuuaagca

SEQ ID NO: 1255851 - RNA, 19 nt, Artificial Sequence
  Description of Artificial Sequence: Synthetic oligonucleotide
  Antisense strand to SEQ ID NO: 1255850
ugcuuaaagacagauuccc

SEQ ID NO: 1255852 - RNA, 19 nt, Artificial Sequence
  Description of Artificial Sequence: Synthetic oligonucleotide
  Sense strand starting at position 3826 of SEQ ID NO: 1241220
ggaaucugucuuuaagcaa

SEQ ID NO: 1255853 - RNA, 19 nt, Artificial Sequence
  Description of Artificial Sequence: Synthetic oligonucleotide
  Antisense strand to SEQ ID NO: 1255852
uugcuuaaagacagauucc

SEQ ID NO: 1255854 - RNA, 19 nt, Artificial Sequence
  Description of Artificial Sequence: Synthetic oligonucleotide
  Sense strand starting at position 3855 of SEQ ID NO: 1241220
ggauguuagcuacaggguu

SEQ ID NO: 1255855 - RNA, 19 nt, Artificial Sequence
  Description of Artificial Sequence: Synthetic oligonucleotide
  Antisense strand to SEQ ID NO: 1255854
aacccuguagcuaacaucc

SEQ ID NO: 1255856 - RNA, 19 nt, Artificial Sequence
  Description of Artificial Sequence: Synthetic oligonucleotide
  Sense strand starting at position 3890 of SEQ ID NO: 1241220
ugcaaagaugucugauccu

SEQ ID NO: 1255857 - RNA, 19 nt, Artificial Sequence
  Description of Artificial Sequence: Synthetic oligonucleotide
  Antisense strand to SEQ ID NO: 1255856
aggaucagacaucuuugca

SEQ ID NO: 1255858 - RNA, 19 nt, Artificial Sequence
  Description of Artificial Sequence: Synthetic oligonucleotide
  Sense strand starting at position 3897 of SEQ ID NO: 1241220
augucugauccugggaaug

SEQ ID NO: 1255859 - RNA, 19 nt, Artificial Sequence
  Description of Artificial Sequence: Synthetic oligonucleotide
  Antisense strand to SEQ ID NO: 1255858
cauucccaggaucagacau

SEQ ID NO: 1255860 - RNA, 19 nt, Artificial Sequence
  Description of Artificial Sequence: Synthetic oligonucleotide
  Sense strand starting at position 3973 of SEQ ID NO: 1241220
ggacuaugaucaccaucga

SEQ ID NO: 1255861 - RNA, 19 nt, Artificial Sequence
  Description of Artificial Sequence: Synthetic oligonucleotide
  Antisense strand to SEQ ID NO: 1255860
ucgauggugaucauagucc

SEQ ID NO: 1255862 - RNA, 19 nt, Artificial Sequence
  Description of Artificial Sequence: Synthetic oligonucleotide
  Sense strand starting at position 3977 of SEQ ID NO: 1241220
uaugaucaccaucgauuga

SEQ ID NO: 1255863 - RNA, 19 nt, Artificial Sequence
  Description of Artificial Sequence: Synthetic oligonucleotide
  Antisense strand to SEQ ID NO: 1255862
ucaaucgauggugaucaua

SEQ ID NO: 1255864 - RNA, 19 nt, Artificial Sequence
  Description of Artificial Sequence: Synthetic oligonucleotide
  Sense strand starting at position 195 of SEQ ID NO: 1241221
uguugucaccuuuaguaac

SEQ ID NO: 1255865 - RNA, 19 nt, Artificial Sequence
  Description of Artificial Sequence: Synthetic oligonucleotide
  Antisense strand to SEQ ID NO: 1255864
guuacuaaaggugacaaca

SEQ ID NO: 1255866 - RNA, 19 nt, Artificial Sequence
  Description of Artificial Sequence: Synthetic oligonucleotide
  Sense strand starting at position 197 of SEQ ID NO: 1241221
uugucaccuuuaguaacau

SEQ ID NO: 1255867 - RNA, 19 nt, Artificial Sequence
  Description of Artificial Sequence: Synthetic oligonucleotide
  Antisense strand to SEQ ID NO: 1255866
auguuacuaaaggugacaa

SEQ ID NO: 1255868 - RNA, 19 nt, Artificial Sequence
  Description of Artificial Sequence: Synthetic oligonucleotide
  Sense strand starting at position 212 of SEQ ID NO: 1241221
acaugauaucguggugaag

SEQ ID NO: 1255869 - RNA, 19 nt, Artificial Sequence
  Description of Artificial Sequence: Synthetic oligonucleotide
  Antisense strand to SEQ ID NO: 1255868
cuucaccacgauaucaugu

SEQ ID NO: 1255870 - RNA, 19 nt, Artificial Sequence
  Description of Artificial Sequence: Synthetic oligonucleotide
  Sense strand starting at position 215 of SEQ ID NO: 1241221
ugauaucguggugaagagu

SEQ ID NO: 1255871 - RNA, 19 nt, Artificial Sequence
  Description of Artificial Sequence: Synthetic oligonucleotide
  Antisense strand to SEQ ID NO: 1255870
acucuucaccacgauauca

SEQ ID NO: 1255872 - RNA, 19 nt, Artificial Sequence
  Description of Artificial Sequence: Synthetic oligonucleotide
  Sense strand starting at position 224 of SEQ ID NO: 1241221
ggugaagaguagaaguguu

SEQ ID NO: 1255873 - RNA, 19 nt, Artificial Sequence
  Description of Artificial Sequence: Synthetic oligonucleotide
  Antisense strand to SEQ ID NO: 1255872
aacacuucuacucuucacc

SEQ ID NO: 1255874 - RNA, 19 nt, Artificial Sequence
  Description of Artificial Sequence: Synthetic oligonucleotide
  Sense strand starting at position 250 of SEQ ID NO: 1241221
ggaugacggaauugcuuua

SEQ ID NO: 1255875 - RNA, 19 nt, Artificial Sequence
  Description of Artificial Sequence: Synthetic oligonucleotide
  Antisense strand to SEQ ID NO: 1255874
uaaagcaauuccgucaucc

SEQ ID NO: 1255876 - RNA, 19 nt, Artificial Sequence
  Description of Artificial Sequence: Synthetic oligonucleotide
  Sense strand starting at position 255 of SEQ ID NO: 1241221
acggaauugcuuuauaacc

SEQ ID NO: 1255877 - RNA, 19 nt, Artificial Sequence
  Description of Artificial Sequence: Synthetic oligonucleotide
  Antisense strand to SEQ ID NO: 1255876
gguuauaaagcaauuccgu

SEQ ID NO: 1255878 - RNA, 19 nt, Artificial Sequence
  Description of Artificial Sequence: Synthetic oligonucleotide
  Sense strand starting at position 421 of SEQ ID NO: 1241221
aggacuaaacucugucacu

SEQ ID NO: 1255879 - RNA, 19 nt, Artificial Sequence
  Description of Artificial Sequence: Synthetic oligonucleotide
  Antisense strand to SEQ ID NO: 1255878
agugacagaguuuaguccu

SEQ ID NO: 1255880 - RNA, 19 nt, Artificial Sequence
  Description of Artificial Sequence: Synthetic oligonucleotide
  Sense strand starting at position 422 of SEQ ID NO: 1241221
ggacuaaacucugucacug

SEQ ID NO: 1255881 - RNA, 19 nt, Artificial Sequence
  Description of Artificial Sequence: Synthetic oligonucleotide
  Antisense strand to SEQ ID NO: 1255880
cagugacagaguuuagucc

SEQ ID NO: 1255882 - RNA, 19 nt, Artificial Sequence
  Description of Artificial Sequence: Synthetic oligonucleotide
  Sense strand starting at position 512 of SEQ ID NO: 1241221
gaaagagcuuucucaggaa

SEQ ID NO: 1255883 - RNA, 19 nt, Artificial Sequence
  Description of Artificial Sequence: Synthetic oligonucleotide
  Antisense strand to SEQ ID NO: 1255882
uuccugagaaagcucuuuc

SEQ ID NO: 1255884 - RNA, 19 nt, Artificial Sequence
  Description of Artificial Sequence: Synthetic oligonucleotide
  Sense strand starting at position 657 of SEQ ID NO: 1241221
auaucaguuaaacgggaaa

SEQ ID NO: 1255885 - RNA, 19 nt, Artificial Sequence
  Description of Artificial Sequence: Synthetic oligonucleotide
  Antisense strand to SEQ ID NO: 1255884
uuucccguuuaacugauau

SEQ ID NO: 1255886 - RNA, 19 nt, Artificial Sequence
  Description of Artificial Sequence: Synthetic oligonucleotide
  Sense strand starting at position 659 of SEQ ID NO: 1241221
aucaguuaaacgggaaagu

SEQ ID NO: 1255887 - RNA, 19 nt, Artificial Sequence
  Description of Artificial Sequence: Synthetic oligonucleotide
  Antisense strand to SEQ ID NO: 1255886
acuuucccguuuaacugau

SEQ ID NO: 1255888 - RNA, 19 nt, Artificial Sequence
  Description of Artificial Sequence: Synthetic oligonucleotide
  Sense strand starting at position 743 of SEQ ID NO: 1241221
agaggccaguguucuugaa

SEQ ID NO: 1255889 - RNA, 19 nt, Artificial Sequence
  Description of Artificial Sequence: Synthetic oligonucleotide
  Antisense strand to SEQ ID NO: 1255888
uucaagaacacuggccucu

SEQ ID NO: 1255890 - RNA, 19 nt, Artificial Sequence
  Description of Artificial Sequence: Synthetic oligonucleotide
  Sense strand starting at position 1022 of SEQ ID NO: 1241221
gguguauuccuggaugcua

SEQ ID NO: 1255891 - RNA, 19 nt, Artificial Sequence
  Description of Artificial Sequence: Synthetic oligonucleotide
  Antisense strand to SEQ ID NO: 1255890
uagcauccaggaauacacc

SEQ ID NO: 1255892 - RNA, 19 nt, Artificial Sequence
  Description of Artificial Sequence: Synthetic oligonucleotide
  Sense strand starting at position 1318 of SEQ ID NO: 1241221
gagcuaggcuucccuggaa

SEQ ID NO: 1255893 - RNA, 19 nt, Artificial Sequence
  Description of Artificial Sequence: Synthetic oligonucleotide
  Antisense strand to SEQ ID NO: 1255892
uuccagggaagccuagcuc

SEQ ID NO: 1255894 - RNA, 19 nt, Artificial Sequence
  Description of Artificial Sequence: Synthetic oligonucleotide
  Sense strand starting at position 1321 of SEQ ID NO: 1241221
cuaggcuucccuggaaucu

SEQ ID NO: 1255895 - RNA, 19 nt, Artificial Sequence
  Description of Artificial Sequence: Synthetic oligonucleotide
  Antisense strand to SEQ ID NO: 1255894
agauuccagggaagccuag

SEQ ID NO: 1255896 - RNA, 19 nt, Artificial Sequence
  Description of Artificial Sequence: Synthetic oligonucleotide
  Sense strand starting at position 1559 of SEQ ID NO: 1241221
ucuugagcauggucacaga

SEQ ID NO: 1255897 - RNA, 19 nt, Artificial Sequence
  Description of Artificial Sequence: Synthetic oligonucleotide
  Antisense strand to SEQ ID NO: 1255896
ucugugaccaugcucaaga

SEQ ID NO: 1255898 - RNA, 19 nt, Artificial Sequence
  Description of Artificial Sequence: Synthetic oligonucleotide
  Sense strand starting at position 1603 of SEQ ID NO: 1241221
agcccugaugcucagaaga

SEQ ID NO: 1255899 - RNA, 19 nt, Artificial Sequence
  Description of Artificial Sequence: Synthetic oligonucleotide
  Antisense strand to SEQ ID NO: 1255898
ucuucugagcaucagggcu

SEQ ID NO: 1255900 - RNA, 19 nt, Artificial Sequence
  Description of Artificial Sequence: Synthetic oligonucleotide
  Sense strand starting at position 1719 of SEQ ID NO: 1241221
uguccuaggcuguagagaa

SEQ ID NO: 1255901 - RNA, 19 nt, Artificial Sequence
  Description of Artificial Sequence: Synthetic oligonucleotide
  Antisense strand to SEQ ID NO: 1255900
uucucuacagccuaggaca

SEQ ID NO: 1255902 - RNA, 19 nt, Artificial Sequence
  Description of Artificial Sequence: Synthetic oligonucleotide
  Sense strand starting at position 1824 of SEQ ID NO: 1241221
cuguuuaggagucagcuau

SEQ ID NO: 1255903 - RNA, 19 nt, Artificial Sequence
  Description of Artificial Sequence: Synthetic oligonucleotide
  Antisense strand to SEQ ID NO: 1255902
auagcugacuccuaaacag

SEQ ID NO: 1255904 - RNA, 19 nt, Artificial Sequence
  Description of Artificial Sequence: Synthetic oligonucleotide
  Sense strand starting at position 2109 of SEQ ID NO: 1241221
ggcuguuucugaucagaag

SEQ ID NO: 1255905 - RNA, 19 nt, Artificial Sequence
  Description of Artificial Sequence: Synthetic oligonucleotide
  Antisense strand to SEQ ID NO: 1255904
cuucugaucagaaacagcc

SEQ ID NO: 1255906 - RNA, 19 nt, Artificial Sequence
  Description of Artificial Sequence: Synthetic oligonucleotide
  Sense strand starting at position 2110 of SEQ ID NO: 1241221
gcuguuucugaucagaagu

SEQ ID NO: 1255907 - RNA, 19 nt, Artificial Sequence
  Description of Artificial Sequence: Synthetic oligonucleotide
  Antisense strand to SEQ ID NO: 1255906
acuucugaucagaaacagc

SEQ ID NO: 1255908 - RNA, 19 nt, Artificial Sequence
  Description of Artificial Sequence: Synthetic oligonucleotide
  Sense strand starting at position 2324 of SEQ ID NO: 1241221
ggcuauguuccauagucag

SEQ ID NO: 1255909 - RNA, 19 nt, Artificial Sequence
  Description of Artificial Sequence: Synthetic oligonucleotide
  Antisense strand to SEQ ID NO: 1255908
cugacuauggaacauagcc

SEQ ID NO: 1255910 - RNA, 19 nt, Artificial Sequence
  Description of Artificial Sequence: Synthetic oligonucleotide
  Sense strand starting at position 2338 of SEQ ID NO: 1241221
gucagaaaugcauauugca

SEQ ID NO: 1255911 - RNA, 19 nt, Artificial Sequence
  Description of Artificial Sequence: Synthetic oligonucleotide
  Antisense strand to SEQ ID NO: 1255910
ugcaauaugcauuucugac

SEQ ID NO: 1255912 - RNA, 19 nt, Artificial Sequence
  Description of Artificial Sequence: Synthetic oligonucleotide
  Sense strand starting at position 2385 of SEQ ID NO: 1241221
gugaguauguaagcacaaa

SEQ ID NO: 1255913 - RNA, 19 nt, Artificial Sequence
  Description of Artificial Sequence: Synthetic oligonucleotide
  Antisense strand to SEQ ID NO: 1255912
uuugugcuuacauacucac

SEQ ID NO: 1255914 - RNA, 19 nt, Artificial Sequence
  Description of Artificial Sequence: Synthetic oligonucleotide
  Sense strand starting at position 2663 of SEQ ID NO: 1241221
agcaauugggauuggaauu

SEQ ID NO: 1255915 - RNA, 19 nt, Artificial Sequence
  Description of Artificial Sequence: Synthetic oligonucleotide
  Antisense strand to SEQ ID NO: 1255914
aauuccaaucccaauugcu

SEQ ID NO: 1255916 - RNA, 19 nt, Artificial Sequence
  Description of Artificial Sequence: Synthetic oligonucleotide
  Sense strand starting at position 2664 of SEQ ID NO: 1241221
gcaauugggauuggaauua

SEQ ID NO: 1255917 - RNA, 19 nt, Artificial Sequence
  Description of Artificial Sequence: Synthetic oligonucleotide
  Antisense strand to SEQ ID NO: 1255916
uaauuccaaucccaauugc

SEQ ID NO: 1255918 - RNA, 19 nt, Artificial Sequence
  Description of Artificial Sequence: Synthetic oligonucleotide
  Sense strand starting at position 2693 of SEQ ID NO: 1241221
agagucuagguguaucaua

SEQ ID NO: 1255919 - RNA, 19 nt, Artificial Sequence
  Description of Artificial Sequence: Synthetic oligonucleotide
  Antisense strand to SEQ ID NO: 1255918
uaugauacaccuagacucu

SEQ ID NO: 1255920 - RNA, 19 nt, Artificial Sequence
  Description of Artificial Sequence: Synthetic oligonucleotide
  Sense strand starting at position 2700 of SEQ ID NO: 1241221
agguguaucauauauuguc

SEQ ID NO: 1255921 - RNA, 19 nt, Artificial Sequence
  Description of Artificial Sequence: Synthetic oligonucleotide
  Antisense strand to SEQ ID NO: 1255920
gacaauauaugauacaccu

SEQ ID NO: 1255922 - RNA, 19 nt, Artificial Sequence
  Description of Artificial Sequence: Synthetic oligonucleotide
  Sense strand starting at position 2783 of SEQ ID NO: 1241221
uuaucaugucaugauaguc

SEQ ID NO: 1255923 - RNA, 19 nt, Artificial Sequence
  Description of Artificial Sequence: Synthetic oligonucleotide
  Antisense strand to SEQ ID NO: 1255922
gacuaucaugacaugauaa

SEQ ID NO: 1255924 - RNA, 19 nt, Artificial Sequence
  Description of Artificial Sequence: Synthetic oligonucleotide
  Sense strand starting at position 2876 of SEQ ID NO: 1241221
gcucuagcacuagagagaa

SEQ ID NO: 1255925 - RNA, 19 nt, Artificial Sequence
  Description of Artificial Sequence: Synthetic oligonucleotide
  Antisense strand to SEQ ID NO: 1255924
uucucucuagugcuagagc

SEQ ID NO: 1255926 - RNA, 19 nt, Artificial Sequence
  Description of Artificial Sequence: Synthetic oligonucleotide
  Sense strand starting at position 3178 of SEQ ID NO: 1241221
cuuggagauuuauaaggca

SEQ ID NO: 1255927 - RNA, 19 nt, Artificial Sequence
  Description of Artificial Sequence: Synthetic oligonucleotide
  Antisense strand to SEQ ID NO: 1255926
ugccuuauaaaucuccaag

SEQ ID NO: 1255928 - RNA, 19 nt, Artificial Sequence
  Description of Artificial Sequence: Synthetic oligonucleotide
  Sense strand starting at position 3213 of SEQ ID NO: 1241221
ggaugaguaguguauaagu

SEQ ID NO: 1255929 - RNA, 19 nt, Artificial Sequence
  Description of Artificial Sequence: Synthetic oligonucleotide
  Antisense strand to SEQ ID NO: 1255928
acuuauacacuacucaucc

SEQ ID NO: 1255930 - RNA, 19 nt, Artificial Sequence
  Description of Artificial Sequence: Synthetic oligonucleotide
  Sense strand starting at position 3289 of SEQ ID NO: 1241221
ugauccacuccuuaguaua

SEQ ID NO: 1255931 - RNA, 19 nt, Artificial Sequence
  Description of Artificial Sequence: Synthetic oligonucleotide
  Antisense strand to SEQ ID NO: 1255930
uauacuaaggaguggauca

SEQ ID NO: 1255932 - RNA, 19 nt, Artificial Sequence
  Description of Artificial Sequence: Synthetic oligonucleotide
  Sense strand starting at position 3528 of SEQ ID NO: 1241221
uuaguuaaguauguccaaa

SEQ ID NO: 1255933 - RNA, 19 nt, Artificial Sequence
  Description of Artificial Sequence: Synthetic oligonucleotide
  Antisense strand to SEQ ID NO: 1255932
uuuggacauacuuaacuaa

SEQ ID NO: 1255934 - RNA, 19 nt, Artificial Sequence
  Description of Artificial Sequence: Synthetic oligonucleotide
  Sense strand starting at position 3530 of SEQ ID NO: 1241221
aguuaaguauguccaaaua

SEQ ID NO: 1255935 - RNA, 19 nt, Artificial Sequence
  Description of Artificial Sequence: Synthetic oligonucleotide
  Antisense strand to SEQ ID NO: 1255934
uauuuggacauacuuaacu

SEQ ID NO: 1255936 - RNA, 19 nt, Artificial Sequence
  Description of Artificial Sequence: Synthetic oligonucleotide
  Sense strand starting at position 3692 of SEQ ID NO: 1241221
ggagaacucuugucuugug

SEQ ID NO: 1255937 - RNA, 19 nt, Artificial Sequence
  Description of Artificial Sequence: Synthetic oligonucleotide
  Antisense strand to SEQ ID NO: 1255936
cacaagacaagaguucucc

SEQ ID NO: 1255938 - RNA, 19 nt, Artificial Sequence
  Description of Artificial Sequence: Synthetic oligonucleotide
  Sense strand starting at position 3710 of SEQ ID NO: 1241221
ggucuuacaucaguuagac

SEQ ID NO: 1255939 - RNA, 19 nt, Artificial Sequence
  Description of Artificial Sequence: Synthetic oligonucleotide
  Antisense strand to SEQ ID NO: 1255938
gucuaacugauguaagacc

SEQ ID NO: 1255940 - RNA, 19 nt, Artificial Sequence
  Description of Artificial Sequence: Synthetic oligonucleotide
  Sense strand starting at position 3821 of SEQ ID NO: 1241221
gcuccacagcaucaagauu

SEQ ID NO: 1255941 - RNA, 19 nt, Artificial Sequence
  Description of Artificial Sequence: Synthetic oligonucleotide
  Antisense strand to SEQ ID NO: 1255940
aaucuugaugcuguggagc

SEQ ID NO: 1255942 - RNA, 19 nt, Artificial Sequence
  Description of Artificial Sequence: Synthetic oligonucleotide
  Sense strand starting at position 3943 of SEQ ID NO: 1241221
gcgcuaucugcucacauuu

SEQ ID NO: 1255943 - RNA, 19 nt, Artificial Sequence
  Description of Artificial Sequence: Synthetic oligonucleotide
  Antisense strand to SEQ ID NO: 1255942
aaaugugagcagauagcgc

SEQ ID NO: 1255944 - RNA, 19 nt, Artificial Sequence
  Description of Artificial Sequence: Synthetic oligonucleotide
  Sense strand starting at position 130 of SEQ ID NO: 1241222
uggcccugcagcugugaaa

SEQ ID NO: 1255945 - RNA, 19 nt, Artificial Sequence
  Description of Artificial Sequence: Synthetic oligonucleotide
  Antisense strand to SEQ ID NO: 1255944
uuucacagcugcagggcca

SEQ ID NO: 1255946 - RNA, 19 nt, Artificial Sequence
  Description of Artificial Sequence: Synthetic oligonucleotide
  Sense strand starting at position 141 of SEQ ID NO: 1241222
cugugaaaucagugugagu

SEQ ID NO: 1255947 - RNA, 19 nt, Artificial Sequence
  Description of Artificial Sequence: Synthetic oligonucleotide
  Antisense strand to SEQ ID NO: 1255946
acucacacugauuucacag

SEQ ID NO: 1255948 - RNA, 19 nt, Artificial Sequence
  Description of Artificial Sequence: Synthetic oligonucleotide
  Sense strand starting at position 143 of SEQ ID NO: 1241222
gugaaaucagugugaguca

SEQ ID NO: 1255949 - RNA, 19 nt, Artificial Sequence
  Description of Artificial Sequence: Synthetic oligonucleotide
  Antisense strand to SEQ ID NO: 1255948
ugacucacacugauuucac

SEQ ID NO: 1255950 - RNA, 19 nt, Artificial Sequence
  Description of Artificial Sequence: Synthetic oligonucleotide
  Sense strand starting at position 144 of SEQ ID NO: 1241222
ugaaaucagugugagucaa

SEQ ID NO: 1255951 - RNA, 19 nt, Artificial Sequence
  Description of Artificial Sequence: Synthetic oligonucleotide
  Antisense strand to SEQ ID NO: 1255950
uugacucacacugauuuca

SEQ ID NO: 1255952 - RNA, 19 nt, Artificial Sequence
  Description of Artificial Sequence: Synthetic oligonucleotide
  Sense strand starting at position 146 of SEQ ID NO: 1241222
aaaucagugugagucaaag

SEQ ID NO: 1255953 - RNA, 19 nt, Artificial Sequence
  Description of Artificial Sequence: Synthetic oligonucleotide
  Antisense strand to SEQ ID NO: 1255952
cuuugacucacacugauuu

SEQ ID NO: 1255954 - RNA, 19 nt, Artificial Sequence
  Description of Artificial Sequence: Synthetic oligonucleotide
  Sense strand starting at position 202 of SEQ ID NO: 1241222
ccagcugugguguggaaau

SEQ ID NO: 1255955 - RNA, 19 nt, Artificial Sequence
  Description of Artificial Sequence: Synthetic oligonucleotide
  Antisense strand to SEQ ID NO: 1255954
auuuccacaccacagcugg

SEQ ID NO: 1255956 - RNA, 19 nt, Artificial Sequence
  Description of Artificial Sequence: Synthetic oligonucleotide
  Sense strand starting at position 248 of SEQ ID NO: 1241222
augcaucauuuagaggaga

SEQ ID NO: 1255957 - RNA, 19 nt, Artificial Sequence
  Description of Artificial Sequence: Synthetic oligonucleotide
  Antisense strand to SEQ ID NO: 1255956
ucuccucuaaaugaugcau

SEQ ID NO: 1255958 - RNA, 19 nt, Artificial Sequence
  Description of Artificial Sequence: Synthetic oligonucleotide
  Sense strand starting at position 720 of SEQ ID NO: 1241222
ggagcacuaucccacagua

SEQ ID NO: 1255959 - RNA, 19 nt, Artificial Sequence
  Description of Artificial Sequence: Synthetic oligonucleotide
  Antisense strand to SEQ ID NO: 1255958
uacugugggauagugcucc

SEQ ID NO: 1255960 - RNA, 19 nt, Artificial Sequence
  Description of Artificial Sequence: Synthetic oligonucleotide
  Sense strand starting at position 769 of SEQ ID NO: 1241222
uggaguugugcccacagag

SEQ ID NO: 1255961 - RNA, 19 nt, Artificial Sequence
  Description of Artificial Sequence: Synthetic oligonucleotide
  Antisense strand to SEQ ID NO: 1255960
cucugugggcacaacucca

SEQ ID NO: 1255962 - RNA, 19 nt, Artificial Sequence
  Description of Artificial Sequence: Synthetic oligonucleotide
  Sense strand starting at position 882 of SEQ ID NO: 1241222
uugauuccaugccaagaga

SEQ ID NO: 1255963 - RNA, 19 nt, Artificial Sequence
  Description of Artificial Sequence: Synthetic oligonucleotide
  Antisense strand to SEQ ID NO: 1255962
ucucuuggcauggaaucaa

SEQ ID NO: 1255964 - RNA, 19 nt, Artificial Sequence
  Description of Artificial Sequence: Synthetic oligonucleotide
  Sense strand starting at position 991 of SEQ ID NO: 1241222
uggucuugcuaaguaacca

SEQ ID NO: 1255965 - RNA, 19 nt, Artificial Sequence
  Description of Artificial Sequence: Synthetic oligonucleotide
  Antisense strand to SEQ ID NO: 1255964
ugguuacuuagcaagacca

SEQ ID NO: 1255966 - RNA, 19 nt, Artificial Sequence
  Description of Artificial Sequence: Synthetic oligonucleotide
  Sense strand starting at position 1017 of SEQ ID NO: 1241222
auccuuuccugagaagaga

SEQ ID NO: 1255967 - RNA, 19 nt, Artificial Sequence
  Description of Artificial Sequence: Synthetic oligonucleotide
  Antisense strand to SEQ ID NO: 1255966
ucucuucucaggaaaggau

SEQ ID NO: 1255968 - RNA, 19 nt, Artificial Sequence
  Description of Artificial Sequence: Synthetic oligonucleotide
  Sense strand starting at position 1030 of SEQ ID NO: 1241222
aagagauguuucugggcag

SEQ ID NO: 1255969 - RNA, 19 nt, Artificial Sequence
  Description of Artificial Sequence: Synthetic oligonucleotide
  Antisense strand to SEQ ID NO: 1255968
cugcccagaaacaucucuu

SEQ ID NO: 1255970 - RNA, 19 nt, Artificial Sequence
  Description of Artificial Sequence: Synthetic oligonucleotide
  Sense strand starting at position 1034 of SEQ ID NO: 1241222
gauguuucugggcagcaga

SEQ ID NO: 1255971 - RNA, 19 nt, Artificial Sequence
  Description of Artificial Sequence: Synthetic oligonucleotide
  Antisense strand to SEQ ID NO: 1255970
ucugcugcccagaaacauc

SEQ ID NO: 1255972 - RNA, 19 nt, Artificial Sequence
  Description of Artificial Sequence: Synthetic oligonucleotide
  Sense strand starting at position 1096 of SEQ ID NO: 1241222
guuagacuucuuggacgug

SEQ ID NO: 1255973 - RNA, 19 nt, Artificial Sequence
  Description of Artificial Sequence: Synthetic oligonucleotide
  Antisense strand to SEQ ID NO: 1255972
cacguccaagaagucuaac

SEQ ID NO: 1255974 - RNA, 19 nt, Artificial Sequence
  Description of Artificial Sequence: Synthetic oligonucleotide
  Sense strand starting at position 1115 of SEQ ID NO: 1241222
cugagaaguggccauguua

SEQ ID NO: 1255975 - RNA, 19 nt, Artificial Sequence
  Description of Artificial Sequence: Synthetic oligonucleotide
  Antisense strand to SEQ ID NO: 1255974
uaacauggccacuucucag

SEQ ID NO: 1255976 - RNA, 19 nt, Artificial Sequence
  Description of Artificial Sequence: Synthetic oligonucleotide
  Sense strand starting at position 1127 of SEQ ID NO: 1241222
cauguuagaggcugucauu

SEQ ID NO: 1255977 - RNA, 19 nt, Artificial Sequence
  Description of Artificial Sequence: Synthetic oligonucleotide
  Antisense strand to SEQ ID NO: 1255976
aaugacagccucuaacaug

SEQ ID NO: 1255978 - RNA, 19 nt, Artificial Sequence
  Description of Artificial Sequence: Synthetic oligonucleotide
  Sense strand starting at position 1152 of SEQ ID NO: 1241222
gucccaucccuaugucuca

SEQ ID NO: 1255979 - RNA, 19 nt, Artificial Sequence
  Description of Artificial Sequence: Synthetic oligonucleotide
  Antisense strand to SEQ ID NO: 1255978
ugagacauagggaugggac

SEQ ID NO: 1255980 - RNA, 19 nt, Artificial Sequence
  Description of Artificial Sequence: Synthetic oligonucleotide
  Sense strand starting at position 1227 of SEQ ID NO: 1241222
acugaaaccugcuguaaau

SEQ ID NO: 1255981 - RNA, 19 nt, Artificial Sequence
  Description of Artificial Sequence: Synthetic oligonucleotide
  Antisense strand to SEQ ID NO: 1255980
auuuacagcagguuucagu

SEQ ID NO: 1255982 - RNA, 19 nt, Artificial Sequence
  Description of Artificial Sequence: Synthetic oligonucleotide
  Sense strand starting at position 1229 of SEQ ID NO: 1241222
ugaaaccugcuguaaaugu

SEQ ID NO: 1255983 - RNA, 19 nt, Artificial Sequence
  Description of Artificial Sequence: Synthetic oligonucleotide
  Antisense strand to SEQ ID NO: 1255982
acauuuacagcagguuuca

SEQ ID NO: 1255984 - RNA, 19 nt, Artificial Sequence
  Description of Artificial Sequence: Synthetic oligonucleotide
  Sense strand starting at position 1240 of SEQ ID NO: 1241222
guaaaugucuccgggugga

SEQ ID NO: 1255985 - RNA, 19 nt, Artificial Sequence
  Description of Artificial Sequence: Synthetic oligonucleotide
  Antisense strand to SEQ ID NO: 1255984
uccacccggagacauuuac

SEQ ID NO: 1255986 - RNA, 19 nt, Artificial Sequence
  Description of Artificial Sequence: Synthetic oligonucleotide
  Sense strand starting at position 2364 of SEQ ID NO: 1241222
gcgagauguucaggcacca

SEQ ID NO: 1255987 - RNA, 19 nt, Artificial Sequence
  Description of Artificial Sequence: Synthetic oligonucleotide
  Antisense strand to SEQ ID NO: 1255986
uggugccugaacaucucgc

SEQ ID NO: 1255988 - RNA, 19 nt, Artificial Sequence
  Description of Artificial Sequence: Synthetic oligonucleotide
  Sense strand starting at position 3200 of SEQ ID NO: 1241222
uugucaggccuuggaaaga

SEQ ID NO: 1255989 - RNA, 19 nt, Artificial Sequence
  Description of Artificial Sequence: Synthetic oligonucleotide
  Antisense strand to SEQ ID NO: 1255988
ucuuuccaaggccugacaa

SEQ ID NO: 1255990 - RNA, 19 nt, Artificial Sequence
  Description of Artificial Sequence: Synthetic oligonucleotide
  Sense strand starting at position 3291 of SEQ ID NO: 1241222
ccucuugucucaguucuga

SEQ ID NO: 1255991 - RNA, 19 nt, Artificial Sequence
  Description of Artificial Sequence: Synthetic oligonucleotide
  Antisense strand to SEQ ID NO: 1255990
ucagaacugagacaagagg

SEQ ID NO: 1255992 - RNA, 19 nt, Artificial Sequence
  Description of Artificial Sequence: Synthetic oligonucleotide
  Sense strand starting at position 3308 of SEQ ID NO: 1241222
gaacccacuugcuguguaa

SEQ ID NO: 1255993 - RNA, 19 nt, Artificial Sequence
  Description of Artificial Sequence: Synthetic oligonucleotide
  Antisense strand to SEQ ID NO: 1255992
uuacacagcaaguggguuc

SEQ ID NO: 1255994 - RNA, 19 nt, Artificial Sequence
  Description of Artificial Sequence: Synthetic oligonucleotide
  Sense strand starting at position 3312 of SEQ ID NO: 1241222
ccacuugcuguguaacuuu

SEQ ID NO: 1255995 - RNA, 19 nt, Artificial Sequence
  Description of Artificial Sequence: Synthetic oligonucleotide
  Antisense strand to SEQ ID NO: 1255994
aaaguuacacagcaagugg

SEQ ID NO: 1255996 - RNA, 19 nt, Artificial Sequence
  Description of Artificial Sequence: Synthetic oligonucleotide
  Sense strand starting at position 3319 of SEQ ID NO: 1241222
cuguguaacuuugaacaag

SEQ ID NO: 1255997 - RNA, 19 nt, Artificial Sequence
  Description of Artificial Sequence: Synthetic oligonucleotide
  Antisense strand to SEQ ID NO: 1255996
cuuguucaaaguuacacag

SEQ ID NO: 1255998 - RNA, 19 nt, Artificial Sequence
  Description of Artificial Sequence: Synthetic oligonucleotide
  Sense strand starting at position 3387 of SEQ ID NO: 1241222
gugacagagugcuuuccaa

SEQ ID NO: 1255999 - RNA, 19 nt, Artificial Sequence
  Description of Artificial Sequence: Synthetic oligonucleotide
  Antisense strand to SEQ ID NO: 1255998
uuggaaagcacucugucac

SEQ ID NO: 1256000 - RNA, 19 nt, Artificial Sequence
  Description of Artificial Sequence: Synthetic oligonucleotide
  Sense strand starting at position 3478 of SEQ ID NO: 1241222
gcuucuaucugacucagca

SEQ ID NO: 1256001 - RNA, 19 nt, Artificial Sequence
  Description of Artificial Sequence: Synthetic oligonucleotide
  Antisense strand to SEQ ID NO: 1256000
ugcugagucagauagaagc

SEQ ID NO: 1256002 - RNA, 19 nt, Artificial Sequence
  Description of Artificial Sequence: Synthetic oligonucleotide
  Sense strand starting at position 3494 of SEQ ID NO: 1241222
gcaugagguuucuuauugu

SEQ ID NO: 1256003 - RNA, 19 nt, Artificial Sequence
  Description of Artificial Sequence: Synthetic oligonucleotide
  Antisense strand to SEQ ID NO: 1256002
acaauaagaaaccucaugc

SEQ ID NO: 1256004 - RNA, 19 nt, Artificial Sequence
  Description of Artificial Sequence: Synthetic oligonucleotide
  Sense strand starting at position 3497 of SEQ ID NO: 1241222
ugagguuucuuauuguaau

SEQ ID NO: 1256005 - RNA, 19 nt, Artificial Sequence
  Description of Artificial Sequence: Synthetic oligonucleotide
  Antisense strand to SEQ ID NO: 1256004
auuacaauaagaaaccuca

SEQ ID NO: 1256006 - RNA, 19 nt, Artificial Sequence
  Description of Artificial Sequence: Synthetic oligonucleotide
  Sense strand starting at position 3498 of SEQ ID NO: 1241222
gagguuucuuauuguaaug

SEQ ID NO: 1256007 - RNA, 19 nt, Artificial Sequence
  Description of Artificial Sequence: Synthetic oligonucleotide
  Antisense strand to SEQ ID NO: 1256006
cauuacaauaagaaaccuc

SEQ ID NO: 1256008 - RNA, 19 nt, Artificial Sequence
  Description of Artificial Sequence: Synthetic oligonucleotide
  Sense strand starting at position 3500 of SEQ ID NO: 1241222
gguuucuuauuguaaugau

SEQ ID NO: 1256009 - RNA, 19 nt, Artificial Sequence
  Description of Artificial Sequence: Synthetic oligonucleotide
  Antisense strand to SEQ ID NO: 1256008
aucauuacaauaagaaacc

SEQ ID NO: 1256010 - RNA, 19 nt, Artificial Sequence
  Description of Artificial Sequence: Synthetic oligonucleotide
  Sense strand starting at position 3641 of SEQ ID NO: 1241222
gagcgauucuccugaugcc

SEQ ID NO: 1256011 - RNA, 19 nt, Artificial Sequence
  Description of Artificial Sequence: Synthetic oligonucleotide
  Antisense strand to SEQ ID NO: 1256010
ggcaucaggagaaucgcuc

SEQ ID NO: 1256012 - RNA, 19 nt, Artificial Sequence
  Description of Artificial Sequence: Synthetic oligonucleotide
  Sense strand starting at position 3894 of SEQ ID NO: 1241222
gaguauaaagagugaaagu

SEQ ID NO: 1256013 - RNA, 19 nt, Artificial Sequence
  Description of Artificial Sequence: Synthetic oligonucleotide
  Antisense strand to SEQ ID NO: 1256012
acuuucacucuuuauacuc

SEQ ID NO: 1256014 - RNA, 19 nt, Artificial Sequence
  Description of Artificial Sequence: Synthetic oligonucleotide
  Sense strand starting at position 3910 of SEQ ID NO: 1241222
aguuaauagucucucccua

SEQ ID NO: 1256015 - RNA, 19 nt, Artificial Sequence
  Description of Artificial Sequence: Synthetic oligonucleotide
  Antisense strand to SEQ ID NO: 1256014
uagggagagacuauuaacu

SEQ ID NO: 1256016 - RNA, 19 nt, Artificial Sequence
  Description of Artificial Sequence: Synthetic oligonucleotide
  Sense strand starting at position 3944 of SEQ ID NO: 1241222
agaagaagcuauccucaac

SEQ ID NO: 1256017 - RNA, 19 nt, Artificial Sequence
  Description of Artificial Sequence: Synthetic oligonucleotide
  Antisense strand to SEQ ID NO: 1256016
guugaggauagcuucuucu

SEQ ID NO: 1256018 - RNA, 19 nt, Artificial Sequence
  Description of Artificial Sequence: Synthetic oligonucleotide
  Sense strand starting at position 457 of SEQ ID NO: 1241223
ugagcuagucuguauccca

SEQ ID NO: 1256019 - RNA, 19 nt, Artificial Sequence
  Description of Artificial Sequence: Synthetic oligonucleotide
  Antisense strand to SEQ ID NO: 1256018
ugggauacagacuagcuca

SEQ ID NO: 1256020 - RNA, 19 nt, Artificial Sequence
  Description of Artificial Sequence: Synthetic oligonucleotide
  Sense strand starting at position 485 of SEQ ID NO: 1241223
agguauuguucuuccauca

SEQ ID NO: 1256021 - RNA, 19 nt, Artificial Sequence
  Description of Artificial Sequence: Synthetic oligonucleotide
  Antisense strand to SEQ ID NO: 1256020
ugauggaagaacaauaccu

SEQ ID NO: 1256022 - RNA, 19 nt, Artificial Sequence
  Description of Artificial Sequence: Synthetic oligonucleotide
  Sense strand starting at position 580 of SEQ ID NO: 1241223
guuaauagccuacauaagu

SEQ ID NO: 1256023 - RNA, 19 nt, Artificial Sequence
  Description of Artificial Sequence: Synthetic oligonucleotide
  Antisense strand to SEQ ID NO: 1256022
acuuauguaggcuauuaac

SEQ ID NO: 1256024 - RNA, 19 nt, Artificial Sequence
  Description of Artificial Sequence: Synthetic oligonucleotide
  Sense strand starting at position 714 of SEQ ID NO: 1241223
gacgcugcugcuguuuaau

SEQ ID NO: 1256025 - RNA, 19 nt, Artificial Sequence
  Description of Artificial Sequence: Synthetic oligonucleotide
  Antisense strand to SEQ ID NO: 1256024
auuaaacagcagcagcguc

SEQ ID NO: 1256026 - RNA, 19 nt, Artificial Sequence
  Description of Artificial Sequence: Synthetic oligonucleotide
  Sense strand starting at position 766 of SEQ ID NO: 1241223
uuguuacuggcaugaugaa

SEQ ID NO: 1256027 - RNA, 19 nt, Artificial Sequence
  Description of Artificial Sequence: Synthetic oligonucleotide
  Antisense strand to SEQ ID NO: 1256026
uucaucaugccaguaacaa

SEQ ID NO: 1256028 - RNA, 19 nt, Artificial Sequence
  Description of Artificial Sequence: Synthetic oligonucleotide
  Sense strand starting at position 841 of SEQ ID NO: 1241223
uccagaaggcacuggaaua

SEQ ID NO: 1256029 - RNA, 19 nt, Artificial Sequence
  Description of Artificial Sequence: Synthetic oligonucleotide
  Antisense strand to SEQ ID NO: 1256028
uauuccagugccuucugga

SEQ ID NO: 1256030 - RNA, 19 nt, Artificial Sequence
  Description of Artificial Sequence: Synthetic oligonucleotide
  Sense strand starting at position 935 of SEQ ID NO: 1241223
gugcuaaagcaacagaaau

SEQ ID NO: 1256031 - RNA, 19 nt, Artificial Sequence
  Description of Artificial Sequence: Synthetic oligonucleotide
  Antisense strand to SEQ ID NO: 1256030
auuucuguugcuuuagcac

SEQ ID NO: 1256032 - RNA, 19 nt, Artificial Sequence
  Description of Artificial Sequence: Synthetic oligonucleotide
  Sense strand starting at position 961 of SEQ ID NO: 1241223
ucuguagaacuaugucaca

SEQ ID NO: 1256033 - RNA, 19 nt, Artificial Sequence
  Description of Artificial Sequence: Synthetic oligonucleotide
  Antisense strand to SEQ ID NO: 1256032
ugugacauaguucuacaga

SEQ ID NO: 1256034 - RNA, 19 nt, Artificial Sequence
  Description of Artificial Sequence: Synthetic oligonucleotide
  Sense strand starting at position 1040 of SEQ ID NO: 1241223
ugaugaugauguguguaac

SEQ ID NO: 1256035 - RNA, 19 nt, Artificial Sequence
  Description of Artificial Sequence: Synthetic oligonucleotide
  Antisense strand to SEQ ID NO: 1256034
guuacacacaucaucauca

SEQ ID NO: 1256036 - RNA, 19 nt, Artificial Sequence
  Description of Artificial Sequence: Synthetic oligonucleotide
  Sense strand starting at position 1041 of SEQ ID NO: 1241223
gaugaugauguguguaaca

SEQ ID NO: 1256037 - RNA, 19 nt, Artificial Sequence
  Description of Artificial Sequence: Synthetic oligonucleotide
  Antisense strand to SEQ ID NO: 1256036
uguuacacacaucaucauc

SEQ ID NO: 1256038 - RNA, 19 nt, Artificial Sequence
  Description of Artificial Sequence: Synthetic oligonucleotide
  Sense strand starting at position 1043 of SEQ ID NO: 1241223
ugaugauguguguaacaga

SEQ ID NO: 1256039 - RNA, 19 nt, Artificial Sequence
  Description of Artificial Sequence: Synthetic oligonucleotide
  Antisense strand to SEQ ID NO: 1256038
ucuguuacacacaucauca

SEQ ID NO: 1256040 - RNA, 19 nt, Artificial Sequence
  Description of Artificial Sequence: Synthetic oligonucleotide
  Sense strand starting at position 1087 of SEQ ID NO: 1241223
aagguuucugagcaucuca

SEQ ID NO: 1256041 - RNA, 19 nt, Artificial Sequence
  Description of Artificial Sequence: Synthetic oligonucleotide
  Antisense strand to SEQ ID NO: 1256040
ugagaugcucagaaaccuu

SEQ ID NO: 1256042 - RNA, 19 nt, Artificial Sequence
  Description of Artificial Sequence: Synthetic oligonucleotide
  Sense strand starting at position 1177 of SEQ ID NO: 1241223
ugaaacuccagcggucaaa

SEQ ID NO: 1256043 - RNA, 19 nt, Artificial Sequence
  Description of Artificial Sequence: Synthetic oligonucleotide
  Antisense strand to SEQ ID NO: 1256042
uuugaccgcuggaguuuca

SEQ ID NO: 1256044 - RNA, 19 nt, Artificial Sequence
  Description of Artificial Sequence: Synthetic oligonucleotide
  Sense strand starting at position 1244 of SEQ ID NO: 1241223
uugaacuugcaucaaaguu

SEQ ID NO: 1256045 - RNA, 19 nt, Artificial Sequence
  Description of Artificial Sequence: Synthetic oligonucleotide
  Antisense strand to SEQ ID NO: 1256044
aacuuugaugcaaguucaa

SEQ ID NO: 1256046 - RNA, 19 nt, Artificial Sequence
  Description of Artificial Sequence: Synthetic oligonucleotide
  Sense strand starting at position 1374 of SEQ ID NO: 1241223
ggccacaguucuguggaaa

SEQ ID NO: 1256047 - RNA, 19 nt, Artificial Sequence
  Description of Artificial Sequence: Synthetic oligonucleotide
  Antisense strand to SEQ ID NO: 1256046
uuuccacagaacuguggcc

SEQ ID NO: 1256048 - RNA, 19 nt, Artificial Sequence
  Description of Artificial Sequence: Synthetic oligonucleotide
  Sense strand starting at position 2166 of SEQ ID NO: 1241223
uugaaugaaugccuaguuu

SEQ ID NO: 1256049 - RNA, 19 nt, Artificial Sequence
  Description of Artificial Sequence: Synthetic oligonucleotide
  Antisense strand to SEQ ID NO: 1256048
aaacuaggcauucauucaa

SEQ ID NO: 1256050 - RNA, 19 nt, Artificial Sequence
  Description of Artificial Sequence: Synthetic oligonucleotide
  Sense strand starting at position 2196 of SEQ ID NO: 1241223
cgcgcuucucgcuucagau

SEQ ID NO: 1256051 - RNA, 19 nt, Artificial Sequence
  Description of Artificial Sequence: Synthetic oligonucleotide
  Antisense strand to SEQ ID NO: 1256050
aucugaagcgagaagcgcg

SEQ ID NO: 1256052 - RNA, 19 nt, Artificial Sequence
  Description of Artificial Sequence: Synthetic oligonucleotide
  Sense strand starting at position 2197 of SEQ ID NO: 1241223
gcgcuucucgcuucagaua

SEQ ID NO: 1256053 - RNA, 19 nt, Artificial Sequence
  Description of Artificial Sequence: Synthetic oligonucleotide
  Antisense strand to SEQ ID NO: 1256052
uaucugaagcgagaagcgc

SEQ ID NO: 1256054 - RNA, 19 nt, Artificial Sequence
  Description of Artificial Sequence: Synthetic oligonucleotide
  Sense strand starting at position 2254 of SEQ ID NO: 1241223
aguauagugccggaaauga

SEQ ID NO: 1256055 - RNA, 19 nt, Artificial Sequence
  Description of Artificial Sequence: Synthetic oligonucleotide
  Antisense strand to SEQ ID NO: 1256054
ucauuuccggcacuauacu

SEQ ID NO: 1256056 - RNA, 19 nt, Artificial Sequence
  Description of Artificial Sequence: Synthetic oligonucleotide
  Sense strand starting at position 2398 of SEQ ID NO: 1241223
uuccuaaguuggccuuaga

SEQ ID NO: 1256057 - RNA, 19 nt, Artificial Sequence
  Description of Artificial Sequence: Synthetic oligonucleotide
  Antisense strand to SEQ ID NO: 1256056
ucuaaggccaacuuaggaa

SEQ ID NO: 1256058 - RNA, 19 nt, Artificial Sequence
  Description of Artificial Sequence: Synthetic oligonucleotide
  Sense strand starting at position 2401 of SEQ ID NO: 1241223
cuaaguuggccuuagauga

SEQ ID NO: 1256059 - RNA, 19 nt, Artificial Sequence
  Description of Artificial Sequence: Synthetic oligonucleotide
  Antisense strand to SEQ ID NO: 1256058
ucaucuaaggccaacuuag

SEQ ID NO: 1256060 - RNA, 19 nt, Artificial Sequence
  Description of Artificial Sequence: Synthetic oligonucleotide
  Sense strand starting at position 2405 of SEQ ID NO: 1241223
guuggccuuagaugaugau

SEQ ID NO: 1256061 - RNA, 19 nt, Artificial Sequence
  Description of Artificial Sequence: Synthetic oligonucleotide
  Antisense strand to SEQ ID NO: 1256060
aucaucaucuaaggccaac

SEQ ID NO: 1256062 - RNA, 19 nt, Artificial Sequence
  Description of Artificial Sequence: Synthetic oligonucleotide
  Sense strand starting at position 2409 of SEQ ID NO: 1241223
gccuuagaugaugauaagu

SEQ ID NO: 1256063 - RNA, 19 nt, Artificial Sequence
  Description of Artificial Sequence: Synthetic oligonucleotide
  Antisense strand to SEQ ID NO: 1256062
acuuaucaucaucuaaggc

SEQ ID NO: 1256064 - RNA, 19 nt, Artificial Sequence
  Description of Artificial Sequence: Synthetic oligonucleotide
  Sense strand starting at position 2419 of SEQ ID NO: 1241223
augauaaguucuccaggca

SEQ ID NO: 1256065 - RNA, 19 nt, Artificial Sequence
  Description of Artificial Sequence: Synthetic oligonucleotide
  Antisense strand to SEQ ID NO: 1256064
ugccuggagaacuuaucau

SEQ ID NO: 1256066 - RNA, 19 nt, Artificial Sequence
  Description of Artificial Sequence: Synthetic oligonucleotide
  Sense strand starting at position 2420 of SEQ ID NO: 1241223
ugauaaguucuccaggcaa

SEQ ID NO: 1256067 - RNA, 19 nt, Artificial Sequence
  Description of Artificial Sequence: Synthetic oligonucleotide
  Antisense strand to SEQ ID NO: 1256066
uugccuggagaacuuauca

SEQ ID NO: 1256068 - RNA, 19 nt, Artificial Sequence
  Description of Artificial Sequence: Synthetic oligonucleotide
  Sense strand starting at position 2534 of SEQ ID NO: 1241223
aggugaaaccagcagcaau

SEQ ID NO: 1256069 - RNA, 19 nt, Artificial Sequence
  Description of Artificial Sequence: Synthetic oligonucleotide
  Antisense strand to SEQ ID NO: 1256068
auugcugcugguuucaccu

SEQ ID NO: 1256070 - RNA, 19 nt, Artificial Sequence
  Description of Artificial Sequence: Synthetic oligonucleotide
  Sense strand starting at position 2544 of SEQ ID NO: 1241223
agcagcaauucuguauuaa

SEQ ID NO: 1256071 - RNA, 19 nt, Artificial Sequence
  Description of Artificial Sequence: Synthetic oligonucleotide
  Antisense strand to SEQ ID NO: 1256070
uuaauacagaauugcugcu

SEQ ID NO: 1256072 - RNA, 19 nt, Artificial Sequence
  Description of Artificial Sequence: Synthetic oligonucleotide
  Sense strand starting at position 2545 of SEQ ID NO: 1241223
gcagcaauucuguauuaau

SEQ ID NO: 1256073 - RNA, 19 nt, Artificial Sequence
  Description of Artificial Sequence: Synthetic oligonucleotide
  Antisense strand to SEQ ID NO: 1256072
auuaauacagaauugcugc

SEQ ID NO: 1256074 - RNA, 19 nt, Artificial Sequence
  Description of Artificial Sequence: Synthetic oligonucleotide
  Sense strand starting at position 2719 of SEQ ID NO: 1241223
auugcaacccaguggaaua

SEQ ID NO: 1256075 - RNA, 19 nt, Artificial Sequence
  Description of Artificial Sequence: Synthetic oligonucleotide
  Antisense strand to SEQ ID NO: 1256074
uauuccacuggguugcaau

SEQ ID NO: 1256076 - RNA, 19 nt, Artificial Sequence
  Description of Artificial Sequence: Synthetic oligonucleotide
  Sense strand starting at position 2764 of SEQ ID NO: 1241223
guggaaaucuaguuauaga

SEQ ID NO: 1256077 - RNA, 19 nt, Artificial Sequence
  Description of Artificial Sequence: Synthetic oligonucleotide
  Antisense strand to SEQ ID NO: 1256076
ucuauaacuagauuuccac

SEQ ID NO: 1256078 - RNA, 19 nt, Artificial Sequence
  Description of Artificial Sequence: Synthetic oligonucleotide
  Sense strand starting at position 2771 of SEQ ID NO: 1241223
ucuaguuauagaggcaaag

SEQ ID NO: 1256079 - RNA, 19 nt, Artificial Sequence
  Description of Artificial Sequence: Synthetic oligonucleotide
  Antisense strand to SEQ ID NO: 1256078
cuuugccucuauaacuaga

SEQ ID NO: 1256080 - RNA, 19 nt, Artificial Sequence
  Description of Artificial Sequence: Synthetic oligonucleotide
  Sense strand starting at position 2964 of SEQ ID NO: 1241223
cugauugcugcugauggaa

SEQ ID NO: 1256081 - RNA, 19 nt, Artificial Sequence
  Description of Artificial Sequence: Synthetic oligonucleotide
  Antisense strand to SEQ ID NO: 1256080
uuccaucagcagcaaucag

SEQ ID NO: 1256082 - RNA, 19 nt, Artificial Sequence
  Description of Artificial Sequence: Synthetic oligonucleotide
  Sense strand starting at position 3012 of SEQ ID NO: 1241223
agaagaccauguuuagauu

SEQ ID NO: 1256083 - RNA, 19 nt, Artificial Sequence
  Description of Artificial Sequence: Synthetic oligonucleotide
  Antisense strand to SEQ ID NO: 1256082
aaucuaaacauggucuucu

SEQ ID NO: 1256084 - RNA, 19 nt, Artificial Sequence
  Description of Artificial Sequence: Synthetic oligonucleotide
  Sense strand starting at position 3051 of SEQ ID NO: 1241223
uagcaaauugcguagaaua

SEQ ID NO: 1256085 - RNA, 19 nt, Artificial Sequence
  Description of Artificial Sequence: Synthetic oligonucleotide
  Antisense strand to SEQ ID NO: 1256084
uauucuacgcaauuugcua

SEQ ID NO: 1256086 - RNA, 19 nt, Artificial Sequence
  Description of Artificial Sequence: Synthetic oligonucleotide
  Sense strand starting at position 3059 of SEQ ID NO: 1241223
ugcguagaauaguuuagaa

SEQ ID NO: 1256087 - RNA, 19 nt, Artificial Sequence
  Description of Artificial Sequence: Synthetic oligonucleotide
  Antisense strand to SEQ ID NO: 1256086
uucuaaacuauucuacgca

SEQ ID NO: 1256088 - RNA, 19 nt, Artificial Sequence
  Description of Artificial Sequence: Synthetic oligonucleotide
  Sense strand starting at position 3107 of SEQ ID NO: 1241223
accuucugugauggugaaa

SEQ ID NO: 1256089 - RNA, 19 nt, Artificial Sequence
  Description of Artificial Sequence: Synthetic oligonucleotide
  Antisense strand to SEQ ID NO: 1256088
uuucaccaucacagaaggu

SEQ ID NO: 1256090 - RNA, 19 nt, Artificial Sequence
  Description of Artificial Sequence: Synthetic oligonucleotide
  Sense strand starting at position 3188 of SEQ ID NO: 1241223
uuguaaauugucuagcaug

SEQ ID NO: 1256091 - RNA, 19 nt, Artificial Sequence
  Description of Artificial Sequence: Synthetic oligonucleotide
  Antisense strand to SEQ ID NO: 1256090
caugcuagacaauuuacaa

SEQ ID NO: 1256092 - RNA, 19 nt, Artificial Sequence
  Description of Artificial Sequence: Synthetic oligonucleotide
  Sense strand starting at position 3193 of SEQ ID NO: 1241223
aauugucuagcaugacuga

SEQ ID NO: 1256093 - RNA, 19 nt, Artificial Sequence
  Description of Artificial Sequence: Synthetic oligonucleotide
  Antisense strand to SEQ ID NO: 1256092
ucagucaugcuagacaauu

SEQ ID NO: 1256094 - RNA, 19 nt, Artificial Sequence
  Description of Artificial Sequence: Synthetic oligonucleotide
  Sense strand starting at position 3256 of SEQ ID NO: 1241223
uaguguauuggacaguaca

SEQ ID NO: 1256095 - RNA, 19 nt, Artificial Sequence
  Description of Artificial Sequence: Synthetic oligonucleotide
  Antisense strand to SEQ ID NO: 1256094
uguacuguccaauacacua

SEQ ID NO: 1256096 - RNA, 19 nt, Artificial Sequence
  Description of Artificial Sequence: Synthetic oligonucleotide
  Sense strand starting at position 3276 of SEQ ID NO: 1241223
ccuguaccaccaggauuau

SEQ ID NO: 1256097 - RNA, 19 nt, Artificial Sequence
  Description of Artificial Sequence: Synthetic oligonucleotide
  Antisense strand to SEQ ID NO: 1256096
auaauccuggugguacagg

SEQ ID NO: 1256098 - RNA, 19 nt, Artificial Sequence
  Description of Artificial Sequence: Synthetic oligonucleotide
  Sense strand starting at position 117 of SEQ ID NO: 1241224
agaucuguccagugagauu

SEQ ID NO: 1256099 - RNA, 19 nt, Artificial Sequence
  Description of Artificial Sequence: Synthetic oligonucleotide
  Antisense strand to SEQ ID NO: 1256098
aaucucacuggacagaucu

SEQ ID NO: 1256100 - RNA, 19 nt, Artificial Sequence
  Description of Artificial Sequence: Synthetic oligonucleotide
  Sense strand starting at position 167 of SEQ ID NO: 1241224
cuguuaauauucucaaguu

SEQ ID NO: 1256101 - RNA, 19 nt, Artificial Sequence
  Description of Artificial Sequence: Synthetic oligonucleotide
  Antisense strand to SEQ ID NO: 1256100
aacuugagaauauuaacag

SEQ ID NO: 1256102 - RNA, 19 nt, Artificial Sequence
  Description of Artificial Sequence: Synthetic oligonucleotide
  Sense strand starting at position 224 of SEQ ID NO: 1241224
aaaugaugcuaggaagaga

SEQ ID NO: 1256103 - RNA, 19 nt, Artificial Sequence
  Description of Artificial Sequence: Synthetic oligonucleotide
  Antisense strand to SEQ ID NO: 1256102
ucucuuccuagcaucauuu

SEQ ID NO: 1256104 - RNA, 19 nt, Artificial Sequence
  Description of Artificial Sequence: Synthetic oligonucleotide
  Sense strand starting at position 354 of SEQ ID NO: 1241224
ggaaguuguaguuauccaa

SEQ ID NO: 1256105 - RNA, 19 nt, Artificial Sequence
  Description of Artificial Sequence: Synthetic oligonucleotide
  Antisense strand to SEQ ID NO: 1256104
uuggauaacuacaacuucc

SEQ ID NO: 1256106 - RNA, 19 nt, Artificial Sequence
  Description of Artificial Sequence: Synthetic oligonucleotide
  Sense strand starting at position 422 of SEQ ID NO: 1241224
gaggaauacuuucuggcca

SEQ ID NO: 1256107 - RNA, 19 nt, Artificial Sequence
  Description of Artificial Sequence: Synthetic oligonucleotide
  Antisense strand to SEQ ID NO: 1256106
uggccagaaaguauuccuc

SEQ ID NO: 1256108 - RNA, 19 nt, Artificial Sequence
  Description of Artificial Sequence: Synthetic oligonucleotide
  Sense strand starting at position 496 of SEQ ID NO: 1241224
ggugacagguaccuuacau

SEQ ID NO: 1256109 - RNA, 19 nt, Artificial Sequence
  Description of Artificial Sequence: Synthetic oligonucleotide
  Antisense strand to SEQ ID NO: 1256108
auguaagguaccugucacc

SEQ ID NO: 1256110 - RNA, 19 nt, Artificial Sequence
  Description of Artificial Sequence: Synthetic oligonucleotide
  Sense strand starting at position 507 of SEQ ID NO: 1241224
ccuuacauuccauggaaga

SEQ ID NO: 1256111 - RNA, 19 nt, Artificial Sequence
  Description of Artificial Sequence: Synthetic oligonucleotide
  Antisense strand to SEQ ID NO: 1256110
ucuuccauggaauguaagg

SEQ ID NO: 1256112 - RNA, 19 nt, Artificial Sequence
  Description of Artificial Sequence: Synthetic oligonucleotide
  Sense strand starting at position 548 of SEQ ID NO: 1241224
gcccauuucuuagcucuga

SEQ ID NO: 1256113 - RNA, 19 nt, Artificial Sequence
  Description of Artificial Sequence: Synthetic oligonucleotide
  Antisense strand to SEQ ID NO: 1256112
ucagagcuaagaaaugggc

SEQ ID NO: 1256114 - RNA, 19 nt, Artificial Sequence
  Description of Artificial Sequence: Synthetic oligonucleotide
  Sense strand starting at position 552 of SEQ ID NO: 1241224
auuucuuagcucugaagca

SEQ ID NO: 1256115 - RNA, 19 nt, Artificial Sequence
  Description of Artificial Sequence: Synthetic oligonucleotide
  Antisense strand to SEQ ID NO: 1256114
ugcuucagagcuaagaaau

SEQ ID NO: 1256116 - RNA, 19 nt, Artificial Sequence
  Description of Artificial Sequence: Synthetic oligonucleotide
  Sense strand starting at position 728 of SEQ ID NO: 1241224
uuaaguagagcgggagaaa

SEQ ID NO: 1256117 - RNA, 19 nt, Artificial Sequence
  Description of Artificial Sequence: Synthetic oligonucleotide
  Antisense strand to SEQ ID NO: 1256116
uuucucccgcucuacuuaa

SEQ ID NO: 1256118 - RNA, 19 nt, Artificial Sequence
  Description of Artificial Sequence: Synthetic oligonucleotide
  Sense strand starting at position 916 of SEQ ID NO: 1241224
ccgcgagugcuucugauua

SEQ ID NO: 1256119 - RNA, 19 nt, Artificial Sequence
  Description of Artificial Sequence: Synthetic oligonucleotide
  Antisense strand to SEQ ID NO: 1256118
uaaucagaagcacucgcgg

SEQ ID NO: 1256120 - RNA, 19 nt, Artificial Sequence
  Description of Artificial Sequence: Synthetic oligonucleotide
  Sense strand starting at position 920 of SEQ ID NO: 1241224
gagugcuucugauuauagg

SEQ ID NO: 1256121 - RNA, 19 nt, Artificial Sequence
  Description of Artificial Sequence: Synthetic oligonucleotide
  Antisense strand to SEQ ID NO: 1256120
ccuauaaucagaagcacuc

SEQ ID NO: 1256122 - RNA, 19 nt, Artificial Sequence
  Description of Artificial Sequence: Synthetic oligonucleotide
  Sense strand starting at position 1188 of SEQ ID NO: 1241224
ccuagugcucuuggagaac

SEQ ID NO: 1256123 - RNA, 19 nt, Artificial Sequence
  Description of Artificial Sequence: Synthetic oligonucleotide
  Antisense strand to SEQ ID NO: 1256122
guucuccaagagcacuagg

SEQ ID NO: 1256124 - RNA, 19 nt, Artificial Sequence
  Description of Artificial Sequence: Synthetic oligonucleotide
  Sense strand starting at position 2400 of SEQ ID NO: 1241224
ggugcucucguggaaagag

SEQ ID NO: 1256125 - RNA, 19 nt, Artificial Sequence
  Description of Artificial Sequence: Synthetic oligonucleotide
  Antisense strand to SEQ ID NO: 1256124
cucuuuccacgagagcacc

SEQ ID NO: 1256126 - RNA, 19 nt, Artificial Sequence
  Description of Artificial Sequence: Synthetic oligonucleotide
  Sense strand starting at position 2410 of SEQ ID NO: 1241224
uggaaagaguuccuacuuc

SEQ ID NO: 1256127 - RNA, 19 nt, Artificial Sequence
  Description of Artificial Sequence: Synthetic oligonucleotide
  Antisense strand to SEQ ID NO: 1256126
gaaguaggaacucuuucca

SEQ ID NO: 1256128 - RNA, 19 nt, Artificial Sequence
  Description of Artificial Sequence: Synthetic oligonucleotide
  Sense strand starting at position 2707 of SEQ ID NO: 1241224
ugcacagaaucucagauuu

SEQ ID NO: 1256129 - RNA, 19 nt, Artificial Sequence
  Description of Artificial Sequence: Synthetic oligonucleotide
  Antisense strand to SEQ ID NO: 1256128
aaaucugagauucugugca

SEQ ID NO: 1256130 - RNA, 19 nt, Artificial Sequence
  Description of Artificial Sequence: Synthetic oligonucleotide
  Sense strand starting at position 2793 of SEQ ID NO: 1241224
agaauucuugaggaguguu

SEQ ID NO: 1256131 - RNA, 19 nt, Artificial Sequence
  Description of Artificial Sequence: Synthetic oligonucleotide
  Antisense strand to SEQ ID NO: 1256130
aacacuccucaagaauucu

SEQ ID NO: 1256132 - RNA, 19 nt, Artificial Sequence
  Description of Artificial Sequence: Synthetic oligonucleotide
  Sense strand starting at position 2796 of SEQ ID NO: 1241224
auucuugaggaguguuagu

SEQ ID NO: 1256133 - RNA, 19 nt, Artificial Sequence
  Description of Artificial Sequence: Synthetic oligonucleotide
  Antisense strand to SEQ ID NO: 1256132
acuaacacuccucaagaau

SEQ ID NO: 1256134 - RNA, 19 nt, Artificial Sequence
  Description of Artificial Sequence: Synthetic oligonucleotide
  Sense strand starting at position 3130 of SEQ ID NO: 1241224
ucguuucuuauagauggga

SEQ ID NO: 1256135 - RNA, 19 nt, Artificial Sequence
  Description of Artificial Sequence: Synthetic oligonucleotide
  Antisense strand to SEQ ID NO: 1256134
ucccaucuauaagaaacga

SEQ ID NO: 1256136 - RNA, 19 nt, Artificial Sequence
  Description of Artificial Sequence: Synthetic oligonucleotide
  Sense strand starting at position 3132 of SEQ ID NO: 1241224
guuucuuauagaugggauu

SEQ ID NO: 1256137 - RNA, 19 nt, Artificial Sequence
  Description of Artificial Sequence: Synthetic oligonucleotide
  Antisense strand to SEQ ID NO: 1256136
aaucccaucuauaagaaac

SEQ ID NO: 1256138 - RNA, 19 nt, Artificial Sequence
  Description of Artificial Sequence: Synthetic oligonucleotide
  Sense strand starting at position 3133 of SEQ ID NO: 1241224
uuucuuauagaugggauua

SEQ ID NO: 1256139 - RNA, 19 nt, Artificial Sequence
  Description of Artificial Sequence: Synthetic oligonucleotide
  Antisense strand to SEQ ID NO: 1256138
uaaucccaucuauaagaaa

SEQ ID NO: 1256140 - RNA, 19 nt, Artificial Sequence
  Description of Artificial Sequence: Synthetic oligonucleotide
  Sense strand starting at position 3205 of SEQ ID NO: 1241224
ggcauuauagaacaguacu

SEQ ID NO: 1256141 - RNA, 19 nt, Artificial Sequence
  Description of Artificial Sequence: Synthetic oligonucleotide
  Antisense strand to SEQ ID NO: 1256140
aguacuguucuauaaugcc

SEQ ID NO: 1256142 - RNA, 19 nt, Artificial Sequence
  Description of Artificial Sequence: Synthetic oligonucleotide
  Sense strand starting at position 3294 of SEQ ID NO: 1241224
cuggaagucaacuagugua

SEQ ID NO: 1256143 - RNA, 19 nt, Artificial Sequence
  Description of Artificial Sequence: Synthetic oligonucleotide
  Antisense strand to SEQ ID NO: 1256142
uacacuaguugacuuccag

SEQ ID NO: 1256144 - RNA, 19 nt, Artificial Sequence
  Description of Artificial Sequence: Synthetic oligonucleotide
  Sense strand starting at position 3329 of SEQ ID NO: 1241224
cuaucuuccugauuggaau

SEQ ID NO: 1256145 - RNA, 19 nt, Artificial Sequence
  Description of Artificial Sequence: Synthetic oligonucleotide
  Antisense strand to SEQ ID NO: 1256144
auuccaaucaggaagauag

SEQ ID NO: 1256146 - RNA, 19 nt, Artificial Sequence
  Description of Artificial Sequence: Synthetic oligonucleotide
  Sense strand starting at position 3335 of SEQ ID NO: 1241224
uccugauuggaaugacuua

SEQ ID NO: 1256147 - RNA, 19 nt, Artificial Sequence
  Description of Artificial Sequence: Synthetic oligonucleotide
  Antisense strand to SEQ ID NO: 1256146
uaagucauuccaaucagga

SEQ ID NO: 1256148 - RNA, 19 nt, Artificial Sequence
  Description of Artificial Sequence: Synthetic oligonucleotide
  Sense strand starting at position 3367 of SEQ ID NO: 1241224
gcaacuaaggaguguugau

SEQ ID NO: 1256149 - RNA, 19 nt, Artificial Sequence
  Description of Artificial Sequence: Synthetic oligonucleotide
  Antisense strand to SEQ ID NO: 1256148
aucaacacuccuuaguugc

SEQ ID NO: 1256150 - RNA, 19 nt, Artificial Sequence
  Description of Artificial Sequence: Synthetic oligonucleotide
  Sense strand starting at position 3401 of SEQ ID NO: 1241224
accugaaugucuucuggag

SEQ ID NO: 1256151 - RNA, 19 nt, Artificial Sequence
  Description of Artificial Sequence: Synthetic oligonucleotide
  Antisense strand to SEQ ID NO: 1256150
cuccagaagacauucaggu

SEQ ID NO: 1256152 - RNA, 19 nt, Artificial Sequence
  Description of Artificial Sequence: Synthetic oligonucleotide
  Sense strand starting at position 3408 of SEQ ID NO: 1241224
ugucuucuggagggaaaga

SEQ ID NO: 1256153 - RNA, 19 nt, Artificial Sequence
  Description of Artificial Sequence: Synthetic oligonucleotide
  Antisense strand to SEQ ID NO: 1256152
ucuuucccuccagaagaca

SEQ ID NO: 1256154 - RNA, 19 nt, Artificial Sequence
  Description of Artificial Sequence: Synthetic oligonucleotide
  Sense strand starting at position 3619 of SEQ ID NO: 1241224
uuuauugaguguccucaau

SEQ ID NO: 1256155 - RNA, 19 nt, Artificial Sequence
  Description of Artificial Sequence: Synthetic oligonucleotide
  Antisense strand to SEQ ID NO: 1256154
auugaggacacucaauaaa

SEQ ID NO: 1256156 - RNA, 19 nt, Artificial Sequence
  Description of Artificial Sequence: Synthetic oligonucleotide
  Sense strand starting at position 3632 of SEQ ID NO: 1241224
cucaaucaggguuggauaa

SEQ ID NO: 1256157 - RNA, 19 nt, Artificial Sequence
  Description of Artificial Sequence: Synthetic oligonucleotide
  Antisense strand to SEQ ID NO: 1256156
uuauccaacccugauugag

SEQ ID NO: 1256158 - RNA, 19 nt, Artificial Sequence
  Description of Artificial Sequence: Synthetic oligonucleotide
  Sense strand starting at position 3655 of SEQ ID NO: 1241224
cccuaauuaggcuggacaa

SEQ ID NO: 1256159 - RNA, 19 nt, Artificial Sequence
  Description of Artificial Sequence: Synthetic oligonucleotide
  Antisense strand to SEQ ID NO: 1256158
uuguccagccuaauuaggg

SEQ ID NO: 1256160 - RNA, 19 nt, Artificial Sequence
  Description of Artificial Sequence: Synthetic oligonucleotide
  Sense strand starting at position 3656 of SEQ ID NO: 1241224
ccuaauuaggcuggacaaa

SEQ ID NO: 1256161 - RNA, 19 nt, Artificial Sequence
  Description of Artificial Sequence: Synthetic oligonucleotide
  Antisense strand to SEQ ID NO: 1256160
uuuguccagccuaauuagg

SEQ ID NO: 1256162 - RNA, 19 nt, Artificial Sequence
  Description of Artificial Sequence: Synthetic oligonucleotide
  Sense strand starting at position 3666 of SEQ ID NO: 1241224
cuggacaaauugucaugau

SEQ ID NO: 1256163 - RNA, 19 nt, Artificial Sequence
  Description of Artificial Sequence: Synthetic oligonucleotide
  Antisense strand to SEQ ID NO: 1256162
aucaugacaauuuguccag

SEQ ID NO: 1256164 - RNA, 19 nt, Artificial Sequence
  Description of Artificial Sequence: Synthetic oligonucleotide
  Sense strand starting at position 3767 of SEQ ID NO: 1241224
gguagaugcuauucagagc

SEQ ID NO: 1256165 - RNA, 19 nt, Artificial Sequence
  Description of Artificial Sequence: Synthetic oligonucleotide
  Antisense strand to SEQ ID NO: 1256164
gcucugaauagcaucuacc

SEQ ID NO: 1256166 - RNA, 19 nt, Artificial Sequence
  Description of Artificial Sequence: Synthetic oligonucleotide
  Sense strand starting at position 3826 of SEQ ID NO: 1241224
gugagugauuuggcagagu

SEQ ID NO: 1256167 - RNA, 19 nt, Artificial Sequence
  Description of Artificial Sequence: Synthetic oligonucleotide
  Antisense strand to SEQ ID NO: 1256166
acucugccaaaucacucac

SEQ ID NO: 1256168 - RNA, 19 nt, Artificial Sequence
  Description of Artificial Sequence: Synthetic oligonucleotide
  Sense strand starting at position 3876 of SEQ ID NO: 1241224
cugagucuguaaccauuaa

SEQ ID NO: 1256169 - RNA, 19 nt, Artificial Sequence
  Description of Artificial Sequence: Synthetic oligonucleotide
  Antisense strand to SEQ ID NO: 1256168
uuaaugguuacagacucag

SEQ ID NO: 1256170 - RNA, 19 nt, Artificial Sequence
  Description of Artificial Sequence: Synthetic oligonucleotide
  Sense strand starting at position 3923 of SEQ ID NO: 1241224
caugguuguuuacugagau

SEQ ID NO: 1256171 - RNA, 19 nt, Artificial Sequence
  Description of Artificial Sequence: Synthetic oligonucleotide
  Antisense strand to SEQ ID NO: 1256170
aucucaguaaacaaccaug

SEQ ID NO: 1256172 - RNA, 19 nt, Artificial Sequence
  Description of Artificial Sequence: Synthetic oligonucleotide
  Sense strand starting at position 3962 of SEQ ID NO: 1241224
ugaaacauuuaagagaagu

SEQ ID NO: 1256173 - RNA, 19 nt, Artificial Sequence
  Description of Artificial Sequence: Synthetic oligonucleotide
  Antisense strand to SEQ ID NO: 1256172
acuucucuuaaauguuuca

SEQ ID NO: 1256174 - RNA, 19 nt, Artificial Sequence
  Description of Artificial Sequence: Synthetic oligonucleotide
  Sense strand starting at position 3972 of SEQ ID NO: 1241224
aagagaaguuacucugucu

SEQ ID NO: 1256175 - RNA, 19 nt, Artificial Sequence
  Description of Artificial Sequence: Synthetic oligonucleotide
  Antisense strand to SEQ ID NO: 1256174
agacagaguaacuucucuu

SEQ ID NO: 1256176 - RNA, 19 nt, Artificial Sequence
  Description of Artificial Sequence: Synthetic oligonucleotide
  Sense strand starting at position 3975 of SEQ ID NO: 1241224
agaaguuacucugucuuua

SEQ ID NO: 1256177 - RNA, 19 nt, Artificial Sequence
  Description of Artificial Sequence: Synthetic oligonucleotide
  Antisense strand to SEQ ID NO: 1256176
uaaagacagaguaacuucu

SEQ ID NO: 1256178 - RNA, 19 nt, Artificial Sequence
  Description of Artificial Sequence: Synthetic oligonucleotide
  Sense strand starting at position 208 of SEQ ID NO: 1241225
ggacaugcucuguagagca

SEQ ID NO: 1256179 - RNA, 19 nt, Artificial Sequence
  Description of Artificial Sequence: Synthetic oligonucleotide
  Antisense strand to SEQ ID NO: 1256178
ugcucuacagagcaugucc

SEQ ID NO: 1256180 - RNA, 19 nt, Artificial Sequence
  Description of Artificial Sequence: Synthetic oligonucleotide
  Sense strand starting at position 218 of SEQ ID NO: 1241225
uguagagcaugcucuguaa

SEQ ID NO: 1256181 - RNA, 19 nt, Artificial Sequence
  Description of Artificial Sequence: Synthetic oligonucleotide
  Antisense strand to SEQ ID NO: 1256180
uuacagagcaugcucuaca

SEQ ID NO: 1256182 - RNA, 19 nt, Artificial Sequence
  Description of Artificial Sequence: Synthetic oligonucleotide
  Sense strand starting at position 220 of SEQ ID NO: 1241225
uagagcaugcucuguaaag

SEQ ID NO: 1256183 - RNA, 19 nt, Artificial Sequence
  Description of Artificial Sequence: Synthetic oligonucleotide
  Antisense strand to SEQ ID NO: 1256182
cuuuacagagcaugcucua

SEQ ID NO: 1256184 - RNA, 19 nt, Artificial Sequence
  Description of Artificial Sequence: Synthetic oligonucleotide
  Sense strand starting at position 277 of SEQ ID NO: 1241225
uaucgaguuucgcucuugu

SEQ ID NO: 1256185 - RNA, 19 nt, Artificial Sequence
  Description of Artificial Sequence: Synthetic oligonucleotide
  Antisense strand to SEQ ID NO: 1256184
acaagagcgaaacucgaua

SEQ ID NO: 1256186 - RNA, 19 nt, Artificial Sequence
  Description of Artificial Sequence: Synthetic oligonucleotide
  Sense strand starting at position 392 of SEQ ID NO: 1241225
ugagaaccacccuguuaca

SEQ ID NO: 1256187 - RNA, 19 nt, Artificial Sequence
  Description of Artificial Sequence: Synthetic oligonucleotide
  Antisense strand to SEQ ID NO: 1256186
uguaacagggugguucuca

SEQ ID NO: 1256188 - RNA, 19 nt, Artificial Sequence
  Description of Artificial Sequence: Synthetic oligonucleotide
  Sense strand starting at position 405 of SEQ ID NO: 1241225
guuacagaagucuaugauc

SEQ ID NO: 1256189 - RNA, 19 nt, Artificial Sequence
  Description of Artificial Sequence: Synthetic oligonucleotide
  Antisense strand to SEQ ID NO: 1256188
gaucauagacuucuguaac

SEQ ID NO: 1256190 - RNA, 19 nt, Artificial Sequence
  Description of Artificial Sequence: Synthetic oligonucleotide
  Sense strand starting at position 407 of SEQ ID NO: 1241225
uacagaagucuaugaucug

SEQ ID NO: 1256191 - RNA, 19 nt, Artificial Sequence
  Description of Artificial Sequence: Synthetic oligonucleotide
  Antisense strand to SEQ ID NO: 1256190
cagaucauagacuucugua

SEQ ID NO: 1256192 - RNA, 19 nt, Artificial Sequence
  Description of Artificial Sequence: Synthetic oligonucleotide
  Sense strand starting at position 410 of SEQ ID NO: 1241225
agaagucuaugaucugcuu

SEQ ID NO: 1256193 - RNA, 19 nt, Artificial Sequence
  Description of Artificial Sequence: Synthetic oligonucleotide
  Antisense strand to SEQ ID NO: 1256192
aagcagaucauagacuucu

SEQ ID NO: 1256194 - RNA, 19 nt, Artificial Sequence
  Description of Artificial Sequence: Synthetic oligonucleotide
  Sense strand starting at position 413 of SEQ ID NO: 1241225
agucuaugaucugcuuuaa

SEQ ID NO: 1256195 - RNA, 19 nt, Artificial Sequence
  Description of Artificial Sequence: Synthetic oligonucleotide
  Antisense strand to SEQ ID NO: 1256194
uuaaagcagaucauagacu

SEQ ID NO: 1256196 - RNA, 19 nt, Artificial Sequence
  Description of Artificial Sequence: Synthetic oligonucleotide
  Sense strand starting at position 440 of SEQ ID NO: 1241225
uuguguaucuugugagaug

SEQ ID NO: 1256197 - RNA, 19 nt, Artificial Sequence
  Description of Artificial Sequence: Synthetic oligonucleotide
  Antisense strand to SEQ ID NO: 1256196
caucucacaagauacacaa

SEQ ID NO: 1256198 - RNA, 19 nt, Artificial Sequence
  Description of Artificial Sequence: Synthetic oligonucleotide
  Sense strand starting at position 441 of SEQ ID NO: 1241225
uguguaucuugugagauga

SEQ ID NO: 1256199 - RNA, 19 nt, Artificial Sequence
  Description of Artificial Sequence: Synthetic oligonucleotide
  Antisense strand to SEQ ID NO: 1256198
ucaucucacaagauacaca

SEQ ID NO: 1256200 - RNA, 19 nt, Artificial Sequence
  Description of Artificial Sequence: Synthetic oligonucleotide
  Sense strand starting at position 484 of SEQ ID NO: 1241225
cuuagaucaggguguccaa

SEQ ID NO: 1256201 - RNA, 19 nt, Artificial Sequence
  Description of Artificial Sequence: Synthetic oligonucleotide
  Antisense strand to SEQ ID NO: 1256200
uuggacacccugaucuaag

SEQ ID NO: 1256202 - RNA, 19 nt, Artificial Sequence
  Description of Artificial Sequence: Synthetic oligonucleotide
  Sense strand starting at position 913 of SEQ ID NO: 1241225
agucauuuaucagauaagg

SEQ ID NO: 1256203 - RNA, 19 nt, Artificial Sequence
  Description of Artificial Sequence: Synthetic oligonucleotide
  Antisense strand to SEQ ID NO: 1256202
ccuuaucugauaaaugacu

SEQ ID NO: 1256204 - RNA, 19 nt, Artificial Sequence
  Description of Artificial Sequence: Synthetic oligonucleotide
  Sense strand starting at position 969 of SEQ ID NO: 1241225
guugcuuaugccgguaauc

SEQ ID NO: 1256205 - RNA, 19 nt, Artificial Sequence
  Description of Artificial Sequence: Synthetic oligonucleotide
  Antisense strand to SEQ ID NO: 1256204
gauuaccggcauaagcaac

SEQ ID NO: 1256206 - RNA, 19 nt, Artificial Sequence
  Description of Artificial Sequence: Synthetic oligonucleotide
  Sense strand starting at position 1470 of SEQ ID NO: 1241225
uguccaggaucuggagaaa

SEQ ID NO: 1256207 - RNA, 19 nt, Artificial Sequence
  Description of Artificial Sequence: Synthetic oligonucleotide
  Antisense strand to SEQ ID NO: 1256206
uuucuccagauccuggaca

SEQ ID NO: 1256208 - RNA, 19 nt, Artificial Sequence
  Description of Artificial Sequence: Synthetic oligonucleotide
  Sense strand starting at position 1645 of SEQ ID NO: 1241225
cgucgcgagaccugagaaa

SEQ ID NO: 1256209 - RNA, 19 nt, Artificial Sequence
  Description of Artificial Sequence: Synthetic oligonucleotide
  Antisense strand to SEQ ID NO: 1256208
uuucucaggucucgcgacg

SEQ ID NO: 1256210 - RNA, 19 nt, Artificial Sequence
  Description of Artificial Sequence: Synthetic oligonucleotide
  Sense strand starting at position 1658 of SEQ ID NO: 1241225
gagaaauugucuuugggca

SEQ ID NO: 1256211 - RNA, 19 nt, Artificial Sequence
  Description of Artificial Sequence: Synthetic oligonucleotide
  Antisense strand to SEQ ID NO: 1256210
ugcccaaagacaauuucuc

SEQ ID NO: 1256212 - RNA, 19 nt, Artificial Sequence
  Description of Artificial Sequence: Synthetic oligonucleotide
  Sense strand starting at position 1659 of SEQ ID NO: 1241225
agaaauugucuuugggcaa

SEQ ID NO: 1256213 - RNA, 19 nt, Artificial Sequence
  Description of Artificial Sequence: Synthetic oligonucleotide
  Antisense strand to SEQ ID NO: 1256212
uugcccaaagacaauuucu

SEQ ID NO: 1256214 - RNA, 19 nt, Artificial Sequence
  Description of Artificial Sequence: Synthetic oligonucleotide
  Sense strand starting at position 1660 of SEQ ID NO: 1241225
gaaauugucuuugggcaag

SEQ ID NO: 1256215 - RNA, 19 nt, Artificial Sequence
  Description of Artificial Sequence: Synthetic oligonucleotide
  Antisense strand to SEQ ID NO: 1256214
cuugcccaaagacaauuuc

SEQ ID NO: 1256216 - RNA, 19 nt, Artificial Sequence
  Description of Artificial Sequence: Synthetic oligonucleotide
  Sense strand starting at position 1731 of SEQ ID NO: 1241225
ccacuaguagccuggagaa

SEQ ID NO: 1256217 - RNA, 19 nt, Artificial Sequence
  Description of Artificial Sequence: Synthetic oligonucleotide
  Antisense strand to SEQ ID NO: 1256216
uucuccaggcuacuagugg

SEQ ID NO: 1256218 - RNA, 19 nt, Artificial Sequence
  Description of Artificial Sequence: Synthetic oligonucleotide
  Sense strand starting at position 2017 of SEQ ID NO: 1241225
guccucagaaccggaaaua

SEQ ID NO: 1256219 - RNA, 19 nt, Artificial Sequence
  Description of Artificial Sequence: Synthetic oligonucleotide
  Antisense strand to SEQ ID NO: 1256218
uauuuccgguucugaggac

SEQ ID NO: 1256220 - RNA, 19 nt, Artificial Sequence
  Description of Artificial Sequence: Synthetic oligonucleotide
  Sense strand starting at position 2336 of SEQ ID NO: 1241225
gggcguugccuuggagaca

SEQ ID NO: 1256221 - RNA, 19 nt, Artificial Sequence
  Description of Artificial Sequence: Synthetic oligonucleotide
  Antisense strand to SEQ ID NO: 1256220
ugucuccaaggcaacgccc

SEQ ID NO: 1256222 - RNA, 19 nt, Artificial Sequence
  Description of Artificial Sequence: Synthetic oligonucleotide
  Sense strand starting at position 2456 of SEQ ID NO: 1241225
cgaggcucuugauaggcaa

SEQ ID NO: 1256223 - RNA, 19 nt, Artificial Sequence
  Description of Artificial Sequence: Synthetic oligonucleotide
  Antisense strand to SEQ ID NO: 1256222
uugccuaucaagagccucg

SEQ ID NO: 1256224 - RNA, 19 nt, Artificial Sequence
  Description of Artificial Sequence: Synthetic oligonucleotide
  Sense strand starting at position 2468 of SEQ ID NO: 1241225
uaggcaaugucacucaguu

SEQ ID NO: 1256225 - RNA, 19 nt, Artificial Sequence
  Description of Artificial Sequence: Synthetic oligonucleotide
  Antisense strand to SEQ ID NO: 1256224
aacugagugacauugccua

SEQ ID NO: 1256226 - RNA, 19 nt, Artificial Sequence
  Description of Artificial Sequence: Synthetic oligonucleotide
  Sense strand starting at position 2489 of SEQ ID NO: 1241225
cgcuuauccucuuaguacu

SEQ ID NO: 1256227 - RNA, 19 nt, Artificial Sequence
  Description of Artificial Sequence: Synthetic oligonucleotide
  Antisense strand to SEQ ID NO: 1256226
aguacuaagaggauaagcg

SEQ ID NO: 1256228 - RNA, 19 nt, Artificial Sequence
  Description of Artificial Sequence: Synthetic oligonucleotide
  Sense strand starting at position 2495 of SEQ ID NO: 1241225
uccucuuaguacucuauga

SEQ ID NO: 1256229 - RNA, 19 nt, Artificial Sequence
  Description of Artificial Sequence: Synthetic oligonucleotide
  Antisense strand to SEQ ID NO: 1256228
ucauagaguacuaagagga

SEQ ID NO: 1256230 - RNA, 19 nt, Artificial Sequence
  Description of Artificial Sequence: Synthetic oligonucleotide
  Sense strand starting at position 2500 of SEQ ID NO: 1241225
uuaguacucuaugaccagu

SEQ ID NO: 1256231 - RNA, 19 nt, Artificial Sequence
  Description of Artificial Sequence: Synthetic oligonucleotide
  Antisense strand to SEQ ID NO: 1256230
acuggucauagaguacuaa

SEQ ID NO: 1256232 - RNA, 19 nt, Artificial Sequence
  Description of Artificial Sequence: Synthetic oligonucleotide
  Sense strand starting at position 2503 of SEQ ID NO: 1241225
guacucuaugaccaguagu

SEQ ID NO: 1256233 - RNA, 19 nt, Artificial Sequence
  Description of Artificial Sequence: Synthetic oligonucleotide
  Antisense strand to SEQ ID NO: 1256232
acuacuggucauagaguac

SEQ ID NO: 1256234 - RNA, 19 nt, Artificial Sequence
  Description of Artificial Sequence: Synthetic oligonucleotide
  Sense strand starting at position 2506 of SEQ ID NO: 1241225
cucuaugaccaguaguaca

SEQ ID NO: 1256235 - RNA, 19 nt, Artificial Sequence
  Description of Artificial Sequence: Synthetic oligonucleotide
  Antisense strand to SEQ ID NO: 1256234
uguacuacuggucauagag

SEQ ID NO: 1256236 - RNA, 19 nt, Artificial Sequence
  Description of Artificial Sequence: Synthetic oligonucleotide
  Sense strand starting at position 2520 of SEQ ID NO: 1241225
guacaauugucgucucauu

SEQ ID NO: 1256237 - RNA, 19 nt, Artificial Sequence
  Description of Artificial Sequence: Synthetic oligonucleotide
  Antisense strand to SEQ ID NO: 1256236
aaugagacgacaauuguac

SEQ ID NO: 1256238 - RNA, 19 nt, Artificial Sequence
  Description of Artificial Sequence: Synthetic oligonucleotide
  Sense strand starting at position 3349 of SEQ ID NO: 1241225
gcgugccuccagugaucca

SEQ ID NO: 1256239 - RNA, 19 nt, Artificial Sequence
  Description of Artificial Sequence: Synthetic oligonucleotide
  Antisense strand to SEQ ID NO: 1256238
uggaucacuggaggcacgc

SEQ ID NO: 1256240 - RNA, 19 nt, Artificial Sequence
  Description of Artificial Sequence: Synthetic oligonucleotide
  Sense strand starting at position 3515 of SEQ ID NO: 1241225
cacuaaagcguguggcauu

SEQ ID NO: 1256241 - RNA, 19 nt, Artificial Sequence
  Description of Artificial Sequence: Synthetic oligonucleotide
  Antisense strand to SEQ ID NO: 1256240
aaugccacacgcuuuagug

SEQ ID NO: 1256242 - RNA, 19 nt, Artificial Sequence
  Description of Artificial Sequence: Synthetic oligonucleotide
  Sense strand starting at position 3542 of SEQ ID NO: 1241225
gggcgaugaagguguucua

SEQ ID NO: 1256243 - RNA, 19 nt, Artificial Sequence
  Description of Artificial Sequence: Synthetic oligonucleotide
  Antisense strand to SEQ ID NO: 1256242
uagaacaccuucaucgccc

SEQ ID NO: 1256244 - RNA, 19 nt, Artificial Sequence
  Description of Artificial Sequence: Synthetic oligonucleotide
  Sense strand starting at position 3564 of SEQ ID NO: 1241225
uugugaugguaguugcaca

SEQ ID NO: 1256245 - RNA, 19 nt, Artificial Sequence
  Description of Artificial Sequence: Synthetic oligonucleotide
  Antisense strand to SEQ ID NO: 1256244
ugugcaacuaccaucacaa

SEQ ID NO: 1256246 - RNA, 19 nt, Artificial Sequence
  Description of Artificial Sequence: Synthetic oligonucleotide
  Sense strand starting at position 3626 of SEQ ID NO: 1241225
gagugaauauauuguauag

SEQ ID NO: 1256247 - RNA, 19 nt, Artificial Sequence
  Description of Artificial Sequence: Synthetic oligonucleotide
  Antisense strand to SEQ ID NO: 1256246
cuauacaauauauucacuc

SEQ ID NO: 1256248 - RNA, 19 nt, Artificial Sequence
  Description of Artificial Sequence: Synthetic oligonucleotide
  Sense strand starting at position 3852 of SEQ ID NO: 1241225
cucagacugucauaggcau

SEQ ID NO: 1256249 - RNA, 19 nt, Artificial Sequence
  Description of Artificial Sequence: Synthetic oligonucleotide
  Antisense strand to SEQ ID NO: 1256248
augccuaugacagucugag

SEQ ID NO: 1256250 - RNA, 19 nt, Artificial Sequence
  Description of Artificial Sequence: Synthetic oligonucleotide
  Sense strand starting at position 3858 of SEQ ID NO: 1241225
cugucauaggcauagauaa

SEQ ID NO: 1256251 - RNA, 19 nt, Artificial Sequence
  Description of Artificial Sequence: Synthetic oligonucleotide
  Antisense strand to SEQ ID NO: 1256250
uuaucuaugccuaugacag

SEQ ID NO: 1256252 - RNA, 19 nt, Artificial Sequence
  Description of Artificial Sequence: Synthetic oligonucleotide
  Sense strand starting at position 3905 of SEQ ID NO: 1241225
uguuucucucagggccaua

SEQ ID NO: 1256253 - RNA, 19 nt, Artificial Sequence
  Description of Artificial Sequence: Synthetic oligonucleotide
  Antisense strand to SEQ ID NO: 1256252
uauggcccugagagaaaca

SEQ ID NO: 1256254 - RNA, 19 nt, Artificial Sequence
  Description of Artificial Sequence: Synthetic oligonucleotide
  Sense strand starting at position 3910 of SEQ ID NO: 1241225
cucucagggccauaacaua

SEQ ID NO: 1256255 - RNA, 19 nt, Artificial Sequence
  Description of Artificial Sequence: Synthetic oligonucleotide
  Antisense strand to SEQ ID NO: 1256254
uauguuauggcccugagag

SEQ ID NO: 1256256 - RNA, 19 nt, Artificial Sequence
  Description of Artificial Sequence: Synthetic oligonucleotide
  Sense strand starting at position 3918 of SEQ ID NO: 1241225
gccauaacauaggugcaaa

SEQ ID NO: 1256257 - RNA, 19 nt, Artificial Sequence
  Description of Artificial Sequence: Synthetic oligonucleotide
  Antisense strand to SEQ ID NO: 1256256
uuugcaccuauguuauggc

SEQ ID NO: 1256258 - RNA, 19 nt, Artificial Sequence
  Description of Artificial Sequence: Synthetic oligonucleotide
  Sense strand starting at position 74 of SEQ ID NO: 1241226
ugagaaccacccuguuaca

SEQ ID NO: 1256259 - RNA, 19 nt, Artificial Sequence
  Description of Artificial Sequence: Synthetic oligonucleotide
  Antisense strand to SEQ ID NO: 1256258
uguaacagggugguucuca

SEQ ID NO: 1256260 - RNA, 19 nt, Artificial Sequence
  Description of Artificial Sequence: Synthetic oligonucleotide
  Sense strand starting at position 87 of SEQ ID NO: 1241226
guuacagaagucuaugauc

SEQ ID NO: 1256261 - RNA, 19 nt, Artificial Sequence
  Description of Artificial Sequence: Synthetic oligonucleotide
  Antisense strand to SEQ ID NO: 1256260
gaucauagacuucuguaac

SEQ ID NO: 1256262 - RNA, 19 nt, Artificial Sequence
  Description of Artificial Sequence: Synthetic oligonucleotide
  Sense strand starting at position 89 of SEQ ID NO: 1241226
uacagaagucuaugaucug

SEQ ID NO: 1256263 - RNA, 19 nt, Artificial Sequence
  Description of Artificial Sequence: Synthetic oligonucleotide
  Antisense strand to SEQ ID NO: 1256262
cagaucauagacuucugua

SEQ ID NO: 1256264 - RNA, 19 nt, Artificial Sequence
  Description of Artificial Sequence: Synthetic oligonucleotide
  Sense strand starting at position 92 of SEQ ID NO: 1241226
agaagucuaugaucugcuu

SEQ ID NO: 1256265 - RNA, 19 nt, Artificial Sequence
  Description of Artificial Sequence: Synthetic oligonucleotide
  Antisense strand to SEQ ID NO: 1256264
aagcagaucauagacuucu

SEQ ID NO: 1256266 - RNA, 19 nt, Artificial Sequence
  Description of Artificial Sequence: Synthetic oligonucleotide
  Sense strand starting at position 95 of SEQ ID NO: 1241226
agucuaugaucugcuuuaa

SEQ ID NO: 1256267 - RNA, 19 nt, Artificial Sequence
  Description of Artificial Sequence: Synthetic oligonucleotide
  Antisense strand to SEQ ID NO: 1256266
uuaaagcagaucauagacu

SEQ ID NO: 1256268 - RNA, 19 nt, Artificial Sequence
  Description of Artificial Sequence: Synthetic oligonucleotide
  Sense strand starting at position 122 of SEQ ID NO: 1241226
uuguguaucuugugagaug

SEQ ID NO: 1256269 - RNA, 19 nt, Artificial Sequence
  Description of Artificial Sequence: Synthetic oligonucleotide
  Antisense strand to SEQ ID NO: 1256268
caucucacaagauacacaa

SEQ ID NO: 1256270 - RNA, 19 nt, Artificial Sequence
  Description of Artificial Sequence: Synthetic oligonucleotide
  Sense strand starting at position 123 of SEQ ID NO: 1241226
uguguaucuugugagauga

SEQ ID NO: 1256271 - RNA, 19 nt, Artificial Sequence
  Description of Artificial Sequence: Synthetic oligonucleotide
  Antisense strand to SEQ ID NO: 1256270
ucaucucacaagauacaca

SEQ ID NO: 1256272 - RNA, 19 nt, Artificial Sequence
  Description of Artificial Sequence: Synthetic oligonucleotide
  Sense strand starting at position 166 of SEQ ID NO: 1241226
cuuagaucaggguguccaa

SEQ ID NO: 1256273 - RNA, 19 nt, Artificial Sequence
  Description of Artificial Sequence: Synthetic oligonucleotide
  Antisense strand to SEQ ID NO: 1256272
uuggacacccugaucuaag

SEQ ID NO: 1256274 - RNA, 19 nt, Artificial Sequence
  Description of Artificial Sequence: Synthetic oligonucleotide
  Sense strand starting at position 595 of SEQ ID NO: 1241226
agucauuuaucagauaagg

SEQ ID NO: 1256275 - RNA, 19 nt, Artificial Sequence
  Description of Artificial Sequence: Synthetic oligonucleotide
  Antisense strand to SEQ ID NO: 1256274
ccuuaucugauaaaugacu

SEQ ID NO: 1256276 - RNA, 19 nt, Artificial Sequence
  Description of Artificial Sequence: Synthetic oligonucleotide
  Sense strand starting at position 650 of SEQ ID NO: 1241226
gguugcuuaugccgguaau

SEQ ID NO: 1256277 - RNA, 19 nt, Artificial Sequence
  Description of Artificial Sequence: Synthetic oligonucleotide
  Antisense strand to SEQ ID NO: 1256276
auuaccggcauaagcaacc

SEQ ID NO: 1256278 - RNA, 19 nt, Artificial Sequence
  Description of Artificial Sequence: Synthetic oligonucleotide
  Sense strand starting at position 651 of SEQ ID NO: 1241226
guugcuuaugccgguaauc

SEQ ID NO: 1256279 - RNA, 19 nt, Artificial Sequence
  Description of Artificial Sequence: Synthetic oligonucleotide
  Antisense strand to SEQ ID NO: 1256278
gauuaccggcauaagcaac

SEQ ID NO: 1256280 - RNA, 19 nt, Artificial Sequence
  Description of Artificial Sequence: Synthetic oligonucleotide
  Sense strand starting at position 1152 of SEQ ID NO: 1241226
uguccaggaucuggagaaa

SEQ ID NO: 1256281 - RNA, 19 nt, Artificial Sequence
  Description of Artificial Sequence: Synthetic oligonucleotide
  Antisense strand to SEQ ID NO: 1256280
uuucuccagauccuggaca

SEQ ID NO: 1256282 - RNA, 19 nt, Artificial Sequence
  Description of Artificial Sequence: Synthetic oligonucleotide
  Sense strand starting at position 1327 of SEQ ID NO: 1241226
cgucgcgagaccugagaaa

SEQ ID NO: 1256283 - RNA, 19 nt, Artificial Sequence
  Description of Artificial Sequence: Synthetic oligonucleotide
  Antisense strand to SEQ ID NO: 1256282
uuucucaggucucgcgacg

SEQ ID NO: 1256284 - RNA, 19 nt, Artificial Sequence
  Description of Artificial Sequence: Synthetic oligonucleotide
  Sense strand starting at position 1340 of SEQ ID NO: 1241226
gagaaauugucuuugggca

SEQ ID NO: 1256285 - RNA, 19 nt, Artificial Sequence
  Description of Artificial Sequence: Synthetic oligonucleotide
  Antisense strand to SEQ ID NO: 1256284
ugcccaaagacaauuucuc

SEQ ID NO: 1256286 - RNA, 19 nt, Artificial Sequence
  Description of Artificial Sequence: Synthetic oligonucleotide
  Sense strand starting at position 1341 of SEQ ID NO: 1241226
agaaauugucuuugggcaa

SEQ ID NO: 1256287 - RNA, 19 nt, Artificial Sequence
  Description of Artificial Sequence: Synthetic oligonucleotide
  Antisense strand to SEQ ID NO: 1256286
uugcccaaagacaauuucu

SEQ ID NO: 1256288 - RNA, 19 nt, Artificial Sequence
  Description of Artificial Sequence: Synthetic oligonucleotide
  Sense strand starting at position 1342 of SEQ ID NO: 1241226
gaaauugucuuugggcaag

SEQ ID NO: 1256289 - RNA, 19 nt, Artificial Sequence
  Description of Artificial Sequence: Synthetic oligonucleotide
  Antisense strand to SEQ ID NO: 1256288
cuugcccaaagacaauuuc

SEQ ID NO: 1256290 - RNA, 19 nt, Artificial Sequence
  Description of Artificial Sequence: Synthetic oligonucleotide
  Sense strand starting at position 1413 of SEQ ID NO: 1241226
ccacuaguagccuggagaa

SEQ ID NO: 1256291 - RNA, 19 nt, Artificial Sequence
  Description of Artificial Sequence: Synthetic oligonucleotide
  Antisense strand to SEQ ID NO: 1256290
uucuccaggcuacuagugg

SEQ ID NO: 1256292 - RNA, 19 nt, Artificial Sequence
  Description of Artificial Sequence: Synthetic oligonucleotide
  Sense strand starting at position 1699 of SEQ ID NO: 1241226
guccucagaaccggaaaua

SEQ ID NO: 1256293 - RNA, 19 nt, Artificial Sequence
  Description of Artificial Sequence: Synthetic oligonucleotide
  Antisense strand to SEQ ID NO: 1256292
uauuuccgguucugaggac

SEQ ID NO: 1256294 - RNA, 19 nt, Artificial Sequence
  Description of Artificial Sequence: Synthetic oligonucleotide
  Sense strand starting at position 2018 of SEQ ID NO: 1241226
gggcguugccuuggagaca

SEQ ID NO: 1256295 - RNA, 19 nt, Artificial Sequence
  Description of Artificial Sequence: Synthetic oligonucleotide
  Antisense strand to SEQ ID NO: 1256294
ugucuccaaggcaacgccc

SEQ ID NO: 1256296 - RNA, 19 nt, Artificial Sequence
  Description of Artificial Sequence: Synthetic oligonucleotide
  Sense strand starting at position 2138 of SEQ ID NO: 1241226
cgaggcucuugauaggcaa

SEQ ID NO: 1256297 - RNA, 19 nt, Artificial Sequence
  Description of Artificial Sequence: Synthetic oligonucleotide
  Antisense strand to SEQ ID NO: 1256296
uugccuaucaagagccucg

SEQ ID NO: 1256298 - RNA, 19 nt, Artificial Sequence
  Description of Artificial Sequence: Synthetic oligonucleotide
  Sense strand starting at position 2150 of SEQ ID NO: 1241226
uaggcaaugucacucaguu

SEQ ID NO: 1256299 - RNA, 19 nt, Artificial Sequence
  Description of Artificial Sequence: Synthetic oligonucleotide
  Antisense strand to SEQ ID NO: 1256298
aacugagugacauugccua

SEQ ID NO: 1256300 - RNA, 19 nt, Artificial Sequence
  Description of Artificial Sequence: Synthetic oligonucleotide
  Sense strand starting at position 2171 of SEQ ID NO: 1241226
cgcuuauccucuuaguacu

SEQ ID NO: 1256301 - RNA, 19 nt, Artificial Sequence
  Description of Artificial Sequence: Synthetic oligonucleotide
  Antisense strand to SEQ ID NO: 1256300
aguacuaagaggauaagcg

SEQ ID NO: 1256302 - RNA, 19 nt, Artificial Sequence
  Description of Artificial Sequence: Synthetic oligonucleotide
  Sense strand starting at position 2177 of SEQ ID NO: 1241226
uccucuuaguacucuauga

SEQ ID NO: 1256303 - RNA, 19 nt, Artificial Sequence
  Description of Artificial Sequence: Synthetic oligonucleotide
  Antisense strand to SEQ ID NO: 1256302
ucauagaguacuaagagga

SEQ ID NO: 1256304 - RNA, 19 nt, Artificial Sequence
  Description of Artificial Sequence: Synthetic oligonucleotide
  Sense strand starting at position 2182 of SEQ ID NO: 1241226
uuaguacucuaugaccagu

SEQ ID NO: 1256305 - RNA, 19 nt, Artificial Sequence
  Description of Artificial Sequence: Synthetic oligonucleotide
  Antisense strand to SEQ ID NO: 1256304
acuggucauagaguacuaa

SEQ ID NO: 1256306 - RNA, 19 nt, Artificial Sequence
  Description of Artificial Sequence: Synthetic oligonucleotide
  Sense strand starting at position 2185 of SEQ ID NO: 1241226
guacucuaugaccaguagu

SEQ ID NO: 1256307 - RNA, 19 nt, Artificial Sequence
  Description of Artificial Sequence: Synthetic oligonucleotide
  Antisense strand to SEQ ID NO: 1256306
acuacuggucauagaguac

SEQ ID NO: 1256308 - RNA, 19 nt, Artificial Sequence
  Description of Artificial Sequence: Synthetic oligonucleotide
  Sense strand starting at position 2188 of SEQ ID NO: 1241226
cucuaugaccaguaguaca

SEQ ID NO: 1256309 - RNA, 19 nt, Artificial Sequence
  Description of Artificial Sequence: Synthetic oligonucleotide
  Antisense strand to SEQ ID NO: 1256308
uguacuacuggucauagag

SEQ ID NO: 1256310 - RNA, 19 nt, Artificial Sequence
  Description of Artificial Sequence: Synthetic oligonucleotide
  Sense strand starting at position 2202 of SEQ ID NO: 1241226
guacaauugucgucucauu

SEQ ID NO: 1256311 - RNA, 19 nt, Artificial Sequence
  Description of Artificial Sequence: Synthetic oligonucleotide
  Antisense strand to SEQ ID NO: 1256310
aaugagacgacaauuguac

SEQ ID NO: 1256312 - RNA, 19 nt, Artificial Sequence
  Description of Artificial Sequence: Synthetic oligonucleotide
  Sense strand starting at position 3029 of SEQ ID NO: 1241226
gcgcgugccuccagugauc

SEQ ID NO: 1256313 - RNA, 19 nt, Artificial Sequence
  Description of Artificial Sequence: Synthetic oligonucleotide
  Antisense strand to SEQ ID NO: 1256312
gaucacuggaggcacgcgc

SEQ ID NO: 1256314 - RNA, 19 nt, Artificial Sequence
  Description of Artificial Sequence: Synthetic oligonucleotide
  Sense strand starting at position 3031 of SEQ ID NO: 1241226
gcgugccuccagugaucca

SEQ ID NO: 1256315 - RNA, 19 nt, Artificial Sequence
  Description of Artificial Sequence: Synthetic oligonucleotide
  Antisense strand to SEQ ID NO: 1256314
uggaucacuggaggcacgc

SEQ ID NO: 1256316 - RNA, 19 nt, Artificial Sequence
  Description of Artificial Sequence: Synthetic oligonucleotide
  Sense strand starting at position 3197 of SEQ ID NO: 1241226
cacuaaagcguguggcauu

SEQ ID NO: 1256317 - RNA, 19 nt, Artificial Sequence
  Description of Artificial Sequence: Synthetic oligonucleotide
  Antisense strand to SEQ ID NO: 1256316
aaugccacacgcuuuagug

SEQ ID NO: 1256318 - RNA, 19 nt, Artificial Sequence
  Description of Artificial Sequence: Synthetic oligonucleotide
  Sense strand starting at position 3224 of SEQ ID NO: 1241226
gggcgaugaagguguucua

SEQ ID NO: 1256319 - RNA, 19 nt, Artificial Sequence
  Description of Artificial Sequence: Synthetic oligonucleotide
  Antisense strand to SEQ ID NO: 1256318
uagaacaccuucaucgccc

SEQ ID NO: 1256320 - RNA, 19 nt, Artificial Sequence
  Description of Artificial Sequence: Synthetic oligonucleotide
  Sense strand starting at position 3246 of SEQ ID NO: 1241226
uugugaugguaguugcaca

SEQ ID NO: 1256321 - RNA, 19 nt, Artificial Sequence
  Description of Artificial Sequence: Synthetic oligonucleotide
  Antisense strand to SEQ ID NO: 1256320
ugugcaacuaccaucacaa

SEQ ID NO: 1256322 - RNA, 19 nt, Artificial Sequence
  Description of Artificial Sequence: Synthetic oligonucleotide
  Sense strand starting at position 3308 of SEQ ID NO: 1241226
gagugaauauauuguauag

SEQ ID NO: 1256323 - RNA, 19 nt, Artificial Sequence
  Description of Artificial Sequence: Synthetic oligonucleotide
  Antisense strand to SEQ ID NO: 1256322
cuauacaauauauucacuc

SEQ ID NO: 1256324 - RNA, 19 nt, Artificial Sequence
  Description of Artificial Sequence: Synthetic oligonucleotide
  Sense strand starting at position 3534 of SEQ ID NO: 1241226
cucagacugucauaggcau

SEQ ID NO: 1256325 - RNA, 19 nt, Artificial Sequence
  Description of Artificial Sequence: Synthetic oligonucleotide
  Antisense strand to SEQ ID NO: 1256324
augccuaugacagucugag

SEQ ID NO: 1256326 - RNA, 19 nt, Artificial Sequence
  Description of Artificial Sequence: Synthetic oligonucleotide
  Sense strand starting at position 3540 of SEQ ID NO: 1241226
cugucauaggcauagauaa

SEQ ID NO: 1256327 - RNA, 19 nt, Artificial Sequence
  Description of Artificial Sequence: Synthetic oligonucleotide
  Antisense strand to SEQ ID NO: 1256326
uuaucuaugccuaugacag

SEQ ID NO: 1256328 - RNA, 19 nt, Artificial Sequence
  Description of Artificial Sequence: Synthetic oligonucleotide
  Sense strand starting at position 3587 of SEQ ID NO: 1241226
uguuucucucagggccaua

SEQ ID NO: 1256329 - RNA, 19 nt, Artificial Sequence
  Description of Artificial Sequence: Synthetic oligonucleotide
  Antisense strand to SEQ ID NO: 1256328
uauggcccugagagaaaca

SEQ ID NO: 1256330 - RNA, 19 nt, Artificial Sequence
  Description of Artificial Sequence: Synthetic oligonucleotide
  Sense strand starting at position 3592 of SEQ ID NO: 1241226
cucucagggccauaacaua

SEQ ID NO: 1256331 - RNA, 19 nt, Artificial Sequence
  Description of Artificial Sequence: Synthetic oligonucleotide
  Antisense strand to SEQ ID NO: 1256330
uauguuauggcccugagag

SEQ ID NO: 1256332 - RNA, 19 nt, Artificial Sequence
  Description of Artificial Sequence: Synthetic oligonucleotide
  Sense strand starting at position 3600 of SEQ ID NO: 1241226
gccauaacauaggugcaaa

SEQ ID NO: 1256333 - RNA, 19 nt, Artificial Sequence
  Description of Artificial Sequence: Synthetic oligonucleotide
  Antisense strand to SEQ ID NO: 1256332
uuugcaccuauguuauggc

SEQ ID NO: 1256334 - RNA, 19 nt, Artificial Sequence
  Description of Artificial Sequence: Synthetic oligonucleotide
  Sense strand starting at position 3903 of SEQ ID NO: 1241226
ggaucaucaccugagcuca

SEQ ID NO: 1256335 - RNA, 19 nt, Artificial Sequence
  Description of Artificial Sequence: Synthetic oligonucleotide
  Antisense strand to SEQ ID NO: 1256334
ugagcucaggugaugaucc

SEQ ID NO: 1256336 - RNA, 19 nt, Artificial Sequence
  Description of Artificial Sequence: Synthetic oligonucleotide
  Sense strand starting at position 117 of SEQ ID NO: 1241227
guugaagaguuaccauaug

SEQ ID NO: 1256337 - RNA, 19 nt, Artificial Sequence
  Description of Artificial Sequence: Synthetic oligonucleotide
  Antisense strand to SEQ ID NO: 1256336
cauaugguaacucuucaac

SEQ ID NO: 1256338 - RNA, 19 nt, Artificial Sequence
  Description of Artificial Sequence: Synthetic oligonucleotide
  Sense strand starting at position 155 of SEQ ID NO: 1241227
agguauauucccuaccuga

SEQ ID NO: 1256339 - RNA, 19 nt, Artificial Sequence
  Description of Artificial Sequence: Synthetic oligonucleotide
  Antisense strand to SEQ ID NO: 1256338
ucagguagggaauauaccu

SEQ ID NO: 1256340 - RNA, 19 nt, Artificial Sequence
  Description of Artificial Sequence: Synthetic oligonucleotide
  Sense strand starting at position 195 of SEQ ID NO: 1241227
acacaaagcguguacauaa

SEQ ID NO: 1256341 - RNA, 19 nt, Artificial Sequence
  Description of Artificial Sequence: Synthetic oligonucleotide
  Antisense strand to SEQ ID NO: 1256340
uuauguacacgcuuugugu

SEQ ID NO: 1256342 - RNA, 19 nt, Artificial Sequence
  Description of Artificial Sequence: Synthetic oligonucleotide
  Sense strand starting at position 398 of SEQ ID NO: 1241227
cguuguauuaguguguuaa

SEQ ID NO: 1256343 - RNA, 19 nt, Artificial Sequence
  Description of Artificial Sequence: Synthetic oligonucleotide
  Antisense strand to SEQ ID NO: 1256342
uuaacacacuaauacaacg

SEQ ID NO: 1256344 - RNA, 19 nt, Artificial Sequence
  Description of Artificial Sequence: Synthetic oligonucleotide
  Sense strand starting at position 450 of SEQ ID NO: 1241227
agaaguagauuagugguuu

SEQ ID NO: 1256345 - RNA, 19 nt, Artificial Sequence
  Description of Artificial Sequence: Synthetic oligonucleotide
  Antisense strand to SEQ ID NO: 1256344
aaaccacuaaucuacuucu

SEQ ID NO: 1256346 - RNA, 19 nt, Artificial Sequence
  Description of Artificial Sequence: Synthetic oligonucleotide
  Sense strand starting at position 506 of SEQ ID NO: 1241227
ugacuacuauuaguuauga

SEQ ID NO: 1256347 - RNA, 19 nt, Artificial Sequence
  Description of Artificial Sequence: Synthetic oligonucleotide
  Antisense strand to SEQ ID NO: 1256346
ucauaacuaauaguaguca

SEQ ID NO: 1256348 - RNA, 19 nt, Artificial Sequence
  Description of Artificial Sequence: Synthetic oligonucleotide
  Sense strand starting at position 561 of SEQ ID NO: 1241227
uggugauggcuccauaacu

SEQ ID NO: 1256349 - RNA, 19 nt, Artificial Sequence
  Description of Artificial Sequence: Synthetic oligonucleotide
  Antisense strand to SEQ ID NO: 1256348
aguuauggagccaucacca

SEQ ID NO: 1256350 - RNA, 19 nt, Artificial Sequence
  Description of Artificial Sequence: Synthetic oligonucleotide
  Sense strand starting at position 1030 of SEQ ID NO: 1241227
auaacuggcccguaaucaa

SEQ ID NO: 1256351 - RNA, 19 nt, Artificial Sequence
  Description of Artificial Sequence: Synthetic oligonucleotide
  Antisense strand to SEQ ID NO: 1256350
uugauuacgggccaguuau

SEQ ID NO: 1256352 - RNA, 19 nt, Artificial Sequence
  Description of Artificial Sequence: Synthetic oligonucleotide
  Sense strand starting at position 1124 of SEQ ID NO: 1241227
uagggaacucaguguggau

SEQ ID NO: 1256353 - RNA, 19 nt, Artificial Sequence
  Description of Artificial Sequence: Synthetic oligonucleotide
  Antisense strand to SEQ ID NO: 1256352
auccacacugaguucccua

SEQ ID NO: 1256354 - RNA, 19 nt, Artificial Sequence
  Description of Artificial Sequence: Synthetic oligonucleotide
  Sense strand starting at position 1126 of SEQ ID NO: 1241227
gggaacucaguguggauau

SEQ ID NO: 1256355 - RNA, 19 nt, Artificial Sequence
  Description of Artificial Sequence: Synthetic oligonucleotide
  Antisense strand to SEQ ID NO: 1256354
auauccacacugaguuccc

SEQ ID NO: 1256356 - RNA, 19 nt, Artificial Sequence
  Description of Artificial Sequence: Synthetic oligonucleotide
  Sense strand starting at position 1329 of SEQ ID NO: 1241227
caggaauucgugcaguuaa

SEQ ID NO: 1256357 - RNA, 19 nt, Artificial Sequence
  Description of Artificial Sequence: Synthetic oligonucleotide
  Antisense strand to SEQ ID NO: 1256356
uuaacugcacgaauuccug

SEQ ID NO: 1256358 - RNA, 19 nt, Artificial Sequence
  Description of Artificial Sequence: Synthetic oligonucleotide
  Sense strand starting at position 1449 of SEQ ID NO: 1241227
gugguucugacugaauucu

SEQ ID NO: 1256359 - RNA, 19 nt, Artificial Sequence
  Description of Artificial Sequence: Synthetic oligonucleotide
  Antisense strand to SEQ ID NO: 1256358
agaauucagucagaaccac

SEQ ID NO: 1256360 - RNA, 19 nt, Artificial Sequence
  Description of Artificial Sequence: Synthetic oligonucleotide
  Sense strand starting at position 1488 of SEQ ID NO: 1241227
cugugaaucaaggguagua

SEQ ID NO: 1256361 - RNA, 19 nt, Artificial Sequence
  Description of Artificial Sequence: Synthetic oligonucleotide
  Antisense strand to SEQ ID NO: 1256360
uacuacccuugauucacag

SEQ ID NO: 1256362 - RNA, 19 nt, Artificial Sequence
  Description of Artificial Sequence: Synthetic oligonucleotide
  Sense strand starting at position 1845 of SEQ ID NO: 1241227
gggugcaaacaugagugaa

SEQ ID NO: 1256363 - RNA, 19 nt, Artificial Sequence
  Description of Artificial Sequence: Synthetic oligonucleotide
  Antisense strand to SEQ ID NO: 1256362
uucacucauguuugcaccc

SEQ ID NO: 1256364 - RNA, 19 nt, Artificial Sequence
  Description of Artificial Sequence: Synthetic oligonucleotide
  Sense strand starting at position 1847 of SEQ ID NO: 1241227
gugcaaacaugagugaacu

SEQ ID NO: 1256365 - RNA, 19 nt, Artificial Sequence
  Description of Artificial Sequence: Synthetic oligonucleotide
  Antisense strand to SEQ ID NO: 1256364
aguucacucauguuugcac

SEQ ID NO: 1256366 - RNA, 19 nt, Artificial Sequence
  Description of Artificial Sequence: Synthetic oligonucleotide
  Sense strand starting at position 1866 of SEQ ID NO: 1241227
cuuccaucggcucagaacu

SEQ ID NO: 1256367 - RNA, 19 nt, Artificial Sequence
  Description of Artificial Sequence: Synthetic oligonucleotide
  Antisense strand to SEQ ID NO: 1256366
aguucugagccgauggaag

SEQ ID NO: 1256368 - RNA, 19 nt, Artificial Sequence
  Description of Artificial Sequence: Synthetic oligonucleotide
  Sense strand starting at position 2044 of SEQ ID NO: 1241227
gugcguccgcccagaaaug

SEQ ID NO: 1256369 - RNA, 19 nt, Artificial Sequence
  Description of Artificial Sequence: Synthetic oligonucleotide
  Antisense strand to SEQ ID NO: 1256368
cauuucugggcggacgcac

SEQ ID NO: 1256370 - RNA, 19 nt, Artificial Sequence
  Description of Artificial Sequence: Synthetic oligonucleotide
  Sense strand starting at position 2117 of SEQ ID NO: 1241227
uuugaaucgguuuacgauc

SEQ ID NO: 1256371 - RNA, 19 nt, Artificial Sequence
  Description of Artificial Sequence: Synthetic oligonucleotide
  Antisense strand to SEQ ID NO: 1256370
gaucguaaaccgauucaaa

SEQ ID NO: 1256372 - RNA, 19 nt, Artificial Sequence
  Description of Artificial Sequence: Synthetic oligonucleotide
  Sense strand starting at position 2630 of SEQ ID NO: 1241227
gccaguuuaauggagacuu

SEQ ID NO: 1256373 - RNA, 19 nt, Artificial Sequence
  Description of Artificial Sequence: Synthetic oligonucleotide
  Antisense strand to SEQ ID NO: 1256372
aagucuccauuaaacuggc

SEQ ID NO: 1256374 - RNA, 19 nt, Artificial Sequence
  Description of Artificial Sequence: Synthetic oligonucleotide
  Sense strand starting at position 2682 of SEQ ID NO: 1241227
aaauguaaucaguguagug

SEQ ID NO: 1256375 - RNA, 19 nt, Artificial Sequence
  Description of Artificial Sequence: Synthetic oligonucleotide
  Antisense strand to SEQ ID NO: 1256374
cacuacacugauuacauuu

SEQ ID NO: 1256376 - RNA, 19 nt, Artificial Sequence
  Description of Artificial Sequence: Synthetic oligonucleotide
  Sense strand starting at position 2701 of SEQ ID NO: 1241227
ucucaucagucauuacuga

SEQ ID NO: 1256377 - RNA, 19 nt, Artificial Sequence
  Description of Artificial Sequence: Synthetic oligonucleotide
  Antisense strand to SEQ ID NO: 1256376
ucaguaaugacugaugaga

SEQ ID NO: 1256378 - RNA, 19 nt, Artificial Sequence
  Description of Artificial Sequence: Synthetic oligonucleotide
  Sense strand starting at position 2752 of SEQ ID NO: 1241227
accuguaaucuuuagucau

SEQ ID NO: 1256379 - RNA, 19 nt, Artificial Sequence
  Description of Artificial Sequence: Synthetic oligonucleotide
  Antisense strand to SEQ ID NO: 1256378
augacuaaagauuacaggu

SEQ ID NO: 1256380 - RNA, 19 nt, Artificial Sequence
  Description of Artificial Sequence: Synthetic oligonucleotide
  Sense strand starting at position 2825 of SEQ ID NO: 1241227
ugucuuugaaaggguucua

SEQ ID NO: 1256381 - RNA, 19 nt, Artificial Sequence
  Description of Artificial Sequence: Synthetic oligonucleotide
  Antisense strand to SEQ ID NO: 1256380
uagaacccuuucaaagaca

SEQ ID NO: 1256382 - RNA, 19 nt, Artificial Sequence
  Description of Artificial Sequence: Synthetic oligonucleotide
  Sense strand starting at position 2885 of SEQ ID NO: 1241227
uggcgauuucaugggcaca

SEQ ID NO: 1256383 - RNA, 19 nt, Artificial Sequence
  Description of Artificial Sequence: Synthetic oligonucleotide
  Antisense strand to SEQ ID NO: 1256382
ugugcccaugaaaucgcca

SEQ ID NO: 1256384 - RNA, 19 nt, Artificial Sequence
  Description of Artificial Sequence: Synthetic oligonucleotide
  Sense strand starting at position 2905 of SEQ ID NO: 1241227
aaacaaacaugugugaagu

SEQ ID NO: 1256385 - RNA, 19 nt, Artificial Sequence
  Description of Artificial Sequence: Synthetic oligonucleotide
  Antisense strand to SEQ ID NO: 1256384
acuucacacauguuuguuu

SEQ ID NO: 1256386 - RNA, 19 nt, Artificial Sequence
  Description of Artificial Sequence: Synthetic oligonucleotide
  Sense strand starting at position 2906 of SEQ ID NO: 1241227
aacaaacaugugugaagua

SEQ ID NO: 1256387 - RNA, 19 nt, Artificial Sequence
  Description of Artificial Sequence: Synthetic oligonucleotide
  Antisense strand to SEQ ID NO: 1256386
uacuucacacauguuuguu

SEQ ID NO: 1256388 - RNA, 19 nt, Artificial Sequence
  Description of Artificial Sequence: Synthetic oligonucleotide
  Sense strand starting at position 2915 of SEQ ID NO: 1241227
gugugaaguacugggauag

SEQ ID NO: 1256389 - RNA, 19 nt, Artificial Sequence
  Description of Artificial Sequence: Synthetic oligonucleotide
  Antisense strand to SEQ ID NO: 1256388
cuaucccaguacuucacac

SEQ ID NO: 1256390 - RNA, 19 nt, Artificial Sequence
  Description of Artificial Sequence: Synthetic oligonucleotide
  Sense strand starting at position 2984 of SEQ ID NO: 1241227
gcaggugaugcggaauauu

SEQ ID NO: 1256391 - RNA, 19 nt, Artificial Sequence
  Description of Artificial Sequence: Synthetic oligonucleotide
  Antisense strand to SEQ ID NO: 1256390
aauauuccgcaucaccugc

SEQ ID NO: 1256392 - RNA, 19 nt, Artificial Sequence
  Description of Artificial Sequence: Synthetic oligonucleotide
  Sense strand starting at position 2987 of SEQ ID NO: 1241227
ggugaugcggaauauuauc

SEQ ID NO: 1256393 - RNA, 19 nt, Artificial Sequence
  Description of Artificial Sequence: Synthetic oligonucleotide
  Antisense strand to SEQ ID NO: 1256392
gauaauauuccgcaucacc

SEQ ID NO: 1256394 - RNA, 19 nt, Artificial Sequence
  Description of Artificial Sequence: Synthetic oligonucleotide
  Sense strand starting at position 3046 of SEQ ID NO: 1241227
cucuguuaccacugaaaug

SEQ ID NO: 1256395 - RNA, 19 nt, Artificial Sequence
  Description of Artificial Sequence: Synthetic oligonucleotide
  Antisense strand to SEQ ID NO: 1256394
cauuucagugguaacagag

SEQ ID NO: 1256396 - RNA, 19 nt, Artificial Sequence
  Description of Artificial Sequence: Synthetic oligonucleotide
  Sense strand starting at position 3151 of SEQ ID NO: 1241227
aggcuacuccagugaaacu

SEQ ID NO: 1256397 - RNA, 19 nt, Artificial Sequence
  Description of Artificial Sequence: Synthetic oligonucleotide
  Antisense strand to SEQ ID NO: 1256396
aguuucacuggaguagccu

SEQ ID NO: 1256398 - RNA, 19 nt, Artificial Sequence
  Description of Artificial Sequence: Synthetic oligonucleotide
  Sense strand starting at position 3281 of SEQ ID NO: 1241227
auaggaguuugcuccacca

SEQ ID NO: 1256399 - RNA, 19 nt, Artificial Sequence
  Description of Artificial Sequence: Synthetic oligonucleotide
  Antisense strand to SEQ ID NO: 1256398
ugguggagcaaacuccuau

SEQ ID NO: 1256400 - RNA, 19 nt, Artificial Sequence
  Description of Artificial Sequence: Synthetic oligonucleotide
  Sense strand starting at position 3283 of SEQ ID NO: 1241227
aggaguuugcuccaccacu

SEQ ID NO: 1256401 - RNA, 19 nt, Artificial Sequence
  Description of Artificial Sequence: Synthetic oligonucleotide
  Antisense strand to SEQ ID NO: 1256400
agugguggagcaaacuccu

SEQ ID NO: 1256402 - RNA, 19 nt, Artificial Sequence
  Description of Artificial Sequence: Synthetic oligonucleotide
  Sense strand starting at position 3702 of SEQ ID NO: 1241227
uggcauccagguuaguuaa

SEQ ID NO: 1256403 - RNA, 19 nt, Artificial Sequence
  Description of Artificial Sequence: Synthetic oligonucleotide
  Antisense strand to SEQ ID NO: 1256402
uuaacuaaccuggaugcca

SEQ ID NO: 1256404 - RNA, 19 nt, Artificial Sequence
  Description of Artificial Sequence: Synthetic oligonucleotide
  Sense strand starting at position 3859 of SEQ ID NO: 1241227
guagcuaauaauggguuaa

SEQ ID NO: 1256405 - RNA, 19 nt, Artificial Sequence
  Description of Artificial Sequence: Synthetic oligonucleotide
  Antisense strand to SEQ ID NO: 1256404
uuaacccauuauuagcuac

SEQ ID NO: 1256406 - RNA, 19 nt, Artificial Sequence
  Description of Artificial Sequence: Synthetic oligonucleotide
  Sense strand starting at position 3861 of SEQ ID NO: 1241227
agcuaauaauggguuaaau

SEQ ID NO: 1256407 - RNA, 19 nt, Artificial Sequence
  Description of Artificial Sequence: Synthetic oligonucleotide
  Antisense strand to SEQ ID NO: 1256406
auuuaacccauuauuagcu

SEQ ID NO: 1256408 - RNA, 19 nt, Artificial Sequence
  Description of Artificial Sequence: Synthetic oligonucleotide
  Sense strand starting at position 3872 of SEQ ID NO: 1241227
gguuaaaucguauacauau

SEQ ID NO: 1256409 - RNA, 19 nt, Artificial Sequence
  Description of Artificial Sequence: Synthetic oligonucleotide
  Antisense strand to SEQ ID NO: 1256408
auauguauacgauuuaacc

SEQ ID NO: 1256410 - RNA, 19 nt, Artificial Sequence
  Description of Artificial Sequence: Synthetic oligonucleotide
  Sense strand starting at position 3900 of SEQ ID NO: 1241227
aaugcuagagucgauaauc

SEQ ID NO: 1256411 - RNA, 19 nt, Artificial Sequence
  Description of Artificial Sequence: Synthetic oligonucleotide
  Antisense strand to SEQ ID NO: 1256410
gauuaucgacucuagcauu

SEQ ID NO: 1256412 - RNA, 19 nt, Artificial Sequence
  Description of Artificial Sequence: Synthetic oligonucleotide
  Sense strand starting at position 3905 of SEQ ID NO: 1241227
uagagucgauaaucuuaca

SEQ ID NO: 1256413 - RNA, 19 nt, Artificial Sequence
  Description of Artificial Sequence: Synthetic oligonucleotide
  Antisense strand to SEQ ID NO: 1256412
uguaagauuaucgacucua

SEQ ID NO: 1256414 - RNA, 19 nt, Artificial Sequence
  Description of Artificial Sequence: Synthetic oligonucleotide
  Sense strand starting at position 3957 of SEQ ID NO: 1241227
acucuaugucuuuaguauc

SEQ ID NO: 1256415 - RNA, 19 nt, Artificial Sequence
  Description of Artificial Sequence: Synthetic oligonucleotide
  Antisense strand to SEQ ID NO: 1256414
gauacuaaagacauagagu

SEQ ID NO: 1256416 - RNA, 19 nt, Artificial Sequence
  Description of Artificial Sequence: Synthetic oligonucleotide
  Sense strand starting at position 142 of SEQ ID NO: 1241228
agaccuugccaugaguguu

SEQ ID NO: 1256417 - RNA, 19 nt, Artificial Sequence
  Description of Artificial Sequence: Synthetic oligonucleotide
  Antisense strand to SEQ ID NO: 1256416
aacacucauggcaaggucu

SEQ ID NO: 1256418 - RNA, 19 nt, Artificial Sequence
  Description of Artificial Sequence: Synthetic oligonucleotide
  Sense strand starting at position 417 of SEQ ID NO: 1241228
ugaacuauguugcccauga

SEQ ID NO: 1256419 - RNA, 19 nt, Artificial Sequence
  Description of Artificial Sequence: Synthetic oligonucleotide
  Antisense strand to SEQ ID NO: 1256418
ucaugggcaacauaguuca

SEQ ID NO: 1256420 - RNA, 19 nt, Artificial Sequence
  Description of Artificial Sequence: Synthetic oligonucleotide
  Sense strand starting at position 418 of SEQ ID NO: 1241228
gaacuauguugcccaugau

SEQ ID NO: 1256421 - RNA, 19 nt, Artificial Sequence
  Description of Artificial Sequence: Synthetic oligonucleotide
  Antisense strand to SEQ ID NO: 1256420
aucaugggcaacauaguuc

SEQ ID NO: 1256422 - RNA, 19 nt, Artificial Sequence
  Description of Artificial Sequence: Synthetic oligonucleotide
  Sense strand starting at position 421 of SEQ ID NO: 1241228
cuauguugcccaugauaac

SEQ ID NO: 1256423 - RNA, 19 nt, Artificial Sequence
  Description of Artificial Sequence: Synthetic oligonucleotide
  Antisense strand to SEQ ID NO: 1256422
guuaucaugggcaacauag

SEQ ID NO: 1256424 - RNA, 19 nt, Artificial Sequence
  Description of Artificial Sequence: Synthetic oligonucleotide
  Sense strand starting at position 465 of SEQ ID NO: 1241228
caaagauguguaugauucu

SEQ ID NO: 1256425 - RNA, 19 nt, Artificial Sequence
  Description of Artificial Sequence: Synthetic oligonucleotide
  Antisense strand to SEQ ID NO: 1256424
agaaucauacacaucuuug

SEQ ID NO: 1256426 - RNA, 19 nt, Artificial Sequence
  Description of Artificial Sequence: Synthetic oligonucleotide
  Sense strand starting at position 554 of SEQ ID NO: 1241228
ucugacguguagucauuua

SEQ ID NO: 1256427 - RNA, 19 nt, Artificial Sequence
  Description of Artificial Sequence: Synthetic oligonucleotide
  Antisense strand to SEQ ID NO: 1256426
uaaaugacuacacgucaga

SEQ ID NO: 1256428 - RNA, 19 nt, Artificial Sequence
  Description of Artificial Sequence: Synthetic oligonucleotide
  Sense strand starting at position 576 of SEQ ID NO: 1241228
aggcaaagaaaugguugua

SEQ ID NO: 1256429 - RNA, 19 nt, Artificial Sequence
  Description of Artificial Sequence: Synthetic oligonucleotide
  Antisense strand to SEQ ID NO: 1256428
uacaaccauuucuuugccu

SEQ ID NO: 1256430 - RNA, 19 nt, Artificial Sequence
  Description of Artificial Sequence: Synthetic oligonucleotide
  Sense strand starting at position 579 of SEQ ID NO: 1241228
caaagaaaugguuguacuu

SEQ ID NO: 1256431 - RNA, 19 nt, Artificial Sequence
  Description of Artificial Sequence: Synthetic oligonucleotide
  Antisense strand to SEQ ID NO: 1256430
aaguacaaccauuucuuug

SEQ ID NO: 1256432 - RNA, 19 nt, Artificial Sequence
  Description of Artificial Sequence: Synthetic oligonucleotide
  Sense strand starting at position 618 of SEQ ID NO: 1241228
guggcauggcaguacuaau

SEQ ID NO: 1256433 - RNA, 19 nt, Artificial Sequence
  Description of Artificial Sequence: Synthetic oligonucleotide
  Antisense strand to SEQ ID NO: 1256432
auuaguacugccaugccac

SEQ ID NO: 1256434 - RNA, 19 nt, Artificial Sequence
  Description of Artificial Sequence: Synthetic oligonucleotide
  Sense strand starting at position 699 of SEQ ID NO: 1241228
gggugaugucacuagauac

SEQ ID NO: 1256435 - RNA, 19 nt, Artificial Sequence
  Description of Artificial Sequence: Synthetic oligonucleotide
  Antisense strand to SEQ ID NO: 1256434
guaucuagugacaucaccc

SEQ ID NO: 1256436 - RNA, 19 nt, Artificial Sequence
  Description of Artificial Sequence: Synthetic oligonucleotide
  Sense strand starting at position 1213 of SEQ ID NO: 1241228
ugacuugcugccuaacaaa

SEQ ID NO: 1256437 - RNA, 19 nt, Artificial Sequence
  Description of Artificial Sequence: Synthetic oligonucleotide
  Antisense strand to SEQ ID NO: 1256436
uuuguuaggcagcaaguca

SEQ ID NO: 1256438 - RNA, 19 nt, Artificial Sequence
  Description of Artificial Sequence: Synthetic oligonucleotide
  Sense strand starting at position 1264 of SEQ ID NO: 1241228
accguuguccuagaaacag

SEQ ID NO: 1256439 - RNA, 19 nt, Artificial Sequence
  Description of Artificial Sequence: Synthetic oligonucleotide
  Antisense strand to SEQ ID NO: 1256438
cuguuucuaggacaacggu

SEQ ID NO: 1256440 - RNA, 19 nt, Artificial Sequence
  Description of Artificial Sequence: Synthetic oligonucleotide
  Sense strand starting at position 1395 of SEQ ID NO: 1241228
uucgauguggcccaggauu

SEQ ID NO: 1256441 - RNA, 19 nt, Artificial Sequence
  Description of Artificial Sequence: Synthetic oligonucleotide
  Antisense strand to SEQ ID NO: 1256440
aauccugggccacaucgaa

SEQ ID NO: 1256442 - RNA, 19 nt, Artificial Sequence
  Description of Artificial Sequence: Synthetic oligonucleotide
  Sense strand starting at position 2491 of SEQ ID NO: 1241228
cuggcauuggcagaguuua

SEQ ID NO: 1256443 - RNA, 19 nt, Artificial Sequence
  Description of Artificial Sequence: Synthetic oligonucleotide
  Antisense strand to SEQ ID NO: 1256442
uaaacucugccaaugccag

SEQ ID NO: 1256444 - RNA, 19 nt, Artificial Sequence
  Description of Artificial Sequence: Synthetic oligonucleotide
  Sense strand starting at position 2642 of SEQ ID NO: 1241228
aguguuuggacccaguaga

SEQ ID NO: 1256445 - RNA, 19 nt, Artificial Sequence
  Description of Artificial Sequence: Synthetic oligonucleotide
  Antisense strand to SEQ ID NO: 1256444
ucuacuggguccaaacacu

SEQ ID NO: 1256446 - RNA, 19 nt, Artificial Sequence
  Description of Artificial Sequence: Synthetic oligonucleotide
  Sense strand starting at position 2668 of SEQ ID NO: 1241228
auguaauuaucugucacua

SEQ ID NO: 1256447 - RNA, 19 nt, Artificial Sequence
  Description of Artificial Sequence: Synthetic oligonucleotide
  Antisense strand to SEQ ID NO: 1256446
uagugacagauaauuacau

SEQ ID NO: 1256448 - RNA, 19 nt, Artificial Sequence
  Description of Artificial Sequence: Synthetic oligonucleotide
  Sense strand starting at position 2930 of SEQ ID NO: 1241228
ggccuauugcacgaguaac

SEQ ID NO: 1256449 - RNA, 19 nt, Artificial Sequence
  Description of Artificial Sequence: Synthetic oligonucleotide
  Antisense strand to SEQ ID NO: 1256448
guuacucgugcaauaggcc

SEQ ID NO: 1256450 - RNA, 19 nt, Artificial Sequence
  Description of Artificial Sequence: Synthetic oligonucleotide
  Sense strand starting at position 2941 of SEQ ID NO: 1241228
cgaguaacacucuaggguu

SEQ ID NO: 1256451 - RNA, 19 nt, Artificial Sequence
  Description of Artificial Sequence: Synthetic oligonucleotide
  Antisense strand to SEQ ID NO: 1256450
aacccuagaguguuacucg

SEQ ID NO: 1256452 - RNA, 19 nt, Artificial Sequence
  Description of Artificial Sequence: Synthetic oligonucleotide
  Sense strand starting at position 3042 of SEQ ID NO: 1241228
cuguucuuucaggaagggu

SEQ ID NO: 1256453 - RNA, 19 nt, Artificial Sequence
  Description of Artificial Sequence: Synthetic oligonucleotide
  Antisense strand to SEQ ID NO: 1256452
acccuuccugaaagaacag

SEQ ID NO: 1256454 - RNA, 19 nt, Artificial Sequence
  Description of Artificial Sequence: Synthetic oligonucleotide
  Sense strand starting at position 3055 of SEQ ID NO: 1241228
aaggguuuguaggugauaa

SEQ ID NO: 1256455 - RNA, 19 nt, Artificial Sequence
  Description of Artificial Sequence: Synthetic oligonucleotide
  Antisense strand to SEQ ID NO: 1256454
uuaucaccuacaaacccuu

SEQ ID NO: 1256456 - RNA, 19 nt, Artificial Sequence
  Description of Artificial Sequence: Synthetic oligonucleotide
  Sense strand starting at position 3056 of SEQ ID NO: 1241228
aggguuuguaggugauaaa

SEQ ID NO: 1256457 - RNA, 19 nt, Artificial Sequence
  Description of Artificial Sequence: Synthetic oligonucleotide
  Antisense strand to SEQ ID NO: 1256456
uuuaucaccuacaaacccu

SEQ ID NO: 1256458 - RNA, 19 nt, Artificial Sequence
  Description of Artificial Sequence: Synthetic oligonucleotide
  Sense strand starting at position 3057 of SEQ ID NO: 1241228
ggguuuguaggugauaaag

SEQ ID NO: 1256459 - RNA, 19 nt, Artificial Sequence
  Description of Artificial Sequence: Synthetic oligonucleotide
  Antisense strand to SEQ ID NO: 1256458
cuuuaucaccuacaaaccc

SEQ ID NO: 1256460 - RNA, 19 nt, Artificial Sequence
  Description of Artificial Sequence: Synthetic oligonucleotide
  Sense strand starting at position 3067 of SEQ ID NO: 1241228
gugauaaaguuccucaguc

SEQ ID NO: 1256461 - RNA, 19 nt, Artificial Sequence
  Description of Artificial Sequence: Synthetic oligonucleotide
  Antisense strand to SEQ ID NO: 1256460
gacugaggaacuuuaucac

SEQ ID NO: 1256462 - RNA, 19 nt, Artificial Sequence
  Description of Artificial Sequence: Synthetic oligonucleotide
  Sense strand starting at position 3075 of SEQ ID NO: 1241228
guuccucaguccuuggaaa

SEQ ID NO: 1256463 - RNA, 19 nt, Artificial Sequence
  Description of Artificial Sequence: Synthetic oligonucleotide
  Antisense strand to SEQ ID NO: 1256462
uuuccaaggacugaggaac

SEQ ID NO: 1256464 - RNA, 19 nt, Artificial Sequence
  Description of Artificial Sequence: Synthetic oligonucleotide
  Sense strand starting at position 3076 of SEQ ID NO: 1241228
uuccucaguccuuggaaau

SEQ ID NO: 1256465 - RNA, 19 nt, Artificial Sequence
  Description of Artificial Sequence: Synthetic oligonucleotide
  Antisense strand to SEQ ID NO: 1256464
auuuccaaggacugaggaa

SEQ ID NO: 1256466 - RNA, 19 nt, Artificial Sequence
  Description of Artificial Sequence: Synthetic oligonucleotide
  Sense strand starting at position 3077 of SEQ ID NO: 1241228
uccucaguccuuggaaauc

SEQ ID NO: 1256467 - RNA, 19 nt, Artificial Sequence
  Description of Artificial Sequence: Synthetic oligonucleotide
  Antisense strand to SEQ ID NO: 1256466
gauuuccaaggacugagga

SEQ ID NO: 1256468 - RNA, 19 nt, Artificial Sequence
  Description of Artificial Sequence: Synthetic oligonucleotide
  Sense strand starting at position 3143 of SEQ ID NO: 1241228
auagaacucugggcucaaa

SEQ ID NO: 1256469 - RNA, 19 nt, Artificial Sequence
  Description of Artificial Sequence: Synthetic oligonucleotide
  Antisense strand to SEQ ID NO: 1256468
uuugagcccagaguucuau

SEQ ID NO: 1256470 - RNA, 19 nt, Artificial Sequence
  Description of Artificial Sequence: Synthetic oligonucleotide
  Sense strand starting at position 3321 of SEQ ID NO: 1241228
gacguuccuccaggauacu

SEQ ID NO: 1256471 - RNA, 19 nt, Artificial Sequence
  Description of Artificial Sequence: Synthetic oligonucleotide
  Antisense strand to SEQ ID NO: 1256470
aguauccuggaggaacguc

SEQ ID NO: 1256472 - RNA, 19 nt, Artificial Sequence
  Description of Artificial Sequence: Synthetic oligonucleotide
  Sense strand starting at position 3334 of SEQ ID NO: 1241228
gauacuguuagauaugggu

SEQ ID NO: 1256473 - RNA, 19 nt, Artificial Sequence
  Description of Artificial Sequence: Synthetic oligonucleotide
  Antisense strand to SEQ ID NO: 1256472
acccauaucuaacaguauc

SEQ ID NO: 1256474 - RNA, 19 nt, Artificial Sequence
  Description of Artificial Sequence: Synthetic oligonucleotide
  Sense strand starting at position 3367 of SEQ ID NO: 1241228
auggauuagcaguggguaa

SEQ ID NO: 1256475 - RNA, 19 nt, Artificial Sequence
  Description of Artificial Sequence: Synthetic oligonucleotide
  Antisense strand to SEQ ID NO: 1256474
uuacccacugcuaauccau

SEQ ID NO: 1256476 - RNA, 19 nt, Artificial Sequence
  Description of Artificial Sequence: Synthetic oligonucleotide
  Sense strand starting at position 3369 of SEQ ID NO: 1241228
ggauuagcaguggguaaga

SEQ ID NO: 1256477 - RNA, 19 nt, Artificial Sequence
  Description of Artificial Sequence: Synthetic oligonucleotide
  Antisense strand to SEQ ID NO: 1256476
ucuuacccacugcuaaucc

SEQ ID NO: 1256478 - RNA, 19 nt, Artificial Sequence
  Description of Artificial Sequence: Synthetic oligonucleotide
  Sense strand starting at position 3385 of SEQ ID NO: 1241228
agaccuuucuaucugaagu

SEQ ID NO: 1256479 - RNA, 19 nt, Artificial Sequence
  Description of Artificial Sequence: Synthetic oligonucleotide
  Antisense strand to SEQ ID NO: 1256478
acuucagauagaaaggucu

SEQ ID NO: 1256480 - RNA, 19 nt, Artificial Sequence
  Description of Artificial Sequence: Synthetic oligonucleotide
  Sense strand starting at position 3395 of SEQ ID NO: 1241228
aucugaagucaugguucuu

SEQ ID NO: 1256481 - RNA, 19 nt, Artificial Sequence
  Description of Artificial Sequence: Synthetic oligonucleotide
  Antisense strand to SEQ ID NO: 1256480
aagaaccaugacuucagau

SEQ ID NO: 1256482 - RNA, 19 nt, Artificial Sequence
  Description of Artificial Sequence: Synthetic oligonucleotide
  Sense strand starting at position 3406 of SEQ ID NO: 1241228
ugguucuuuagccauagga

SEQ ID NO: 1256483 - RNA, 19 nt, Artificial Sequence
  Description of Artificial Sequence: Synthetic oligonucleotide
  Antisense strand to SEQ ID NO: 1256482
uccuauggcuaaagaacca

SEQ ID NO: 1256484 - RNA, 19 nt, Artificial Sequence
  Description of Artificial Sequence: Synthetic oligonucleotide
  Sense strand starting at position 3475 of SEQ ID NO: 1241228
auucuuauugacggacacu

SEQ ID NO: 1256485 - RNA, 19 nt, Artificial Sequence
  Description of Artificial Sequence: Synthetic oligonucleotide
  Antisense strand to SEQ ID NO: 1256484
aguguccgucaauaagaau

SEQ ID NO: 1256486 - RNA, 19 nt, Artificial Sequence
  Description of Artificial Sequence: Synthetic oligonucleotide
  Sense strand starting at position 3728 of SEQ ID NO: 1241228
aguuaucucuauuccauga

SEQ ID NO: 1256487 - RNA, 19 nt, Artificial Sequence
  Description of Artificial Sequence: Synthetic oligonucleotide
  Antisense strand to SEQ ID NO: 1256486
ucauggaauagagauaacu

SEQ ID NO: 1256488 - RNA, 19 nt, Artificial Sequence
  Description of Artificial Sequence: Synthetic oligonucleotide
  Sense strand starting at position 3811 of SEQ ID NO: 1241228
uuaugauccuugguuguca

SEQ ID NO: 1256489 - RNA, 19 nt, Artificial Sequence
  Description of Artificial Sequence: Synthetic oligonucleotide
  Antisense strand to SEQ ID NO: 1256488
ugacaaccaaggaucauaa

SEQ ID NO: 1256490 - RNA, 19 nt, Artificial Sequence
  Description of Artificial Sequence: Synthetic oligonucleotide
  Sense strand starting at position 3812 of SEQ ID NO: 1241228
uaugauccuugguugucau

SEQ ID NO: 1256491 - RNA, 19 nt, Artificial Sequence
  Description of Artificial Sequence: Synthetic oligonucleotide
  Antisense strand to SEQ ID NO: 1256490
augacaaccaaggaucaua

SEQ ID NO: 1256492 - RNA, 19 nt, Artificial Sequence
  Description of Artificial Sequence: Synthetic oligonucleotide
  Sense strand starting at position 3813 of SEQ ID NO: 1241228
augauccuugguugucauu

SEQ ID NO: 1256493 - RNA, 19 nt, Artificial Sequence
  Description of Artificial Sequence: Synthetic oligonucleotide
  Antisense strand to SEQ ID NO: 1256492
aaugacaaccaaggaucau

SEQ ID NO: 1256494 - RNA, 19 nt, Artificial Sequence
  Description of Artificial Sequence: Synthetic oligonucleotide
  Sense strand starting at position 3982 of SEQ ID NO: 1241228
aaucaaugugcugguagau

SEQ ID NO: 1256495 - RNA, 19 nt, Artificial Sequence
  Description of Artificial Sequence: Synthetic oligonucleotide
  Antisense strand to SEQ ID NO: 1256494
aucuaccagcacauugauu

SEQ ID NO: 1256496 - RNA, 19 nt, Artificial Sequence
  Description of Artificial Sequence: Synthetic oligonucleotide
  Sense strand starting at position 196 of SEQ ID NO: 1241229
uaggccaucgauugaucua

SEQ ID NO: 1256497 - RNA, 19 nt, Artificial Sequence
  Description of Artificial Sequence: Synthetic oligonucleotide
  Antisense strand to SEQ ID NO: 1256496
uagaucaaucgauggccua

SEQ ID NO: 1256498 - RNA, 19 nt, Artificial Sequence
  Description of Artificial Sequence: Synthetic oligonucleotide
  Sense strand starting at position 239 of SEQ ID NO: 1241229
cugcuauuucccgacuggu

SEQ ID NO: 1256499 - RNA, 19 nt, Artificial Sequence
  Description of Artificial Sequence: Synthetic oligonucleotide
  Antisense strand to SEQ ID NO: 1256498
accagucgggaaauagcag

SEQ ID NO: 1256500 - RNA, 19 nt, Artificial Sequence
  Description of Artificial Sequence: Synthetic oligonucleotide
  Sense strand starting at position 242 of SEQ ID NO: 1241229
cuauuucccgacugguguu

SEQ ID NO: 1256501 - RNA, 19 nt, Artificial Sequence
  Description of Artificial Sequence: Synthetic oligonucleotide
  Antisense strand to SEQ ID NO: 1256500
aacaccagucgggaaauag

SEQ ID NO: 1256502 - RNA, 19 nt, Artificial Sequence
  Description of Artificial Sequence: Synthetic oligonucleotide
  Sense strand starting at position 285 of SEQ ID NO: 1241229
gcacgagggagcuaaacua

SEQ ID NO: 1256503 - RNA, 19 nt, Artificial Sequence
  Description of Artificial Sequence: Synthetic oligonucleotide
  Antisense strand to SEQ ID NO: 1256502
uaguuuagcucccucgugc

SEQ ID NO: 1256504 - RNA, 19 nt, Artificial Sequence
  Description of Artificial Sequence: Synthetic oligonucleotide
  Sense strand starting at position 327 of SEQ ID NO: 1241229
uggagaggccucuggaguu

SEQ ID NO: 1256505 - RNA, 19 nt, Artificial Sequence
  Description of Artificial Sequence: Synthetic oligonucleotide
  Antisense strand to SEQ ID NO: 1256504
aacuccagaggccucucca

SEQ ID NO: 1256506 - RNA, 19 nt, Artificial Sequence
  Description of Artificial Sequence: Synthetic oligonucleotide
  Sense strand starting at position 532 of SEQ ID NO: 1241229
aggagcucuaacugugaca

SEQ ID NO: 1256507 - RNA, 19 nt, Artificial Sequence
  Description of Artificial Sequence: Synthetic oligonucleotide
  Antisense strand to SEQ ID NO: 1256506
ugucacaguuagagcuccu

SEQ ID NO: 1256508 - RNA, 19 nt, Artificial Sequence
  Description of Artificial Sequence: Synthetic oligonucleotide
  Sense strand starting at position 534 of SEQ ID NO: 1241229
gagcucuaacugugacaag

SEQ ID NO: 1256509 - RNA, 19 nt, Artificial Sequence
  Description of Artificial Sequence: Synthetic oligonucleotide
  Antisense strand to SEQ ID NO: 1256508
cuugucacaguuagagcuc

SEQ ID NO: 1256510 - RNA, 19 nt, Artificial Sequence
  Description of Artificial Sequence: Synthetic oligonucleotide
  Sense strand starting at position 608 of SEQ ID NO: 1241229
gucucuuagcgacaggauu

SEQ ID NO: 1256511 - RNA, 19 nt, Artificial Sequence
  Description of Artificial Sequence: Synthetic oligonucleotide
  Antisense strand to SEQ ID NO: 1256510
aauccugucgcuaagagac

SEQ ID NO: 1256512 - RNA, 19 nt, Artificial Sequence
  Description of Artificial Sequence: Synthetic oligonucleotide
  Sense strand starting at position 722 of SEQ ID NO: 1241229
ggguaugccggccagaguu

SEQ ID NO: 1256513 - RNA, 19 nt, Artificial Sequence
  Description of Artificial Sequence: Synthetic oligonucleotide
  Antisense strand to SEQ ID NO: 1256512
aacucuggccggcauaccc

SEQ ID NO: 1256514 - RNA, 19 nt, Artificial Sequence
  Description of Artificial Sequence: Synthetic oligonucleotide
  Sense strand starting at position 759 of SEQ ID NO: 1241229
cuaucugugucuguacaga

SEQ ID NO: 1256515 - RNA, 19 nt, Artificial Sequence
  Description of Artificial Sequence: Synthetic oligonucleotide
  Antisense strand to SEQ ID NO: 1256514
ucuguacagacacagauag

SEQ ID NO: 1256516 - RNA, 19 nt, Artificial Sequence
  Description of Artificial Sequence: Synthetic oligonucleotide
  Sense strand starting at position 827 of SEQ ID NO: 1241229
ugcauuggugugucugagu

SEQ ID NO: 1256517 - RNA, 19 nt, Artificial Sequence
  Description of Artificial Sequence: Synthetic oligonucleotide
  Antisense strand to SEQ ID NO: 1256516
acucagacacaccaaugca

SEQ ID NO: 1256518 - RNA, 19 nt, Artificial Sequence
  Description of Artificial Sequence: Synthetic oligonucleotide
  Sense strand starting at position 967 of SEQ ID NO: 1241229
ugugccuuucuggauaugu

SEQ ID NO: 1256519 - RNA, 19 nt, Artificial Sequence
  Description of Artificial Sequence: Synthetic oligonucleotide
  Antisense strand to SEQ ID NO: 1256518
acauauccagaaaggcaca

SEQ ID NO: 1256520 - RNA, 19 nt, Artificial Sequence
  Description of Artificial Sequence: Synthetic oligonucleotide
  Sense strand starting at position 969 of SEQ ID NO: 1241229
ugccuuucuggauauguga

SEQ ID NO: 1256521 - RNA, 19 nt, Artificial Sequence
  Description of Artificial Sequence: Synthetic oligonucleotide
  Antisense strand to SEQ ID NO: 1256520
ucacauauccagaaaggca

SEQ ID NO: 1256522 - RNA, 19 nt, Artificial Sequence
  Description of Artificial Sequence: Synthetic oligonucleotide
  Sense strand starting at position 1565 of SEQ ID NO: 1241229
cagagaaaugauggcgaca

SEQ ID NO: 1256523 - RNA, 19 nt, Artificial Sequence
  Description of Artificial Sequence: Synthetic oligonucleotide
  Antisense strand to SEQ ID NO: 1256522
ugucgccaucauuucucug

SEQ ID NO: 1256524 - RNA, 19 nt, Artificial Sequence
  Description of Artificial Sequence: Synthetic oligonucleotide
  Sense strand starting at position 1678 of SEQ ID NO: 1241229
gcggauacacauugggaaa

SEQ ID NO: 1256525 - RNA, 19 nt, Artificial Sequence
  Description of Artificial Sequence: Synthetic oligonucleotide
  Antisense strand to SEQ ID NO: 1256524
uuucccaauguguauccgc

SEQ ID NO: 1256526 - RNA, 19 nt, Artificial Sequence
  Description of Artificial Sequence: Synthetic oligonucleotide
  Sense strand starting at position 2064 of SEQ ID NO: 1241229
uggccuuacccuuguggga

SEQ ID NO: 1256527 - RNA, 19 nt, Artificial Sequence
  Description of Artificial Sequence: Synthetic oligonucleotide
  Antisense strand to SEQ ID NO: 1256526
ucccacaaggguaaggcca

SEQ ID NO: 1256528 - RNA, 19 nt, Artificial Sequence
  Description of Artificial Sequence: Synthetic oligonucleotide
  Sense strand starting at position 2085 of SEQ ID NO: 1241229
ggcugugccaugcacagau

SEQ ID NO: 1256529 - RNA, 19 nt, Artificial Sequence
  Description of Artificial Sequence: Synthetic oligonucleotide
  Antisense strand to SEQ ID NO: 1256528
aucugugcauggcacagcc

SEQ ID NO: 1256530 - RNA, 19 nt, Artificial Sequence
  Description of Artificial Sequence: Synthetic oligonucleotide
  Sense strand starting at position 2119 of SEQ ID NO: 1241229
caaguaauuccuggugaaa

SEQ ID NO: 1256531 - RNA, 19 nt, Artificial Sequence
  Description of Artificial Sequence: Synthetic oligonucleotide
  Antisense strand to SEQ ID NO: 1256530
uuucaccaggaauuacuug

SEQ ID NO: 1256532 - RNA, 19 nt, Artificial Sequence
  Description of Artificial Sequence: Synthetic oligonucleotide
  Sense strand starting at position 2122 of SEQ ID NO: 1241229
guaauuccuggugaaauca

SEQ ID NO: 1256533 - RNA, 19 nt, Artificial Sequence
  Description of Artificial Sequence: Synthetic oligonucleotide
  Antisense strand to SEQ ID NO: 1256532
ugauuucaccaggaauuac

SEQ ID NO: 1256534 - RNA, 19 nt, Artificial Sequence
  Description of Artificial Sequence: Synthetic oligonucleotide
  Sense strand starting at position 2188 of SEQ ID NO: 1241229
ugaagacauuugggcacau

SEQ ID NO: 1256535 - RNA, 19 nt, Artificial Sequence
  Description of Artificial Sequence: Synthetic oligonucleotide
  Antisense strand to SEQ ID NO: 1256534
augugcccaaaugucuuca

SEQ ID NO: 1256536 - RNA, 19 nt, Artificial Sequence
  Description of Artificial Sequence: Synthetic oligonucleotide
  Sense strand starting at position 2201 of SEQ ID NO: 1241229
gcacauuguggucugcgau

SEQ ID NO: 1256537 - RNA, 19 nt, Artificial Sequence
  Description of Artificial Sequence: Synthetic oligonucleotide
  Antisense strand to SEQ ID NO: 1256536
aucgcagaccacaaugugc

SEQ ID NO: 1256538 - RNA, 19 nt, Artificial Sequence
  Description of Artificial Sequence: Synthetic oligonucleotide
  Sense strand starting at position 2218 of SEQ ID NO: 1241229
augaguacgcaagagcauu

SEQ ID NO: 1256539 - RNA, 19 nt, Artificial Sequence
  Description of Artificial Sequence: Synthetic oligonucleotide
  Antisense strand to SEQ ID NO: 1256538
aaugcucuugcguacucau

SEQ ID NO: 1256540 - RNA, 19 nt, Artificial Sequence
  Description of Artificial Sequence: Synthetic oligonucleotide
  Sense strand starting at position 2255 of SEQ ID NO: 1241229
ccuuaagcugcucauguau

SEQ ID NO: 1256541 - RNA, 19 nt, Artificial Sequence
  Description of Artificial Sequence: Synthetic oligonucleotide
  Antisense strand to SEQ ID NO: 1256540
auacaugagcagcuuaagg

SEQ ID NO: 1256542 - RNA, 19 nt, Artificial Sequence
  Description of Artificial Sequence: Synthetic oligonucleotide
  Sense strand starting at position 2332 of SEQ ID NO: 1241229
gggcuacacaggugauuaa

SEQ ID NO: 1256543 - RNA, 19 nt, Artificial Sequence
  Description of Artificial Sequence: Synthetic oligonucleotide
  Antisense strand to SEQ ID NO: 1256542
uuaaucaccuguguagccc

SEQ ID NO: 1256544 - RNA, 19 nt, Artificial Sequence
  Description of Artificial Sequence: Synthetic oligonucleotide
  Sense strand starting at position 2375 of SEQ ID NO: 1241229
ggcagauguauauggaaca

SEQ ID NO: 1256545 - RNA, 19 nt, Artificial Sequence
  Description of Artificial Sequence: Synthetic oligonucleotide
  Antisense strand to SEQ ID NO: 1256544
uguuccauauacaucugcc

SEQ ID NO: 1256546 - RNA, 19 nt, Artificial Sequence
  Description of Artificial Sequence: Synthetic oligonucleotide
  Sense strand starting at position 2502 of SEQ ID NO: 1241229
gggugcaauauggaugagu

SEQ ID NO: 1256547 - RNA, 19 nt, Artificial Sequence
  Description of Artificial Sequence: Synthetic oligonucleotide
  Antisense strand to SEQ ID NO: 1256546
acucauccauauugcaccc

SEQ ID NO: 1256548 - RNA, 19 nt, Artificial Sequence
  Description of Artificial Sequence: Synthetic oligonucleotide
  Sense strand starting at position 2572 of SEQ ID NO: 1241229
cuugaaugccaagauagua

SEQ ID NO: 1256549 - RNA, 19 nt, Artificial Sequence
  Description of Artificial Sequence: Synthetic oligonucleotide
  Antisense strand to SEQ ID NO: 1256548
uacuaucuuggcauucaag

SEQ ID NO: 1256550 - RNA, 19 nt, Artificial Sequence
  Description of Artificial Sequence: Synthetic oligonucleotide
  Sense strand starting at position 2584 of SEQ ID NO: 1241229
gauaguauuugcuagaaca

SEQ ID NO: 1256551 - RNA, 19 nt, Artificial Sequence
  Description of Artificial Sequence: Synthetic oligonucleotide
  Antisense strand to SEQ ID NO: 1256550
uguucuagcaaauacuauc

SEQ ID NO: 1256552 - RNA, 19 nt, Artificial Sequence
  Description of Artificial Sequence: Synthetic oligonucleotide
  Sense strand starting at position 2608 of SEQ ID NO: 1241229
ggagacagcuacuuuaguu

SEQ ID NO: 1256553 - RNA, 19 nt, Artificial Sequence
  Description of Artificial Sequence: Synthetic oligonucleotide
  Antisense strand to SEQ ID NO: 1256552
aacuaaaguagcugucucc

SEQ ID NO: 1256554 - RNA, 19 nt, Artificial Sequence
  Description of Artificial Sequence: Synthetic oligonucleotide
  Sense strand starting at position 2678 of SEQ ID NO: 1241229
ugagacuucugacuaguga

SEQ ID NO: 1256555 - RNA, 19 nt, Artificial Sequence
  Description of Artificial Sequence: Synthetic oligonucleotide
  Antisense strand to SEQ ID NO: 1256554
ucacuagucagaagucuca

SEQ ID NO: 1256556 - RNA, 19 nt, Artificial Sequence
  Description of Artificial Sequence: Synthetic oligonucleotide
  Sense strand starting at position 2733 of SEQ ID NO: 1241229
cccauuagugugcaugcau

SEQ ID NO: 1256557 - RNA, 19 nt, Artificial Sequence
  Description of Artificial Sequence: Synthetic oligonucleotide
  Antisense strand to SEQ ID NO: 1256556
augcaugcacacuaauggg

SEQ ID NO: 1256558 - RNA, 19 nt, Artificial Sequence
  Description of Artificial Sequence: Synthetic oligonucleotide
  Sense strand starting at position 2835 of SEQ ID NO: 1241229
gacagacuuuguguugguu

SEQ ID NO: 1256559 - RNA, 19 nt, Artificial Sequence
  Description of Artificial Sequence: Synthetic oligonucleotide
  Antisense strand to SEQ ID NO: 1256558
aaccaacacaaagucuguc

SEQ ID NO: 1256560 - RNA, 19 nt, Artificial Sequence
  Description of Artificial Sequence: Synthetic oligonucleotide
  Sense strand starting at position 2863 of SEQ ID NO: 1241229
uugguucuuucuccaggaa

SEQ ID NO: 1256561 - RNA, 19 nt, Artificial Sequence
  Description of Artificial Sequence: Synthetic oligonucleotide
  Antisense strand to SEQ ID NO: 1256560
uuccuggagaaagaaccaa

SEQ ID NO: 1256562 - RNA, 19 nt, Artificial Sequence
  Description of Artificial Sequence: Synthetic oligonucleotide
  Sense strand starting at position 2866 of SEQ ID NO: 1241229
guucuuucuccaggaagcu

SEQ ID NO: 1256563 - RNA, 19 nt, Artificial Sequence
  Description of Artificial Sequence: Synthetic oligonucleotide
  Antisense strand to SEQ ID NO: 1256562
agcuuccuggagaaagaac

SEQ ID NO: 1256564 - RNA, 19 nt, Artificial Sequence
  Description of Artificial Sequence: Synthetic oligonucleotide
  Sense strand starting at position 2986 of SEQ ID NO: 1241229
caagucuaucccuguggaa

SEQ ID NO: 1256565 - RNA, 19 nt, Artificial Sequence
  Description of Artificial Sequence: Synthetic oligonucleotide
  Antisense strand to SEQ ID NO: 1256564
uuccacagggauagacuug

SEQ ID NO: 1256566 - RNA, 19 nt, Artificial Sequence
  Description of Artificial Sequence: Synthetic oligonucleotide
  Sense strand starting at position 2988 of SEQ ID NO: 1241229
agucuaucccuguggaaug

SEQ ID NO: 1256567 - RNA, 19 nt, Artificial Sequence
  Description of Artificial Sequence: Synthetic oligonucleotide
  Antisense strand to SEQ ID NO: 1256566
cauuccacagggauagacu

SEQ ID NO: 1256568 - RNA, 19 nt, Artificial Sequence
  Description of Artificial Sequence: Synthetic oligonucleotide
  Sense strand starting at position 3533 of SEQ ID NO: 1241229
gggugucauguuggacaga

SEQ ID NO: 1256569 - RNA, 19 nt, Artificial Sequence
  Description of Artificial Sequence: Synthetic oligonucleotide
  Antisense strand to SEQ ID NO: 1256568
ucuguccaacaugacaccc

SEQ ID NO: 1256570 - RNA, 19 nt, Artificial Sequence
  Description of Artificial Sequence: Synthetic oligonucleotide
  Sense strand starting at position 3536 of SEQ ID NO: 1241229
ugucauguuggacagauag

SEQ ID NO: 1256571 - RNA, 19 nt, Artificial Sequence
  Description of Artificial Sequence: Synthetic oligonucleotide
  Antisense strand to SEQ ID NO: 1256570
cuaucuguccaacaugaca

SEQ ID NO: 1256572 - RNA, 19 nt, Artificial Sequence
  Description of Artificial Sequence: Synthetic oligonucleotide
  Sense strand starting at position 3538 of SEQ ID NO: 1241229
ucauguuggacagauaggu

SEQ ID NO: 1256573 - RNA, 19 nt, Artificial Sequence
  Description of Artificial Sequence: Synthetic oligonucleotide
  Antisense strand to SEQ ID NO: 1256572
accuaucuguccaacauga

SEQ ID NO: 1256574 - RNA, 19 nt, Artificial Sequence
  Description of Artificial Sequence: Synthetic oligonucleotide
  Sense strand starting at position 3777 of SEQ ID NO: 1241229
gguugucacucauuccaug

SEQ ID NO: 1256575 - RNA, 19 nt, Artificial Sequence
  Description of Artificial Sequence: Synthetic oligonucleotide
  Antisense strand to SEQ ID NO: 1256574
cauggaaugagugacaacc

SEQ ID NO: 1256576 - RNA, 19 nt, Artificial Sequence
  Description of Artificial Sequence: Synthetic oligonucleotide
  Sense strand starting at position 199 of SEQ ID NO: 1241230
aagcuuaacccagguuagu

SEQ ID NO: 1256577 - RNA, 19 nt, Artificial Sequence
  Description of Artificial Sequence: Synthetic oligonucleotide
  Antisense strand to SEQ ID NO: 1256576
acuaaccuggguuaagcuu

SEQ ID NO: 1256578 - RNA, 19 nt, Artificial Sequence
  Description of Artificial Sequence: Synthetic oligonucleotide
  Sense strand starting at position 706 of SEQ ID NO: 1241230
uaggccaucgauugaucua

SEQ ID NO: 1256579 - RNA, 19 nt, Artificial Sequence
  Description of Artificial Sequence: Synthetic oligonucleotide
  Antisense strand to SEQ ID NO: 1256578
uagaucaaucgauggccua

SEQ ID NO: 1256580 - RNA, 19 nt, Artificial Sequence
  Description of Artificial Sequence: Synthetic oligonucleotide
  Sense strand starting at position 749 of SEQ ID NO: 1241230
cugcuauuucccgacuggu

SEQ ID NO: 1256581 - RNA, 19 nt, Artificial Sequence
  Description of Artificial Sequence: Synthetic oligonucleotide
  Antisense strand to SEQ ID NO: 1256580
accagucgggaaauagcag

SEQ ID NO: 1256582 - RNA, 19 nt, Artificial Sequence
  Description of Artificial Sequence: Synthetic oligonucleotide
  Sense strand starting at position 752 of SEQ ID NO: 1241230
cuauuucccgacugguguu

SEQ ID NO: 1256583 - RNA, 19 nt, Artificial Sequence
  Description of Artificial Sequence: Synthetic oligonucleotide
  Antisense strand to SEQ ID NO: 1256582
aacaccagucgggaaauag

SEQ ID NO: 1256584 - RNA, 19 nt, Artificial Sequence
  Description of Artificial Sequence: Synthetic oligonucleotide
  Sense strand starting at position 795 of SEQ ID NO: 1241230
gcacgagggagcuaaacua

SEQ ID NO: 1256585 - RNA, 19 nt, Artificial Sequence
  Description of Artificial Sequence: Synthetic oligonucleotide
  Antisense strand to SEQ ID NO: 1256584
uaguuuagcucccucgugc

SEQ ID NO: 1256586 - RNA, 19 nt, Artificial Sequence
  Description of Artificial Sequence: Synthetic oligonucleotide
  Sense strand starting at position 837 of SEQ ID NO: 1241230
uggagaggccucuggaguu

SEQ ID NO: 1256587 - RNA, 19 nt, Artificial Sequence
  Description of Artificial Sequence: Synthetic oligonucleotide
  Antisense strand to SEQ ID NO: 1256586
aacuccagaggccucucca

SEQ ID NO: 1256588 - RNA, 19 nt, Artificial Sequence
  Description of Artificial Sequence: Synthetic oligonucleotide
  Sense strand starting at position 1042 of SEQ ID NO: 1241230
aggagcucuaacugugaca

SEQ ID NO: 1256589 - RNA, 19 nt, Artificial Sequence
  Description of Artificial Sequence: Synthetic oligonucleotide
  Antisense strand to SEQ ID NO: 1256588
ugucacaguuagagcuccu

SEQ ID NO: 1256590 - RNA, 19 nt, Artificial Sequence
  Description of Artificial Sequence: Synthetic oligonucleotide
  Sense strand starting at position 1044 of SEQ ID NO: 1241230
gagcucuaacugugacaag

SEQ ID NO: 1256591 - RNA, 19 nt, Artificial Sequence
  Description of Artificial Sequence: Synthetic oligonucleotide
  Antisense strand to SEQ ID NO: 1256590
cuugucacaguuagagcuc

SEQ ID NO: 1256592 - RNA, 19 nt, Artificial Sequence
  Description of Artificial Sequence: Synthetic oligonucleotide
  Sense strand starting at position 1118 of SEQ ID NO: 1241230
gucucuuagcgacaggauu

SEQ ID NO: 1256593 - RNA, 19 nt, Artificial Sequence
  Description of Artificial Sequence: Synthetic oligonucleotide
  Antisense strand to SEQ ID NO: 1256592
aauccugucgcuaagagac

SEQ ID NO: 1256594 - RNA, 19 nt, Artificial Sequence
  Description of Artificial Sequence: Synthetic oligonucleotide
  Sense strand starting at position 1232 of SEQ ID NO: 1241230
ggguaugccggccagaguu

SEQ ID NO: 1256595 - RNA, 19 nt, Artificial Sequence
  Description of Artificial Sequence: Synthetic oligonucleotide
  Antisense strand to SEQ ID NO: 1256594
aacucuggccggcauaccc

SEQ ID NO: 1256596 - RNA, 19 nt, Artificial Sequence
  Description of Artificial Sequence: Synthetic oligonucleotide
  Sense strand starting at position 1265 of SEQ ID NO: 1241230
ccaucuaucugugucugua

SEQ ID NO: 1256597 - RNA, 19 nt, Artificial Sequence
  Description of Artificial Sequence: Synthetic oligonucleotide
  Antisense strand to SEQ ID NO: 1256596
uacagacacagauagaugg

SEQ ID NO: 1256598 - RNA, 19 nt, Artificial Sequence
  Description of Artificial Sequence: Synthetic oligonucleotide
  Sense strand starting at position 1269 of SEQ ID NO: 1241230
cuaucugugucuguacaga

SEQ ID NO: 1256599 - RNA, 19 nt, Artificial Sequence
  Description of Artificial Sequence: Synthetic oligonucleotide
  Antisense strand to SEQ ID NO: 1256598
ucuguacagacacagauag

SEQ ID NO: 1256600 - RNA, 19 nt, Artificial Sequence
  Description of Artificial Sequence: Synthetic oligonucleotide
  Sense strand starting at position 1337 of SEQ ID NO: 1241230
ugcauuggugugucugagu

SEQ ID NO: 1256601 - RNA, 19 nt, Artificial Sequence
  Description of Artificial Sequence: Synthetic oligonucleotide
  Antisense strand to SEQ ID NO: 1256600
acucagacacaccaaugca

SEQ ID NO: 1256602 - RNA, 19 nt, Artificial Sequence
  Description of Artificial Sequence: Synthetic oligonucleotide
  Sense strand starting at position 1477 of SEQ ID NO: 1241230
ugugccuuucuggauaugu

SEQ ID NO: 1256603 - RNA, 19 nt, Artificial Sequence
  Description of Artificial Sequence: Synthetic oligonucleotide
  Antisense strand to SEQ ID NO: 1256602
acauauccagaaaggcaca

SEQ ID NO: 1256604 - RNA, 19 nt, Artificial Sequence
  Description of Artificial Sequence: Synthetic oligonucleotide
  Sense strand starting at position 1479 of SEQ ID NO: 1241230
ugccuuucuggauauguga

SEQ ID NO: 1256605 - RNA, 19 nt, Artificial Sequence
  Description of Artificial Sequence: Synthetic oligonucleotide
  Antisense strand to SEQ ID NO: 1256604
ucacauauccagaaaggca

SEQ ID NO: 1256606 - RNA, 19 nt, Artificial Sequence
  Description of Artificial Sequence: Synthetic oligonucleotide
  Sense strand starting at position 2075 of SEQ ID NO: 1241230
cagagaaaugauggcgaca

SEQ ID NO: 1256607 - RNA, 19 nt, Artificial Sequence
  Description of Artificial Sequence: Synthetic oligonucleotide
  Antisense strand to SEQ ID NO: 1256606
ugucgccaucauuucucug

SEQ ID NO: 1256608 - RNA, 19 nt, Artificial Sequence
  Description of Artificial Sequence: Synthetic oligonucleotide
  Sense strand starting at position 2188 of SEQ ID NO: 1241230
gcggauacacauugggaaa

SEQ ID NO: 1256609 - RNA, 19 nt, Artificial Sequence
  Description of Artificial Sequence: Synthetic oligonucleotide
  Antisense strand to SEQ ID NO: 1256608
uuucccaauguguauccgc

SEQ ID NO: 1256610 - RNA, 19 nt, Artificial Sequence
  Description of Artificial Sequence: Synthetic oligonucleotide
  Sense strand starting at position 2574 of SEQ ID NO: 1241230
uggccuuacccuuguggga

SEQ ID NO: 1256611 - RNA, 19 nt, Artificial Sequence
  Description of Artificial Sequence: Synthetic oligonucleotide
  Antisense strand to SEQ ID NO: 1256610
ucccacaaggguaaggcca

SEQ ID NO: 1256612 - RNA, 19 nt, Artificial Sequence
  Description of Artificial Sequence: Synthetic oligonucleotide
  Sense strand starting at position 2595 of SEQ ID NO: 1241230
ggcugugccaugcacagau

SEQ ID NO: 1256613 - RNA, 19 nt, Artificial Sequence
  Description of Artificial Sequence: Synthetic oligonucleotide
  Antisense strand to SEQ ID NO: 1256612
aucugugcauggcacagcc

SEQ ID NO: 1256614 - RNA, 19 nt, Artificial Sequence
  Description of Artificial Sequence: Synthetic oligonucleotide
  Sense strand starting at position 2604 of SEQ ID NO: 1241230
augcacagaucuuaaggaa

SEQ ID NO: 1256615 - RNA, 19 nt, Artificial Sequence
  Description of Artificial Sequence: Synthetic oligonucleotide
  Antisense strand to SEQ ID NO: 1256614
uuccuuaagaucugugcau

SEQ ID NO: 1256616 - RNA, 19 nt, Artificial Sequence
  Description of Artificial Sequence: Synthetic oligonucleotide
  Sense strand starting at position 2629 of SEQ ID NO: 1241230
caaguaauuccuggugaaa

SEQ ID NO: 1256617 - RNA, 19 nt, Artificial Sequence
  Description of Artificial Sequence: Synthetic oligonucleotide
  Antisense strand to SEQ ID NO: 1256616
uuucaccaggaauuacuug

SEQ ID NO: 1256618 - RNA, 19 nt, Artificial Sequence
  Description of Artificial Sequence: Synthetic oligonucleotide
  Sense strand starting at position 2632 of SEQ ID NO: 1241230
guaauuccuggugaaauca

SEQ ID NO: 1256619 - RNA, 19 nt, Artificial Sequence
  Description of Artificial Sequence: Synthetic oligonucleotide
  Antisense strand to SEQ ID NO: 1256618
ugauuucaccaggaauuac

SEQ ID NO: 1256620 - RNA, 19 nt, Artificial Sequence
  Description of Artificial Sequence: Synthetic oligonucleotide
  Sense strand starting at position 2698 of SEQ ID NO: 1241230
ugaagacauuugggcacau

SEQ ID NO: 1256621 - RNA, 19 nt, Artificial Sequence
  Description of Artificial Sequence: Synthetic oligonucleotide
  Antisense strand to SEQ ID NO: 1256620
augugcccaaaugucuuca

SEQ ID NO: 1256622 - RNA, 19 nt, Artificial Sequence
  Description of Artificial Sequence: Synthetic oligonucleotide
  Sense strand starting at position 2711 of SEQ ID NO: 1241230
gcacauuguggucugcgau

SEQ ID NO: 1256623 - RNA, 19 nt, Artificial Sequence
  Description of Artificial Sequence: Synthetic oligonucleotide
  Antisense strand to SEQ ID NO: 1256622
aucgcagaccacaaugugc

SEQ ID NO: 1256624 - RNA, 19 nt, Artificial Sequence
  Description of Artificial Sequence: Synthetic oligonucleotide
  Sense strand starting at position 2728 of SEQ ID NO: 1241230
augaguacgcaagagcauu

SEQ ID NO: 1256625 - RNA, 19 nt, Artificial Sequence
  Description of Artificial Sequence: Synthetic oligonucleotide
  Antisense strand to SEQ ID NO: 1256624
aaugcucuugcguacucau

SEQ ID NO: 1256626 - RNA, 19 nt, Artificial Sequence
  Description of Artificial Sequence: Synthetic oligonucleotide
  Sense strand starting at position 2765 of SEQ ID NO: 1241230
ccuuaagcugcucauguau

SEQ ID NO: 1256627 - RNA, 19 nt, Artificial Sequence
  Description of Artificial Sequence: Synthetic oligonucleotide
  Antisense strand to SEQ ID NO: 1256626
auacaugagcagcuuaagg

SEQ ID NO: 1256628 - RNA, 19 nt, Artificial Sequence
  Description of Artificial Sequence: Synthetic oligonucleotide
  Sense strand starting at position 2842 of SEQ ID NO: 1241230
gggcuacacaggugauuaa

SEQ ID NO: 1256629 - RNA, 19 nt, Artificial Sequence
  Description of Artificial Sequence: Synthetic oligonucleotide
  Antisense strand to SEQ ID NO: 1256628
uuaaucaccuguguagccc

SEQ ID NO: 1256630 - RNA, 19 nt, Artificial Sequence
  Description of Artificial Sequence: Synthetic oligonucleotide
  Sense strand starting at position 2885 of SEQ ID NO: 1241230
ggcagauguauauggaaca

SEQ ID NO: 1256631 - RNA, 19 nt, Artificial Sequence
  Description of Artificial Sequence: Synthetic oligonucleotide
  Antisense strand to SEQ ID NO: 1256630
uguuccauauacaucugcc

SEQ ID NO: 1256632 - RNA, 19 nt, Artificial Sequence
  Description of Artificial Sequence: Synthetic oligonucleotide
  Sense strand starting at position 3012 of SEQ ID NO: 1241230
gggugcaauauggaugagu

SEQ ID NO: 1256633 - RNA, 19 nt, Artificial Sequence
  Description of Artificial Sequence: Synthetic oligonucleotide
  Antisense strand to SEQ ID NO: 1256632
acucauccauauugcaccc

SEQ ID NO: 1256634 - RNA, 19 nt, Artificial Sequence
  Description of Artificial Sequence: Synthetic oligonucleotide
  Sense strand starting at position 3082 of SEQ ID NO: 1241230
cuugaaugccaagauagua

SEQ ID NO: 1256635 - RNA, 19 nt, Artificial Sequence
  Description of Artificial Sequence: Synthetic oligonucleotide
  Antisense strand to SEQ ID NO: 1256634
uacuaucuuggcauucaag

SEQ ID NO: 1256636 - RNA, 19 nt, Artificial Sequence
  Description of Artificial Sequence: Synthetic oligonucleotide
  Sense strand starting at position 3094 of SEQ ID NO: 1241230
gauaguauuugcuagaaca

SEQ ID NO: 1256637 - RNA, 19 nt, Artificial Sequence
  Description of Artificial Sequence: Synthetic oligonucleotide
  Antisense strand to SEQ ID NO: 1256636
uguucuagcaaauacuauc

SEQ ID NO: 1256638 - RNA, 19 nt, Artificial Sequence
  Description of Artificial Sequence: Synthetic oligonucleotide
  Sense strand starting at position 3118 of SEQ ID NO: 1241230
ggagacagcuacuuuaguu

SEQ ID NO: 1256639 - RNA, 19 nt, Artificial Sequence
  Description of Artificial Sequence: Synthetic oligonucleotide
  Antisense strand to SEQ ID NO: 1256638
aacuaaaguagcugucucc

SEQ ID NO: 1256640 - RNA, 19 nt, Artificial Sequence
  Description of Artificial Sequence: Synthetic oligonucleotide
  Sense strand starting at position 3188 of SEQ ID NO: 1241230
ugagacuucugacuaguga

SEQ ID NO: 1256641 - RNA, 19 nt, Artificial Sequence
  Description of Artificial Sequence: Synthetic oligonucleotide
  Antisense strand to SEQ ID NO: 1256640
ucacuagucagaagucuca

SEQ ID NO: 1256642 - RNA, 19 nt, Artificial Sequence
  Description of Artificial Sequence: Synthetic oligonucleotide
  Sense strand starting at position 3243 of SEQ ID NO: 1241230
cccauuagugugcaugcau

SEQ ID NO: 1256643 - RNA, 19 nt, Artificial Sequence
  Description of Artificial Sequence: Synthetic oligonucleotide
  Antisense strand to SEQ ID NO: 1256642
augcaugcacacuaauggg

SEQ ID NO: 1256644 - RNA, 19 nt, Artificial Sequence
  Description of Artificial Sequence: Synthetic oligonucleotide
  Sense strand starting at position 3345 of SEQ ID NO: 1241230
gacagacuuuguguugguu

SEQ ID NO: 1256645 - RNA, 19 nt, Artificial Sequence
  Description of Artificial Sequence: Synthetic oligonucleotide
  Antisense strand to SEQ ID NO: 1256644
aaccaacacaaagucuguc

SEQ ID NO: 1256646 - RNA, 19 nt, Artificial Sequence
  Description of Artificial Sequence: Synthetic oligonucleotide
  Sense strand starting at position 3373 of SEQ ID NO: 1241230
uugguucuuucuccaggaa

SEQ ID NO: 1256647 - RNA, 19 nt, Artificial Sequence
  Description of Artificial Sequence: Synthetic oligonucleotide
  Antisense strand to SEQ ID NO: 1256646
uuccuggagaaagaaccaa

SEQ ID NO: 1256648 - RNA, 19 nt, Artificial Sequence
  Description of Artificial Sequence: Synthetic oligonucleotide
  Sense strand starting at position 3376 of SEQ ID NO: 1241230
guucuuucuccaggaagcu

SEQ ID NO: 1256649 - RNA, 19 nt, Artificial Sequence
  Description of Artificial Sequence: Synthetic oligonucleotide
  Antisense strand to SEQ ID NO: 1256648
agcuuccuggagaaagaac

SEQ ID NO: 1256650 - RNA, 19 nt, Artificial Sequence
  Description of Artificial Sequence: Synthetic oligonucleotide
  Sense strand starting at position 3496 of SEQ ID NO: 1241230
caagucuaucccuguggaa

SEQ ID NO: 1256651 - RNA, 19 nt, Artificial Sequence
  Description of Artificial Sequence: Synthetic oligonucleotide
  Antisense strand to SEQ ID NO: 1256650
uuccacagggauagacuug

SEQ ID NO: 1256652 - RNA, 19 nt, Artificial Sequence
  Description of Artificial Sequence: Synthetic oligonucleotide
  Sense strand starting at position 3498 of SEQ ID NO: 1241230
agucuaucccuguggaaug

SEQ ID NO: 1256653 - RNA, 19 nt, Artificial Sequence
  Description of Artificial Sequence: Synthetic oligonucleotide
  Antisense strand to SEQ ID NO: 1256652
cauuccacagggauagacu

SEQ ID NO: 1256654 - RNA, 19 nt, Artificial Sequence
  Description of Artificial Sequence: Synthetic oligonucleotide
  Sense strand starting at position 3549 of SEQ ID NO: 1241230
gaggguuugugggaagaga

SEQ ID NO: 1256655 - RNA, 19 nt, Artificial Sequence
  Description of Artificial Sequence: Synthetic oligonucleotide
  Antisense strand to SEQ ID NO: 1256654
ucucuucccacaaacccuc

SEQ ID NO: 1256656 - RNA, 19 nt, Artificial Sequence
  Description of Artificial Sequence: Synthetic oligonucleotide
  Sense strand starting at position 78 of SEQ ID NO: 1241231
gugaucaucuuuguauauc

SEQ ID NO: 1256657 - RNA, 19 nt, Artificial Sequence
  Description of Artificial Sequence: Synthetic oligonucleotide
  Antisense strand to SEQ ID NO: 1256656
gauauacaaagaugaucac

SEQ ID NO: 1256658 - RNA, 19 nt, Artificial Sequence
  Description of Artificial Sequence: Synthetic oligonucleotide
  Sense strand starting at position 112 of SEQ ID NO: 1241231
uggucaaggcagcauaaau

SEQ ID NO: 1256659 - RNA, 19 nt, Artificial Sequence
  Description of Artificial Sequence: Synthetic oligonucleotide
  Antisense strand to SEQ ID NO: 1256658
auuuaugcugccuugacca

SEQ ID NO: 1256660 - RNA, 19 nt, Artificial Sequence
  Description of Artificial Sequence: Synthetic oligonucleotide
  Sense strand starting at position 221 of SEQ ID NO: 1241231
acaguuacuugcccucuua

SEQ ID NO: 1256661 - RNA, 19 nt, Artificial Sequence
  Description of Artificial Sequence: Synthetic oligonucleotide
  Antisense strand to SEQ ID NO: 1256660
uaagagggcaaguaacugu

SEQ ID NO: 1256662 - RNA, 19 nt, Artificial Sequence
  Description of Artificial Sequence: Synthetic oligonucleotide
  Sense strand starting at position 240 of SEQ ID NO: 1241231
auaauaaucgugcauguug

SEQ ID NO: 1256663 - RNA, 19 nt, Artificial Sequence
  Description of Artificial Sequence: Synthetic oligonucleotide
  Antisense strand to SEQ ID NO: 1256662
caacaugcacgauuauuau

SEQ ID NO: 1256664 - RNA, 19 nt, Artificial Sequence
  Description of Artificial Sequence: Synthetic oligonucleotide
  Sense strand starting at position 269 of SEQ ID NO: 1241231
uggcuugcgccuuuaaucu

SEQ ID NO: 1256665 - RNA, 19 nt, Artificial Sequence
  Description of Artificial Sequence: Synthetic oligonucleotide
  Antisense strand to SEQ ID NO: 1256664
agauuaaaggcgcaagcca

SEQ ID NO: 1256666 - RNA, 19 nt, Artificial Sequence
  Description of Artificial Sequence: Synthetic oligonucleotide
  Sense strand starting at position 819 of SEQ ID NO: 1241231
aaauaauuaccgugcaugu

SEQ ID NO: 1256667 - RNA, 19 nt, Artificial Sequence
  Description of Artificial Sequence: Synthetic oligonucleotide
  Antisense strand to SEQ ID NO: 1256666
acaugcacgguaauuauuu

SEQ ID NO: 1256668 - RNA, 19 nt, Artificial Sequence
  Description of Artificial Sequence: Synthetic oligonucleotide
  Sense strand starting at position 877 of SEQ ID NO: 1241231
aacagaggaguuuggguua

SEQ ID NO: 1256669 - RNA, 19 nt, Artificial Sequence
  Description of Artificial Sequence: Synthetic oligonucleotide
  Antisense strand to SEQ ID NO: 1256668
uaacccaaacuccucuguu

SEQ ID NO: 1256670 - RNA, 19 nt, Artificial Sequence
  Description of Artificial Sequence: Synthetic oligonucleotide
  Sense strand starting at position 922 of SEQ ID NO: 1241231
gcucuucucggucaguuga

SEQ ID NO: 1256671 - RNA, 19 nt, Artificial Sequence
  Description of Artificial Sequence: Synthetic oligonucleotide
  Antisense strand to SEQ ID NO: 1256670
ucaacugaccgagaagagc

SEQ ID NO: 1256672 - RNA, 19 nt, Artificial Sequence
  Description of Artificial Sequence: Synthetic oligonucleotide
  Sense strand starting at position 1154 of SEQ ID NO: 1241231
ggguauaaaugauagcuca

SEQ ID NO: 1256673 - RNA, 19 nt, Artificial Sequence
  Description of Artificial Sequence: Synthetic oligonucleotide
  Antisense strand to SEQ ID NO: 1256672
ugagcuaucauuuauaccc

SEQ ID NO: 1256674 - RNA, 19 nt, Artificial Sequence
  Description of Artificial Sequence: Synthetic oligonucleotide
  Sense strand starting at position 1170 of SEQ ID NO: 1241231
ucagguucgccuggucaca

SEQ ID NO: 1256675 - RNA, 19 nt, Artificial Sequence
  Description of Artificial Sequence: Synthetic oligonucleotide
  Antisense strand to SEQ ID NO: 1256674
ugugaccaggcgaaccuga

SEQ ID NO: 1256676 - RNA, 19 nt, Artificial Sequence
  Description of Artificial Sequence: Synthetic oligonucleotide
  Sense strand starting at position 1270 of SEQ ID NO: 1241231
agaacuucgcagugauagu

SEQ ID NO: 1256677 - RNA, 19 nt, Artificial Sequence
  Description of Artificial Sequence: Synthetic oligonucleotide
  Antisense strand to SEQ ID NO: 1256676
acuaucacugcgaaguucu

SEQ ID NO: 1256678 - RNA, 19 nt, Artificial Sequence
  Description of Artificial Sequence: Synthetic oligonucleotide
  Sense strand starting at position 1271 of SEQ ID NO: 1241231
gaacuucgcagugauagug

SEQ ID NO: 1256679 - RNA, 19 nt, Artificial Sequence
  Description of Artificial Sequence: Synthetic oligonucleotide
  Antisense strand to SEQ ID NO: 1256678
cacuaucacugcgaaguuc

SEQ ID NO: 1256680 - RNA, 19 nt, Artificial Sequence
  Description of Artificial Sequence: Synthetic oligonucleotide
  Sense strand starting at position 1342 of SEQ ID NO: 1241231
uacagugugguacaaacaa

SEQ ID NO: 1256681 - RNA, 19 nt, Artificial Sequence
  Description of Artificial Sequence: Synthetic oligonucleotide
  Antisense strand to SEQ ID NO: 1256680
uuguuuguaccacacugua

SEQ ID NO: 1256682 - RNA, 19 nt, Artificial Sequence
  Description of Artificial Sequence: Synthetic oligonucleotide
  Sense strand starting at position 1360 of SEQ ID NO: 1241231
accgaaaggucucuggagu

SEQ ID NO: 1256683 - RNA, 19 nt, Artificial Sequence
  Description of Artificial Sequence: Synthetic oligonucleotide
  Antisense strand to SEQ ID NO: 1256682
acuccagagaccuuucggu

SEQ ID NO: 1256684 - RNA, 19 nt, Artificial Sequence
  Description of Artificial Sequence: Synthetic oligonucleotide
  Sense strand starting at position 1361 of SEQ ID NO: 1241231
ccgaaaggucucuggaguc

SEQ ID NO: 1256685 - RNA, 19 nt, Artificial Sequence
  Description of Artificial Sequence: Synthetic oligonucleotide
  Antisense strand to SEQ ID NO: 1256684
gacuccagagaccuuucgg

SEQ ID NO: 1256686 - RNA, 19 nt, Artificial Sequence
  Description of Artificial Sequence: Synthetic oligonucleotide
  Sense strand starting at position 1367 of SEQ ID NO: 1241231
ggucucuggagucgaagaa

SEQ ID NO: 1256687 - RNA, 19 nt, Artificial Sequence
  Description of Artificial Sequence: Synthetic oligonucleotide
  Antisense strand to SEQ ID NO: 1256686
uucuucgacuccagagacc

SEQ ID NO: 1256688 - RNA, 19 nt, Artificial Sequence
  Description of Artificial Sequence: Synthetic oligonucleotide
  Sense strand starting at position 1627 of SEQ ID NO: 1241231
gcuugaaacccauggagaa

SEQ ID NO: 1256689 - RNA, 19 nt, Artificial Sequence
  Description of Artificial Sequence: Synthetic oligonucleotide
  Antisense strand to SEQ ID NO: 1256688
uucuccauggguuucaagc

SEQ ID NO: 1256690 - RNA, 19 nt, Artificial Sequence
  Description of Artificial Sequence: Synthetic oligonucleotide
  Sense strand starting at position 1669 of SEQ ID NO: 1241231
ccacuucugccgggaacga

SEQ ID NO: 1256691 - RNA, 19 nt, Artificial Sequence
  Description of Artificial Sequence: Synthetic oligonucleotide
  Antisense strand to SEQ ID NO: 1256690
ucguucccggcagaagugg

SEQ ID NO: 1256692 - RNA, 19 nt, Artificial Sequence
  Description of Artificial Sequence: Synthetic oligonucleotide
  Sense strand starting at position 2078 of SEQ ID NO: 1241231
gucugucuggagcgaaauu

SEQ ID NO: 1256693 - RNA, 19 nt, Artificial Sequence
  Description of Artificial Sequence: Synthetic oligonucleotide
  Antisense strand to SEQ ID NO: 1256692
aauuucgcuccagacagac

SEQ ID NO: 1256694 - RNA, 19 nt, Artificial Sequence
  Description of Artificial Sequence: Synthetic oligonucleotide
  Sense strand starting at position 2102 of SEQ ID NO: 1241231
cagaaauuauugguaaugu

SEQ ID NO: 1256695 - RNA, 19 nt, Artificial Sequence
  Description of Artificial Sequence: Synthetic oligonucleotide
  Antisense strand to SEQ ID NO: 1256694
acauuaccaauaauuucug

SEQ ID NO: 1256696 - RNA, 19 nt, Artificial Sequence
  Description of Artificial Sequence: Synthetic oligonucleotide
  Sense strand starting at position 2176 of SEQ ID NO: 1241231
guaugauuugcuggcguca

SEQ ID NO: 1256697 - RNA, 19 nt, Artificial Sequence
  Description of Artificial Sequence: Synthetic oligonucleotide
  Antisense strand to SEQ ID NO: 1256696
ugacgccagcaaaucauac

SEQ ID NO: 1256698 - RNA, 19 nt, Artificial Sequence
  Description of Artificial Sequence: Synthetic oligonucleotide
  Sense strand starting at position 2659 of SEQ ID NO: 1241231
agcuuacauucguccaagu

SEQ ID NO: 1256699 - RNA, 19 nt, Artificial Sequence
  Description of Artificial Sequence: Synthetic oligonucleotide
  Antisense strand to SEQ ID NO: 1256698
acuuggacgaauguaagcu

SEQ ID NO: 1256700 - RNA, 19 nt, Artificial Sequence
  Description of Artificial Sequence: Synthetic oligonucleotide
  Sense strand starting at position 2661 of SEQ ID NO: 1241231
cuuacauucguccaaguuc

SEQ ID NO: 1256701 - RNA, 19 nt, Artificial Sequence
  Description of Artificial Sequence: Synthetic oligonucleotide
  Antisense strand to SEQ ID NO: 1256700
gaacuuggacgaauguaag

SEQ ID NO: 1256702 - RNA, 19 nt, Artificial Sequence
  Description of Artificial Sequence: Synthetic oligonucleotide
  Sense strand starting at position 2683 of SEQ ID NO: 1241231
ccuucugucuucucgcuaa

SEQ ID NO: 1256703 - RNA, 19 nt, Artificial Sequence
  Description of Artificial Sequence: Synthetic oligonucleotide
  Antisense strand to SEQ ID NO: 1256702
uuagcgagaagacagaagg

SEQ ID NO: 1256704 - RNA, 19 nt, Artificial Sequence
  Description of Artificial Sequence: Synthetic oligonucleotide
  Sense strand starting at position 2740 of SEQ ID NO: 1241231
caccguugcgccuaaauga

SEQ ID NO: 1256705 - RNA, 19 nt, Artificial Sequence
  Description of Artificial Sequence: Synthetic oligonucleotide
  Antisense strand to SEQ ID NO: 1256704
ucauuuaggcgcaacggug

SEQ ID NO: 1256706 - RNA, 19 nt, Artificial Sequence
  Description of Artificial Sequence: Synthetic oligonucleotide
  Sense strand starting at position 3618 of SEQ ID NO: 1241231
guaugaauuguauaagcau

SEQ ID NO: 1256707 - RNA, 19 nt, Artificial Sequence
  Description of Artificial Sequence: Synthetic oligonucleotide
  Antisense strand to SEQ ID NO: 1256706
augcuuauacaauucauac

SEQ ID NO: 1256708 - RNA, 19 nt, Artificial Sequence
  Description of Artificial Sequence: Synthetic oligonucleotide
  Sense strand starting at position 3624 of SEQ ID NO: 1241231
auuguauaagcaugccagu

SEQ ID NO: 1256709 - RNA, 19 nt, Artificial Sequence
  Description of Artificial Sequence: Synthetic oligonucleotide
  Antisense strand to SEQ ID NO: 1256708
acuggcaugcuuauacaau

SEQ ID NO: 1256710 - RNA, 19 nt, Artificial Sequence
  Description of Artificial Sequence: Synthetic oligonucleotide
  Sense strand starting at position 3630 of SEQ ID NO: 1241231
uaagcaugccaguguaaga

SEQ ID NO: 1256711 - RNA, 19 nt, Artificial Sequence
  Description of Artificial Sequence: Synthetic oligonucleotide
  Antisense strand to SEQ ID NO: 1256710
ucuuacacuggcaugcuua

SEQ ID NO: 1256712 - RNA, 19 nt, Artificial Sequence
  Description of Artificial Sequence: Synthetic oligonucleotide
  Sense strand starting at position 3717 of SEQ ID NO: 1241231
uguauugucuuucuaggau

SEQ ID NO: 1256713 - RNA, 19 nt, Artificial Sequence
  Description of Artificial Sequence: Synthetic oligonucleotide
  Antisense strand to SEQ ID NO: 1256712
auccuagaaagacaauaca

SEQ ID NO: 1256714 - RNA, 19 nt, Artificial Sequence
  Description of Artificial Sequence: Synthetic oligonucleotide
  Sense strand starting at position 3720 of SEQ ID NO: 1241231
auugucuuucuaggauguu

SEQ ID NO: 1256715 - RNA, 19 nt, Artificial Sequence
  Description of Artificial Sequence: Synthetic oligonucleotide
  Antisense strand to SEQ ID NO: 1256714
aacauccuagaaagacaau

SEQ ID NO: 1256716 - RNA, 19 nt, Artificial Sequence
  Description of Artificial Sequence: Synthetic oligonucleotide
  Sense strand starting at position 3736 of SEQ ID NO: 1241231
guugucauaugucuucuua

SEQ ID NO: 1256717 - RNA, 19 nt, Artificial Sequence
  Description of Artificial Sequence: Synthetic oligonucleotide
  Antisense strand to SEQ ID NO: 1256716
uaagaagacauaugacaac

SEQ ID NO: 1256718 - RNA, 19 nt, Artificial Sequence
  Description of Artificial Sequence: Synthetic oligonucleotide
  Sense strand starting at position 3738 of SEQ ID NO: 1241231
ugucauaugucuucuuagu

SEQ ID NO: 1256719 - RNA, 19 nt, Artificial Sequence
  Description of Artificial Sequence: Synthetic oligonucleotide
  Antisense strand to SEQ ID NO: 1256718
acuaagaagacauaugaca

SEQ ID NO: 1256720 - RNA, 19 nt, Artificial Sequence
  Description of Artificial Sequence: Synthetic oligonucleotide
  Sense strand starting at position 3740 of SEQ ID NO: 1241231
ucauaugucuucuuaguca

SEQ ID NO: 1256721 - RNA, 19 nt, Artificial Sequence
  Description of Artificial Sequence: Synthetic oligonucleotide
  Antisense strand to SEQ ID NO: 1256720
ugacuaagaagacauauga

SEQ ID NO: 1256722 - RNA, 19 nt, Artificial Sequence
  Description of Artificial Sequence: Synthetic oligonucleotide
  Sense strand starting at position 3744 of SEQ ID NO: 1241231
augucuucuuagucauugu

SEQ ID NO: 1256723 - RNA, 19 nt, Artificial Sequence
  Description of Artificial Sequence: Synthetic oligonucleotide
  Antisense strand to SEQ ID NO: 1256722
acaaugacuaagaagacau

SEQ ID NO: 1256724 - RNA, 19 nt, Artificial Sequence
  Description of Artificial Sequence: Synthetic oligonucleotide
  Sense strand starting at position 3747 of SEQ ID NO: 1241231
ucuucuuagucauuguaca

SEQ ID NO: 1256725 - RNA, 19 nt, Artificial Sequence
  Description of Artificial Sequence: Synthetic oligonucleotide
  Antisense strand to SEQ ID NO: 1256724
uguacaaugacuaagaaga

SEQ ID NO: 1256726 - RNA, 19 nt, Artificial Sequence
  Description of Artificial Sequence: Synthetic oligonucleotide
  Sense strand starting at position 3748 of SEQ ID NO: 1241231
cuucuuagucauuguacau

SEQ ID NO: 1256727 - RNA, 19 nt, Artificial Sequence
  Description of Artificial Sequence: Synthetic oligonucleotide
  Antisense strand to SEQ ID NO: 1256726
auguacaaugacuaagaag

SEQ ID NO: 1256728 - RNA, 19 nt, Artificial Sequence
  Description of Artificial Sequence: Synthetic oligonucleotide
  Sense strand starting at position 3752 of SEQ ID NO: 1241231
uuagucauuguacaugauu

SEQ ID NO: 1256729 - RNA, 19 nt, Artificial Sequence
  Description of Artificial Sequence: Synthetic oligonucleotide
  Antisense strand to SEQ ID NO: 1256728
aaucauguacaaugacuaa

SEQ ID NO: 1256730 - RNA, 19 nt, Artificial Sequence
  Description of Artificial Sequence: Synthetic oligonucleotide
  Sense strand starting at position 3770 of SEQ ID NO: 1241231
uuauuaguuuaguccaaac

SEQ ID NO: 1256731 - RNA, 19 nt, Artificial Sequence
  Description of Artificial Sequence: Synthetic oligonucleotide
  Antisense strand to SEQ ID NO: 1256730
guuuggacuaaacuaauaa

SEQ ID NO: 1256732 - RNA, 19 nt, Artificial Sequence
  Description of Artificial Sequence: Synthetic oligonucleotide
  Sense strand starting at position 3913 of SEQ ID NO: 1241231
cccugaucagaauguugga

SEQ ID NO: 1256733 - RNA, 19 nt, Artificial Sequence
  Description of Artificial Sequence: Synthetic oligonucleotide
  Antisense strand to SEQ ID NO: 1256732
uccaacauucugaucaggg

SEQ ID NO: 1256734 - RNA, 19 nt, Artificial Sequence
  Description of Artificial Sequence: Synthetic oligonucleotide
  Sense strand starting at position 3916 of SEQ ID NO: 1241231
ugaucagaauguuggaaau

SEQ ID NO: 1256735 - RNA, 19 nt, Artificial Sequence
  Description of Artificial Sequence: Synthetic oligonucleotide
  Antisense strand to SEQ ID NO: 1256734
auuuccaacauucugauca

SEQ ID NO: 1256736 - RNA, 19 nt, Artificial Sequence
  Description of Artificial Sequence: Synthetic oligonucleotide
  Sense strand starting at position 579 of SEQ ID NO: 1241232
uuugccuucgugcugcaaa

SEQ ID NO: 1256737 - RNA, 19 nt, Artificial Sequence
  Description of Artificial Sequence: Synthetic oligonucleotide
  Antisense strand to SEQ ID NO: 1256736
uuugcagcacgaaggcaaa

SEQ ID NO: 1256738 - RNA, 19 nt, Artificial Sequence
  Description of Artificial Sequence: Synthetic oligonucleotide
  Sense strand starting at position 581 of SEQ ID NO: 1241232
ugccuucgugcugcaaaga

SEQ ID NO: 1256739 - RNA, 19 nt, Artificial Sequence
  Description of Artificial Sequence: Synthetic oligonucleotide
  Antisense strand to SEQ ID NO: 1256738
ucuuugcagcacgaaggca

SEQ ID NO: 1256740 - RNA, 19 nt, Artificial Sequence
  Description of Artificial Sequence: Synthetic oligonucleotide
  Sense strand starting at position 1000 of SEQ ID NO: 1241232
ccgggaaucuugcuccuga

SEQ ID NO: 1256741 - RNA, 19 nt, Artificial Sequence
  Description of Artificial Sequence: Synthetic oligonucleotide
  Antisense strand to SEQ ID NO: 1256740
ucaggagcaagauucccgg

SEQ ID NO: 1256742 - RNA, 19 nt, Artificial Sequence
  Description of Artificial Sequence: Synthetic oligonucleotide
  Sense strand starting at position 1001 of SEQ ID NO: 1241232
cgggaaucuugcuccugaa

SEQ ID NO: 1256743 - RNA, 19 nt, Artificial Sequence
  Description of Artificial Sequence: Synthetic oligonucleotide
  Antisense strand to SEQ ID NO: 1256742
uucaggagcaagauucccg

SEQ ID NO: 1256744 - RNA, 19 nt, Artificial Sequence
  Description of Artificial Sequence: Synthetic oligonucleotide
  Sense strand starting at position 1254 of SEQ ID NO: 1241232
ccgcgucuguuuccacuua

SEQ ID NO: 1256745 - RNA, 19 nt, Artificial Sequence
  Description of Artificial Sequence: Synthetic oligonucleotide
  Antisense strand to SEQ ID NO: 1256744
uaaguggaaacagacgcgg

SEQ ID NO: 1256746 - RNA, 19 nt, Artificial Sequence
  Description of Artificial Sequence: Synthetic oligonucleotide
  Sense strand starting at position 1858 of SEQ ID NO: 1241232
gaaagaucaucugguccac

SEQ ID NO: 1256747 - RNA, 19 nt, Artificial Sequence
  Description of Artificial Sequence: Synthetic oligonucleotide
  Antisense strand to SEQ ID NO: 1256746
guggaccagaugaucuuuc

SEQ ID NO: 1256748 - RNA, 19 nt, Artificial Sequence
  Description of Artificial Sequence: Synthetic oligonucleotide
  Sense strand starting at position 2544 of SEQ ID NO: 1241232
gcccuuaucucugcgggua

SEQ ID NO: 1256749 - RNA, 19 nt, Artificial Sequence
  Description of Artificial Sequence: Synthetic oligonucleotide
  Antisense strand to SEQ ID NO: 1256748
uacccgcagagauaagggc

SEQ ID NO: 1256750 - RNA, 19 nt, Artificial Sequence
  Description of Artificial Sequence: Synthetic oligonucleotide
  Sense strand starting at position 2586 of SEQ ID NO: 1241232
ccaaguacgcugcaaaguu

SEQ ID NO: 1256751 - RNA, 19 nt, Artificial Sequence
  Description of Artificial Sequence: Synthetic oligonucleotide
  Antisense strand to SEQ ID NO: 1256750
aacuuugcagcguacuugg

SEQ ID NO: 1256752 - RNA, 19 nt, Artificial Sequence
  Description of Artificial Sequence: Synthetic oligonucleotide
  Sense strand starting at position 2889 of SEQ ID NO: 1241232
uccugucagccauguuaac

SEQ ID NO: 1256753 - RNA, 19 nt, Artificial Sequence
  Description of Artificial Sequence: Synthetic oligonucleotide
  Antisense strand to SEQ ID NO: 1256752
guuaacauggcugacagga

SEQ ID NO: 1256754 - RNA, 19 nt, Artificial Sequence
  Description of Artificial Sequence: Synthetic oligonucleotide
  Sense strand starting at position 3402 of SEQ ID NO: 1241232
gagauaagguuuccagagu

SEQ ID NO: 1256755 - RNA, 19 nt, Artificial Sequence
  Description of Artificial Sequence: Synthetic oligonucleotide
  Antisense strand to SEQ ID NO: 1256754
acucuggaaaccuuaucuc

SEQ ID NO: 1256756 - RNA, 19 nt, Artificial Sequence
  Description of Artificial Sequence: Synthetic oligonucleotide
  Sense strand starting at position 3403 of SEQ ID NO: 1241232
agauaagguuuccagagua

SEQ ID NO: 1256757 - RNA, 19 nt, Artificial Sequence
  Description of Artificial Sequence: Synthetic oligonucleotide
  Antisense strand to SEQ ID NO: 1256756
uacucuggaaaccuuaucu

SEQ ID NO: 1256758 - RNA, 19 nt, Artificial Sequence
  Description of Artificial Sequence: Synthetic oligonucleotide
  Sense strand starting at position 3429 of SEQ ID NO: 1241232
gcuccuguccugcaaacuu

SEQ ID NO: 1256759 - RNA, 19 nt, Artificial Sequence
  Description of Artificial Sequence: Synthetic oligonucleotide
  Antisense strand to SEQ ID NO: 1256758
aaguuugcaggacaggagc

SEQ ID NO: 1256760 - RNA, 19 nt, Artificial Sequence
  Description of Artificial Sequence: Synthetic oligonucleotide
  Sense strand starting at position 3776 of SEQ ID NO: 1241232
uggacauacccguaugggu

SEQ ID NO: 1256761 - RNA, 19 nt, Artificial Sequence
  Description of Artificial Sequence: Synthetic oligonucleotide
  Antisense strand to SEQ ID NO: 1256760
acccauacggguaugucca

SEQ ID NO: 1256762 - RNA, 19 nt, Artificial Sequence
  Description of Artificial Sequence: Synthetic oligonucleotide
  Sense strand starting at position 3784 of SEQ ID NO: 1241232
cccguauggguguguccau

SEQ ID NO: 1256763 - RNA, 19 nt, Artificial Sequence
  Description of Artificial Sequence: Synthetic oligonucleotide
  Antisense strand to SEQ ID NO: 1256762
auggacacacccauacggg

SEQ ID NO: 1256764 - RNA, 19 nt, Artificial Sequence
  Description of Artificial Sequence: Synthetic oligonucleotide
  Sense strand starting at position 3831 of SEQ ID NO: 1241232
guguguggucccucucgca

SEQ ID NO: 1256765 - RNA, 19 nt, Artificial Sequence
  Description of Artificial Sequence: Synthetic oligonucleotide
  Antisense strand to SEQ ID NO: 1256764
ugcgagagggaccacacac

SEQ ID NO: 1256766 - RNA, 19 nt, Artificial Sequence
  Description of Artificial Sequence: Synthetic oligonucleotide
  Sense strand starting at position 3846 of SEQ ID NO: 1241232
cgcaguuguccgcccauau

SEQ ID NO: 1256767 - RNA, 19 nt, Artificial Sequence
  Description of Artificial Sequence: Synthetic oligonucleotide
  Antisense strand to SEQ ID NO: 1256766
auaugggcggacaacugcg

SEQ ID NO: 1256768 - RNA, 19 nt, Artificial Sequence
  Description of Artificial Sequence: Synthetic oligonucleotide
  Sense strand starting at position 3847 of SEQ ID NO: 1241232
gcaguuguccgcccauauu

SEQ ID NO: 1256769 - RNA, 19 nt, Artificial Sequence
  Description of Artificial Sequence: Synthetic oligonucleotide
  Antisense strand to SEQ ID NO: 1256768
aauaugggcggacaacugc

SEQ ID NO: 1256770 - RNA, 19 nt, Artificial Sequence
  Description of Artificial Sequence: Synthetic oligonucleotide
  Sense strand starting at position 3856 of SEQ ID NO: 1241232
cgcccauauuucugucaag

SEQ ID NO: 1256771 - RNA, 19 nt, Artificial Sequence
  Description of Artificial Sequence: Synthetic oligonucleotide
  Antisense strand to SEQ ID NO: 1256770
cuugacagaaauaugggcg

SEQ ID NO: 1256772 - RNA, 19 nt, Artificial Sequence
  Description of Artificial Sequence: Synthetic oligonucleotide
  Sense strand starting at position 3917 of SEQ ID NO: 1241232
agcucauguacggacauua

SEQ ID NO: 1256773 - RNA, 19 nt, Artificial Sequence
  Description of Artificial Sequence: Synthetic oligonucleotide
  Antisense strand to SEQ ID NO: 1256772
uaauguccguacaugagcu

SEQ ID NO: 1256774 - RNA, 19 nt, Artificial Sequence
  Description of Artificial Sequence: Synthetic oligonucleotide
  Sense strand starting at position 3928 of SEQ ID NO: 1241232
ggacauuagccagggcaga

SEQ ID NO: 1256775 - RNA, 19 nt, Artificial Sequence
  Description of Artificial Sequence: Synthetic oligonucleotide
  Antisense strand to SEQ ID NO: 1256774
ucugcccuggcuaaugucc

SEQ ID NO: 1256776 - RNA, 19 nt, Artificial Sequence
  Description of Artificial Sequence: Synthetic oligonucleotide
  Sense strand starting at position 3929 of SEQ ID NO: 1241232
gacauuagccagggcagau

SEQ ID NO: 1256777 - RNA, 19 nt, Artificial Sequence
  Description of Artificial Sequence: Synthetic oligonucleotide
  Antisense strand to SEQ ID NO: 1256776
aucugcccuggcuaauguc

SEQ ID NO: 1256778 - RNA, 19 nt, Artificial Sequence
  Description of Artificial Sequence: Synthetic oligonucleotide
  Sense strand starting at position 3089 of SEQ ID NO: 1241233
ggagcuguguccuucauga

SEQ ID NO: 1256779 - RNA, 19 nt, Artificial Sequence
  Description of Artificial Sequence: Synthetic oligonucleotide
  Antisense strand to SEQ ID NO: 1256778
ucaugaaggacacagcucc

SEQ ID NO: 1256780 - RNA, 19 nt, Artificial Sequence
  Description of Artificial Sequence: Synthetic oligonucleotide
  Sense strand starting at position 3178 of SEQ ID NO: 1241233
ggaugcuggcugcagauua

SEQ ID NO: 1256781 - RNA, 19 nt, Artificial Sequence
  Description of Artificial Sequence: Synthetic oligonucleotide
  Antisense strand to SEQ ID NO: 1256780
uaaucugcagccagcaucc

SEQ ID NO: 1256782 - RNA, 19 nt, Artificial Sequence
  Description of Artificial Sequence: Synthetic oligonucleotide
  Sense strand starting at position 3345 of SEQ ID NO: 1241233
uuaucuuugucuccuggga

SEQ ID NO: 1256783 - RNA, 19 nt, Artificial Sequence
  Description of Artificial Sequence: Synthetic oligonucleotide
  Antisense strand to SEQ ID NO: 1256782
ucccaggagacaaagauaa

SEQ ID NO: 1256784 - RNA, 19 nt, Artificial Sequence
  Description of Artificial Sequence: Synthetic oligonucleotide
  Sense strand starting at position 3349 of SEQ ID NO: 1241233
cuuugucuccugggagaca

SEQ ID NO: 1256785 - RNA, 19 nt, Artificial Sequence
  Description of Artificial Sequence: Synthetic oligonucleotide
  Antisense strand to SEQ ID NO: 1256784
ugucucccaggagacaaag

SEQ ID NO: 1256786 - RNA, 19 nt, Artificial Sequence
  Description of Artificial Sequence: Synthetic oligonucleotide
  Sense strand starting at position 3386 of SEQ ID NO: 1241233
uuaauuccguggcugagau

SEQ ID NO: 1256787 - RNA, 19 nt, Artificial Sequence
  Description of Artificial Sequence: Synthetic oligonucleotide
  Antisense strand to SEQ ID NO: 1256786
aucucagccacggaauuaa

SEQ ID NO: 1256788 - RNA, 19 nt, Artificial Sequence
  Description of Artificial Sequence: Synthetic oligonucleotide
  Sense strand starting at position 3387 of SEQ ID NO: 1241233
uaauuccguggcugagauu

SEQ ID NO: 1256789 - RNA, 19 nt, Artificial Sequence
  Description of Artificial Sequence: Synthetic oligonucleotide
  Antisense strand to SEQ ID NO: 1256788
aaucucagccacggaauua

SEQ ID NO: 1256790 - RNA, 19 nt, Artificial Sequence
  Description of Artificial Sequence: Synthetic oligonucleotide
  Sense strand starting at position 3396 of SEQ ID NO: 1241233
ggcugagauuuccacauga

SEQ ID NO: 1256791 - RNA, 19 nt, Artificial Sequence
  Description of Artificial Sequence: Synthetic oligonucleotide
  Antisense strand to SEQ ID NO: 1256790
ucauguggaaaucucagcc

SEQ ID NO: 1256792 - RNA, 19 nt, Artificial Sequence
  Description of Artificial Sequence: Synthetic oligonucleotide
  Sense strand starting at position 3642 of SEQ ID NO: 1241233
caggauuucugagaaugug

SEQ ID NO: 1256793 - RNA, 19 nt, Artificial Sequence
  Description of Artificial Sequence: Synthetic oligonucleotide
  Antisense strand to SEQ ID NO: 1256792
cacauucucagaaauccug

SEQ ID NO: 1256794 - RNA, 19 nt, Artificial Sequence
  Description of Artificial Sequence: Synthetic oligonucleotide
  Sense strand starting at position 3650 of SEQ ID NO: 1241233
cugagaaugugcuugcaga

SEQ ID NO: 1256795 - RNA, 19 nt, Artificial Sequence
  Description of Artificial Sequence: Synthetic oligonucleotide
  Antisense strand to SEQ ID NO: 1256794
ucugcaagcacauucucag

SEQ ID NO: 1256796 - RNA, 19 nt, Artificial Sequence
  Description of Artificial Sequence: Synthetic oligonucleotide
  Sense strand starting at position 3651 of SEQ ID NO: 1241233
ugagaaugugcuugcagaa

SEQ ID NO: 1256797 - RNA, 19 nt, Artificial Sequence
  Description of Artificial Sequence: Synthetic oligonucleotide
  Antisense strand to SEQ ID NO: 1256796
uucugcaagcacauucuca

SEQ ID NO: 1256798 - RNA, 19 nt, Artificial Sequence
  Description of Artificial Sequence: Synthetic oligonucleotide
  Sense strand starting at position 3664 of SEQ ID NO: 1241233
gcagaaaucuaagcagauu

SEQ ID NO: 1256799 - RNA, 19 nt, Artificial Sequence
  Description of Artificial Sequence: Synthetic oligonucleotide
  Antisense strand to SEQ ID NO: 1256798
aaucugcuuagauuucugc

SEQ ID NO: 1256800 - RNA, 19 nt, Artificial Sequence
  Description of Artificial Sequence: Synthetic oligonucleotide
  Sense strand starting at position 3675 of SEQ ID NO: 1241233
agcagauucucacugugga

SEQ ID NO: 1256801 - RNA, 19 nt, Artificial Sequence
  Description of Artificial Sequence: Synthetic oligonucleotide
  Antisense strand to SEQ ID NO: 1256800
uccacagugagaaucugcu

SEQ ID NO: 1256802 - RNA, 19 nt, Artificial Sequence
  Description of Artificial Sequence: Synthetic oligonucleotide
  Sense strand starting at position 3676 of SEQ ID NO: 1241233
gcagauucucacuguggag

SEQ ID NO: 1256803 - RNA, 19 nt, Artificial Sequence
  Description of Artificial Sequence: Synthetic oligonucleotide
  Antisense strand to SEQ ID NO: 1256802
cuccacagugagaaucugc

SEQ ID NO: 1256804 - RNA, 19 nt, Artificial Sequence
  Description of Artificial Sequence: Synthetic oligonucleotide
  Sense strand starting at position 3714 of SEQ ID NO: 1241233
gccagagcucugggcagaa

SEQ ID NO: 1256805 - RNA, 19 nt, Artificial Sequence
  Description of Artificial Sequence: Synthetic oligonucleotide
  Antisense strand to SEQ ID NO: 1256804
uucugcccagagcucuggc

SEQ ID NO: 1256806 - RNA, 19 nt, Artificial Sequence
  Description of Artificial Sequence: Synthetic oligonucleotide
  Sense strand starting at position 992 of SEQ ID NO: 1241234
gcgaaucagccaggaggaa

SEQ ID NO: 1256807 - RNA, 19 nt, Artificial Sequence
  Description of Artificial Sequence: Synthetic oligonucleotide
  Antisense strand to SEQ ID NO: 1256806
uuccuccuggcugauucgc

SEQ ID NO: 1256808 - RNA, 19 nt, Artificial Sequence
  Description of Artificial Sequence: Synthetic oligonucleotide
  Sense strand starting at position 1219 of SEQ ID NO: 1241234
cgggaacucgcgugucaca

SEQ ID NO: 1256809 - RNA, 19 nt, Artificial Sequence
  Description of Artificial Sequence: Synthetic oligonucleotide
  Antisense strand to SEQ ID NO: 1256808
ugugacacgcgaguucccg

SEQ ID NO: 1256810 - RNA, 19 nt, Artificial Sequence
  Description of Artificial Sequence: Synthetic oligonucleotide
  Sense strand starting at position 1287 of SEQ ID NO: 1241234
agggaaugcgucgggacaa

SEQ ID NO: 1256811 - RNA, 19 nt, Artificial Sequence
  Description of Artificial Sequence: Synthetic oligonucleotide
  Antisense strand to SEQ ID NO: 1256810
uugucccgacgcauucccu

SEQ ID NO: 1256812 - RNA, 19 nt, Artificial Sequence
  Description of Artificial Sequence: Synthetic oligonucleotide
  Sense strand starting at position 1337 of SEQ ID NO: 1241234
uggacugaaucccgacaga

SEQ ID NO: 1256813 - RNA, 19 nt, Artificial Sequence
  Description of Artificial Sequence: Synthetic oligonucleotide
  Antisense strand to SEQ ID NO: 1256812
ucugucgggauucagucca

SEQ ID NO: 1256814 - RNA, 19 nt, Artificial Sequence
  Description of Artificial Sequence: Synthetic oligonucleotide
  Sense strand starting at position 29 of SEQ ID NO: 1241235
ucguaacugccucaauaau

SEQ ID NO: 1256815 - RNA, 19 nt, Artificial Sequence
  Description of Artificial Sequence: Synthetic oligonucleotide
  Antisense strand to SEQ ID NO: 1256814
auuauugaggcaguuacga

SEQ ID NO: 1256816 - RNA, 19 nt, Artificial Sequence
  Description of Artificial Sequence: Synthetic oligonucleotide
  Sense strand starting at position 209 of SEQ ID NO: 1241235
ggaguuuacuaucucuaga

SEQ ID NO: 1256817 - RNA, 19 nt, Artificial Sequence
  Description of Artificial Sequence: Synthetic oligonucleotide
  Antisense strand to SEQ ID NO: 1256816
ucuagagauaguaaacucc

SEQ ID NO: 1256818 - RNA, 19 nt, Artificial Sequence
  Description of Artificial Sequence: Synthetic oligonucleotide
  Sense strand starting at position 211 of SEQ ID NO: 1241235
aguuuacuaucucuagacu

SEQ ID NO: 1256819 - RNA, 19 nt, Artificial Sequence
  Description of Artificial Sequence: Synthetic oligonucleotide
  Antisense strand to SEQ ID NO: 1256818
agucuagagauaguaaacu

SEQ ID NO: 1256820 - RNA, 19 nt, Artificial Sequence
  Description of Artificial Sequence: Synthetic oligonucleotide
  Sense strand starting at position 214 of SEQ ID NO: 1241235
uuacuaucucuagacugua

SEQ ID NO: 1256821 - RNA, 19 nt, Artificial Sequence
  Description of Artificial Sequence: Synthetic oligonucleotide
  Antisense strand to SEQ ID NO: 1256820
uacagucuagagauaguaa

SEQ ID NO: 1256822 - RNA, 19 nt, Artificial Sequence
  Description of Artificial Sequence: Synthetic oligonucleotide
  Sense strand starting at position 378 of SEQ ID NO: 1241235
gaaguuacaucaguaaaug

SEQ ID NO: 1256823 - RNA, 19 nt, Artificial Sequence
  Description of Artificial Sequence: Synthetic oligonucleotide
  Antisense strand to SEQ ID NO: 1256822
cauuuacugauguaacuuc

SEQ ID NO: 1256824 - RNA, 19 nt, Artificial Sequence
  Description of Artificial Sequence: Synthetic oligonucleotide
  Sense strand starting at position 408 of SEQ ID NO: 1241235
aaggaacaguccucaaguu

SEQ ID NO: 1256825 - RNA, 19 nt, Artificial Sequence
  Description of Artificial Sequence: Synthetic oligonucleotide
  Antisense strand to SEQ ID NO: 1256824
aacuugaggacuguuccuu

SEQ ID NO: 1256826 - RNA, 19 nt, Artificial Sequence
  Description of Artificial Sequence: Synthetic oligonucleotide
  Sense strand starting at position 409 of SEQ ID NO: 1241235
aggaacaguccucaaguuu

SEQ ID NO: 1256827 - RNA, 19 nt, Artificial Sequence
  Description of Artificial Sequence: Synthetic oligonucleotide
  Antisense strand to SEQ ID NO: 1256826
aaacuugaggacuguuccu

SEQ ID NO: 1256828 - RNA, 19 nt, Artificial Sequence
  Description of Artificial Sequence: Synthetic oligonucleotide
  Sense strand starting at position 476 of SEQ ID NO: 1241235
cggaaaggcuaauuaguuu

SEQ ID NO: 1256829 - RNA, 19 nt, Artificial Sequence
  Description of Artificial Sequence: Synthetic oligonucleotide
  Antisense strand to SEQ ID NO: 1256828
aaacuaauuagccuuuccg

SEQ ID NO: 1256830 - RNA, 19 nt, Artificial Sequence
  Description of Artificial Sequence: Synthetic oligonucleotide
  Sense strand starting at position 503 of SEQ ID NO: 1241235
gggaaacauuuacaucuuu

SEQ ID NO: 1256831 - RNA, 19 nt, Artificial Sequence
  Description of Artificial Sequence: Synthetic oligonucleotide
  Antisense strand to SEQ ID NO: 1256830
aaagauguaaauguuuccc

SEQ ID NO: 1256832 - RNA, 19 nt, Artificial Sequence
  Description of Artificial Sequence: Synthetic oligonucleotide
  Sense strand starting at position 1306 of SEQ ID NO: 1241235
ggaugagauucggccucau

SEQ ID NO: 1256833 - RNA, 19 nt, Artificial Sequence
  Description of Artificial Sequence: Synthetic oligonucleotide
  Antisense strand to SEQ ID NO: 1256832
augaggccgaaucucaucc

SEQ ID NO: 1256834 - RNA, 19 nt, Artificial Sequence
  Description of Artificial Sequence: Synthetic oligonucleotide
  Sense strand starting at position 1310 of SEQ ID NO: 1241235
gagauucggccucauacuc

SEQ ID NO: 1256835 - RNA, 19 nt, Artificial Sequence
  Description of Artificial Sequence: Synthetic oligonucleotide
  Antisense strand to SEQ ID NO: 1256834
gaguaugaggccgaaucuc

SEQ ID NO: 1256836 - RNA, 19 nt, Artificial Sequence
  Description of Artificial Sequence: Synthetic oligonucleotide
  Sense strand starting at position 1708 of SEQ ID NO: 1241235
ugugguuuggucagaguuu

SEQ ID NO: 1256837 - RNA, 19 nt, Artificial Sequence
  Description of Artificial Sequence: Synthetic oligonucleotide
  Antisense strand to SEQ ID NO: 1256836
aaacucugaccaaaccaca

SEQ ID NO: 1256838 - RNA, 19 nt, Artificial Sequence
  Description of Artificial Sequence: Synthetic oligonucleotide
  Sense strand starting at position 2085 of SEQ ID NO: 1241235
acucaaguacuuuggugaa

SEQ ID NO: 1256839 - RNA, 19 nt, Artificial Sequence
  Description of Artificial Sequence: Synthetic oligonucleotide
  Antisense strand to SEQ ID NO: 1256838
uucaccaaaguacuugagu

SEQ ID NO: 1256840 - RNA, 19 nt, Artificial Sequence
  Description of Artificial Sequence: Synthetic oligonucleotide
  Sense strand starting at position 2089 of SEQ ID NO: 1241235
aaguacuuuggugaagcaa

SEQ ID NO: 1256841 - RNA, 19 nt, Artificial Sequence
  Description of Artificial Sequence: Synthetic oligonucleotide
  Antisense strand to SEQ ID NO: 1256840
uugcuucaccaaaguacuu

SEQ ID NO: 1256842 - RNA, 19 nt, Artificial Sequence
  Description of Artificial Sequence: Synthetic oligonucleotide
  Sense strand starting at position 2305 of SEQ ID NO: 1241235
agaacucaagauugcuauu

SEQ ID NO: 1256843 - RNA, 19 nt, Artificial Sequence
  Description of Artificial Sequence: Synthetic oligonucleotide
  Antisense strand to SEQ ID NO: 1256842
aauagcaaucuugaguucu

SEQ ID NO: 1256844 - RNA, 19 nt, Artificial Sequence
  Description of Artificial Sequence: Synthetic oligonucleotide
  Sense strand starting at position 2363 of SEQ ID NO: 1241235
cuaauaucagaguagccaa

SEQ ID NO: 1256845 - RNA, 19 nt, Artificial Sequence
  Description of Artificial Sequence: Synthetic oligonucleotide
  Antisense strand to SEQ ID NO: 1256844
uuggcuacucugauauuag

SEQ ID NO: 1256846 - RNA, 19 nt, Artificial Sequence
  Description of Artificial Sequence: Synthetic oligonucleotide
  Sense strand starting at position 2388 of SEQ ID NO: 1241235
uuaguaauucuccauuguu

SEQ ID NO: 1256847 - RNA, 19 nt, Artificial Sequence
  Description of Artificial Sequence: Synthetic oligonucleotide
  Antisense strand to SEQ ID NO: 1256846
aacaauggagaauuacuaa

SEQ ID NO: 1256848 - RNA, 19 nt, Artificial Sequence
  Description of Artificial Sequence: Synthetic oligonucleotide
  Sense strand starting at position 2391 of SEQ ID NO: 1241235
guaauucuccauuguuaag

SEQ ID NO: 1256849 - RNA, 19 nt, Artificial Sequence
  Description of Artificial Sequence: Synthetic oligonucleotide
  Antisense strand to SEQ ID NO: 1256848
cuuaacaauggagaauuac

SEQ ID NO: 1256850 - RNA, 19 nt, Artificial Sequence
  Description of Artificial Sequence: Synthetic oligonucleotide
  Sense strand starting at position 2401 of SEQ ID NO: 1241235
auuguuaagguauaaggua

SEQ ID NO: 1256851 - RNA, 19 nt, Artificial Sequence
  Description of Artificial Sequence: Synthetic oligonucleotide
  Antisense strand to SEQ ID NO: 1256850
uaccuuauaccuuaacaau

SEQ ID NO: 1256852 - RNA, 19 nt, Artificial Sequence
  Description of Artificial Sequence: Synthetic oligonucleotide
  Sense strand starting at position 2439 of SEQ ID NO: 1241235
guuagacacuguguauuaa

SEQ ID NO: 1256853 - RNA, 19 nt, Artificial Sequence
  Description of Artificial Sequence: Synthetic oligonucleotide
  Antisense strand to SEQ ID NO: 1256852
uuaauacacagugucuaac

SEQ ID NO: 1256854 - RNA, 19 nt, Artificial Sequence
  Description of Artificial Sequence: Synthetic oligonucleotide
  Sense strand starting at position 2440 of SEQ ID NO: 1241235
uuagacacuguguauuaaa

SEQ ID NO: 1256855 - RNA, 19 nt, Artificial Sequence
  Description of Artificial Sequence: Synthetic oligonucleotide
  Antisense strand to SEQ ID NO: 1256854
uuuaauacacagugucuaa

SEQ ID NO: 1256856 - RNA, 19 nt, Artificial Sequence
  Description of Artificial Sequence: Synthetic oligonucleotide
  Sense strand starting at position 2580 of SEQ ID NO: 1241235
ucuuaaaugugucugaaca

SEQ ID NO: 1256857 - RNA, 19 nt, Artificial Sequence
  Description of Artificial Sequence: Synthetic oligonucleotide
  Antisense strand to SEQ ID NO: 1256856
uguucagacacauuuaaga

SEQ ID NO: 1256858 - RNA, 19 nt, Artificial Sequence
  Description of Artificial Sequence: Synthetic oligonucleotide
  Sense strand starting at position 2581 of SEQ ID NO: 1241235
cuuaaaugugucugaacau

SEQ ID NO: 1256859 - RNA, 19 nt, Artificial Sequence
  Description of Artificial Sequence: Synthetic oligonucleotide
  Antisense strand to SEQ ID NO: 1256858
auguucagacacauuuaag

SEQ ID NO: 1256860 - RNA, 19 nt, Artificial Sequence
  Description of Artificial Sequence: Synthetic oligonucleotide
  Sense strand starting at position 3066 of SEQ ID NO: 1241235
uggaguugugacuaccaac

SEQ ID NO: 1256861 - RNA, 19 nt, Artificial Sequence
  Description of Artificial Sequence: Synthetic oligonucleotide
  Antisense strand to SEQ ID NO: 1256860
guugguagucacaacucca

SEQ ID NO: 1256862 - RNA, 19 nt, Artificial Sequence
  Description of Artificial Sequence: Synthetic oligonucleotide
  Sense strand starting at position 3225 of SEQ ID NO: 1241235
uccugaauuugauaacuga

SEQ ID NO: 1256863 - RNA, 19 nt, Artificial Sequence
  Description of Artificial Sequence: Synthetic oligonucleotide
  Antisense strand to SEQ ID NO: 1256862
ucaguuaucaaauucagga

SEQ ID NO: 1256864 - RNA, 19 nt, Artificial Sequence
  Description of Artificial Sequence: Synthetic oligonucleotide
  Sense strand starting at position 3284 of SEQ ID NO: 1241235
aguacaugaucucuaucau

SEQ ID NO: 1256865 - RNA, 19 nt, Artificial Sequence
  Description of Artificial Sequence: Synthetic oligonucleotide
  Antisense strand to SEQ ID NO: 1256864
augauagagaucauguacu

SEQ ID NO: 1256866 - RNA, 19 nt, Artificial Sequence
  Description of Artificial Sequence: Synthetic oligonucleotide
  Sense strand starting at position 3285 of SEQ ID NO: 1241235
guacaugaucucuaucauu

SEQ ID NO: 1256867 - RNA, 19 nt, Artificial Sequence
  Description of Artificial Sequence: Synthetic oligonucleotide
  Antisense strand to SEQ ID NO: 1256866
aaugauagagaucauguac

SEQ ID NO: 1256868 - RNA, 19 nt, Artificial Sequence
  Description of Artificial Sequence: Synthetic oligonucleotide
  Sense strand starting at position 3319 of SEQ ID NO: 1241235
gacuguccuccauaaguag

SEQ ID NO: 1256869 - RNA, 19 nt, Artificial Sequence
  Description of Artificial Sequence: Synthetic oligonucleotide
  Antisense strand to SEQ ID NO: 1256868
cuacuuauggaggacaguc

SEQ ID NO: 1256870 - RNA, 19 nt, Artificial Sequence
  Description of Artificial Sequence: Synthetic oligonucleotide
  Sense strand starting at position 3403 of SEQ ID NO: 1241235
guguuugugauagauacua

SEQ ID NO: 1256871 - RNA, 19 nt, Artificial Sequence
  Description of Artificial Sequence: Synthetic oligonucleotide
  Antisense strand to SEQ ID NO: 1256870
uaguaucuaucacaaacac

SEQ ID NO: 1256872 - RNA, 19 nt, Artificial Sequence
  Description of Artificial Sequence: Synthetic oligonucleotide
  Sense strand starting at position 3549 of SEQ ID NO: 1241235
ggcagugucacagacuuua

SEQ ID NO: 1256873 - RNA, 19 nt, Artificial Sequence
  Description of Artificial Sequence: Synthetic oligonucleotide
  Antisense strand to SEQ ID NO: 1256872
uaaagucugugacacugcc

SEQ ID NO: 1256874 - RNA, 19 nt, Artificial Sequence
  Description of Artificial Sequence: Synthetic oligonucleotide
  Sense strand starting at position 3601 of SEQ ID NO: 1241235
ggagccacaucuuuaaucu

SEQ ID NO: 1256875 - RNA, 19 nt, Artificial Sequence
  Description of Artificial Sequence: Synthetic oligonucleotide
  Antisense strand to SEQ ID NO: 1256874
agauuaaagauguggcucc

SEQ ID NO: 1256876 - RNA, 19 nt, Artificial Sequence
  Description of Artificial Sequence: Synthetic oligonucleotide
  Sense strand starting at position 3611 of SEQ ID NO: 1241235
cuuuaaucucuguacuagu

SEQ ID NO: 1256877 - RNA, 19 nt, Artificial Sequence
  Description of Artificial Sequence: Synthetic oligonucleotide
  Antisense strand to SEQ ID NO: 1256876
acuaguacagagauuaaag

SEQ ID NO: 1256878 - RNA, 19 nt, Artificial Sequence
  Description of Artificial Sequence: Synthetic oligonucleotide
  Sense strand starting at position 3618 of SEQ ID NO: 1241235
cucuguacuagugauguaa

SEQ ID NO: 1256879 - RNA, 19 nt, Artificial Sequence
  Description of Artificial Sequence: Synthetic oligonucleotide
  Antisense strand to SEQ ID NO: 1256878
uuacaucacuaguacagag

SEQ ID NO: 1256880 - RNA, 19 nt, Artificial Sequence
  Description of Artificial Sequence: Synthetic oligonucleotide
  Sense strand starting at position 3622 of SEQ ID NO: 1241235
guacuagugauguaagagu

SEQ ID NO: 1256881 - RNA, 19 nt, Artificial Sequence
  Description of Artificial Sequence: Synthetic oligonucleotide
  Antisense strand to SEQ ID NO: 1256880
acucuuacaucacuaguac

SEQ ID NO: 1256882 - RNA, 19 nt, Artificial Sequence
  Description of Artificial Sequence: Synthetic oligonucleotide
  Sense strand starting at position 3631 of SEQ ID NO: 1241235
auguaagaguuguucucag

SEQ ID NO: 1256883 - RNA, 19 nt, Artificial Sequence
  Description of Artificial Sequence: Synthetic oligonucleotide
  Antisense strand to SEQ ID NO: 1256882
cugagaacaacucuuacau

SEQ ID NO: 1256884 - RNA, 19 nt, Artificial Sequence
  Description of Artificial Sequence: Synthetic oligonucleotide
  Sense strand starting at position 3674 of SEQ ID NO: 1241235
guugaacaauagcuggaua

SEQ ID NO: 1256885 - RNA, 19 nt, Artificial Sequence
  Description of Artificial Sequence: Synthetic oligonucleotide
  Antisense strand to SEQ ID NO: 1256884
uauccagcuauuguucaac

SEQ ID NO: 1256886 - RNA, 19 nt, Artificial Sequence
  Description of Artificial Sequence: Synthetic oligonucleotide
  Sense strand starting at position 3676 of SEQ ID NO: 1241235
ugaacaauagcuggauaau

SEQ ID NO: 1256887 - RNA, 19 nt, Artificial Sequence
  Description of Artificial Sequence: Synthetic oligonucleotide
  Antisense strand to SEQ ID NO: 1256886
auuauccagcuauuguuca

SEQ ID NO: 1256888 - RNA, 19 nt, Artificial Sequence
  Description of Artificial Sequence: Synthetic oligonucleotide
  Sense strand starting at position 3686 of SEQ ID NO: 1241235
cuggauaauuuccauugua

SEQ ID NO: 1256889 - RNA, 19 nt, Artificial Sequence
  Description of Artificial Sequence: Synthetic oligonucleotide
  Antisense strand to SEQ ID NO: 1256888
uacaauggaaauuauccag

SEQ ID NO: 1256890 - RNA, 19 nt, Artificial Sequence
  Description of Artificial Sequence: Synthetic oligonucleotide
  Sense strand starting at position 3696 of SEQ ID NO: 1241235
uccauuguauauucuguga

SEQ ID NO: 1256891 - RNA, 19 nt, Artificial Sequence
  Description of Artificial Sequence: Synthetic oligonucleotide
  Antisense strand to SEQ ID NO: 1256890
ucacagaauauacaaugga

SEQ ID NO: 1256892 - RNA, 19 nt, Artificial Sequence
  Description of Artificial Sequence: Synthetic oligonucleotide
  Sense strand starting at position 3954 of SEQ ID NO: 1241235
cggugcauuggauaaagaa

SEQ ID NO: 1256893 - RNA, 19 nt, Artificial Sequence
  Description of Artificial Sequence: Synthetic oligonucleotide
  Antisense strand to SEQ ID NO: 1256892
uucuuuauccaaugcaccg

SEQ ID NO: 1256894 - RNA, 19 nt, Artificial Sequence
  Description of Artificial Sequence: Synthetic oligonucleotide
  Sense strand starting at position 49 of SEQ ID NO: 1241236
aacugugcaggugaagaua

SEQ ID NO: 1256895 - RNA, 19 nt, Artificial Sequence
  Description of Artificial Sequence: Synthetic oligonucleotide
  Antisense strand to SEQ ID NO: 1256894
uaucuucaccugcacaguu

SEQ ID NO: 1256896 - RNA, 19 nt, Artificial Sequence
  Description of Artificial Sequence: Synthetic oligonucleotide
  Sense strand starting at position 101 of SEQ ID NO: 1241236
ggcugcauuucuccaugua

SEQ ID NO: 1256897 - RNA, 19 nt, Artificial Sequence
  Description of Artificial Sequence: Synthetic oligonucleotide
  Antisense strand to SEQ ID NO: 1256896
uacauggagaaaugcagcc

SEQ ID NO: 1256898 - RNA, 19 nt, Artificial Sequence
  Description of Artificial Sequence: Synthetic oligonucleotide
  Sense strand starting at position 102 of SEQ ID NO: 1241236
gcugcauuucuccauguau

SEQ ID NO: 1256899 - RNA, 19 nt, Artificial Sequence
  Description of Artificial Sequence: Synthetic oligonucleotide
  Antisense strand to SEQ ID NO: 1256898
auacauggagaaaugcagc

SEQ ID NO: 1256900 - RNA, 19 nt, Artificial Sequence
  Description of Artificial Sequence: Synthetic oligonucleotide
  Sense strand starting at position 111 of SEQ ID NO: 1241236
cuccauguauuucugcauu

SEQ ID NO: 1256901 - RNA, 19 nt, Artificial Sequence
  Description of Artificial Sequence: Synthetic oligonucleotide
  Antisense strand to SEQ ID NO: 1256900
aaugcagaaauacauggag

SEQ ID NO: 1256902 - RNA, 19 nt, Artificial Sequence
  Description of Artificial Sequence: Synthetic oligonucleotide
  Sense strand starting at position 121 of SEQ ID NO: 1241236
uucugcauuucuccaugua

SEQ ID NO: 1256903 - RNA, 19 nt, Artificial Sequence
  Description of Artificial Sequence: Synthetic oligonucleotide
  Antisense strand to SEQ ID NO: 1256902
uacauggagaaaugcagaa

SEQ ID NO: 1256904 - RNA, 19 nt, Artificial Sequence
  Description of Artificial Sequence: Synthetic oligonucleotide
  Sense strand starting at position 124 of SEQ ID NO: 1241236
ugcauuucuccauguacac

SEQ ID NO: 1256905 - RNA, 19 nt, Artificial Sequence
  Description of Artificial Sequence: Synthetic oligonucleotide
  Antisense strand to SEQ ID NO: 1256904
guguacauggagaaaugca

SEQ ID NO: 1256906 - RNA, 19 nt, Artificial Sequence
  Description of Artificial Sequence: Synthetic oligonucleotide
  Sense strand starting at position 194 of SEQ ID NO: 1241236
agggaaauaugcuucucuu

SEQ ID NO: 1256907 - RNA, 19 nt, Artificial Sequence
  Description of Artificial Sequence: Synthetic oligonucleotide
  Antisense strand to SEQ ID NO: 1256906
aagagaagcauauuucccu

SEQ ID NO: 1256908 - RNA, 19 nt, Artificial Sequence
  Description of Artificial Sequence: Synthetic oligonucleotide
  Sense strand starting at position 524 of SEQ ID NO: 1241236
cuacuuacaucuccggcaa

SEQ ID NO: 1256909 - RNA, 19 nt, Artificial Sequence
  Description of Artificial Sequence: Synthetic oligonucleotide
  Antisense strand to SEQ ID NO: 1256908
uugccggagauguaaguag

SEQ ID NO: 1256910 - RNA, 19 nt, Artificial Sequence
  Description of Artificial Sequence: Synthetic oligonucleotide
  Sense strand starting at position 528 of SEQ ID NO: 1241236
uuacaucuccggcaagcau

SEQ ID NO: 1256911 - RNA, 19 nt, Artificial Sequence
  Description of Artificial Sequence: Synthetic oligonucleotide
  Antisense strand to SEQ ID NO: 1256910
augcuugccggagauguaa

SEQ ID NO: 1256912 - RNA, 19 nt, Artificial Sequence
  Description of Artificial Sequence: Synthetic oligonucleotide
  Sense strand starting at position 614 of SEQ ID NO: 1241236
guguguaugcuuagguaag

SEQ ID NO: 1256913 - RNA, 19 nt, Artificial Sequence
  Description of Artificial Sequence: Synthetic oligonucleotide
  Antisense strand to SEQ ID NO: 1256912
cuuaccuaagcauacacac

SEQ ID NO: 1256914 - RNA, 19 nt, Artificial Sequence
  Description of Artificial Sequence: Synthetic oligonucleotide
  Sense strand starting at position 775 of SEQ ID NO: 1241236
augcguaugcauuagacaa

SEQ ID NO: 1256915 - RNA, 19 nt, Artificial Sequence
  Description of Artificial Sequence: Synthetic oligonucleotide
  Antisense strand to SEQ ID NO: 1256914
uugucuaaugcauacgcau

SEQ ID NO: 1256916 - RNA, 19 nt, Artificial Sequence
  Description of Artificial Sequence: Synthetic oligonucleotide
  Sense strand starting at position 855 of SEQ ID NO: 1241236
ucguaacugccucaauaau

SEQ ID NO: 1256917 - RNA, 19 nt, Artificial Sequence
  Description of Artificial Sequence: Synthetic oligonucleotide
  Antisense strand to SEQ ID NO: 1256916
auuauugaggcaguuacga

SEQ ID NO: 1256918 - RNA, 19 nt, Artificial Sequence
  Description of Artificial Sequence: Synthetic oligonucleotide
  Sense strand starting at position 1035 of SEQ ID NO: 1241236
ggaguuuacuaucucuaga

SEQ ID NO: 1256919 - RNA, 19 nt, Artificial Sequence
  Description of Artificial Sequence: Synthetic oligonucleotide
  Antisense strand to SEQ ID NO: 1256918
ucuagagauaguaaacucc

SEQ ID NO: 1256920 - RNA, 19 nt, Artificial Sequence
  Description of Artificial Sequence: Synthetic oligonucleotide
  Sense strand starting at position 1037 of SEQ ID NO: 1241236
aguuuacuaucucuagacu

SEQ ID NO: 1256921 - RNA, 19 nt, Artificial Sequence
  Description of Artificial Sequence: Synthetic oligonucleotide
  Antisense strand to SEQ ID NO: 1256920
agucuagagauaguaaacu

SEQ ID NO: 1256922 - RNA, 19 nt, Artificial Sequence
  Description of Artificial Sequence: Synthetic oligonucleotide
  Sense strand starting at position 1040 of SEQ ID NO: 1241236
uuacuaucucuagacugua

SEQ ID NO: 1256923 - RNA, 19 nt, Artificial Sequence
  Description of Artificial Sequence: Synthetic oligonucleotide
  Antisense strand to SEQ ID NO: 1256922
uacagucuagagauaguaa

SEQ ID NO: 1256924 - RNA, 19 nt, Artificial Sequence
  Description of Artificial Sequence: Synthetic oligonucleotide
  Sense strand starting at position 1204 of SEQ ID NO: 1241236
gaaguuacaucaguaaaug

SEQ ID NO: 1256925 - RNA, 19 nt, Artificial Sequence
  Description of Artificial Sequence: Synthetic oligonucleotide
  Antisense strand to SEQ ID NO: 1256924
cauuuacugauguaacuuc

SEQ ID NO: 1256926 - RNA, 19 nt, Artificial Sequence
  Description of Artificial Sequence: Synthetic oligonucleotide
  Sense strand starting at position 1234 of SEQ ID NO: 1241236
aaggaacaguccucaaguu

SEQ ID NO: 1256927 - RNA, 19 nt, Artificial Sequence
  Description of Artificial Sequence: Synthetic oligonucleotide
  Antisense strand to SEQ ID NO: 1256926
aacuugaggacuguuccuu

SEQ ID NO: 1256928 - RNA, 19 nt, Artificial Sequence
  Description of Artificial Sequence: Synthetic oligonucleotide
  Sense strand starting at position 1235 of SEQ ID NO: 1241236
aggaacaguccucaaguuu

SEQ ID NO: 1256929 - RNA, 19 nt, Artificial Sequence
  Description of Artificial Sequence: Synthetic oligonucleotide
  Antisense strand to SEQ ID NO: 1256928
aaacuugaggacuguuccu

SEQ ID NO: 1256930 - RNA, 19 nt, Artificial Sequence
  Description of Artificial Sequence: Synthetic oligonucleotide
  Sense strand starting at position 1302 of SEQ ID NO: 1241236
cggaaaggcuaauuaguuu

SEQ ID NO: 1256931 - RNA, 19 nt, Artificial Sequence
  Description of Artificial Sequence: Synthetic oligonucleotide
  Antisense strand to SEQ ID NO: 1256930
aaacuaauuagccuuuccg

SEQ ID NO: 1256932 - RNA, 19 nt, Artificial Sequence
  Description of Artificial Sequence: Synthetic oligonucleotide
  Sense strand starting at position 1329 of SEQ ID NO: 1241236
gggaaacauuuacaucuuu

SEQ ID NO: 1256933 - RNA, 19 nt, Artificial Sequence
  Description of Artificial Sequence: Synthetic oligonucleotide
  Antisense strand to SEQ ID NO: 1256932
aaagauguaaauguuuccc

SEQ ID NO: 1256934 - RNA, 19 nt, Artificial Sequence
  Description of Artificial Sequence: Synthetic oligonucleotide
  Sense strand starting at position 2132 of SEQ ID NO: 1241236
ggaugagauucggccucau

SEQ ID NO: 1256935 - RNA, 19 nt, Artificial Sequence
  Description of Artificial Sequence: Synthetic oligonucleotide
  Antisense strand to SEQ ID NO: 1256934
augaggccgaaucucaucc

SEQ ID NO: 1256936 - RNA, 19 nt, Artificial Sequence
  Description of Artificial Sequence: Synthetic oligonucleotide
  Sense strand starting at position 2136 of SEQ ID NO: 1241236
gagauucggccucauacuc

SEQ ID NO: 1256937 - RNA, 19 nt, Artificial Sequence
  Description of Artificial Sequence: Synthetic oligonucleotide
  Antisense strand to SEQ ID NO: 1256936
gaguaugaggccgaaucuc

SEQ ID NO: 1256938 - RNA, 19 nt, Artificial Sequence
  Description of Artificial Sequence: Synthetic oligonucleotide
  Sense strand starting at position 2534 of SEQ ID NO: 1241236
ugugguuuggucagaguuu

SEQ ID NO: 1256939 - RNA, 19 nt, Artificial Sequence
  Description of Artificial Sequence: Synthetic oligonucleotide
  Antisense strand to SEQ ID NO: 1256938
aaacucugaccaaaccaca

SEQ ID NO: 1256940 - RNA, 19 nt, Artificial Sequence
  Description of Artificial Sequence: Synthetic oligonucleotide
  Sense strand starting at position 2829 of SEQ ID NO: 1241236
ugacguagguguaaaggau

SEQ ID NO: 1256941 - RNA, 19 nt, Artificial Sequence
  Description of Artificial Sequence: Synthetic oligonucleotide
  Antisense strand to SEQ ID NO: 1256940
auccuuuacaccuacguca

SEQ ID NO: 1256942 - RNA, 19 nt, Artificial Sequence
  Description of Artificial Sequence: Synthetic oligonucleotide
  Sense strand starting at position 2911 of SEQ ID NO: 1241236
acucaaguacuuuggugaa

SEQ ID NO: 1256943 - RNA, 19 nt, Artificial Sequence
  Description of Artificial Sequence: Synthetic oligonucleotide
  Antisense strand to SEQ ID NO: 1256942
uucaccaaaguacuugagu

SEQ ID NO: 1256944 - RNA, 19 nt, Artificial Sequence
  Description of Artificial Sequence: Synthetic oligonucleotide
  Sense strand starting at position 2915 of SEQ ID NO: 1241236
aaguacuuuggugaagcaa

SEQ ID NO: 1256945 - RNA, 19 nt, Artificial Sequence
  Description of Artificial Sequence: Synthetic oligonucleotide
  Antisense strand to SEQ ID NO: 1256944
uugcuucaccaaaguacuu

SEQ ID NO: 1256946 - RNA, 19 nt, Artificial Sequence
  Description of Artificial Sequence: Synthetic oligonucleotide
  Sense strand starting at position 3131 of SEQ ID NO: 1241236
agaacucaagauugcuauu

SEQ ID NO: 1256947 - RNA, 19 nt, Artificial Sequence
  Description of Artificial Sequence: Synthetic oligonucleotide
  Antisense strand to SEQ ID NO: 1256946
aauagcaaucuugaguucu

SEQ ID NO: 1256948 - RNA, 19 nt, Artificial Sequence
  Description of Artificial Sequence: Synthetic oligonucleotide
  Sense strand starting at position 3189 of SEQ ID NO: 1241236
cuaauaucagaguagccaa

SEQ ID NO: 1256949 - RNA, 19 nt, Artificial Sequence
  Description of Artificial Sequence: Synthetic oligonucleotide
  Antisense strand to SEQ ID NO: 1256948
uuggcuacucugauauuag

SEQ ID NO: 1256950 - RNA, 19 nt, Artificial Sequence
  Description of Artificial Sequence: Synthetic oligonucleotide
  Sense strand starting at position 3213 of SEQ ID NO: 1241236
cuuaguaauucuccauugu

SEQ ID NO: 1256951 - RNA, 19 nt, Artificial Sequence
  Description of Artificial Sequence: Synthetic oligonucleotide
  Antisense strand to SEQ ID NO: 1256950
acaauggagaauuacuaag

SEQ ID NO: 1256952 - RNA, 19 nt, Artificial Sequence
  Description of Artificial Sequence: Synthetic oligonucleotide
  Sense strand starting at position 3214 of SEQ ID NO: 1241236
uuaguaauucuccauuguu

SEQ ID NO: 1256953 - RNA, 19 nt, Artificial Sequence
  Description of Artificial Sequence: Synthetic oligonucleotide
  Antisense strand to SEQ ID NO: 1256952
aacaauggagaauuacuaa

SEQ ID NO: 1256954 - RNA, 19 nt, Artificial Sequence
  Description of Artificial Sequence: Synthetic oligonucleotide
  Sense strand starting at position 3217 of SEQ ID NO: 1241236
guaauucuccauuguuaag

SEQ ID NO: 1256955 - RNA, 19 nt, Artificial Sequence
  Description of Artificial Sequence: Synthetic oligonucleotide
  Antisense strand to SEQ ID NO: 1256954
cuuaacaauggagaauuac

SEQ ID NO: 1256956 - RNA, 19 nt, Artificial Sequence
  Description of Artificial Sequence: Synthetic oligonucleotide
  Sense strand starting at position 3227 of SEQ ID NO: 1241236
auuguuaagguauaaggua

SEQ ID NO: 1256957 - RNA, 19 nt, Artificial Sequence
  Description of Artificial Sequence: Synthetic oligonucleotide
  Antisense strand to SEQ ID NO: 1256956
uaccuuauaccuuaacaau

SEQ ID NO: 1256958 - RNA, 19 nt, Artificial Sequence
  Description of Artificial Sequence: Synthetic oligonucleotide
  Sense strand starting at position 3265 of SEQ ID NO: 1241236
guuagacacuguguauuaa

SEQ ID NO: 1256959 - RNA, 19 nt, Artificial Sequence
  Description of Artificial Sequence: Synthetic oligonucleotide
  Antisense strand to SEQ ID NO: 1256958
uuaauacacagugucuaac

SEQ ID NO: 1256960 - RNA, 19 nt, Artificial Sequence
  Description of Artificial Sequence: Synthetic oligonucleotide
  Sense strand starting at position 3266 of SEQ ID NO: 1241236
uuagacacuguguauuaaa

SEQ ID NO: 1256961 - RNA, 19 nt, Artificial Sequence
  Description of Artificial Sequence: Synthetic oligonucleotide
  Antisense strand to SEQ ID NO: 1256960
uuuaauacacagugucuaa

SEQ ID NO: 1256962 - RNA, 19 nt, Artificial Sequence
  Description of Artificial Sequence: Synthetic oligonucleotide
  Sense strand starting at position 3363 of SEQ ID NO: 1241236
acguguaugccucaauuag

SEQ ID NO: 1256963 - RNA, 19 nt, Artificial Sequence
  Description of Artificial Sequence: Synthetic oligonucleotide
  Antisense strand to SEQ ID NO: 1256962
cuaauugaggcauacacgu

SEQ ID NO: 1256964 - RNA, 19 nt, Artificial Sequence
  Description of Artificial Sequence: Synthetic oligonucleotide
  Sense strand starting at position 3406 of SEQ ID NO: 1241236
ucuuaaaugugucugaaca

SEQ ID NO: 1256965 - RNA, 19 nt, Artificial Sequence
  Description of Artificial Sequence: Synthetic oligonucleotide
  Antisense strand to SEQ ID NO: 1256964
uguucagacacauuuaaga

SEQ ID NO: 1256966 - RNA, 19 nt, Artificial Sequence
  Description of Artificial Sequence: Synthetic oligonucleotide
  Sense strand starting at position 3407 of SEQ ID NO: 1241236
cuuaaaugugucugaacau

SEQ ID NO: 1256967 - RNA, 19 nt, Artificial Sequence
  Description of Artificial Sequence: Synthetic oligonucleotide
  Antisense strand to SEQ ID NO: 1256966
auguucagacacauuuaag

SEQ ID NO: 1256968 - RNA, 19 nt, Artificial Sequence
  Description of Artificial Sequence: Synthetic oligonucleotide
  Sense strand starting at position 3892 of SEQ ID NO: 1241236
uggaguugugacuaccaac

SEQ ID NO: 1256969 - RNA, 19 nt, Artificial Sequence
  Description of Artificial Sequence: Synthetic oligonucleotide
  Antisense strand to SEQ ID NO: 1256968
guugguagucacaacucca

SEQ ID NO: 1256970 - RNA, 19 nt, Artificial Sequence
  Description of Artificial Sequence: Synthetic oligonucleotide
  Sense strand starting at position 3928 of SEQ ID NO: 1241236
ggaccucacucguuguuaa

SEQ ID NO: 1256971 - RNA, 19 nt, Artificial Sequence
  Description of Artificial Sequence: Synthetic oligonucleotide
  Antisense strand to SEQ ID NO: 1256970
uuaacaacgagugaggucc

SEQ ID NO: 1256972 - RNA, 19 nt, Artificial Sequence
  Description of Artificial Sequence: Synthetic oligonucleotide
  Sense strand starting at position 3936 of SEQ ID NO: 1241236
cucguuguuaaguauauau

SEQ ID NO: 1256973 - RNA, 19 nt, Artificial Sequence
  Description of Artificial Sequence: Synthetic oligonucleotide
  Antisense strand to SEQ ID NO: 1256972
auauauacuuaacaacgag

SEQ ID NO: 1256974 - RNA, 19 nt, Artificial Sequence
  Description of Artificial Sequence: Synthetic oligonucleotide
  Sense strand starting at position 280 of SEQ ID NO: 1241237
ggaugagauucggccucau

SEQ ID NO: 1256975 - RNA, 19 nt, Artificial Sequence
  Description of Artificial Sequence: Synthetic oligonucleotide
  Antisense strand to SEQ ID NO: 1256974
augaggccgaaucucaucc

SEQ ID NO: 1256976 - RNA, 19 nt, Artificial Sequence
  Description of Artificial Sequence: Synthetic oligonucleotide
  Sense strand starting at position 284 of SEQ ID NO: 1241237
gagauucggccucauacuc

SEQ ID NO: 1256977 - RNA, 19 nt, Artificial Sequence
  Description of Artificial Sequence: Synthetic oligonucleotide
  Antisense strand to SEQ ID NO: 1256976
gaguaugaggccgaaucuc

SEQ ID NO: 1256978 - RNA, 19 nt, Artificial Sequence
  Description of Artificial Sequence: Synthetic oligonucleotide
  Sense strand starting at position 682 of SEQ ID NO: 1241237
ugugguuuggucagaguuu

SEQ ID NO: 1256979 - RNA, 19 nt, Artificial Sequence
  Description of Artificial Sequence: Synthetic oligonucleotide
  Antisense strand to SEQ ID NO: 1256978
aaacucugaccaaaccaca

SEQ ID NO: 1256980 - RNA, 19 nt, Artificial Sequence
  Description of Artificial Sequence: Synthetic oligonucleotide
  Sense strand starting at position 977 of SEQ ID NO: 1241237
ugacguagguguaaaggau

SEQ ID NO: 1256981 - RNA, 19 nt, Artificial Sequence
  Description of Artificial Sequence: Synthetic oligonucleotide
  Antisense strand to SEQ ID NO: 1256980
auccuuuacaccuacguca

SEQ ID NO: 1256982 - RNA, 19 nt, Artificial Sequence
  Description of Artificial Sequence: Synthetic oligonucleotide
  Sense strand starting at position 1059 of SEQ ID NO: 1241237
acucaaguacuuuggugaa

SEQ ID NO: 1256983 - RNA, 19 nt, Artificial Sequence
  Description of Artificial Sequence: Synthetic oligonucleotide
  Antisense strand to SEQ ID NO: 1256982
uucaccaaaguacuugagu

SEQ ID NO: 1256984 - RNA, 19 nt, Artificial Sequence
  Description of Artificial Sequence: Synthetic oligonucleotide
  Sense strand starting at position 1063 of SEQ ID NO: 1241237
aaguacuuuggugaagcaa

SEQ ID NO: 1256985 - RNA, 19 nt, Artificial Sequence
  Description of Artificial Sequence: Synthetic oligonucleotide
  Antisense strand to SEQ ID NO: 1256984
uugcuucaccaaaguacuu

SEQ ID NO: 1256986 - RNA, 19 nt, Artificial Sequence
  Description of Artificial Sequence: Synthetic oligonucleotide
  Sense strand starting at position 1279 of SEQ ID NO: 1241237
agaacucaagauugcuauu

SEQ ID NO: 1256987 - RNA, 19 nt, Artificial Sequence
  Description of Artificial Sequence: Synthetic oligonucleotide
  Antisense strand to SEQ ID NO: 1256986
aauagcaaucuugaguucu

SEQ ID NO: 1256988 - RNA, 19 nt, Artificial Sequence
  Description of Artificial Sequence: Synthetic oligonucleotide
  Sense strand starting at position 1337 of SEQ ID NO: 1241237
cuaauaucagaguagccaa

SEQ ID NO: 1256989 - RNA, 19 nt, Artificial Sequence
  Description of Artificial Sequence: Synthetic oligonucleotide
  Antisense strand to SEQ ID NO: 1256988
uuggcuacucugauauuag

SEQ ID NO: 1256990 - RNA, 19 nt, Artificial Sequence
  Description of Artificial Sequence: Synthetic oligonucleotide
  Sense strand starting at position 1361 of SEQ ID NO: 1241237
cuuaguaauucuccauugu

SEQ ID NO: 1256991 - RNA, 19 nt, Artificial Sequence
  Description of Artificial Sequence: Synthetic oligonucleotide
  Antisense strand to SEQ ID NO: 1256990
acaauggagaauuacuaag

SEQ ID NO: 1256992 - RNA, 19 nt, Artificial Sequence
  Description of Artificial Sequence: Synthetic oligonucleotide
  Sense strand starting at position 1362 of SEQ ID NO: 1241237
uuaguaauucuccauuguu

SEQ ID NO: 1256993 - RNA, 19 nt, Artificial Sequence
  Description of Artificial Sequence: Synthetic oligonucleotide
  Antisense strand to SEQ ID NO: 1256992
aacaauggagaauuacuaa

SEQ ID NO: 1256994 - RNA, 19 nt, Artificial Sequence
  Description of Artificial Sequence: Synthetic oligonucleotide
  Sense strand starting at position 1365 of SEQ ID NO: 1241237
guaauucuccauuguuaag

SEQ ID NO: 1256995 - RNA, 19 nt, Artificial Sequence
  Description of Artificial Sequence: Synthetic oligonucleotide
  Antisense strand to SEQ ID NO: 1256994
cuuaacaauggagaauuac

SEQ ID NO: 1256996 - RNA, 19 nt, Artificial Sequence
  Description of Artificial Sequence: Synthetic oligonucleotide
  Sense strand starting at position 1375 of SEQ ID NO: 1241237
auuguuaagguauaaggua

SEQ ID NO: 1256997 - RNA, 19 nt, Artificial Sequence
  Description of Artificial Sequence: Synthetic oligonucleotide
  Antisense strand to SEQ ID NO: 1256996
uaccuuauaccuuaacaau

SEQ ID NO: 1256998 - RNA, 19 nt, Artificial Sequence
  Description of Artificial Sequence: Synthetic oligonucleotide
  Sense strand starting at position 1413 of SEQ ID NO: 1241237
guuagacacuguguauuaa

SEQ ID NO: 1256999 - RNA, 19 nt, Artificial Sequence
  Description of Artificial Sequence: Synthetic oligonucleotide
  Antisense strand to SEQ ID NO: 1256998
uuaauacacagugucuaac

SEQ ID NO: 1257000 - RNA, 19 nt, Artificial Sequence
  Description of Artificial Sequence: Synthetic oligonucleotide
  Sense strand starting at position 1414 of SEQ ID NO: 1241237
uuagacacuguguauuaaa

SEQ ID NO: 1257001 - RNA, 19 nt, Artificial Sequence
  Description of Artificial Sequence: Synthetic oligonucleotide
  Antisense strand to SEQ ID NO: 1257000
uuuaauacacagugucuaa

SEQ ID NO: 1257002 - RNA, 19 nt, Artificial Sequence
  Description of Artificial Sequence: Synthetic oligonucleotide
  Sense strand starting at position 1511 of SEQ ID NO: 1241237
acguguaugccucaauuag

SEQ ID NO: 1257003 - RNA, 19 nt, Artificial Sequence
  Description of Artificial Sequence: Synthetic oligonucleotide
  Antisense strand to SEQ ID NO: 1257002
cuaauugaggcauacacgu

SEQ ID NO: 1257004 - RNA, 19 nt, Artificial Sequence
  Description of Artificial Sequence: Synthetic oligonucleotide
  Sense strand starting at position 1554 of SEQ ID NO: 1241237
ucuuaaaugugucugaaca

SEQ ID NO: 1257005 - RNA, 19 nt, Artificial Sequence
  Description of Artificial Sequence: Synthetic oligonucleotide
  Antisense strand to SEQ ID NO: 1257004
uguucagacacauuuaaga

SEQ ID NO: 1257006 - RNA, 19 nt, Artificial Sequence
  Description of Artificial Sequence: Synthetic oligonucleotide
  Sense strand starting at position 1555 of SEQ ID NO: 1241237
cuuaaaugugucugaacau

SEQ ID NO: 1257007 - RNA, 19 nt, Artificial Sequence
  Description of Artificial Sequence: Synthetic oligonucleotide
  Antisense strand to SEQ ID NO: 1257006
auguucagacacauuuaag

SEQ ID NO: 1257008 - RNA, 19 nt, Artificial Sequence
  Description of Artificial Sequence: Synthetic oligonucleotide
  Sense strand starting at position 2040 of SEQ ID NO: 1241237
uggaguugugacuaccaac

SEQ ID NO: 1257009 - RNA, 19 nt, Artificial Sequence
  Description of Artificial Sequence: Synthetic oligonucleotide
  Antisense strand to SEQ ID NO: 1257008
guugguagucacaacucca

SEQ ID NO: 1257010 - RNA, 19 nt, Artificial Sequence
  Description of Artificial Sequence: Synthetic oligonucleotide
  Sense strand starting at position 2084 of SEQ ID NO: 1241237
cucguuguuaaguauauau

SEQ ID NO: 1257011 - RNA, 19 nt, Artificial Sequence
  Description of Artificial Sequence: Synthetic oligonucleotide
  Antisense strand to SEQ ID NO: 1257010
auauauacuuaacaacgag

SEQ ID NO: 1257012 - RNA, 19 nt, Artificial Sequence
  Description of Artificial Sequence: Synthetic oligonucleotide
  Sense strand starting at position 2199 of SEQ ID NO: 1241237
uccugaauuugauaacuga

SEQ ID NO: 1257013 - RNA, 19 nt, Artificial Sequence
  Description of Artificial Sequence: Synthetic oligonucleotide
  Antisense strand to SEQ ID NO: 1257012
ucaguuaucaaauucagga

SEQ ID NO: 1257014 - RNA, 19 nt, Artificial Sequence
  Description of Artificial Sequence: Synthetic oligonucleotide
  Sense strand starting at position 2258 of SEQ ID NO: 1241237
aguacaugaucucuaucau

SEQ ID NO: 1257015 - RNA, 19 nt, Artificial Sequence
  Description of Artificial Sequence: Synthetic oligonucleotide
  Antisense strand to SEQ ID NO: 1257014
augauagagaucauguacu

SEQ ID NO: 1257016 - RNA, 19 nt, Artificial Sequence
  Description of Artificial Sequence: Synthetic oligonucleotide
  Sense strand starting at position 2259 of SEQ ID NO: 1241237
guacaugaucucuaucauu

SEQ ID NO: 1257017 - RNA, 19 nt, Artificial Sequence
  Description of Artificial Sequence: Synthetic oligonucleotide
  Antisense strand to SEQ ID NO: 1257016
aaugauagagaucauguac

SEQ ID NO: 1257018 - RNA, 19 nt, Artificial Sequence
  Description of Artificial Sequence: Synthetic oligonucleotide
  Sense strand starting at position 2293 of SEQ ID NO: 1241237
gacuguccuccauaaguag

SEQ ID NO: 1257019 - RNA, 19 nt, Artificial Sequence
  Description of Artificial Sequence: Synthetic oligonucleotide
  Antisense strand to SEQ ID NO: 1257018
cuacuuauggaggacaguc

SEQ ID NO: 1257020 - RNA, 19 nt, Artificial Sequence
  Description of Artificial Sequence: Synthetic oligonucleotide
  Sense strand starting at position 2377 of SEQ ID NO: 1241237
guguuugugauagauacua

SEQ ID NO: 1257021 - RNA, 19 nt, Artificial Sequence
  Description of Artificial Sequence: Synthetic oligonucleotide
  Antisense strand to SEQ ID NO: 1257020
uaguaucuaucacaaacac

SEQ ID NO: 1257022 - RNA, 19 nt, Artificial Sequence
  Description of Artificial Sequence: Synthetic oligonucleotide
  Sense strand starting at position 2523 of SEQ ID NO: 1241237
ggcagugucacagacuuua

SEQ ID NO: 1257023 - RNA, 19 nt, Artificial Sequence
  Description of Artificial Sequence: Synthetic oligonucleotide
  Antisense strand to SEQ ID NO: 1257022
uaaagucugugacacugcc

SEQ ID NO: 1257024 - RNA, 19 nt, Artificial Sequence
  Description of Artificial Sequence: Synthetic oligonucleotide
  Sense strand starting at position 2575 of SEQ ID NO: 1241237
ggagccacaucuuuaaucu

SEQ ID NO: 1257025 - RNA, 19 nt, Artificial Sequence
  Description of Artificial Sequence: Synthetic oligonucleotide
  Antisense strand to SEQ ID NO: 1257024
agauuaaagauguggcucc

SEQ ID NO: 1257026 - RNA, 19 nt, Artificial Sequence
  Description of Artificial Sequence: Synthetic oligonucleotide
  Sense strand starting at position 2585 of SEQ ID NO: 1241237
cuuuaaucucuguacuagu

SEQ ID NO: 1257027 - RNA, 19 nt, Artificial Sequence
  Description of Artificial Sequence: Synthetic oligonucleotide
  Antisense strand to SEQ ID NO: 1257026
acuaguacagagauuaaag

SEQ ID NO: 1257028 - RNA, 19 nt, Artificial Sequence
  Description of Artificial Sequence: Synthetic oligonucleotide
  Sense strand starting at position 2592 of SEQ ID NO: 1241237
cucuguacuagugauguaa

SEQ ID NO: 1257029 - RNA, 19 nt, Artificial Sequence
  Description of Artificial Sequence: Synthetic oligonucleotide
  Antisense strand to SEQ ID NO: 1257028
uuacaucacuaguacagag

SEQ ID NO: 1257030 - RNA, 19 nt, Artificial Sequence
  Description of Artificial Sequence: Synthetic oligonucleotide
  Sense strand starting at position 2596 of SEQ ID NO: 1241237
guacuagugauguaagagu

SEQ ID NO: 1257031 - RNA, 19 nt, Artificial Sequence
  Description of Artificial Sequence: Synthetic oligonucleotide
  Antisense strand to SEQ ID NO: 1257030
acucuuacaucacuaguac

SEQ ID NO: 1257032 - RNA, 19 nt, Artificial Sequence
  Description of Artificial Sequence: Synthetic oligonucleotide
  Sense strand starting at position 2605 of SEQ ID NO: 1241237
auguaagaguuguucucag

SEQ ID NO: 1257033 - RNA, 19 nt, Artificial Sequence
  Description of Artificial Sequence: Synthetic oligonucleotide
  Antisense strand to SEQ ID NO: 1257032
cugagaacaacucuuacau

SEQ ID NO: 1257034 - RNA, 19 nt, Artificial Sequence
  Description of Artificial Sequence: Synthetic oligonucleotide
  Sense strand starting at position 2648 of SEQ ID NO: 1241237
guugaacaauagcuggaua

SEQ ID NO: 1257035 - RNA, 19 nt, Artificial Sequence
  Description of Artificial Sequence: Synthetic oligonucleotide
  Antisense strand to SEQ ID NO: 1257034
uauccagcuauuguucaac

SEQ ID NO: 1257036 - RNA, 19 nt, Artificial Sequence
  Description of Artificial Sequence: Synthetic oligonucleotide
  Sense strand starting at position 2650 of SEQ ID NO: 1241237
ugaacaauagcuggauaau

SEQ ID NO: 1257037 - RNA, 19 nt, Artificial Sequence
  Description of Artificial Sequence: Synthetic oligonucleotide
  Antisense strand to SEQ ID NO: 1257036
auuauccagcuauuguuca

SEQ ID NO: 1257038 - RNA, 19 nt, Artificial Sequence
  Description of Artificial Sequence: Synthetic oligonucleotide
  Sense strand starting at position 2660 of SEQ ID NO: 1241237
cuggauaauuuccauugua

SEQ ID NO: 1257039 - RNA, 19 nt, Artificial Sequence
  Description of Artificial Sequence: Synthetic oligonucleotide
  Antisense strand to SEQ ID NO: 1257038
uacaauggaaauuauccag

SEQ ID NO: 1257040 - RNA, 19 nt, Artificial Sequence
  Description of Artificial Sequence: Synthetic oligonucleotide
  Sense strand starting at position 2670 of SEQ ID NO: 1241237
uccauuguauauucuguga

SEQ ID NO: 1257041 - RNA, 19 nt, Artificial Sequence
  Description of Artificial Sequence: Synthetic oligonucleotide
  Antisense strand to SEQ ID NO: 1257040
ucacagaauauacaaugga

SEQ ID NO: 1257042 - RNA, 19 nt, Artificial Sequence
  Description of Artificial Sequence: Synthetic oligonucleotide
  Sense strand starting at position 2928 of SEQ ID NO: 1241237
cggugcauuggauaaagaa

SEQ ID NO: 1257043 - RNA, 19 nt, Artificial Sequence
  Description of Artificial Sequence: Synthetic oligonucleotide
  Antisense strand to SEQ ID NO: 1257042
uucuuuauccaaugcaccg

SEQ ID NO: 1257044 - RNA, 19 nt, Artificial Sequence
  Description of Artificial Sequence: Synthetic oligonucleotide
  Sense strand starting at position 3039 of SEQ ID NO: 1241237
uccuaagcgaauuaacgua

SEQ ID NO: 1257045 - RNA, 19 nt, Artificial Sequence
  Description of Artificial Sequence: Synthetic oligonucleotide
  Antisense strand to SEQ ID NO: 1257044
uacguuaauucgcuuagga

SEQ ID NO: 1257046 - RNA, 19 nt, Artificial Sequence
  Description of Artificial Sequence: Synthetic oligonucleotide
  Sense strand starting at position 3044 of SEQ ID NO: 1241237
agcgaauuaacguagaaac

SEQ ID NO: 1257047 - RNA, 19 nt, Artificial Sequence
  Description of Artificial Sequence: Synthetic oligonucleotide
  Antisense strand to SEQ ID NO: 1257046
guuucuacguuaauucgcu

SEQ ID NO: 1257048 - RNA, 19 nt, Artificial Sequence
  Description of Artificial Sequence: Synthetic oligonucleotide
  Sense strand starting at position 3111 of SEQ ID NO: 1241237
uggguacguacagacauaa

SEQ ID NO: 1257049 - RNA, 19 nt, Artificial Sequence
  Description of Artificial Sequence: Synthetic oligonucleotide
  Antisense strand to SEQ ID NO: 1257048
uuaugucuguacguaccca

SEQ ID NO: 1257050 - RNA, 19 nt, Artificial Sequence
  Description of Artificial Sequence: Synthetic oligonucleotide
  Sense strand starting at position 3733 of SEQ ID NO: 1241237
gaaagaugcugggcaugau

SEQ ID NO: 1257051 - RNA, 19 nt, Artificial Sequence
  Description of Artificial Sequence: Synthetic oligonucleotide
  Antisense strand to SEQ ID NO: 1257050
aucaugcccagcaucuuuc

SEQ ID NO: 1257052 - RNA, 19 nt, Artificial Sequence
  Description of Artificial Sequence: Synthetic oligonucleotide
  Sense strand starting at position 3793 of SEQ ID NO: 1241237
gaaggauucccuugagcuc

SEQ ID NO: 1257053 - RNA, 19 nt, Artificial Sequence
  Description of Artificial Sequence: Synthetic oligonucleotide
  Antisense strand to SEQ ID NO: 1257052
gagcucaagggaauccuuc

SEQ ID NO: 1257054 - RNA, 19 nt, Artificial Sequence
  Description of Artificial Sequence: Synthetic oligonucleotide
  Sense strand starting at position 415 of SEQ ID NO: 1241238
cugcaauaacaugauguca

SEQ ID NO: 1257055 - RNA, 19 nt, Artificial Sequence
  Description of Artificial Sequence: Synthetic oligonucleotide
  Antisense strand to SEQ ID NO: 1257054
ugacaucauguuauugcag

SEQ ID NO: 1257056 - RNA, 19 nt, Artificial Sequence
  Description of Artificial Sequence: Synthetic oligonucleotide
  Sense strand starting at position 700 of SEQ ID NO: 1241238
gcagcucugagcuagggau

SEQ ID NO: 1257057 - RNA, 19 nt, Artificial Sequence
  Description of Artificial Sequence: Synthetic oligonucleotide
  Antisense strand to SEQ ID NO: 1257056
aucccuagcucagagcugc

SEQ ID NO: 1257058 - RNA, 19 nt, Artificial Sequence
  Description of Artificial Sequence: Synthetic oligonucleotide
  Sense strand starting at position 761 of SEQ ID NO: 1241238
guugauaaauagccugagu

SEQ ID NO: 1257059 - RNA, 19 nt, Artificial Sequence
  Description of Artificial Sequence: Synthetic oligonucleotide
  Antisense strand to SEQ ID NO: 1257058
acucaggcuauuuaucaac

SEQ ID NO: 1257060 - RNA, 19 nt, Artificial Sequence
  Description of Artificial Sequence: Synthetic oligonucleotide
  Sense strand starting at position 763 of SEQ ID NO: 1241238
ugauaaauagccugaguuu

SEQ ID NO: 1257061 - RNA, 19 nt, Artificial Sequence
  Description of Artificial Sequence: Synthetic oligonucleotide
  Antisense strand to SEQ ID NO: 1257060
aaacucaggcuauuuauca

SEQ ID NO: 1257062 - RNA, 19 nt, Artificial Sequence
  Description of Artificial Sequence: Synthetic oligonucleotide
  Sense strand starting at position 764 of SEQ ID NO: 1241238
gauaaauagccugaguuua

SEQ ID NO: 1257063 - RNA, 19 nt, Artificial Sequence
  Description of Artificial Sequence: Synthetic oligonucleotide
  Antisense strand to SEQ ID NO: 1257062
uaaacucaggcuauuuauc

SEQ ID NO: 1257064 - RNA, 19 nt, Artificial Sequence
  Description of Artificial Sequence: Synthetic oligonucleotide
  Sense strand starting at position 865 of SEQ ID NO: 1241238
gccuguucccucccgcaaa

SEQ ID NO: 1257065 - RNA, 19 nt, Artificial Sequence
  Description of Artificial Sequence: Synthetic oligonucleotide
  Antisense strand to SEQ ID NO: 1257064
uuugcgggagggaacaggc

SEQ ID NO: 1257066 - RNA, 19 nt, Artificial Sequence
  Description of Artificial Sequence: Synthetic oligonucleotide
  Sense strand starting at position 1195 of SEQ ID NO: 1241238
cugcaauguggguaccaga

SEQ ID NO: 1257067 - RNA, 19 nt, Artificial Sequence
  Description of Artificial Sequence: Synthetic oligonucleotide
  Antisense strand to SEQ ID NO: 1257066
ucugguacccacauugcag

SEQ ID NO: 1257068 - RNA, 19 nt, Artificial Sequence
  Description of Artificial Sequence: Synthetic oligonucleotide
  Sense strand starting at position 1209 of SEQ ID NO: 1241238
ccagauugguggcuccaga

SEQ ID NO: 1257069 - RNA, 19 nt, Artificial Sequence
  Description of Artificial Sequence: Synthetic oligonucleotide
  Antisense strand to SEQ ID NO: 1257068
ucuggagccaccaaucugg

SEQ ID NO: 1257070 - RNA, 19 nt, Artificial Sequence
  Description of Artificial Sequence: Synthetic oligonucleotide
  Sense strand starting at position 1344 of SEQ ID NO: 1241238
cacugcugucuugaaagga

SEQ ID NO: 1257071 - RNA, 19 nt, Artificial Sequence
  Description of Artificial Sequence: Synthetic oligonucleotide
  Antisense strand to SEQ ID NO: 1257070
uccuuucaagacagcagug

SEQ ID NO: 1257072 - RNA, 19 nt, Artificial Sequence
  Description of Artificial Sequence: Synthetic oligonucleotide
  Sense strand starting at position 1448 of SEQ ID NO: 1241238
gccucagguauugaggaga

SEQ ID NO: 1257073 - RNA, 19 nt, Artificial Sequence
  Description of Artificial Sequence: Synthetic oligonucleotide
  Antisense strand to SEQ ID NO: 1257072
ucuccucaauaccugaggc

SEQ ID NO: 1257074 - RNA, 19 nt, Artificial Sequence
  Description of Artificial Sequence: Synthetic oligonucleotide
  Sense strand starting at position 1483 of SEQ ID NO: 1241238
acaggauuguuccugaagu

SEQ ID NO: 1257075 - RNA, 19 nt, Artificial Sequence
  Description of Artificial Sequence: Synthetic oligonucleotide
  Antisense strand to SEQ ID NO: 1257074
acuucaggaacaauccugu

SEQ ID NO: 1257076 - RNA, 19 nt, Artificial Sequence
  Description of Artificial Sequence: Synthetic oligonucleotide
  Sense strand starting at position 1485 of SEQ ID NO: 1241238
aggauuguuccugaaguuc

SEQ ID NO: 1257077 - RNA, 19 nt, Artificial Sequence
  Description of Artificial Sequence: Synthetic oligonucleotide
  Antisense strand to SEQ ID NO: 1257076
gaacuucaggaacaauccu

SEQ ID NO: 1257078 - RNA, 19 nt, Artificial Sequence
  Description of Artificial Sequence: Synthetic oligonucleotide
  Sense strand starting at position 1628 of SEQ ID NO: 1241238
cuagguagggucugacaca

SEQ ID NO: 1257079 - RNA, 19 nt, Artificial Sequence
  Description of Artificial Sequence: Synthetic oligonucleotide
  Antisense strand to SEQ ID NO: 1257078
ugugucagacccuaccuag

SEQ ID NO: 1257080 - RNA, 19 nt, Artificial Sequence
  Description of Artificial Sequence: Synthetic oligonucleotide
  Sense strand starting at position 1751 of SEQ ID NO: 1241238
cugcaagaucgguauuaau

SEQ ID NO: 1257081 - RNA, 19 nt, Artificial Sequence
  Description of Artificial Sequence: Synthetic oligonucleotide
  Antisense strand to SEQ ID NO: 1257080
auuaauaccgaucuugcag

SEQ ID NO: 1257082 - RNA, 19 nt, Artificial Sequence
  Description of Artificial Sequence: Synthetic oligonucleotide
  Sense strand starting at position 1833 of SEQ ID NO: 1241238
aggauauaccaaggcaauu

SEQ ID NO: 1257083 - RNA, 19 nt, Artificial Sequence
  Description of Artificial Sequence: Synthetic oligonucleotide
  Antisense strand to SEQ ID NO: 1257082
aauugccuugguauauccu

SEQ ID NO: 1257084 - RNA, 19 nt, Artificial Sequence
  Description of Artificial Sequence: Synthetic oligonucleotide
  Sense strand starting at position 2014 of SEQ ID NO: 1241238
acuuuaaggcccugagaga

SEQ ID NO: 1257085 - RNA, 19 nt, Artificial Sequence
  Description of Artificial Sequence: Synthetic oligonucleotide
  Antisense strand to SEQ ID NO: 1257084
ucucucagggccuuaaagu

SEQ ID NO: 1257086 - RNA, 19 nt, Artificial Sequence
  Description of Artificial Sequence: Synthetic oligonucleotide
  Sense strand starting at position 2117 of SEQ ID NO: 1241238
ucaggaaguuugcccacaa

SEQ ID NO: 1257087 - RNA, 19 nt, Artificial Sequence
  Description of Artificial Sequence: Synthetic oligonucleotide
  Antisense strand to SEQ ID NO: 1257086
uugugggcaaacuuccuga

SEQ ID NO: 1257088 - RNA, 19 nt, Artificial Sequence
  Description of Artificial Sequence: Synthetic oligonucleotide
  Sense strand starting at position 2118 of SEQ ID NO: 1241238
caggaaguuugcccacaaa

SEQ ID NO: 1257089 - RNA, 19 nt, Artificial Sequence
  Description of Artificial Sequence: Synthetic oligonucleotide
  Antisense strand to SEQ ID NO: 1257088
uuugugggcaaacuuccug

SEQ ID NO: 1257090 - RNA, 19 nt, Artificial Sequence
  Description of Artificial Sequence: Synthetic oligonucleotide
  Sense strand starting at position 2121 of SEQ ID NO: 1241238
gaaguuugcccacaaacug

SEQ ID NO: 1257091 - RNA, 19 nt, Artificial Sequence
  Description of Artificial Sequence: Synthetic oligonucleotide
  Antisense strand to SEQ ID NO: 1257090
caguuugugggcaaacuuc

SEQ ID NO: 1257092 - RNA, 19 nt, Artificial Sequence
  Description of Artificial Sequence: Synthetic oligonucleotide
  Sense strand starting at position 2338 of SEQ ID NO: 1241238
uuucuacuccucugggauu

SEQ ID NO: 1257093 - RNA, 19 nt, Artificial Sequence
  Description of Artificial Sequence: Synthetic oligonucleotide
  Antisense strand to SEQ ID NO: 1257092
aaucccagaggaguagaaa

SEQ ID NO: 1257094 - RNA, 19 nt, Artificial Sequence
  Description of Artificial Sequence: Synthetic oligonucleotide
  Sense strand starting at position 2351 of SEQ ID NO: 1241238
gggauuagaucauuauugc

SEQ ID NO: 1257095 - RNA, 19 nt, Artificial Sequence
  Description of Artificial Sequence: Synthetic oligonucleotide
  Antisense strand to SEQ ID NO: 1257094
gcaauaaugaucuaauccc

SEQ ID NO: 1257096 - RNA, 19 nt, Artificial Sequence
  Description of Artificial Sequence: Synthetic oligonucleotide
  Sense strand starting at position 2352 of SEQ ID NO: 1241238
ggauuagaucauuauugcu

SEQ ID NO: 1257097 - RNA, 19 nt, Artificial Sequence
  Description of Artificial Sequence: Synthetic oligonucleotide
  Antisense strand to SEQ ID NO: 1257096
agcaauaaugaucuaaucc

SEQ ID NO: 1257098 - RNA, 19 nt, Artificial Sequence
  Description of Artificial Sequence: Synthetic oligonucleotide
  Sense strand starting at position 2397 of SEQ ID NO: 1241238
aaugcaaguucccuggauu

SEQ ID NO: 1257099 - RNA, 19 nt, Artificial Sequence
  Description of Artificial Sequence: Synthetic oligonucleotide
  Antisense strand to SEQ ID NO: 1257098
aauccagggaacuugcauu

SEQ ID NO: 1257100 - RNA, 19 nt, Artificial Sequence
  Description of Artificial Sequence: Synthetic oligonucleotide
  Sense strand starting at position 2413 of SEQ ID NO: 1241238
auugcuuaucuguauauac

SEQ ID NO: 1257101 - RNA, 19 nt, Artificial Sequence
  Description of Artificial Sequence: Synthetic oligonucleotide
  Antisense strand to SEQ ID NO: 1257100
guauauacagauaagcaau

SEQ ID NO: 1257102 - RNA, 19 nt, Artificial Sequence
  Description of Artificial Sequence: Synthetic oligonucleotide
  Sense strand starting at position 2415 of SEQ ID NO: 1241238
ugcuuaucuguauauacuu

SEQ ID NO: 1257103 - RNA, 19 nt, Artificial Sequence
  Description of Artificial Sequence: Synthetic oligonucleotide
  Antisense strand to SEQ ID NO: 1257102
aaguauauacagauaagca

SEQ ID NO: 1257104 - RNA, 19 nt, Artificial Sequence
  Description of Artificial Sequence: Synthetic oligonucleotide
  Sense strand starting at position 2430 of SEQ ID NO: 1241238
acuuaauaagucugggaca

SEQ ID NO: 1257105 - RNA, 19 nt, Artificial Sequence
  Description of Artificial Sequence: Synthetic oligonucleotide
  Antisense strand to SEQ ID NO: 1257104
ugucccagacuuauuaagu

SEQ ID NO: 1257106 - RNA, 19 nt, Artificial Sequence
  Description of Artificial Sequence: Synthetic oligonucleotide
  Sense strand starting at position 2675 of SEQ ID NO: 1241238
agaacaaggcucugacaau

SEQ ID NO: 1257107 - RNA, 19 nt, Artificial Sequence
  Description of Artificial Sequence: Synthetic oligonucleotide
  Antisense strand to SEQ ID NO: 1257106
auugucagagccuuguucu

SEQ ID NO: 1257108 - RNA, 19 nt, Artificial Sequence
  Description of Artificial Sequence: Synthetic oligonucleotide
  Sense strand starting at position 2712 of SEQ ID NO: 1241238
ucacuugaguccucaguga

SEQ ID NO: 1257109 - RNA, 19 nt, Artificial Sequence
  Description of Artificial Sequence: Synthetic oligonucleotide
  Antisense strand to SEQ ID NO: 1257108
ucacugaggacucaaguga

SEQ ID NO: 1257110 - RNA, 19 nt, Artificial Sequence
  Description of Artificial Sequence: Synthetic oligonucleotide
  Sense strand starting at position 2778 of SEQ ID NO: 1241238
gguuaaaguccuuauguuc

SEQ ID NO: 1257111 - RNA, 19 nt, Artificial Sequence
  Description of Artificial Sequence: Synthetic oligonucleotide
  Antisense strand to SEQ ID NO: 1257110
gaacauaaggacuuuaacc

SEQ ID NO: 1257112 - RNA, 19 nt, Artificial Sequence
  Description of Artificial Sequence: Synthetic oligonucleotide
  Sense strand starting at position 3066 of SEQ ID NO: 1241238
uuagaagauucuguguaug

SEQ ID NO: 1257113 - RNA, 19 nt, Artificial Sequence
  Description of Artificial Sequence: Synthetic oligonucleotide
  Antisense strand to SEQ ID NO: 1257112
cauacacagaaucuucuaa

SEQ ID NO: 1257114 - RNA, 19 nt, Artificial Sequence
  Description of Artificial Sequence: Synthetic oligonucleotide
  Sense strand starting at position 3069 of SEQ ID NO: 1241238
gaagauucuguguaugcac

SEQ ID NO: 1257115 - RNA, 19 nt, Artificial Sequence
  Description of Artificial Sequence: Synthetic oligonucleotide
  Antisense strand to SEQ ID NO: 1257114
gugcauacacagaaucuuc

SEQ ID NO: 1257116 - RNA, 19 nt, Artificial Sequence
  Description of Artificial Sequence: Synthetic oligonucleotide
  Sense strand starting at position 3300 of SEQ ID NO: 1241238
agauauuaagcccagcacu

SEQ ID NO: 1257117 - RNA, 19 nt, Artificial Sequence
  Description of Artificial Sequence: Synthetic oligonucleotide
  Antisense strand to SEQ ID NO: 1257116
agugcugggcuuaauaucu

SEQ ID NO: 1257118 - RNA, 19 nt, Artificial Sequence
  Description of Artificial Sequence: Synthetic oligonucleotide
  Sense strand starting at position 3431 of SEQ ID NO: 1241238
uuauuugguuuccugcauu

SEQ ID NO: 1257119 - RNA, 19 nt, Artificial Sequence
  Description of Artificial Sequence: Synthetic oligonucleotide
  Antisense strand to SEQ ID NO: 1257118
aaugcaggaaaccaaauaa

SEQ ID NO: 1257120 - RNA, 19 nt, Artificial Sequence
  Description of Artificial Sequence: Synthetic oligonucleotide
  Sense strand starting at position 3529 of SEQ ID NO: 1241238
aggucaugaguccauucuu

SEQ ID NO: 1257121 - RNA, 19 nt, Artificial Sequence
  Description of Artificial Sequence: Synthetic oligonucleotide
  Antisense strand to SEQ ID NO: 1257120
aagaauggacucaugaccu

SEQ ID NO: 1257122 - RNA, 19 nt, Artificial Sequence
  Description of Artificial Sequence: Synthetic oligonucleotide
  Sense strand starting at position 3564 of SEQ ID NO: 1241238
guauauguaccacaaugua

SEQ ID NO: 1257123 - RNA, 19 nt, Artificial Sequence
  Description of Artificial Sequence: Synthetic oligonucleotide
  Antisense strand to SEQ ID NO: 1257122
uacauugugguacauauac

SEQ ID NO: 1257124 - RNA, 19 nt, Artificial Sequence
  Description of Artificial Sequence: Synthetic oligonucleotide
  Sense strand starting at position 3714 of SEQ ID NO: 1241238
cuggguaaauauccaguga

SEQ ID NO: 1257125 - RNA, 19 nt, Artificial Sequence
  Description of Artificial Sequence: Synthetic oligonucleotide
  Antisense strand to SEQ ID NO: 1257124
ucacuggauauuuacccag

SEQ ID NO: 1257126 - RNA, 19 nt, Artificial Sequence
  Description of Artificial Sequence: Synthetic oligonucleotide
  Sense strand starting at position 3718 of SEQ ID NO: 1241238
guaaauauccagugauggg

SEQ ID NO: 1257127 - RNA, 19 nt, Artificial Sequence
  Description of Artificial Sequence: Synthetic oligonucleotide
  Antisense strand to SEQ ID NO: 1257126
cccaucacuggauauuuac

SEQ ID NO: 1257128 - RNA, 19 nt, Artificial Sequence
  Description of Artificial Sequence: Synthetic oligonucleotide
  Sense strand starting at position 3924 of SEQ ID NO: 1241238
gucuuuauggaguauaaua

SEQ ID NO: 1257129 - RNA, 19 nt, Artificial Sequence
  Description of Artificial Sequence: Synthetic oligonucleotide
  Antisense strand to SEQ ID NO: 1257128
uauuauacuccauaaagac

SEQ ID NO: 1257130 - RNA, 19 nt, Artificial Sequence
  Description of Artificial Sequence: Synthetic oligonucleotide
  Sense strand starting at position 3971 of SEQ ID NO: 1241238
ggguuccuuuccuuauaca

SEQ ID NO: 1257131 - RNA, 19 nt, Artificial Sequence
  Description of Artificial Sequence: Synthetic oligonucleotide
  Antisense strand to SEQ ID NO: 1257130
uguauaaggaaaggaaccc

SEQ ID NO: 1257132 - RNA, 19 nt, Artificial Sequence
  Description of Artificial Sequence: Synthetic oligonucleotide
  Sense strand starting at position 3972 of SEQ ID NO: 1241238
gguuccuuuccuuauacau

SEQ ID NO: 1257133 - RNA, 19 nt, Artificial Sequence
  Description of Artificial Sequence: Synthetic oligonucleotide
  Antisense strand to SEQ ID NO: 1257132
auguauaaggaaaggaacc

SEQ ID NO: 1257134 - RNA, 19 nt, Artificial Sequence
  Description of Artificial Sequence: Synthetic oligonucleotide
  Sense strand starting at position 129 of SEQ ID NO: 1241239
auuugaguuuaugagaaga

SEQ ID NO: 1257135 - RNA, 19 nt, Artificial Sequence
  Description of Artificial Sequence: Synthetic oligonucleotide
  Antisense strand to SEQ ID NO: 1257134
ucuucucauaaacucaaau

SEQ ID NO: 1257136 - RNA, 19 nt, Artificial Sequence
  Description of Artificial Sequence: Synthetic oligonucleotide
  Sense strand starting at position 233 of SEQ ID NO: 1241239
gauaguguccaccacggaa

SEQ ID NO: 1257137 - RNA, 19 nt, Artificial Sequence
  Description of Artificial Sequence: Synthetic oligonucleotide
  Antisense strand to SEQ ID NO: 1257136
uuccgugguggacacuauc

SEQ ID NO: 1257138 - RNA, 19 nt, Artificial Sequence
  Description of Artificial Sequence: Synthetic oligonucleotide
  Sense strand starting at position 245 of SEQ ID NO: 1241239
cacggaacucacgggagau

SEQ ID NO: 1257139 - RNA, 19 nt, Artificial Sequence
  Description of Artificial Sequence: Synthetic oligonucleotide
  Antisense strand to SEQ ID NO: 1257138
aucucccgugaguuccgug

SEQ ID NO: 1257140 - RNA, 19 nt, Artificial Sequence
  Description of Artificial Sequence: Synthetic oligonucleotide
  Sense strand starting at position 246 of SEQ ID NO: 1241239
acggaacucacgggagauu

SEQ ID NO: 1257141 - RNA, 19 nt, Artificial Sequence
  Description of Artificial Sequence: Synthetic oligonucleotide
  Antisense strand to SEQ ID NO: 1257140
aaucucccgugaguuccgu

SEQ ID NO: 1257142 - RNA, 19 nt, Artificial Sequence
  Description of Artificial Sequence: Synthetic oligonucleotide
  Sense strand starting at position 255 of SEQ ID NO: 1241239
acgggagauuuccaccauu

SEQ ID NO: 1257143 - RNA, 19 nt, Artificial Sequence
  Description of Artificial Sequence: Synthetic oligonucleotide
  Antisense strand to SEQ ID NO: 1257142
aaugguggaaaucucccgu

SEQ ID NO: 1257144 - RNA, 19 nt, Artificial Sequence
  Description of Artificial Sequence: Synthetic oligonucleotide
  Sense strand starting at position 294 of SEQ ID NO: 1241239
uagagugucuacuaugcau

SEQ ID NO: 1257145 - RNA, 19 nt, Artificial Sequence
  Description of Artificial Sequence: Synthetic oligonucleotide
  Antisense strand to SEQ ID NO: 1257144
augcauaguagacacucua

SEQ ID NO: 1257146 - RNA, 19 nt, Artificial Sequence
  Description of Artificial Sequence: Synthetic oligonucleotide
  Sense strand starting at position 296 of SEQ ID NO: 1241239
gagugucuacuaugcaugu

SEQ ID NO: 1257147 - RNA, 19 nt, Artificial Sequence
  Description of Artificial Sequence: Synthetic oligonucleotide
  Antisense strand to SEQ ID NO: 1257146
acaugcauaguagacacuc

SEQ ID NO: 1257148 - RNA, 19 nt, Artificial Sequence
  Description of Artificial Sequence: Synthetic oligonucleotide
  Sense strand starting at position 297 of SEQ ID NO: 1241239
agugucuacuaugcaugua

SEQ ID NO: 1257149 - RNA, 19 nt, Artificial Sequence
  Description of Artificial Sequence: Synthetic oligonucleotide
  Antisense strand to SEQ ID NO: 1257148
uacaugcauaguagacacu

SEQ ID NO: 1257150 - RNA, 19 nt, Artificial Sequence
  Description of Artificial Sequence: Synthetic oligonucleotide
  Sense strand starting at position 300 of SEQ ID NO: 1241239
gucuacuaugcauguacaa

SEQ ID NO: 1257151 - RNA, 19 nt, Artificial Sequence
  Description of Artificial Sequence: Synthetic oligonucleotide
  Antisense strand to SEQ ID NO: 1257150
uuguacaugcauaguagac

SEQ ID NO: 1257152 - RNA, 19 nt, Artificial Sequence
  Description of Artificial Sequence: Synthetic oligonucleotide
  Sense strand starting at position 322 of SEQ ID NO: 1241239
gcugcuacaugucggagau

SEQ ID NO: 1257153 - RNA, 19 nt, Artificial Sequence
  Description of Artificial Sequence: Synthetic oligonucleotide
  Antisense strand to SEQ ID NO: 1257152
aucuccgacauguagcagc

SEQ ID NO: 1257154 - RNA, 19 nt, Artificial Sequence
  Description of Artificial Sequence: Synthetic oligonucleotide
  Sense strand starting at position 417 of SEQ ID NO: 1241239
uuaacauuaugcuguaaag

SEQ ID NO: 1257155 - RNA, 19 nt, Artificial Sequence
  Description of Artificial Sequence: Synthetic oligonucleotide
  Antisense strand to SEQ ID NO: 1257154
cuuuacagcauaauguuaa

SEQ ID NO: 1257156 - RNA, 19 nt, Artificial Sequence
  Description of Artificial Sequence: Synthetic oligonucleotide
  Sense strand starting at position 496 of SEQ ID NO: 1241239
gaaccucccugaggaguua

SEQ ID NO: 1257157 - RNA, 19 nt, Artificial Sequence
  Description of Artificial Sequence: Synthetic oligonucleotide
  Antisense strand to SEQ ID NO: 1257156
uaacuccucagggagguuc

SEQ ID NO: 1257158 - RNA, 19 nt, Artificial Sequence
  Description of Artificial Sequence: Synthetic oligonucleotide
  Sense strand starting at position 508 of SEQ ID NO: 1241239
ggaguuagcauugaagcca

SEQ ID NO: 1257159 - RNA, 19 nt, Artificial Sequence
  Description of Artificial Sequence: Synthetic oligonucleotide
  Antisense strand to SEQ ID NO: 1257158
uggcuucaaugcuaacucc

SEQ ID NO: 1257160 - RNA, 19 nt, Artificial Sequence
  Description of Artificial Sequence: Synthetic oligonucleotide
  Sense strand starting at position 715 of SEQ ID NO: 1241239
ucuggcuugugcuggagau

SEQ ID NO: 1257161 - RNA, 19 nt, Artificial Sequence
  Description of Artificial Sequence: Synthetic oligonucleotide
  Antisense strand to SEQ ID NO: 1257160
aucuccagcacaagccaga

SEQ ID NO: 1257162 - RNA, 19 nt, Artificial Sequence
  Description of Artificial Sequence: Synthetic oligonucleotide
  Sense strand starting at position 732 of SEQ ID NO: 1241239
augggugccuuccagaaua

SEQ ID NO: 1257163 - RNA, 19 nt, Artificial Sequence
  Description of Artificial Sequence: Synthetic oligonucleotide
  Antisense strand to SEQ ID NO: 1257162
uauucuggaaggcacccau

SEQ ID NO: 1257164 - RNA, 19 nt, Artificial Sequence
  Description of Artificial Sequence: Synthetic oligonucleotide
  Sense strand starting at position 734 of SEQ ID NO: 1241239
gggugccuuccagaauauu

SEQ ID NO: 1257165 - RNA, 19 nt, Artificial Sequence
  Description of Artificial Sequence: Synthetic oligonucleotide
  Antisense strand to SEQ ID NO: 1257164
aauauucuggaaggcaccc

SEQ ID NO: 1257166 - RNA, 19 nt, Artificial Sequence
  Description of Artificial Sequence: Synthetic oligonucleotide
  Sense strand starting at position 774 of SEQ ID NO: 1241239
gugugucuaauacaauugu

SEQ ID NO: 1257167 - RNA, 19 nt, Artificial Sequence
  Description of Artificial Sequence: Synthetic oligonucleotide
  Antisense strand to SEQ ID NO: 1257166
acaauuguauuagacacac

SEQ ID NO: 1257168 - RNA, 19 nt, Artificial Sequence
  Description of Artificial Sequence: Synthetic oligonucleotide
  Sense strand starting at position 946 of SEQ ID NO: 1241239
aagguaaccucagagguga

SEQ ID NO: 1257169 - RNA, 19 nt, Artificial Sequence
  Description of Artificial Sequence: Synthetic oligonucleotide
  Antisense strand to SEQ ID NO: 1257168
ucaccucugagguuaccuu

SEQ ID NO: 1257170 - RNA, 19 nt, Artificial Sequence
  Description of Artificial Sequence: Synthetic oligonucleotide
  Sense strand starting at position 986 of SEQ ID NO: 1241239
cuggguggucuuuacacaa

SEQ ID NO: 1257171 - RNA, 19 nt, Artificial Sequence
  Description of Artificial Sequence: Synthetic oligonucleotide
  Antisense strand to SEQ ID NO: 1257170
uuguguaaagaccacccag

SEQ ID NO: 1257172 - RNA, 19 nt, Artificial Sequence
  Description of Artificial Sequence: Synthetic oligonucleotide
  Sense strand starting at position 1237 of SEQ ID NO: 1241239
ugcauuuaguugucaagug

SEQ ID NO: 1257173 - RNA, 19 nt, Artificial Sequence
  Description of Artificial Sequence: Synthetic oligonucleotide
  Antisense strand to SEQ ID NO: 1257172
cacuugacaacuaaaugca

SEQ ID NO: 1257174 - RNA, 19 nt, Artificial Sequence
  Description of Artificial Sequence: Synthetic oligonucleotide
  Sense strand starting at position 1238 of SEQ ID NO: 1241239
gcauuuaguugucaaguga

SEQ ID NO: 1257175 - RNA, 19 nt, Artificial Sequence
  Description of Artificial Sequence: Synthetic oligonucleotide
  Antisense strand to SEQ ID NO: 1257174
ucacuugacaacuaaaugc

SEQ ID NO: 1257176 - RNA, 19 nt, Artificial Sequence
  Description of Artificial Sequence: Synthetic oligonucleotide
  Sense strand starting at position 1535 of SEQ ID NO: 1241239
ggcuuaaaucuaggcuuac

SEQ ID NO: 1257177 - RNA, 19 nt, Artificial Sequence
  Description of Artificial Sequence: Synthetic oligonucleotide
  Antisense strand to SEQ ID NO: 1257176
guaagccuagauuuaagcc

SEQ ID NO: 1257178 - RNA, 19 nt, Artificial Sequence
  Description of Artificial Sequence: Synthetic oligonucleotide
  Sense strand starting at position 1599 of SEQ ID NO: 1241239
gucuccucgucugaacgau

SEQ ID NO: 1257179 - RNA, 19 nt, Artificial Sequence
  Description of Artificial Sequence: Synthetic oligonucleotide
  Antisense strand to SEQ ID NO: 1257178
aucguucagacgaggagac

SEQ ID NO: 1257180 - RNA, 19 nt, Artificial Sequence
  Description of Artificial Sequence: Synthetic oligonucleotide
  Sense strand starting at position 1605 of SEQ ID NO: 1241239
ucgucugaacgauggguua

SEQ ID NO: 1257181 - RNA, 19 nt, Artificial Sequence
  Description of Artificial Sequence: Synthetic oligonucleotide
  Antisense strand to SEQ ID NO: 1257180
uaacccaucguucagacga

SEQ ID NO: 1257182 - RNA, 19 nt, Artificial Sequence
  Description of Artificial Sequence: Synthetic oligonucleotide
  Sense strand starting at position 1607 of SEQ ID NO: 1241239
gucugaacgauggguuaac

SEQ ID NO: 1257183 - RNA, 19 nt, Artificial Sequence
  Description of Artificial Sequence: Synthetic oligonucleotide
  Antisense strand to SEQ ID NO: 1257182
guuaacccaucguucagac

SEQ ID NO: 1257184 - RNA, 19 nt, Artificial Sequence
  Description of Artificial Sequence: Synthetic oligonucleotide
  Sense strand starting at position 1709 of SEQ ID NO: 1241239
ggcugugaguaauuuguua

SEQ ID NO: 1257185 - RNA, 19 nt, Artificial Sequence
  Description of Artificial Sequence: Synthetic oligonucleotide
  Antisense strand to SEQ ID NO: 1257184
uaacaaauuacucacagcc

SEQ ID NO: 1257186 - RNA, 19 nt, Artificial Sequence
  Description of Artificial Sequence: Synthetic oligonucleotide
  Sense strand starting at position 1711 of SEQ ID NO: 1241239
cugugaguaauuuguuacu

SEQ ID NO: 1257187 - RNA, 19 nt, Artificial Sequence
  Description of Artificial Sequence: Synthetic oligonucleotide
  Antisense strand to SEQ ID NO: 1257186
aguaacaaauuacucacag

SEQ ID NO: 1257188 - RNA, 19 nt, Artificial Sequence
  Description of Artificial Sequence: Synthetic oligonucleotide
  Sense strand starting at position 1714 of SEQ ID NO: 1241239
ugaguaauuuguuacuaag

SEQ ID NO: 1257189 - RNA, 19 nt, Artificial Sequence
  Description of Artificial Sequence: Synthetic oligonucleotide
  Antisense strand to SEQ ID NO: 1257188
cuuaguaacaaauuacuca

SEQ ID NO: 1257190 - RNA, 19 nt, Artificial Sequence
  Description of Artificial Sequence: Synthetic oligonucleotide
  Sense strand starting at position 2594 of SEQ ID NO: 1241239
cgccgacuguucccaaacu

SEQ ID NO: 1257191 - RNA, 19 nt, Artificial Sequence
  Description of Artificial Sequence: Synthetic oligonucleotide
  Antisense strand to SEQ ID NO: 1257190
aguuugggaacagucggcg

SEQ ID NO: 1257192 - RNA, 19 nt, Artificial Sequence
  Description of Artificial Sequence: Synthetic oligonucleotide
  Sense strand starting at position 2595 of SEQ ID NO: 1241239
gccgacuguucccaaacuu

SEQ ID NO: 1257193 - RNA, 19 nt, Artificial Sequence
  Description of Artificial Sequence: Synthetic oligonucleotide
  Antisense strand to SEQ ID NO: 1257192
aaguuugggaacagucggc

SEQ ID NO: 1257194 - RNA, 19 nt, Artificial Sequence
  Description of Artificial Sequence: Synthetic oligonucleotide
  Sense strand starting at position 2793 of SEQ ID NO: 1241239
gcuguucucccagagacuc

SEQ ID NO: 1257195 - RNA, 19 nt, Artificial Sequence
  Description of Artificial Sequence: Synthetic oligonucleotide
  Antisense strand to SEQ ID NO: 1257194
gagucucugggagaacagc

SEQ ID NO: 1257196 - RNA, 19 nt, Artificial Sequence
  Description of Artificial Sequence: Synthetic oligonucleotide
  Sense strand starting at position 2868 of SEQ ID NO: 1241239
gcccgaaggaguuggaguu

SEQ ID NO: 1257197 - RNA, 19 nt, Artificial Sequence
  Description of Artificial Sequence: Synthetic oligonucleotide
  Antisense strand to SEQ ID NO: 1257196
aacuccaacuccuucgggc

SEQ ID NO: 1257198 - RNA, 19 nt, Artificial Sequence
  Description of Artificial Sequence: Synthetic oligonucleotide
  Sense strand starting at position 3019 of SEQ ID NO: 1241239
gcccaucccguaugaagau

SEQ ID NO: 1257199 - RNA, 19 nt, Artificial Sequence
  Description of Artificial Sequence: Synthetic oligonucleotide
  Antisense strand to SEQ ID NO: 1257198
aucuucauacgggaugggc

SEQ ID NO: 1257200 - RNA, 19 nt, Artificial Sequence
  Description of Artificial Sequence: Synthetic oligonucleotide
  Sense strand starting at position 3186 of SEQ ID NO: 1241239
gcugcuggguuucugagaa

SEQ ID NO: 1257201 - RNA, 19 nt, Artificial Sequence
  Description of Artificial Sequence: Synthetic oligonucleotide
  Antisense strand to SEQ ID NO: 1257200
uucucagaaacccagcagc

SEQ ID NO: 1257202 - RNA, 19 nt, Artificial Sequence
  Description of Artificial Sequence: Synthetic oligonucleotide
  Sense strand starting at position 3281 of SEQ ID NO: 1241239
cgccuucccagguauaguu

SEQ ID NO: 1257203 - RNA, 19 nt, Artificial Sequence
  Description of Artificial Sequence: Synthetic oligonucleotide
  Antisense strand to SEQ ID NO: 1257202
aacuauaccugggaaggcg

SEQ ID NO: 1257204 - RNA, 19 nt, Artificial Sequence
  Description of Artificial Sequence: Synthetic oligonucleotide
  Sense strand starting at position 3289 of SEQ ID NO: 1241239
cagguauaguuagggacau

SEQ ID NO: 1257205 - RNA, 19 nt, Artificial Sequence
  Description of Artificial Sequence: Synthetic oligonucleotide
  Antisense strand to SEQ ID NO: 1257204
augucccuaacuauaccug

SEQ ID NO: 1257206 - RNA, 19 nt, Artificial Sequence
  Description of Artificial Sequence: Synthetic oligonucleotide
  Sense strand starting at position 3716 of SEQ ID NO: 1241239
aagaaaugugacggcauca

SEQ ID NO: 1257207 - RNA, 19 nt, Artificial Sequence
  Description of Artificial Sequence: Synthetic oligonucleotide
  Antisense strand to SEQ ID NO: 1257206
ugaugccgucacauuucuu

SEQ ID NO: 1257208 - RNA, 19 nt, Artificial Sequence
  Description of Artificial Sequence: Synthetic oligonucleotide
  Sense strand starting at position 3739 of SEQ ID NO: 1241239
uaguauccaguuuguggaa

SEQ ID NO: 1257209 - RNA, 19 nt, Artificial Sequence
  Description of Artificial Sequence: Synthetic oligonucleotide
  Antisense strand to SEQ ID NO: 1257208
uuccacaaacuggauacua

SEQ ID NO: 1257210 - RNA, 19 nt, Artificial Sequence
  Description of Artificial Sequence: Synthetic oligonucleotide
  Sense strand starting at position 3757 of SEQ ID NO: 1241239
acggcucccugagauuaca

SEQ ID NO: 1257211 - RNA, 19 nt, Artificial Sequence
  Description of Artificial Sequence: Synthetic oligonucleotide
  Antisense strand to SEQ ID NO: 1257210
uguaaucucagggagccgu

SEQ ID NO: 1257212 - RNA, 19 nt, Artificial Sequence
  Description of Artificial Sequence: Synthetic oligonucleotide
  Sense strand starting at position 124 of SEQ ID NO: 1241240
cagugucuuccagccguua

SEQ ID NO: 1257213 - RNA, 19 nt, Artificial Sequence
  Description of Artificial Sequence: Synthetic oligonucleotide
  Antisense strand to SEQ ID NO: 1257212
uaacggcuggaagacacug

SEQ ID NO: 1257214 - RNA, 19 nt, Artificial Sequence
  Description of Artificial Sequence: Synthetic oligonucleotide
  Sense strand starting at position 125 of SEQ ID NO: 1241240
agugucuuccagccguuau

SEQ ID NO: 1257215 - RNA, 19 nt, Artificial Sequence
  Description of Artificial Sequence: Synthetic oligonucleotide
  Antisense strand to SEQ ID NO: 1257214
auaacggcuggaagacacu

SEQ ID NO: 1257216 - RNA, 19 nt, Artificial Sequence
  Description of Artificial Sequence: Synthetic oligonucleotide
  Sense strand starting at position 210 of SEQ ID NO: 1241240
gagagcucucuuuaugcac

SEQ ID NO: 1257217 - RNA, 19 nt, Artificial Sequence
  Description of Artificial Sequence: Synthetic oligonucleotide
  Antisense strand to SEQ ID NO: 1257216
gugcauaaagagagcucuc

SEQ ID NO: 1257218 - RNA, 19 nt, Artificial Sequence
  Description of Artificial Sequence: Synthetic oligonucleotide
  Sense strand starting at position 343 of SEQ ID NO: 1241240
cagaguuugccucaggaaa

SEQ ID NO: 1257219 - RNA, 19 nt, Artificial Sequence
  Description of Artificial Sequence: Synthetic oligonucleotide
  Antisense strand to SEQ ID NO: 1257218
uuuccugaggcaaacucug

SEQ ID NO: 1257220 - RNA, 19 nt, Artificial Sequence
  Description of Artificial Sequence: Synthetic oligonucleotide
  Sense strand starting at position 434 of SEQ ID NO: 1241240
uagaacuguguccaagcua

SEQ ID NO: 1257221 - RNA, 19 nt, Artificial Sequence
  Description of Artificial Sequence: Synthetic oligonucleotide
  Antisense strand to SEQ ID NO: 1257220
uagcuuggacacaguucua

SEQ ID NO: 1257222 - RNA, 19 nt, Artificial Sequence
  Description of Artificial Sequence: Synthetic oligonucleotide
  Sense strand starting at position 446 of SEQ ID NO: 1241240
caagcuauuuaggagagaa

SEQ ID NO: 1257223 - RNA, 19 nt, Artificial Sequence
  Description of Artificial Sequence: Synthetic oligonucleotide
  Antisense strand to SEQ ID NO: 1257222
uucucuccuaaauagcuug

SEQ ID NO: 1257224 - RNA, 19 nt, Artificial Sequence
  Description of Artificial Sequence: Synthetic oligonucleotide
  Sense strand starting at position 717 of SEQ ID NO: 1241240
gguggcauuugcucuugau

SEQ ID NO: 1257225 - RNA, 19 nt, Artificial Sequence
  Description of Artificial Sequence: Synthetic oligonucleotide
  Antisense strand to SEQ ID NO: 1257224
aucaagagcaaaugccacc

SEQ ID NO: 1257226 - RNA, 19 nt, Artificial Sequence
  Description of Artificial Sequence: Synthetic oligonucleotide
  Sense strand starting at position 729 of SEQ ID NO: 1241240
ucuugaugcucuccagaaa

SEQ ID NO: 1257227 - RNA, 19 nt, Artificial Sequence
  Description of Artificial Sequence: Synthetic oligonucleotide
  Antisense strand to SEQ ID NO: 1257226
uuucuggagagcaucaaga

SEQ ID NO: 1257228 - RNA, 19 nt, Artificial Sequence
  Description of Artificial Sequence: Synthetic oligonucleotide
  Sense strand starting at position 730 of SEQ ID NO: 1241240
cuugaugcucuccagaaag

SEQ ID NO: 1257229 - RNA, 19 nt, Artificial Sequence
  Description of Artificial Sequence: Synthetic oligonucleotide
  Antisense strand to SEQ ID NO: 1257228
cuuucuggagagcaucaag

SEQ ID NO: 1257230 - RNA, 19 nt, Artificial Sequence
  Description of Artificial Sequence: Synthetic oligonucleotide
  Sense strand starting at position 846 of SEQ ID NO: 1241240
cuuagcaggguuugaugaa

SEQ ID NO: 1257231 - RNA, 19 nt, Artificial Sequence
  Description of Artificial Sequence: Synthetic oligonucleotide
  Antisense strand to SEQ ID NO: 1257230
uucaucaaacccugcuaag

SEQ ID NO: 1257232 - RNA, 19 nt, Artificial Sequence
  Description of Artificial Sequence: Synthetic oligonucleotide
  Sense strand starting at position 853 of SEQ ID NO: 1241240
ggguuugaugaaugaguaa

SEQ ID NO: 1257233 - RNA, 19 nt, Artificial Sequence
  Description of Artificial Sequence: Synthetic oligonucleotide
  Antisense strand to SEQ ID NO: 1257232
uuacucauucaucaaaccc

SEQ ID NO: 1257234 - RNA, 19 nt, Artificial Sequence
  Description of Artificial Sequence: Synthetic oligonucleotide
  Sense strand starting at position 992 of SEQ ID NO: 1241240
cuggguaaacccgauuauc

SEQ ID NO: 1257235 - RNA, 19 nt, Artificial Sequence
  Description of Artificial Sequence: Synthetic oligonucleotide
  Antisense strand to SEQ ID NO: 1257234
gauaaucggguuuacccag

SEQ ID NO: 1257236 - RNA, 19 nt, Artificial Sequence
  Description of Artificial Sequence: Synthetic oligonucleotide
  Sense strand starting at position 1030 of SEQ ID NO: 1241240
cgagccuaaucauuagauu

SEQ ID NO: 1257237 - RNA, 19 nt, Artificial Sequence
  Description of Artificial Sequence: Synthetic oligonucleotide
  Antisense strand to SEQ ID NO: 1257236
aaucuaaugauuaggcucg

SEQ ID NO: 1257238 - RNA, 19 nt, Artificial Sequence
  Description of Artificial Sequence: Synthetic oligonucleotide
  Sense strand starting at position 1038 of SEQ ID NO: 1241240
aucauuagauuauccgaca

SEQ ID NO: 1257239 - RNA, 19 nt, Artificial Sequence
  Description of Artificial Sequence: Synthetic oligonucleotide
  Antisense strand to SEQ ID NO: 1257238
ugucggauaaucuaaugau

SEQ ID NO: 1257240 - RNA, 19 nt, Artificial Sequence
  Description of Artificial Sequence: Synthetic oligonucleotide
  Sense strand starting at position 1301 of SEQ ID NO: 1241240
gguccaacuuagucugaau

SEQ ID NO: 1257241 - RNA, 19 nt, Artificial Sequence
  Description of Artificial Sequence: Synthetic oligonucleotide
  Antisense strand to SEQ ID NO: 1257240
auucagacuaaguuggacc

SEQ ID NO: 1257242 - RNA, 19 nt, Artificial Sequence
  Description of Artificial Sequence: Synthetic oligonucleotide
  Sense strand starting at position 1724 of SEQ ID NO: 1241240
accugaaggacggguuuaa

SEQ ID NO: 1257243 - RNA, 19 nt, Artificial Sequence
  Description of Artificial Sequence: Synthetic oligonucleotide
  Antisense strand to SEQ ID NO: 1257242
uuaaacccguccuucaggu

SEQ ID NO: 1257244 - RNA, 19 nt, Artificial Sequence
  Description of Artificial Sequence: Synthetic oligonucleotide
  Sense strand starting at position 2565 of SEQ ID NO: 1241240
ggaggaaucuccuuguacc

SEQ ID NO: 1257245 - RNA, 19 nt, Artificial Sequence
  Description of Artificial Sequence: Synthetic oligonucleotide
  Antisense strand to SEQ ID NO: 1257244
gguacaaggagauuccucc

SEQ ID NO: 1257246 - RNA, 19 nt, Artificial Sequence
  Description of Artificial Sequence: Synthetic oligonucleotide
  Sense strand starting at position 2612 of SEQ ID NO: 1241240
ucccguuuaacggagacaa

SEQ ID NO: 1257247 - RNA, 19 nt, Artificial Sequence
  Description of Artificial Sequence: Synthetic oligonucleotide
  Antisense strand to SEQ ID NO: 1257246
uugucuccguuaaacggga

SEQ ID NO: 1257248 - RNA, 19 nt, Artificial Sequence
  Description of Artificial Sequence: Synthetic oligonucleotide
  Sense strand starting at position 2685 of SEQ ID NO: 1241240
ggagguugucacuaccaga

SEQ ID NO: 1257249 - RNA, 19 nt, Artificial Sequence
  Description of Artificial Sequence: Synthetic oligonucleotide
  Antisense strand to SEQ ID NO: 1257248
ucugguagugacaaccucc

SEQ ID NO: 1257250 - RNA, 19 nt, Artificial Sequence
  Description of Artificial Sequence: Synthetic oligonucleotide
  Sense strand starting at position 2706 of SEQ ID NO: 1241240
ugcggugugauagacuaga

SEQ ID NO: 1257251 - RNA, 19 nt, Artificial Sequence
  Description of Artificial Sequence: Synthetic oligonucleotide
  Antisense strand to SEQ ID NO: 1257250
ucuagucuaucacaccgca

SEQ ID NO: 1257252 - RNA, 19 nt, Artificial Sequence
  Description of Artificial Sequence: Synthetic oligonucleotide
  Sense strand starting at position 3050 of SEQ ID NO: 1241240
gcagaauucugacccuuua

SEQ ID NO: 1257253 - RNA, 19 nt, Artificial Sequence
  Description of Artificial Sequence: Synthetic oligonucleotide
  Antisense strand to SEQ ID NO: 1257252
uaaagggucagaauucugc

SEQ ID NO: 1257254 - RNA, 19 nt, Artificial Sequence
  Description of Artificial Sequence: Synthetic oligonucleotide
  Sense strand starting at position 3159 of SEQ ID NO: 1241240
ugcauuuaguuacucgagu

SEQ ID NO: 1257255 - RNA, 19 nt, Artificial Sequence
  Description of Artificial Sequence: Synthetic oligonucleotide
  Antisense strand to SEQ ID NO: 1257254
acucgaguaacuaaaugca

SEQ ID NO: 1257256 - RNA, 19 nt, Artificial Sequence
  Description of Artificial Sequence: Synthetic oligonucleotide
  Sense strand starting at position 3160 of SEQ ID NO: 1241240
gcauuuaguuacucgaguu

SEQ ID NO: 1257257 - RNA, 19 nt, Artificial Sequence
  Description of Artificial Sequence: Synthetic oligonucleotide
  Antisense strand to SEQ ID NO: 1257256
aacucgaguaacuaaaugc

SEQ ID NO: 1257258 - RNA, 19 nt, Artificial Sequence
  Description of Artificial Sequence: Synthetic oligonucleotide
  Sense strand starting at position 3196 of SEQ ID NO: 1241240
uggcauuugaugugucuca

SEQ ID NO: 1257259 - RNA, 19 nt, Artificial Sequence
  Description of Artificial Sequence: Synthetic oligonucleotide
  Antisense strand to SEQ ID NO: 1257258
ugagacacaucaaaugcca

SEQ ID NO: 1257260 - RNA, 19 nt, Artificial Sequence
  Description of Artificial Sequence: Synthetic oligonucleotide
  Sense strand starting at position 3197 of SEQ ID NO: 1241240
ggcauuugaugugucucaa

SEQ ID NO: 1257261 - RNA, 19 nt, Artificial Sequence
  Description of Artificial Sequence: Synthetic oligonucleotide
  Antisense strand to SEQ ID NO: 1257260
uugagacacaucaaaugcc

SEQ ID NO: 1257262 - RNA, 19 nt, Artificial Sequence
  Description of Artificial Sequence: Synthetic oligonucleotide
  Sense strand starting at position 3261 of SEQ ID NO: 1241240
ucuagaagacugugcaucu

SEQ ID NO: 1257263 - RNA, 19 nt, Artificial Sequence
  Description of Artificial Sequence: Synthetic oligonucleotide
  Antisense strand to SEQ ID NO: 1257262
agaugcacagucuucuaga

SEQ ID NO: 1257264 - RNA, 19 nt, Artificial Sequence
  Description of Artificial Sequence: Synthetic oligonucleotide
  Sense strand starting at position 3262 of SEQ ID NO: 1241240
cuagaagacugugcaucuu

SEQ ID NO: 1257265 - RNA, 19 nt, Artificial Sequence
  Description of Artificial Sequence: Synthetic oligonucleotide
  Antisense strand to SEQ ID NO: 1257264
aagaugcacagucuucuag

SEQ ID NO: 1257266 - RNA, 19 nt, Artificial Sequence
  Description of Artificial Sequence: Synthetic oligonucleotide
  Sense strand starting at position 3376 of SEQ ID NO: 1241240
cuaaguuggguucaaguga

SEQ ID NO: 1257267 - RNA, 19 nt, Artificial Sequence
  Description of Artificial Sequence: Synthetic oligonucleotide
  Antisense strand to SEQ ID NO: 1257266
ucacuugaacccaacuuag

SEQ ID NO: 1257268 - RNA, 19 nt, Artificial Sequence
  Description of Artificial Sequence: Synthetic oligonucleotide
  Sense strand starting at position 3447 of SEQ ID NO: 1241240
uuugcucagagagauguuu

SEQ ID NO: 1257269 - RNA, 19 nt, Artificial Sequence
  Description of Artificial Sequence: Synthetic oligonucleotide
  Antisense strand to SEQ ID NO: 1257268
aaacaucucucugagcaaa

SEQ ID NO: 1257270 - RNA, 19 nt, Artificial Sequence
  Description of Artificial Sequence: Synthetic oligonucleotide
  Sense strand starting at position 3449 of SEQ ID NO: 1241240
ugcucagagagauguuuag

SEQ ID NO: 1257271 - RNA, 19 nt, Artificial Sequence
  Description of Artificial Sequence: Synthetic oligonucleotide
  Antisense strand to SEQ ID NO: 1257270
cuaaacaucucucugagca

SEQ ID NO: 1257272 - RNA, 19 nt, Artificial Sequence
  Description of Artificial Sequence: Synthetic oligonucleotide
  Sense strand starting at position 3453 of SEQ ID NO: 1241240
cagagagauguuuagcgau

SEQ ID NO: 1257273 - RNA, 19 nt, Artificial Sequence
  Description of Artificial Sequence: Synthetic oligonucleotide
  Antisense strand to SEQ ID NO: 1257272
aucgcuaaacaucucucug

SEQ ID NO: 1257274 - RNA, 19 nt, Artificial Sequence
  Description of Artificial Sequence: Synthetic oligonucleotide
  Sense strand starting at position 3455 of SEQ ID NO: 1241240
gagagauguuuagcgauga

SEQ ID NO: 1257275 - RNA, 19 nt, Artificial Sequence
  Description of Artificial Sequence: Synthetic oligonucleotide
  Antisense strand to SEQ ID NO: 1257274
ucaucgcuaaacaucucuc

SEQ ID NO: 1257276 - RNA, 19 nt, Artificial Sequence
  Description of Artificial Sequence: Synthetic oligonucleotide
  Sense strand starting at position 3460 of SEQ ID NO: 1241240
auguuuagcgaugaauucu

SEQ ID NO: 1257277 - RNA, 19 nt, Artificial Sequence
  Description of Artificial Sequence: Synthetic oligonucleotide
  Antisense strand to SEQ ID NO: 1257276
agaauucaucgcuaaacau

SEQ ID NO: 1257278 - RNA, 19 nt, Artificial Sequence
  Description of Artificial Sequence: Synthetic oligonucleotide
  Sense strand starting at position 3535 of SEQ ID NO: 1241240
agaagauagcuuugaaugu

SEQ ID NO: 1257279 - RNA, 19 nt, Artificial Sequence
  Description of Artificial Sequence: Synthetic oligonucleotide
  Antisense strand to SEQ ID NO: 1257278
acauucaaagcuaucuucu

SEQ ID NO: 1257280 - RNA, 19 nt, Artificial Sequence
  Description of Artificial Sequence: Synthetic oligonucleotide
  Sense strand starting at position 3674 of SEQ ID NO: 1241240
guagacuuaauguaacgca

SEQ ID NO: 1257281 - RNA, 19 nt, Artificial Sequence
  Description of Artificial Sequence: Synthetic oligonucleotide
  Antisense strand to SEQ ID NO: 1257280
ugcguuacauuaagucuac

SEQ ID NO: 1257282 - RNA, 19 nt, Artificial Sequence
  Description of Artificial Sequence: Synthetic oligonucleotide
  Sense strand starting at position 3757 of SEQ ID NO: 1241240
uuuauaacuguguaaagcu

SEQ ID NO: 1257283 - RNA, 19 nt, Artificial Sequence
  Description of Artificial Sequence: Synthetic oligonucleotide
  Antisense strand to SEQ ID NO: 1257282
agcuuuacacaguuauaaa

SEQ ID NO: 1257284 - RNA, 19 nt, Artificial Sequence
  Description of Artificial Sequence: Synthetic oligonucleotide
  Sense strand starting at position 3841 of SEQ ID NO: 1241240
ucuguuaagacagggcuua

SEQ ID NO: 1257285 - RNA, 19 nt, Artificial Sequence
  Description of Artificial Sequence: Synthetic oligonucleotide
  Antisense strand to SEQ ID NO: 1257284
uaagcccugucuuaacaga

SEQ ID NO: 1257286 - RNA, 19 nt, Artificial Sequence
  Description of Artificial Sequence: Synthetic oligonucleotide
  Sense strand starting at position 3842 of SEQ ID NO: 1241240
cuguuaagacagggcuuau

SEQ ID NO: 1257287 - RNA, 19 nt, Artificial Sequence
  Description of Artificial Sequence: Synthetic oligonucleotide
  Antisense strand to SEQ ID NO: 1257286
auaagcccugucuuaacag

SEQ ID NO: 1257288 - RNA, 19 nt, Artificial Sequence
  Description of Artificial Sequence: Synthetic oligonucleotide
  Sense strand starting at position 3851 of SEQ ID NO: 1241240
cagggcuuauccuuguaga

SEQ ID NO: 1257289 - RNA, 19 nt, Artificial Sequence
  Description of Artificial Sequence: Synthetic oligonucleotide
  Antisense strand to SEQ ID NO: 1257288
ucuacaaggauaagcccug

SEQ ID NO: 1257290 - RNA, 19 nt, Artificial Sequence
  Description of Artificial Sequence: Synthetic oligonucleotide
  Sense strand starting at position 3888 of SEQ ID NO: 1241240
gcacacucugaggaguaau

SEQ ID NO: 1257291 - RNA, 19 nt, Artificial Sequence
  Description of Artificial Sequence: Synthetic oligonucleotide
  Antisense strand to SEQ ID NO: 1257290
auuacuccucagagugugc

SEQ ID NO: 1257292 - RNA, 19 nt, Artificial Sequence
  Description of Artificial Sequence: Synthetic oligonucleotide
  Sense strand starting at position 111 of SEQ ID NO: 1241241
gaucauaaagcguaaguac

SEQ ID NO: 1257293 - RNA, 19 nt, Artificial Sequence
  Description of Artificial Sequence: Synthetic oligonucleotide
  Antisense strand to SEQ ID NO: 1257292
guacuuacgcuuuaugauc

SEQ ID NO: 1257294 - RNA, 19 nt, Artificial Sequence
  Description of Artificial Sequence: Synthetic oligonucleotide
  Sense strand starting at position 130 of SEQ ID NO: 1241241
acugguaggagucaucuuu

SEQ ID NO: 1257295 - RNA, 19 nt, Artificial Sequence
  Description of Artificial Sequence: Synthetic oligonucleotide
  Antisense strand to SEQ ID NO: 1257294
aaagaugacuccuaccagu

SEQ ID NO: 1257296 - RNA, 19 nt, Artificial Sequence
  Description of Artificial Sequence: Synthetic oligonucleotide
  Sense strand starting at position 159 of SEQ ID NO: 1241241
gaccaacucugguuggcaa

SEQ ID NO: 1257297 - RNA, 19 nt, Artificial Sequence
  Description of Artificial Sequence: Synthetic oligonucleotide
  Antisense strand to SEQ ID NO: 1257296
uugccaaccagaguugguc

SEQ ID NO: 1257298 - RNA, 19 nt, Artificial Sequence
  Description of Artificial Sequence: Synthetic oligonucleotide
  Sense strand starting at position 267 of SEQ ID NO: 1241241
aauucuggucuauaagagu

SEQ ID NO: 1257299 - RNA, 19 nt, Artificial Sequence
  Description of Artificial Sequence: Synthetic oligonucleotide
  Antisense strand to SEQ ID NO: 1257298
acucuuauagaccagaauu

SEQ ID NO: 1257300 - RNA, 19 nt, Artificial Sequence
  Description of Artificial Sequence: Synthetic oligonucleotide
  Sense strand starting at position 274 of SEQ ID NO: 1241241
gucuauaagaguuggagug

SEQ ID NO: 1257301 - RNA, 19 nt, Artificial Sequence
  Description of Artificial Sequence: Synthetic oligonucleotide
  Antisense strand to SEQ ID NO: 1257300
cacuccaacucuuauagac

SEQ ID NO: 1257302 - RNA, 19 nt, Artificial Sequence
  Description of Artificial Sequence: Synthetic oligonucleotide
  Sense strand starting at position 275 of SEQ ID NO: 1241241
ucuauaagaguuggaguga

SEQ ID NO: 1257303 - RNA, 19 nt, Artificial Sequence
  Description of Artificial Sequence: Synthetic oligonucleotide
  Antisense strand to SEQ ID NO: 1257302
ucacuccaacucuuauaga

SEQ ID NO: 1257304 - RNA, 19 nt, Artificial Sequence
  Description of Artificial Sequence: Synthetic oligonucleotide
  Sense strand starting at position 290 of SEQ ID NO: 1241241
gugacauggucaguucaga

SEQ ID NO: 1257305 - RNA, 19 nt, Artificial Sequence
  Description of Artificial Sequence: Synthetic oligonucleotide
  Antisense strand to SEQ ID NO: 1257304
ucugaacugaccaugucac

SEQ ID NO: 1257306 - RNA, 19 nt, Artificial Sequence
  Description of Artificial Sequence: Synthetic oligonucleotide
  Sense strand starting at position 339 of SEQ ID NO: 1241241
acaguauguccuugaccaa

SEQ ID NO: 1257307 - RNA, 19 nt, Artificial Sequence
  Description of Artificial Sequence: Synthetic oligonucleotide
  Antisense strand to SEQ ID NO: 1257306
uuggucaaggacauacugu

SEQ ID NO: 1257308 - RNA, 19 nt, Artificial Sequence
  Description of Artificial Sequence: Synthetic oligonucleotide
  Sense strand starting at position 388 of SEQ ID NO: 1241241
gugucuguugaacaauaua

SEQ ID NO: 1257309 - RNA, 19 nt, Artificial Sequence
  Description of Artificial Sequence: Synthetic oligonucleotide
  Antisense strand to SEQ ID NO: 1257308
uauauuguucaacagacac

SEQ ID NO: 1257310 - RNA, 19 nt, Artificial Sequence
  Description of Artificial Sequence: Synthetic oligonucleotide
  Sense strand starting at position 408 of SEQ ID NO: 1241241
augguccauuuagaacuaa

SEQ ID NO: 1257311 - RNA, 19 nt, Artificial Sequence
  Description of Artificial Sequence: Synthetic oligonucleotide
  Antisense strand to SEQ ID NO: 1257310
uuaguucuaaauggaccau

SEQ ID NO: 1257312 - RNA, 19 nt, Artificial Sequence
  Description of Artificial Sequence: Synthetic oligonucleotide
  Sense strand starting at position 525 of SEQ ID NO: 1241241
agguguucucacuaauaag

SEQ ID NO: 1257313 - RNA, 19 nt, Artificial Sequence
  Description of Artificial Sequence: Synthetic oligonucleotide
  Antisense strand to SEQ ID NO: 1257312
cuuauuagugagaacaccu

SEQ ID NO: 1257314 - RNA, 19 nt, Artificial Sequence
  Description of Artificial Sequence: Synthetic oligonucleotide
  Sense strand starting at position 827 of SEQ ID NO: 1241241
gccaguggugaucaaagca

SEQ ID NO: 1257315 - RNA, 19 nt, Artificial Sequence
  Description of Artificial Sequence: Synthetic oligonucleotide
  Antisense strand to SEQ ID NO: 1257314
ugcuuugaucaccacuggc

SEQ ID NO: 1257316 - RNA, 19 nt, Artificial Sequence
  Description of Artificial Sequence: Synthetic oligonucleotide
  Sense strand starting at position 1141 of SEQ ID NO: 1241241
ugaagaauguacuuacauc

SEQ ID NO: 1257317 - RNA, 19 nt, Artificial Sequence
  Description of Artificial Sequence: Synthetic oligonucleotide
  Antisense strand to SEQ ID NO: 1257316
gauguaaguacauucuuca

SEQ ID NO: 1257318 - RNA, 19 nt, Artificial Sequence
  Description of Artificial Sequence: Synthetic oligonucleotide
  Sense strand starting at position 1149 of SEQ ID NO: 1241241
guacuuacaucucuugaug

SEQ ID NO: 1257319 - RNA, 19 nt, Artificial Sequence
  Description of Artificial Sequence: Synthetic oligonucleotide
  Antisense strand to SEQ ID NO: 1257318
caucaagagauguaaguac

SEQ ID NO: 1257320 - RNA, 19 nt, Artificial Sequence
  Description of Artificial Sequence: Synthetic oligonucleotide
  Sense strand starting at position 1287 of SEQ ID NO: 1241241
ugaugcuguacugaaguaa

SEQ ID NO: 1257321 - RNA, 19 nt, Artificial Sequence
  Description of Artificial Sequence: Synthetic oligonucleotide
  Antisense strand to SEQ ID NO: 1257320
uuacuucaguacagcauca

SEQ ID NO: 1257322 - RNA, 19 nt, Artificial Sequence
  Description of Artificial Sequence: Synthetic oligonucleotide
  Sense strand starting at position 1413 of SEQ ID NO: 1241241
ucccaauaggugugaagua

SEQ ID NO: 1257323 - RNA, 19 nt, Artificial Sequence
  Description of Artificial Sequence: Synthetic oligonucleotide
  Antisense strand to SEQ ID NO: 1257322
uacuucacaccuauuggga

SEQ ID NO: 1257324 - RNA, 19 nt, Artificial Sequence
  Description of Artificial Sequence: Synthetic oligonucleotide
  Sense strand starting at position 1438 of SEQ ID NO: 1241241
ggaauuauuuagcauaaug

SEQ ID NO: 1257325 - RNA, 19 nt, Artificial Sequence
  Description of Artificial Sequence: Synthetic oligonucleotide
  Antisense strand to SEQ ID NO: 1257324
cauuaugcuaaauaauucc

SEQ ID NO: 1257326 - RNA, 19 nt, Artificial Sequence
  Description of Artificial Sequence: Synthetic oligonucleotide
  Sense strand starting at position 1573 of SEQ ID NO: 1241241
agcacuuggauguaguaau

SEQ ID NO: 1257327 - RNA, 19 nt, Artificial Sequence
  Description of Artificial Sequence: Synthetic oligonucleotide
  Antisense strand to SEQ ID NO: 1257326
auuacuacauccaagugcu

SEQ ID NO: 1257328 - RNA, 19 nt, Artificial Sequence
  Description of Artificial Sequence: Synthetic oligonucleotide
  Sense strand starting at position 1645 of SEQ ID NO: 1241241
ugcagacauaaaggugaau

SEQ ID NO: 1257329 - RNA, 19 nt, Artificial Sequence
  Description of Artificial Sequence: Synthetic oligonucleotide
  Antisense strand to SEQ ID NO: 1257328
auucaccuuuaugucugca

SEQ ID NO: 1257330 - RNA, 19 nt, Artificial Sequence
  Description of Artificial Sequence: Synthetic oligonucleotide
  Sense strand starting at position 1749 of SEQ ID NO: 1241241
ccaccaaugccaggauaga

SEQ ID NO: 1257331 - RNA, 19 nt, Artificial Sequence
  Description of Artificial Sequence: Synthetic oligonucleotide
  Antisense strand to SEQ ID NO: 1257330
ucuauccuggcauuggugg

SEQ ID NO: 1257332 - RNA, 19 nt, Artificial Sequence
  Description of Artificial Sequence: Synthetic oligonucleotide
  Sense strand starting at position 2206 of SEQ ID NO: 1241241
gcaauaacugcugagcaaa

SEQ ID NO: 1257333 - RNA, 19 nt, Artificial Sequence
  Description of Artificial Sequence: Synthetic oligonucleotide
  Antisense strand to SEQ ID NO: 1257332
uuugcucagcaguuauugc

SEQ ID NO: 1257334 - RNA, 19 nt, Artificial Sequence
  Description of Artificial Sequence: Synthetic oligonucleotide
  Sense strand starting at position 2330 of SEQ ID NO: 1241241
uuguuacucuucuuggaag

SEQ ID NO: 1257335 - RNA, 19 nt, Artificial Sequence
  Description of Artificial Sequence: Synthetic oligonucleotide
  Antisense strand to SEQ ID NO: 1257334
cuuccaagaagaguaacaa

SEQ ID NO: 1257336 - RNA, 19 nt, Artificial Sequence
  Description of Artificial Sequence: Synthetic oligonucleotide
  Sense strand starting at position 2332 of SEQ ID NO: 1241241
guuacucuucuuggaagac

SEQ ID NO: 1257337 - RNA, 19 nt, Artificial Sequence
  Description of Artificial Sequence: Synthetic oligonucleotide
  Antisense strand to SEQ ID NO: 1257336
gucuuccaagaagaguaac

SEQ ID NO: 1257338 - RNA, 19 nt, Artificial Sequence
  Description of Artificial Sequence: Synthetic oligonucleotide
  Sense strand starting at position 2375 of SEQ ID NO: 1241241
ggagaucucuuccuuaucu

SEQ ID NO: 1257339 - RNA, 19 nt, Artificial Sequence
  Description of Artificial Sequence: Synthetic oligonucleotide
  Antisense strand to SEQ ID NO: 1257338
agauaaggaagagaucucc

SEQ ID NO: 1257340 - RNA, 19 nt, Artificial Sequence
  Description of Artificial Sequence: Synthetic oligonucleotide
  Sense strand starting at position 2394 of SEQ ID NO: 1241241
uuuaaagucugauuccaga

SEQ ID NO: 1257341 - RNA, 19 nt, Artificial Sequence
  Description of Artificial Sequence: Synthetic oligonucleotide
  Antisense strand to SEQ ID NO: 1257340
ucuggaaucagacuuuaaa

SEQ ID NO: 1257342 - RNA, 19 nt, Artificial Sequence
  Description of Artificial Sequence: Synthetic oligonucleotide
  Sense strand starting at position 2488 of SEQ ID NO: 1241241
auucuaagcucuuuaugag

SEQ ID NO: 1257343 - RNA, 19 nt, Artificial Sequence
  Description of Artificial Sequence: Synthetic oligonucleotide
  Antisense strand to SEQ ID NO: 1257342
cucauaaagagcuuagaau

SEQ ID NO: 1257344 - RNA, 19 nt, Artificial Sequence
  Description of Artificial Sequence: Synthetic oligonucleotide
  Sense strand starting at position 2489 of SEQ ID NO: 1241241
uucuaagcucuuuaugagu

SEQ ID NO: 1257345 - RNA, 19 nt, Artificial Sequence
  Description of Artificial Sequence: Synthetic oligonucleotide
  Antisense strand to SEQ ID NO: 1257344
acucauaaagagcuuagaa

SEQ ID NO: 1257346 - RNA, 19 nt, Artificial Sequence
  Description of Artificial Sequence: Synthetic oligonucleotide
  Sense strand starting at position 2605 of SEQ ID NO: 1241241
gaaggcacuccauaaaugu

SEQ ID NO: 1257347 - RNA, 19 nt, Artificial Sequence
  Description of Artificial Sequence: Synthetic oligonucleotide
  Antisense strand to SEQ ID NO: 1257346
acauuuauggagugccuuc

SEQ ID NO: 1257348 - RNA, 19 nt, Artificial Sequence
  Description of Artificial Sequence: Synthetic oligonucleotide
  Sense strand starting at position 2862 of SEQ ID NO: 1241241
gcuauaggaguacaugauu

SEQ ID NO: 1257349 - RNA, 19 nt, Artificial Sequence
  Description of Artificial Sequence: Synthetic oligonucleotide
  Antisense strand to SEQ ID NO: 1257348
aaucauguacuccuauagc

SEQ ID NO: 1257350 - RNA, 19 nt, Artificial Sequence
  Description of Artificial Sequence: Synthetic oligonucleotide
  Sense strand starting at position 3058 of SEQ ID NO: 1241241
auauauugccuuggaaaga

SEQ ID NO: 1257351 - RNA, 19 nt, Artificial Sequence
  Description of Artificial Sequence: Synthetic oligonucleotide
  Antisense strand to SEQ ID NO: 1257350
ucuuuccaaggcaauauau

SEQ ID NO: 1257352 - RNA, 19 nt, Artificial Sequence
  Description of Artificial Sequence: Synthetic oligonucleotide
  Sense strand starting at position 3082 of SEQ ID NO: 1241241
aguugauacugucuauuga

SEQ ID NO: 1257353 - RNA, 19 nt, Artificial Sequence
  Description of Artificial Sequence: Synthetic oligonucleotide
  Antisense strand to SEQ ID NO: 1257352
ucaauagacaguaucaacu

SEQ ID NO: 1257354 - RNA, 19 nt, Artificial Sequence
  Description of Artificial Sequence: Synthetic oligonucleotide
  Sense strand starting at position 3083 of SEQ ID NO: 1241241
guugauacugucuauugaa

SEQ ID NO: 1257355 - RNA, 19 nt, Artificial Sequence
  Description of Artificial Sequence: Synthetic oligonucleotide
  Antisense strand to SEQ ID NO: 1257354
uucaauagacaguaucaac

SEQ ID NO: 1257356 - RNA, 19 nt, Artificial Sequence
  Description of Artificial Sequence: Synthetic oligonucleotide
  Sense strand starting at position 3239 of SEQ ID NO: 1241241
cucuucugagaguggaaua

SEQ ID NO: 1257357 - RNA, 19 nt, Artificial Sequence
  Description of Artificial Sequence: Synthetic oligonucleotide
  Antisense strand to SEQ ID NO: 1257356
uauuccacucucagaagag

SEQ ID NO: 1257358 - RNA, 19 nt, Artificial Sequence
  Description of Artificial Sequence: Synthetic oligonucleotide
  Sense strand starting at position 3240 of SEQ ID NO: 1241241
ucuucugagaguggaauaa

SEQ ID NO: 1257359 - RNA, 19 nt, Artificial Sequence
  Description of Artificial Sequence: Synthetic oligonucleotide
  Antisense strand to SEQ ID NO: 1257358
uuauuccacucucagaaga

SEQ ID NO: 1257360 - RNA, 19 nt, Artificial Sequence
  Description of Artificial Sequence: Synthetic oligonucleotide
  Sense strand starting at position 3439 of SEQ ID NO: 1241241
aacauaucuuggucaggga

SEQ ID NO: 1257361 - RNA, 19 nt, Artificial Sequence
  Description of Artificial Sequence: Synthetic oligonucleotide
  Antisense strand to SEQ ID NO: 1257360
ucccugaccaagauauguu

SEQ ID NO: 1257362 - RNA, 19 nt, Artificial Sequence
  Description of Artificial Sequence: Synthetic oligonucleotide
  Sense strand starting at position 3463 of SEQ ID NO: 1241241
guagaacaaggcugugaau

SEQ ID NO: 1257363 - RNA, 19 nt, Artificial Sequence
  Description of Artificial Sequence: Synthetic oligonucleotide
  Antisense strand to SEQ ID NO: 1257362
auucacagccuuguucuac

SEQ ID NO: 1257364 - RNA, 19 nt, Artificial Sequence
  Description of Artificial Sequence: Synthetic oligonucleotide
  Sense strand starting at position 3575 of SEQ ID NO: 1241241
acagaugccuuccuugaac

SEQ ID NO: 1257365 - RNA, 19 nt, Artificial Sequence
  Description of Artificial Sequence: Synthetic oligonucleotide
  Antisense strand to SEQ ID NO: 1257364
guucaaggaaggcaucugu

SEQ ID NO: 1257366 - RNA, 19 nt, Artificial Sequence
  Description of Artificial Sequence: Synthetic oligonucleotide
  Sense strand starting at position 3823 of SEQ ID NO: 1241241
agguucugugacgggaaga

SEQ ID NO: 1257367 - RNA, 19 nt, Artificial Sequence
  Description of Artificial Sequence: Synthetic oligonucleotide
  Antisense strand to SEQ ID NO: 1257366
ucuucccgucacagaaccu

SEQ ID NO: 1257368 - RNA, 19 nt, Artificial Sequence
  Description of Artificial Sequence: Synthetic oligonucleotide
  Sense strand starting at position 3825 of SEQ ID NO: 1241241
guucugugacgggaagaga

SEQ ID NO: 1257369 - RNA, 19 nt, Artificial Sequence
  Description of Artificial Sequence: Synthetic oligonucleotide
  Antisense strand to SEQ ID NO: 1257368
ucucuucccgucacagaac

SEQ ID NO: 1257370 - RNA, 19 nt, Artificial Sequence
  Description of Artificial Sequence: Synthetic oligonucleotide
  Sense strand starting at position 3863 of SEQ ID NO: 1241241
gugucuaucacagagucca

SEQ ID NO: 1257371 - RNA, 19 nt, Artificial Sequence
  Description of Artificial Sequence: Synthetic oligonucleotide
  Antisense strand to SEQ ID NO: 1257370
uggacucugugauagacac

SEQ ID NO: 1257372 - RNA, 19 nt, Artificial Sequence
  Description of Artificial Sequence: Synthetic oligonucleotide
  Sense strand starting at position 184 of SEQ ID NO: 1241242
agccauaaccagugagaac

SEQ ID NO: 1257373 - RNA, 19 nt, Artificial Sequence
  Description of Artificial Sequence: Synthetic oligonucleotide
  Antisense strand to SEQ ID NO: 1257372
guucucacugguuauggcu

SEQ ID NO: 1257374 - RNA, 19 nt, Artificial Sequence
  Description of Artificial Sequence: Synthetic oligonucleotide
  Sense strand starting at position 204 of SEQ ID NO: 1241242
ggcucaaaugaauguuaca

SEQ ID NO: 1257375 - RNA, 19 nt, Artificial Sequence
  Description of Artificial Sequence: Synthetic oligonucleotide
  Antisense strand to SEQ ID NO: 1257374
uguaacauucauuugagcc

SEQ ID NO: 1257376 - RNA, 19 nt, Artificial Sequence
  Description of Artificial Sequence: Synthetic oligonucleotide
  Sense strand starting at position 209 of SEQ ID NO: 1241242
aaaugaauguuacauagga

SEQ ID NO: 1257377 - RNA, 19 nt, Artificial Sequence
  Description of Artificial Sequence: Synthetic oligonucleotide
  Antisense strand to SEQ ID NO: 1257376
uccuauguaacauucauuu

SEQ ID NO: 1257378 - RNA, 19 nt, Artificial Sequence
  Description of Artificial Sequence: Synthetic oligonucleotide
  Sense strand starting at position 222 of SEQ ID NO: 1241242
auaggaaucuggucuguga

SEQ ID NO: 1257379 - RNA, 19 nt, Artificial Sequence
  Description of Artificial Sequence: Synthetic oligonucleotide
  Antisense strand to SEQ ID NO: 1257378
ucacagaccagauuccuau

SEQ ID NO: 1257380 - RNA, 19 nt, Artificial Sequence
  Description of Artificial Sequence: Synthetic oligonucleotide
  Sense strand starting at position 226 of SEQ ID NO: 1241242
gaaucuggucugugaccga

SEQ ID NO: 1257381 - RNA, 19 nt, Artificial Sequence
  Description of Artificial Sequence: Synthetic oligonucleotide
  Antisense strand to SEQ ID NO: 1257380
ucggucacagaccagauuc

SEQ ID NO: 1257382 - RNA, 19 nt, Artificial Sequence
  Description of Artificial Sequence: Synthetic oligonucleotide
  Sense strand starting at position 357 of SEQ ID NO: 1241242
ggagacauaaauuguaugu

SEQ ID NO: 1257383 - RNA, 19 nt, Artificial Sequence
  Description of Artificial Sequence: Synthetic oligonucleotide
  Antisense strand to SEQ ID NO: 1257382
acauacaauuuaugucucc

SEQ ID NO: 1257384 - RNA, 19 nt, Artificial Sequence
  Description of Artificial Sequence: Synthetic oligonucleotide
  Sense strand starting at position 572 of SEQ ID NO: 1241242
guaucacuuggucagguga

SEQ ID NO: 1257385 - RNA, 19 nt, Artificial Sequence
  Description of Artificial Sequence: Synthetic oligonucleotide
  Antisense strand to SEQ ID NO: 1257384
ucaccugaccaagugauac

SEQ ID NO: 1257386 - RNA, 19 nt, Artificial Sequence
  Description of Artificial Sequence: Synthetic oligonucleotide
  Sense strand starting at position 765 of SEQ ID NO: 1241242
gauaaaugcuuaccgagag

SEQ ID NO: 1257387 - RNA, 19 nt, Artificial Sequence
  Description of Artificial Sequence: Synthetic oligonucleotide
  Antisense strand to SEQ ID NO: 1257386
cucucgguaagcauuuauc

SEQ ID NO: 1257388 - RNA, 19 nt, Artificial Sequence
  Description of Artificial Sequence: Synthetic oligonucleotide
  Sense strand starting at position 2447 of SEQ ID NO: 1241242
uugggcucuccggagaacu

SEQ ID NO: 1257389 - RNA, 19 nt, Artificial Sequence
  Description of Artificial Sequence: Synthetic oligonucleotide
  Antisense strand to SEQ ID NO: 1257388
aguucuccggagagcccaa

SEQ ID NO: 1257390 - RNA, 19 nt, Artificial Sequence
  Description of Artificial Sequence: Synthetic oligonucleotide
  Sense strand starting at position 2449 of SEQ ID NO: 1241242
gggcucuccggagaacuuu

SEQ ID NO: 1257391 - RNA, 19 nt, Artificial Sequence
  Description of Artificial Sequence: Synthetic oligonucleotide
  Antisense strand to SEQ ID NO: 1257390
aaaguucuccggagagccc

SEQ ID NO: 1257392 - RNA, 19 nt, Artificial Sequence
  Description of Artificial Sequence: Synthetic oligonucleotide
  Sense strand starting at position 2733 of SEQ ID NO: 1241242
ggaggaugucguuguauag

SEQ ID NO: 1257393 - RNA, 19 nt, Artificial Sequence
  Description of Artificial Sequence: Synthetic oligonucleotide
  Antisense strand to SEQ ID NO: 1257392
cuauacaacgacauccucc

SEQ ID NO: 1257394 - RNA, 19 nt, Artificial Sequence
  Description of Artificial Sequence: Synthetic oligonucleotide
  Sense strand starting at position 2736 of SEQ ID NO: 1241242
ggaugucguuguauagcga

SEQ ID NO: 1257395 - RNA, 19 nt, Artificial Sequence
  Description of Artificial Sequence: Synthetic oligonucleotide
  Antisense strand to SEQ ID NO: 1257394
ucgcuauacaacgacaucc

SEQ ID NO: 1257396 - RNA, 19 nt, Artificial Sequence
  Description of Artificial Sequence: Synthetic oligonucleotide
  Sense strand starting at position 2742 of SEQ ID NO: 1241242
cguuguauagcgagagguu

SEQ ID NO: 1257397 - RNA, 19 nt, Artificial Sequence
  Description of Artificial Sequence: Synthetic oligonucleotide
  Antisense strand to SEQ ID NO: 1257396
aaccucucgcuauacaacg

SEQ ID NO: 1257398 - RNA, 19 nt, Artificial Sequence
  Description of Artificial Sequence: Synthetic oligonucleotide
  Sense strand starting at position 2743 of SEQ ID NO: 1241242
guuguauagcgagagguug

SEQ ID NO: 1257399 - RNA, 19 nt, Artificial Sequence
  Description of Artificial Sequence: Synthetic oligonucleotide
  Antisense strand to SEQ ID NO: 1257398
caaccucucgcuauacaac

SEQ ID NO: 1257400 - RNA, 19 nt, Artificial Sequence
  Description of Artificial Sequence: Synthetic oligonucleotide
  Sense strand starting at position 2840 of SEQ ID NO: 1241242
uuagucugcguuuacaaua

SEQ ID NO: 1257401 - RNA, 19 nt, Artificial Sequence
  Description of Artificial Sequence: Synthetic oligonucleotide
  Antisense strand to SEQ ID NO: 1257400
uauuguaaacgcagacuaa

SEQ ID NO: 1257402 - RNA, 19 nt, Artificial Sequence
  Description of Artificial Sequence: Synthetic oligonucleotide
  Sense strand starting at position 2874 of SEQ ID NO: 1241242
aaaucagacugucuggauu

SEQ ID NO: 1257403 - RNA, 19 nt, Artificial Sequence
  Description of Artificial Sequence: Synthetic oligonucleotide
  Antisense strand to SEQ ID NO: 1257402
aauccagacagucugauuu

SEQ ID NO: 1257404 - RNA, 19 nt, Artificial Sequence
  Description of Artificial Sequence: Synthetic oligonucleotide
  Sense strand starting at position 2987 of SEQ ID NO: 1241242
gaaccugcuguugaagaau

SEQ ID NO: 1257405 - RNA, 19 nt, Artificial Sequence
  Description of Artificial Sequence: Synthetic oligonucleotide
  Antisense strand to SEQ ID NO: 1257404
auucuucaacagcagguuc

SEQ ID NO: 1257406 - RNA, 19 nt, Artificial Sequence
  Description of Artificial Sequence: Synthetic oligonucleotide
  Sense strand starting at position 2990 of SEQ ID NO: 1241242
ccugcuguugaagaauuau

SEQ ID NO: 1257407 - RNA, 19 nt, Artificial Sequence
  Description of Artificial Sequence: Synthetic oligonucleotide
  Antisense strand to SEQ ID NO: 1257406
auaauucuucaacagcagg

SEQ ID NO: 1257408 - RNA, 19 nt, Artificial Sequence
  Description of Artificial Sequence: Synthetic oligonucleotide
  Sense strand starting at position 3121 of SEQ ID NO: 1241242
gucuucccucuugaaguau

SEQ ID NO: 1257409 - RNA, 19 nt, Artificial Sequence
  Description of Artificial Sequence: Synthetic oligonucleotide
  Antisense strand to SEQ ID NO: 1257408
auacuucaagagggaagac

SEQ ID NO: 1257410 - RNA, 19 nt, Artificial Sequence
  Description of Artificial Sequence: Synthetic oligonucleotide
  Sense strand starting at position 3132 of SEQ ID NO: 1241242
ugaaguaucauguauuggu

SEQ ID NO: 1257411 - RNA, 19 nt, Artificial Sequence
  Description of Artificial Sequence: Synthetic oligonucleotide
  Antisense strand to SEQ ID NO: 1257410
accaauacaugauacuuca

SEQ ID NO: 1257412 - RNA, 19 nt, Artificial Sequence
  Description of Artificial Sequence: Synthetic oligonucleotide
  Sense strand starting at position 3139 of SEQ ID NO: 1241242
ucauguauuggucaucucu

SEQ ID NO: 1257413 - RNA, 19 nt, Artificial Sequence
  Description of Artificial Sequence: Synthetic oligonucleotide
  Antisense strand to SEQ ID NO: 1257412
agagaugaccaauacauga

SEQ ID NO: 1257414 - RNA, 19 nt, Artificial Sequence
  Description of Artificial Sequence: Synthetic oligonucleotide
  Sense strand starting at position 3148 of SEQ ID NO: 1241242
ggucaucucugcuuggaac

SEQ ID NO: 1257415 - RNA, 19 nt, Artificial Sequence
  Description of Artificial Sequence: Synthetic oligonucleotide
  Antisense strand to SEQ ID NO: 1257414
guuccaagcagagaugacc

SEQ ID NO: 1257416 - RNA, 19 nt, Artificial Sequence
  Description of Artificial Sequence: Synthetic oligonucleotide
  Sense strand starting at position 3149 of SEQ ID NO: 1241242
gucaucucugcuuggaaca

SEQ ID NO: 1257417 - RNA, 19 nt, Artificial Sequence
  Description of Artificial Sequence: Synthetic oligonucleotide
  Antisense strand to SEQ ID NO: 1257416
uguuccaagcagagaugac

SEQ ID NO: 1257418 - RNA, 19 nt, Artificial Sequence
  Description of Artificial Sequence: Synthetic oligonucleotide
  Sense strand starting at position 3231 of SEQ ID NO: 1241242
gcuggcuuaucuguggaaa

SEQ ID NO: 1257419 - RNA, 19 nt, Artificial Sequence
  Description of Artificial Sequence: Synthetic oligonucleotide
  Antisense strand to SEQ ID NO: 1257418
uuuccacagauaagccagc

SEQ ID NO: 1257420 - RNA, 19 nt, Artificial Sequence
  Description of Artificial Sequence: Synthetic oligonucleotide
  Sense strand starting at position 3332 of SEQ ID NO: 1241242
caaaguguugugugaaaga

SEQ ID NO: 1257421 - RNA, 19 nt, Artificial Sequence
  Description of Artificial Sequence: Synthetic oligonucleotide
  Antisense strand to SEQ ID NO: 1257420
ucuuucacacaacacuuug

SEQ ID NO: 1257422 - RNA, 19 nt, Artificial Sequence
  Description of Artificial Sequence: Synthetic oligonucleotide
  Sense strand starting at position 3342 of SEQ ID NO: 1241242
ugugaaagagugcauccua

SEQ ID NO: 1257423 - RNA, 19 nt, Artificial Sequence
  Description of Artificial Sequence: Synthetic oligonucleotide
  Antisense strand to SEQ ID NO: 1257422
uaggaugcacucuuucaca

SEQ ID NO: 1257424 - RNA, 19 nt, Artificial Sequence
  Description of Artificial Sequence: Synthetic oligonucleotide
  Sense strand starting at position 3461 of SEQ ID NO: 1241242
accuuugagcuccaguuaa

SEQ ID NO: 1257425 - RNA, 19 nt, Artificial Sequence
  Description of Artificial Sequence: Synthetic oligonucleotide
  Antisense strand to SEQ ID NO: 1257424
uuaacuggagcucaaaggu

SEQ ID NO: 1257426 - RNA, 19 nt, Artificial Sequence
  Description of Artificial Sequence: Synthetic oligonucleotide
  Sense strand starting at position 3504 of SEQ ID NO: 1241242
ccaugcuaccuguaugguu

SEQ ID NO: 1257427 - RNA, 19 nt, Artificial Sequence
  Description of Artificial Sequence: Synthetic oligonucleotide
  Antisense strand to SEQ ID NO: 1257426
aaccauacagguagcaugg

SEQ ID NO: 1257428 - RNA, 19 nt, Artificial Sequence
  Description of Artificial Sequence: Synthetic oligonucleotide
  Sense strand starting at position 3512 of SEQ ID NO: 1241242
ccuguaugguuauuuaucu

SEQ ID NO: 1257429 - RNA, 19 nt, Artificial Sequence
  Description of Artificial Sequence: Synthetic oligonucleotide
  Antisense strand to SEQ ID NO: 1257428
agauaaauaaccauacagg

SEQ ID NO: 1257430 - RNA, 19 nt, Artificial Sequence
  Description of Artificial Sequence: Synthetic oligonucleotide
  Sense strand starting at position 3518 of SEQ ID NO: 1241242
ugguuauuuaucugggugu

SEQ ID NO: 1257431 - RNA, 19 nt, Artificial Sequence
  Description of Artificial Sequence: Synthetic oligonucleotide
  Antisense strand to SEQ ID NO: 1257430
acacccagauaaauaacca

SEQ ID NO: 1257432 - RNA, 19 nt, Artificial Sequence
  Description of Artificial Sequence: Synthetic oligonucleotide
  Sense strand starting at position 3521 of SEQ ID NO: 1241242
uuauuuaucugggugugca

SEQ ID NO: 1257433 - RNA, 19 nt, Artificial Sequence
  Description of Artificial Sequence: Synthetic oligonucleotide
  Antisense strand to SEQ ID NO: 1257432
ugcacacccagauaaauaa

SEQ ID NO: 1257434 - RNA, 19 nt, Artificial Sequence
  Description of Artificial Sequence: Synthetic oligonucleotide
  Sense strand starting at position 3522 of SEQ ID NO: 1241242
uauuuaucugggugugcac

SEQ ID NO: 1257435 - RNA, 19 nt, Artificial Sequence
  Description of Artificial Sequence: Synthetic oligonucleotide
  Antisense strand to SEQ ID NO: 1257434
gugcacacccagauaaaua

SEQ ID NO: 1257436 - RNA, 19 nt, Artificial Sequence
  Description of Artificial Sequence: Synthetic oligonucleotide
  Sense strand starting at position 3675 of SEQ ID NO: 1241242
accugacaauugcuagaga

SEQ ID NO: 1257437 - RNA, 19 nt, Artificial Sequence
  Description of Artificial Sequence: Synthetic oligonucleotide
  Antisense strand to SEQ ID NO: 1257436
ucucuagcaauugucaggu

SEQ ID NO: 1257438 - RNA, 19 nt, Artificial Sequence
  Description of Artificial Sequence: Synthetic oligonucleotide
  Sense strand starting at position 3694 of SEQ ID NO: 1241242
gagacucgagaauguagau

SEQ ID NO: 1257439 - RNA, 19 nt, Artificial Sequence
  Description of Artificial Sequence: Synthetic oligonucleotide
  Antisense strand to SEQ ID NO: 1257438
aucuacauucucgagucuc

SEQ ID NO: 1257440 - RNA, 19 nt, Artificial Sequence
  Description of Artificial Sequence: Synthetic oligonucleotide
  Sense strand starting at position 3703 of SEQ ID NO: 1241242
gaauguagauugguuguaa

SEQ ID NO: 1257441 - RNA, 19 nt, Artificial Sequence
  Description of Artificial Sequence: Synthetic oligonucleotide
  Antisense strand to SEQ ID NO: 1257440
uuacaaccaaucuacauuc

SEQ ID NO: 1257442 - RNA, 19 nt, Artificial Sequence
  Description of Artificial Sequence: Synthetic oligonucleotide
  Sense strand starting at position 3704 of SEQ ID NO: 1241242
aauguagauugguuguaaa

SEQ ID NO: 1257443 - RNA, 19 nt, Artificial Sequence
  Description of Artificial Sequence: Synthetic oligonucleotide
  Antisense strand to SEQ ID NO: 1257442
uuuacaaccaaucuacauu

SEQ ID NO: 1257444 - RNA, 19 nt, Artificial Sequence
  Description of Artificial Sequence: Synthetic oligonucleotide
  Sense strand starting at position 3907 of SEQ ID NO: 1241242
gguuguauauuagcucuaa

SEQ ID NO: 1257445 - RNA, 19 nt, Artificial Sequence
  Description of Artificial Sequence: Synthetic oligonucleotide
  Antisense strand to SEQ ID NO: 1257444
uuagagcuaauauacaacc

SEQ ID NO: 1257446 - RNA, 19 nt, Artificial Sequence
  Description of Artificial Sequence: Synthetic oligonucleotide
  Sense strand starting at position 3908 of SEQ ID NO: 1241242
guuguauauuagcucuaaa

SEQ ID NO: 1257447 - RNA, 19 nt, Artificial Sequence
  Description of Artificial Sequence: Synthetic oligonucleotide
  Antisense strand to SEQ ID NO: 1257446
uuuagagcuaauauacaac

SEQ ID NO: 1257448 - RNA, 19 nt, Artificial Sequence
  Description of Artificial Sequence: Synthetic oligonucleotide
  Sense strand starting at position 3928 of SEQ ID NO: 1241242
auggaauuauggucaggug

SEQ ID NO: 1257449 - RNA, 19 nt, Artificial Sequence
  Description of Artificial Sequence: Synthetic oligonucleotide
  Antisense strand to SEQ ID NO: 1257448
caccugaccauaauuccau

SEQ ID NO: 1257450 - RNA, 19 nt, Artificial Sequence
  Description of Artificial Sequence: Synthetic oligonucleotide
  Sense strand starting at position 3929 of SEQ ID NO: 1241242
uggaauuauggucaggugu

SEQ ID NO: 1257451 - RNA, 19 nt, Artificial Sequence
  Description of Artificial Sequence: Synthetic oligonucleotide
  Antisense strand to SEQ ID NO: 1257450
acaccugaccauaauucca

SEQ ID NO: 1257452 - RNA, 19 nt, Artificial Sequence
  Description of Artificial Sequence: Synthetic oligonucleotide
  Sense strand starting at position 26 of SEQ ID NO: 1241243
gugacuucuacauggagaa

SEQ ID NO: 1257453 - RNA, 19 nt, Artificial Sequence
  Description of Artificial Sequence: Synthetic oligonucleotide
  Antisense strand to SEQ ID NO: 1257452
uucuccauguagaagucac

SEQ ID NO: 1257454 - RNA, 19 nt, Artificial Sequence
  Description of Artificial Sequence: Synthetic oligonucleotide
  Sense strand starting at position 299 of SEQ ID NO: 1241243
aggucuuggucaucuagga

SEQ ID NO: 1257455 - RNA, 19 nt, Artificial Sequence
  Description of Artificial Sequence: Synthetic oligonucleotide
  Antisense strand to SEQ ID NO: 1257454
uccuagaugaccaagaccu

SEQ ID NO: 1257456 - RNA, 19 nt, Artificial Sequence
  Description of Artificial Sequence: Synthetic oligonucleotide
  Sense strand starting at position 303 of SEQ ID NO: 1241243
cuuggucaucuaggacaaa

SEQ ID NO: 1257457 - RNA, 19 nt, Artificial Sequence
  Description of Artificial Sequence: Synthetic oligonucleotide
  Antisense strand to SEQ ID NO: 1257456
uuuguccuagaugaccaag

SEQ ID NO: 1257458 - RNA, 19 nt, Artificial Sequence
  Description of Artificial Sequence: Synthetic oligonucleotide
  Sense strand starting at position 373 of SEQ ID NO: 1241243
guacacaagucauuagauc

SEQ ID NO: 1257459 - RNA, 19 nt, Artificial Sequence
  Description of Artificial Sequence: Synthetic oligonucleotide
  Antisense strand to SEQ ID NO: 1257458
gaucuaaugacuuguguac

SEQ ID NO: 1257460 - RNA, 19 nt, Artificial Sequence
  Description of Artificial Sequence: Synthetic oligonucleotide
  Sense strand starting at position 412 of SEQ ID NO: 1241243
uaagaaauaucucuggugu

SEQ ID NO: 1257461 - RNA, 19 nt, Artificial Sequence
  Description of Artificial Sequence: Synthetic oligonucleotide
  Antisense strand to SEQ ID NO: 1257460
acaccagagauauuucuua

SEQ ID NO: 1257462 - RNA, 19 nt, Artificial Sequence
  Description of Artificial Sequence: Synthetic oligonucleotide
  Sense strand starting at position 413 of SEQ ID NO: 1241243
aagaaauaucucuggugug

SEQ ID NO: 1257463 - RNA, 19 nt, Artificial Sequence
  Description of Artificial Sequence: Synthetic oligonucleotide
  Antisense strand to SEQ ID NO: 1257462
cacaccagagauauuucuu

SEQ ID NO: 1257464 - RNA, 19 nt, Artificial Sequence
  Description of Artificial Sequence: Synthetic oligonucleotide
  Sense strand starting at position 429 of SEQ ID NO: 1241243
gugucagaacaauguaaau

SEQ ID NO: 1257465 - RNA, 19 nt, Artificial Sequence
  Description of Artificial Sequence: Synthetic oligonucleotide
  Antisense strand to SEQ ID NO: 1257464
auuuacauuguucugacac

SEQ ID NO: 1257466 - RNA, 19 nt, Artificial Sequence
  Description of Artificial Sequence: Synthetic oligonucleotide
  Sense strand starting at position 442 of SEQ ID NO: 1241243
guaaauguacaauaagcau

SEQ ID NO: 1257467 - RNA, 19 nt, Artificial Sequence
  Description of Artificial Sequence: Synthetic oligonucleotide
  Antisense strand to SEQ ID NO: 1257466
augcuuauuguacauuuac

SEQ ID NO: 1257468 - RNA, 19 nt, Artificial Sequence
  Description of Artificial Sequence: Synthetic oligonucleotide
  Sense strand starting at position 459 of SEQ ID NO: 1241243
auucuauaggucuguaacu

SEQ ID NO: 1257469 - RNA, 19 nt, Artificial Sequence
  Description of Artificial Sequence: Synthetic oligonucleotide
  Antisense strand to SEQ ID NO: 1257468
aguuacagaccuauagaau

SEQ ID NO: 1257470 - RNA, 19 nt, Artificial Sequence
  Description of Artificial Sequence: Synthetic oligonucleotide
  Sense strand starting at position 461 of SEQ ID NO: 1241243
ucuauaggucuguaacuuu

SEQ ID NO: 1257471 - RNA, 19 nt, Artificial Sequence
  Description of Artificial Sequence: Synthetic oligonucleotide
  Antisense strand to SEQ ID NO: 1257470
aaaguuacagaccuauaga

SEQ ID NO: 1257472 - RNA, 19 nt, Artificial Sequence
  Description of Artificial Sequence: Synthetic oligonucleotide
  Sense strand starting at position 802 of SEQ ID NO: 1241243
agacaauuccaaugcugua

SEQ ID NO: 1257473 - RNA, 19 nt, Artificial Sequence
  Description of Artificial Sequence: Synthetic oligonucleotide
  Antisense strand to SEQ ID NO: 1257472
uacagcauuggaauugucu

SEQ ID NO: 1257474 - RNA, 19 nt, Artificial Sequence
  Description of Artificial Sequence: Synthetic oligonucleotide
  Sense strand starting at position 842 of SEQ ID NO: 1241243
accauaaacucuuuacgga

SEQ ID NO: 1257475 - RNA, 19 nt, Artificial Sequence
  Description of Artificial Sequence: Synthetic oligonucleotide
  Antisense strand to SEQ ID NO: 1257474
uccguaaagaguuuauggu

SEQ ID NO: 1257476 - RNA, 19 nt, Artificial Sequence
  Description of Artificial Sequence: Synthetic oligonucleotide
  Sense strand starting at position 978 of SEQ ID NO: 1241243
gucaaaguagcaggugaua

SEQ ID NO: 1257477 - RNA, 19 nt, Artificial Sequence
  Description of Artificial Sequence: Synthetic oligonucleotide
  Antisense strand to SEQ ID NO: 1257476
uaucaccugcuacuuugac

SEQ ID NO: 1257478 - RNA, 19 nt, Artificial Sequence
  Description of Artificial Sequence: Synthetic oligonucleotide
  Sense strand starting at position 989 of SEQ ID NO: 1241243
aggugauaccagugauaga

SEQ ID NO: 1257479 - RNA, 19 nt, Artificial Sequence
  Description of Artificial Sequence: Synthetic oligonucleotide
  Antisense strand to SEQ ID NO: 1257478
ucuaucacugguaucaccu

SEQ ID NO: 1257480 - RNA, 19 nt, Artificial Sequence
  Description of Artificial Sequence: Synthetic oligonucleotide
  Sense strand starting at position 1082 of SEQ ID NO: 1241243
gacuguucucgcuaaauau

SEQ ID NO: 1257481 - RNA, 19 nt, Artificial Sequence
  Description of Artificial Sequence: Synthetic oligonucleotide
  Antisense strand to SEQ ID NO: 1257480
auauuuagcgagaacaguc

SEQ ID NO: 1257482 - RNA, 19 nt, Artificial Sequence
  Description of Artificial Sequence: Synthetic oligonucleotide
  Sense strand starting at position 1178 of SEQ ID NO: 1241243
gguucaggacagugaaaua

SEQ ID NO: 1257483 - RNA, 19 nt, Artificial Sequence
  Description of Artificial Sequence: Synthetic oligonucleotide
  Antisense strand to SEQ ID NO: 1257482
uauuucacuguccugaacc

SEQ ID NO: 1257484 - RNA, 19 nt, Artificial Sequence
  Description of Artificial Sequence: Synthetic oligonucleotide
  Sense strand starting at position 1303 of SEQ ID NO: 1241243
ugaaacguuucaccggaga

SEQ ID NO: 1257485 - RNA, 19 nt, Artificial Sequence
  Description of Artificial Sequence: Synthetic oligonucleotide
  Antisense strand to SEQ ID NO: 1257484
ucuccggugaaacguuuca

SEQ ID NO: 1257486 - RNA, 19 nt, Artificial Sequence
  Description of Artificial Sequence: Synthetic oligonucleotide
  Sense strand starting at position 1324 of SEQ ID NO: 1241243
gguaaugauuaggccaaga

SEQ ID NO: 1257487 - RNA, 19 nt, Artificial Sequence
  Description of Artificial Sequence: Synthetic oligonucleotide
  Antisense strand to SEQ ID NO: 1257486
ucuuggccuaaucauuacc

SEQ ID NO: 1257488 - RNA, 19 nt, Artificial Sequence
  Description of Artificial Sequence: Synthetic oligonucleotide
  Sense strand starting at position 1402 of SEQ ID NO: 1241243
uguuaaaccuaaguuaaag

SEQ ID NO: 1257489 - RNA, 19 nt, Artificial Sequence
  Description of Artificial Sequence: Synthetic oligonucleotide
  Antisense strand to SEQ ID NO: 1257488
cuuuaacuuagguuuaaca

SEQ ID NO: 1257490 - RNA, 19 nt, Artificial Sequence
  Description of Artificial Sequence: Synthetic oligonucleotide
  Sense strand starting at position 1441 of SEQ ID NO: 1241243
gaccaauauuaagugaagu

SEQ ID NO: 1257491 - RNA, 19 nt, Artificial Sequence
  Description of Artificial Sequence: Synthetic oligonucleotide
  Antisense strand to SEQ ID NO: 1257490
acuucacuuaauauugguc

SEQ ID NO: 1257492 - RNA, 19 nt, Artificial Sequence
  Description of Artificial Sequence: Synthetic oligonucleotide
  Sense strand starting at position 1485 of SEQ ID NO: 1241243
gaaggugguuucuuuagac

SEQ ID NO: 1257493 - RNA, 19 nt, Artificial Sequence
  Description of Artificial Sequence: Synthetic oligonucleotide
  Antisense strand to SEQ ID NO: 1257492
gucuaaagaaaccaccuuc

SEQ ID NO: 1257494 - RNA, 19 nt, Artificial Sequence
  Description of Artificial Sequence: Synthetic oligonucleotide
  Sense strand starting at position 1532 of SEQ ID NO: 1241243
ugguauuaggcauauaauc

SEQ ID NO: 1257495 - RNA, 19 nt, Artificial Sequence
  Description of Artificial Sequence: Synthetic oligonucleotide
  Antisense strand to SEQ ID NO: 1257494
gauuauaugccuaauacca

SEQ ID NO: 1257496 - RNA, 19 nt, Artificial Sequence
  Description of Artificial Sequence: Synthetic oligonucleotide
  Sense strand starting at position 1625 of SEQ ID NO: 1241243
gguggucugauauagagua

SEQ ID NO: 1257497 - RNA, 19 nt, Artificial Sequence
  Description of Artificial Sequence: Synthetic oligonucleotide
  Antisense strand to SEQ ID NO: 1257496
uacucuauaucagaccacc

SEQ ID NO: 1257498 - RNA, 19 nt, Artificial Sequence
  Description of Artificial Sequence: Synthetic oligonucleotide
  Sense strand starting at position 1627 of SEQ ID NO: 1241243
uggucugauauagaguacu

SEQ ID NO: 1257499 - RNA, 19 nt, Artificial Sequence
  Description of Artificial Sequence: Synthetic oligonucleotide
  Antisense strand to SEQ ID NO: 1257498
aguacucuauaucagacca

SEQ ID NO: 1257500 - RNA, 19 nt, Artificial Sequence
  Description of Artificial Sequence: Synthetic oligonucleotide
  Sense strand starting at position 1889 of SEQ ID NO: 1241243
cgcgaaaugacagacacua

SEQ ID NO: 1257501 - RNA, 19 nt, Artificial Sequence
  Description of Artificial Sequence: Synthetic oligonucleotide
  Antisense strand to SEQ ID NO: 1257500
uagugucugucauuucgcg

SEQ ID NO: 1257502 - RNA, 19 nt, Artificial Sequence
  Description of Artificial Sequence: Synthetic oligonucleotide
  Sense strand starting at position 2282 of SEQ ID NO: 1241243
cguagcuaaccagagguau

SEQ ID NO: 1257503 - RNA, 19 nt, Artificial Sequence
  Description of Artificial Sequence: Synthetic oligonucleotide
  Antisense strand to SEQ ID NO: 1257502
auaccucugguuagcuacg

SEQ ID NO: 1257504 - RNA, 19 nt, Artificial Sequence
  Description of Artificial Sequence: Synthetic oligonucleotide
  Sense strand starting at position 2333 of SEQ ID NO: 1241243
gauuuaacgguuugcaucu

SEQ ID NO: 1257505 - RNA, 19 nt, Artificial Sequence
  Description of Artificial Sequence: Synthetic oligonucleotide
  Antisense strand to SEQ ID NO: 1257504
agaugcaaaccguuaaauc

SEQ ID NO: 1257506 - RNA, 19 nt, Artificial Sequence
  Description of Artificial Sequence: Synthetic oligonucleotide
  Sense strand starting at position 2434 of SEQ ID NO: 1241243
gucacagaucauuggaaca

SEQ ID NO: 1257507 - RNA, 19 nt, Artificial Sequence
  Description of Artificial Sequence: Synthetic oligonucleotide
  Antisense strand to SEQ ID NO: 1257506
uguuccaaugaucugugac

SEQ ID NO: 1257508 - RNA, 19 nt, Artificial Sequence
  Description of Artificial Sequence: Synthetic oligonucleotide
  Sense strand starting at position 2671 of SEQ ID NO: 1241243
gggacucucacgugaauca

SEQ ID NO: 1257509 - RNA, 19 nt, Artificial Sequence
  Description of Artificial Sequence: Synthetic oligonucleotide
  Antisense strand to SEQ ID NO: 1257508
ugauucacgugagaguccc

SEQ ID NO: 1257510 - RNA, 19 nt, Artificial Sequence
  Description of Artificial Sequence: Synthetic oligonucleotide
  Sense strand starting at position 2751 of SEQ ID NO: 1241243
aaagcauauggucaaguuu

SEQ ID NO: 1257511 - RNA, 19 nt, Artificial Sequence
  Description of Artificial Sequence: Synthetic oligonucleotide
  Antisense strand to SEQ ID NO: 1257510
aaacuugaccauaugcuuu

SEQ ID NO: 1257512 - RNA, 19 nt, Artificial Sequence
  Description of Artificial Sequence: Synthetic oligonucleotide
  Sense strand starting at position 2794 of SEQ ID NO: 1241243
uaucuugaaccugguguaa

SEQ ID NO: 1257513 - RNA, 19 nt, Artificial Sequence
  Description of Artificial Sequence: Synthetic oligonucleotide
  Antisense strand to SEQ ID NO: 1257512
uuacaccagguucaagaua

SEQ ID NO: 1257514 - RNA, 19 nt, Artificial Sequence
  Description of Artificial Sequence: Synthetic oligonucleotide
  Sense strand starting at position 2809 of SEQ ID NO: 1241243
guaauaucccgggauguca

SEQ ID NO: 1257515 - RNA, 19 nt, Artificial Sequence
  Description of Artificial Sequence: Synthetic oligonucleotide
  Antisense strand to SEQ ID NO: 1257514
ugacaucccgggauauuac

SEQ ID NO: 1257516 - RNA, 19 nt, Artificial Sequence
  Description of Artificial Sequence: Synthetic oligonucleotide
  Sense strand starting at position 3373 of SEQ ID NO: 1241243
ugaacuguacgugagcaaa

SEQ ID NO: 1257517 - RNA, 19 nt, Artificial Sequence
  Description of Artificial Sequence: Synthetic oligonucleotide
  Antisense strand to SEQ ID NO: 1257516
uuugcucacguacaguuca

SEQ ID NO: 1257518 - RNA, 19 nt, Artificial Sequence
  Description of Artificial Sequence: Synthetic oligonucleotide
  Sense strand starting at position 3784 of SEQ ID NO: 1241243
gcauuaacuaacggaugua

SEQ ID NO: 1257519 - RNA, 19 nt, Artificial Sequence
  Description of Artificial Sequence: Synthetic oligonucleotide
  Antisense strand to SEQ ID NO: 1257518
uacauccguuaguuaaugc

SEQ ID NO: 1257520 - RNA, 19 nt, Artificial Sequence
  Description of Artificial Sequence: Synthetic oligonucleotide
  Sense strand starting at position 3787 of SEQ ID NO: 1241243
uuaacuaacggauguauua

SEQ ID NO: 1257521 - RNA, 19 nt, Artificial Sequence
  Description of Artificial Sequence: Synthetic oligonucleotide
  Antisense strand to SEQ ID NO: 1257520
uaauacauccguuaguuaa

SEQ ID NO: 1257522 - RNA, 19 nt, Artificial Sequence
  Description of Artificial Sequence: Synthetic oligonucleotide
  Sense strand starting at position 3797 of SEQ ID NO: 1241243
gauguauuaucagugguga

SEQ ID NO: 1257523 - RNA, 19 nt, Artificial Sequence
  Description of Artificial Sequence: Synthetic oligonucleotide
  Antisense strand to SEQ ID NO: 1257522
ucaccacugauaauacauc

SEQ ID NO: 1257524 - RNA, 19 nt, Artificial Sequence
  Description of Artificial Sequence: Synthetic oligonucleotide
  Sense strand starting at position 3798 of SEQ ID NO: 1241243
auguauuaucaguggugau

SEQ ID NO: 1257525 - RNA, 19 nt, Artificial Sequence
  Description of Artificial Sequence: Synthetic oligonucleotide
  Antisense strand to SEQ ID NO: 1257524
aucaccacugauaauacau

SEQ ID NO: 1257526 - RNA, 19 nt, Artificial Sequence
  Description of Artificial Sequence: Synthetic oligonucleotide
  Sense strand starting at position 3867 of SEQ ID NO: 1241243
uagagucuauuugaauaga

SEQ ID NO: 1257527 - RNA, 19 nt, Artificial Sequence
  Description of Artificial Sequence: Synthetic oligonucleotide
  Antisense strand to SEQ ID NO: 1257526
ucuauucaaauagacucua

SEQ ID NO: 1257528 - RNA, 19 nt, Artificial Sequence
  Description of Artificial Sequence: Synthetic oligonucleotide
  Sense strand starting at position 3946 of SEQ ID NO: 1241243
accuauguugcugagaaag

SEQ ID NO: 1257529 - RNA, 19 nt, Artificial Sequence
  Description of Artificial Sequence: Synthetic oligonucleotide
  Antisense strand to SEQ ID NO: 1257528
cuuucucagcaacauaggu

SEQ ID NO: 1257530 - RNA, 19 nt, Artificial Sequence
  Description of Artificial Sequence: Synthetic oligonucleotide
  Sense strand starting at position 3980 of SEQ ID NO: 1241243
auaacaagcugguucuuau

SEQ ID NO: 1257531 - RNA, 19 nt, Artificial Sequence
  Description of Artificial Sequence: Synthetic oligonucleotide
  Antisense strand to SEQ ID NO: 1257530
auaagaaccagcuuguuau

SEQ ID NO: 1257532 - RNA, 19 nt, Artificial Sequence
  Description of Artificial Sequence: Synthetic oligonucleotide
  Sense strand starting at position 135 of SEQ ID NO: 1241244
gagccucugccugagaagu

SEQ ID NO: 1257533 - RNA, 19 nt, Artificial Sequence
  Description of Artificial Sequence: Synthetic oligonucleotide
  Antisense strand to SEQ ID NO: 1257532
acuucucaggcagaggcuc

SEQ ID NO: 1257534 - RNA, 19 nt, Artificial Sequence
  Description of Artificial Sequence: Synthetic oligonucleotide
  Sense strand starting at position 143 of SEQ ID NO: 1241244
gccugagaaguccaccaca

SEQ ID NO: 1257535 - RNA, 19 nt, Artificial Sequence
  Description of Artificial Sequence: Synthetic oligonucleotide
  Antisense strand to SEQ ID NO: 1257534
ugugguggacuucucaggc

SEQ ID NO: 1257536 - RNA, 19 nt, Artificial Sequence
  Description of Artificial Sequence: Synthetic oligonucleotide
  Sense strand starting at position 258 of SEQ ID NO: 1241244
uggugugcacuugaucaca

SEQ ID NO: 1257537 - RNA, 19 nt, Artificial Sequence
  Description of Artificial Sequence: Synthetic oligonucleotide
  Antisense strand to SEQ ID NO: 1257536
ugugaucaagugcacacca

SEQ ID NO: 1257538 - RNA, 19 nt, Artificial Sequence
  Description of Artificial Sequence: Synthetic oligonucleotide
  Sense strand starting at position 309 of SEQ ID NO: 1241244
cacagugagcccugucuau

SEQ ID NO: 1257539 - RNA, 19 nt, Artificial Sequence
  Description of Artificial Sequence: Synthetic oligonucleotide
  Antisense strand to SEQ ID NO: 1257538
auagacagggcucacugug

SEQ ID NO: 1257540 - RNA, 19 nt, Artificial Sequence
  Description of Artificial Sequence: Synthetic oligonucleotide
  Sense strand starting at position 318 of SEQ ID NO: 1241244
cccugucuaugucuacuaa

SEQ ID NO: 1257541 - RNA, 19 nt, Artificial Sequence
  Description of Artificial Sequence: Synthetic oligonucleotide
  Antisense strand to SEQ ID NO: 1257540
uuaguagacauagacaggg

SEQ ID NO: 1257542 - RNA, 19 nt, Artificial Sequence
  Description of Artificial Sequence: Synthetic oligonucleotide
  Sense strand starting at position 319 of SEQ ID NO: 1241244
ccugucuaugucuacuaaa

SEQ ID NO: 1257543 - RNA, 19 nt, Artificial Sequence
  Description of Artificial Sequence: Synthetic oligonucleotide
  Antisense strand to SEQ ID NO: 1257542
uuuaguagacauagacagg

SEQ ID NO: 1257544 - RNA, 19 nt, Artificial Sequence
  Description of Artificial Sequence: Synthetic oligonucleotide
  Sense strand starting at position 365 of SEQ ID NO: 1241244
auacaauauucugaaggga

SEQ ID NO: 1257545 - RNA, 19 nt, Artificial Sequence
  Description of Artificial Sequence: Synthetic oligonucleotide
  Antisense strand to SEQ ID NO: 1257544
ucccuucagaauauuguau

SEQ ID NO: 1257546 - RNA, 19 nt, Artificial Sequence
  Description of Artificial Sequence: Synthetic oligonucleotide
  Sense strand starting at position 478 of SEQ ID NO: 1241244
aggcauucuuuccucaaga

SEQ ID NO: 1257547 - RNA, 19 nt, Artificial Sequence
  Description of Artificial Sequence: Synthetic oligonucleotide
  Antisense strand to SEQ ID NO: 1257546
ucuugaggaaagaaugccu

SEQ ID NO: 1257548 - RNA, 19 nt, Artificial Sequence
  Description of Artificial Sequence: Synthetic oligonucleotide
  Sense strand starting at position 479 of SEQ ID NO: 1241244
ggcauucuuuccucaagaa

SEQ ID NO: 1257549 - RNA, 19 nt, Artificial Sequence
  Description of Artificial Sequence: Synthetic oligonucleotide
  Antisense strand to SEQ ID NO: 1257548
uucuugaggaaagaaugcc

SEQ ID NO: 1257550 - RNA, 19 nt, Artificial Sequence
  Description of Artificial Sequence: Synthetic oligonucleotide
  Sense strand starting at position 550 of SEQ ID NO: 1241244
cucauaucaugugucaacu

SEQ ID NO: 1257551 - RNA, 19 nt, Artificial Sequence
  Description of Artificial Sequence: Synthetic oligonucleotide
  Antisense strand to SEQ ID NO: 1257550
aguugacacaugauaugag

SEQ ID NO: 1257552 - RNA, 19 nt, Artificial Sequence
  Description of Artificial Sequence: Synthetic oligonucleotide
  Sense strand starting at position 559 of SEQ ID NO: 1241244
ugugucaacugccuuacua

SEQ ID NO: 1257553 - RNA, 19 nt, Artificial Sequence
  Description of Artificial Sequence: Synthetic oligonucleotide
  Antisense strand to SEQ ID NO: 1257552
uaguaaggcaguugacaca

SEQ ID NO: 1257554 - RNA, 19 nt, Artificial Sequence
  Description of Artificial Sequence: Synthetic oligonucleotide
  Sense strand starting at position 684 of SEQ ID NO: 1241244
uguguagucacagagacag

SEQ ID NO: 1257555 - RNA, 19 nt, Artificial Sequence
  Description of Artificial Sequence: Synthetic oligonucleotide
  Antisense strand to SEQ ID NO: 1257554
cugucucugugacuacaca

SEQ ID NO: 1257556 - RNA, 19 nt, Artificial Sequence
  Description of Artificial Sequence: Synthetic oligonucleotide
  Sense strand starting at position 696 of SEQ ID NO: 1241244
gagacaggcucccuugaau

SEQ ID NO: 1257557 - RNA, 19 nt, Artificial Sequence
  Description of Artificial Sequence: Synthetic oligonucleotide
  Antisense strand to SEQ ID NO: 1257556
auucaagggagccugucuc

SEQ ID NO: 1257558 - RNA, 19 nt, Artificial Sequence
  Description of Artificial Sequence: Synthetic oligonucleotide
  Sense strand starting at position 748 of SEQ ID NO: 1241244
gacccucccuagguaagaa

SEQ ID NO: 1257559 - RNA, 19 nt, Artificial Sequence
  Description of Artificial Sequence: Synthetic oligonucleotide
  Antisense strand to SEQ ID NO: 1257558
uucuuaccuagggaggguc

SEQ ID NO: 1257560 - RNA, 19 nt, Artificial Sequence
  Description of Artificial Sequence: Synthetic oligonucleotide
  Sense strand starting at position 768 of SEQ ID NO: 1241244
cacucuuacuggguaugga

SEQ ID NO: 1257561 - RNA, 19 nt, Artificial Sequence
  Description of Artificial Sequence: Synthetic oligonucleotide
  Antisense strand to SEQ ID NO: 1257560
uccauacccaguaagagug

SEQ ID NO: 1257562 - RNA, 19 nt, Artificial Sequence
  Description of Artificial Sequence: Synthetic oligonucleotide
  Sense strand starting at position 836 of SEQ ID NO: 1241244
aacagcuguccugagcgaa

SEQ ID NO: 1257563 - RNA, 19 nt, Artificial Sequence
  Description of Artificial Sequence: Synthetic oligonucleotide
  Antisense strand to SEQ ID NO: 1257562
uucgcucaggacagcuguu

SEQ ID NO: 1257564 - RNA, 19 nt, Artificial Sequence
  Description of Artificial Sequence: Synthetic oligonucleotide
  Sense strand starting at position 895 of SEQ ID NO: 1241244
ggaucaaggcacuguggua

SEQ ID NO: 1257565 - RNA, 19 nt, Artificial Sequence
  Description of Artificial Sequence: Synthetic oligonucleotide
  Antisense strand to SEQ ID NO: 1257564
uaccacagugccuugaucc

SEQ ID NO: 1257566 - RNA, 19 nt, Artificial Sequence
  Description of Artificial Sequence: Synthetic oligonucleotide
  Sense strand starting at position 940 of SEQ ID NO: 1241244
guaaguuaccugcggagga

SEQ ID NO: 1257567 - RNA, 19 nt, Artificial Sequence
  Description of Artificial Sequence: Synthetic oligonucleotide
  Antisense strand to SEQ ID NO: 1257566
uccuccgcagguaacuuac

SEQ ID NO: 1257568 - RNA, 19 nt, Artificial Sequence
  Description of Artificial Sequence: Synthetic oligonucleotide
  Sense strand starting at position 2149 of SEQ ID NO: 1241244
guucgcuaccgagagguau

SEQ ID NO: 1257569 - RNA, 19 nt, Artificial Sequence
  Description of Artificial Sequence: Synthetic oligonucleotide
  Antisense strand to SEQ ID NO: 1257568
auaccucucgguagcgaac

SEQ ID NO: 1257570 - RNA, 19 nt, Artificial Sequence
  Description of Artificial Sequence: Synthetic oligonucleotide
  Sense strand starting at position 2151 of SEQ ID NO: 1241244
ucgcuaccgagagguauuu

SEQ ID NO: 1257571 - RNA, 19 nt, Artificial Sequence
  Description of Artificial Sequence: Synthetic oligonucleotide
  Antisense strand to SEQ ID NO: 1257570
aaauaccucucgguagcga

SEQ ID NO: 1257572 - RNA, 19 nt, Artificial Sequence
  Description of Artificial Sequence: Synthetic oligonucleotide
  Sense strand starting at position 2185 of SEQ ID NO: 1241244
uuuacugucugucccuaaa

SEQ ID NO: 1257573 - RNA, 19 nt, Artificial Sequence
  Description of Artificial Sequence: Synthetic oligonucleotide
  Antisense strand to SEQ ID NO: 1257572
uuuagggacagacaguaaa

SEQ ID NO: 1257574 - RNA, 19 nt, Artificial Sequence
  Description of Artificial Sequence: Synthetic oligonucleotide
  Sense strand starting at position 2188 of SEQ ID NO: 1241244
acugucugucccuaaagau

SEQ ID NO: 1257575 - RNA, 19 nt, Artificial Sequence
  Description of Artificial Sequence: Synthetic oligonucleotide
  Antisense strand to SEQ ID NO: 1257574
aucuuuagggacagacagu

SEQ ID NO: 1257576 - RNA, 19 nt, Artificial Sequence
  Description of Artificial Sequence: Synthetic oligonucleotide
  Sense strand starting at position 2419 of SEQ ID NO: 1241244
cuuuauccggucugacaau

SEQ ID NO: 1257577 - RNA, 19 nt, Artificial Sequence
  Description of Artificial Sequence: Synthetic oligonucleotide
  Antisense strand to SEQ ID NO: 1257576
auugucagaccggauaaag

SEQ ID NO: 1257578 - RNA, 19 nt, Artificial Sequence
  Description of Artificial Sequence: Synthetic oligonucleotide
  Sense strand starting at position 2475 of SEQ ID NO: 1241244
gcagacguucccuaauaca

SEQ ID NO: 1257579 - RNA, 19 nt, Artificial Sequence
  Description of Artificial Sequence: Synthetic oligonucleotide
  Antisense strand to SEQ ID NO: 1257578
uguauuagggaacgucugc

SEQ ID NO: 1257580 - RNA, 19 nt, Artificial Sequence
  Description of Artificial Sequence: Synthetic oligonucleotide
  Sense strand starting at position 2665 of SEQ ID NO: 1241244
gcggguuuaugaguaacaa

SEQ ID NO: 1257581 - RNA, 19 nt, Artificial Sequence
  Description of Artificial Sequence: Synthetic oligonucleotide
  Antisense strand to SEQ ID NO: 1257580
uuguuacucauaaacccgc

SEQ ID NO: 1257582 - RNA, 19 nt, Artificial Sequence
  Description of Artificial Sequence: Synthetic oligonucleotide
  Sense strand starting at position 2666 of SEQ ID NO: 1241244
cggguuuaugaguaacaag

SEQ ID NO: 1257583 - RNA, 19 nt, Artificial Sequence
  Description of Artificial Sequence: Synthetic oligonucleotide
  Antisense strand to SEQ ID NO: 1257582
cuuguuacucauaaacccg

SEQ ID NO: 1257584 - RNA, 19 nt, Artificial Sequence
  Description of Artificial Sequence: Synthetic oligonucleotide
  Sense strand starting at position 2740 of SEQ ID NO: 1241244
ggacguguggguugaauga

SEQ ID NO: 1257585 - RNA, 19 nt, Artificial Sequence
  Description of Artificial Sequence: Synthetic oligonucleotide
  Antisense strand to SEQ ID NO: 1257584
ucauucaacccacacgucc

SEQ ID NO: 1257586 - RNA, 19 nt, Artificial Sequence
  Description of Artificial Sequence: Synthetic oligonucleotide
  Sense strand starting at position 2814 of SEQ ID NO: 1241244
gccugcacuuccuugggaa

SEQ ID NO: 1257587 - RNA, 19 nt, Artificial Sequence
  Description of Artificial Sequence: Synthetic oligonucleotide
  Antisense strand to SEQ ID NO: 1257586
uucccaaggaagugcaggc

SEQ ID NO: 1257588 - RNA, 19 nt, Artificial Sequence
  Description of Artificial Sequence: Synthetic oligonucleotide
  Sense strand starting at position 2815 of SEQ ID NO: 1241244
ccugcacuuccuugggaaa

SEQ ID NO: 1257589 - RNA, 19 nt, Artificial Sequence
  Description of Artificial Sequence: Synthetic oligonucleotide
  Antisense strand to SEQ ID NO: 1257588
uuucccaaggaagugcagg

SEQ ID NO: 1257590 - RNA, 19 nt, Artificial Sequence
  Description of Artificial Sequence: Synthetic oligonucleotide
  Sense strand starting at position 3031 of SEQ ID NO: 1241244
ccugaauguuugguuuaau

SEQ ID NO: 1257591 - RNA, 19 nt, Artificial Sequence
  Description of Artificial Sequence: Synthetic oligonucleotide
  Antisense strand to SEQ ID NO: 1257590
auuaaaccaaacauucagg

SEQ ID NO: 1257592 - RNA, 19 nt, Artificial Sequence
  Description of Artificial Sequence: Synthetic oligonucleotide
  Sense strand starting at position 3032 of SEQ ID NO: 1241244
cugaauguuugguuuaaug

SEQ ID NO: 1257593 - RNA, 19 nt, Artificial Sequence
  Description of Artificial Sequence: Synthetic oligonucleotide
  Antisense strand to SEQ ID NO: 1257592
cauuaaaccaaacauucag

SEQ ID NO: 1257594 - RNA, 19 nt, Artificial Sequence
  Description of Artificial Sequence: Synthetic oligonucleotide
  Sense strand starting at position 3034 of SEQ ID NO: 1241244
gaauguuugguuuaauguu

SEQ ID NO: 1257595 - RNA, 19 nt, Artificial Sequence
  Description of Artificial Sequence: Synthetic oligonucleotide
  Antisense strand to SEQ ID NO: 1257594
aacauuaaaccaaacauuc

SEQ ID NO: 1257596 - RNA, 19 nt, Artificial Sequence
  Description of Artificial Sequence: Synthetic oligonucleotide
  Sense strand starting at position 3058 of SEQ ID NO: 1241244
guuaacggucuugaaauua

SEQ ID NO: 1257597 - RNA, 19 nt, Artificial Sequence
  Description of Artificial Sequence: Synthetic oligonucleotide
  Antisense strand to SEQ ID NO: 1257596
uaauuucaagaccguuaac

SEQ ID NO: 1257598 - RNA, 19 nt, Artificial Sequence
  Description of Artificial Sequence: Synthetic oligonucleotide
  Sense strand starting at position 3063 of SEQ ID NO: 1241244
cggucuugaaauuauuagu

SEQ ID NO: 1257599 - RNA, 19 nt, Artificial Sequence
  Description of Artificial Sequence: Synthetic oligonucleotide
  Antisense strand to SEQ ID NO: 1257598
acuaauaauuucaagaccg

SEQ ID NO: 1257600 - RNA, 19 nt, Artificial Sequence
  Description of Artificial Sequence: Synthetic oligonucleotide
  Sense strand starting at position 3088 of SEQ ID NO: 1241244
aaagcaagugccugguauu

SEQ ID NO: 1257601 - RNA, 19 nt, Artificial Sequence
  Description of Artificial Sequence: Synthetic oligonucleotide
  Antisense strand to SEQ ID NO: 1257600
aauaccaggcacuugcuuu

SEQ ID NO: 1257602 - RNA, 19 nt, Artificial Sequence
  Description of Artificial Sequence: Synthetic oligonucleotide
  Sense strand starting at position 3089 of SEQ ID NO: 1241244
aagcaagugccugguauuu

SEQ ID NO: 1257603 - RNA, 19 nt, Artificial Sequence
  Description of Artificial Sequence: Synthetic oligonucleotide
  Antisense strand to SEQ ID NO: 1257602
aaauaccaggcacuugcuu

SEQ ID NO: 1257604 - RNA, 19 nt, Artificial Sequence
  Description of Artificial Sequence: Synthetic oligonucleotide
  Sense strand starting at position 3120 of SEQ ID NO: 1241244
cggcuccacugauuaugua

SEQ ID NO: 1257605 - RNA, 19 nt, Artificial Sequence
  Description of Artificial Sequence: Synthetic oligonucleotide
  Antisense strand to SEQ ID NO: 1257604
uacauaaucaguggagccg

SEQ ID NO: 1257606 - RNA, 19 nt, Artificial Sequence
  Description of Artificial Sequence: Synthetic oligonucleotide
  Sense strand starting at position 3176 of SEQ ID NO: 1241244
acuuacuaucugugcuuua

SEQ ID NO: 1257607 - RNA, 19 nt, Artificial Sequence
  Description of Artificial Sequence: Synthetic oligonucleotide
  Antisense strand to SEQ ID NO: 1257606
uaaagcacagauaguaagu

SEQ ID NO: 1257608 - RNA, 19 nt, Artificial Sequence
  Description of Artificial Sequence: Synthetic oligonucleotide
  Sense strand starting at position 3280 of SEQ ID NO: 1241244
ugcguucucccagaaugug

SEQ ID NO: 1257609 - RNA, 19 nt, Artificial Sequence
  Description of Artificial Sequence: Synthetic oligonucleotide
  Antisense strand to SEQ ID NO: 1257608
cacauucugggagaacgca

SEQ ID NO: 1257610 - RNA, 19 nt, Artificial Sequence
  Description of Artificial Sequence: Synthetic oligonucleotide
  Sense strand starting at position 3289 of SEQ ID NO: 1241244
ccagaaugugacggaauca

SEQ ID NO: 1257611 - RNA, 19 nt, Artificial Sequence
  Description of Artificial Sequence: Synthetic oligonucleotide
  Antisense strand to SEQ ID NO: 1257610
ugauuccgucacauucugg

SEQ ID NO: 1257612 - RNA, 19 nt, Artificial Sequence
  Description of Artificial Sequence: Synthetic oligonucleotide
  Sense strand starting at position 215 of SEQ ID NO: 1241245
gagccucugccugagaagu

SEQ ID NO: 1257613 - RNA, 19 nt, Artificial Sequence
  Description of Artificial Sequence: Synthetic oligonucleotide
  Antisense strand to SEQ ID NO: 1257612
acuucucaggcagaggcuc

SEQ ID NO: 1257614 - RNA, 19 nt, Artificial Sequence
  Description of Artificial Sequence: Synthetic oligonucleotide
  Sense strand starting at position 223 of SEQ ID NO: 1241245
gccugagaaguccaccaca

SEQ ID NO: 1257615 - RNA, 19 nt, Artificial Sequence
  Description of Artificial Sequence: Synthetic oligonucleotide
  Antisense strand to SEQ ID NO: 1257614
ugugguggacuucucaggc

SEQ ID NO: 1257616 - RNA, 19 nt, Artificial Sequence
  Description of Artificial Sequence: Synthetic oligonucleotide
  Sense strand starting at position 338 of SEQ ID NO: 1241245
uggugugcacuugaucaca

SEQ ID NO: 1257617 - RNA, 19 nt, Artificial Sequence
  Description of Artificial Sequence: Synthetic oligonucleotide
  Antisense strand to SEQ ID NO: 1257616
ugugaucaagugcacacca

SEQ ID NO: 1257618 - RNA, 19 nt, Artificial Sequence
  Description of Artificial Sequence: Synthetic oligonucleotide
  Sense strand starting at position 389 of SEQ ID NO: 1241245
cacagugagcccugucuau

SEQ ID NO: 1257619 - RNA, 19 nt, Artificial Sequence
  Description of Artificial Sequence: Synthetic oligonucleotide
  Antisense strand to SEQ ID NO: 1257618
auagacagggcucacugug

SEQ ID NO: 1257620 - RNA, 19 nt, Artificial Sequence
  Description of Artificial Sequence: Synthetic oligonucleotide
  Sense strand starting at position 398 of SEQ ID NO: 1241245
cccugucuaugucuacuaa

SEQ ID NO: 1257621 - RNA, 19 nt, Artificial Sequence
  Description of Artificial Sequence: Synthetic oligonucleotide
  Antisense strand to SEQ ID NO: 1257620
uuaguagacauagacaggg

SEQ ID NO: 1257622 - RNA, 19 nt, Artificial Sequence
  Description of Artificial Sequence: Synthetic oligonucleotide
  Sense strand starting at position 399 of SEQ ID NO: 1241245
ccugucuaugucuacuaaa

SEQ ID NO: 1257623 - RNA, 19 nt, Artificial Sequence
  Description of Artificial Sequence: Synthetic oligonucleotide
  Antisense strand to SEQ ID NO: 1257622
uuuaguagacauagacagg

SEQ ID NO: 1257624 - RNA, 19 nt, Artificial Sequence
  Description of Artificial Sequence: Synthetic oligonucleotide
  Sense strand starting at position 445 of SEQ ID NO: 1241245
auacaauauucugaaggga

SEQ ID NO: 1257625 - RNA, 19 nt, Artificial Sequence
  Description of Artificial Sequence: Synthetic oligonucleotide
  Antisense strand to SEQ ID NO: 1257624
ucccuucagaauauuguau

SEQ ID NO: 1257626 - RNA, 19 nt, Artificial Sequence
  Description of Artificial Sequence: Synthetic oligonucleotide
  Sense strand starting at position 558 of SEQ ID NO: 1241245
aggcauucuuuccucaaga

SEQ ID NO: 1257627 - RNA, 19 nt, Artificial Sequence
  Description of Artificial Sequence: Synthetic oligonucleotide
  Antisense strand to SEQ ID NO: 1257626
ucuugaggaaagaaugccu

SEQ ID NO: 1257628 - RNA, 19 nt, Artificial Sequence
  Description of Artificial Sequence: Synthetic oligonucleotide
  Sense strand starting at position 559 of SEQ ID NO: 1241245
ggcauucuuuccucaagaa

SEQ ID NO: 1257629 - RNA, 19 nt, Artificial Sequence
  Description of Artificial Sequence: Synthetic oligonucleotide
  Antisense strand to SEQ ID NO: 1257628
uucuugaggaaagaaugcc

SEQ ID NO: 1257630 - RNA, 19 nt, Artificial Sequence
  Description of Artificial Sequence: Synthetic oligonucleotide
  Sense strand starting at position 630 of SEQ ID NO: 1241245
cucauaucaugugucaacu

SEQ ID NO: 1257631 - RNA, 19 nt, Artificial Sequence
  Description of Artificial Sequence: Synthetic oligonucleotide
  Antisense strand to SEQ ID NO: 1257630
aguugacacaugauaugag

SEQ ID NO: 1257632 - RNA, 19 nt, Artificial Sequence
  Description of Artificial Sequence: Synthetic oligonucleotide
  Sense strand starting at position 639 of SEQ ID NO: 1241245
ugugucaacugccuuacua

SEQ ID NO: 1257633 - RNA, 19 nt, Artificial Sequence
  Description of Artificial Sequence: Synthetic oligonucleotide
  Antisense strand to SEQ ID NO: 1257632
uaguaaggcaguugacaca

SEQ ID NO: 1257634 - RNA, 19 nt, Artificial Sequence
  Description of Artificial Sequence: Synthetic oligonucleotide
  Sense strand starting at position 764 of SEQ ID NO: 1241245
uguguagucacagagacag

SEQ ID NO: 1257635 - RNA, 19 nt, Artificial Sequence
  Description of Artificial Sequence: Synthetic oligonucleotide
  Antisense strand to SEQ ID NO: 1257634
cugucucugugacuacaca

SEQ ID NO: 1257636 - RNA, 19 nt, Artificial Sequence
  Description of Artificial Sequence: Synthetic oligonucleotide
  Sense strand starting at position 776 of SEQ ID NO: 1241245
gagacaggcucccuugaau

SEQ ID NO: 1257637 - RNA, 19 nt, Artificial Sequence
  Description of Artificial Sequence: Synthetic oligonucleotide
  Antisense strand to SEQ ID NO: 1257636
auucaagggagccugucuc

SEQ ID NO: 1257638 - RNA, 19 nt, Artificial Sequence
  Description of Artificial Sequence: Synthetic oligonucleotide
  Sense strand starting at position 828 of SEQ ID NO: 1241245
gacccucccuagguaagaa

SEQ ID NO: 1257639 - RNA, 19 nt, Artificial Sequence
  Description of Artificial Sequence: Synthetic oligonucleotide
  Antisense strand to SEQ ID NO: 1257638
uucuuaccuagggaggguc

SEQ ID NO: 1257640 - RNA, 19 nt, Artificial Sequence
  Description of Artificial Sequence: Synthetic oligonucleotide
  Sense strand starting at position 848 of SEQ ID NO: 1241245
cacucuuacuggguaugga

SEQ ID NO: 1257641 - RNA, 19 nt, Artificial Sequence
  Description of Artificial Sequence: Synthetic oligonucleotide
  Antisense strand to SEQ ID NO: 1257640
uccauacccaguaagagug

SEQ ID NO: 1257642 - RNA, 19 nt, Artificial Sequence
  Description of Artificial Sequence: Synthetic oligonucleotide
  Sense strand starting at position 916 of SEQ ID NO: 1241245
aacagcuguccugagcgaa

SEQ ID NO: 1257643 - RNA, 19 nt, Artificial Sequence
  Description of Artificial Sequence: Synthetic oligonucleotide
  Antisense strand to SEQ ID NO: 1257642
uucgcucaggacagcuguu

SEQ ID NO: 1257644 - RNA, 19 nt, Artificial Sequence
  Description of Artificial Sequence: Synthetic oligonucleotide
  Sense strand starting at position 975 of SEQ ID NO: 1241245
ggaucaaggcacuguggua

SEQ ID NO: 1257645 - RNA, 19 nt, Artificial Sequence
  Description of Artificial Sequence: Synthetic oligonucleotide
  Antisense strand to SEQ ID NO: 1257644
uaccacagugccuugaucc

SEQ ID NO: 1257646 - RNA, 19 nt, Artificial Sequence
  Description of Artificial Sequence: Synthetic oligonucleotide
  Sense strand starting at position 1020 of SEQ ID NO: 1241245
guaaguuaccugcggagga

SEQ ID NO: 1257647 - RNA, 19 nt, Artificial Sequence
  Description of Artificial Sequence: Synthetic oligonucleotide
  Antisense strand to SEQ ID NO: 1257646
uccuccgcagguaacuuac

SEQ ID NO: 1257648 - RNA, 19 nt, Artificial Sequence
  Description of Artificial Sequence: Synthetic oligonucleotide
  Sense strand starting at position 2229 of SEQ ID NO: 1241245
guucgcuaccgagagguau

SEQ ID NO: 1257649 - RNA, 19 nt, Artificial Sequence
  Description of Artificial Sequence: Synthetic oligonucleotide
  Antisense strand to SEQ ID NO: 1257648
auaccucucgguagcgaac

SEQ ID NO: 1257650 - RNA, 19 nt, Artificial Sequence
  Description of Artificial Sequence: Synthetic oligonucleotide
  Sense strand starting at position 2231 of SEQ ID NO: 1241245
ucgcuaccgagagguauuu

SEQ ID NO: 1257651 - RNA, 19 nt, Artificial Sequence
  Description of Artificial Sequence: Synthetic oligonucleotide
  Antisense strand to SEQ ID NO: 1257650
aaauaccucucgguagcga

SEQ ID NO: 1257652 - RNA, 19 nt, Artificial Sequence
  Description of Artificial Sequence: Synthetic oligonucleotide
  Sense strand starting at position 2265 of SEQ ID NO: 1241245
uuuacugucugucccuaaa

SEQ ID NO: 1257653 - RNA, 19 nt, Artificial Sequence
  Description of Artificial Sequence: Synthetic oligonucleotide
  Antisense strand to SEQ ID NO: 1257652
uuuagggacagacaguaaa

SEQ ID NO: 1257654 - RNA, 19 nt, Artificial Sequence
  Description of Artificial Sequence: Synthetic oligonucleotide
  Sense strand starting at position 2268 of SEQ ID NO: 1241245
acugucugucccuaaagau

SEQ ID NO: 1257655 - RNA, 19 nt, Artificial Sequence
  Description of Artificial Sequence: Synthetic oligonucleotide
  Antisense strand to SEQ ID NO: 1257654
aucuuuagggacagacagu

SEQ ID NO: 1257656 - RNA, 19 nt, Artificial Sequence
  Description of Artificial Sequence: Synthetic oligonucleotide
  Sense strand starting at position 2499 of SEQ ID NO: 1241245
cuuuauccggucugacaau

SEQ ID NO: 1257657 - RNA, 19 nt, Artificial Sequence
  Description of Artificial Sequence: Synthetic oligonucleotide
  Antisense strand to SEQ ID NO: 1257656
auugucagaccggauaaag

SEQ ID NO: 1257658 - RNA, 19 nt, Artificial Sequence
  Description of Artificial Sequence: Synthetic oligonucleotide
  Sense strand starting at position 2555 of SEQ ID NO: 1241245
gcagacguucccuaauaca

SEQ ID NO: 1257659 - RNA, 19 nt, Artificial Sequence
  Description of Artificial Sequence: Synthetic oligonucleotide
  Antisense strand to SEQ ID NO: 1257658
uguauuagggaacgucugc

SEQ ID NO: 1257660 - RNA, 19 nt, Artificial Sequence
  Description of Artificial Sequence: Synthetic oligonucleotide
  Sense strand starting at position 2745 of SEQ ID NO: 1241245
gcggguuuaugaguaacaa

SEQ ID NO: 1257661 - RNA, 19 nt, Artificial Sequence
  Description of Artificial Sequence: Synthetic oligonucleotide
  Antisense strand to SEQ ID NO: 1257660
uuguuacucauaaacccgc

SEQ ID NO: 1257662 - RNA, 19 nt, Artificial Sequence
  Description of Artificial Sequence: Synthetic oligonucleotide
  Sense strand starting at position 2746 of SEQ ID NO: 1241245
cggguuuaugaguaacaag

SEQ ID NO: 1257663 - RNA, 19 nt, Artificial Sequence
  Description of Artificial Sequence: Synthetic oligonucleotide
  Antisense strand to SEQ ID NO: 1257662
cuuguuacucauaaacccg

SEQ ID NO: 1257664 - RNA, 19 nt, Artificial Sequence
  Description of Artificial Sequence: Synthetic oligonucleotide
  Sense strand starting at position 2820 of SEQ ID NO: 1241245
ggacguguggguugaauga

SEQ ID NO: 1257665 - RNA, 19 nt, Artificial Sequence
  Description of Artificial Sequence: Synthetic oligonucleotide
  Antisense strand to SEQ ID NO: 1257664
ucauucaacccacacgucc

SEQ ID NO: 1257666 - RNA, 19 nt, Artificial Sequence
  Description of Artificial Sequence: Synthetic oligonucleotide
  Sense strand starting at position 2894 of SEQ ID NO: 1241245
gccugcacuuccuugggaa

SEQ ID NO: 1257667 - RNA, 19 nt, Artificial Sequence
  Description of Artificial Sequence: Synthetic oligonucleotide
  Antisense strand to SEQ ID NO: 1257666
uucccaaggaagugcaggc

SEQ ID NO: 1257668 - RNA, 19 nt, Artificial Sequence
  Description of Artificial Sequence: Synthetic oligonucleotide
  Sense strand starting at position 2895 of SEQ ID NO: 1241245
ccugcacuuccuugggaaa

SEQ ID NO: 1257669 - RNA, 19 nt, Artificial Sequence
  Description of Artificial Sequence: Synthetic oligonucleotide
  Antisense strand to SEQ ID NO: 1257668
uuucccaaggaagugcagg

SEQ ID NO: 1257670 - RNA, 19 nt, Artificial Sequence
  Description of Artificial Sequence: Synthetic oligonucleotide
  Sense strand starting at position 3111 of SEQ ID NO: 1241245
ccugaauguuugguuuaau

SEQ ID NO: 1257671 - RNA, 19 nt, Artificial Sequence
  Description of Artificial Sequence: Synthetic oligonucleotide
  Antisense strand to SEQ ID NO: 1257670
auuaaaccaaacauucagg

SEQ ID NO: 1257672 - RNA, 19 nt, Artificial Sequence
  Description of Artificial Sequence: Synthetic oligonucleotide
  Sense strand starting at position 3112 of SEQ ID NO: 1241245
cugaauguuugguuuaaug

SEQ ID NO: 1257673 - RNA, 19 nt, Artificial Sequence
  Description of Artificial Sequence: Synthetic oligonucleotide
  Antisense strand to SEQ ID NO: 1257672
cauuaaaccaaacauucag

SEQ ID NO: 1257674 - RNA, 19 nt, Artificial Sequence
  Description of Artificial Sequence: Synthetic oligonucleotide
  Sense strand starting at position 3114 of SEQ ID NO: 1241245
gaauguuugguuuaauguu

SEQ ID NO: 1257675 - RNA, 19 nt, Artificial Sequence
  Description of Artificial Sequence: Synthetic oligonucleotide
  Antisense strand to SEQ ID NO: 1257674
aacauuaaaccaaacauuc

SEQ ID NO: 1257676 - RNA, 19 nt, Artificial Sequence
  Description of Artificial Sequence: Synthetic oligonucleotide
  Sense strand starting at position 3138 of SEQ ID NO: 1241245
guuaacggucuugaaauua

SEQ ID NO: 1257677 - RNA, 19 nt, Artificial Sequence
  Description of Artificial Sequence: Synthetic oligonucleotide
  Antisense strand to SEQ ID NO: 1257676
uaauuucaagaccguuaac

SEQ ID NO: 1257678 - RNA, 19 nt, Artificial Sequence
  Description of Artificial Sequence: Synthetic oligonucleotide
  Sense strand starting at position 3143 of SEQ ID NO: 1241245
cggucuugaaauuauuagu

SEQ ID NO: 1257679 - RNA, 19 nt, Artificial Sequence
  Description of Artificial Sequence: Synthetic oligonucleotide
  Antisense strand to SEQ ID NO: 1257678
acuaauaauuucaagaccg

SEQ ID NO: 1257680 - RNA, 19 nt, Artificial Sequence
  Description of Artificial Sequence: Synthetic oligonucleotide
  Sense strand starting at position 3168 of SEQ ID NO: 1241245
aaagcaagugccugguauu

SEQ ID NO: 1257681 - RNA, 19 nt, Artificial Sequence
  Description of Artificial Sequence: Synthetic oligonucleotide
  Antisense strand to SEQ ID NO: 1257680
aauaccaggcacuugcuuu

SEQ ID NO: 1257682 - RNA, 19 nt, Artificial Sequence
  Description of Artificial Sequence: Synthetic oligonucleotide
  Sense strand starting at position 3169 of SEQ ID NO: 1241245
aagcaagugccugguauuu

SEQ ID NO: 1257683 - RNA, 19 nt, Artificial Sequence
  Description of Artificial Sequence: Synthetic oligonucleotide
  Antisense strand to SEQ ID NO: 1257682
aaauaccaggcacuugcuu

SEQ ID NO: 1257684 - RNA, 19 nt, Artificial Sequence
  Description of Artificial Sequence: Synthetic oligonucleotide
  Sense strand starting at position 3200 of SEQ ID NO: 1241245
cggcuccacugauuaugua

SEQ ID NO: 1257685 - RNA, 19 nt, Artificial Sequence
  Description of Artificial Sequence: Synthetic oligonucleotide
  Antisense strand to SEQ ID NO: 1257684
uacauaaucaguggagccg

SEQ ID NO: 1257686 - RNA, 19 nt, Artificial Sequence
  Description of Artificial Sequence: Synthetic oligonucleotide
  Sense strand starting at position 3256 of SEQ ID NO: 1241245
acuuacuaucugugcuuua

SEQ ID NO: 1257687 - RNA, 19 nt, Artificial Sequence
  Description of Artificial Sequence: Synthetic oligonucleotide
  Antisense strand to SEQ ID NO: 1257686
uaaagcacagauaguaagu

SEQ ID NO: 1257688 - RNA, 19 nt, Artificial Sequence
  Description of Artificial Sequence: Synthetic oligonucleotide
  Sense strand starting at position 3360 of SEQ ID NO: 1241245
ugcguucucccagaaugug

SEQ ID NO: 1257689 - RNA, 19 nt, Artificial Sequence
  Description of Artificial Sequence: Synthetic oligonucleotide
  Antisense strand to SEQ ID NO: 1257688
cacauucugggagaacgca

SEQ ID NO: 1257690 - RNA, 19 nt, Artificial Sequence
  Description of Artificial Sequence: Synthetic oligonucleotide
  Sense strand starting at position 3369 of SEQ ID NO: 1241245
ccagaaugugacggaauca

SEQ ID NO: 1257691 - RNA, 19 nt, Artificial Sequence
  Description of Artificial Sequence: Synthetic oligonucleotide
  Antisense strand to SEQ ID NO: 1257690
ugauuccgucacauucugg

SEQ ID NO: 1257692 - RNA, 19 nt, Artificial Sequence
  Description of Artificial Sequence: Synthetic oligonucleotide
  Sense strand starting at position 34 of SEQ ID NO: 1241246
ggagaaguuucauccuagg

SEQ ID NO: 1257693 - RNA, 19 nt, Artificial Sequence
  Description of Artificial Sequence: Synthetic oligonucleotide
  Antisense strand to SEQ ID NO: 1257692
ccuaggaugaaacuucucc

SEQ ID NO: 1257694 - RNA, 19 nt, Artificial Sequence
  Description of Artificial Sequence: Synthetic oligonucleotide
  Sense strand starting at position 427 of SEQ ID NO: 1241246
cagagucaauggcuaucua

SEQ ID NO: 1257695 - RNA, 19 nt, Artificial Sequence
  Description of Artificial Sequence: Synthetic oligonucleotide
  Antisense strand to SEQ ID NO: 1257694
uagauagccauugacucug

SEQ ID NO: 1257696 - RNA, 19 nt, Artificial Sequence
  Description of Artificial Sequence: Synthetic oligonucleotide
  Sense strand starting at position 474 of SEQ ID NO: 1241246
agguuugaggcugacuaga

SEQ ID NO: 1257697 - RNA, 19 nt, Artificial Sequence
  Description of Artificial Sequence: Synthetic oligonucleotide
  Antisense strand to SEQ ID NO: 1257696
ucuagucagccucaaaccu

SEQ ID NO: 1257698 - RNA, 19 nt, Artificial Sequence
  Description of Artificial Sequence: Synthetic oligonucleotide
  Sense strand starting at position 487 of SEQ ID NO: 1241246
acuagaccuuggcuguuau

SEQ ID NO: 1257699 - RNA, 19 nt, Artificial Sequence
  Description of Artificial Sequence: Synthetic oligonucleotide
  Antisense strand to SEQ ID NO: 1257698
auaacagccaaggucuagu

SEQ ID NO: 1257700 - RNA, 19 nt, Artificial Sequence
  Description of Artificial Sequence: Synthetic oligonucleotide
  Sense strand starting at position 488 of SEQ ID NO: 1241246
cuagaccuuggcuguuauu

SEQ ID NO: 1257701 - RNA, 19 nt, Artificial Sequence
  Description of Artificial Sequence: Synthetic oligonucleotide
  Antisense strand to SEQ ID NO: 1257700
aauaacagccaaggucuag

SEQ ID NO: 1257702 - RNA, 19 nt, Artificial Sequence
  Description of Artificial Sequence: Synthetic oligonucleotide
  Sense strand starting at position 723 of SEQ ID NO: 1241246
gagccucugccugagaagu

SEQ ID NO: 1257703 - RNA, 19 nt, Artificial Sequence
  Description of Artificial Sequence: Synthetic oligonucleotide
  Antisense strand to SEQ ID NO: 1257702
acuucucaggcagaggcuc

SEQ ID NO: 1257704 - RNA, 19 nt, Artificial Sequence
  Description of Artificial Sequence: Synthetic oligonucleotide
  Sense strand starting at position 731 of SEQ ID NO: 1241246
gccugagaaguccaccaca

SEQ ID NO: 1257705 - RNA, 19 nt, Artificial Sequence
  Description of Artificial Sequence: Synthetic oligonucleotide
  Antisense strand to SEQ ID NO: 1257704
ugugguggacuucucaggc

SEQ ID NO: 1257706 - RNA, 19 nt, Artificial Sequence
  Description of Artificial Sequence: Synthetic oligonucleotide
  Sense strand starting at position 846 of SEQ ID NO: 1241246
uggugugcacuugaucaca

SEQ ID NO: 1257707 - RNA, 19 nt, Artificial Sequence
  Description of Artificial Sequence: Synthetic oligonucleotide
  Antisense strand to SEQ ID NO: 1257706
ugugaucaagugcacacca

SEQ ID NO: 1257708 - RNA, 19 nt, Artificial Sequence
  Description of Artificial Sequence: Synthetic oligonucleotide
  Sense strand starting at position 906 of SEQ ID NO: 1241246
cccugucuaugucuacuaa

SEQ ID NO: 1257709 - RNA, 19 nt, Artificial Sequence
  Description of Artificial Sequence: Synthetic oligonucleotide
  Antisense strand to SEQ ID NO: 1257708
uuaguagacauagacaggg

SEQ ID NO: 1257710 - RNA, 19 nt, Artificial Sequence
  Description of Artificial Sequence: Synthetic oligonucleotide
  Sense strand starting at position 907 of SEQ ID NO: 1241246
ccugucuaugucuacuaaa

SEQ ID NO: 1257711 - RNA, 19 nt, Artificial Sequence
  Description of Artificial Sequence: Synthetic oligonucleotide
  Antisense strand to SEQ ID NO: 1257710
uuuaguagacauagacagg

SEQ ID NO: 1257712 - RNA, 19 nt, Artificial Sequence
  Description of Artificial Sequence: Synthetic oligonucleotide
  Sense strand starting at position 953 of SEQ ID NO: 1241246
auacaauauucugaaggga

SEQ ID NO: 1257713 - RNA, 19 nt, Artificial Sequence
  Description of Artificial Sequence: Synthetic oligonucleotide
  Antisense strand to SEQ ID NO: 1257712
ucccuucagaauauuguau

SEQ ID NO: 1257714 - RNA, 19 nt, Artificial Sequence
  Description of Artificial Sequence: Synthetic oligonucleotide
  Sense strand starting at position 1066 of SEQ ID NO: 1241246
aggcauucuuuccucaaga

SEQ ID NO: 1257715 - RNA, 19 nt, Artificial Sequence
  Description of Artificial Sequence: Synthetic oligonucleotide
  Antisense strand to SEQ ID NO: 1257714
ucuugaggaaagaaugccu

SEQ ID NO: 1257716 - RNA, 19 nt, Artificial Sequence
  Description of Artificial Sequence: Synthetic oligonucleotide
  Sense strand starting at position 1067 of SEQ ID NO: 1241246
ggcauucuuuccucaagaa

SEQ ID NO: 1257717 - RNA, 19 nt, Artificial Sequence
  Description of Artificial Sequence: Synthetic oligonucleotide
  Antisense strand to SEQ ID NO: 1257716
uucuugaggaaagaaugcc

SEQ ID NO: 1257718 - RNA, 19 nt, Artificial Sequence
  Description of Artificial Sequence: Synthetic oligonucleotide
  Sense strand starting at position 1138 of SEQ ID NO: 1241246
cucauaucaugugucaacu

SEQ ID NO: 1257719 - RNA, 19 nt, Artificial Sequence
  Description of Artificial Sequence: Synthetic oligonucleotide
  Antisense strand to SEQ ID NO: 1257718
aguugacacaugauaugag

SEQ ID NO: 1257720 - RNA, 19 nt, Artificial Sequence
  Description of Artificial Sequence: Synthetic oligonucleotide
  Sense strand starting at position 1272 of SEQ ID NO: 1241246
uguguagucacagagacag

SEQ ID NO: 1257721 - RNA, 19 nt, Artificial Sequence
  Description of Artificial Sequence: Synthetic oligonucleotide
  Antisense strand to SEQ ID NO: 1257720
cugucucugugacuacaca

SEQ ID NO: 1257722 - RNA, 19 nt, Artificial Sequence
  Description of Artificial Sequence: Synthetic oligonucleotide
  Sense strand starting at position 1284 of SEQ ID NO: 1241246
gagacaggcucccuugaau

SEQ ID NO: 1257723 - RNA, 19 nt, Artificial Sequence
  Description of Artificial Sequence: Synthetic oligonucleotide
  Antisense strand to SEQ ID NO: 1257722
auucaagggagccugucuc

SEQ ID NO: 1257724 - RNA, 19 nt, Artificial Sequence
  Description of Artificial Sequence: Synthetic oligonucleotide
  Sense strand starting at position 1336 of SEQ ID NO: 1241246
gacccucccuagguaagaa

SEQ ID NO: 1257725 - RNA, 19 nt, Artificial Sequence
  Description of Artificial Sequence: Synthetic oligonucleotide
  Antisense strand to SEQ ID NO: 1257724
uucuuaccuagggaggguc

SEQ ID NO: 1257726 - RNA, 19 nt, Artificial Sequence
  Description of Artificial Sequence: Synthetic oligonucleotide
  Sense strand starting at position 1356 of SEQ ID NO: 1241246
cacucuuacuggguaugga

SEQ ID NO: 1257727 - RNA, 19 nt, Artificial Sequence
  Description of Artificial Sequence: Synthetic oligonucleotide
  Antisense strand to SEQ ID NO: 1257726
uccauacccaguaagagug

SEQ ID NO: 1257728 - RNA, 19 nt, Artificial Sequence
  Description of Artificial Sequence: Synthetic oligonucleotide
  Sense strand starting at position 1424 of SEQ ID NO: 1241246
aacagcuguccugagcgaa

SEQ ID NO: 1257729 - RNA, 19 nt, Artificial Sequence
  Description of Artificial Sequence: Synthetic oligonucleotide
  Antisense strand to SEQ ID NO: 1257728
uucgcucaggacagcuguu

SEQ ID NO: 1257730 - RNA, 19 nt, Artificial Sequence
  Description of Artificial Sequence: Synthetic oligonucleotide
  Sense strand starting at position 1483 of SEQ ID NO: 1241246
ggaucaaggcacuguggua

SEQ ID NO: 1257731 - RNA, 19 nt, Artificial Sequence
  Description of Artificial Sequence: Synthetic oligonucleotide
  Antisense strand to SEQ ID NO: 1257730
uaccacagugccuugaucc

SEQ ID NO: 1257732 - RNA, 19 nt, Artificial Sequence
  Description of Artificial Sequence: Synthetic oligonucleotide
  Sense strand starting at position 1528 of SEQ ID NO: 1241246
guaaguuaccugcggagga

SEQ ID NO: 1257733 - RNA, 19 nt, Artificial Sequence
  Description of Artificial Sequence: Synthetic oligonucleotide
  Antisense strand to SEQ ID NO: 1257732
uccuccgcagguaacuuac

SEQ ID NO: 1257734 - RNA, 19 nt, Artificial Sequence
  Description of Artificial Sequence: Synthetic oligonucleotide
  Sense strand starting at position 2739 of SEQ ID NO: 1241246
ucgcuaccgagagguauuu

SEQ ID NO: 1257735 - RNA, 19 nt, Artificial Sequence
  Description of Artificial Sequence: Synthetic oligonucleotide
  Antisense strand to SEQ ID NO: 1257734
aaauaccucucgguagcga

SEQ ID NO: 1257736 - RNA, 19 nt, Artificial Sequence
  Description of Artificial Sequence: Synthetic oligonucleotide
  Sense strand starting at position 2773 of SEQ ID NO: 1241246
uuuacugucugucccuaaa

SEQ ID NO: 1257737 - RNA, 19 nt, Artificial Sequence
  Description of Artificial Sequence: Synthetic oligonucleotide
  Antisense strand to SEQ ID NO: 1257736
uuuagggacagacaguaaa

SEQ ID NO: 1257738 - RNA, 19 nt, Artificial Sequence
  Description of Artificial Sequence: Synthetic oligonucleotide
  Sense strand starting at position 2776 of SEQ ID NO: 1241246
acugucugucccuaaagau

SEQ ID NO: 1257739 - RNA, 19 nt, Artificial Sequence
  Description of Artificial Sequence: Synthetic oligonucleotide
  Antisense strand to SEQ ID NO: 1257738
aucuuuagggacagacagu

SEQ ID NO: 1257740 - RNA, 19 nt, Artificial Sequence
  Description of Artificial Sequence: Synthetic oligonucleotide
  Sense strand starting at position 3007 of SEQ ID NO: 1241246
cuuuauccggucugacaau

SEQ ID NO: 1257741 - RNA, 19 nt, Artificial Sequence
  Description of Artificial Sequence: Synthetic oligonucleotide
  Antisense strand to SEQ ID NO: 1257740
auugucagaccggauaaag

SEQ ID NO: 1257742 - RNA, 19 nt, Artificial Sequence
  Description of Artificial Sequence: Synthetic oligonucleotide
  Sense strand starting at position 3063 of SEQ ID NO: 1241246
gcagacguucccuaauaca

SEQ ID NO: 1257743 - RNA, 19 nt, Artificial Sequence
  Description of Artificial Sequence: Synthetic oligonucleotide
  Antisense strand to SEQ ID NO: 1257742
uguauuagggaacgucugc

SEQ ID NO: 1257744 - RNA, 19 nt, Artificial Sequence
  Description of Artificial Sequence: Synthetic oligonucleotide
  Sense strand starting at position 3253 of SEQ ID NO: 1241246
gcggguuuaugaguaacaa

SEQ ID NO: 1257745 - RNA, 19 nt, Artificial Sequence
  Description of Artificial Sequence: Synthetic oligonucleotide
  Antisense strand to SEQ ID NO: 1257744
uuguuacucauaaacccgc

SEQ ID NO: 1257746 - RNA, 19 nt, Artificial Sequence
  Description of Artificial Sequence: Synthetic oligonucleotide
  Sense strand starting at position 3254 of SEQ ID NO: 1241246
cggguuuaugaguaacaag

SEQ ID NO: 1257747 - RNA, 19 nt, Artificial Sequence
  Description of Artificial Sequence: Synthetic oligonucleotide
  Antisense strand to SEQ ID NO: 1257746
cuuguuacucauaaacccg

SEQ ID NO: 1257748 - RNA, 19 nt, Artificial Sequence
  Description of Artificial Sequence: Synthetic oligonucleotide
  Sense strand starting at position 3328 of SEQ ID NO: 1241246
ggacguguggguugaauga

SEQ ID NO: 1257749 - RNA, 19 nt, Artificial Sequence
  Description of Artificial Sequence: Synthetic oligonucleotide
  Antisense strand to SEQ ID NO: 1257748
ucauucaacccacacgucc

SEQ ID NO: 1257750 - RNA, 19 nt, Artificial Sequence
  Description of Artificial Sequence: Synthetic oligonucleotide
  Sense strand starting at position 3402 of SEQ ID NO: 1241246
gccugcacuuccuugggaa

SEQ ID NO: 1257751 - RNA, 19 nt, Artificial Sequence
  Description of Artificial Sequence: Synthetic oligonucleotide
  Antisense strand to SEQ ID NO: 1257750
uucccaaggaagugcaggc

SEQ ID NO: 1257752 - RNA, 19 nt, Artificial Sequence
  Description of Artificial Sequence: Synthetic oligonucleotide
  Sense strand starting at position 3403 of SEQ ID NO: 1241246
ccugcacuuccuugggaaa

SEQ ID NO: 1257753 - RNA, 19 nt, Artificial Sequence
  Description of Artificial Sequence: Synthetic oligonucleotide
  Antisense strand to SEQ ID NO: 1257752
uuucccaaggaagugcagg

SEQ ID NO: 1257754 - RNA, 19 nt, Artificial Sequence
  Description of Artificial Sequence: Synthetic oligonucleotide
  Sense strand starting at position 3619 of SEQ ID NO: 1241246
ccugaauguuugguuuaau

SEQ ID NO: 1257755 - RNA, 19 nt, Artificial Sequence
  Description of Artificial Sequence: Synthetic oligonucleotide
  Antisense strand to SEQ ID NO: 1257754
auuaaaccaaacauucagg

SEQ ID NO: 1257756 - RNA, 19 nt, Artificial Sequence
  Description of Artificial Sequence: Synthetic oligonucleotide
  Sense strand starting at position 3620 of SEQ ID NO: 1241246
cugaauguuugguuuaaug

SEQ ID NO: 1257757 - RNA, 19 nt, Artificial Sequence
  Description of Artificial Sequence: Synthetic oligonucleotide
  Antisense strand to SEQ ID NO: 1257756
cauuaaaccaaacauucag

SEQ ID NO: 1257758 - RNA, 19 nt, Artificial Sequence
  Description of Artificial Sequence: Synthetic oligonucleotide
  Sense strand starting at position 3622 of SEQ ID NO: 1241246
gaauguuugguuuaauguu

SEQ ID NO: 1257759 - RNA, 19 nt, Artificial Sequence
  Description of Artificial Sequence: Synthetic oligonucleotide
  Antisense strand to SEQ ID NO: 1257758
aacauuaaaccaaacauuc

SEQ ID NO: 1257760 - RNA, 19 nt, Artificial Sequence
  Description of Artificial Sequence: Synthetic oligonucleotide
  Sense strand starting at position 3646 of SEQ ID NO: 1241246
guuaacggucuugaaauua

SEQ ID NO: 1257761 - RNA, 19 nt, Artificial Sequence
  Description of Artificial Sequence: Synthetic oligonucleotide
  Antisense strand to SEQ ID NO: 1257760
uaauuucaagaccguuaac

SEQ ID NO: 1257762 - RNA, 19 nt, Artificial Sequence
  Description of Artificial Sequence: Synthetic oligonucleotide
  Sense strand starting at position 3651 of SEQ ID NO: 1241246
cggucuugaaauuauuagu

SEQ ID NO: 1257763 - RNA, 19 nt, Artificial Sequence
  Description of Artificial Sequence: Synthetic oligonucleotide
  Antisense strand to SEQ ID NO: 1257762
acuaauaauuucaagaccg

SEQ ID NO: 1257764 - RNA, 19 nt, Artificial Sequence
  Description of Artificial Sequence: Synthetic oligonucleotide
  Sense strand starting at position 3677 of SEQ ID NO: 1241246
aagcaagugccugguauuu

SEQ ID NO: 1257765 - RNA, 19 nt, Artificial Sequence
  Description of Artificial Sequence: Synthetic oligonucleotide
  Antisense strand to SEQ ID NO: 1257764
aaauaccaggcacuugcuu

SEQ ID NO: 1257766 - RNA, 19 nt, Artificial Sequence
  Description of Artificial Sequence: Synthetic oligonucleotide
  Sense strand starting at position 3764 of SEQ ID NO: 1241246
acuuacuaucugugcuuua

SEQ ID NO: 1257767 - RNA, 19 nt, Artificial Sequence
  Description of Artificial Sequence: Synthetic oligonucleotide
  Antisense strand to SEQ ID NO: 1257766
uaaagcacagauaguaagu

SEQ ID NO: 1257768 - RNA, 19 nt, Artificial Sequence
  Description of Artificial Sequence: Synthetic oligonucleotide
  Sense strand starting at position 3868 of SEQ ID NO: 1241246
ugcguucucccagaaugug

SEQ ID NO: 1257769 - RNA, 19 nt, Artificial Sequence
  Description of Artificial Sequence: Synthetic oligonucleotide
  Antisense strand to SEQ ID NO: 1257768
cacauucugggagaacgca

SEQ ID NO: 1257770 - RNA, 19 nt, Artificial Sequence
  Description of Artificial Sequence: Synthetic oligonucleotide
  Sense strand starting at position 3877 of SEQ ID NO: 1241246
ccagaaugugacggaauca

SEQ ID NO: 1257771 - RNA, 19 nt, Artificial Sequence
  Description of Artificial Sequence: Synthetic oligonucleotide
  Antisense strand to SEQ ID NO: 1257770
ugauuccgucacauucugg

SEQ ID NO: 1257772 - RNA, 19 nt, Artificial Sequence
  Description of Artificial Sequence: Synthetic oligonucleotide
  Sense strand starting at position 106 of SEQ ID NO: 1241247
uagugaaauuccguaucaa

SEQ ID NO: 1257773 - RNA, 19 nt, Artificial Sequence
  Description of Artificial Sequence: Synthetic oligonucleotide
  Antisense strand to SEQ ID NO: 1257772
uugauacggaauuucacua

SEQ ID NO: 1257774 - RNA, 19 nt, Artificial Sequence
  Description of Artificial Sequence: Synthetic oligonucleotide
  Sense strand starting at position 107 of SEQ ID NO: 1241247
agugaaauuccguaucaaa

SEQ ID NO: 1257775 - RNA, 19 nt, Artificial Sequence
  Description of Artificial Sequence: Synthetic oligonucleotide
  Antisense strand to SEQ ID NO: 1257774
uuugauacggaauuucacu

SEQ ID NO: 1257776 - RNA, 19 nt, Artificial Sequence
  Description of Artificial Sequence: Synthetic oligonucleotide
  Sense strand starting at position 167 of SEQ ID NO: 1241247
gcgggcuguaaugugcaaa

SEQ ID NO: 1257777 - RNA, 19 nt, Artificial Sequence
  Description of Artificial Sequence: Synthetic oligonucleotide
  Antisense strand to SEQ ID NO: 1257776
uuugcacauuacagcccgc

SEQ ID NO: 1257778 - RNA, 19 nt, Artificial Sequence
  Description of Artificial Sequence: Synthetic oligonucleotide
  Sense strand starting at position 194 of SEQ ID NO: 1241247
gccacuggucuguaaagcu

SEQ ID NO: 1257779 - RNA, 19 nt, Artificial Sequence
  Description of Artificial Sequence: Synthetic oligonucleotide
  Antisense strand to SEQ ID NO: 1257778
agcuuuacagaccaguggc

SEQ ID NO: 1257780 - RNA, 19 nt, Artificial Sequence
  Description of Artificial Sequence: Synthetic oligonucleotide
  Sense strand starting at position 201 of SEQ ID NO: 1241247
gucuguaaagcugaauaca

SEQ ID NO: 1257781 - RNA, 19 nt, Artificial Sequence
  Description of Artificial Sequence: Synthetic oligonucleotide
  Antisense strand to SEQ ID NO: 1257780
uguauucagcuuuacagac

SEQ ID NO: 1257782 - RNA, 19 nt, Artificial Sequence
  Description of Artificial Sequence: Synthetic oligonucleotide
  Sense strand starting at position 596 of SEQ ID NO: 1241247
cacccagcguaaguuaaau

SEQ ID NO: 1257783 - RNA, 19 nt, Artificial Sequence
  Description of Artificial Sequence: Synthetic oligonucleotide
  Antisense strand to SEQ ID NO: 1257782
auuuaacuuacgcugggug

SEQ ID NO: 1257784 - RNA, 19 nt, Artificial Sequence
  Description of Artificial Sequence: Synthetic oligonucleotide
  Sense strand starting at position 998 of SEQ ID NO: 1241247
ccgcgacucuaauuuccau

SEQ ID NO: 1257785 - RNA, 19 nt, Artificial Sequence
  Description of Artificial Sequence: Synthetic oligonucleotide
  Antisense strand to SEQ ID NO: 1257784
auggaaauuagagucgcgg

SEQ ID NO: 1257786 - RNA, 19 nt, Artificial Sequence
  Description of Artificial Sequence: Synthetic oligonucleotide
  Sense strand starting at position 1046 of SEQ ID NO: 1241247
ggaauuguuuccucuagga

SEQ ID NO: 1257787 - RNA, 19 nt, Artificial Sequence
  Description of Artificial Sequence: Synthetic oligonucleotide
  Antisense strand to SEQ ID NO: 1257786
uccuagaggaaacaauucc

SEQ ID NO: 1257788 - RNA, 19 nt, Artificial Sequence
  Description of Artificial Sequence: Synthetic oligonucleotide
  Sense strand starting at position 1125 of SEQ ID NO: 1241247
guagaacaccauggugaaa

SEQ ID NO: 1257789 - RNA, 19 nt, Artificial Sequence
  Description of Artificial Sequence: Synthetic oligonucleotide
  Antisense strand to SEQ ID NO: 1257788
uuucaccaugguguucuac

SEQ ID NO: 1257790 - RNA, 19 nt, Artificial Sequence
  Description of Artificial Sequence: Synthetic oligonucleotide
  Sense strand starting at position 1137 of SEQ ID NO: 1241247
ggugaaaggcgucaugguu

SEQ ID NO: 1257791 - RNA, 19 nt, Artificial Sequence
  Description of Artificial Sequence: Synthetic oligonucleotide
  Antisense strand to SEQ ID NO: 1257790
aaccaugacgccuuucacc

SEQ ID NO: 1257792 - RNA, 19 nt, Artificial Sequence
  Description of Artificial Sequence: Synthetic oligonucleotide
  Sense strand starting at position 1183 of SEQ ID NO: 1241247
cguggcuuucucgcuaacu

SEQ ID NO: 1257793 - RNA, 19 nt, Artificial Sequence
  Description of Artificial Sequence: Synthetic oligonucleotide
  Antisense strand to SEQ ID NO: 1257792
aguuagcgagaaagccacg

SEQ ID NO: 1257794 - RNA, 19 nt, Artificial Sequence
  Description of Artificial Sequence: Synthetic oligonucleotide
  Sense strand starting at position 1185 of SEQ ID NO: 1241247
uggcuuucucgcuaacuca

SEQ ID NO: 1257795 - RNA, 19 nt, Artificial Sequence
  Description of Artificial Sequence: Synthetic oligonucleotide
  Antisense strand to SEQ ID NO: 1257794
ugaguuagcgagaaagcca

SEQ ID NO: 1257796 - RNA, 19 nt, Artificial Sequence
  Description of Artificial Sequence: Synthetic oligonucleotide
  Sense strand starting at position 1389 of SEQ ID NO: 1241247
accuguuaugcugaccuga

SEQ ID NO: 1257797 - RNA, 19 nt, Artificial Sequence
  Description of Artificial Sequence: Synthetic oligonucleotide
  Antisense strand to SEQ ID NO: 1257796
ucaggucagcauaacaggu

SEQ ID NO: 1257798 - RNA, 19 nt, Artificial Sequence
  Description of Artificial Sequence: Synthetic oligonucleotide
  Sense strand starting at position 1391 of SEQ ID NO: 1241247
cuguuaugcugaccugaac

SEQ ID NO: 1257799 - RNA, 19 nt, Artificial Sequence
  Description of Artificial Sequence: Synthetic oligonucleotide
  Antisense strand to SEQ ID NO: 1257798
guucaggucagcauaacag

SEQ ID NO: 1257800 - RNA, 19 nt, Artificial Sequence
  Description of Artificial Sequence: Synthetic oligonucleotide
  Sense strand starting at position 1394 of SEQ ID NO: 1241247
uuaugcugaccugaacauu

SEQ ID NO: 1257801 - RNA, 19 nt, Artificial Sequence
  Description of Artificial Sequence: Synthetic oligonucleotide
  Antisense strand to SEQ ID NO: 1257800
aauguucaggucagcauaa

SEQ ID NO: 1257802 - RNA, 19 nt, Artificial Sequence
  Description of Artificial Sequence: Synthetic oligonucleotide
  Sense strand starting at position 1487 of SEQ ID NO: 1241247
cagagaagcgcuuagagaa

SEQ ID NO: 1257803 - RNA, 19 nt, Artificial Sequence
  Description of Artificial Sequence: Synthetic oligonucleotide
  Antisense strand to SEQ ID NO: 1257802
uucucuaagcgcuucucug

SEQ ID NO: 1257804 - RNA, 19 nt, Artificial Sequence
  Description of Artificial Sequence: Synthetic oligonucleotide
  Sense strand starting at position 2262 of SEQ ID NO: 1241247
acagaaguaacgugauguu

SEQ ID NO: 1257805 - RNA, 19 nt, Artificial Sequence
  Description of Artificial Sequence: Synthetic oligonucleotide
  Antisense strand to SEQ ID NO: 1257804
aacaucacguuacuucugu

SEQ ID NO: 1257806 - RNA, 19 nt, Artificial Sequence
  Description of Artificial Sequence: Synthetic oligonucleotide
  Sense strand starting at position 2389 of SEQ ID NO: 1241247
cuccguguuggcuccagua

SEQ ID NO: 1257807 - RNA, 19 nt, Artificial Sequence
  Description of Artificial Sequence: Synthetic oligonucleotide
  Antisense strand to SEQ ID NO: 1257806
uacuggagccaacacggag

SEQ ID NO: 1257808 - RNA, 19 nt, Artificial Sequence
  Description of Artificial Sequence: Synthetic oligonucleotide
  Sense strand starting at position 2453 of SEQ ID NO: 1241247
ugccuugauuucuucuguu

SEQ ID NO: 1257809 - RNA, 19 nt, Artificial Sequence
  Description of Artificial Sequence: Synthetic oligonucleotide
  Antisense strand to SEQ ID NO: 1257808
aacagaagaaaucaaggca

SEQ ID NO: 1257810 - RNA, 19 nt, Artificial Sequence
  Description of Artificial Sequence: Synthetic oligonucleotide
  Sense strand starting at position 2459 of SEQ ID NO: 1241247
gauuucuucuguugagaga

SEQ ID NO: 1257811 - RNA, 19 nt, Artificial Sequence
  Description of Artificial Sequence: Synthetic oligonucleotide
  Antisense strand to SEQ ID NO: 1257810
ucucucaacagaagaaauc

SEQ ID NO: 1257812 - RNA, 19 nt, Artificial Sequence
  Description of Artificial Sequence: Synthetic oligonucleotide
  Sense strand starting at position 2483 of SEQ ID NO: 1241247
ucggaucuaucauucucau

SEQ ID NO: 1257813 - RNA, 19 nt, Artificial Sequence
  Description of Artificial Sequence: Synthetic oligonucleotide
  Antisense strand to SEQ ID NO: 1257812
augagaaugauagauccga

SEQ ID NO: 1257814 - RNA, 19 nt, Artificial Sequence
  Description of Artificial Sequence: Synthetic oligonucleotide
  Sense strand starting at position 2498 of SEQ ID NO: 1241247
ucauguccucuccagcuua

SEQ ID NO: 1257815 - RNA, 19 nt, Artificial Sequence
  Description of Artificial Sequence: Synthetic oligonucleotide
  Antisense strand to SEQ ID NO: 1257814
uaagcuggagaggacauga

SEQ ID NO: 1257816 - RNA, 19 nt, Artificial Sequence
  Description of Artificial Sequence: Synthetic oligonucleotide
  Sense strand starting at position 2579 of SEQ ID NO: 1241247
ucagcugacgguuaugaga

SEQ ID NO: 1257817 - RNA, 19 nt, Artificial Sequence
  Description of Artificial Sequence: Synthetic oligonucleotide
  Antisense strand to SEQ ID NO: 1257816
ucucauaaccgucagcuga

SEQ ID NO: 1257818 - RNA, 19 nt, Artificial Sequence
  Description of Artificial Sequence: Synthetic oligonucleotide
  Sense strand starting at position 2592 of SEQ ID NO: 1241247
augagaucuuaugaaagga

SEQ ID NO: 1257819 - RNA, 19 nt, Artificial Sequence
  Description of Artificial Sequence: Synthetic oligonucleotide
  Antisense strand to SEQ ID NO: 1257818
uccuuucauaagaucucau

SEQ ID NO: 1257820 - RNA, 19 nt, Artificial Sequence
  Description of Artificial Sequence: Synthetic oligonucleotide
  Sense strand starting at position 2712 of SEQ ID NO: 1241247
gugucaugcggcuccguaa

SEQ ID NO: 1257821 - RNA, 19 nt, Artificial Sequence
  Description of Artificial Sequence: Synthetic oligonucleotide
  Antisense strand to SEQ ID NO: 1257820
uuacggagccgcaugacac

SEQ ID NO: 1257822 - RNA, 19 nt, Artificial Sequence
  Description of Artificial Sequence: Synthetic oligonucleotide
  Sense strand starting at position 2813 of SEQ ID NO: 1241247
gcucuuaaccaggaagcua

SEQ ID NO: 1257823 - RNA, 19 nt, Artificial Sequence
  Description of Artificial Sequence: Synthetic oligonucleotide
  Antisense strand to SEQ ID NO: 1257822
uagcuuccugguuaagagc

SEQ ID NO: 1257824 - RNA, 19 nt, Artificial Sequence
  Description of Artificial Sequence: Synthetic oligonucleotide
  Sense strand starting at position 2849 of SEQ ID NO: 1241247
ccuggcucucaggaguuua

SEQ ID NO: 1257825 - RNA, 19 nt, Artificial Sequence
  Description of Artificial Sequence: Synthetic oligonucleotide
  Antisense strand to SEQ ID NO: 1257824
uaaacuccugagagccagg

SEQ ID NO: 1257826 - RNA, 19 nt, Artificial Sequence
  Description of Artificial Sequence: Synthetic oligonucleotide
  Sense strand starting at position 3093 of SEQ ID NO: 1241247
cagcaauugccagggaaag

SEQ ID NO: 1257827 - RNA, 19 nt, Artificial Sequence
  Description of Artificial Sequence: Synthetic oligonucleotide
  Antisense strand to SEQ ID NO: 1257826
cuuucccuggcaauugcug

SEQ ID NO: 1257828 - RNA, 19 nt, Artificial Sequence
  Description of Artificial Sequence: Synthetic oligonucleotide
  Sense strand starting at position 3094 of SEQ ID NO: 1241247
agcaauugccagggaaaga

SEQ ID NO: 1257829 - RNA, 19 nt, Artificial Sequence
  Description of Artificial Sequence: Synthetic oligonucleotide
  Antisense strand to SEQ ID NO: 1257828
ucuuucccuggcaauugcu

SEQ ID NO: 1257830 - RNA, 19 nt, Artificial Sequence
  Description of Artificial Sequence: Synthetic oligonucleotide
  Sense strand starting at position 3438 of SEQ ID NO: 1241247
ggguucuagaguugggaag

SEQ ID NO: 1257831 - RNA, 19 nt, Artificial Sequence
  Description of Artificial Sequence: Synthetic oligonucleotide
  Antisense strand to SEQ ID NO: 1257830
cuucccaacucuagaaccc

SEQ ID NO: 1257832 - RNA, 19 nt, Artificial Sequence
  Description of Artificial Sequence: Synthetic oligonucleotide
  Sense strand starting at position 3439 of SEQ ID NO: 1241247
gguucuagaguugggaagu

SEQ ID NO: 1257833 - RNA, 19 nt, Artificial Sequence
  Description of Artificial Sequence: Synthetic oligonucleotide
  Antisense strand to SEQ ID NO: 1257832
acuucccaacucuagaacc

SEQ ID NO: 1257834 - RNA, 19 nt, Artificial Sequence
  Description of Artificial Sequence: Synthetic oligonucleotide
  Sense strand starting at position 3555 of SEQ ID NO: 1241247
cagcaacaguccuugugaa

SEQ ID NO: 1257835 - RNA, 19 nt, Artificial Sequence
  Description of Artificial Sequence: Synthetic oligonucleotide
  Antisense strand to SEQ ID NO: 1257834
uucacaaggacuguugcug

SEQ ID NO: 1257836 - RNA, 19 nt, Artificial Sequence
  Description of Artificial Sequence: Synthetic oligonucleotide
  Sense strand starting at position 3556 of SEQ ID NO: 1241247
agcaacaguccuugugaaa

SEQ ID NO: 1257837 - RNA, 19 nt, Artificial Sequence
  Description of Artificial Sequence: Synthetic oligonucleotide
  Antisense strand to SEQ ID NO: 1257836
uuucacaaggacuguugcu

SEQ ID NO: 1257838 - RNA, 19 nt, Artificial Sequence
  Description of Artificial Sequence: Synthetic oligonucleotide
  Sense strand starting at position 3647 of SEQ ID NO: 1241247
gggagaaucggccagacuu

SEQ ID NO: 1257839 - RNA, 19 nt, Artificial Sequence
  Description of Artificial Sequence: Synthetic oligonucleotide
  Antisense strand to SEQ ID NO: 1257838
aagucuggccgauucuccc

SEQ ID NO: 1257840 - RNA, 19 nt, Artificial Sequence
  Description of Artificial Sequence: Synthetic oligonucleotide
  Sense strand starting at position 3790 of SEQ ID NO: 1241247
ucuguugaauguccacaga

SEQ ID NO: 1257841 - RNA, 19 nt, Artificial Sequence
  Description of Artificial Sequence: Synthetic oligonucleotide
  Antisense strand to SEQ ID NO: 1257840
ucuguggacauucaacaga

SEQ ID NO: 1257842 - RNA, 19 nt, Artificial Sequence
  Description of Artificial Sequence: Synthetic oligonucleotide
  Sense strand starting at position 3816 of SEQ ID NO: 1241247
gugacgugggcaugagaua

SEQ ID NO: 1257843 - RNA, 19 nt, Artificial Sequence
  Description of Artificial Sequence: Synthetic oligonucleotide
  Antisense strand to SEQ ID NO: 1257842
uaucucaugcccacgucac

SEQ ID NO: 1257844 - RNA, 19 nt, Artificial Sequence
  Description of Artificial Sequence: Synthetic oligonucleotide
  Sense strand starting at position 3817 of SEQ ID NO: 1241247
ugacgugggcaugagauau

SEQ ID NO: 1257845 - RNA, 19 nt, Artificial Sequence
  Description of Artificial Sequence: Synthetic oligonucleotide
  Antisense strand to SEQ ID NO: 1257844
auaucucaugcccacguca

SEQ ID NO: 1257846 - RNA, 19 nt, Artificial Sequence
  Description of Artificial Sequence: Synthetic oligonucleotide
  Sense strand starting at position 3879 of SEQ ID NO: 1241247
guuugcaaaucagugaaca

SEQ ID NO: 1257847 - RNA, 19 nt, Artificial Sequence
  Description of Artificial Sequence: Synthetic oligonucleotide
  Antisense strand to SEQ ID NO: 1257846
uguucacugauuugcaaac

SEQ ID NO: 1257848 - RNA, 19 nt, Artificial Sequence
  Description of Artificial Sequence: Synthetic oligonucleotide
  Sense strand starting at position 3880 of SEQ ID NO: 1241247
uuugcaaaucagugaacaa

SEQ ID NO: 1257849 - RNA, 19 nt, Artificial Sequence
  Description of Artificial Sequence: Synthetic oligonucleotide
  Antisense strand to SEQ ID NO: 1257848
uuguucacugauuugcaaa

SEQ ID NO: 1257850 - RNA, 19 nt, Artificial Sequence
  Description of Artificial Sequence: Synthetic oligonucleotide
  Sense strand starting at position 3978 of SEQ ID NO: 1241247
ucuacugagaaagguugua

SEQ ID NO: 1257851 - RNA, 19 nt, Artificial Sequence
  Description of Artificial Sequence: Synthetic oligonucleotide
  Antisense strand to SEQ ID NO: 1257850
uacaaccuuucucaguaga

SEQ ID NO: 1257852 - RNA, 19 nt, Artificial Sequence
  Description of Artificial Sequence: Synthetic oligonucleotide
  Sense strand starting at position 203 of SEQ ID NO: 1241248
gacggaugcuuugccaaga

SEQ ID NO: 1257853 - RNA, 19 nt, Artificial Sequence
  Description of Artificial Sequence: Synthetic oligonucleotide
  Antisense strand to SEQ ID NO: 1257852
ucuuggcaaagcauccguc

SEQ ID NO: 1257854 - RNA, 19 nt, Artificial Sequence
  Description of Artificial Sequence: Synthetic oligonucleotide
  Sense strand starting at position 204 of SEQ ID NO: 1241248
acggaugcuuugccaagau

SEQ ID NO: 1257855 - RNA, 19 nt, Artificial Sequence
  Description of Artificial Sequence: Synthetic oligonucleotide
  Antisense strand to SEQ ID NO: 1257854
aucuuggcaaagcauccgu

SEQ ID NO: 1257856 - RNA, 19 nt, Artificial Sequence
  Description of Artificial Sequence: Synthetic oligonucleotide
  Sense strand starting at position 590 of SEQ ID NO: 1241248
ggagcaauaggcuaucgau

SEQ ID NO: 1257857 - RNA, 19 nt, Artificial Sequence
  Description of Artificial Sequence: Synthetic oligonucleotide
  Antisense strand to SEQ ID NO: 1257856
aucgauagccuauugcucc

SEQ ID NO: 1257858 - RNA, 19 nt, Artificial Sequence
  Description of Artificial Sequence: Synthetic oligonucleotide
  Sense strand starting at position 850 of SEQ ID NO: 1241248
gcaaguugcgcauucaagu

SEQ ID NO: 1257859 - RNA, 19 nt, Artificial Sequence
  Description of Artificial Sequence: Synthetic oligonucleotide
  Antisense strand to SEQ ID NO: 1257858
acuugaaugcgcaacuugc

SEQ ID NO: 1257860 - RNA, 19 nt, Artificial Sequence
  Description of Artificial Sequence: Synthetic oligonucleotide
  Sense strand starting at position 1237 of SEQ ID NO: 1241248
agaguuugccgucaaacuu

SEQ ID NO: 1257861 - RNA, 19 nt, Artificial Sequence
  Description of Artificial Sequence: Synthetic oligonucleotide
  Antisense strand to SEQ ID NO: 1257860
aaguuugacggcaaacucu

SEQ ID NO: 1257862 - RNA, 19 nt, Artificial Sequence
  Description of Artificial Sequence: Synthetic oligonucleotide
  Sense strand starting at position 1312 of SEQ ID NO: 1241248
gagagaucacuuugcacuu

SEQ ID NO: 1257863 - RNA, 19 nt, Artificial Sequence
  Description of Artificial Sequence: Synthetic oligonucleotide
  Antisense strand to SEQ ID NO: 1257862
aagugcaaagugaucucuc

SEQ ID NO: 1257864 - RNA, 19 nt, Artificial Sequence
  Description of Artificial Sequence: Synthetic oligonucleotide
  Sense strand starting at position 1584 of SEQ ID NO: 1241248
gccuccauuguuggagaau

SEQ ID NO: 1257865 - RNA, 19 nt, Artificial Sequence
  Description of Artificial Sequence: Synthetic oligonucleotide
  Antisense strand to SEQ ID NO: 1257864
auucuccaacaauggaggc

SEQ ID NO: 1257866 - RNA, 19 nt, Artificial Sequence
  Description of Artificial Sequence: Synthetic oligonucleotide
  Sense strand starting at position 1638 of SEQ ID NO: 1241248
guccuucuuguagagguuu

SEQ ID NO: 1257867 - RNA, 19 nt, Artificial Sequence
  Description of Artificial Sequence: Synthetic oligonucleotide
  Antisense strand to SEQ ID NO: 1257866
aaaccucuacaagaaggac

SEQ ID NO: 1257868 - RNA, 19 nt, Artificial Sequence
  Description of Artificial Sequence: Synthetic oligonucleotide
  Sense strand starting at position 1679 of SEQ ID NO: 1241248
ucugaaaguccugagugag

SEQ ID NO: 1257869 - RNA, 19 nt, Artificial Sequence
  Description of Artificial Sequence: Synthetic oligonucleotide
  Antisense strand to SEQ ID NO: 1257868
cucacucaggacuuucaga

SEQ ID NO: 1257870 - RNA, 19 nt, Artificial Sequence
  Description of Artificial Sequence: Synthetic oligonucleotide
  Sense strand starting at position 1880 of SEQ ID NO: 1241248
ccggaugguucuuuaacca

SEQ ID NO: 1257871 - RNA, 19 nt, Artificial Sequence
  Description of Artificial Sequence: Synthetic oligonucleotide
  Antisense strand to SEQ ID NO: 1257870
ugguuaaagaaccauccgg

SEQ ID NO: 1257872 - RNA, 19 nt, Artificial Sequence
  Description of Artificial Sequence: Synthetic oligonucleotide
  Sense strand starting at position 2575 of SEQ ID NO: 1241248
aguccaguucucuaacucu

SEQ ID NO: 1257873 - RNA, 19 nt, Artificial Sequence
  Description of Artificial Sequence: Synthetic oligonucleotide
  Antisense strand to SEQ ID NO: 1257872
agaguuagagaacuggacu

SEQ ID NO: 1257874 - RNA, 19 nt, Artificial Sequence
  Description of Artificial Sequence: Synthetic oligonucleotide
  Sense strand starting at position 2601 of SEQ ID NO: 1241248
uccgguccuuuaguugaaa

SEQ ID NO: 1257875 - RNA, 19 nt, Artificial Sequence
  Description of Artificial Sequence: Synthetic oligonucleotide
  Antisense strand to SEQ ID NO: 1257874
uuucaacuaaaggaccgga

SEQ ID NO: 1257876 - RNA, 19 nt, Artificial Sequence
  Description of Artificial Sequence: Synthetic oligonucleotide
  Sense strand starting at position 2632 of SEQ ID NO: 1241248
uuccgucuggcagauuaga

SEQ ID NO: 1257877 - RNA, 19 nt, Artificial Sequence
  Description of Artificial Sequence: Synthetic oligonucleotide
  Antisense strand to SEQ ID NO: 1257876
ucuaaucugccagacggaa

SEQ ID NO: 1257878 - RNA, 19 nt, Artificial Sequence
  Description of Artificial Sequence: Synthetic oligonucleotide
  Sense strand starting at position 2640 of SEQ ID NO: 1241248
ggcagauuagagugguaca

SEQ ID NO: 1257879 - RNA, 19 nt, Artificial Sequence
  Description of Artificial Sequence: Synthetic oligonucleotide
  Antisense strand to SEQ ID NO: 1257878
uguaccacucuaaucugcc

SEQ ID NO: 1257880 - RNA, 19 nt, Artificial Sequence
  Description of Artificial Sequence: Synthetic oligonucleotide
  Sense strand starting at position 2641 of SEQ ID NO: 1241248
gcagauuagagugguacau

SEQ ID NO: 1257881 - RNA, 19 nt, Artificial Sequence
  Description of Artificial Sequence: Synthetic oligonucleotide
  Antisense strand to SEQ ID NO: 1257880
auguaccacucuaaucugc

SEQ ID NO: 1257882 - RNA, 19 nt, Artificial Sequence
  Description of Artificial Sequence: Synthetic oligonucleotide
  Sense strand starting at position 2743 of SEQ ID NO: 1241248
cucuccguuccagauaaau

SEQ ID NO: 1257883 - RNA, 19 nt, Artificial Sequence
  Description of Artificial Sequence: Synthetic oligonucleotide
  Antisense strand to SEQ ID NO: 1257882
auuuaucuggaacggagag

SEQ ID NO: 1257884 - RNA, 19 nt, Artificial Sequence
  Description of Artificial Sequence: Synthetic oligonucleotide
  Sense strand starting at position 2767 of SEQ ID NO: 1241248
cgacacaagaagcgugauu

SEQ ID NO: 1257885 - RNA, 19 nt, Artificial Sequence
  Description of Artificial Sequence: Synthetic oligonucleotide
  Antisense strand to SEQ ID NO: 1257884
aaucacgcuucuugugucg

SEQ ID NO: 1257886 - RNA, 19 nt, Artificial Sequence
  Description of Artificial Sequence: Synthetic oligonucleotide
  Sense strand starting at position 2937 of SEQ ID NO: 1241248
gacccuaguggguguuaaa

SEQ ID NO: 1257887 - RNA, 19 nt, Artificial Sequence
  Description of Artificial Sequence: Synthetic oligonucleotide
  Antisense strand to SEQ ID NO: 1257886
uuuaacacccacuaggguc

SEQ ID NO: 1257888 - RNA, 19 nt, Artificial Sequence
  Description of Artificial Sequence: Synthetic oligonucleotide
  Sense strand starting at position 3030 of SEQ ID NO: 1241248
cucugucauuaagugguaa

SEQ ID NO: 1257889 - RNA, 19 nt, Artificial Sequence
  Description of Artificial Sequence: Synthetic oligonucleotide
  Antisense strand to SEQ ID NO: 1257888
uuaccacuuaaugacagag

SEQ ID NO: 1257890 - RNA, 19 nt, Artificial Sequence
  Description of Artificial Sequence: Synthetic oligonucleotide
  Sense strand starting at position 3042 of SEQ ID NO: 1241248
gugguaauaagcuacugaa

SEQ ID NO: 1257891 - RNA, 19 nt, Artificial Sequence
  Description of Artificial Sequence: Synthetic oligonucleotide
  Antisense strand to SEQ ID NO: 1257890
uucaguagcuuauuaccac

SEQ ID NO: 1257892 - RNA, 19 nt, Artificial Sequence
  Description of Artificial Sequence: Synthetic oligonucleotide
  Sense strand starting at position 3097 of SEQ ID NO: 1241248
ggaauuacauccucuggac

SEQ ID NO: 1257893 - RNA, 19 nt, Artificial Sequence
  Description of Artificial Sequence: Synthetic oligonucleotide
  Antisense strand to SEQ ID NO: 1257892
guccagaggauguaauucc

SEQ ID NO: 1257894 - RNA, 19 nt, Artificial Sequence
  Description of Artificial Sequence: Synthetic oligonucleotide
  Sense strand starting at position 3128 of SEQ ID NO: 1241248
aggagcaguugaguagaau

SEQ ID NO: 1257895 - RNA, 19 nt, Artificial Sequence
  Description of Artificial Sequence: Synthetic oligonucleotide
  Antisense strand to SEQ ID NO: 1257894
auucuacucaacugcuccu

SEQ ID NO: 1257896 - RNA, 19 nt, Artificial Sequence
  Description of Artificial Sequence: Synthetic oligonucleotide
  Sense strand starting at position 3129 of SEQ ID NO: 1241248
ggagcaguugaguagaauc

SEQ ID NO: 1257897 - RNA, 19 nt, Artificial Sequence
  Description of Artificial Sequence: Synthetic oligonucleotide
  Antisense strand to SEQ ID NO: 1257896
gauucuacucaacugcucc

SEQ ID NO: 1257898 - RNA, 19 nt, Artificial Sequence
  Description of Artificial Sequence: Synthetic oligonucleotide
  Sense strand starting at position 3131 of SEQ ID NO: 1241248
agcaguugaguagaaucau

SEQ ID NO: 1257899 - RNA, 19 nt, Artificial Sequence
  Description of Artificial Sequence: Synthetic oligonucleotide
  Antisense strand to SEQ ID NO: 1257898
augauucuacucaacugcu

SEQ ID NO: 1257900 - RNA, 19 nt, Artificial Sequence
  Description of Artificial Sequence: Synthetic oligonucleotide
  Sense strand starting at position 3137 of SEQ ID NO: 1241248
ugaguagaaucaucauuga

SEQ ID NO: 1257901 - RNA, 19 nt, Artificial Sequence
  Description of Artificial Sequence: Synthetic oligonucleotide
  Antisense strand to SEQ ID NO: 1257900
ucaaugaugauucuacuca

SEQ ID NO: 1257902 - RNA, 19 nt, Artificial Sequence
  Description of Artificial Sequence: Synthetic oligonucleotide
  Sense strand starting at position 3162 of SEQ ID NO: 1241248
ggcuguacaucucugaucu

SEQ ID NO: 1257903 - RNA, 19 nt, Artificial Sequence
  Description of Artificial Sequence: Synthetic oligonucleotide
  Antisense strand to SEQ ID NO: 1257902
agaucagagauguacagcc

SEQ ID NO: 1257904 - RNA, 19 nt, Artificial Sequence
  Description of Artificial Sequence: Synthetic oligonucleotide
  Sense strand starting at position 3234 of SEQ ID NO: 1241248
agguuuacccgucaaacaa

SEQ ID NO: 1257905 - RNA, 19 nt, Artificial Sequence
  Description of Artificial Sequence: Synthetic oligonucleotide
  Antisense strand to SEQ ID NO: 1257904
uuguuugacggguaaaccu

SEQ ID NO: 1257906 - RNA, 19 nt, Artificial Sequence
  Description of Artificial Sequence: Synthetic oligonucleotide
  Sense strand starting at position 3280 of SEQ ID NO: 1241248
ugacaauacgauuaaucgu

SEQ ID NO: 1257907 - RNA, 19 nt, Artificial Sequence
  Description of Artificial Sequence: Synthetic oligonucleotide
  Antisense strand to SEQ ID NO: 1257906
acgauuaaucguauuguca

SEQ ID NO: 1257908 - RNA, 19 nt, Artificial Sequence
  Description of Artificial Sequence: Synthetic oligonucleotide
  Sense strand starting at position 3283 of SEQ ID NO: 1241248
caauacgauuaaucguacu

SEQ ID NO: 1257909 - RNA, 19 nt, Artificial Sequence
  Description of Artificial Sequence: Synthetic oligonucleotide
  Antisense strand to SEQ ID NO: 1257908
aguacgauuaaucguauug

SEQ ID NO: 1257910 - RNA, 19 nt, Artificial Sequence
  Description of Artificial Sequence: Synthetic oligonucleotide
  Sense strand starting at position 3518 of SEQ ID NO: 1241248
uucuaauaauccuuugugu

SEQ ID NO: 1257911 - RNA, 19 nt, Artificial Sequence
  Description of Artificial Sequence: Synthetic oligonucleotide
  Antisense strand to SEQ ID NO: 1257910
acacaaaggauuauuagaa

SEQ ID NO: 1257912 - RNA, 19 nt, Artificial Sequence
  Description of Artificial Sequence: Synthetic oligonucleotide
  Sense strand starting at position 3520 of SEQ ID NO: 1241248
cuaauaauccuuuguguuu

SEQ ID NO: 1257913 - RNA, 19 nt, Artificial Sequence
  Description of Artificial Sequence: Synthetic oligonucleotide
  Antisense strand to SEQ ID NO: 1257912
aaacacaaaggauuauuag

SEQ ID NO: 1257914 - RNA, 19 nt, Artificial Sequence
  Description of Artificial Sequence: Synthetic oligonucleotide
  Sense strand starting at position 3615 of SEQ ID NO: 1241248
cugucauugcaaugucaaa

SEQ ID NO: 1257915 - RNA, 19 nt, Artificial Sequence
  Description of Artificial Sequence: Synthetic oligonucleotide
  Antisense strand to SEQ ID NO: 1257914
uuugacauugcaaugacag

SEQ ID NO: 1257916 - RNA, 19 nt, Artificial Sequence
  Description of Artificial Sequence: Synthetic oligonucleotide
  Sense strand starting at position 3682 of SEQ ID NO: 1241248
ugcuguaaguucucugaga

SEQ ID NO: 1257917 - RNA, 19 nt, Artificial Sequence
  Description of Artificial Sequence: Synthetic oligonucleotide
  Antisense strand to SEQ ID NO: 1257916
ucucagagaacuuacagca

SEQ ID NO: 1257918 - RNA, 19 nt, Artificial Sequence
  Description of Artificial Sequence: Synthetic oligonucleotide
  Sense strand starting at position 3683 of SEQ ID NO: 1241248
gcuguaaguucucugagag

SEQ ID NO: 1257919 - RNA, 19 nt, Artificial Sequence
  Description of Artificial Sequence: Synthetic oligonucleotide
  Antisense strand to SEQ ID NO: 1257918
cucucagagaacuuacagc

SEQ ID NO: 1257920 - RNA, 19 nt, Artificial Sequence
  Description of Artificial Sequence: Synthetic oligonucleotide
  Sense strand starting at position 3756 of SEQ ID NO: 1241248
gcacuaguggccgcuuuaa

SEQ ID NO: 1257921 - RNA, 19 nt, Artificial Sequence
  Description of Artificial Sequence: Synthetic oligonucleotide
  Antisense strand to SEQ ID NO: 1257920
uuaaagcggccacuagugc

SEQ ID NO: 1257922 - RNA, 19 nt, Artificial Sequence
  Description of Artificial Sequence: Synthetic oligonucleotide
  Sense strand starting at position 3787 of SEQ ID NO: 1241248
ucaugaauguacuuaggga

SEQ ID NO: 1257923 - RNA, 19 nt, Artificial Sequence
  Description of Artificial Sequence: Synthetic oligonucleotide
  Antisense strand to SEQ ID NO: 1257922
ucccuaaguacauucauga

SEQ ID NO: 1257924 - RNA, 19 nt, Artificial Sequence
  Description of Artificial Sequence: Synthetic oligonucleotide
  Sense strand starting at position 3810 of SEQ ID NO: 1241248
ggaggaguuugaagggaaa

SEQ ID NO: 1257925 - RNA, 19 nt, Artificial Sequence
  Description of Artificial Sequence: Synthetic oligonucleotide
  Antisense strand to SEQ ID NO: 1257924
uuucccuucaaacuccucc

SEQ ID NO: 1257926 - RNA, 19 nt, Artificial Sequence
  Description of Artificial Sequence: Synthetic oligonucleotide
  Sense strand starting at position 3831 of SEQ ID NO: 1241248
ucgugcuuuccgguuugga

SEQ ID NO: 1257927 - RNA, 19 nt, Artificial Sequence
  Description of Artificial Sequence: Synthetic oligonucleotide
  Antisense strand to SEQ ID NO: 1257926
uccaaaccggaaagcacga

SEQ ID NO: 1257928 - RNA, 19 nt, Artificial Sequence
  Description of Artificial Sequence: Synthetic oligonucleotide
  Sense strand starting at position 3832 of SEQ ID NO: 1241248
cgugcuuuccgguuuggau

SEQ ID NO: 1257929 - RNA, 19 nt, Artificial Sequence
  Description of Artificial Sequence: Synthetic oligonucleotide
  Antisense strand to SEQ ID NO: 1257928
auccaaaccggaaagcacg

SEQ ID NO: 1257930 - RNA, 19 nt, Artificial Sequence
  Description of Artificial Sequence: Synthetic oligonucleotide
  Sense strand starting at position 3846 of SEQ ID NO: 1241248
uggauauguugaguuugac

SEQ ID NO: 1257931 - RNA, 19 nt, Artificial Sequence
  Description of Artificial Sequence: Synthetic oligonucleotide
  Antisense strand to SEQ ID NO: 1257930
gucaaacucaacauaucca

SEQ ID NO: 1257932 - RNA, 19 nt, Artificial Sequence
  Description of Artificial Sequence: Synthetic oligonucleotide
  Sense strand starting at position 139 of SEQ ID NO: 1241249
uuaaauuaccugggcauga

SEQ ID NO: 1257933 - RNA, 19 nt, Artificial Sequence
  Description of Artificial Sequence: Synthetic oligonucleotide
  Antisense strand to SEQ ID NO: 1257932
ucaugcccagguaauuuaa

SEQ ID NO: 1257934 - RNA, 19 nt, Artificial Sequence
  Description of Artificial Sequence: Synthetic oligonucleotide
  Sense strand starting at position 307 of SEQ ID NO: 1241249
uaaauaaaggugugucaag

SEQ ID NO: 1257935 - RNA, 19 nt, Artificial Sequence
  Description of Artificial Sequence: Synthetic oligonucleotide
  Antisense strand to SEQ ID NO: 1257934
cuugacacaccuuuauuua

SEQ ID NO: 1257936 - RNA, 19 nt, Artificial Sequence
  Description of Artificial Sequence: Synthetic oligonucleotide
  Sense strand starting at position 333 of SEQ ID NO: 1241249
acgugugacuacuuacaau

SEQ ID NO: 1257937 - RNA, 19 nt, Artificial Sequence
  Description of Artificial Sequence: Synthetic oligonucleotide
  Antisense strand to SEQ ID NO: 1257936
auuguaaguagucacacgu

SEQ ID NO: 1257938 - RNA, 19 nt, Artificial Sequence
  Description of Artificial Sequence: Synthetic oligonucleotide
  Sense strand starting at position 345 of SEQ ID NO: 1241249
uuacaauuccguuaacaug

SEQ ID NO: 1257939 - RNA, 19 nt, Artificial Sequence
  Description of Artificial Sequence: Synthetic oligonucleotide
  Antisense strand to SEQ ID NO: 1257938
cauguuaacggaauuguaa

SEQ ID NO: 1257940 - RNA, 19 nt, Artificial Sequence
  Description of Artificial Sequence: Synthetic oligonucleotide
  Sense strand starting at position 351 of SEQ ID NO: 1241249
uuccguuaacaugauuagu

SEQ ID NO: 1257941 - RNA, 19 nt, Artificial Sequence
  Description of Artificial Sequence: Synthetic oligonucleotide
  Antisense strand to SEQ ID NO: 1257940
acuaaucauguuaacggaa

SEQ ID NO: 1257942 - RNA, 19 nt, Artificial Sequence
  Description of Artificial Sequence: Synthetic oligonucleotide
  Sense strand starting at position 404 of SEQ ID NO: 1241249
ucacucgguagguaaaguu

SEQ ID NO: 1257943 - RNA, 19 nt, Artificial Sequence
  Description of Artificial Sequence: Synthetic oligonucleotide
  Antisense strand to SEQ ID NO: 1257942
aacuuuaccuaccgaguga

SEQ ID NO: 1257944 - RNA, 19 nt, Artificial Sequence
  Description of Artificial Sequence: Synthetic oligonucleotide
  Sense strand starting at position 420 of SEQ ID NO: 1241249
guuuacuugugucugggaa

SEQ ID NO: 1257945 - RNA, 19 nt, Artificial Sequence
  Description of Artificial Sequence: Synthetic oligonucleotide
  Antisense strand to SEQ ID NO: 1257944
uucccagacacaaguaaac

SEQ ID NO: 1257946 - RNA, 19 nt, Artificial Sequence
  Description of Artificial Sequence: Synthetic oligonucleotide
  Sense strand starting at position 421 of SEQ ID NO: 1241249
uuuacuugugucugggaac

SEQ ID NO: 1257947 - RNA, 19 nt, Artificial Sequence
  Description of Artificial Sequence: Synthetic oligonucleotide
  Antisense strand to SEQ ID NO: 1257946
guucccagacacaaguaaa

SEQ ID NO: 1257948 - RNA, 19 nt, Artificial Sequence
  Description of Artificial Sequence: Synthetic oligonucleotide
  Sense strand starting at position 433 of SEQ ID NO: 1241249
ugggaacuucucuguugua

SEQ ID NO: 1257949 - RNA, 19 nt, Artificial Sequence
  Description of Artificial Sequence: Synthetic oligonucleotide
  Antisense strand to SEQ ID NO: 1257948
uacaacagagaaguuccca

SEQ ID NO: 1257950 - RNA, 19 nt, Artificial Sequence
  Description of Artificial Sequence: Synthetic oligonucleotide
  Sense strand starting at position 434 of SEQ ID NO: 1241249
gggaacuucucuguuguaa

SEQ ID NO: 1257951 - RNA, 19 nt, Artificial Sequence
  Description of Artificial Sequence: Synthetic oligonucleotide
  Antisense strand to SEQ ID NO: 1257950
uuacaacagagaaguuccc

SEQ ID NO: 1257952 - RNA, 19 nt, Artificial Sequence
  Description of Artificial Sequence: Synthetic oligonucleotide
  Sense strand starting at position 446 of SEQ ID NO: 1241249
guuguaauacaucgggagu

SEQ ID NO: 1257953 - RNA, 19 nt, Artificial Sequence
  Description of Artificial Sequence: Synthetic oligonucleotide
  Antisense strand to SEQ ID NO: 1257952
acucccgauguauuacaac

SEQ ID NO: 1257954 - RNA, 19 nt, Artificial Sequence
  Description of Artificial Sequence: Synthetic oligonucleotide
  Sense strand starting at position 447 of SEQ ID NO: 1241249
uuguaauacaucgggaguu

SEQ ID NO: 1257955 - RNA, 19 nt, Artificial Sequence
  Description of Artificial Sequence: Synthetic oligonucleotide
  Antisense strand to SEQ ID NO: 1257954
aacucccgauguauuacaa

SEQ ID NO: 1257956 - RNA, 19 nt, Artificial Sequence
  Description of Artificial Sequence: Synthetic oligonucleotide
  Sense strand starting at position 801 of SEQ ID NO: 1241249
gacggaugcuuugccaaga

SEQ ID NO: 1257957 - RNA, 19 nt, Artificial Sequence
  Description of Artificial Sequence: Synthetic oligonucleotide
  Antisense strand to SEQ ID NO: 1257956
ucuuggcaaagcauccguc

SEQ ID NO: 1257958 - RNA, 19 nt, Artificial Sequence
  Description of Artificial Sequence: Synthetic oligonucleotide
  Sense strand starting at position 802 of SEQ ID NO: 1241249
acggaugcuuugccaagau

SEQ ID NO: 1257959 - RNA, 19 nt, Artificial Sequence
  Description of Artificial Sequence: Synthetic oligonucleotide
  Antisense strand to SEQ ID NO: 1257958
aucuuggcaaagcauccgu

SEQ ID NO: 1257960 - RNA, 19 nt, Artificial Sequence
  Description of Artificial Sequence: Synthetic oligonucleotide
  Sense strand starting at position 1188 of SEQ ID NO: 1241249
ggagcaauaggcuaucgau

SEQ ID NO: 1257961 - RNA, 19 nt, Artificial Sequence
  Description of Artificial Sequence: Synthetic oligonucleotide
  Antisense strand to SEQ ID NO: 1257960
aucgauagccuauugcucc

SEQ ID NO: 1257962 - RNA, 19 nt, Artificial Sequence
  Description of Artificial Sequence: Synthetic oligonucleotide
  Sense strand starting at position 1448 of SEQ ID NO: 1241249
gcaaguugcgcauucaagu

SEQ ID NO: 1257963 - RNA, 19 nt, Artificial Sequence
  Description of Artificial Sequence: Synthetic oligonucleotide
  Antisense strand to SEQ ID NO: 1257962
acuugaaugcgcaacuugc

SEQ ID NO: 1257964 - RNA, 19 nt, Artificial Sequence
  Description of Artificial Sequence: Synthetic oligonucleotide
  Sense strand starting at position 1835 of SEQ ID NO: 1241249
agaguuugccgucaaacuu

SEQ ID NO: 1257965 - RNA, 19 nt, Artificial Sequence
  Description of Artificial Sequence: Synthetic oligonucleotide
  Antisense strand to SEQ ID NO: 1257964
aaguuugacggcaaacucu

SEQ ID NO: 1257966 - RNA, 19 nt, Artificial Sequence
  Description of Artificial Sequence: Synthetic oligonucleotide
  Sense strand starting at position 1910 of SEQ ID NO: 1241249
gagagaucacuuugcacuu

SEQ ID NO: 1257967 - RNA, 19 nt, Artificial Sequence
  Description of Artificial Sequence: Synthetic oligonucleotide
  Antisense strand to SEQ ID NO: 1257966
aagugcaaagugaucucuc

SEQ ID NO: 1257968 - RNA, 19 nt, Artificial Sequence
  Description of Artificial Sequence: Synthetic oligonucleotide
  Sense strand starting at position 2182 of SEQ ID NO: 1241249
gccuccauuguuggagaau

SEQ ID NO: 1257969 - RNA, 19 nt, Artificial Sequence
  Description of Artificial Sequence: Synthetic oligonucleotide
  Antisense strand to SEQ ID NO: 1257968
auucuccaacaauggaggc

SEQ ID NO: 1257970 - RNA, 19 nt, Artificial Sequence
  Description of Artificial Sequence: Synthetic oligonucleotide
  Sense strand starting at position 2236 of SEQ ID NO: 1241249
guccuucuuguagagguuu

SEQ ID NO: 1257971 - RNA, 19 nt, Artificial Sequence
  Description of Artificial Sequence: Synthetic oligonucleotide
  Antisense strand to SEQ ID NO: 1257970
aaaccucuacaagaaggac

SEQ ID NO: 1257972 - RNA, 19 nt, Artificial Sequence
  Description of Artificial Sequence: Synthetic oligonucleotide
  Sense strand starting at position 2277 of SEQ ID NO: 1241249
ucugaaaguccugagugag

SEQ ID NO: 1257973 - RNA, 19 nt, Artificial Sequence
  Description of Artificial Sequence: Synthetic oligonucleotide
  Antisense strand to SEQ ID NO: 1257972
cucacucaggacuuucaga

SEQ ID NO: 1257974 - RNA, 19 nt, Artificial Sequence
  Description of Artificial Sequence: Synthetic oligonucleotide
  Sense strand starting at position 2478 of SEQ ID NO: 1241249
ccggaugguucuuuaacca

SEQ ID NO: 1257975 - RNA, 19 nt, Artificial Sequence
  Description of Artificial Sequence: Synthetic oligonucleotide
  Antisense strand to SEQ ID NO: 1257974
ugguuaaagaaccauccgg

SEQ ID NO: 1257976 - RNA, 19 nt, Artificial Sequence
  Description of Artificial Sequence: Synthetic oligonucleotide
  Sense strand starting at position 3173 of SEQ ID NO: 1241249
aguccaguucucuaacucu

SEQ ID NO: 1257977 - RNA, 19 nt, Artificial Sequence
  Description of Artificial Sequence: Synthetic oligonucleotide
  Antisense strand to SEQ ID NO: 1257976
agaguuagagaacuggacu

SEQ ID NO: 1257978 - RNA, 19 nt, Artificial Sequence
  Description of Artificial Sequence: Synthetic oligonucleotide
  Sense strand starting at position 3230 of SEQ ID NO: 1241249
uuccgucuggcagauuaga

SEQ ID NO: 1257979 - RNA, 19 nt, Artificial Sequence
  Description of Artificial Sequence: Synthetic oligonucleotide
  Antisense strand to SEQ ID NO: 1257978
ucuaaucugccagacggaa

SEQ ID NO: 1257980 - RNA, 19 nt, Artificial Sequence
  Description of Artificial Sequence: Synthetic oligonucleotide
  Sense strand starting at position 3238 of SEQ ID NO: 1241249
ggcagauuagagugguaca

SEQ ID NO: 1257981 - RNA, 19 nt, Artificial Sequence
  Description of Artificial Sequence: Synthetic oligonucleotide
  Antisense strand to SEQ ID NO: 1257980
uguaccacucuaaucugcc

SEQ ID NO: 1257982 - RNA, 19 nt, Artificial Sequence
  Description of Artificial Sequence: Synthetic oligonucleotide
  Sense strand starting at position 3239 of SEQ ID NO: 1241249
gcagauuagagugguacau

SEQ ID NO: 1257983 - RNA, 19 nt, Artificial Sequence
  Description of Artificial Sequence: Synthetic oligonucleotide
  Antisense strand to SEQ ID NO: 1257982
auguaccacucuaaucugc

SEQ ID NO: 1257984 - RNA, 19 nt, Artificial Sequence
  Description of Artificial Sequence: Synthetic oligonucleotide
  Sense strand starting at position 3341 of SEQ ID NO: 1241249
cucuccguuccagauaaau

SEQ ID NO: 1257985 - RNA, 19 nt, Artificial Sequence
  Description of Artificial Sequence: Synthetic oligonucleotide
  Antisense strand to SEQ ID NO: 1257984
auuuaucuggaacggagag

SEQ ID NO: 1257986 - RNA, 19 nt, Artificial Sequence
  Description of Artificial Sequence: Synthetic oligonucleotide
  Sense strand starting at position 3365 of SEQ ID NO: 1241249
cgacacaagaagcgugauu

SEQ ID NO: 1257987 - RNA, 19 nt, Artificial Sequence
  Description of Artificial Sequence: Synthetic oligonucleotide
  Antisense strand to SEQ ID NO: 1257986
aaucacgcuucuugugucg

SEQ ID NO: 1257988 - RNA, 19 nt, Artificial Sequence
  Description of Artificial Sequence: Synthetic oligonucleotide
  Sense strand starting at position 3535 of SEQ ID NO: 1241249
gacccuaguggguguuaaa

SEQ ID NO: 1257989 - RNA, 19 nt, Artificial Sequence
  Description of Artificial Sequence: Synthetic oligonucleotide
  Antisense strand to SEQ ID NO: 1257988
uuuaacacccacuaggguc

SEQ ID NO: 1257990 - RNA, 19 nt, Artificial Sequence
  Description of Artificial Sequence: Synthetic oligonucleotide
  Sense strand starting at position 3628 of SEQ ID NO: 1241249
cucugucauuaagugguaa

SEQ ID NO: 1257991 - RNA, 19 nt, Artificial Sequence
  Description of Artificial Sequence: Synthetic oligonucleotide
  Antisense strand to SEQ ID NO: 1257990
uuaccacuuaaugacagag

SEQ ID NO: 1257992 - RNA, 19 nt, Artificial Sequence
  Description of Artificial Sequence: Synthetic oligonucleotide
  Sense strand starting at position 3640 of SEQ ID NO: 1241249
gugguaauaagcuacugaa

SEQ ID NO: 1257993 - RNA, 19 nt, Artificial Sequence
  Description of Artificial Sequence: Synthetic oligonucleotide
  Antisense strand to SEQ ID NO: 1257992
uucaguagcuuauuaccac

SEQ ID NO: 1257994 - RNA, 19 nt, Artificial Sequence
  Description of Artificial Sequence: Synthetic oligonucleotide
  Sense strand starting at position 3695 of SEQ ID NO: 1241249
ggaauuacauccucuggac

SEQ ID NO: 1257995 - RNA, 19 nt, Artificial Sequence
  Description of Artificial Sequence: Synthetic oligonucleotide
  Antisense strand to SEQ ID NO: 1257994
guccagaggauguaauucc

SEQ ID NO: 1257996 - RNA, 19 nt, Artificial Sequence
  Description of Artificial Sequence: Synthetic oligonucleotide
  Sense strand starting at position 3726 of SEQ ID NO: 1241249
aggagcaguugaguagaau

SEQ ID NO: 1257997 - RNA, 19 nt, Artificial Sequence
  Description of Artificial Sequence: Synthetic oligonucleotide
  Antisense strand to SEQ ID NO: 1257996
auucuacucaacugcuccu

SEQ ID NO: 1257998 - RNA, 19 nt, Artificial Sequence
  Description of Artificial Sequence: Synthetic oligonucleotide
  Sense strand starting at position 3727 of SEQ ID NO: 1241249
ggagcaguugaguagaauc

SEQ ID NO: 1257999 - RNA, 19 nt, Artificial Sequence
  Description of Artificial Sequence: Synthetic oligonucleotide
  Antisense strand to SEQ ID NO: 1257998
gauucuacucaacugcucc

SEQ ID NO: 1258000 - RNA, 19 nt, Artificial Sequence
  Description of Artificial Sequence: Synthetic oligonucleotide
  Sense strand starting at position 3729 of SEQ ID NO: 1241249
agcaguugaguagaaucau

SEQ ID NO: 1258001 - RNA, 19 nt, Artificial Sequence
  Description of Artificial Sequence: Synthetic oligonucleotide
  Antisense strand to SEQ ID NO: 1258000
augauucuacucaacugcu

SEQ ID NO: 1258002 - RNA, 19 nt, Artificial Sequence
  Description of Artificial Sequence: Synthetic oligonucleotide
  Sense strand starting at position 3735 of SEQ ID NO: 1241249
ugaguagaaucaucauuga

SEQ ID NO: 1258003 - RNA, 19 nt, Artificial Sequence
  Description of Artificial Sequence: Synthetic oligonucleotide
  Antisense strand to SEQ ID NO: 1258002
ucaaugaugauucuacuca

SEQ ID NO: 1258004 - RNA, 19 nt, Artificial Sequence
  Description of Artificial Sequence: Synthetic oligonucleotide
  Sense strand starting at position 3760 of SEQ ID NO: 1241249
ggcuguacaucucugaucu

SEQ ID NO: 1258005 - RNA, 19 nt, Artificial Sequence
  Description of Artificial Sequence: Synthetic oligonucleotide
  Antisense strand to SEQ ID NO: 1258004
agaucagagauguacagcc

SEQ ID NO: 1258006 - RNA, 19 nt, Artificial Sequence
  Description of Artificial Sequence: Synthetic oligonucleotide
  Sense strand starting at position 3832 of SEQ ID NO: 1241249
agguuuacccgucaaacaa

SEQ ID NO: 1258007 - RNA, 19 nt, Artificial Sequence
  Description of Artificial Sequence: Synthetic oligonucleotide
  Antisense strand to SEQ ID NO: 1258006
uuguuugacggguaaaccu

SEQ ID NO: 1258008 - RNA, 19 nt, Artificial Sequence
  Description of Artificial Sequence: Synthetic oligonucleotide
  Sense strand starting at position 3878 of SEQ ID NO: 1241249
ugacaauacgauuaaucgu

SEQ ID NO: 1258009 - RNA, 19 nt, Artificial Sequence
  Description of Artificial Sequence: Synthetic oligonucleotide
  Antisense strand to SEQ ID NO: 1258008
acgauuaaucguauuguca

SEQ ID NO: 1258010 - RNA, 19 nt, Artificial Sequence
  Description of Artificial Sequence: Synthetic oligonucleotide
  Sense strand starting at position 3881 of SEQ ID NO: 1241249
caauacgauuaaucguacu

SEQ ID NO: 1258011 - RNA, 19 nt, Artificial Sequence
  Description of Artificial Sequence: Synthetic oligonucleotide
  Antisense strand to SEQ ID NO: 1258010
aguacgauuaaucguauug

SEQ ID NO: 1258012 - RNA, 19 nt, Artificial Sequence
  Description of Artificial Sequence: Synthetic oligonucleotide
  Sense strand starting at position 12 of SEQ ID NO: 1241250
ucaguaacuucugugacua

SEQ ID NO: 1258013 - RNA, 19 nt, Artificial Sequence
  Description of Artificial Sequence: Synthetic oligonucleotide
  Antisense strand to SEQ ID NO: 1258012
uagucacagaaguuacuga

SEQ ID NO: 1258014 - RNA, 19 nt, Artificial Sequence
  Description of Artificial Sequence: Synthetic oligonucleotide
  Sense strand starting at position 54 of SEQ ID NO: 1241250
uacguaauauuugcugcau

SEQ ID NO: 1258015 - RNA, 19 nt, Artificial Sequence
  Description of Artificial Sequence: Synthetic oligonucleotide
  Antisense strand to SEQ ID NO: 1258014
augcagcaaauauuacgua

SEQ ID NO: 1258016 - RNA, 19 nt, Artificial Sequence
  Description of Artificial Sequence: Synthetic oligonucleotide
  Sense strand starting at position 123 of SEQ ID NO: 1241250
gucuguguuguugucuaau

SEQ ID NO: 1258017 - RNA, 19 nt, Artificial Sequence
  Description of Artificial Sequence: Synthetic oligonucleotide
  Antisense strand to SEQ ID NO: 1258016
auuagacaacaacacagac

SEQ ID NO: 1258018 - RNA, 19 nt, Artificial Sequence
  Description of Artificial Sequence: Synthetic oligonucleotide
  Sense strand starting at position 126 of SEQ ID NO: 1241250
uguguuguugucuaauaaa

SEQ ID NO: 1258019 - RNA, 19 nt, Artificial Sequence
  Description of Artificial Sequence: Synthetic oligonucleotide
  Antisense strand to SEQ ID NO: 1258018
uuuauuagacaacaacaca

SEQ ID NO: 1258020 - RNA, 19 nt, Artificial Sequence
  Description of Artificial Sequence: Synthetic oligonucleotide
  Sense strand starting at position 185 of SEQ ID NO: 1241250
uuccaagcccuugaaguau

SEQ ID NO: 1258021 - RNA, 19 nt, Artificial Sequence
  Description of Artificial Sequence: Synthetic oligonucleotide
  Antisense strand to SEQ ID NO: 1258020
auacuucaagggcuuggaa

SEQ ID NO: 1258022 - RNA, 19 nt, Artificial Sequence
  Description of Artificial Sequence: Synthetic oligonucleotide
  Sense strand starting at position 231 of SEQ ID NO: 1241250
ccgugagguagguacaauu

SEQ ID NO: 1258023 - RNA, 19 nt, Artificial Sequence
  Description of Artificial Sequence: Synthetic oligonucleotide
  Antisense strand to SEQ ID NO: 1258022
aauuguaccuaccucacgg

SEQ ID NO: 1258024 - RNA, 19 nt, Artificial Sequence
  Description of Artificial Sequence: Synthetic oligonucleotide
  Sense strand starting at position 277 of SEQ ID NO: 1241250
aggcauagaaaugguaauu

SEQ ID NO: 1258025 - RNA, 19 nt, Artificial Sequence
  Description of Artificial Sequence: Synthetic oligonucleotide
  Antisense strand to SEQ ID NO: 1258024
aauuaccauuucuaugccu

SEQ ID NO: 1258026 - RNA, 19 nt, Artificial Sequence
  Description of Artificial Sequence: Synthetic oligonucleotide
  Sense strand starting at position 353 of SEQ ID NO: 1241250
ccaguauuccaccgaggga

SEQ ID NO: 1258027 - RNA, 19 nt, Artificial Sequence
  Description of Artificial Sequence: Synthetic oligonucleotide
  Antisense strand to SEQ ID NO: 1258026
ucccucgguggaauacugg

SEQ ID NO: 1258028 - RNA, 19 nt, Artificial Sequence
  Description of Artificial Sequence: Synthetic oligonucleotide
  Sense strand starting at position 446 of SEQ ID NO: 1241250
cuccuuucccuccagggau

SEQ ID NO: 1258029 - RNA, 19 nt, Artificial Sequence
  Description of Artificial Sequence: Synthetic oligonucleotide
  Antisense strand to SEQ ID NO: 1258028
aucccuggagggaaaggag

SEQ ID NO: 1258030 - RNA, 19 nt, Artificial Sequence
  Description of Artificial Sequence: Synthetic oligonucleotide
  Sense strand starting at position 505 of SEQ ID NO: 1241250
ucgagcagauccucucaaa

SEQ ID NO: 1258031 - RNA, 19 nt, Artificial Sequence
  Description of Artificial Sequence: Synthetic oligonucleotide
  Antisense strand to SEQ ID NO: 1258030
uuugagaggaucugcucga

SEQ ID NO: 1258032 - RNA, 19 nt, Artificial Sequence
  Description of Artificial Sequence: Synthetic oligonucleotide
  Sense strand starting at position 563 of SEQ ID NO: 1241250
ggcuguuuaggguaaauga

SEQ ID NO: 1258033 - RNA, 19 nt, Artificial Sequence
  Description of Artificial Sequence: Synthetic oligonucleotide
  Antisense strand to SEQ ID NO: 1258032
ucauuuacccuaaacagcc

SEQ ID NO: 1258034 - RNA, 19 nt, Artificial Sequence
  Description of Artificial Sequence: Synthetic oligonucleotide
  Sense strand starting at position 1242 of SEQ ID NO: 1241250
ucuuguccuccuuguagaa

SEQ ID NO: 1258035 - RNA, 19 nt, Artificial Sequence
  Description of Artificial Sequence: Synthetic oligonucleotide
  Antisense strand to SEQ ID NO: 1258034
uucuacaaggaggacaaga

SEQ ID NO: 1258036 - RNA, 19 nt, Artificial Sequence
  Description of Artificial Sequence: Synthetic oligonucleotide
  Sense strand starting at position 1491 of SEQ ID NO: 1241250
cggagcugaagucauaguu

SEQ ID NO: 1258037 - RNA, 19 nt, Artificial Sequence
  Description of Artificial Sequence: Synthetic oligonucleotide
  Antisense strand to SEQ ID NO: 1258036
aacuaugacuucagcuccg

SEQ ID NO: 1258038 - RNA, 19 nt, Artificial Sequence
  Description of Artificial Sequence: Synthetic oligonucleotide
  Sense strand starting at position 2610 of SEQ ID NO: 1241250
gugcgcaaucagucuuagu

SEQ ID NO: 1258039 - RNA, 19 nt, Artificial Sequence
  Description of Artificial Sequence: Synthetic oligonucleotide
  Antisense strand to SEQ ID NO: 1258038
acuaagacugauugcgcac

SEQ ID NO: 1258040 - RNA, 19 nt, Artificial Sequence
  Description of Artificial Sequence: Synthetic oligonucleotide
  Sense strand starting at position 2611 of SEQ ID NO: 1241250
ugcgcaaucagucuuaguu

SEQ ID NO: 1258041 - RNA, 19 nt, Artificial Sequence
  Description of Artificial Sequence: Synthetic oligonucleotide
  Antisense strand to SEQ ID NO: 1258040
aacuaagacugauugcgca

SEQ ID NO: 1258042 - RNA, 19 nt, Artificial Sequence
  Description of Artificial Sequence: Synthetic oligonucleotide
  Sense strand starting at position 2612 of SEQ ID NO: 1241250
gcgcaaucagucuuaguug

SEQ ID NO: 1258043 - RNA, 19 nt, Artificial Sequence
  Description of Artificial Sequence: Synthetic oligonucleotide
  Antisense strand to SEQ ID NO: 1258042
caacuaagacugauugcgc

SEQ ID NO: 1258044 - RNA, 19 nt, Artificial Sequence
  Description of Artificial Sequence: Synthetic oligonucleotide
  Sense strand starting at position 2618 of SEQ ID NO: 1241250
ucagucuuaguugauuaua

SEQ ID NO: 1258045 - RNA, 19 nt, Artificial Sequence
  Description of Artificial Sequence: Synthetic oligonucleotide
  Antisense strand to SEQ ID NO: 1258044
uauaaucaacuaagacuga

SEQ ID NO: 1258046 - RNA, 19 nt, Artificial Sequence
  Description of Artificial Sequence: Synthetic oligonucleotide
  Sense strand starting at position 2621 of SEQ ID NO: 1241250
gucuuaguugauuauaaug

SEQ ID NO: 1258047 - RNA, 19 nt, Artificial Sequence
  Description of Artificial Sequence: Synthetic oligonucleotide
  Antisense strand to SEQ ID NO: 1258046
cauuauaaucaacuaagac

SEQ ID NO: 1258048 - RNA, 19 nt, Artificial Sequence
  Description of Artificial Sequence: Synthetic oligonucleotide
  Sense strand starting at position 2661 of SEQ ID NO: 1241250
gguaaagaguguucgauug

SEQ ID NO: 1258049 - RNA, 19 nt, Artificial Sequence
  Description of Artificial Sequence: Synthetic oligonucleotide
  Antisense strand to SEQ ID NO: 1258048
caaucgaacacucuuuacc

SEQ ID NO: 1258050 - RNA, 19 nt, Artificial Sequence
  Description of Artificial Sequence: Synthetic oligonucleotide
  Sense strand starting at position 2666 of SEQ ID NO: 1241250
agaguguucgauugagagg

SEQ ID NO: 1258051 - RNA, 19 nt, Artificial Sequence
  Description of Artificial Sequence: Synthetic oligonucleotide
  Antisense strand to SEQ ID NO: 1258050
ccucucaaucgaacacucu

SEQ ID NO: 1258052 - RNA, 19 nt, Artificial Sequence
  Description of Artificial Sequence: Synthetic oligonucleotide
  Sense strand starting at position 2667 of SEQ ID NO: 1241250
gaguguucgauugagaggu

SEQ ID NO: 1258053 - RNA, 19 nt, Artificial Sequence
  Description of Artificial Sequence: Synthetic oligonucleotide
  Antisense strand to SEQ ID NO: 1258052
accucucaaucgaacacuc

SEQ ID NO: 1258054 - RNA, 19 nt, Artificial Sequence
  Description of Artificial Sequence: Synthetic oligonucleotide
  Sense strand starting at position 2671 of SEQ ID NO: 1241250
guucgauugagagguagaa

SEQ ID NO: 1258055 - RNA, 19 nt, Artificial Sequence
  Description of Artificial Sequence: Synthetic oligonucleotide
  Antisense strand to SEQ ID NO: 1258054
uucuaccucucaaucgaac

SEQ ID NO: 1258056 - RNA, 19 nt, Artificial Sequence
  Description of Artificial Sequence: Synthetic oligonucleotide
  Sense strand starting at position 2811 of SEQ ID NO: 1241250
uccuucuagcaauggaauu

SEQ ID NO: 1258057 - RNA, 19 nt, Artificial Sequence
  Description of Artificial Sequence: Synthetic oligonucleotide
  Antisense strand to SEQ ID NO: 1258056
aauuccauugcuagaagga

SEQ ID NO: 1258058 - RNA, 19 nt, Artificial Sequence
  Description of Artificial Sequence: Synthetic oligonucleotide
  Sense strand starting at position 2828 of SEQ ID NO: 1241250
uucuaugaacuuuaagguu

SEQ ID NO: 1258059 - RNA, 19 nt, Artificial Sequence
  Description of Artificial Sequence: Synthetic oligonucleotide
  Antisense strand to SEQ ID NO: 1258058
aaccuuaaaguucauagaa

SEQ ID NO: 1258060 - RNA, 19 nt, Artificial Sequence
  Description of Artificial Sequence: Synthetic oligonucleotide
  Sense strand starting at position 2837 of SEQ ID NO: 1241250
cuuuaagguuucuuccaga

SEQ ID NO: 1258061 - RNA, 19 nt, Artificial Sequence
  Description of Artificial Sequence: Synthetic oligonucleotide
  Antisense strand to SEQ ID NO: 1258060
ucuggaagaaaccuuaaag

SEQ ID NO: 1258062 - RNA, 19 nt, Artificial Sequence
  Description of Artificial Sequence: Synthetic oligonucleotide
  Sense strand starting at position 2880 of SEQ ID NO: 1241250
acucauauucugggaucaa

SEQ ID NO: 1258063 - RNA, 19 nt, Artificial Sequence
  Description of Artificial Sequence: Synthetic oligonucleotide
  Antisense strand to SEQ ID NO: 1258062
uugaucccagaauaugagu

SEQ ID NO: 1258064 - RNA, 19 nt, Artificial Sequence
  Description of Artificial Sequence: Synthetic oligonucleotide
  Sense strand starting at position 2889 of SEQ ID NO: 1241250
cugggaucaaguugaauac

SEQ ID NO: 1258065 - RNA, 19 nt, Artificial Sequence
  Description of Artificial Sequence: Synthetic oligonucleotide
  Antisense strand to SEQ ID NO: 1258064
guauucaacuugaucccag

SEQ ID NO: 1258066 - RNA, 19 nt, Artificial Sequence
  Description of Artificial Sequence: Synthetic oligonucleotide
  Sense strand starting at position 3062 of SEQ ID NO: 1241250
aucagauugguagggcaau

SEQ ID NO: 1258067 - RNA, 19 nt, Artificial Sequence
  Description of Artificial Sequence: Synthetic oligonucleotide
  Antisense strand to SEQ ID NO: 1258066
auugcccuaccaaucugau

SEQ ID NO: 1258068 - RNA, 19 nt, Artificial Sequence
  Description of Artificial Sequence: Synthetic oligonucleotide
  Sense strand starting at position 3093 of SEQ ID NO: 1241250
ugagauguaaccugucaga

SEQ ID NO: 1258069 - RNA, 19 nt, Artificial Sequence
  Description of Artificial Sequence: Synthetic oligonucleotide
  Antisense strand to SEQ ID NO: 1258068
ucugacagguuacaucuca

SEQ ID NO: 1258070 - RNA, 19 nt, Artificial Sequence
  Description of Artificial Sequence: Synthetic oligonucleotide
  Sense strand starting at position 3103 of SEQ ID NO: 1241250
ccugucagacauuauuacu

SEQ ID NO: 1258071 - RNA, 19 nt, Artificial Sequence
  Description of Artificial Sequence: Synthetic oligonucleotide
  Antisense strand to SEQ ID NO: 1258070
aguaauaaugucugacagg

SEQ ID NO: 1258072 - RNA, 19 nt, Artificial Sequence
  Description of Artificial Sequence: Synthetic oligonucleotide
  Sense strand starting at position 3109 of SEQ ID NO: 1241250
agacauuauuacucuguca

SEQ ID NO: 1258073 - RNA, 19 nt, Artificial Sequence
  Description of Artificial Sequence: Synthetic oligonucleotide
  Antisense strand to SEQ ID NO: 1258072
ugacagaguaauaaugucu

SEQ ID NO: 1258074 - RNA, 19 nt, Artificial Sequence
  Description of Artificial Sequence: Synthetic oligonucleotide
  Sense strand starting at position 3230 of SEQ ID NO: 1241250
uggcuugucaaguagaaua

SEQ ID NO: 1258075 - RNA, 19 nt, Artificial Sequence
  Description of Artificial Sequence: Synthetic oligonucleotide
  Antisense strand to SEQ ID NO: 1258074
uauucuacuugacaagcca

SEQ ID NO: 1258076 - RNA, 19 nt, Artificial Sequence
  Description of Artificial Sequence: Synthetic oligonucleotide
  Sense strand starting at position 3232 of SEQ ID NO: 1241250
gcuugucaaguagaauaca

SEQ ID NO: 1258077 - RNA, 19 nt, Artificial Sequence
  Description of Artificial Sequence: Synthetic oligonucleotide
  Antisense strand to SEQ ID NO: 1258076
uguauucuacuugacaagc

SEQ ID NO: 1258078 - RNA, 19 nt, Artificial Sequence
  Description of Artificial Sequence: Synthetic oligonucleotide
  Sense strand starting at position 3290 of SEQ ID NO: 1241250
aaccuugugcagugaacaa

SEQ ID NO: 1258079 - RNA, 19 nt, Artificial Sequence
  Description of Artificial Sequence: Synthetic oligonucleotide
  Antisense strand to SEQ ID NO: 1258078
uuguucacugcacaagguu

SEQ ID NO: 1258080 - RNA, 19 nt, Artificial Sequence
  Description of Artificial Sequence: Synthetic oligonucleotide
  Sense strand starting at position 3327 of SEQ ID NO: 1241250
gcagcucugacugaaagca

SEQ ID NO: 1258081 - RNA, 19 nt, Artificial Sequence
  Description of Artificial Sequence: Synthetic oligonucleotide
  Antisense strand to SEQ ID NO: 1258080
ugcuuucagucagagcugc

SEQ ID NO: 1258082 - RNA, 19 nt, Artificial Sequence
  Description of Artificial Sequence: Synthetic oligonucleotide
  Sense strand starting at position 3568 of SEQ ID NO: 1241250
gggagagaguucuuucuuu

SEQ ID NO: 1258083 - RNA, 19 nt, Artificial Sequence
  Description of Artificial Sequence: Synthetic oligonucleotide
  Antisense strand to SEQ ID NO: 1258082
aaagaaagaacucucuccc

SEQ ID NO: 1258084 - RNA, 19 nt, Artificial Sequence
  Description of Artificial Sequence: Synthetic oligonucleotide
  Sense strand starting at position 3717 of SEQ ID NO: 1241250
uccuuuauguuucuugaua

SEQ ID NO: 1258085 - RNA, 19 nt, Artificial Sequence
  Description of Artificial Sequence: Synthetic oligonucleotide
  Antisense strand to SEQ ID NO: 1258084
uaucaagaaacauaaagga

SEQ ID NO: 1258086 - RNA, 19 nt, Artificial Sequence
  Description of Artificial Sequence: Synthetic oligonucleotide
  Sense strand starting at position 3718 of SEQ ID NO: 1241250
ccuuuauguuucuugauag

SEQ ID NO: 1258087 - RNA, 19 nt, Artificial Sequence
  Description of Artificial Sequence: Synthetic oligonucleotide
  Antisense strand to SEQ ID NO: 1258086
cuaucaagaaacauaaagg

SEQ ID NO: 1258088 - RNA, 19 nt, Artificial Sequence
  Description of Artificial Sequence: Synthetic oligonucleotide
  Sense strand starting at position 3732 of SEQ ID NO: 1241250
gauagaauguagccuaacu

SEQ ID NO: 1258089 - RNA, 19 nt, Artificial Sequence
  Description of Artificial Sequence: Synthetic oligonucleotide
  Antisense strand to SEQ ID NO: 1258088
aguuaggcuacauucuauc

SEQ ID NO: 1258090 - RNA, 19 nt, Artificial Sequence
  Description of Artificial Sequence: Synthetic oligonucleotide
  Sense strand starting at position 3753 of SEQ ID NO: 1241250
auaacuaucuggucagauu

SEQ ID NO: 1258091 - RNA, 19 nt, Artificial Sequence
  Description of Artificial Sequence: Synthetic oligonucleotide
  Antisense strand to SEQ ID NO: 1258090
aaucugaccagauaguuau

SEQ ID NO: 1258092 - RNA, 19 nt, Artificial Sequence
  Description of Artificial Sequence: Synthetic oligonucleotide
  Sense strand starting at position 307 of SEQ ID NO: 1241251
uugggugcuuccuuugaga

SEQ ID NO: 1258093 - RNA, 19 nt, Artificial Sequence
  Description of Artificial Sequence: Synthetic oligonucleotide
  Antisense strand to SEQ ID NO: 1258092
ucucaaaggaagcacccaa

SEQ ID NO: 1258094 - RNA, 19 nt, Artificial Sequence
  Description of Artificial Sequence: Synthetic oligonucleotide
  Sense strand starting at position 309 of SEQ ID NO: 1241251
gggugcuuccuuugagaag

SEQ ID NO: 1258095 - RNA, 19 nt, Artificial Sequence
  Description of Artificial Sequence: Synthetic oligonucleotide
  Antisense strand to SEQ ID NO: 1258094
cuucucaaaggaagcaccc

SEQ ID NO: 1258096 - RNA, 19 nt, Artificial Sequence
  Description of Artificial Sequence: Synthetic oligonucleotide
  Sense strand starting at position 459 of SEQ ID NO: 1241251
uuugauucccuuugucuga

SEQ ID NO: 1258097 - RNA, 19 nt, Artificial Sequence
  Description of Artificial Sequence: Synthetic oligonucleotide
  Antisense strand to SEQ ID NO: 1258096
ucagacaaagggaaucaaa

SEQ ID NO: 1258098 - RNA, 19 nt, Artificial Sequence
  Description of Artificial Sequence: Synthetic oligonucleotide
  Sense strand starting at position 460 of SEQ ID NO: 1241251
uugauucccuuugucugaa

SEQ ID NO: 1258099 - RNA, 19 nt, Artificial Sequence
  Description of Artificial Sequence: Synthetic oligonucleotide
  Antisense strand to SEQ ID NO: 1258098
uucagacaaagggaaucaa

SEQ ID NO: 1258100 - RNA, 19 nt, Artificial Sequence
  Description of Artificial Sequence: Synthetic oligonucleotide
  Sense strand starting at position 461 of SEQ ID NO: 1241251
ugauucccuuugucugaaa

SEQ ID NO: 1258101 - RNA, 19 nt, Artificial Sequence
  Description of Artificial Sequence: Synthetic oligonucleotide
  Antisense strand to SEQ ID NO: 1258100
uuucagacaaagggaauca

SEQ ID NO: 1258102 - RNA, 19 nt, Artificial Sequence
  Description of Artificial Sequence: Synthetic oligonucleotide
  Sense strand starting at position 543 of SEQ ID NO: 1241251
ggagauacauguucuauua

SEQ ID NO: 1258103 - RNA, 19 nt, Artificial Sequence
  Description of Artificial Sequence: Synthetic oligonucleotide
  Antisense strand to SEQ ID NO: 1258102
uaauagaacauguaucucc

SEQ ID NO: 1258104 - RNA, 19 nt, Artificial Sequence
  Description of Artificial Sequence: Synthetic oligonucleotide
  Sense strand starting at position 559 of SEQ ID NO: 1241251
uuagguuggugucugagaa

SEQ ID NO: 1258105 - RNA, 19 nt, Artificial Sequence
  Description of Artificial Sequence: Synthetic oligonucleotide
  Antisense strand to SEQ ID NO: 1258104
uucucagacaccaaccuaa

SEQ ID NO: 1258106 - RNA, 19 nt, Artificial Sequence
  Description of Artificial Sequence: Synthetic oligonucleotide
  Sense strand starting at position 560 of SEQ ID NO: 1241251
uagguuggugucugagaag

SEQ ID NO: 1258107 - RNA, 19 nt, Artificial Sequence
  Description of Artificial Sequence: Synthetic oligonucleotide
  Antisense strand to SEQ ID NO: 1258106
cuucucagacaccaaccua

SEQ ID NO: 1258108 - RNA, 19 nt, Artificial Sequence
  Description of Artificial Sequence: Synthetic oligonucleotide
  Sense strand starting at position 701 of SEQ ID NO: 1241251
gacagcuuugccuggaaca

SEQ ID NO: 1258109 - RNA, 19 nt, Artificial Sequence
  Description of Artificial Sequence: Synthetic oligonucleotide
  Antisense strand to SEQ ID NO: 1258108
uguuccaggcaaagcuguc

SEQ ID NO: 1258110 - RNA, 19 nt, Artificial Sequence
  Description of Artificial Sequence: Synthetic oligonucleotide
  Sense strand starting at position 751 of SEQ ID NO: 1241251
ugagcuagaccugguuuga

SEQ ID NO: 1258111 - RNA, 19 nt, Artificial Sequence
  Description of Artificial Sequence: Synthetic oligonucleotide
  Antisense strand to SEQ ID NO: 1258110
ucaaaccaggucuagcuca

SEQ ID NO: 1258112 - RNA, 19 nt, Artificial Sequence
  Description of Artificial Sequence: Synthetic oligonucleotide
  Sense strand starting at position 941 of SEQ ID NO: 1241251
acaccuaagucguucugaa

SEQ ID NO: 1258113 - RNA, 19 nt, Artificial Sequence
  Description of Artificial Sequence: Synthetic oligonucleotide
  Antisense strand to SEQ ID NO: 1258112
uucagaacgacuuaggugu

SEQ ID NO: 1258114 - RNA, 19 nt, Artificial Sequence
  Description of Artificial Sequence: Synthetic oligonucleotide
  Sense strand starting at position 1043 of SEQ ID NO: 1241251
ucaagccuugccugagaga

SEQ ID NO: 1258115 - RNA, 19 nt, Artificial Sequence
  Description of Artificial Sequence: Synthetic oligonucleotide
  Antisense strand to SEQ ID NO: 1258114
ucucucaggcaaggcuuga

SEQ ID NO: 1258116 - RNA, 19 nt, Artificial Sequence
  Description of Artificial Sequence: Synthetic oligonucleotide
  Sense strand starting at position 1136 of SEQ ID NO: 1241251
guggcuuaauggccauuua

SEQ ID NO: 1258117 - RNA, 19 nt, Artificial Sequence
  Description of Artificial Sequence: Synthetic oligonucleotide
  Antisense strand to SEQ ID NO: 1258116
uaaauggccauuaagccac

SEQ ID NO: 1258118 - RNA, 19 nt, Artificial Sequence
  Description of Artificial Sequence: Synthetic oligonucleotide
  Sense strand starting at position 1298 of SEQ ID NO: 1241251
acguauuaaucucugaguc

SEQ ID NO: 1258119 - RNA, 19 nt, Artificial Sequence
  Description of Artificial Sequence: Synthetic oligonucleotide
  Antisense strand to SEQ ID NO: 1258118
gacucagagauuaauacgu

SEQ ID NO: 1258120 - RNA, 19 nt, Artificial Sequence
  Description of Artificial Sequence: Synthetic oligonucleotide
  Sense strand starting at position 1930 of SEQ ID NO: 1241251
ccgucagucgcgagugaag

SEQ ID NO: 1258121 - RNA, 19 nt, Artificial Sequence
  Description of Artificial Sequence: Synthetic oligonucleotide
  Antisense strand to SEQ ID NO: 1258120
cuucacucgcgacugacgg

SEQ ID NO: 1258122 - RNA, 19 nt, Artificial Sequence
  Description of Artificial Sequence: Synthetic oligonucleotide
  Sense strand starting at position 1931 of SEQ ID NO: 1241251
cgucagucgcgagugaaga

SEQ ID NO: 1258123 - RNA, 19 nt, Artificial Sequence
  Description of Artificial Sequence: Synthetic oligonucleotide
  Antisense strand to SEQ ID NO: 1258122
ucuucacucgcgacugacg

SEQ ID NO: 1258124 - RNA, 19 nt, Artificial Sequence
  Description of Artificial Sequence: Synthetic oligonucleotide
  Sense strand starting at position 2377 of SEQ ID NO: 1241251
guacuuuacuccguagaca

SEQ ID NO: 1258125 - RNA, 19 nt, Artificial Sequence
  Description of Artificial Sequence: Synthetic oligonucleotide
  Antisense strand to SEQ ID NO: 1258124
ugucuacggaguaaaguac

SEQ ID NO: 1258126 - RNA, 19 nt, Artificial Sequence
  Description of Artificial Sequence: Synthetic oligonucleotide
  Sense strand starting at position 2401 of SEQ ID NO: 1241251
gggcguucccgaagguaag

SEQ ID NO: 1258127 - RNA, 19 nt, Artificial Sequence
  Description of Artificial Sequence: Synthetic oligonucleotide
  Antisense strand to SEQ ID NO: 1258126
cuuaccuucgggaacgccc

SEQ ID NO: 1258128 - RNA, 19 nt, Artificial Sequence
  Description of Artificial Sequence: Synthetic oligonucleotide
  Sense strand starting at position 2430 of SEQ ID NO: 1241251
cguccauccuagguacaau

SEQ ID NO: 1258129 - RNA, 19 nt, Artificial Sequence
  Description of Artificial Sequence: Synthetic oligonucleotide
  Antisense strand to SEQ ID NO: 1258128
auuguaccuaggauggacg

SEQ ID NO: 1258130 - RNA, 19 nt, Artificial Sequence
  Description of Artificial Sequence: Synthetic oligonucleotide
  Sense strand starting at position 2537 of SEQ ID NO: 1241251
augagcugugcccauauaa

SEQ ID NO: 1258131 - RNA, 19 nt, Artificial Sequence
  Description of Artificial Sequence: Synthetic oligonucleotide
  Antisense strand to SEQ ID NO: 1258130
uuauaugggcacagcucau

SEQ ID NO: 1258132 - RNA, 19 nt, Artificial Sequence
  Description of Artificial Sequence: Synthetic oligonucleotide
  Sense strand starting at position 2638 of SEQ ID NO: 1241251
gggucucuauucccugaga

SEQ ID NO: 1258133 - RNA, 19 nt, Artificial Sequence
  Description of Artificial Sequence: Synthetic oligonucleotide
  Antisense strand to SEQ ID NO: 1258132
ucucagggaauagagaccc

SEQ ID NO: 1258134 - RNA, 19 nt, Artificial Sequence
  Description of Artificial Sequence: Synthetic oligonucleotide
  Sense strand starting at position 2639 of SEQ ID NO: 1241251
ggucucuauucccugagac

SEQ ID NO: 1258135 - RNA, 19 nt, Artificial Sequence
  Description of Artificial Sequence: Synthetic oligonucleotide
  Antisense strand to SEQ ID NO: 1258134
gucucagggaauagagacc

SEQ ID NO: 1258136 - RNA, 19 nt, Artificial Sequence
  Description of Artificial Sequence: Synthetic oligonucleotide
  Sense strand starting at position 2806 of SEQ ID NO: 1241251
gcugaaagcuaggcugaaa

SEQ ID NO: 1258137 - RNA, 19 nt, Artificial Sequence
  Description of Artificial Sequence: Synthetic oligonucleotide
  Antisense strand to SEQ ID NO: 1258136
uuucagccuagcuuucagc

SEQ ID NO: 1258138 - RNA, 19 nt, Artificial Sequence
  Description of Artificial Sequence: Synthetic oligonucleotide
  Sense strand starting at position 2809 of SEQ ID NO: 1241251
gaaagcuaggcugaaaguu

SEQ ID NO: 1258139 - RNA, 19 nt, Artificial Sequence
  Description of Artificial Sequence: Synthetic oligonucleotide
  Antisense strand to SEQ ID NO: 1258138
aacuuucagccuagcuuuc

SEQ ID NO: 1258140 - RNA, 19 nt, Artificial Sequence
  Description of Artificial Sequence: Synthetic oligonucleotide
  Sense strand starting at position 2817 of SEQ ID NO: 1241251
ggcugaaaguuugcaccaa

SEQ ID NO: 1258141 - RNA, 19 nt, Artificial Sequence
  Description of Artificial Sequence: Synthetic oligonucleotide
  Antisense strand to SEQ ID NO: 1258140
uuggugcaaacuuucagcc

SEQ ID NO: 1258142 - RNA, 19 nt, Artificial Sequence
  Description of Artificial Sequence: Synthetic oligonucleotide
  Sense strand starting at position 2844 of SEQ ID NO: 1241251
ccaguuugugaaugcaaag

SEQ ID NO: 1258143 - RNA, 19 nt, Artificial Sequence
  Description of Artificial Sequence: Synthetic oligonucleotide
  Antisense strand to SEQ ID NO: 1258142
cuuugcauucacaaacugg

SEQ ID NO: 1258144 - RNA, 19 nt, Artificial Sequence
  Description of Artificial Sequence: Synthetic oligonucleotide
  Sense strand starting at position 3023 of SEQ ID NO: 1241251
ggcccugauucucuucuau

SEQ ID NO: 1258145 - RNA, 19 nt, Artificial Sequence
  Description of Artificial Sequence: Synthetic oligonucleotide
  Antisense strand to SEQ ID NO: 1258144
auagaagagaaucagggcc

SEQ ID NO: 1258146 - RNA, 19 nt, Artificial Sequence
  Description of Artificial Sequence: Synthetic oligonucleotide
  Sense strand starting at position 3069 of SEQ ID NO: 1241251
gcuauagaaguuugaagcu

SEQ ID NO: 1258147 - RNA, 19 nt, Artificial Sequence
  Description of Artificial Sequence: Synthetic oligonucleotide
  Antisense strand to SEQ ID NO: 1258146
agcuucaaacuucuauagc

SEQ ID NO: 1258148 - RNA, 19 nt, Artificial Sequence
  Description of Artificial Sequence: Synthetic oligonucleotide
  Sense strand starting at position 3200 of SEQ ID NO: 1241251
uagguaagaucguugauga

SEQ ID NO: 1258149 - RNA, 19 nt, Artificial Sequence
  Description of Artificial Sequence: Synthetic oligonucleotide
  Antisense strand to SEQ ID NO: 1258148
ucaucaacgaucuuaccua

SEQ ID NO: 1258150 - RNA, 19 nt, Artificial Sequence
  Description of Artificial Sequence: Synthetic oligonucleotide
  Sense strand starting at position 3201 of SEQ ID NO: 1241251
agguaagaucguugaugaa

SEQ ID NO: 1258151 - RNA, 19 nt, Artificial Sequence
  Description of Artificial Sequence: Synthetic oligonucleotide
  Antisense strand to SEQ ID NO: 1258150
uucaucaacgaucuuaccu

SEQ ID NO: 1258152 - RNA, 19 nt, Artificial Sequence
  Description of Artificial Sequence: Synthetic oligonucleotide
  Sense strand starting at position 3235 of SEQ ID NO: 1241251
gcaaguagucaauguagac

SEQ ID NO: 1258153 - RNA, 19 nt, Artificial Sequence
  Description of Artificial Sequence: Synthetic oligonucleotide
  Antisense strand to SEQ ID NO: 1258152
gucuacauugacuacuugc

SEQ ID NO: 1258154 - RNA, 19 nt, Artificial Sequence
  Description of Artificial Sequence: Synthetic oligonucleotide
  Sense strand starting at position 3453 of SEQ ID NO: 1241251
gugcucuguaaguagaaca

SEQ ID NO: 1258155 - RNA, 19 nt, Artificial Sequence
  Description of Artificial Sequence: Synthetic oligonucleotide
  Antisense strand to SEQ ID NO: 1258154
uguucuacuuacagagcac

SEQ ID NO: 1258156 - RNA, 19 nt, Artificial Sequence
  Description of Artificial Sequence: Synthetic oligonucleotide
  Sense strand starting at position 3572 of SEQ ID NO: 1241251
aguauuauugcucauugaa

SEQ ID NO: 1258157 - RNA, 19 nt, Artificial Sequence
  Description of Artificial Sequence: Synthetic oligonucleotide
  Antisense strand to SEQ ID NO: 1258156
uucaaugagcaauaauacu

SEQ ID NO: 1258158 - RNA, 19 nt, Artificial Sequence
  Description of Artificial Sequence: Synthetic oligonucleotide
  Sense strand starting at position 3757 of SEQ ID NO: 1241251
gagaguuauuccucugaug

SEQ ID NO: 1258159 - RNA, 19 nt, Artificial Sequence
  Description of Artificial Sequence: Synthetic oligonucleotide
  Antisense strand to SEQ ID NO: 1258158
caucagaggaauaacucuc

SEQ ID NO: 1258160 - RNA, 19 nt, Artificial Sequence
  Description of Artificial Sequence: Synthetic oligonucleotide
  Sense strand starting at position 3759 of SEQ ID NO: 1241251
gaguuauuccucugaugga

SEQ ID NO: 1258161 - RNA, 19 nt, Artificial Sequence
  Description of Artificial Sequence: Synthetic oligonucleotide
  Antisense strand to SEQ ID NO: 1258160
uccaucagaggaauaacuc

SEQ ID NO: 1258162 - RNA, 19 nt, Artificial Sequence
  Description of Artificial Sequence: Synthetic oligonucleotide
  Sense strand starting at position 3877 of SEQ ID NO: 1241251
uuaacaagaguucggaaga

SEQ ID NO: 1258163 - RNA, 19 nt, Artificial Sequence
  Description of Artificial Sequence: Synthetic oligonucleotide
  Antisense strand to SEQ ID NO: 1258162
ucuuccgaacucuuguuaa

SEQ ID NO: 1258164 - RNA, 19 nt, Artificial Sequence
  Description of Artificial Sequence: Synthetic oligonucleotide
  Sense strand starting at position 3899 of SEQ ID NO: 1241251
ugacuccaguucucauuga

SEQ ID NO: 1258165 - RNA, 19 nt, Artificial Sequence
  Description of Artificial Sequence: Synthetic oligonucleotide
  Antisense strand to SEQ ID NO: 1258164
ucaaugagaacuggaguca

SEQ ID NO: 1258166 - RNA, 19 nt, Artificial Sequence
  Description of Artificial Sequence: Synthetic oligonucleotide
  Sense strand starting at position 3903 of SEQ ID NO: 1241251
uccaguucucauugaugac

SEQ ID NO: 1258167 - RNA, 19 nt, Artificial Sequence
  Description of Artificial Sequence: Synthetic oligonucleotide
  Antisense strand to SEQ ID NO: 1258166
gucaucaaugagaacugga

SEQ ID NO: 1258168 - RNA, 19 nt, Artificial Sequence
  Description of Artificial Sequence: Synthetic oligonucleotide
  Sense strand starting at position 3957 of SEQ ID NO: 1241251
ugcagaugugguuggaaau

SEQ ID NO: 1258169 - RNA, 19 nt, Artificial Sequence
  Description of Artificial Sequence: Synthetic oligonucleotide
  Antisense strand to SEQ ID NO: 1258168
auuuccaaccacaucugca

SEQ ID NO: 1258170 - RNA, 19 nt, Artificial Sequence
  Description of Artificial Sequence: Synthetic oligonucleotide
  Sense strand starting at position 3958 of SEQ ID NO: 1241251
gcagaugugguuggaaaua

SEQ ID NO: 1258171 - RNA, 19 nt, Artificial Sequence
  Description of Artificial Sequence: Synthetic oligonucleotide
  Antisense strand to SEQ ID NO: 1258170
uauuuccaaccacaucugc

SEQ ID NO: 1258172 - RNA, 19 nt, Artificial Sequence
  Description of Artificial Sequence: Synthetic oligonucleotide
  Sense strand starting at position 71 of SEQ ID NO: 1241252
aagucaugguaucucagua

SEQ ID NO: 1258173 - RNA, 19 nt, Artificial Sequence
  Description of Artificial Sequence: Synthetic oligonucleotide
  Antisense strand to SEQ ID NO: 1258172
uacugagauaccaugacuu

SEQ ID NO: 1258174 - RNA, 19 nt, Artificial Sequence
  Description of Artificial Sequence: Synthetic oligonucleotide
  Sense strand starting at position 75 of SEQ ID NO: 1241252
caugguaucucaguaugcu

SEQ ID NO: 1258175 - RNA, 19 nt, Artificial Sequence
  Description of Artificial Sequence: Synthetic oligonucleotide
  Antisense strand to SEQ ID NO: 1258174
agcauacugagauaccaug

SEQ ID NO: 1258176 - RNA, 19 nt, Artificial Sequence
  Description of Artificial Sequence: Synthetic oligonucleotide
  Sense strand starting at position 84 of SEQ ID NO: 1241252
ucaguaugcugccauggga

SEQ ID NO: 1258177 - RNA, 19 nt, Artificial Sequence
  Description of Artificial Sequence: Synthetic oligonucleotide
  Antisense strand to SEQ ID NO: 1258176
ucccauggcagcauacuga

SEQ ID NO: 1258178 - RNA, 19 nt, Artificial Sequence
  Description of Artificial Sequence: Synthetic oligonucleotide
  Sense strand starting at position 87 of SEQ ID NO: 1241252
guaugcugccaugggauua

SEQ ID NO: 1258179 - RNA, 19 nt, Artificial Sequence
  Description of Artificial Sequence: Synthetic oligonucleotide
  Antisense strand to SEQ ID NO: 1258178
uaaucccauggcagcauac

SEQ ID NO: 1258180 - RNA, 19 nt, Artificial Sequence
  Description of Artificial Sequence: Synthetic oligonucleotide
  Sense strand starting at position 553 of SEQ ID NO: 1241252
gcaagacccuguuucuagu

SEQ ID NO: 1258181 - RNA, 19 nt, Artificial Sequence
  Description of Artificial Sequence: Synthetic oligonucleotide
  Antisense strand to SEQ ID NO: 1258180
acuagaaacagggucuugc

SEQ ID NO: 1258182 - RNA, 19 nt, Artificial Sequence
  Description of Artificial Sequence: Synthetic oligonucleotide
  Sense strand starting at position 840 of SEQ ID NO: 1241252
ucgcgagacucugucucua

SEQ ID NO: 1258183 - RNA, 19 nt, Artificial Sequence
  Description of Artificial Sequence: Synthetic oligonucleotide
  Antisense strand to SEQ ID NO: 1258182
uagagacagagucucgcga

SEQ ID NO: 1258184 - RNA, 19 nt, Artificial Sequence
  Description of Artificial Sequence: Synthetic oligonucleotide
  Sense strand starting at position 934 of SEQ ID NO: 1241252
gccacagugaaaugguauu

SEQ ID NO: 1258185 - RNA, 19 nt, Artificial Sequence
  Description of Artificial Sequence: Synthetic oligonucleotide
  Antisense strand to SEQ ID NO: 1258184
aauaccauuucacuguggc

SEQ ID NO: 1258186 - RNA, 19 nt, Artificial Sequence
  Description of Artificial Sequence: Synthetic oligonucleotide
  Sense strand starting at position 1048 of SEQ ID NO: 1241252
uuugguggcaucuggcaaa

SEQ ID NO: 1258187 - RNA, 19 nt, Artificial Sequence
  Description of Artificial Sequence: Synthetic oligonucleotide
  Antisense strand to SEQ ID NO: 1258186
uuugccagaugccaccaaa

SEQ ID NO: 1258188 - RNA, 19 nt, Artificial Sequence
  Description of Artificial Sequence: Synthetic oligonucleotide
  Sense strand starting at position 1248 of SEQ ID NO: 1241252
agcgacaugccagaauaga

SEQ ID NO: 1258189 - RNA, 19 nt, Artificial Sequence
  Description of Artificial Sequence: Synthetic oligonucleotide
  Antisense strand to SEQ ID NO: 1258188
ucuauucuggcaugucgcu

SEQ ID NO: 1258190 - RNA, 19 nt, Artificial Sequence
  Description of Artificial Sequence: Synthetic oligonucleotide
  Sense strand starting at position 1256 of SEQ ID NO: 1241252
gccagaauagaaggauucu

SEQ ID NO: 1258191 - RNA, 19 nt, Artificial Sequence
  Description of Artificial Sequence: Synthetic oligonucleotide
  Antisense strand to SEQ ID NO: 1258190
agaauccuucuauucuggc

SEQ ID NO: 1258192 - RNA, 19 nt, Artificial Sequence
  Description of Artificial Sequence: Synthetic oligonucleotide
  Sense strand starting at position 1262 of SEQ ID NO: 1241252
auagaaggauucuuuagua

SEQ ID NO: 1258193 - RNA, 19 nt, Artificial Sequence
  Description of Artificial Sequence: Synthetic oligonucleotide
  Antisense strand to SEQ ID NO: 1258192
uacuaaagaauccuucuau

SEQ ID NO: 1258194 - RNA, 19 nt, Artificial Sequence
  Description of Artificial Sequence: Synthetic oligonucleotide
  Sense strand starting at position 1267 of SEQ ID NO: 1241252
aggauucuuuaguacaauc

SEQ ID NO: 1258195 - RNA, 19 nt, Artificial Sequence
  Description of Artificial Sequence: Synthetic oligonucleotide
  Antisense strand to SEQ ID NO: 1258194
gauuguacuaaagaauccu

SEQ ID NO: 1258196 - RNA, 19 nt, Artificial Sequence
  Description of Artificial Sequence: Synthetic oligonucleotide
  Sense strand starting at position 2132 of SEQ ID NO: 1241252
ucaguugccucgguuggaa

SEQ ID NO: 1258197 - RNA, 19 nt, Artificial Sequence
  Description of Artificial Sequence: Synthetic oligonucleotide
  Antisense strand to SEQ ID NO: 1258196
uuccaaccgaggcaacuga

SEQ ID NO: 1258198 - RNA, 19 nt, Artificial Sequence
  Description of Artificial Sequence: Synthetic oligonucleotide
  Sense strand starting at position 2134 of SEQ ID NO: 1241252
aguugccucgguuggaaau

SEQ ID NO: 1258199 - RNA, 19 nt, Artificial Sequence
  Description of Artificial Sequence: Synthetic oligonucleotide
  Antisense strand to SEQ ID NO: 1258198
auuuccaaccgaggcaacu

SEQ ID NO: 1258200 - RNA, 19 nt, Artificial Sequence
  Description of Artificial Sequence: Synthetic oligonucleotide
  Sense strand starting at position 2402 of SEQ ID NO: 1241252
ggaggaucggcguggaaug

SEQ ID NO: 1258201 - RNA, 19 nt, Artificial Sequence
  Description of Artificial Sequence: Synthetic oligonucleotide
  Antisense strand to SEQ ID NO: 1258200
cauuccacgccgauccucc

SEQ ID NO: 1258202 - RNA, 19 nt, Artificial Sequence
  Description of Artificial Sequence: Synthetic oligonucleotide
  Sense strand starting at position 2512 of SEQ ID NO: 1241252
gggagauaaugcgucugca

SEQ ID NO: 1258203 - RNA, 19 nt, Artificial Sequence
  Description of Artificial Sequence: Synthetic oligonucleotide
  Antisense strand to SEQ ID NO: 1258202
ugcagacgcauuaucuccc

SEQ ID NO: 1258204 - RNA, 19 nt, Artificial Sequence
  Description of Artificial Sequence: Synthetic oligonucleotide
  Sense strand starting at position 2515 of SEQ ID NO: 1241252
agauaaugcgucugcagca

SEQ ID NO: 1258205 - RNA, 19 nt, Artificial Sequence
  Description of Artificial Sequence: Synthetic oligonucleotide
  Antisense strand to SEQ ID NO: 1258204
ugcugcagacgcauuaucu

SEQ ID NO: 1258206 - RNA, 19 nt, Artificial Sequence
  Description of Artificial Sequence: Synthetic oligonucleotide
  Sense strand starting at position 2516 of SEQ ID NO: 1241252
gauaaugcgucugcagcaa

SEQ ID NO: 1258207 - RNA, 19 nt, Artificial Sequence
  Description of Artificial Sequence: Synthetic oligonucleotide
  Antisense strand to SEQ ID NO: 1258206
uugcugcagacgcauuauc

SEQ ID NO: 1258208 - RNA, 19 nt, Artificial Sequence
  Description of Artificial Sequence: Synthetic oligonucleotide
  Sense strand starting at position 2601 of SEQ ID NO: 1241252
uacagaaguggcuguuaug

SEQ ID NO: 1258209 - RNA, 19 nt, Artificial Sequence
  Description of Artificial Sequence: Synthetic oligonucleotide
  Antisense strand to SEQ ID NO: 1258208
cauaacagccacuucugua

SEQ ID NO: 1258210 - RNA, 19 nt, Artificial Sequence
  Description of Artificial Sequence: Synthetic oligonucleotide
  Sense strand starting at position 2604 of SEQ ID NO: 1241252
agaaguggcuguuaugauu

SEQ ID NO: 1258211 - RNA, 19 nt, Artificial Sequence
  Description of Artificial Sequence: Synthetic oligonucleotide
  Antisense strand to SEQ ID NO: 1258210
aaucauaacagccacuucu

SEQ ID NO: 1258212 - RNA, 19 nt, Artificial Sequence
  Description of Artificial Sequence: Synthetic oligonucleotide
  Sense strand starting at position 2613 of SEQ ID NO: 1241252
uguuaugauucagggugau

SEQ ID NO: 1258213 - RNA, 19 nt, Artificial Sequence
  Description of Artificial Sequence: Synthetic oligonucleotide
  Antisense strand to SEQ ID NO: 1258212
aucacccugaaucauaaca

SEQ ID NO: 1258214 - RNA, 19 nt, Artificial Sequence
  Description of Artificial Sequence: Synthetic oligonucleotide
  Sense strand starting at position 2626 of SEQ ID NO: 1241252
ggugauacgugccaugaca

SEQ ID NO: 1258215 - RNA, 19 nt, Artificial Sequence
  Description of Artificial Sequence: Synthetic oligonucleotide
  Antisense strand to SEQ ID NO: 1258214
ugucauggcacguaucacc

SEQ ID NO: 1258216 - RNA, 19 nt, Artificial Sequence
  Description of Artificial Sequence: Synthetic oligonucleotide
  Sense strand starting at position 2628 of SEQ ID NO: 1241252
ugauacgugccaugacaca

SEQ ID NO: 1258217 - RNA, 19 nt, Artificial Sequence
  Description of Artificial Sequence: Synthetic oligonucleotide
  Antisense strand to SEQ ID NO: 1258216
ugugucauggcacguauca

SEQ ID NO: 1258218 - RNA, 19 nt, Artificial Sequence
  Description of Artificial Sequence: Synthetic oligonucleotide
  Sense strand starting at position 2660 of SEQ ID NO: 1241252
gcagcuaggauccaauaga

SEQ ID NO: 1258219 - RNA, 19 nt, Artificial Sequence
  Description of Artificial Sequence: Synthetic oligonucleotide
  Antisense strand to SEQ ID NO: 1258218
ucuauuggauccuagcugc

SEQ ID NO: 1258220 - RNA, 19 nt, Artificial Sequence
  Description of Artificial Sequence: Synthetic oligonucleotide
  Sense strand starting at position 2733 of SEQ ID NO: 1241252
gggaaaggcauuggugcua

SEQ ID NO: 1258221 - RNA, 19 nt, Artificial Sequence
  Description of Artificial Sequence: Synthetic oligonucleotide
  Antisense strand to SEQ ID NO: 1258220
uagcaccaaugccuuuccc

SEQ ID NO: 1258222 - RNA, 19 nt, Artificial Sequence
  Description of Artificial Sequence: Synthetic oligonucleotide
  Sense strand starting at position 2791 of SEQ ID NO: 1241252
accugaauguucucaaaug

SEQ ID NO: 1258223 - RNA, 19 nt, Artificial Sequence
  Description of Artificial Sequence: Synthetic oligonucleotide
  Antisense strand to SEQ ID NO: 1258222
cauuugagaacauucaggu

SEQ ID NO: 1258224 - RNA, 19 nt, Artificial Sequence
  Description of Artificial Sequence: Synthetic oligonucleotide
  Sense strand starting at position 2863 of SEQ ID NO: 1241252
cagugaugccucuguuccu

SEQ ID NO: 1258225 - RNA, 19 nt, Artificial Sequence
  Description of Artificial Sequence: Synthetic oligonucleotide
  Antisense strand to SEQ ID NO: 1258224
aggaacagaggcaucacug

SEQ ID NO: 1258226 - RNA, 19 nt, Artificial Sequence
  Description of Artificial Sequence: Synthetic oligonucleotide
  Sense strand starting at position 3156 of SEQ ID NO: 1241252
cugaauuagccaugggaaa

SEQ ID NO: 1258227 - RNA, 19 nt, Artificial Sequence
  Description of Artificial Sequence: Synthetic oligonucleotide
  Antisense strand to SEQ ID NO: 1258226
uuucccauggcuaauucag

SEQ ID NO: 1258228 - RNA, 19 nt, Artificial Sequence
  Description of Artificial Sequence: Synthetic oligonucleotide
  Sense strand starting at position 3269 of SEQ ID NO: 1241252
gcuugcacccuugggagaa

SEQ ID NO: 1258229 - RNA, 19 nt, Artificial Sequence
  Description of Artificial Sequence: Synthetic oligonucleotide
  Antisense strand to SEQ ID NO: 1258228
uucucccaagggugcaagc

SEQ ID NO: 1258230 - RNA, 19 nt, Artificial Sequence
  Description of Artificial Sequence: Synthetic oligonucleotide
  Sense strand starting at position 3501 of SEQ ID NO: 1241252
uguguugaacuccgugaga

SEQ ID NO: 1258231 - RNA, 19 nt, Artificial Sequence
  Description of Artificial Sequence: Synthetic oligonucleotide
  Antisense strand to SEQ ID NO: 1258230
ucucacggaguucaacaca

SEQ ID NO: 1258232 - RNA, 19 nt, Artificial Sequence
  Description of Artificial Sequence: Synthetic oligonucleotide
  Sense strand starting at position 3503 of SEQ ID NO: 1241252
uguugaacuccgugagauc

SEQ ID NO: 1258233 - RNA, 19 nt, Artificial Sequence
  Description of Artificial Sequence: Synthetic oligonucleotide
  Antisense strand to SEQ ID NO: 1258232
gaucucacggaguucaaca

SEQ ID NO: 1258234 - RNA, 19 nt, Artificial Sequence
  Description of Artificial Sequence: Synthetic oligonucleotide
  Sense strand starting at position 3504 of SEQ ID NO: 1241252
guugaacuccgugagaucu

SEQ ID NO: 1258235 - RNA, 19 nt, Artificial Sequence
  Description of Artificial Sequence: Synthetic oligonucleotide
  Antisense strand to SEQ ID NO: 1258234
agaucucacggaguucaac

SEQ ID NO: 1258236 - RNA, 19 nt, Artificial Sequence
  Description of Artificial Sequence: Synthetic oligonucleotide
  Sense strand starting at position 3590 of SEQ ID NO: 1241252
accgccuauccagaggaaa

SEQ ID NO: 1258237 - RNA, 19 nt, Artificial Sequence
  Description of Artificial Sequence: Synthetic oligonucleotide
  Antisense strand to SEQ ID NO: 1258236
uuuccucuggauaggcggu

SEQ ID NO: 1258238 - RNA, 19 nt, Artificial Sequence
  Description of Artificial Sequence: Synthetic oligonucleotide
  Sense strand starting at position 3592 of SEQ ID NO: 1241252
cgccuauccagaggaaacu

SEQ ID NO: 1258239 - RNA, 19 nt, Artificial Sequence
  Description of Artificial Sequence: Synthetic oligonucleotide
  Antisense strand to SEQ ID NO: 1258238
aguuuccucuggauaggcg

SEQ ID NO: 1258240 - RNA, 19 nt, Artificial Sequence
  Description of Artificial Sequence: Synthetic oligonucleotide
  Sense strand starting at position 3725 of SEQ ID NO: 1241252
gucugaugcccuugccaag

SEQ ID NO: 1258241 - RNA, 19 nt, Artificial Sequence
  Description of Artificial Sequence: Synthetic oligonucleotide
  Antisense strand to SEQ ID NO: 1258240
cuuggcaagggcaucagac

SEQ ID NO: 1258242 - RNA, 19 nt, Artificial Sequence
  Description of Artificial Sequence: Synthetic oligonucleotide
  Sense strand starting at position 3828 of SEQ ID NO: 1241252
uccguugucccagaaauga

SEQ ID NO: 1258243 - RNA, 19 nt, Artificial Sequence
  Description of Artificial Sequence: Synthetic oligonucleotide
  Antisense strand to SEQ ID NO: 1258242
ucauuucugggacaacgga

SEQ ID NO: 1258244 - RNA, 19 nt, Artificial Sequence
  Description of Artificial Sequence: Synthetic oligonucleotide
  Sense strand starting at position 3863 of SEQ ID NO: 1241252
guuuguaauguggugucuu

SEQ ID NO: 1258245 - RNA, 19 nt, Artificial Sequence
  Description of Artificial Sequence: Synthetic oligonucleotide
  Antisense strand to SEQ ID NO: 1258244
aagacaccacauuacaaac

SEQ ID NO: 1258246 - RNA, 19 nt, Artificial Sequence
  Description of Artificial Sequence: Synthetic oligonucleotide
  Sense strand starting at position 3871 of SEQ ID NO: 1241252
uguggugucuugaauggga

SEQ ID NO: 1258247 - RNA, 19 nt, Artificial Sequence
  Description of Artificial Sequence: Synthetic oligonucleotide
  Antisense strand to SEQ ID NO: 1258246
ucccauucaagacaccaca

SEQ ID NO: 1258248 - RNA, 19 nt, Artificial Sequence
  Description of Artificial Sequence: Synthetic oligonucleotide
  Sense strand starting at position 3932 of SEQ ID NO: 1241252
cuaguaaagcuggaccaua

SEQ ID NO: 1258249 - RNA, 19 nt, Artificial Sequence
  Description of Artificial Sequence: Synthetic oligonucleotide
  Antisense strand to SEQ ID NO: 1258248
uaugguccagcuuuacuag

SEQ ID NO: 1258250 - RNA, 19 nt, Artificial Sequence
  Description of Artificial Sequence: Synthetic oligonucleotide
  Sense strand starting at position 3940 of SEQ ID NO: 1241252
gcuggaccauaguuaauca

SEQ ID NO: 1258251 - RNA, 19 nt, Artificial Sequence
  Description of Artificial Sequence: Synthetic oligonucleotide
  Antisense strand to SEQ ID NO: 1258250
ugauuaacuaugguccagc

SEQ ID NO: 1258252 - RNA, 19 nt, Artificial Sequence
  Description of Artificial Sequence: Synthetic oligonucleotide
  Sense strand starting at position 108 of SEQ ID NO: 1241253
uagaguauucugugcauau

SEQ ID NO: 1258253 - RNA, 19 nt, Artificial Sequence
  Description of Artificial Sequence: Synthetic oligonucleotide
  Antisense strand to SEQ ID NO: 1258252
auaugcacagaauacucua

SEQ ID NO: 1258254 - RNA, 19 nt, Artificial Sequence
  Description of Artificial Sequence: Synthetic oligonucleotide
  Sense strand starting at position 109 of SEQ ID NO: 1241253
agaguauucugugcauauc

SEQ ID NO: 1258255 - RNA, 19 nt, Artificial Sequence
  Description of Artificial Sequence: Synthetic oligonucleotide
  Antisense strand to SEQ ID NO: 1258254
gauaugcacagaauacucu

SEQ ID NO: 1258256 - RNA, 19 nt, Artificial Sequence
  Description of Artificial Sequence: Synthetic oligonucleotide
  Sense strand starting at position 110 of SEQ ID NO: 1241253
gaguauucugugcauaucu

SEQ ID NO: 1258257 - RNA, 19 nt, Artificial Sequence
  Description of Artificial Sequence: Synthetic oligonucleotide
  Antisense strand to SEQ ID NO: 1258256
agauaugcacagaauacuc

SEQ ID NO: 1258258 - RNA, 19 nt, Artificial Sequence
  Description of Artificial Sequence: Synthetic oligonucleotide
  Sense strand starting at position 119 of SEQ ID NO: 1241253
gugcauaucucccucuuau

SEQ ID NO: 1258259 - RNA, 19 nt, Artificial Sequence
  Description of Artificial Sequence: Synthetic oligonucleotide
  Antisense strand to SEQ ID NO: 1258258
auaagagggagauaugcac

SEQ ID NO: 1258260 - RNA, 19 nt, Artificial Sequence
  Description of Artificial Sequence: Synthetic oligonucleotide
  Sense strand starting at position 161 of SEQ ID NO: 1241253
ugaagugacugcuuucugu

SEQ ID NO: 1258261 - RNA, 19 nt, Artificial Sequence
  Description of Artificial Sequence: Synthetic oligonucleotide
  Antisense strand to SEQ ID NO: 1258260
acagaaagcagucacuuca

SEQ ID NO: 1258262 - RNA, 19 nt, Artificial Sequence
  Description of Artificial Sequence: Synthetic oligonucleotide
  Sense strand starting at position 167 of SEQ ID NO: 1241253
gacugcuuucuguaccuga

SEQ ID NO: 1258263 - RNA, 19 nt, Artificial Sequence
  Description of Artificial Sequence: Synthetic oligonucleotide
  Antisense strand to SEQ ID NO: 1258262
ucagguacagaaagcaguc

SEQ ID NO: 1258264 - RNA, 19 nt, Artificial Sequence
  Description of Artificial Sequence: Synthetic oligonucleotide
  Sense strand starting at position 368 of SEQ ID NO: 1241253
gugccuagcuaauuauuua

SEQ ID NO: 1258265 - RNA, 19 nt, Artificial Sequence
  Description of Artificial Sequence: Synthetic oligonucleotide
  Antisense strand to SEQ ID NO: 1258264
uaaauaauuagcuaggcac

SEQ ID NO: 1258266 - RNA, 19 nt, Artificial Sequence
  Description of Artificial Sequence: Synthetic oligonucleotide
  Sense strand starting at position 552 of SEQ ID NO: 1241253
uuuauuagucuugguaacu

SEQ ID NO: 1258267 - RNA, 19 nt, Artificial Sequence
  Description of Artificial Sequence: Synthetic oligonucleotide
  Antisense strand to SEQ ID NO: 1258266
aguuaccaagacuaauaaa

SEQ ID NO: 1258268 - RNA, 19 nt, Artificial Sequence
  Description of Artificial Sequence: Synthetic oligonucleotide
  Sense strand starting at position 553 of SEQ ID NO: 1241253
uuauuagucuugguaacuu

SEQ ID NO: 1258269 - RNA, 19 nt, Artificial Sequence
  Description of Artificial Sequence: Synthetic oligonucleotide
  Antisense strand to SEQ ID NO: 1258268
aaguuaccaagacuaauaa

SEQ ID NO: 1258270 - RNA, 19 nt, Artificial Sequence
  Description of Artificial Sequence: Synthetic oligonucleotide
  Sense strand starting at position 589 of SEQ ID NO: 1241253
cuagcaaaucauggauacu

SEQ ID NO: 1258271 - RNA, 19 nt, Artificial Sequence
  Description of Artificial Sequence: Synthetic oligonucleotide
  Antisense strand to SEQ ID NO: 1258270
aguauccaugauuugcuag

SEQ ID NO: 1258272 - RNA, 19 nt, Artificial Sequence
  Description of Artificial Sequence: Synthetic oligonucleotide
  Sense strand starting at position 622 of SEQ ID NO: 1241253
acugaagucuaguaaauaa

SEQ ID NO: 1258273 - RNA, 19 nt, Artificial Sequence
  Description of Artificial Sequence: Synthetic oligonucleotide
  Antisense strand to SEQ ID NO: 1258272
uuauuuacuagacuucagu

SEQ ID NO: 1258274 - RNA, 19 nt, Artificial Sequence
  Description of Artificial Sequence: Synthetic oligonucleotide
  Sense strand starting at position 662 of SEQ ID NO: 1241253
aaagucuugccugaaauag

SEQ ID NO: 1258275 - RNA, 19 nt, Artificial Sequence
  Description of Artificial Sequence: Synthetic oligonucleotide
  Antisense strand to SEQ ID NO: 1258274
cuauuucaggcaagacuuu

SEQ ID NO: 1258276 - RNA, 19 nt, Artificial Sequence
  Description of Artificial Sequence: Synthetic oligonucleotide
  Sense strand starting at position 1009 of SEQ ID NO: 1241253
ucacaucuuguugaguagu

SEQ ID NO: 1258277 - RNA, 19 nt, Artificial Sequence
  Description of Artificial Sequence: Synthetic oligonucleotide
  Antisense strand to SEQ ID NO: 1258276
acuacucaacaagauguga

SEQ ID NO: 1258278 - RNA, 19 nt, Artificial Sequence
  Description of Artificial Sequence: Synthetic oligonucleotide
  Sense strand starting at position 1011 of SEQ ID NO: 1241253
acaucuuguugaguaguau

SEQ ID NO: 1258279 - RNA, 19 nt, Artificial Sequence
  Description of Artificial Sequence: Synthetic oligonucleotide
  Antisense strand to SEQ ID NO: 1258278
auacuacucaacaagaugu

SEQ ID NO: 1258280 - RNA, 19 nt, Artificial Sequence
  Description of Artificial Sequence: Synthetic oligonucleotide
  Sense strand starting at position 1012 of SEQ ID NO: 1241253
caucuuguugaguaguauu

SEQ ID NO: 1258281 - RNA, 19 nt, Artificial Sequence
  Description of Artificial Sequence: Synthetic oligonucleotide
  Antisense strand to SEQ ID NO: 1258280
aauacuacucaacaagaug

SEQ ID NO: 1258282 - RNA, 19 nt, Artificial Sequence
  Description of Artificial Sequence: Synthetic oligonucleotide
  Sense strand starting at position 1309 of SEQ ID NO: 1241253
aagacuuacucugagggaa

SEQ ID NO: 1258283 - RNA, 19 nt, Artificial Sequence
  Description of Artificial Sequence: Synthetic oligonucleotide
  Antisense strand to SEQ ID NO: 1258282
uucccucagaguaagucuu

SEQ ID NO: 1258284 - RNA, 19 nt, Artificial Sequence
  Description of Artificial Sequence: Synthetic oligonucleotide
  Sense strand starting at position 1552 of SEQ ID NO: 1241253
gaguguggcugccuggaua

SEQ ID NO: 1258285 - RNA, 19 nt, Artificial Sequence
  Description of Artificial Sequence: Synthetic oligonucleotide
  Antisense strand to SEQ ID NO: 1258284
uauccaggcagccacacuc

SEQ ID NO: 1258286 - RNA, 19 nt, Artificial Sequence
  Description of Artificial Sequence: Synthetic oligonucleotide
  Sense strand starting at position 1705 of SEQ ID NO: 1241253
uggagauccuaagcccuaa

SEQ ID NO: 1258287 - RNA, 19 nt, Artificial Sequence
  Description of Artificial Sequence: Synthetic oligonucleotide
  Antisense strand to SEQ ID NO: 1258286
uuagggcuuaggaucucca

SEQ ID NO: 1258288 - RNA, 19 nt, Artificial Sequence
  Description of Artificial Sequence: Synthetic oligonucleotide
  Sense strand starting at position 1833 of SEQ ID NO: 1241253
ggaggcaguguucaaggau

SEQ ID NO: 1258289 - RNA, 19 nt, Artificial Sequence
  Description of Artificial Sequence: Synthetic oligonucleotide
  Antisense strand to SEQ ID NO: 1258288
auccuugaacacugccucc

SEQ ID NO: 1258290 - RNA, 19 nt, Artificial Sequence
  Description of Artificial Sequence: Synthetic oligonucleotide
  Sense strand starting at position 1836 of SEQ ID NO: 1241253
ggcaguguucaaggauuga

SEQ ID NO: 1258291 - RNA, 19 nt, Artificial Sequence
  Description of Artificial Sequence: Synthetic oligonucleotide
  Antisense strand to SEQ ID NO: 1258290
ucaauccuugaacacugcc

SEQ ID NO: 1258292 - RNA, 19 nt, Artificial Sequence
  Description of Artificial Sequence: Synthetic oligonucleotide
  Sense strand starting at position 1847 of SEQ ID NO: 1241253
aggauugauucuguaguag

SEQ ID NO: 1258293 - RNA, 19 nt, Artificial Sequence
  Description of Artificial Sequence: Synthetic oligonucleotide
  Antisense strand to SEQ ID NO: 1258292
cuacuacagaaucaauccu

SEQ ID NO: 1258294 - RNA, 19 nt, Artificial Sequence
  Description of Artificial Sequence: Synthetic oligonucleotide
  Sense strand starting at position 1897 of SEQ ID NO: 1241253
ggcagagucccaggccaaa

SEQ ID NO: 1258295 - RNA, 19 nt, Artificial Sequence
  Description of Artificial Sequence: Synthetic oligonucleotide
  Antisense strand to SEQ ID NO: 1258294
uuuggccugggacucugcc

SEQ ID NO: 1258296 - RNA, 19 nt, Artificial Sequence
  Description of Artificial Sequence: Synthetic oligonucleotide
  Sense strand starting at position 1939 of SEQ ID NO: 1241253
gagcgaucugggugacaca

SEQ ID NO: 1258297 - RNA, 19 nt, Artificial Sequence
  Description of Artificial Sequence: Synthetic oligonucleotide
  Antisense strand to SEQ ID NO: 1258296
ugugucacccagaucgcuc

SEQ ID NO: 1258298 - RNA, 19 nt, Artificial Sequence
  Description of Artificial Sequence: Synthetic oligonucleotide
  Sense strand starting at position 2419 of SEQ ID NO: 1241253
caaggaaacuuucuagggu

SEQ ID NO: 1258299 - RNA, 19 nt, Artificial Sequence
  Description of Artificial Sequence: Synthetic oligonucleotide
  Antisense strand to SEQ ID NO: 1258298
acccuagaaaguuuccuug

SEQ ID NO: 1258300 - RNA, 19 nt, Artificial Sequence
  Description of Artificial Sequence: Synthetic oligonucleotide
  Sense strand starting at position 2504 of SEQ ID NO: 1241253
ugguuaagcgaggguacau

SEQ ID NO: 1258301 - RNA, 19 nt, Artificial Sequence
  Description of Artificial Sequence: Synthetic oligonucleotide
  Antisense strand to SEQ ID NO: 1258300
auguacccucgcuuaacca

SEQ ID NO: 1258302 - RNA, 19 nt, Artificial Sequence
  Description of Artificial Sequence: Synthetic oligonucleotide
  Sense strand starting at position 2513 of SEQ ID NO: 1241253
gaggguacauaacuguauu

SEQ ID NO: 1258303 - RNA, 19 nt, Artificial Sequence
  Description of Artificial Sequence: Synthetic oligonucleotide
  Antisense strand to SEQ ID NO: 1258302
aauacaguuauguacccuc

SEQ ID NO: 1258304 - RNA, 19 nt, Artificial Sequence
  Description of Artificial Sequence: Synthetic oligonucleotide
  Sense strand starting at position 3116 of SEQ ID NO: 1241253
gggagcuugaccgggaaga

SEQ ID NO: 1258305 - RNA, 19 nt, Artificial Sequence
  Description of Artificial Sequence: Synthetic oligonucleotide
  Antisense strand to SEQ ID NO: 1258304
ucuucccggucaagcuccc

SEQ ID NO: 1258306 - RNA, 19 nt, Artificial Sequence
  Description of Artificial Sequence: Synthetic oligonucleotide
  Sense strand starting at position 3117 of SEQ ID NO: 1241253
ggagcuugaccgggaagaa

SEQ ID NO: 1258307 - RNA, 19 nt, Artificial Sequence
  Description of Artificial Sequence: Synthetic oligonucleotide
  Antisense strand to SEQ ID NO: 1258306
uucuucccggucaagcucc

SEQ ID NO: 1258308 - RNA, 19 nt, Artificial Sequence
  Description of Artificial Sequence: Synthetic oligonucleotide
  Sense strand starting at position 3130 of SEQ ID NO: 1241253
gaagaauuagcuugaccug

SEQ ID NO: 1258309 - RNA, 19 nt, Artificial Sequence
  Description of Artificial Sequence: Synthetic oligonucleotide
  Antisense strand to SEQ ID NO: 1258308
caggucaagcuaauucuuc

SEQ ID NO: 1258310 - RNA, 19 nt, Artificial Sequence
  Description of Artificial Sequence: Synthetic oligonucleotide
  Sense strand starting at position 3131 of SEQ ID NO: 1241253
aagaauuagcuugaccugu

SEQ ID NO: 1258311 - RNA, 19 nt, Artificial Sequence
  Description of Artificial Sequence: Synthetic oligonucleotide
  Antisense strand to SEQ ID NO: 1258310
acaggucaagcuaauucuu

SEQ ID NO: 1258312 - RNA, 19 nt, Artificial Sequence
  Description of Artificial Sequence: Synthetic oligonucleotide
  Sense strand starting at position 3458 of SEQ ID NO: 1241253
acagucuugagcugugauc

SEQ ID NO: 1258313 - RNA, 19 nt, Artificial Sequence
  Description of Artificial Sequence: Synthetic oligonucleotide
  Antisense strand to SEQ ID NO: 1258312
gaucacagcucaagacugu

SEQ ID NO: 1258314 - RNA, 19 nt, Artificial Sequence
  Description of Artificial Sequence: Synthetic oligonucleotide
  Sense strand starting at position 3460 of SEQ ID NO: 1241253
agucuugagcugugaucca

SEQ ID NO: 1258315 - RNA, 19 nt, Artificial Sequence
  Description of Artificial Sequence: Synthetic oligonucleotide
  Antisense strand to SEQ ID NO: 1258314
uggaucacagcucaagacu

SEQ ID NO: 1258316 - RNA, 19 nt, Artificial Sequence
  Description of Artificial Sequence: Synthetic oligonucleotide
  Sense strand starting at position 3495 of SEQ ID NO: 1241253
gaaauaaaguuagcgaguu

SEQ ID NO: 1258317 - RNA, 19 nt, Artificial Sequence
  Description of Artificial Sequence: Synthetic oligonucleotide
  Antisense strand to SEQ ID NO: 1258316
aacucgcuaacuuuauuuc

SEQ ID NO: 1258318 - RNA, 19 nt, Artificial Sequence
  Description of Artificial Sequence: Synthetic oligonucleotide
  Sense strand starting at position 3507 of SEQ ID NO: 1241253
gcgaguuuaaaugaggcuu

SEQ ID NO: 1258319 - RNA, 19 nt, Artificial Sequence
  Description of Artificial Sequence: Synthetic oligonucleotide
  Antisense strand to SEQ ID NO: 1258318
aagccucauuuaaacucgc

SEQ ID NO: 1258320 - RNA, 19 nt, Artificial Sequence
  Description of Artificial Sequence: Synthetic oligonucleotide
  Sense strand starting at position 3529 of SEQ ID NO: 1241253
uuuggaauggcuugaauac

SEQ ID NO: 1258321 - RNA, 19 nt, Artificial Sequence
  Description of Artificial Sequence: Synthetic oligonucleotide
  Antisense strand to SEQ ID NO: 1258320
guauucaagccauuccaaa

SEQ ID NO: 1258322 - RNA, 19 nt, Artificial Sequence
  Description of Artificial Sequence: Synthetic oligonucleotide
  Sense strand starting at position 3593 of SEQ ID NO: 1241253
gguugaaguuucuuagaaa

SEQ ID NO: 1258323 - RNA, 19 nt, Artificial Sequence
  Description of Artificial Sequence: Synthetic oligonucleotide
  Antisense strand to SEQ ID NO: 1258322
uuucuaagaaacuucaacc

SEQ ID NO: 1258324 - RNA, 19 nt, Artificial Sequence
  Description of Artificial Sequence: Synthetic oligonucleotide
  Sense strand starting at position 3619 of SEQ ID NO: 1241253
acagaaauguagucucagu

SEQ ID NO: 1258325 - RNA, 19 nt, Artificial Sequence
  Description of Artificial Sequence: Synthetic oligonucleotide
  Antisense strand to SEQ ID NO: 1258324
acugagacuacauuucugu

SEQ ID NO: 1258326 - RNA, 19 nt, Artificial Sequence
  Description of Artificial Sequence: Synthetic oligonucleotide
  Sense strand starting at position 3902 of SEQ ID NO: 1241253
guaggaggauggucucgua

SEQ ID NO: 1258327 - RNA, 19 nt, Artificial Sequence
  Description of Artificial Sequence: Synthetic oligonucleotide
  Antisense strand to SEQ ID NO: 1258326
uacgagaccauccuccuac

SEQ ID NO: 1258328 - RNA, 19 nt, Artificial Sequence
  Description of Artificial Sequence: Synthetic oligonucleotide
  Sense strand starting at position 3921 of SEQ ID NO: 1241253
ucuacuugucuggagguca

SEQ ID NO: 1258329 - RNA, 19 nt, Artificial Sequence
  Description of Artificial Sequence: Synthetic oligonucleotide
  Antisense strand to SEQ ID NO: 1258328
ugaccuccagacaaguaga

SEQ ID NO: 1258330 - RNA, 19 nt, Artificial Sequence
  Description of Artificial Sequence: Synthetic oligonucleotide
  Sense strand starting at position 3966 of SEQ ID NO: 1241253
ucagguuauuccucuucuu

SEQ ID NO: 1258331 - RNA, 19 nt, Artificial Sequence
  Description of Artificial Sequence: Synthetic oligonucleotide
  Antisense strand to SEQ ID NO: 1258330
aagaagaggaauaaccuga

SEQ ID NO: 1258332 - RNA, 19 nt, Artificial Sequence
  Description of Artificial Sequence: Synthetic oligonucleotide
  Sense strand starting at position 97 of SEQ ID NO: 1241254
gucugucugccuuaaauua

SEQ ID NO: 1258333 - RNA, 19 nt, Artificial Sequence
  Description of Artificial Sequence: Synthetic oligonucleotide
  Antisense strand to SEQ ID NO: 1258332
uaauuuaaggcagacagac

SEQ ID NO: 1258334 - RNA, 19 nt, Artificial Sequence
  Description of Artificial Sequence: Synthetic oligonucleotide
  Sense strand starting at position 199 of SEQ ID NO: 1241254
gaugaagccugaguucucu

SEQ ID NO: 1258335 - RNA, 19 nt, Artificial Sequence
  Description of Artificial Sequence: Synthetic oligonucleotide
  Antisense strand to SEQ ID NO: 1258334
agagaacucaggcuucauc

SEQ ID NO: 1258336 - RNA, 19 nt, Artificial Sequence
  Description of Artificial Sequence: Synthetic oligonucleotide
  Sense strand starting at position 205 of SEQ ID NO: 1241254
gccugaguucucuauuagg

SEQ ID NO: 1258337 - RNA, 19 nt, Artificial Sequence
  Description of Artificial Sequence: Synthetic oligonucleotide
  Antisense strand to SEQ ID NO: 1258336
ccuaauagagaacucaggc

SEQ ID NO: 1258338 - RNA, 19 nt, Artificial Sequence
  Description of Artificial Sequence: Synthetic oligonucleotide
  Sense strand starting at position 216 of SEQ ID NO: 1241254
cuauuagggucuuccaaga

SEQ ID NO: 1258339 - RNA, 19 nt, Artificial Sequence
  Description of Artificial Sequence: Synthetic oligonucleotide
  Antisense strand to SEQ ID NO: 1258338
ucuuggaagacccuaauag

SEQ ID NO: 1258340 - RNA, 19 nt, Artificial Sequence
  Description of Artificial Sequence: Synthetic oligonucleotide
  Sense strand starting at position 481 of SEQ ID NO: 1241254
uagaguauucugugcauau

SEQ ID NO: 1258341 - RNA, 19 nt, Artificial Sequence
  Description of Artificial Sequence: Synthetic oligonucleotide
  Antisense strand to SEQ ID NO: 1258340
auaugcacagaauacucua

SEQ ID NO: 1258342 - RNA, 19 nt, Artificial Sequence
  Description of Artificial Sequence: Synthetic oligonucleotide
  Sense strand starting at position 482 of SEQ ID NO: 1241254
agaguauucugugcauauc

SEQ ID NO: 1258343 - RNA, 19 nt, Artificial Sequence
  Description of Artificial Sequence: Synthetic oligonucleotide
  Antisense strand to SEQ ID NO: 1258342
gauaugcacagaauacucu

SEQ ID NO: 1258344 - RNA, 19 nt, Artificial Sequence
  Description of Artificial Sequence: Synthetic oligonucleotide
  Sense strand starting at position 483 of SEQ ID NO: 1241254
gaguauucugugcauaucu

SEQ ID NO: 1258345 - RNA, 19 nt, Artificial Sequence
  Description of Artificial Sequence: Synthetic oligonucleotide
  Antisense strand to SEQ ID NO: 1258344
agauaugcacagaauacuc

SEQ ID NO: 1258346 - RNA, 19 nt, Artificial Sequence
  Description of Artificial Sequence: Synthetic oligonucleotide
  Sense strand starting at position 492 of SEQ ID NO: 1241254
gugcauaucucccucuuau

SEQ ID NO: 1258347 - RNA, 19 nt, Artificial Sequence
  Description of Artificial Sequence: Synthetic oligonucleotide
  Antisense strand to SEQ ID NO: 1258346
auaagagggagauaugcac

SEQ ID NO: 1258348 - RNA, 19 nt, Artificial Sequence
  Description of Artificial Sequence: Synthetic oligonucleotide
  Sense strand starting at position 534 of SEQ ID NO: 1241254
ugaagugacugcuuucugu

SEQ ID NO: 1258349 - RNA, 19 nt, Artificial Sequence
  Description of Artificial Sequence: Synthetic oligonucleotide
  Antisense strand to SEQ ID NO: 1258348
acagaaagcagucacuuca

SEQ ID NO: 1258350 - RNA, 19 nt, Artificial Sequence
  Description of Artificial Sequence: Synthetic oligonucleotide
  Sense strand starting at position 540 of SEQ ID NO: 1241254
gacugcuuucuguaccuga

SEQ ID NO: 1258351 - RNA, 19 nt, Artificial Sequence
  Description of Artificial Sequence: Synthetic oligonucleotide
  Antisense strand to SEQ ID NO: 1258350
ucagguacagaaagcaguc

SEQ ID NO: 1258352 - RNA, 19 nt, Artificial Sequence
  Description of Artificial Sequence: Synthetic oligonucleotide
  Sense strand starting at position 741 of SEQ ID NO: 1241254
gugccuagcuaauuauuua

SEQ ID NO: 1258353 - RNA, 19 nt, Artificial Sequence
  Description of Artificial Sequence: Synthetic oligonucleotide
  Antisense strand to SEQ ID NO: 1258352
uaaauaauuagcuaggcac

SEQ ID NO: 1258354 - RNA, 19 nt, Artificial Sequence
  Description of Artificial Sequence: Synthetic oligonucleotide
  Sense strand starting at position 925 of SEQ ID NO: 1241254
uuuauuagucuugguaacu

SEQ ID NO: 1258355 - RNA, 19 nt, Artificial Sequence
  Description of Artificial Sequence: Synthetic oligonucleotide
  Antisense strand to SEQ ID NO: 1258354
aguuaccaagacuaauaaa

SEQ ID NO: 1258356 - RNA, 19 nt, Artificial Sequence
  Description of Artificial Sequence: Synthetic oligonucleotide
  Sense strand starting at position 926 of SEQ ID NO: 1241254
uuauuagucuugguaacuu

SEQ ID NO: 1258357 - RNA, 19 nt, Artificial Sequence
  Description of Artificial Sequence: Synthetic oligonucleotide
  Antisense strand to SEQ ID NO: 1258356
aaguuaccaagacuaauaa

SEQ ID NO: 1258358 - RNA, 19 nt, Artificial Sequence
  Description of Artificial Sequence: Synthetic oligonucleotide
  Sense strand starting at position 962 of SEQ ID NO: 1241254
cuagcaaaucauggauacu

SEQ ID NO: 1258359 - RNA, 19 nt, Artificial Sequence
  Description of Artificial Sequence: Synthetic oligonucleotide
  Antisense strand to SEQ ID NO: 1258358
aguauccaugauuugcuag

SEQ ID NO: 1258360 - RNA, 19 nt, Artificial Sequence
  Description of Artificial Sequence: Synthetic oligonucleotide
  Sense strand starting at position 995 of SEQ ID NO: 1241254
acugaagucuaguaaauaa

SEQ ID NO: 1258361 - RNA, 19 nt, Artificial Sequence
  Description of Artificial Sequence: Synthetic oligonucleotide
  Antisense strand to SEQ ID NO: 1258360
uuauuuacuagacuucagu

SEQ ID NO: 1258362 - RNA, 19 nt, Artificial Sequence
  Description of Artificial Sequence: Synthetic oligonucleotide
  Sense strand starting at position 1035 of SEQ ID NO: 1241254
aaagucuugccugaaauag

SEQ ID NO: 1258363 - RNA, 19 nt, Artificial Sequence
  Description of Artificial Sequence: Synthetic oligonucleotide
  Antisense strand to SEQ ID NO: 1258362
cuauuucaggcaagacuuu

SEQ ID NO: 1258364 - RNA, 19 nt, Artificial Sequence
  Description of Artificial Sequence: Synthetic oligonucleotide
  Sense strand starting at position 1382 of SEQ ID NO: 1241254
ucacaucuuguugaguagu

SEQ ID NO: 1258365 - RNA, 19 nt, Artificial Sequence
  Description of Artificial Sequence: Synthetic oligonucleotide
  Antisense strand to SEQ ID NO: 1258364
acuacucaacaagauguga

SEQ ID NO: 1258366 - RNA, 19 nt, Artificial Sequence
  Description of Artificial Sequence: Synthetic oligonucleotide
  Sense strand starting at position 1384 of SEQ ID NO: 1241254
acaucuuguugaguaguau

SEQ ID NO: 1258367 - RNA, 19 nt, Artificial Sequence
  Description of Artificial Sequence: Synthetic oligonucleotide
  Antisense strand to SEQ ID NO: 1258366
auacuacucaacaagaugu

SEQ ID NO: 1258368 - RNA, 19 nt, Artificial Sequence
  Description of Artificial Sequence: Synthetic oligonucleotide
  Sense strand starting at position 1385 of SEQ ID NO: 1241254
caucuuguugaguaguauu

SEQ ID NO: 1258369 - RNA, 19 nt, Artificial Sequence
  Description of Artificial Sequence: Synthetic oligonucleotide
  Antisense strand to SEQ ID NO: 1258368
aauacuacucaacaagaug

SEQ ID NO: 1258370 - RNA, 19 nt, Artificial Sequence
  Description of Artificial Sequence: Synthetic oligonucleotide
  Sense strand starting at position 1682 of SEQ ID NO: 1241254
aagacuuacucugagggaa

SEQ ID NO: 1258371 - RNA, 19 nt, Artificial Sequence
  Description of Artificial Sequence: Synthetic oligonucleotide
  Antisense strand to SEQ ID NO: 1258370
uucccucagaguaagucuu

SEQ ID NO: 1258372 - RNA, 19 nt, Artificial Sequence
  Description of Artificial Sequence: Synthetic oligonucleotide
  Sense strand starting at position 1925 of SEQ ID NO: 1241254
gaguguggcugccuggaua

SEQ ID NO: 1258373 - RNA, 19 nt, Artificial Sequence
  Description of Artificial Sequence: Synthetic oligonucleotide
  Antisense strand to SEQ ID NO: 1258372
uauccaggcagccacacuc

SEQ ID NO: 1258374 - RNA, 19 nt, Artificial Sequence
  Description of Artificial Sequence: Synthetic oligonucleotide
  Sense strand starting at position 2078 of SEQ ID NO: 1241254
uggagauccuaagcccuaa

SEQ ID NO: 1258375 - RNA, 19 nt, Artificial Sequence
  Description of Artificial Sequence: Synthetic oligonucleotide
  Antisense strand to SEQ ID NO: 1258374
uuagggcuuaggaucucca

SEQ ID NO: 1258376 - RNA, 19 nt, Artificial Sequence
  Description of Artificial Sequence: Synthetic oligonucleotide
  Sense strand starting at position 2206 of SEQ ID NO: 1241254
ggaggcaguguucaaggau

SEQ ID NO: 1258377 - RNA, 19 nt, Artificial Sequence
  Description of Artificial Sequence: Synthetic oligonucleotide
  Antisense strand to SEQ ID NO: 1258376
auccuugaacacugccucc

SEQ ID NO: 1258378 - RNA, 19 nt, Artificial Sequence
  Description of Artificial Sequence: Synthetic oligonucleotide
  Sense strand starting at position 2209 of SEQ ID NO: 1241254
ggcaguguucaaggauuga

SEQ ID NO: 1258379 - RNA, 19 nt, Artificial Sequence
  Description of Artificial Sequence: Synthetic oligonucleotide
  Antisense strand to SEQ ID NO: 1258378
ucaauccuugaacacugcc

SEQ ID NO: 1258380 - RNA, 19 nt, Artificial Sequence
  Description of Artificial Sequence: Synthetic oligonucleotide
  Sense strand starting at position 2220 of SEQ ID NO: 1241254
aggauugauucuguaguag

SEQ ID NO: 1258381 - RNA, 19 nt, Artificial Sequence
  Description of Artificial Sequence: Synthetic oligonucleotide
  Antisense strand to SEQ ID NO: 1258380
cuacuacagaaucaauccu

SEQ ID NO: 1258382 - RNA, 19 nt, Artificial Sequence
  Description of Artificial Sequence: Synthetic oligonucleotide
  Sense strand starting at position 2270 of SEQ ID NO: 1241254
ggcagagucccaggccaaa

SEQ ID NO: 1258383 - RNA, 19 nt, Artificial Sequence
  Description of Artificial Sequence: Synthetic oligonucleotide
  Antisense strand to SEQ ID NO: 1258382
uuuggccugggacucugcc

SEQ ID NO: 1258384 - RNA, 19 nt, Artificial Sequence
  Description of Artificial Sequence: Synthetic oligonucleotide
  Sense strand starting at position 2312 of SEQ ID NO: 1241254
gagcgaucugggugacaca

SEQ ID NO: 1258385 - RNA, 19 nt, Artificial Sequence
  Description of Artificial Sequence: Synthetic oligonucleotide
  Antisense strand to SEQ ID NO: 1258384
ugugucacccagaucgcuc

SEQ ID NO: 1258386 - RNA, 19 nt, Artificial Sequence
  Description of Artificial Sequence: Synthetic oligonucleotide
  Sense strand starting at position 2792 of SEQ ID NO: 1241254
caaggaaacuuucuagggu

SEQ ID NO: 1258387 - RNA, 19 nt, Artificial Sequence
  Description of Artificial Sequence: Synthetic oligonucleotide
  Antisense strand to SEQ ID NO: 1258386
acccuagaaaguuuccuug

SEQ ID NO: 1258388 - RNA, 19 nt, Artificial Sequence
  Description of Artificial Sequence: Synthetic oligonucleotide
  Sense strand starting at position 2877 of SEQ ID NO: 1241254
ugguuaagcgaggguacau

SEQ ID NO: 1258389 - RNA, 19 nt, Artificial Sequence
  Description of Artificial Sequence: Synthetic oligonucleotide
  Antisense strand to SEQ ID NO: 1258388
auguacccucgcuuaacca

SEQ ID NO: 1258390 - RNA, 19 nt, Artificial Sequence
  Description of Artificial Sequence: Synthetic oligonucleotide
  Sense strand starting at position 2886 of SEQ ID NO: 1241254
gaggguacauaacuguauu

SEQ ID NO: 1258391 - RNA, 19 nt, Artificial Sequence
  Description of Artificial Sequence: Synthetic oligonucleotide
  Antisense strand to SEQ ID NO: 1258390
aauacaguuauguacccuc

SEQ ID NO: 1258392 - RNA, 19 nt, Artificial Sequence
  Description of Artificial Sequence: Synthetic oligonucleotide
  Sense strand starting at position 3489 of SEQ ID NO: 1241254
gggagcuugaccgggaaga

SEQ ID NO: 1258393 - RNA, 19 nt, Artificial Sequence
  Description of Artificial Sequence: Synthetic oligonucleotide
  Antisense strand to SEQ ID NO: 1258392
ucuucccggucaagcuccc

SEQ ID NO: 1258394 - RNA, 19 nt, Artificial Sequence
  Description of Artificial Sequence: Synthetic oligonucleotide
  Sense strand starting at position 3490 of SEQ ID NO: 1241254
ggagcuugaccgggaagaa

SEQ ID NO: 1258395 - RNA, 19 nt, Artificial Sequence
  Description of Artificial Sequence: Synthetic oligonucleotide
  Antisense strand to SEQ ID NO: 1258394
uucuucccggucaagcucc

SEQ ID NO: 1258396 - RNA, 19 nt, Artificial Sequence
  Description of Artificial Sequence: Synthetic oligonucleotide
  Sense strand starting at position 3503 of SEQ ID NO: 1241254
gaagaauuagcuugaccug

SEQ ID NO: 1258397 - RNA, 19 nt, Artificial Sequence
  Description of Artificial Sequence: Synthetic oligonucleotide
  Antisense strand to SEQ ID NO: 1258396
caggucaagcuaauucuuc

SEQ ID NO: 1258398 - RNA, 19 nt, Artificial Sequence
  Description of Artificial Sequence: Synthetic oligonucleotide
  Sense strand starting at position 3504 of SEQ ID NO: 1241254
aagaauuagcuugaccugu

SEQ ID NO: 1258399 - RNA, 19 nt, Artificial Sequence
  Description of Artificial Sequence: Synthetic oligonucleotide
  Antisense strand to SEQ ID NO: 1258398
acaggucaagcuaauucuu

SEQ ID NO: 1258400 - RNA, 19 nt, Artificial Sequence
  Description of Artificial Sequence: Synthetic oligonucleotide
  Sense strand starting at position 3831 of SEQ ID NO: 1241254
acagucuugagcugugauc

SEQ ID NO: 1258401 - RNA, 19 nt, Artificial Sequence
  Description of Artificial Sequence: Synthetic oligonucleotide
  Antisense strand to SEQ ID NO: 1258400
gaucacagcucaagacugu

SEQ ID NO: 1258402 - RNA, 19 nt, Artificial Sequence
  Description of Artificial Sequence: Synthetic oligonucleotide
  Sense strand starting at position 3833 of SEQ ID NO: 1241254
agucuugagcugugaucca

SEQ ID NO: 1258403 - RNA, 19 nt, Artificial Sequence
  Description of Artificial Sequence: Synthetic oligonucleotide
  Antisense strand to SEQ ID NO: 1258402
uggaucacagcucaagacu

SEQ ID NO: 1258404 - RNA, 19 nt, Artificial Sequence
  Description of Artificial Sequence: Synthetic oligonucleotide
  Sense strand starting at position 3868 of SEQ ID NO: 1241254
gaaauaaaguuagcgaguu

SEQ ID NO: 1258405 - RNA, 19 nt, Artificial Sequence
  Description of Artificial Sequence: Synthetic oligonucleotide
  Antisense strand to SEQ ID NO: 1258404
aacucgcuaacuuuauuuc

SEQ ID NO: 1258406 - RNA, 19 nt, Artificial Sequence
  Description of Artificial Sequence: Synthetic oligonucleotide
  Sense strand starting at position 3880 of SEQ ID NO: 1241254
gcgaguuuaaaugaggcuu

SEQ ID NO: 1258407 - RNA, 19 nt, Artificial Sequence
  Description of Artificial Sequence: Synthetic oligonucleotide
  Antisense strand to SEQ ID NO: 1258406
aagccucauuuaaacucgc

SEQ ID NO: 1258408 - RNA, 19 nt, Artificial Sequence
  Description of Artificial Sequence: Synthetic oligonucleotide
  Sense strand starting at position 3902 of SEQ ID NO: 1241254
uuuggaauggcuugaauac

SEQ ID NO: 1258409 - RNA, 19 nt, Artificial Sequence
  Description of Artificial Sequence: Synthetic oligonucleotide
  Antisense strand to SEQ ID NO: 1258408
guauucaagccauuccaaa

SEQ ID NO: 1258410 - RNA, 19 nt, Artificial Sequence
  Description of Artificial Sequence: Synthetic oligonucleotide
  Sense strand starting at position 3966 of SEQ ID NO: 1241254
gguugaaguuucuuagaaa

SEQ ID NO: 1258411 - RNA, 19 nt, Artificial Sequence
  Description of Artificial Sequence: Synthetic oligonucleotide
  Antisense strand to SEQ ID NO: 1258410
uuucuaagaaacuucaacc

SEQ ID NO: 1258412 - RNA, 19 nt, Artificial Sequence
  Description of Artificial Sequence: Synthetic oligonucleotide
  Sense strand starting at position 329 of SEQ ID NO: 1241255
gcagcagugaaucaagauu

SEQ ID NO: 1258413 - RNA, 19 nt, Artificial Sequence
  Description of Artificial Sequence: Synthetic oligonucleotide
  Antisense strand to SEQ ID NO: 1258412
aaucuugauucacugcugc

SEQ ID NO: 1258414 - RNA, 19 nt, Artificial Sequence
  Description of Artificial Sequence: Synthetic oligonucleotide
  Sense strand starting at position 597 of SEQ ID NO: 1241255
auccuuucgcuagacacaa

SEQ ID NO: 1258415 - RNA, 19 nt, Artificial Sequence
  Description of Artificial Sequence: Synthetic oligonucleotide
  Antisense strand to SEQ ID NO: 1258414
uugugucuagcgaaaggau

SEQ ID NO: 1258416 - RNA, 19 nt, Artificial Sequence
  Description of Artificial Sequence: Synthetic oligonucleotide
  Sense strand starting at position 777 of SEQ ID NO: 1241255
ggaacuuacccguguccua

SEQ ID NO: 1258417 - RNA, 19 nt, Artificial Sequence
  Description of Artificial Sequence: Synthetic oligonucleotide
  Antisense strand to SEQ ID NO: 1258416
uaggacacggguaaguucc

SEQ ID NO: 1258418 - RNA, 19 nt, Artificial Sequence
  Description of Artificial Sequence: Synthetic oligonucleotide
  Sense strand starting at position 950 of SEQ ID NO: 1241255
guuagaccugcuuaucuga

SEQ ID NO: 1258419 - RNA, 19 nt, Artificial Sequence
  Description of Artificial Sequence: Synthetic oligonucleotide
  Antisense strand to SEQ ID NO: 1258418
ucagauaagcaggucuaac

SEQ ID NO: 1258420 - RNA, 19 nt, Artificial Sequence
  Description of Artificial Sequence: Synthetic oligonucleotide
  Sense strand starting at position 957 of SEQ ID NO: 1241255
cugcuuaucugaggaggga

SEQ ID NO: 1258421 - RNA, 19 nt, Artificial Sequence
  Description of Artificial Sequence: Synthetic oligonucleotide
  Antisense strand to SEQ ID NO: 1258420
ucccuccucagauaagcag

SEQ ID NO: 1258422 - RNA, 19 nt, Artificial Sequence
  Description of Artificial Sequence: Synthetic oligonucleotide
  Sense strand starting at position 1178 of SEQ ID NO: 1241255
agagaaaguuugucuggca

SEQ ID NO: 1258423 - RNA, 19 nt, Artificial Sequence
  Description of Artificial Sequence: Synthetic oligonucleotide
  Antisense strand to SEQ ID NO: 1258422
ugccagacaaacuuucucu

SEQ ID NO: 1258424 - RNA, 19 nt, Artificial Sequence
  Description of Artificial Sequence: Synthetic oligonucleotide
  Sense strand starting at position 1179 of SEQ ID NO: 1241255
gagaaaguuugucuggcag

SEQ ID NO: 1258425 - RNA, 19 nt, Artificial Sequence
  Description of Artificial Sequence: Synthetic oligonucleotide
  Antisense strand to SEQ ID NO: 1258424
cugccagacaaacuuucuc

SEQ ID NO: 1258426 - RNA, 19 nt, Artificial Sequence
  Description of Artificial Sequence: Synthetic oligonucleotide
  Sense strand starting at position 1231 of SEQ ID NO: 1241255
auaggauagauaggugagu

SEQ ID NO: 1258427 - RNA, 19 nt, Artificial Sequence
  Description of Artificial Sequence: Synthetic oligonucleotide
  Antisense strand to SEQ ID NO: 1258426
acucaccuaucuauccuau

SEQ ID NO: 1258428 - RNA, 19 nt, Artificial Sequence
  Description of Artificial Sequence: Synthetic oligonucleotide
  Sense strand starting at position 1509 of SEQ ID NO: 1241255
ccgacaggugcccagaauu

SEQ ID NO: 1258429 - RNA, 19 nt, Artificial Sequence
  Description of Artificial Sequence: Synthetic oligonucleotide
  Antisense strand to SEQ ID NO: 1258428
aauucugggcaccugucgg

SEQ ID NO: 1258430 - RNA, 19 nt, Artificial Sequence
  Description of Artificial Sequence: Synthetic oligonucleotide
  Sense strand starting at position 1530 of SEQ ID NO: 1241255
gccaccgaauucuaaggaa

SEQ ID NO: 1258431 - RNA, 19 nt, Artificial Sequence
  Description of Artificial Sequence: Synthetic oligonucleotide
  Antisense strand to SEQ ID NO: 1258430
uuccuuagaauucgguggc

SEQ ID NO: 1258432 - RNA, 19 nt, Artificial Sequence
  Description of Artificial Sequence: Synthetic oligonucleotide
  Sense strand starting at position 2720 of SEQ ID NO: 1241255
agcauauugucaccucuca

SEQ ID NO: 1258433 - RNA, 19 nt, Artificial Sequence
  Description of Artificial Sequence: Synthetic oligonucleotide
  Antisense strand to SEQ ID NO: 1258432
ugagaggugacaauaugcu

SEQ ID NO: 1258434 - RNA, 19 nt, Artificial Sequence
  Description of Artificial Sequence: Synthetic oligonucleotide
  Sense strand starting at position 2811 of SEQ ID NO: 1241255
gggaaaugauuuggcauua

SEQ ID NO: 1258435 - RNA, 19 nt, Artificial Sequence
  Description of Artificial Sequence: Synthetic oligonucleotide
  Antisense strand to SEQ ID NO: 1258434
uaaugccaaaucauuuccc

SEQ ID NO: 1258436 - RNA, 19 nt, Artificial Sequence
  Description of Artificial Sequence: Synthetic oligonucleotide
  Sense strand starting at position 2820 of SEQ ID NO: 1241255
uuuggcauuauacggagaa

SEQ ID NO: 1258437 - RNA, 19 nt, Artificial Sequence
  Description of Artificial Sequence: Synthetic oligonucleotide
  Antisense strand to SEQ ID NO: 1258436
uucuccguauaaugccaaa

SEQ ID NO: 1258438 - RNA, 19 nt, Artificial Sequence
  Description of Artificial Sequence: Synthetic oligonucleotide
  Sense strand starting at position 2821 of SEQ ID NO: 1241255
uuggcauuauacggagaag

SEQ ID NO: 1258439 - RNA, 19 nt, Artificial Sequence
  Description of Artificial Sequence: Synthetic oligonucleotide
  Antisense strand to SEQ ID NO: 1258438
cuucuccguauaaugccaa

SEQ ID NO: 1258440 - RNA, 19 nt, Artificial Sequence
  Description of Artificial Sequence: Synthetic oligonucleotide
  Sense strand starting at position 2822 of SEQ ID NO: 1241255
uggcauuauacggagaagu

SEQ ID NO: 1258441 - RNA, 19 nt, Artificial Sequence
  Description of Artificial Sequence: Synthetic oligonucleotide
  Antisense strand to SEQ ID NO: 1258440
acuucuccguauaaugcca

SEQ ID NO: 1258442 - RNA, 19 nt, Artificial Sequence
  Description of Artificial Sequence: Synthetic oligonucleotide
  Sense strand starting at position 2824 of SEQ ID NO: 1241255
gcauuauacggagaaguug

SEQ ID NO: 1258443 - RNA, 19 nt, Artificial Sequence
  Description of Artificial Sequence: Synthetic oligonucleotide
  Antisense strand to SEQ ID NO: 1258442
caacuucuccguauaaugc

SEQ ID NO: 1258444 - RNA, 19 nt, Artificial Sequence
  Description of Artificial Sequence: Synthetic oligonucleotide
  Sense strand starting at position 2892 of SEQ ID NO: 1241255
gaggucaugugugcaccaa

SEQ ID NO: 1258445 - RNA, 19 nt, Artificial Sequence
  Description of Artificial Sequence: Synthetic oligonucleotide
  Antisense strand to SEQ ID NO: 1258444
uuggugcacacaugaccuc

SEQ ID NO: 1258446 - RNA, 19 nt, Artificial Sequence
  Description of Artificial Sequence: Synthetic oligonucleotide
  Sense strand starting at position 2896 of SEQ ID NO: 1241255
ucaugugugcaccaagaga

SEQ ID NO: 1258447 - RNA, 19 nt, Artificial Sequence
  Description of Artificial Sequence: Synthetic oligonucleotide
  Antisense strand to SEQ ID NO: 1258446
ucucuuggugcacacauga

SEQ ID NO: 1258448 - RNA, 19 nt, Artificial Sequence
  Description of Artificial Sequence: Synthetic oligonucleotide
  Sense strand starting at position 2934 of SEQ ID NO: 1241255
gaagccugcuuagaauguu

SEQ ID NO: 1258449 - RNA, 19 nt, Artificial Sequence
  Description of Artificial Sequence: Synthetic oligonucleotide
  Antisense strand to SEQ ID NO: 1258448
aacauucuaagcaggcuuc

SEQ ID NO: 1258450 - RNA, 19 nt, Artificial Sequence
  Description of Artificial Sequence: Synthetic oligonucleotide
  Sense strand starting at position 2937 of SEQ ID NO: 1241255
gccugcuuagaauguucca

SEQ ID NO: 1258451 - RNA, 19 nt, Artificial Sequence
  Description of Artificial Sequence: Synthetic oligonucleotide
  Antisense strand to SEQ ID NO: 1258450
uggaacauucuaagcaggc

SEQ ID NO: 1258452 - RNA, 19 nt, Artificial Sequence
  Description of Artificial Sequence: Synthetic oligonucleotide
  Sense strand starting at position 2940 of SEQ ID NO: 1241255
ugcuuagaauguuccaaac

SEQ ID NO: 1258453 - RNA, 19 nt, Artificial Sequence
  Description of Artificial Sequence: Synthetic oligonucleotide
  Antisense strand to SEQ ID NO: 1258452
guuuggaacauucuaagca

SEQ ID NO: 1258454 - RNA, 19 nt, Artificial Sequence
  Description of Artificial Sequence: Synthetic oligonucleotide
  Sense strand starting at position 2942 of SEQ ID NO: 1241255
cuuagaauguuccaaacug

SEQ ID NO: 1258455 - RNA, 19 nt, Artificial Sequence
  Description of Artificial Sequence: Synthetic oligonucleotide
  Antisense strand to SEQ ID NO: 1258454
caguuuggaacauucuaag

SEQ ID NO: 1258456 - RNA, 19 nt, Artificial Sequence
  Description of Artificial Sequence: Synthetic oligonucleotide
  Sense strand starting at position 2960 of SEQ ID NO: 1241255
ggaaacaagucuguauuag

SEQ ID NO: 1258457 - RNA, 19 nt, Artificial Sequence
  Description of Artificial Sequence: Synthetic oligonucleotide
  Antisense strand to SEQ ID NO: 1258456
cuaauacagacuuguuucc

SEQ ID NO: 1258458 - RNA, 19 nt, Artificial Sequence
  Description of Artificial Sequence: Synthetic oligonucleotide
  Sense strand starting at position 2961 of SEQ ID NO: 1241255
gaaacaagucuguauuagu

SEQ ID NO: 1258459 - RNA, 19 nt, Artificial Sequence
  Description of Artificial Sequence: Synthetic oligonucleotide
  Antisense strand to SEQ ID NO: 1258458
acuaauacagacuuguuuc

SEQ ID NO: 1258460 - RNA, 19 nt, Artificial Sequence
  Description of Artificial Sequence: Synthetic oligonucleotide
  Sense strand starting at position 3181 of SEQ ID NO: 1241255
agacuaagaugggacgauu

SEQ ID NO: 1258461 - RNA, 19 nt, Artificial Sequence
  Description of Artificial Sequence: Synthetic oligonucleotide
  Antisense strand to SEQ ID NO: 1258460
aaucgucccaucuuagucu

SEQ ID NO: 1258462 - RNA, 19 nt, Artificial Sequence
  Description of Artificial Sequence: Synthetic oligonucleotide
  Sense strand starting at position 3660 of SEQ ID NO: 1241255
augccuauuaacgguggaa

SEQ ID NO: 1258463 - RNA, 19 nt, Artificial Sequence
  Description of Artificial Sequence: Synthetic oligonucleotide
  Antisense strand to SEQ ID NO: 1258462
uuccaccguuaauaggcau

SEQ ID NO: 1258464 - RNA, 19 nt, Artificial Sequence
  Description of Artificial Sequence: Synthetic oligonucleotide
  Sense strand starting at position 3662 of SEQ ID NO: 1241255
gccuauuaacgguggaaug

SEQ ID NO: 1258465 - RNA, 19 nt, Artificial Sequence
  Description of Artificial Sequence: Synthetic oligonucleotide
  Antisense strand to SEQ ID NO: 1258464
cauuccaccguuaauaggc

SEQ ID NO: 1258466 - RNA, 19 nt, Artificial Sequence
  Description of Artificial Sequence: Synthetic oligonucleotide
  Sense strand starting at position 3698 of SEQ ID NO: 1241255
gcauuucuauaauggaaua

SEQ ID NO: 1258467 - RNA, 19 nt, Artificial Sequence
  Description of Artificial Sequence: Synthetic oligonucleotide
  Antisense strand to SEQ ID NO: 1258466
uauuccauuauagaaaugc

SEQ ID NO: 1258468 - RNA, 19 nt, Artificial Sequence
  Description of Artificial Sequence: Synthetic oligonucleotide
  Sense strand starting at position 3861 of SEQ ID NO: 1241255
uucuauauugcuuaagaag

SEQ ID NO: 1258469 - RNA, 19 nt, Artificial Sequence
  Description of Artificial Sequence: Synthetic oligonucleotide
  Antisense strand to SEQ ID NO: 1258468
cuucuuaagcaauauagaa

SEQ ID NO: 1258470 - RNA, 19 nt, Artificial Sequence
  Description of Artificial Sequence: Synthetic oligonucleotide
  Sense strand starting at position 3945 of SEQ ID NO: 1241255
guauuuccgcaguagagcu

SEQ ID NO: 1258471 - RNA, 19 nt, Artificial Sequence
  Description of Artificial Sequence: Synthetic oligonucleotide
  Antisense strand to SEQ ID NO: 1258470
agcucuacugcggaaauac

SEQ ID NO: 1258472 - RNA, 19 nt, Artificial Sequence
  Description of Artificial Sequence: Synthetic oligonucleotide
  Sense strand starting at position 203 of SEQ ID NO: 1241256
gggaauguuuauuaacuca

SEQ ID NO: 1258473 - RNA, 19 nt, Artificial Sequence
  Description of Artificial Sequence: Synthetic oligonucleotide
  Antisense strand to SEQ ID NO: 1258472
ugaguuaauaaacauuccc

SEQ ID NO: 1258474 - RNA, 19 nt, Artificial Sequence
  Description of Artificial Sequence: Synthetic oligonucleotide
  Sense strand starting at position 756 of SEQ ID NO: 1241256
caguaugagcucugaaguu

SEQ ID NO: 1258475 - RNA, 19 nt, Artificial Sequence
  Description of Artificial Sequence: Synthetic oligonucleotide
  Antisense strand to SEQ ID NO: 1258474
aacuucagagcucauacug

SEQ ID NO: 1258476 - RNA, 19 nt, Artificial Sequence
  Description of Artificial Sequence: Synthetic oligonucleotide
  Sense strand starting at position 1070 of SEQ ID NO: 1241256
cuuucuuacucgucuacau

SEQ ID NO: 1258477 - RNA, 19 nt, Artificial Sequence
  Description of Artificial Sequence: Synthetic oligonucleotide
  Antisense strand to SEQ ID NO: 1258476
auguagacgaguaagaaag

SEQ ID NO: 1258478 - RNA, 19 nt, Artificial Sequence
  Description of Artificial Sequence: Synthetic oligonucleotide
  Sense strand starting at position 1072 of SEQ ID NO: 1241256
uucuuacucgucuacauca

SEQ ID NO: 1258479 - RNA, 19 nt, Artificial Sequence
  Description of Artificial Sequence: Synthetic oligonucleotide
  Antisense strand to SEQ ID NO: 1258478
ugauguagacgaguaagaa

SEQ ID NO: 1258480 - RNA, 19 nt, Artificial Sequence
  Description of Artificial Sequence: Synthetic oligonucleotide
  Sense strand starting at position 1074 of SEQ ID NO: 1241256
cuuacucgucuacaucauu

SEQ ID NO: 1258481 - RNA, 19 nt, Artificial Sequence
  Description of Artificial Sequence: Synthetic oligonucleotide
  Antisense strand to SEQ ID NO: 1258480
aaugauguagacgaguaag

SEQ ID NO: 1258482 - RNA, 19 nt, Artificial Sequence
  Description of Artificial Sequence: Synthetic oligonucleotide
  Sense strand starting at position 1191 of SEQ ID NO: 1241256
uugcauuugucagcuauua

SEQ ID NO: 1258483 - RNA, 19 nt, Artificial Sequence
  Description of Artificial Sequence: Synthetic oligonucleotide
  Antisense strand to SEQ ID NO: 1258482
uaauagcugacaaaugcaa

SEQ ID NO: 1258484 - RNA, 19 nt, Artificial Sequence
  Description of Artificial Sequence: Synthetic oligonucleotide
  Sense strand starting at position 1406 of SEQ ID NO: 1241256
gggacuuuccggugcccaa

SEQ ID NO: 1258485 - RNA, 19 nt, Artificial Sequence
  Description of Artificial Sequence: Synthetic oligonucleotide
  Antisense strand to SEQ ID NO: 1258484
uugggcaccggaaaguccc

SEQ ID NO: 1258486 - RNA, 19 nt, Artificial Sequence
  Description of Artificial Sequence: Synthetic oligonucleotide
  Sense strand starting at position 1707 of SEQ ID NO: 1241256
agacuuuggcagcguguaa

SEQ ID NO: 1258487 - RNA, 19 nt, Artificial Sequence
  Description of Artificial Sequence: Synthetic oligonucleotide
  Antisense strand to SEQ ID NO: 1258486
uuacacgcugccaaagucu

SEQ ID NO: 1258488 - RNA, 19 nt, Artificial Sequence
  Description of Artificial Sequence: Synthetic oligonucleotide
  Sense strand starting at position 1719 of SEQ ID NO: 1241256
cguguaaggucugaggaca

SEQ ID NO: 1258489 - RNA, 19 nt, Artificial Sequence
  Description of Artificial Sequence: Synthetic oligonucleotide
  Antisense strand to SEQ ID NO: 1258488
uguccucagaccuuacacg

SEQ ID NO: 1258490 - RNA, 19 nt, Artificial Sequence
  Description of Artificial Sequence: Synthetic oligonucleotide
  Sense strand starting at position 2161 of SEQ ID NO: 1241256
gggugagcucuccguucaa

SEQ ID NO: 1258491 - RNA, 19 nt, Artificial Sequence
  Description of Artificial Sequence: Synthetic oligonucleotide
  Antisense strand to SEQ ID NO: 1258490
uugaacggagagcucaccc

SEQ ID NO: 1258492 - RNA, 19 nt, Artificial Sequence
  Description of Artificial Sequence: Synthetic oligonucleotide
  Sense strand starting at position 2163 of SEQ ID NO: 1241256
gugagcucuccguucaagu

SEQ ID NO: 1258493 - RNA, 19 nt, Artificial Sequence
  Description of Artificial Sequence: Synthetic oligonucleotide
  Antisense strand to SEQ ID NO: 1258492
acuugaacggagagcucac

SEQ ID NO: 1258494 - RNA, 19 nt, Artificial Sequence
  Description of Artificial Sequence: Synthetic oligonucleotide
  Sense strand starting at position 2535 of SEQ ID NO: 1241256
agggcagacuauggucauu

SEQ ID NO: 1258495 - RNA, 19 nt, Artificial Sequence
  Description of Artificial Sequence: Synthetic oligonucleotide
  Antisense strand to SEQ ID NO: 1258494
aaugaccauagucugcccu

SEQ ID NO: 1258496 - RNA, 19 nt, Artificial Sequence
  Description of Artificial Sequence: Synthetic oligonucleotide
  Sense strand starting at position 2541 of SEQ ID NO: 1241256
gacuauggucauuggccaa

SEQ ID NO: 1258497 - RNA, 19 nt, Artificial Sequence
  Description of Artificial Sequence: Synthetic oligonucleotide
  Antisense strand to SEQ ID NO: 1258496
uuggccaaugaccauaguc

SEQ ID NO: 1258498 - RNA, 19 nt, Artificial Sequence
  Description of Artificial Sequence: Synthetic oligonucleotide
  Sense strand starting at position 2544 of SEQ ID NO: 1241256
uauggucauuggccaaaca

SEQ ID NO: 1258499 - RNA, 19 nt, Artificial Sequence
  Description of Artificial Sequence: Synthetic oligonucleotide
  Antisense strand to SEQ ID NO: 1258498
uguuuggccaaugaccaua

SEQ ID NO: 1258500 - RNA, 19 nt, Artificial Sequence
  Description of Artificial Sequence: Synthetic oligonucleotide
  Sense strand starting at position 2565 of SEQ ID NO: 1241256
auucucauguccguugaca

SEQ ID NO: 1258501 - RNA, 19 nt, Artificial Sequence
  Description of Artificial Sequence: Synthetic oligonucleotide
  Antisense strand to SEQ ID NO: 1258500
ugucaacggacaugagaau

SEQ ID NO: 1258502 - RNA, 19 nt, Artificial Sequence
  Description of Artificial Sequence: Synthetic oligonucleotide
  Sense strand starting at position 2567 of SEQ ID NO: 1241256
ucucauguccguugacaaa

SEQ ID NO: 1258503 - RNA, 19 nt, Artificial Sequence
  Description of Artificial Sequence: Synthetic oligonucleotide
  Antisense strand to SEQ ID NO: 1258502
uuugucaacggacaugaga

SEQ ID NO: 1258504 - RNA, 19 nt, Artificial Sequence
  Description of Artificial Sequence: Synthetic oligonucleotide
  Sense strand starting at position 2704 of SEQ ID NO: 1241256
ggucuuagccgccaucuua

SEQ ID NO: 1258505 - RNA, 19 nt, Artificial Sequence
  Description of Artificial Sequence: Synthetic oligonucleotide
  Antisense strand to SEQ ID NO: 1258504
uaagauggcggcuaagacc

SEQ ID NO: 1258506 - RNA, 19 nt, Artificial Sequence
  Description of Artificial Sequence: Synthetic oligonucleotide
  Sense strand starting at position 2970 of SEQ ID NO: 1241256
agaaaucuggauggcuuau

SEQ ID NO: 1258507 - RNA, 19 nt, Artificial Sequence
  Description of Artificial Sequence: Synthetic oligonucleotide
  Antisense strand to SEQ ID NO: 1258506
auaagccauccagauuucu

SEQ ID NO: 1258508 - RNA, 19 nt, Artificial Sequence
  Description of Artificial Sequence: Synthetic oligonucleotide
  Sense strand starting at position 3027 of SEQ ID NO: 1241256
gcaucugaauugguuuaac

SEQ ID NO: 1258509 - RNA, 19 nt, Artificial Sequence
  Description of Artificial Sequence: Synthetic oligonucleotide
  Antisense strand to SEQ ID NO: 1258508
guuaaaccaauucagaugc

SEQ ID NO: 1258510 - RNA, 19 nt, Artificial Sequence
  Description of Artificial Sequence: Synthetic oligonucleotide
  Sense strand starting at position 3030 of SEQ ID NO: 1241256
ucugaauugguuuaaccca

SEQ ID NO: 1258511 - RNA, 19 nt, Artificial Sequence
  Description of Artificial Sequence: Synthetic oligonucleotide
  Antisense strand to SEQ ID NO: 1258510
uggguuaaaccaauucaga

SEQ ID NO: 1258512 - RNA, 19 nt, Artificial Sequence
  Description of Artificial Sequence: Synthetic oligonucleotide
  Sense strand starting at position 3406 of SEQ ID NO: 1241256
uuuaguauaugugcaggua

SEQ ID NO: 1258513 - RNA, 19 nt, Artificial Sequence
  Description of Artificial Sequence: Synthetic oligonucleotide
  Antisense strand to SEQ ID NO: 1258512
uaccugcacauauacuaaa

SEQ ID NO: 1258514 - RNA, 19 nt, Artificial Sequence
  Description of Artificial Sequence: Synthetic oligonucleotide
  Sense strand starting at position 3407 of SEQ ID NO: 1241256
uuaguauaugugcagguaa

SEQ ID NO: 1258515 - RNA, 19 nt, Artificial Sequence
  Description of Artificial Sequence: Synthetic oligonucleotide
  Antisense strand to SEQ ID NO: 1258514
uuaccugcacauauacuaa

SEQ ID NO: 1258516 - RNA, 19 nt, Artificial Sequence
  Description of Artificial Sequence: Synthetic oligonucleotide
  Sense strand starting at position 3463 of SEQ ID NO: 1241256
ggguguauggugagcaagu

SEQ ID NO: 1258517 - RNA, 19 nt, Artificial Sequence
  Description of Artificial Sequence: Synthetic oligonucleotide
  Antisense strand to SEQ ID NO: 1258516
acuugcucaccauacaccc

SEQ ID NO: 1258518 - RNA, 19 nt, Artificial Sequence
  Description of Artificial Sequence: Synthetic oligonucleotide
  Sense strand starting at position 3464 of SEQ ID NO: 1241256
gguguauggugagcaagua

SEQ ID NO: 1258519 - RNA, 19 nt, Artificial Sequence
  Description of Artificial Sequence: Synthetic oligonucleotide
  Antisense strand to SEQ ID NO: 1258518
uacuugcucaccauacacc

SEQ ID NO: 1258520 - RNA, 19 nt, Artificial Sequence
  Description of Artificial Sequence: Synthetic oligonucleotide
  Sense strand starting at position 3465 of SEQ ID NO: 1241256
guguauggugagcaaguaa

SEQ ID NO: 1258521 - RNA, 19 nt, Artificial Sequence
  Description of Artificial Sequence: Synthetic oligonucleotide
  Antisense strand to SEQ ID NO: 1258520
uuacuugcucaccauacac

SEQ ID NO: 1258522 - RNA, 19 nt, Artificial Sequence
  Description of Artificial Sequence: Synthetic oligonucleotide
  Sense strand starting at position 3538 of SEQ ID NO: 1241256
gcaauacucugcuuugcua

SEQ ID NO: 1258523 - RNA, 19 nt, Artificial Sequence
  Description of Artificial Sequence: Synthetic oligonucleotide
  Antisense strand to SEQ ID NO: 1258522
uagcaaagcagaguauugc

SEQ ID NO: 1258524 - RNA, 19 nt, Artificial Sequence
  Description of Artificial Sequence: Synthetic oligonucleotide
  Sense strand starting at position 3558 of SEQ ID NO: 1241256
ucagcagaucccgaugaga

SEQ ID NO: 1258525 - RNA, 19 nt, Artificial Sequence
  Description of Artificial Sequence: Synthetic oligonucleotide
  Antisense strand to SEQ ID NO: 1258524
ucucaucgggaucugcuga

SEQ ID NO: 1258526 - RNA, 19 nt, Artificial Sequence
  Description of Artificial Sequence: Synthetic oligonucleotide
  Sense strand starting at position 3560 of SEQ ID NO: 1241256
agcagaucccgaugagaca

SEQ ID NO: 1258527 - RNA, 19 nt, Artificial Sequence
  Description of Artificial Sequence: Synthetic oligonucleotide
  Antisense strand to SEQ ID NO: 1258526
ugucucaucgggaucugcu

SEQ ID NO: 1258528 - RNA, 19 nt, Artificial Sequence
  Description of Artificial Sequence: Synthetic oligonucleotide
  Sense strand starting at position 3929 of SEQ ID NO: 1241256
aaaggauucugggaagaga

SEQ ID NO: 1258529 - RNA, 19 nt, Artificial Sequence
  Description of Artificial Sequence: Synthetic oligonucleotide
  Antisense strand to SEQ ID NO: 1258528
ucucuucccagaauccuuu

SEQ ID NO: 1258530 - RNA, 19 nt, Artificial Sequence
  Description of Artificial Sequence: Synthetic oligonucleotide
  Sense strand starting at position 3945 of SEQ ID NO: 1241256
agagaauuguggcuugggu

SEQ ID NO: 1258531 - RNA, 19 nt, Artificial Sequence
  Description of Artificial Sequence: Synthetic oligonucleotide
  Antisense strand to SEQ ID NO: 1258530
acccaagccacaauucucu

SEQ ID NO: 1258532 - RNA, 19 nt, Artificial Sequence
  Description of Artificial Sequence: Synthetic oligonucleotide
  Sense strand starting at position 3958 of SEQ ID NO: 1241256
uugggugcuuggugaacau

SEQ ID NO: 1258533 - RNA, 19 nt, Artificial Sequence
  Description of Artificial Sequence: Synthetic oligonucleotide
  Antisense strand to SEQ ID NO: 1258532
auguucaccaagcacccaa

SEQ ID NO: 1258534 - RNA, 19 nt, Artificial Sequence
  Description of Artificial Sequence: Synthetic oligonucleotide
  Sense strand starting at position 3962 of SEQ ID NO: 1241256
gugcuuggugaacauuaca

SEQ ID NO: 1258535 - RNA, 19 nt, Artificial Sequence
  Description of Artificial Sequence: Synthetic oligonucleotide
  Antisense strand to SEQ ID NO: 1258534
uguaauguucaccaagcac

SEQ ID NO: 1258536 - RNA, 19 nt, Artificial Sequence
  Description of Artificial Sequence: Synthetic oligonucleotide
  Sense strand starting at position 208 of SEQ ID NO: 1241257
uguugaauauuggucccga

SEQ ID NO: 1258537 - RNA, 19 nt, Artificial Sequence
  Description of Artificial Sequence: Synthetic oligonucleotide
  Antisense strand to SEQ ID NO: 1258536
ucgggaccaauauucaaca

SEQ ID NO: 1258538 - RNA, 19 nt, Artificial Sequence
  Description of Artificial Sequence: Synthetic oligonucleotide
  Sense strand starting at position 209 of SEQ ID NO: 1241257
guugaauauuggucccgac

SEQ ID NO: 1258539 - RNA, 19 nt, Artificial Sequence
  Description of Artificial Sequence: Synthetic oligonucleotide
  Antisense strand to SEQ ID NO: 1258538
gucgggaccaauauucaac

SEQ ID NO: 1258540 - RNA, 19 nt, Artificial Sequence
  Description of Artificial Sequence: Synthetic oligonucleotide
  Sense strand starting at position 212 of SEQ ID NO: 1241257
gaauauuggucccgacucu

SEQ ID NO: 1258541 - RNA, 19 nt, Artificial Sequence
  Description of Artificial Sequence: Synthetic oligonucleotide
  Antisense strand to SEQ ID NO: 1258540
agagucgggaccaauauuc

SEQ ID NO: 1258542 - RNA, 19 nt, Artificial Sequence
  Description of Artificial Sequence: Synthetic oligonucleotide
  Sense strand starting at position 317 of SEQ ID NO: 1241257
ugcccuuaaccuugcugaa

SEQ ID NO: 1258543 - RNA, 19 nt, Artificial Sequence
  Description of Artificial Sequence: Synthetic oligonucleotide
  Antisense strand to SEQ ID NO: 1258542
uucagcaagguuaagggca

SEQ ID NO: 1258544 - RNA, 19 nt, Artificial Sequence
  Description of Artificial Sequence: Synthetic oligonucleotide
  Sense strand starting at position 369 of SEQ ID NO: 1241257
caaggagugucuuugugau

SEQ ID NO: 1258545 - RNA, 19 nt, Artificial Sequence
  Description of Artificial Sequence: Synthetic oligonucleotide
  Antisense strand to SEQ ID NO: 1258544
aucacaaagacacuccuug

SEQ ID NO: 1258546 - RNA, 19 nt, Artificial Sequence
  Description of Artificial Sequence: Synthetic oligonucleotide
  Sense strand starting at position 435 of SEQ ID NO: 1241257
cucuaaucuuguguucuca

SEQ ID NO: 1258547 - RNA, 19 nt, Artificial Sequence
  Description of Artificial Sequence: Synthetic oligonucleotide
  Antisense strand to SEQ ID NO: 1258546
ugagaacacaagauuagag

SEQ ID NO: 1258548 - RNA, 19 nt, Artificial Sequence
  Description of Artificial Sequence: Synthetic oligonucleotide
  Sense strand starting at position 437 of SEQ ID NO: 1241257
cuaaucuuguguucucacu

SEQ ID NO: 1258549 - RNA, 19 nt, Artificial Sequence
  Description of Artificial Sequence: Synthetic oligonucleotide
  Antisense strand to SEQ ID NO: 1258548
agugagaacacaagauuag

SEQ ID NO: 1258550 - RNA, 19 nt, Artificial Sequence
  Description of Artificial Sequence: Synthetic oligonucleotide
  Sense strand starting at position 608 of SEQ ID NO: 1241257
guuagccauucguuuaaca

SEQ ID NO: 1258551 - RNA, 19 nt, Artificial Sequence
  Description of Artificial Sequence: Synthetic oligonucleotide
  Antisense strand to SEQ ID NO: 1258550
uguuaaacgaauggcuaac

SEQ ID NO: 1258552 - RNA, 19 nt, Artificial Sequence
  Description of Artificial Sequence: Synthetic oligonucleotide
  Sense strand starting at position 679 of SEQ ID NO: 1241257
cuggguguaguuuguuauu

SEQ ID NO: 1258553 - RNA, 19 nt, Artificial Sequence
  Description of Artificial Sequence: Synthetic oligonucleotide
  Antisense strand to SEQ ID NO: 1258552
aauaacaaacuacacccag

SEQ ID NO: 1258554 - RNA, 19 nt, Artificial Sequence
  Description of Artificial Sequence: Synthetic oligonucleotide
  Sense strand starting at position 681 of SEQ ID NO: 1241257
ggguguaguuuguuauuac

SEQ ID NO: 1258555 - RNA, 19 nt, Artificial Sequence
  Description of Artificial Sequence: Synthetic oligonucleotide
  Antisense strand to SEQ ID NO: 1258554
guaauaacaaacuacaccc

SEQ ID NO: 1258556 - RNA, 19 nt, Artificial Sequence
  Description of Artificial Sequence: Synthetic oligonucleotide
  Sense strand starting at position 682 of SEQ ID NO: 1241257
gguguaguuuguuauuacu

SEQ ID NO: 1258557 - RNA, 19 nt, Artificial Sequence
  Description of Artificial Sequence: Synthetic oligonucleotide
  Antisense strand to SEQ ID NO: 1258556
aguaauaacaaacuacacc

SEQ ID NO: 1258558 - RNA, 19 nt, Artificial Sequence
  Description of Artificial Sequence: Synthetic oligonucleotide
  Sense strand starting at position 684 of SEQ ID NO: 1241257
uguaguuuguuauuacuga

SEQ ID NO: 1258559 - RNA, 19 nt, Artificial Sequence
  Description of Artificial Sequence: Synthetic oligonucleotide
  Antisense strand to SEQ ID NO: 1258558
ucaguaauaacaaacuaca

SEQ ID NO: 1258560 - RNA, 19 nt, Artificial Sequence
  Description of Artificial Sequence: Synthetic oligonucleotide
  Sense strand starting at position 709 of SEQ ID NO: 1241257
gaagcuuacgucugucaag

SEQ ID NO: 1258561 - RNA, 19 nt, Artificial Sequence
  Description of Artificial Sequence: Synthetic oligonucleotide
  Antisense strand to SEQ ID NO: 1258560
cuugacagacguaagcuuc

SEQ ID NO: 1258562 - RNA, 19 nt, Artificial Sequence
  Description of Artificial Sequence: Synthetic oligonucleotide
  Sense strand starting at position 710 of SEQ ID NO: 1241257
aagcuuacgucugucaagu

SEQ ID NO: 1258563 - RNA, 19 nt, Artificial Sequence
  Description of Artificial Sequence: Synthetic oligonucleotide
  Antisense strand to SEQ ID NO: 1258562
acuugacagacguaagcuu

SEQ ID NO: 1258564 - RNA, 19 nt, Artificial Sequence
  Description of Artificial Sequence: Synthetic oligonucleotide
  Sense strand starting at position 712 of SEQ ID NO: 1241257
gcuuacgucugucaaguca

SEQ ID NO: 1258565 - RNA, 19 nt, Artificial Sequence
  Description of Artificial Sequence: Synthetic oligonucleotide
  Antisense strand to SEQ ID NO: 1258564
ugacuugacagacguaagc

SEQ ID NO: 1258566 - RNA, 19 nt, Artificial Sequence
  Description of Artificial Sequence: Synthetic oligonucleotide
  Sense strand starting at position 719 of SEQ ID NO: 1241257
ucugucaagucaucaaacu

SEQ ID NO: 1258567 - RNA, 19 nt, Artificial Sequence
  Description of Artificial Sequence: Synthetic oligonucleotide
  Antisense strand to SEQ ID NO: 1258566
aguuugaugacuugacaga

SEQ ID NO: 1258568 - RNA, 19 nt, Artificial Sequence
  Description of Artificial Sequence: Synthetic oligonucleotide
  Sense strand starting at position 720 of SEQ ID NO: 1241257
cugucaagucaucaaacuu

SEQ ID NO: 1258569 - RNA, 19 nt, Artificial Sequence
  Description of Artificial Sequence: Synthetic oligonucleotide
  Antisense strand to SEQ ID NO: 1258568
aaguuugaugacuugacag

SEQ ID NO: 1258570 - RNA, 19 nt, Artificial Sequence
  Description of Artificial Sequence: Synthetic oligonucleotide
  Sense strand starting at position 795 of SEQ ID NO: 1241257
aagagacguucugauuucu

SEQ ID NO: 1258571 - RNA, 19 nt, Artificial Sequence
  Description of Artificial Sequence: Synthetic oligonucleotide
  Antisense strand to SEQ ID NO: 1258570
agaaaucagaacgucucuu

SEQ ID NO: 1258572 - RNA, 19 nt, Artificial Sequence
  Description of Artificial Sequence: Synthetic oligonucleotide
  Sense strand starting at position 801 of SEQ ID NO: 1241257
cguucugauuucuggaagu

SEQ ID NO: 1258573 - RNA, 19 nt, Artificial Sequence
  Description of Artificial Sequence: Synthetic oligonucleotide
  Antisense strand to SEQ ID NO: 1258572
acuuccagaaaucagaacg

SEQ ID NO: 1258574 - RNA, 19 nt, Artificial Sequence
  Description of Artificial Sequence: Synthetic oligonucleotide
  Sense strand starting at position 916 of SEQ ID NO: 1241257
guccuuuccuguucugaug

SEQ ID NO: 1258575 - RNA, 19 nt, Artificial Sequence
  Description of Artificial Sequence: Synthetic oligonucleotide
  Antisense strand to SEQ ID NO: 1258574
caucagaacaggaaaggac

SEQ ID NO: 1258576 - RNA, 19 nt, Artificial Sequence
  Description of Artificial Sequence: Synthetic oligonucleotide
  Sense strand starting at position 239 of SEQ ID NO: 1241258
gcaucuccuugucugcaaa

SEQ ID NO: 1258577 - RNA, 19 nt, Artificial Sequence
  Description of Artificial Sequence: Synthetic oligonucleotide
  Antisense strand to SEQ ID NO: 1258576
uuugcagacaaggagaugc

SEQ ID NO: 1258578 - RNA, 19 nt, Artificial Sequence
  Description of Artificial Sequence: Synthetic oligonucleotide
  Sense strand starting at position 242 of SEQ ID NO: 1241258
ucuccuugucugcaaagga

SEQ ID NO: 1258579 - RNA, 19 nt, Artificial Sequence
  Description of Artificial Sequence: Synthetic oligonucleotide
  Antisense strand to SEQ ID NO: 1258578
uccuuugcagacaaggaga

SEQ ID NO: 1258580 - RNA, 19 nt, Artificial Sequence
  Description of Artificial Sequence: Synthetic oligonucleotide
  Sense strand starting at position 339 of SEQ ID NO: 1241258
guugaauauuggucccaac

SEQ ID NO: 1258581 - RNA, 19 nt, Artificial Sequence
  Description of Artificial Sequence: Synthetic oligonucleotide
  Antisense strand to SEQ ID NO: 1258580
guugggaccaauauucaac

SEQ ID NO: 1258582 - RNA, 19 nt, Artificial Sequence
  Description of Artificial Sequence: Synthetic oligonucleotide
  Sense strand starting at position 456 of SEQ ID NO: 1241258
ccuugcugagucugacaau

SEQ ID NO: 1258583 - RNA, 19 nt, Artificial Sequence
  Description of Artificial Sequence: Synthetic oligonucleotide
  Antisense strand to SEQ ID NO: 1258582
auugucagacucagcaagg

SEQ ID NO: 1258584 - RNA, 19 nt, Artificial Sequence
  Description of Artificial Sequence: Synthetic oligonucleotide
  Sense strand starting at position 457 of SEQ ID NO: 1241258
cuugcugagucugacaauu

SEQ ID NO: 1258585 - RNA, 19 nt, Artificial Sequence
  Description of Artificial Sequence: Synthetic oligonucleotide
  Antisense strand to SEQ ID NO: 1258584
aauugucagacucagcaag

SEQ ID NO: 1258586 - RNA, 19 nt, Artificial Sequence
  Description of Artificial Sequence: Synthetic oligonucleotide
  Sense strand starting at position 459 of SEQ ID NO: 1241258
ugcugagucugacaauuau

SEQ ID NO: 1258587 - RNA, 19 nt, Artificial Sequence
  Description of Artificial Sequence: Synthetic oligonucleotide
  Antisense strand to SEQ ID NO: 1258586
auaauugucagacucagca

SEQ ID NO: 1258588 - RNA, 19 nt, Artificial Sequence
  Description of Artificial Sequence: Synthetic oligonucleotide
  Sense strand starting at position 800 of SEQ ID NO: 1241258
guuccuuuagcugggagua

SEQ ID NO: 1258589 - RNA, 19 nt, Artificial Sequence
  Description of Artificial Sequence: Synthetic oligonucleotide
  Antisense strand to SEQ ID NO: 1258588
uacucccagcuaaaggaac

SEQ ID NO: 1258590 - RNA, 19 nt, Artificial Sequence
  Description of Artificial Sequence: Synthetic oligonucleotide
  Sense strand starting at position 810 of SEQ ID NO: 1241258
cugggaguaguuuguuauu

SEQ ID NO: 1258591 - RNA, 19 nt, Artificial Sequence
  Description of Artificial Sequence: Synthetic oligonucleotide
  Antisense strand to SEQ ID NO: 1258590
aauaacaaacuacucccag

SEQ ID NO: 1258592 - RNA, 19 nt, Artificial Sequence
  Description of Artificial Sequence: Synthetic oligonucleotide
  Sense strand starting at position 812 of SEQ ID NO: 1241258
gggaguaguuuguuauuac

SEQ ID NO: 1258593 - RNA, 19 nt, Artificial Sequence
  Description of Artificial Sequence: Synthetic oligonucleotide
  Antisense strand to SEQ ID NO: 1258592
guaauaacaaacuacuccc

SEQ ID NO: 1258594 - RNA, 19 nt, Artificial Sequence
  Description of Artificial Sequence: Synthetic oligonucleotide
  Sense strand starting at position 842 of SEQ ID NO: 1241258
agcuuaacuucugucaagu

SEQ ID NO: 1258595 - RNA, 19 nt, Artificial Sequence
  Description of Artificial Sequence: Synthetic oligonucleotide
  Antisense strand to SEQ ID NO: 1258594
acuugacagaaguuaagcu

SEQ ID NO: 1258596 - RNA, 19 nt, Artificial Sequence
  Description of Artificial Sequence: Synthetic oligonucleotide
  Sense strand starting at position 844 of SEQ ID NO: 1241258
cuuaacuucugucaaguua

SEQ ID NO: 1258597 - RNA, 19 nt, Artificial Sequence
  Description of Artificial Sequence: Synthetic oligonucleotide
  Antisense strand to SEQ ID NO: 1258596
uaacuugacagaaguuaag

SEQ ID NO: 1258598 - RNA, 19 nt, Artificial Sequence
  Description of Artificial Sequence: Synthetic oligonucleotide
  Sense strand starting at position 851 of SEQ ID NO: 1241258
ucugucaaguuaucaaacu

SEQ ID NO: 1258599 - RNA, 19 nt, Artificial Sequence
  Description of Artificial Sequence: Synthetic oligonucleotide
  Antisense strand to SEQ ID NO: 1258598
aguuugauaacuugacaga

SEQ ID NO: 1258600 - RNA, 19 nt, Artificial Sequence
  Description of Artificial Sequence: Synthetic oligonucleotide
  Sense strand starting at position 852 of SEQ ID NO: 1241258
cugucaaguuaucaaacuu

SEQ ID NO: 1258601 - RNA, 19 nt, Artificial Sequence
  Description of Artificial Sequence: Synthetic oligonucleotide
  Antisense strand to SEQ ID NO: 1258600
aaguuugauaacuugacag

SEQ ID NO: 1258602 - RNA, 19 nt, Artificial Sequence
  Description of Artificial Sequence: Synthetic oligonucleotide
  Sense strand starting at position 927 of SEQ ID NO: 1241258
aagagacguucugguuucu

SEQ ID NO: 1258603 - RNA, 19 nt, Artificial Sequence
  Description of Artificial Sequence: Synthetic oligonucleotide
  Antisense strand to SEQ ID NO: 1258602
agaaaccagaacgucucuu

SEQ ID NO: 1258604 - RNA, 19 nt, Artificial Sequence
  Description of Artificial Sequence: Synthetic oligonucleotide
  Sense strand starting at position 933 of SEQ ID NO: 1241258
cguucugguuucuggaagu

SEQ ID NO: 1258605 - RNA, 19 nt, Artificial Sequence
  Description of Artificial Sequence: Synthetic oligonucleotide
  Antisense strand to SEQ ID NO: 1258604
acuuccagaaaccagaacg

SEQ ID NO: 1258606 - RNA, 19 nt, Artificial Sequence
  Description of Artificial Sequence: Synthetic oligonucleotide
  Sense strand starting at position 1042 of SEQ ID NO: 1241258
guggauguccuuugcuauu

SEQ ID NO: 1258607 - RNA, 19 nt, Artificial Sequence
  Description of Artificial Sequence: Synthetic oligonucleotide
  Antisense strand to SEQ ID NO: 1258606
aauagcaaaggacauccac

SEQ ID NO: 1258608 - RNA, 19 nt, Artificial Sequence
  Description of Artificial Sequence: Synthetic oligonucleotide
  Sense strand starting at position 1053 of SEQ ID NO: 1241258
uugcuauucugauguugau

SEQ ID NO: 1258609 - RNA, 19 nt, Artificial Sequence
  Description of Artificial Sequence: Synthetic oligonucleotide
  Antisense strand to SEQ ID NO: 1258608
aucaacaucagaauagcaa

SEQ ID NO: 1258610 - RNA, 19 nt, Artificial Sequence
  Description of Artificial Sequence: Synthetic oligonucleotide
  Sense strand starting at position 2420 of SEQ ID NO: 1241258
ggagggaacucgggucgua

SEQ ID NO: 1258611 - RNA, 19 nt, Artificial Sequence
  Description of Artificial Sequence: Synthetic oligonucleotide
  Antisense strand to SEQ ID NO: 1258610
uacgacccgaguucccucc

SEQ ID NO: 1258612 - RNA, 19 nt, Artificial Sequence
  Description of Artificial Sequence: Synthetic oligonucleotide
  Sense strand starting at position 3381 of SEQ ID NO: 1241258
guacaagcuuucugccuau

SEQ ID NO: 1258613 - RNA, 19 nt, Artificial Sequence
  Description of Artificial Sequence: Synthetic oligonucleotide
  Antisense strand to SEQ ID NO: 1258612
auaggcagaaagcuuguac

SEQ ID NO: 1258614 - RNA, 19 nt, Artificial Sequence
  Description of Artificial Sequence: Synthetic oligonucleotide
  Sense strand starting at position 3406 of SEQ ID NO: 1241258
ggguuaccacgaggauaug

SEQ ID NO: 1258615 - RNA, 19 nt, Artificial Sequence
  Description of Artificial Sequence: Synthetic oligonucleotide
  Antisense strand to SEQ ID NO: 1258614
cauauccucgugguaaccc

SEQ ID NO: 1258616 - RNA, 19 nt, Artificial Sequence
  Description of Artificial Sequence: Synthetic oligonucleotide
  Sense strand starting at position 3691 of SEQ ID NO: 1241258
cuauacuugugccuuaaag

SEQ ID NO: 1258617 - RNA, 19 nt, Artificial Sequence
  Description of Artificial Sequence: Synthetic oligonucleotide
  Antisense strand to SEQ ID NO: 1258616
cuuuaaggcacaaguauag

SEQ ID NO: 1258618 - RNA, 19 nt, Artificial Sequence
  Description of Artificial Sequence: Synthetic oligonucleotide
  Sense strand starting at position 3693 of SEQ ID NO: 1241258
auacuugugccuuaaaguc

SEQ ID NO: 1258619 - RNA, 19 nt, Artificial Sequence
  Description of Artificial Sequence: Synthetic oligonucleotide
  Antisense strand to SEQ ID NO: 1258618
gacuuuaaggcacaaguau

SEQ ID NO: 1258620 - RNA, 19 nt, Artificial Sequence
  Description of Artificial Sequence: Synthetic oligonucleotide
  Sense strand starting at position 3721 of SEQ ID NO: 1241258
uagugagaaugugcuaauu

SEQ ID NO: 1258621 - RNA, 19 nt, Artificial Sequence
  Description of Artificial Sequence: Synthetic oligonucleotide
  Antisense strand to SEQ ID NO: 1258620
aauuagcacauucucacua

SEQ ID NO: 1258622 - RNA, 19 nt, Artificial Sequence
  Description of Artificial Sequence: Synthetic oligonucleotide
  Sense strand starting at position 98 of SEQ ID NO: 1241259
gcaucuccuugucugcaaa

SEQ ID NO: 1258623 - RNA, 19 nt, Artificial Sequence
  Description of Artificial Sequence: Synthetic oligonucleotide
  Antisense strand to SEQ ID NO: 1258622
uuugcagacaaggagaugc

SEQ ID NO: 1258624 - RNA, 19 nt, Artificial Sequence
  Description of Artificial Sequence: Synthetic oligonucleotide
  Sense strand starting at position 101 of SEQ ID NO: 1241259
ucuccuugucugcaaagga

SEQ ID NO: 1258625 - RNA, 19 nt, Artificial Sequence
  Description of Artificial Sequence: Synthetic oligonucleotide
  Antisense strand to SEQ ID NO: 1258624
uccuuugcagacaaggaga

SEQ ID NO: 1258626 - RNA, 19 nt, Artificial Sequence
  Description of Artificial Sequence: Synthetic oligonucleotide
  Sense strand starting at position 198 of SEQ ID NO: 1241259
guugaauauuggucccaac

SEQ ID NO: 1258627 - RNA, 19 nt, Artificial Sequence
  Description of Artificial Sequence: Synthetic oligonucleotide
  Antisense strand to SEQ ID NO: 1258626
guugggaccaauauucaac

SEQ ID NO: 1258628 - RNA, 19 nt, Artificial Sequence
  Description of Artificial Sequence: Synthetic oligonucleotide
  Sense strand starting at position 315 of SEQ ID NO: 1241259
ccuugcugagucugacaau

SEQ ID NO: 1258629 - RNA, 19 nt, Artificial Sequence
  Description of Artificial Sequence: Synthetic oligonucleotide
  Antisense strand to SEQ ID NO: 1258628
auugucagacucagcaagg

SEQ ID NO: 1258630 - RNA, 19 nt, Artificial Sequence
  Description of Artificial Sequence: Synthetic oligonucleotide
  Sense strand starting at position 316 of SEQ ID NO: 1241259
cuugcugagucugacaauu

SEQ ID NO: 1258631 - RNA, 19 nt, Artificial Sequence
  Description of Artificial Sequence: Synthetic oligonucleotide
  Antisense strand to SEQ ID NO: 1258630
aauugucagacucagcaag

SEQ ID NO: 1258632 - RNA, 19 nt, Artificial Sequence
  Description of Artificial Sequence: Synthetic oligonucleotide
  Sense strand starting at position 318 of SEQ ID NO: 1241259
ugcugagucugacaauuau

SEQ ID NO: 1258633 - RNA, 19 nt, Artificial Sequence
  Description of Artificial Sequence: Synthetic oligonucleotide
  Antisense strand to SEQ ID NO: 1258632
auaauugucagacucagca

SEQ ID NO: 1258634 - RNA, 19 nt, Artificial Sequence
  Description of Artificial Sequence: Synthetic oligonucleotide
  Sense strand starting at position 659 of SEQ ID NO: 1241259
guuccuuuagcugggagua

SEQ ID NO: 1258635 - RNA, 19 nt, Artificial Sequence
  Description of Artificial Sequence: Synthetic oligonucleotide
  Antisense strand to SEQ ID NO: 1258634
uacucccagcuaaaggaac

SEQ ID NO: 1258636 - RNA, 19 nt, Artificial Sequence
  Description of Artificial Sequence: Synthetic oligonucleotide
  Sense strand starting at position 669 of SEQ ID NO: 1241259
cugggaguaguuuguuauu

SEQ ID NO: 1258637 - RNA, 19 nt, Artificial Sequence
  Description of Artificial Sequence: Synthetic oligonucleotide
  Antisense strand to SEQ ID NO: 1258636
aauaacaaacuacucccag

SEQ ID NO: 1258638 - RNA, 19 nt, Artificial Sequence
  Description of Artificial Sequence: Synthetic oligonucleotide
  Sense strand starting at position 671 of SEQ ID NO: 1241259
gggaguaguuuguuauuac

SEQ ID NO: 1258639 - RNA, 19 nt, Artificial Sequence
  Description of Artificial Sequence: Synthetic oligonucleotide
  Antisense strand to SEQ ID NO: 1258638
guaauaacaaacuacuccc

SEQ ID NO: 1258640 - RNA, 19 nt, Artificial Sequence
  Description of Artificial Sequence: Synthetic oligonucleotide
  Sense strand starting at position 701 of SEQ ID NO: 1241259
agcuuaacuucugucaagu

SEQ ID NO: 1258641 - RNA, 19 nt, Artificial Sequence
  Description of Artificial Sequence: Synthetic oligonucleotide
  Antisense strand to SEQ ID NO: 1258640
acuugacagaaguuaagcu

SEQ ID NO: 1258642 - RNA, 19 nt, Artificial Sequence
  Description of Artificial Sequence: Synthetic oligonucleotide
  Sense strand starting at position 703 of SEQ ID NO: 1241259
cuuaacuucugucaaguua

SEQ ID NO: 1258643 - RNA, 19 nt, Artificial Sequence
  Description of Artificial Sequence: Synthetic oligonucleotide
  Antisense strand to SEQ ID NO: 1258642
uaacuugacagaaguuaag

SEQ ID NO: 1258644 - RNA, 19 nt, Artificial Sequence
  Description of Artificial Sequence: Synthetic oligonucleotide
  Sense strand starting at position 710 of SEQ ID NO: 1241259
ucugucaaguuaucaaacu

SEQ ID NO: 1258645 - RNA, 19 nt, Artificial Sequence
  Description of Artificial Sequence: Synthetic oligonucleotide
  Antisense strand to SEQ ID NO: 1258644
aguuugauaacuugacaga

SEQ ID NO: 1258646 - RNA, 19 nt, Artificial Sequence
  Description of Artificial Sequence: Synthetic oligonucleotide
  Sense strand starting at position 711 of SEQ ID NO: 1241259
cugucaaguuaucaaacuu

SEQ ID NO: 1258647 - RNA, 19 nt, Artificial Sequence
  Description of Artificial Sequence: Synthetic oligonucleotide
  Antisense strand to SEQ ID NO: 1258646
aaguuugauaacuugacag

SEQ ID NO: 1258648 - RNA, 19 nt, Artificial Sequence
  Description of Artificial Sequence: Synthetic oligonucleotide
  Sense strand starting at position 786 of SEQ ID NO: 1241259
aagagacguucugguuucu

SEQ ID NO: 1258649 - RNA, 19 nt, Artificial Sequence
  Description of Artificial Sequence: Synthetic oligonucleotide
  Antisense strand to SEQ ID NO: 1258648
agaaaccagaacgucucuu

SEQ ID NO: 1258650 - RNA, 19 nt, Artificial Sequence
  Description of Artificial Sequence: Synthetic oligonucleotide
  Sense strand starting at position 792 of SEQ ID NO: 1241259
cguucugguuucuggaagu

SEQ ID NO: 1258651 - RNA, 19 nt, Artificial Sequence
  Description of Artificial Sequence: Synthetic oligonucleotide
  Antisense strand to SEQ ID NO: 1258650
acuuccagaaaccagaacg

SEQ ID NO: 1258652 - RNA, 19 nt, Artificial Sequence
  Description of Artificial Sequence: Synthetic oligonucleotide
  Sense strand starting at position 901 of SEQ ID NO: 1241259
guggauguccuuugcuauu

SEQ ID NO: 1258653 - RNA, 19 nt, Artificial Sequence
  Description of Artificial Sequence: Synthetic oligonucleotide
  Antisense strand to SEQ ID NO: 1258652
aauagcaaaggacauccac

SEQ ID NO: 1258654 - RNA, 19 nt, Artificial Sequence
  Description of Artificial Sequence: Synthetic oligonucleotide
  Sense strand starting at position 912 of SEQ ID NO: 1241259
uugcuauucugauguugau

SEQ ID NO: 1258655 - RNA, 19 nt, Artificial Sequence
  Description of Artificial Sequence: Synthetic oligonucleotide
  Antisense strand to SEQ ID NO: 1258654
aucaacaucagaauagcaa

SEQ ID NO: 1258656 - RNA, 19 nt, Artificial Sequence
  Description of Artificial Sequence: Synthetic oligonucleotide
  Sense strand starting at position 2279 of SEQ ID NO: 1241259
ggagggaacucgggucgua

SEQ ID NO: 1258657 - RNA, 19 nt, Artificial Sequence
  Description of Artificial Sequence: Synthetic oligonucleotide
  Antisense strand to SEQ ID NO: 1258656
uacgacccgaguucccucc

SEQ ID NO: 1258658 - RNA, 19 nt, Artificial Sequence
  Description of Artificial Sequence: Synthetic oligonucleotide
  Sense strand starting at position 3240 of SEQ ID NO: 1241259
guacaagcuuucugccuau

SEQ ID NO: 1258659 - RNA, 19 nt, Artificial Sequence
  Description of Artificial Sequence: Synthetic oligonucleotide
  Antisense strand to SEQ ID NO: 1258658
auaggcagaaagcuuguac

SEQ ID NO: 1258660 - RNA, 19 nt, Artificial Sequence
  Description of Artificial Sequence: Synthetic oligonucleotide
  Sense strand starting at position 3265 of SEQ ID NO: 1241259
ggguuaccacgaggauaug

SEQ ID NO: 1258661 - RNA, 19 nt, Artificial Sequence
  Description of Artificial Sequence: Synthetic oligonucleotide
  Antisense strand to SEQ ID NO: 1258660
cauauccucgugguaaccc

SEQ ID NO: 1258662 - RNA, 19 nt, Artificial Sequence
  Description of Artificial Sequence: Synthetic oligonucleotide
  Sense strand starting at position 3550 of SEQ ID NO: 1241259
cuauacuugugccuuaaag

SEQ ID NO: 1258663 - RNA, 19 nt, Artificial Sequence
  Description of Artificial Sequence: Synthetic oligonucleotide
  Antisense strand to SEQ ID NO: 1258662
cuuuaaggcacaaguauag

SEQ ID NO: 1258664 - RNA, 19 nt, Artificial Sequence
  Description of Artificial Sequence: Synthetic oligonucleotide
  Sense strand starting at position 3552 of SEQ ID NO: 1241259
auacuugugccuuaaaguc

SEQ ID NO: 1258665 - RNA, 19 nt, Artificial Sequence
  Description of Artificial Sequence: Synthetic oligonucleotide
  Antisense strand to SEQ ID NO: 1258664
gacuuuaaggcacaaguau

SEQ ID NO: 1258666 - RNA, 19 nt, Artificial Sequence
  Description of Artificial Sequence: Synthetic oligonucleotide
  Sense strand starting at position 3580 of SEQ ID NO: 1241259
uagugagaaugugcuaauu

SEQ ID NO: 1258667 - RNA, 19 nt, Artificial Sequence
  Description of Artificial Sequence: Synthetic oligonucleotide
  Antisense strand to SEQ ID NO: 1258666
aauuagcacauucucacua

SEQ ID NO: 1258668 - RNA, 19 nt, Artificial Sequence
  Description of Artificial Sequence: Synthetic oligonucleotide
  Sense strand starting at position 3884 of SEQ ID NO: 1241259
aggugauucuaaugugaau

SEQ ID NO: 1258669 - RNA, 19 nt, Artificial Sequence
  Description of Artificial Sequence: Synthetic oligonucleotide
  Antisense strand to SEQ ID NO: 1258668
auucacauuagaaucaccu

SEQ ID NO: 1258670 - RNA, 19 nt, Artificial Sequence
  Description of Artificial Sequence: Synthetic oligonucleotide
  Sense strand starting at position 3887 of SEQ ID NO: 1241259
ugauucuaaugugaaucca

SEQ ID NO: 1258671 - RNA, 19 nt, Artificial Sequence
  Description of Artificial Sequence: Synthetic oligonucleotide
  Antisense strand to SEQ ID NO: 1258670
uggauucacauuagaauca

SEQ ID NO: 1258672 - RNA, 19 nt, Artificial Sequence
  Description of Artificial Sequence: Synthetic oligonucleotide
  Sense strand starting at position 3898 of SEQ ID NO: 1241259
ugaauccaguauugagcua

SEQ ID NO: 1258673 - RNA, 19 nt, Artificial Sequence
  Description of Artificial Sequence: Synthetic oligonucleotide
  Antisense strand to SEQ ID NO: 1258672
uagcucaauacuggauuca

SEQ ID NO: 1258674 - RNA, 19 nt, Artificial Sequence
  Description of Artificial Sequence: Synthetic oligonucleotide
  Sense strand starting at position 3937 of SEQ ID NO: 1241259
ggugcucuagguugacaau

SEQ ID NO: 1258675 - RNA, 19 nt, Artificial Sequence
  Description of Artificial Sequence: Synthetic oligonucleotide
  Antisense strand to SEQ ID NO: 1258674
auugucaaccuagagcacc

SEQ ID NO: 1258676 - RNA, 19 nt, Artificial Sequence
  Description of Artificial Sequence: Synthetic oligonucleotide
  Sense strand starting at position 3966 of SEQ ID NO: 1241259
auuaaugaguuaugaacca

SEQ ID NO: 1258677 - RNA, 19 nt, Artificial Sequence
  Description of Artificial Sequence: Synthetic oligonucleotide
  Antisense strand to SEQ ID NO: 1258676
ugguucauaacucauuaau

SEQ ID NO: 1258678 - RNA, 19 nt, Artificial Sequence
  Description of Artificial Sequence: Synthetic oligonucleotide
  Sense strand starting at position 698 of SEQ ID NO: 1241260
gggcucugaaguuaagacu

SEQ ID NO: 1258679 - RNA, 19 nt, Artificial Sequence
  Description of Artificial Sequence: Synthetic oligonucleotide
  Antisense strand to SEQ ID NO: 1258678
agucuuaacuucagagccc

SEQ ID NO: 1258680 - RNA, 19 nt, Artificial Sequence
  Description of Artificial Sequence: Synthetic oligonucleotide
  Sense strand starting at position 744 of SEQ ID NO: 1241260
cuauauaacuccuacgugu

SEQ ID NO: 1258681 - RNA, 19 nt, Artificial Sequence
  Description of Artificial Sequence: Synthetic oligonucleotide
  Antisense strand to SEQ ID NO: 1258680
acacguaggaguuauauag

SEQ ID NO: 1258682 - RNA, 19 nt, Artificial Sequence
  Description of Artificial Sequence: Synthetic oligonucleotide
  Sense strand starting at position 824 of SEQ ID NO: 1241260
uuauuaugaccuggaucac

SEQ ID NO: 1258683 - RNA, 19 nt, Artificial Sequence
  Description of Artificial Sequence: Synthetic oligonucleotide
  Antisense strand to SEQ ID NO: 1258682
gugauccaggucauaauaa

SEQ ID NO: 1258684 - RNA, 19 nt, Artificial Sequence
  Description of Artificial Sequence: Synthetic oligonucleotide
  Sense strand starting at position 843 of SEQ ID NO: 1241260
agccuuaguucccaagaac

SEQ ID NO: 1258685 - RNA, 19 nt, Artificial Sequence
  Description of Artificial Sequence: Synthetic oligonucleotide
  Antisense strand to SEQ ID NO: 1258684
guucuugggaacuaaggcu

SEQ ID NO: 1258686 - RNA, 19 nt, Artificial Sequence
  Description of Artificial Sequence: Synthetic oligonucleotide
  Sense strand starting at position 961 of SEQ ID NO: 1241260
ccgugauuugaaggucuca

SEQ ID NO: 1258687 - RNA, 19 nt, Artificial Sequence
  Description of Artificial Sequence: Synthetic oligonucleotide
  Antisense strand to SEQ ID NO: 1258686
ugagaccuucaaaucacgg

SEQ ID NO: 1258688 - RNA, 19 nt, Artificial Sequence
  Description of Artificial Sequence: Synthetic oligonucleotide
  Sense strand starting at position 972 of SEQ ID NO: 1241260
aggucucacucagaacagu

SEQ ID NO: 1258689 - RNA, 19 nt, Artificial Sequence
  Description of Artificial Sequence: Synthetic oligonucleotide
  Antisense strand to SEQ ID NO: 1258688
acuguucugagugagaccu

SEQ ID NO: 1258690 - RNA, 19 nt, Artificial Sequence
  Description of Artificial Sequence: Synthetic oligonucleotide
  Sense strand starting at position 995 of SEQ ID NO: 1241260
ccgccagguuucuuucuua

SEQ ID NO: 1258691 - RNA, 19 nt, Artificial Sequence
  Description of Artificial Sequence: Synthetic oligonucleotide
  Antisense strand to SEQ ID NO: 1258690
uaagaaagaaaccuggcgg

SEQ ID NO: 1258692 - RNA, 19 nt, Artificial Sequence
  Description of Artificial Sequence: Synthetic oligonucleotide
  Sense strand starting at position 1070 of SEQ ID NO: 1241260
aaagauggucucuggucaa

SEQ ID NO: 1258693 - RNA, 19 nt, Artificial Sequence
  Description of Artificial Sequence: Synthetic oligonucleotide
  Antisense strand to SEQ ID NO: 1258692
uugaccagagaccaucuuu

SEQ ID NO: 1258694 - RNA, 19 nt, Artificial Sequence
  Description of Artificial Sequence: Synthetic oligonucleotide
  Sense strand starting at position 1092 of SEQ ID NO: 1241260
cguaaauauugccuuggga

SEQ ID NO: 1258695 - RNA, 19 nt, Artificial Sequence
  Description of Artificial Sequence: Synthetic oligonucleotide
  Antisense strand to SEQ ID NO: 1258694
ucccaaggcaauauuuacg

SEQ ID NO: 1258696 - RNA, 19 nt, Artificial Sequence
  Description of Artificial Sequence: Synthetic oligonucleotide
  Sense strand starting at position 1094 of SEQ ID NO: 1241260
uaaauauugccuugggaag

SEQ ID NO: 1258697 - RNA, 19 nt, Artificial Sequence
  Description of Artificial Sequence: Synthetic oligonucleotide
  Antisense strand to SEQ ID NO: 1258696
cuucccaaggcaauauuua

SEQ ID NO: 1258698 - RNA, 19 nt, Artificial Sequence
  Description of Artificial Sequence: Synthetic oligonucleotide
  Sense strand starting at position 1095 of SEQ ID NO: 1241260
aaauauugccuugggaaga

SEQ ID NO: 1258699 - RNA, 19 nt, Artificial Sequence
  Description of Artificial Sequence: Synthetic oligonucleotide
  Antisense strand to SEQ ID NO: 1258698
ucuucccaaggcaauauuu

SEQ ID NO: 1258700 - RNA, 19 nt, Artificial Sequence
  Description of Artificial Sequence: Synthetic oligonucleotide
  Sense strand starting at position 1096 of SEQ ID NO: 1241260
aauauugccuugggaagaa

SEQ ID NO: 1258701 - RNA, 19 nt, Artificial Sequence
  Description of Artificial Sequence: Synthetic oligonucleotide
  Antisense strand to SEQ ID NO: 1258700
uucuucccaaggcaauauu

SEQ ID NO: 1258702 - RNA, 19 nt, Artificial Sequence
  Description of Artificial Sequence: Synthetic oligonucleotide
  Sense strand starting at position 1355 of SEQ ID NO: 1241260
gcccaaauagaaugguaca

SEQ ID NO: 1258703 - RNA, 19 nt, Artificial Sequence
  Description of Artificial Sequence: Synthetic oligonucleotide
  Antisense strand to SEQ ID NO: 1258702
uguaccauucuauuugggc

SEQ ID NO: 1258704 - RNA, 19 nt, Artificial Sequence
  Description of Artificial Sequence: Synthetic oligonucleotide
  Sense strand starting at position 1388 of SEQ ID NO: 1241260
gaggccuuguuauaagauu

SEQ ID NO: 1258705 - RNA, 19 nt, Artificial Sequence
  Description of Artificial Sequence: Synthetic oligonucleotide
  Antisense strand to SEQ ID NO: 1258704
aaucuuauaacaaggccuc

SEQ ID NO: 1258706 - RNA, 19 nt, Artificial Sequence
  Description of Artificial Sequence: Synthetic oligonucleotide
  Sense strand starting at position 1438 of SEQ ID NO: 1241260
cuggucuucccagaggcua

SEQ ID NO: 1258707 - RNA, 19 nt, Artificial Sequence
  Description of Artificial Sequence: Synthetic oligonucleotide
  Antisense strand to SEQ ID NO: 1258706
uagccucugggaagaccag

SEQ ID NO: 1258708 - RNA, 19 nt, Artificial Sequence
  Description of Artificial Sequence: Synthetic oligonucleotide
  Sense strand starting at position 2084 of SEQ ID NO: 1241260
cgggcuggugagugaucaa

SEQ ID NO: 1258709 - RNA, 19 nt, Artificial Sequence
  Description of Artificial Sequence: Synthetic oligonucleotide
  Antisense strand to SEQ ID NO: 1258708
uugaucacucaccagcccg

SEQ ID NO: 1258710 - RNA, 19 nt, Artificial Sequence
  Description of Artificial Sequence: Synthetic oligonucleotide
  Sense strand starting at position 2480 of SEQ ID NO: 1241260
agacuacggucauuggcaa

SEQ ID NO: 1258711 - RNA, 19 nt, Artificial Sequence
  Description of Artificial Sequence: Synthetic oligonucleotide
  Antisense strand to SEQ ID NO: 1258710
uugccaaugaccguagucu

SEQ ID NO: 1258712 - RNA, 19 nt, Artificial Sequence
  Description of Artificial Sequence: Synthetic oligonucleotide
  Sense strand starting at position 2481 of SEQ ID NO: 1241260
gacuacggucauuggcaaa

SEQ ID NO: 1258713 - RNA, 19 nt, Artificial Sequence
  Description of Artificial Sequence: Synthetic oligonucleotide
  Antisense strand to SEQ ID NO: 1258712
uuugccaaugaccguaguc

SEQ ID NO: 1258714 - RNA, 19 nt, Artificial Sequence
  Description of Artificial Sequence: Synthetic oligonucleotide
  Sense strand starting at position 2960 of SEQ ID NO: 1241260
agguaaguaucugaauuag

SEQ ID NO: 1258715 - RNA, 19 nt, Artificial Sequence
  Description of Artificial Sequence: Synthetic oligonucleotide
  Antisense strand to SEQ ID NO: 1258714
cuaauucagauacuuaccu

SEQ ID NO: 1258716 - RNA, 19 nt, Artificial Sequence
  Description of Artificial Sequence: Synthetic oligonucleotide
  Sense strand starting at position 3711 of SEQ ID NO: 1241260
ggguguauggcgagcaagu

SEQ ID NO: 1258717 - RNA, 19 nt, Artificial Sequence
  Description of Artificial Sequence: Synthetic oligonucleotide
  Antisense strand to SEQ ID NO: 1258716
acuugcucgccauacaccc

SEQ ID NO: 1258718 - RNA, 19 nt, Artificial Sequence
  Description of Artificial Sequence: Synthetic oligonucleotide
  Sense strand starting at position 3713 of SEQ ID NO: 1241260
guguauggcgagcaaguaa

SEQ ID NO: 1258719 - RNA, 19 nt, Artificial Sequence
  Description of Artificial Sequence: Synthetic oligonucleotide
  Antisense strand to SEQ ID NO: 1258718
uuacuugcucgccauacac

SEQ ID NO: 1258720 - RNA, 19 nt, Artificial Sequence
  Description of Artificial Sequence: Synthetic oligonucleotide
  Sense strand starting at position 3720 of SEQ ID NO: 1241260
gcgagcaaguaauagaaca

SEQ ID NO: 1258721 - RNA, 19 nt, Artificial Sequence
  Description of Artificial Sequence: Synthetic oligonucleotide
  Antisense strand to SEQ ID NO: 1258720
uguucuauuacuugcucgc

SEQ ID NO: 1258722 - RNA, 19 nt, Artificial Sequence
  Description of Artificial Sequence: Synthetic oligonucleotide
  Sense strand starting at position 3787 of SEQ ID NO: 1241260
gcagcacucugcuuugcua

SEQ ID NO: 1258723 - RNA, 19 nt, Artificial Sequence
  Description of Artificial Sequence: Synthetic oligonucleotide
  Antisense strand to SEQ ID NO: 1258722
uagcaaagcagagugcugc

SEQ ID NO: 1258724 - RNA, 19 nt, Artificial Sequence
  Description of Artificial Sequence: Synthetic oligonucleotide
  Sense strand starting at position 3825 of SEQ ID NO: 1241260
acaggagagcugcaguaua

SEQ ID NO: 1258725 - RNA, 19 nt, Artificial Sequence
  Description of Artificial Sequence: Synthetic oligonucleotide
  Antisense strand to SEQ ID NO: 1258724
uauacugcagcucuccugu

SEQ ID NO: 1258726 - RNA, 19 nt, Artificial Sequence
  Description of Artificial Sequence: Synthetic oligonucleotide
  Sense strand starting at position 189 of SEQ ID NO: 1241261
aacuuaguagcuuagagau

SEQ ID NO: 1258727 - RNA, 19 nt, Artificial Sequence
  Description of Artificial Sequence: Synthetic oligonucleotide
  Antisense strand to SEQ ID NO: 1258726
aucucuaagcuacuaaguu

SEQ ID NO: 1258728 - RNA, 19 nt, Artificial Sequence
  Description of Artificial Sequence: Synthetic oligonucleotide
  Sense strand starting at position 249 of SEQ ID NO: 1241261
gacauaauuugauggguug

SEQ ID NO: 1258729 - RNA, 19 nt, Artificial Sequence
  Description of Artificial Sequence: Synthetic oligonucleotide
  Antisense strand to SEQ ID NO: 1258728
caacccaucaaauuauguc

SEQ ID NO: 1258730 - RNA, 19 nt, Artificial Sequence
  Description of Artificial Sequence: Synthetic oligonucleotide
  Sense strand starting at position 436 of SEQ ID NO: 1241261
agagaaagcccuugguuaa

SEQ ID NO: 1258731 - RNA, 19 nt, Artificial Sequence
  Description of Artificial Sequence: Synthetic oligonucleotide
  Antisense strand to SEQ ID NO: 1258730
uuaaccaagggcuuucucu

SEQ ID NO: 1258732 - RNA, 19 nt, Artificial Sequence
  Description of Artificial Sequence: Synthetic oligonucleotide
  Sense strand starting at position 437 of SEQ ID NO: 1241261
gagaaagcccuugguuaau

SEQ ID NO: 1258733 - RNA, 19 nt, Artificial Sequence
  Description of Artificial Sequence: Synthetic oligonucleotide
  Antisense strand to SEQ ID NO: 1258732
auuaaccaagggcuuucuc

SEQ ID NO: 1258734 - RNA, 19 nt, Artificial Sequence
  Description of Artificial Sequence: Synthetic oligonucleotide
  Sense strand starting at position 439 of SEQ ID NO: 1241261
gaaagcccuugguuaauga

SEQ ID NO: 1258735 - RNA, 19 nt, Artificial Sequence
  Description of Artificial Sequence: Synthetic oligonucleotide
  Antisense strand to SEQ ID NO: 1258734
ucauuaaccaagggcuuuc

SEQ ID NO: 1258736 - RNA, 19 nt, Artificial Sequence
  Description of Artificial Sequence: Synthetic oligonucleotide
  Sense strand starting at position 453 of SEQ ID NO: 1241261
aaugaaguugugcaguauu

SEQ ID NO: 1258737 - RNA, 19 nt, Artificial Sequence
  Description of Artificial Sequence: Synthetic oligonucleotide
  Antisense strand to SEQ ID NO: 1258736
aauacugcacaacuucauu

SEQ ID NO: 1258738 - RNA, 19 nt, Artificial Sequence
  Description of Artificial Sequence: Synthetic oligonucleotide
  Sense strand starting at position 460 of SEQ ID NO: 1241261
uugugcaguauuugggauu

SEQ ID NO: 1258739 - RNA, 19 nt, Artificial Sequence
  Description of Artificial Sequence: Synthetic oligonucleotide
  Antisense strand to SEQ ID NO: 1258738
aaucccaaauacugcacaa

SEQ ID NO: 1258740 - RNA, 19 nt, Artificial Sequence
  Description of Artificial Sequence: Synthetic oligonucleotide
  Sense strand starting at position 662 of SEQ ID NO: 1241261
ggcacaaaccacuguauua

SEQ ID NO: 1258741 - RNA, 19 nt, Artificial Sequence
  Description of Artificial Sequence: Synthetic oligonucleotide
  Antisense strand to SEQ ID NO: 1258740
uaauacagugguuugugcc

SEQ ID NO: 1258742 - RNA, 19 nt, Artificial Sequence
  Description of Artificial Sequence: Synthetic oligonucleotide
  Sense strand starting at position 669 of SEQ ID NO: 1241261
accacuguauuaccagauu

SEQ ID NO: 1258743 - RNA, 19 nt, Artificial Sequence
  Description of Artificial Sequence: Synthetic oligonucleotide
  Antisense strand to SEQ ID NO: 1258742
aaucugguaauacaguggu

SEQ ID NO: 1258744 - RNA, 19 nt, Artificial Sequence
  Description of Artificial Sequence: Synthetic oligonucleotide
  Sense strand starting at position 911 of SEQ ID NO: 1241261
uucgguaggucauuuaauu

SEQ ID NO: 1258745 - RNA, 19 nt, Artificial Sequence
  Description of Artificial Sequence: Synthetic oligonucleotide
  Antisense strand to SEQ ID NO: 1258744
aauuaaaugaccuaccgaa

SEQ ID NO: 1258746 - RNA, 19 nt, Artificial Sequence
  Description of Artificial Sequence: Synthetic oligonucleotide
  Sense strand starting at position 981 of SEQ ID NO: 1241261
uuguaagaguuguuguaaa

SEQ ID NO: 1258747 - RNA, 19 nt, Artificial Sequence
  Description of Artificial Sequence: Synthetic oligonucleotide
  Antisense strand to SEQ ID NO: 1258746
uuuacaacaacucuuacaa

SEQ ID NO: 1258748 - RNA, 19 nt, Artificial Sequence
  Description of Artificial Sequence: Synthetic oligonucleotide
  Sense strand starting at position 1004 of SEQ ID NO: 1241261
aaauguuauguguguaaag

SEQ ID NO: 1258749 - RNA, 19 nt, Artificial Sequence
  Description of Artificial Sequence: Synthetic oligonucleotide
  Antisense strand to SEQ ID NO: 1258748
cuuuacacacauaacauuu

SEQ ID NO: 1258750 - RNA, 19 nt, Artificial Sequence
  Description of Artificial Sequence: Synthetic oligonucleotide
  Sense strand starting at position 1040 of SEQ ID NO: 1241261
gcaaauguacacgauguca

SEQ ID NO: 1258751 - RNA, 19 nt, Artificial Sequence
  Description of Artificial Sequence: Synthetic oligonucleotide
  Antisense strand to SEQ ID NO: 1258750
ugacaucguguacauuugc

SEQ ID NO: 1258752 - RNA, 19 nt, Artificial Sequence
  Description of Artificial Sequence: Synthetic oligonucleotide
  Sense strand starting at position 1042 of SEQ ID NO: 1241261
aaauguacacgaugucaaa

SEQ ID NO: 1258753 - RNA, 19 nt, Artificial Sequence
  Description of Artificial Sequence: Synthetic oligonucleotide
  Antisense strand to SEQ ID NO: 1258752
uuugacaucguguacauuu

SEQ ID NO: 1258754 - RNA, 19 nt, Artificial Sequence
  Description of Artificial Sequence: Synthetic oligonucleotide
  Sense strand starting at position 1092 of SEQ ID NO: 1241261
gcaguaugccaauaaugau

SEQ ID NO: 1258755 - RNA, 19 nt, Artificial Sequence
  Description of Artificial Sequence: Synthetic oligonucleotide
  Antisense strand to SEQ ID NO: 1258754
aucauuauuggcauacugc

SEQ ID NO: 1258756 - RNA, 19 nt, Artificial Sequence
  Description of Artificial Sequence: Synthetic oligonucleotide
  Sense strand starting at position 1106 of SEQ ID NO: 1241261
augaucucgcuccagcaaa

SEQ ID NO: 1258757 - RNA, 19 nt, Artificial Sequence
  Description of Artificial Sequence: Synthetic oligonucleotide
  Antisense strand to SEQ ID NO: 1258756
uuugcuggagcgagaucau

SEQ ID NO: 1258758 - RNA, 19 nt, Artificial Sequence
  Description of Artificial Sequence: Synthetic oligonucleotide
  Sense strand starting at position 1143 of SEQ ID NO: 1241261
ucuaguguuugacuagaau

SEQ ID NO: 1258759 - RNA, 19 nt, Artificial Sequence
  Description of Artificial Sequence: Synthetic oligonucleotide
  Antisense strand to SEQ ID NO: 1258758
auucuagucaaacacuaga

SEQ ID NO: 1258760 - RNA, 19 nt, Artificial Sequence
  Description of Artificial Sequence: Synthetic oligonucleotide
  Sense strand starting at position 1149 of SEQ ID NO: 1241261
guuugacuagaaugaguaa

SEQ ID NO: 1258761 - RNA, 19 nt, Artificial Sequence
  Description of Artificial Sequence: Synthetic oligonucleotide
  Antisense strand to SEQ ID NO: 1258760
uuacucauucuagucaaac

SEQ ID NO: 1258762 - RNA, 19 nt, Artificial Sequence
  Description of Artificial Sequence: Synthetic oligonucleotide
  Sense strand starting at position 1152 of SEQ ID NO: 1241261
ugacuagaaugaguaagua

SEQ ID NO: 1258763 - RNA, 19 nt, Artificial Sequence
  Description of Artificial Sequence: Synthetic oligonucleotide
  Antisense strand to SEQ ID NO: 1258762
uacuuacucauucuaguca

SEQ ID NO: 1258764 - RNA, 19 nt, Artificial Sequence
  Description of Artificial Sequence: Synthetic oligonucleotide
  Sense strand starting at position 1171 of SEQ ID NO: 1241261
ggugaaggacuucggauua

SEQ ID NO: 1258765 - RNA, 19 nt, Artificial Sequence
  Description of Artificial Sequence: Synthetic oligonucleotide
  Antisense strand to SEQ ID NO: 1258764
uaauccgaaguccuucacc

SEQ ID NO: 1258766 - RNA, 19 nt, Artificial Sequence
  Description of Artificial Sequence: Synthetic oligonucleotide
  Sense strand starting at position 1268 of SEQ ID NO: 1241261
gguacuuacaaaggaguuu

SEQ ID NO: 1258767 - RNA, 19 nt, Artificial Sequence
  Description of Artificial Sequence: Synthetic oligonucleotide
  Antisense strand to SEQ ID NO: 1258766
aaacuccuuuguaaguacc

SEQ ID NO: 1258768 - RNA, 19 nt, Artificial Sequence
  Description of Artificial Sequence: Synthetic oligonucleotide
  Sense strand starting at position 1322 of SEQ ID NO: 1241261
aaaguaucguccucugaga

SEQ ID NO: 1258769 - RNA, 19 nt, Artificial Sequence
  Description of Artificial Sequence: Synthetic oligonucleotide
  Antisense strand to SEQ ID NO: 1258768
ucucagaggacgauacuuu

SEQ ID NO: 1258770 - RNA, 19 nt, Artificial Sequence
  Description of Artificial Sequence: Synthetic oligonucleotide
  Sense strand starting at position 1343 of SEQ ID NO: 1241261
acaccagaaucccuugagu

SEQ ID NO: 1258771 - RNA, 19 nt, Artificial Sequence
  Description of Artificial Sequence: Synthetic oligonucleotide
  Antisense strand to SEQ ID NO: 1258770
acucaagggauucuggugu

SEQ ID NO: 1258772 - RNA, 19 nt, Artificial Sequence
  Description of Artificial Sequence: Synthetic oligonucleotide
  Sense strand starting at position 1356 of SEQ ID NO: 1241261
uugaguccugcguaagaug

SEQ ID NO: 1258773 - RNA, 19 nt, Artificial Sequence
  Description of Artificial Sequence: Synthetic oligonucleotide
  Antisense strand to SEQ ID NO: 1258772
caucuuacgcaggacucaa

SEQ ID NO: 1258774 - RNA, 19 nt, Artificial Sequence
  Description of Artificial Sequence: Synthetic oligonucleotide
  Sense strand starting at position 1436 of SEQ ID NO: 1241261
gagguuuccuagccugaau

SEQ ID NO: 1258775 - RNA, 19 nt, Artificial Sequence
  Description of Artificial Sequence: Synthetic oligonucleotide
  Antisense strand to SEQ ID NO: 1258774
auucaggcuaggaaaccuc

SEQ ID NO: 1258776 - RNA, 19 nt, Artificial Sequence
  Description of Artificial Sequence: Synthetic oligonucleotide
  Sense strand starting at position 1467 of SEQ ID NO: 1241261
ccaucuuccgaccaguaca

SEQ ID NO: 1258777 - RNA, 19 nt, Artificial Sequence
  Description of Artificial Sequence: Synthetic oligonucleotide
  Antisense strand to SEQ ID NO: 1258776
uguacuggucggaagaugg

SEQ ID NO: 1258778 - RNA, 19 nt, Artificial Sequence
  Description of Artificial Sequence: Synthetic oligonucleotide
  Sense strand starting at position 2188 of SEQ ID NO: 1241261
guuauuuccucucuguaca

SEQ ID NO: 1258779 - RNA, 19 nt, Artificial Sequence
  Description of Artificial Sequence: Synthetic oligonucleotide
  Antisense strand to SEQ ID NO: 1258778
uguacagagaggaaauaac

SEQ ID NO: 1258780 - RNA, 19 nt, Artificial Sequence
  Description of Artificial Sequence: Synthetic oligonucleotide
  Sense strand starting at position 2333 of SEQ ID NO: 1241261
gaagaaagacuguggcuau

SEQ ID NO: 1258781 - RNA, 19 nt, Artificial Sequence
  Description of Artificial Sequence: Synthetic oligonucleotide
  Antisense strand to SEQ ID NO: 1258780
auagccacagucuuucuuc

SEQ ID NO: 1258782 - RNA, 19 nt, Artificial Sequence
  Description of Artificial Sequence: Synthetic oligonucleotide
  Sense strand starting at position 2653 of SEQ ID NO: 1241261
uaauuuccguuugaaauga

SEQ ID NO: 1258783 - RNA, 19 nt, Artificial Sequence
  Description of Artificial Sequence: Synthetic oligonucleotide
  Antisense strand to SEQ ID NO: 1258782
ucauuucaaacggaaauua

SEQ ID NO: 1258784 - RNA, 19 nt, Artificial Sequence
  Description of Artificial Sequence: Synthetic oligonucleotide
  Sense strand starting at position 2798 of SEQ ID NO: 1241261
ccaguuagagugcauagaa

SEQ ID NO: 1258785 - RNA, 19 nt, Artificial Sequence
  Description of Artificial Sequence: Synthetic oligonucleotide
  Antisense strand to SEQ ID NO: 1258784
uucuaugcacucuaacugg

SEQ ID NO: 1258786 - RNA, 19 nt, Artificial Sequence
  Description of Artificial Sequence: Synthetic oligonucleotide
  Sense strand starting at position 2812 of SEQ ID NO: 1241261
uagaaacuaggccauguau

SEQ ID NO: 1258787 - RNA, 19 nt, Artificial Sequence
  Description of Artificial Sequence: Synthetic oligonucleotide
  Antisense strand to SEQ ID NO: 1258786
auacauggccuaguuucua

SEQ ID NO: 1258788 - RNA, 19 nt, Artificial Sequence
  Description of Artificial Sequence: Synthetic oligonucleotide
  Sense strand starting at position 2814 of SEQ ID NO: 1241261
gaaacuaggccauguauga

SEQ ID NO: 1258789 - RNA, 19 nt, Artificial Sequence
  Description of Artificial Sequence: Synthetic oligonucleotide
  Antisense strand to SEQ ID NO: 1258788
ucauacauggccuaguuuc

SEQ ID NO: 1258790 - RNA, 19 nt, Artificial Sequence
  Description of Artificial Sequence: Synthetic oligonucleotide
  Sense strand starting at position 2935 of SEQ ID NO: 1241261
ucuuccuuggcugaaacua

SEQ ID NO: 1258791 - RNA, 19 nt, Artificial Sequence
  Description of Artificial Sequence: Synthetic oligonucleotide
  Antisense strand to SEQ ID NO: 1258790
uaguuucagccaaggaaga

SEQ ID NO: 1258792 - RNA, 19 nt, Artificial Sequence
  Description of Artificial Sequence: Synthetic oligonucleotide
  Sense strand starting at position 3066 of SEQ ID NO: 1241261
gaagaauguuacuugcagu

SEQ ID NO: 1258793 - RNA, 19 nt, Artificial Sequence
  Description of Artificial Sequence: Synthetic oligonucleotide
  Antisense strand to SEQ ID NO: 1258792
acugcaaguaacauucuuc

SEQ ID NO: 1258794 - RNA, 19 nt, Artificial Sequence
  Description of Artificial Sequence: Synthetic oligonucleotide
  Sense strand starting at position 3072 of SEQ ID NO: 1241261
uguuacuugcaguaaucaa

SEQ ID NO: 1258795 - RNA, 19 nt, Artificial Sequence
  Description of Artificial Sequence: Synthetic oligonucleotide
  Antisense strand to SEQ ID NO: 1258794
uugauuacugcaaguaaca

SEQ ID NO: 1258796 - RNA, 19 nt, Artificial Sequence
  Description of Artificial Sequence: Synthetic oligonucleotide
  Sense strand starting at position 3360 of SEQ ID NO: 1241261
gaauacauagcuuaguguu

SEQ ID NO: 1258797 - RNA, 19 nt, Artificial Sequence
  Description of Artificial Sequence: Synthetic oligonucleotide
  Antisense strand to SEQ ID NO: 1258796
aacacuaagcuauguauuc

SEQ ID NO: 1258798 - RNA, 19 nt, Artificial Sequence
  Description of Artificial Sequence: Synthetic oligonucleotide
  Sense strand starting at position 3362 of SEQ ID NO: 1241261
auacauagcuuaguguuga

SEQ ID NO: 1258799 - RNA, 19 nt, Artificial Sequence
  Description of Artificial Sequence: Synthetic oligonucleotide
  Antisense strand to SEQ ID NO: 1258798
ucaacacuaagcuauguau

SEQ ID NO: 1258800 - RNA, 19 nt, Artificial Sequence
  Description of Artificial Sequence: Synthetic oligonucleotide
  Sense strand starting at position 3367 of SEQ ID NO: 1241261
uagcuuaguguugacauga

SEQ ID NO: 1258801 - RNA, 19 nt, Artificial Sequence
  Description of Artificial Sequence: Synthetic oligonucleotide
  Antisense strand to SEQ ID NO: 1258800
ucaugucaacacuaagcua

SEQ ID NO: 1258802 - RNA, 19 nt, Artificial Sequence
  Description of Artificial Sequence: Synthetic oligonucleotide
  Sense strand starting at position 3830 of SEQ ID NO: 1241261
aaaugagaguugcuagcau

SEQ ID NO: 1258803 - RNA, 19 nt, Artificial Sequence
  Description of Artificial Sequence: Synthetic oligonucleotide
  Antisense strand to SEQ ID NO: 1258802
augcuagcaacucucauuu

SEQ ID NO: 1258804 - RNA, 19 nt, Artificial Sequence
  Description of Artificial Sequence: Synthetic oligonucleotide
  Sense strand starting at position 3887 of SEQ ID NO: 1241261
uugaauaaaguccgaaagu

SEQ ID NO: 1258805 - RNA, 19 nt, Artificial Sequence
  Description of Artificial Sequence: Synthetic oligonucleotide
  Antisense strand to SEQ ID NO: 1258804
acuuucggacuuuauucaa

SEQ ID NO: 1258806 - RNA, 19 nt, Artificial Sequence
  Description of Artificial Sequence: Synthetic oligonucleotide
  Sense strand starting at position 2 of SEQ ID NO: 1241262
uuaccuggugcuuaguaaa

SEQ ID NO: 1258807 - RNA, 19 nt, Artificial Sequence
  Description of Artificial Sequence: Synthetic oligonucleotide
  Antisense strand to SEQ ID NO: 1258806
uuuacuaagcaccagguaa

SEQ ID NO: 1258808 - RNA, 19 nt, Artificial Sequence
  Description of Artificial Sequence: Synthetic oligonucleotide
  Sense strand starting at position 85 of SEQ ID NO: 1241262
uugagaucugaaugaguuc

SEQ ID NO: 1258809 - RNA, 19 nt, Artificial Sequence
  Description of Artificial Sequence: Synthetic oligonucleotide
  Antisense strand to SEQ ID NO: 1258808
gaacucauucagaucucaa

SEQ ID NO: 1258810 - RNA, 19 nt, Artificial Sequence
  Description of Artificial Sequence: Synthetic oligonucleotide
  Sense strand starting at position 88 of SEQ ID NO: 1241262
agaucugaaugaguucuga

SEQ ID NO: 1258811 - RNA, 19 nt, Artificial Sequence
  Description of Artificial Sequence: Synthetic oligonucleotide
  Antisense strand to SEQ ID NO: 1258810
ucagaacucauucagaucu

SEQ ID NO: 1258812 - RNA, 19 nt, Artificial Sequence
  Description of Artificial Sequence: Synthetic oligonucleotide
  Sense strand starting at position 129 of SEQ ID NO: 1241262
cugguuugcuaauuacaaa

SEQ ID NO: 1258813 - RNA, 19 nt, Artificial Sequence
  Description of Artificial Sequence: Synthetic oligonucleotide
  Antisense strand to SEQ ID NO: 1258812
uuuguaauuagcaaaccag

SEQ ID NO: 1258814 - RNA, 19 nt, Artificial Sequence
  Description of Artificial Sequence: Synthetic oligonucleotide
  Sense strand starting at position 169 of SEQ ID NO: 1241262
gagaaaucuugccuaguug

SEQ ID NO: 1258815 - RNA, 19 nt, Artificial Sequence
  Description of Artificial Sequence: Synthetic oligonucleotide
  Antisense strand to SEQ ID NO: 1258814
caacuaggcaagauuucuc

SEQ ID NO: 1258816 - RNA, 19 nt, Artificial Sequence
  Description of Artificial Sequence: Synthetic oligonucleotide
  Sense strand starting at position 187 of SEQ ID NO: 1241262
ggcucucuggacuacuaau

SEQ ID NO: 1258817 - RNA, 19 nt, Artificial Sequence
  Description of Artificial Sequence: Synthetic oligonucleotide
  Antisense strand to SEQ ID NO: 1258816
auuaguaguccagagagcc

SEQ ID NO: 1258818 - RNA, 19 nt, Artificial Sequence
  Description of Artificial Sequence: Synthetic oligonucleotide
  Sense strand starting at position 493 of SEQ ID NO: 1241262
agagcagugacaugaauau

SEQ ID NO: 1258819 - RNA, 19 nt, Artificial Sequence
  Description of Artificial Sequence: Synthetic oligonucleotide
  Antisense strand to SEQ ID NO: 1258818
auauucaugucacugcucu

SEQ ID NO: 1258820 - RNA, 19 nt, Artificial Sequence
  Description of Artificial Sequence: Synthetic oligonucleotide
  Sense strand starting at position 702 of SEQ ID NO: 1241262
gacauacuuggugaagcua

SEQ ID NO: 1258821 - RNA, 19 nt, Artificial Sequence
  Description of Artificial Sequence: Synthetic oligonucleotide
  Antisense strand to SEQ ID NO: 1258820
uagcuucaccaaguauguc

SEQ ID NO: 1258822 - RNA, 19 nt, Artificial Sequence
  Description of Artificial Sequence: Synthetic oligonucleotide
  Sense strand starting at position 750 of SEQ ID NO: 1241262
cuuagauuauguucuaaug

SEQ ID NO: 1258823 - RNA, 19 nt, Artificial Sequence
  Description of Artificial Sequence: Synthetic oligonucleotide
  Antisense strand to SEQ ID NO: 1258822
cauuagaacauaaucuaag

SEQ ID NO: 1258824 - RNA, 19 nt, Artificial Sequence
  Description of Artificial Sequence: Synthetic oligonucleotide
  Sense strand starting at position 766 of SEQ ID NO: 1241262
auguacauauguuccaaua

SEQ ID NO: 1258825 - RNA, 19 nt, Artificial Sequence
  Description of Artificial Sequence: Synthetic oligonucleotide
  Antisense strand to SEQ ID NO: 1258824
uauuggaacauauguacau

SEQ ID NO: 1258826 - RNA, 19 nt, Artificial Sequence
  Description of Artificial Sequence: Synthetic oligonucleotide
  Sense strand starting at position 890 of SEQ ID NO: 1241262
augaguacauuaucuguca

SEQ ID NO: 1258827 - RNA, 19 nt, Artificial Sequence
  Description of Artificial Sequence: Synthetic oligonucleotide
  Antisense strand to SEQ ID NO: 1258826
ugacagauaauguacucau

SEQ ID NO: 1258828 - RNA, 19 nt, Artificial Sequence
  Description of Artificial Sequence: Synthetic oligonucleotide
  Sense strand starting at position 891 of SEQ ID NO: 1241262
ugaguacauuaucugucaa

SEQ ID NO: 1258829 - RNA, 19 nt, Artificial Sequence
  Description of Artificial Sequence: Synthetic oligonucleotide
  Antisense strand to SEQ ID NO: 1258828
uugacagauaauguacuca

SEQ ID NO: 1258830 - RNA, 19 nt, Artificial Sequence
  Description of Artificial Sequence: Synthetic oligonucleotide
  Sense strand starting at position 893 of SEQ ID NO: 1241262
aguacauuaucugucaaac

SEQ ID NO: 1258831 - RNA, 19 nt, Artificial Sequence
  Description of Artificial Sequence: Synthetic oligonucleotide
  Antisense strand to SEQ ID NO: 1258830
guuugacagauaauguacu

SEQ ID NO: 1258832 - RNA, 19 nt, Artificial Sequence
  Description of Artificial Sequence: Synthetic oligonucleotide
  Sense strand starting at position 1071 of SEQ ID NO: 1241262
uaggacagcucuuuaguga

SEQ ID NO: 1258833 - RNA, 19 nt, Artificial Sequence
  Description of Artificial Sequence: Synthetic oligonucleotide
  Antisense strand to SEQ ID NO: 1258832
ucacuaaagagcuguccua

SEQ ID NO: 1258834 - RNA, 19 nt, Artificial Sequence
  Description of Artificial Sequence: Synthetic oligonucleotide
  Sense strand starting at position 1079 of SEQ ID NO: 1241262
cucuuuagugaguaguacu

SEQ ID NO: 1258835 - RNA, 19 nt, Artificial Sequence
  Description of Artificial Sequence: Synthetic oligonucleotide
  Antisense strand to SEQ ID NO: 1258834
aguacuacucacuaaagag

SEQ ID NO: 1258836 - RNA, 19 nt, Artificial Sequence
  Description of Artificial Sequence: Synthetic oligonucleotide
  Sense strand starting at position 1090 of SEQ ID NO: 1241262
guaguacugcaauaaaugu

SEQ ID NO: 1258837 - RNA, 19 nt, Artificial Sequence
  Description of Artificial Sequence: Synthetic oligonucleotide
  Antisense strand to SEQ ID NO: 1258836
acauuuauugcaguacuac

SEQ ID NO: 1258838 - RNA, 19 nt, Artificial Sequence
  Description of Artificial Sequence: Synthetic oligonucleotide
  Sense strand starting at position 1127 of SEQ ID NO: 1241262
uaaacagacgaugguauua

SEQ ID NO: 1258839 - RNA, 19 nt, Artificial Sequence
  Description of Artificial Sequence: Synthetic oligonucleotide
  Antisense strand to SEQ ID NO: 1258838
uaauaccaucgucuguuua

SEQ ID NO: 1258840 - RNA, 19 nt, Artificial Sequence
  Description of Artificial Sequence: Synthetic oligonucleotide
  Sense strand starting at position 1137 of SEQ ID NO: 1241262
augguauuaugauccagag

SEQ ID NO: 1258841 - RNA, 19 nt, Artificial Sequence
  Description of Artificial Sequence: Synthetic oligonucleotide
  Antisense strand to SEQ ID NO: 1258840
cucuggaucauaauaccau

SEQ ID NO: 1258842 - RNA, 19 nt, Artificial Sequence
  Description of Artificial Sequence: Synthetic oligonucleotide
  Sense strand starting at position 1139 of SEQ ID NO: 1241262
gguauuaugauccagagcu

SEQ ID NO: 1258843 - RNA, 19 nt, Artificial Sequence
  Description of Artificial Sequence: Synthetic oligonucleotide
  Antisense strand to SEQ ID NO: 1258842
agcucuggaucauaauacc

SEQ ID NO: 1258844 - RNA, 19 nt, Artificial Sequence
  Description of Artificial Sequence: Synthetic oligonucleotide
  Sense strand starting at position 1318 of SEQ ID NO: 1241262
gucuuuauacgagaauaac

SEQ ID NO: 1258845 - RNA, 19 nt, Artificial Sequence
  Description of Artificial Sequence: Synthetic oligonucleotide
  Antisense strand to SEQ ID NO: 1258844
guuauucucguauaaagac

SEQ ID NO: 1258846 - RNA, 19 nt, Artificial Sequence
  Description of Artificial Sequence: Synthetic oligonucleotide
  Sense strand starting at position 1328 of SEQ ID NO: 1241262
gagaauaacucagaggaau

SEQ ID NO: 1258847 - RNA, 19 nt, Artificial Sequence
  Description of Artificial Sequence: Synthetic oligonucleotide
  Antisense strand to SEQ ID NO: 1258846
auuccucugaguuauucuc

SEQ ID NO: 1258848 - RNA, 19 nt, Artificial Sequence
  Description of Artificial Sequence: Synthetic oligonucleotide
  Sense strand starting at position 1462 of SEQ ID NO: 1241262
cuaaacuuagaguaaucgu

SEQ ID NO: 1258849 - RNA, 19 nt, Artificial Sequence
  Description of Artificial Sequence: Synthetic oligonucleotide
  Antisense strand to SEQ ID NO: 1258848
acgauuacucuaaguuuag

SEQ ID NO: 1258850 - RNA, 19 nt, Artificial Sequence
  Description of Artificial Sequence: Synthetic oligonucleotide
  Sense strand starting at position 1627 of SEQ ID NO: 1241262
ccaauuacccagcagaugu

SEQ ID NO: 1258851 - RNA, 19 nt, Artificial Sequence
  Description of Artificial Sequence: Synthetic oligonucleotide
  Antisense strand to SEQ ID NO: 1258850
acaucugcuggguaauugg

SEQ ID NO: 1258852 - RNA, 19 nt, Artificial Sequence
  Description of Artificial Sequence: Synthetic oligonucleotide
  Sense strand starting at position 1708 of SEQ ID NO: 1241262
gaggccugaaaggguaaau

SEQ ID NO: 1258853 - RNA, 19 nt, Artificial Sequence
  Description of Artificial Sequence: Synthetic oligonucleotide
  Antisense strand to SEQ ID NO: 1258852
auuuacccuuucaggccuc

SEQ ID NO: 1258854 - RNA, 19 nt, Artificial Sequence
  Description of Artificial Sequence: Synthetic oligonucleotide
  Sense strand starting at position 1776 of SEQ ID NO: 1241262
uguagaaugcuccaguauu

SEQ ID NO: 1258855 - RNA, 19 nt, Artificial Sequence
  Description of Artificial Sequence: Synthetic oligonucleotide
  Antisense strand to SEQ ID NO: 1258854
aauacuggagcauucuaca

SEQ ID NO: 1258856 - RNA, 19 nt, Artificial Sequence
  Description of Artificial Sequence: Synthetic oligonucleotide
  Sense strand starting at position 1786 of SEQ ID NO: 1241262
uccaguauuaguguucgca

SEQ ID NO: 1258857 - RNA, 19 nt, Artificial Sequence
  Description of Artificial Sequence: Synthetic oligonucleotide
  Antisense strand to SEQ ID NO: 1258856
ugcgaacacuaauacugga

SEQ ID NO: 1258858 - RNA, 19 nt, Artificial Sequence
  Description of Artificial Sequence: Synthetic oligonucleotide
  Sense strand starting at position 1787 of SEQ ID NO: 1241262
ccaguauuaguguucgcau

SEQ ID NO: 1258859 - RNA, 19 nt, Artificial Sequence
  Description of Artificial Sequence: Synthetic oligonucleotide
  Antisense strand to SEQ ID NO: 1258858
augcgaacacuaauacugg

SEQ ID NO: 1258860 - RNA, 19 nt, Artificial Sequence
  Description of Artificial Sequence: Synthetic oligonucleotide
  Sense strand starting at position 2028 of SEQ ID NO: 1241262
cacaaucaugcaggguuaa

SEQ ID NO: 1258861 - RNA, 19 nt, Artificial Sequence
  Description of Artificial Sequence: Synthetic oligonucleotide
  Antisense strand to SEQ ID NO: 1258860
uuaacccugcaugauugug

SEQ ID NO: 1258862 - RNA, 19 nt, Artificial Sequence
  Description of Artificial Sequence: Synthetic oligonucleotide
  Sense strand starting at position 2029 of SEQ ID NO: 1241262
acaaucaugcaggguuaaa

SEQ ID NO: 1258863 - RNA, 19 nt, Artificial Sequence
  Description of Artificial Sequence: Synthetic oligonucleotide
  Antisense strand to SEQ ID NO: 1258862
uuuaacccugcaugauugu

SEQ ID NO: 1258864 - RNA, 19 nt, Artificial Sequence
  Description of Artificial Sequence: Synthetic oligonucleotide
  Sense strand starting at position 2521 of SEQ ID NO: 1241262
auucuaugacguuacugau

SEQ ID NO: 1258865 - RNA, 19 nt, Artificial Sequence
  Description of Artificial Sequence: Synthetic oligonucleotide
  Antisense strand to SEQ ID NO: 1258864
aucaguaacgucauagaau

SEQ ID NO: 1258866 - RNA, 19 nt, Artificial Sequence
  Description of Artificial Sequence: Synthetic oligonucleotide
  Sense strand starting at position 2731 of SEQ ID NO: 1241262
augacaccacucugugaaa

SEQ ID NO: 1258867 - RNA, 19 nt, Artificial Sequence
  Description of Artificial Sequence: Synthetic oligonucleotide
  Antisense strand to SEQ ID NO: 1258866
uuucacagaguggugucau

SEQ ID NO: 1258868 - RNA, 19 nt, Artificial Sequence
  Description of Artificial Sequence: Synthetic oligonucleotide
  Sense strand starting at position 2732 of SEQ ID NO: 1241262
ugacaccacucugugaaau

SEQ ID NO: 1258869 - RNA, 19 nt, Artificial Sequence
  Description of Artificial Sequence: Synthetic oligonucleotide
  Antisense strand to SEQ ID NO: 1258868
auuucacagagugguguca

SEQ ID NO: 1258870 - RNA, 19 nt, Artificial Sequence
  Description of Artificial Sequence: Synthetic oligonucleotide
  Sense strand starting at position 2881 of SEQ ID NO: 1241262
ucaaauaucugugugaaag

SEQ ID NO: 1258871 - RNA, 19 nt, Artificial Sequence
  Description of Artificial Sequence: Synthetic oligonucleotide
  Antisense strand to SEQ ID NO: 1258870
cuuucacacagauauuuga

SEQ ID NO: 1258872 - RNA, 19 nt, Artificial Sequence
  Description of Artificial Sequence: Synthetic oligonucleotide
  Sense strand starting at position 2911 of SEQ ID NO: 1241262
cuuuacugucagcaggauu

SEQ ID NO: 1258873 - RNA, 19 nt, Artificial Sequence
  Description of Artificial Sequence: Synthetic oligonucleotide
  Antisense strand to SEQ ID NO: 1258872
aauccugcugacaguaaag

SEQ ID NO: 1258874 - RNA, 19 nt, Artificial Sequence
  Description of Artificial Sequence: Synthetic oligonucleotide
  Sense strand starting at position 3043 of SEQ ID NO: 1241262
uuugaaucuccugacaugu

SEQ ID NO: 1258875 - RNA, 19 nt, Artificial Sequence
  Description of Artificial Sequence: Synthetic oligonucleotide
  Antisense strand to SEQ ID NO: 1258874
acaugucaggagauucaaa

SEQ ID NO: 1258876 - RNA, 19 nt, Artificial Sequence
  Description of Artificial Sequence: Synthetic oligonucleotide
  Sense strand starting at position 3324 of SEQ ID NO: 1241262
cgaaguaccacagaguacu

SEQ ID NO: 1258877 - RNA, 19 nt, Artificial Sequence
  Description of Artificial Sequence: Synthetic oligonucleotide
  Antisense strand to SEQ ID NO: 1258876
aguacucugugguacuucg

SEQ ID NO: 1258878 - RNA, 19 nt, Artificial Sequence
  Description of Artificial Sequence: Synthetic oligonucleotide
  Sense strand starting at position 3330 of SEQ ID NO: 1241262
accacagaguacuuuauga

SEQ ID NO: 1258879 - RNA, 19 nt, Artificial Sequence
  Description of Artificial Sequence: Synthetic oligonucleotide
  Antisense strand to SEQ ID NO: 1258878
ucauaaaguacucuguggu

SEQ ID NO: 1258880 - RNA, 19 nt, Artificial Sequence
  Description of Artificial Sequence: Synthetic oligonucleotide
  Sense strand starting at position 3549 of SEQ ID NO: 1241262
ccaagaacccuauguggaa

SEQ ID NO: 1258881 - RNA, 19 nt, Artificial Sequence
  Description of Artificial Sequence: Synthetic oligonucleotide
  Antisense strand to SEQ ID NO: 1258880
uuccacauaggguucuugg

SEQ ID NO: 1258882 - RNA, 19 nt, Artificial Sequence
  Description of Artificial Sequence: Synthetic oligonucleotide
  Sense strand starting at position 3668 of SEQ ID NO: 1241262
ucgugauaccuccacaauu

SEQ ID NO: 1258883 - RNA, 19 nt, Artificial Sequence
  Description of Artificial Sequence: Synthetic oligonucleotide
  Antisense strand to SEQ ID NO: 1258882
aauuguggagguaucacga

SEQ ID NO: 1258884 - RNA, 19 nt, Artificial Sequence
  Description of Artificial Sequence: Synthetic oligonucleotide
  Sense strand starting at position 3909 of SEQ ID NO: 1241262
cagguauguccaggaacca

SEQ ID NO: 1258885 - RNA, 19 nt, Artificial Sequence
  Description of Artificial Sequence: Synthetic oligonucleotide
  Antisense strand to SEQ ID NO: 1258884
ugguuccuggacauaccug

SEQ ID NO: 1258886 - RNA, 19 nt, Artificial Sequence
  Description of Artificial Sequence: Synthetic oligonucleotide
  Sense strand starting at position 17 of SEQ ID NO: 1241263
cgaaguaccacagaguacu

SEQ ID NO: 1258887 - RNA, 19 nt, Artificial Sequence
  Description of Artificial Sequence: Synthetic oligonucleotide
  Antisense strand to SEQ ID NO: 1258886
aguacucugugguacuucg

SEQ ID NO: 1258888 - RNA, 19 nt, Artificial Sequence
  Description of Artificial Sequence: Synthetic oligonucleotide
  Sense strand starting at position 23 of SEQ ID NO: 1241263
accacagaguacuuuauga

SEQ ID NO: 1258889 - RNA, 19 nt, Artificial Sequence
  Description of Artificial Sequence: Synthetic oligonucleotide
  Antisense strand to SEQ ID NO: 1258888
ucauaaaguacucuguggu

SEQ ID NO: 1258890 - RNA, 19 nt, Artificial Sequence
  Description of Artificial Sequence: Synthetic oligonucleotide
  Sense strand starting at position 28 of SEQ ID NO: 1241263
agaguacuuuaugagauaa

SEQ ID NO: 1258891 - RNA, 19 nt, Artificial Sequence
  Description of Artificial Sequence: Synthetic oligonucleotide
  Antisense strand to SEQ ID NO: 1258890
uuaucucauaaaguacucu

SEQ ID NO: 1258892 - RNA, 19 nt, Artificial Sequence
  Description of Artificial Sequence: Synthetic oligonucleotide
  Sense strand starting at position 101 of SEQ ID NO: 1241263
augugcuaauucucucuga

SEQ ID NO: 1258893 - RNA, 19 nt, Artificial Sequence
  Description of Artificial Sequence: Synthetic oligonucleotide
  Antisense strand to SEQ ID NO: 1258892
ucagagagaauuagcacau

SEQ ID NO: 1258894 - RNA, 19 nt, Artificial Sequence
  Description of Artificial Sequence: Synthetic oligonucleotide
  Sense strand starting at position 102 of SEQ ID NO: 1241263
ugugcuaauucucucugaa

SEQ ID NO: 1258895 - RNA, 19 nt, Artificial Sequence
  Description of Artificial Sequence: Synthetic oligonucleotide
  Antisense strand to SEQ ID NO: 1258894
uucagagagaauuagcaca

SEQ ID NO: 1258896 - RNA, 19 nt, Artificial Sequence
  Description of Artificial Sequence: Synthetic oligonucleotide
  Sense strand starting at position 201 of SEQ ID NO: 1241263
cuugcaggcucaucaguua

SEQ ID NO: 1258897 - RNA, 19 nt, Artificial Sequence
  Description of Artificial Sequence: Synthetic oligonucleotide
  Antisense strand to SEQ ID NO: 1258896
uaacugaugagccugcaag

SEQ ID NO: 1258898 - RNA, 19 nt, Artificial Sequence
  Description of Artificial Sequence: Synthetic oligonucleotide
  Sense strand starting at position 204 of SEQ ID NO: 1241263
gcaggcucaucaguuaaac

SEQ ID NO: 1258899 - RNA, 19 nt, Artificial Sequence
  Description of Artificial Sequence: Synthetic oligonucleotide
  Antisense strand to SEQ ID NO: 1258898
guuuaacugaugagccugc

SEQ ID NO: 1258900 - RNA, 19 nt, Artificial Sequence
  Description of Artificial Sequence: Synthetic oligonucleotide
  Sense strand starting at position 242 of SEQ ID NO: 1241263
ccaagaacccuauguggaa

SEQ ID NO: 1258901 - RNA, 19 nt, Artificial Sequence
  Description of Artificial Sequence: Synthetic oligonucleotide
  Antisense strand to SEQ ID NO: 1258900
uuccacauaggguucuugg

SEQ ID NO: 1258902 - RNA, 19 nt, Artificial Sequence
  Description of Artificial Sequence: Synthetic oligonucleotide
  Sense strand starting at position 361 of SEQ ID NO: 1241263
ucgugauaccuccacaauu

SEQ ID NO: 1258903 - RNA, 19 nt, Artificial Sequence
  Description of Artificial Sequence: Synthetic oligonucleotide
  Antisense strand to SEQ ID NO: 1258902
aauuguggagguaucacga

SEQ ID NO: 1258904 - RNA, 19 nt, Artificial Sequence
  Description of Artificial Sequence: Synthetic oligonucleotide
  Sense strand starting at position 602 of SEQ ID NO: 1241263
cagguauguccaggaacca

SEQ ID NO: 1258905 - RNA, 19 nt, Artificial Sequence
  Description of Artificial Sequence: Synthetic oligonucleotide
  Antisense strand to SEQ ID NO: 1258904
ugguuccuggacauaccug

SEQ ID NO: 1258906 - RNA, 19 nt, Artificial Sequence
  Description of Artificial Sequence: Synthetic oligonucleotide
  Sense strand starting at position 865 of SEQ ID NO: 1241263
ggcuuauuauccuuaguau

SEQ ID NO: 1258907 - RNA, 19 nt, Artificial Sequence
  Description of Artificial Sequence: Synthetic oligonucleotide
  Antisense strand to SEQ ID NO: 1258906
auacuaaggauaauaagcc

SEQ ID NO: 1258908 - RNA, 19 nt, Artificial Sequence
  Description of Artificial Sequence: Synthetic oligonucleotide
  Sense strand starting at position 866 of SEQ ID NO: 1241263
gcuuauuauccuuaguauu

SEQ ID NO: 1258909 - RNA, 19 nt, Artificial Sequence
  Description of Artificial Sequence: Synthetic oligonucleotide
  Antisense strand to SEQ ID NO: 1258908
aauacuaaggauaauaagc

SEQ ID NO: 1258910 - RNA, 19 nt, Artificial Sequence
  Description of Artificial Sequence: Synthetic oligonucleotide
  Sense strand starting at position 1108 of SEQ ID NO: 1241263
acgagauaacagcaauguu

SEQ ID NO: 1258911 - RNA, 19 nt, Artificial Sequence
  Description of Artificial Sequence: Synthetic oligonucleotide
  Antisense strand to SEQ ID NO: 1258910
aacauugcuguuaucucgu

SEQ ID NO: 1258912 - RNA, 19 nt, Artificial Sequence
  Description of Artificial Sequence: Synthetic oligonucleotide
  Sense strand starting at position 1111 of SEQ ID NO: 1241263
agauaacagcaauguuaaa

SEQ ID NO: 1258913 - RNA, 19 nt, Artificial Sequence
  Description of Artificial Sequence: Synthetic oligonucleotide
  Antisense strand to SEQ ID NO: 1258912
uuuaacauugcuguuaucu

SEQ ID NO: 1258914 - RNA, 19 nt, Artificial Sequence
  Description of Artificial Sequence: Synthetic oligonucleotide
  Sense strand starting at position 1149 of SEQ ID NO: 1241263
acugacuguggcuauguaa

SEQ ID NO: 1258915 - RNA, 19 nt, Artificial Sequence
  Description of Artificial Sequence: Synthetic oligonucleotide
  Antisense strand to SEQ ID NO: 1258914
uuacauagccacagucagu

SEQ ID NO: 1258916 - RNA, 19 nt, Artificial Sequence
  Description of Artificial Sequence: Synthetic oligonucleotide
  Sense strand starting at position 1212 of SEQ ID NO: 1241263
gguaaagagcuaugauaca

SEQ ID NO: 1258917 - RNA, 19 nt, Artificial Sequence
  Description of Artificial Sequence: Synthetic oligonucleotide
  Antisense strand to SEQ ID NO: 1258916
uguaucauagcucuuuacc

SEQ ID NO: 1258918 - RNA, 19 nt, Artificial Sequence
  Description of Artificial Sequence: Synthetic oligonucleotide
  Sense strand starting at position 1455 of SEQ ID NO: 1241263
aggugauucuggcuagcuc

SEQ ID NO: 1258919 - RNA, 19 nt, Artificial Sequence
  Description of Artificial Sequence: Synthetic oligonucleotide
  Antisense strand to SEQ ID NO: 1258918
gagcuagccagaaucaccu

SEQ ID NO: 1258920 - RNA, 19 nt, Artificial Sequence
  Description of Artificial Sequence: Synthetic oligonucleotide
  Sense strand starting at position 1456 of SEQ ID NO: 1241263
ggugauucuggcuagcucu

SEQ ID NO: 1258921 - RNA, 19 nt, Artificial Sequence
  Description of Artificial Sequence: Synthetic oligonucleotide
  Antisense strand to SEQ ID NO: 1258920
agagcuagccagaaucacc

SEQ ID NO: 1258922 - RNA, 19 nt, Artificial Sequence
  Description of Artificial Sequence: Synthetic oligonucleotide
  Sense strand starting at position 1496 of SEQ ID NO: 1241263
agguaauagccaugcucaa

SEQ ID NO: 1258923 - RNA, 19 nt, Artificial Sequence
  Description of Artificial Sequence: Synthetic oligonucleotide
  Antisense strand to SEQ ID NO: 1258922
uugagcauggcuauuaccu

SEQ ID NO: 1258924 - RNA, 19 nt, Artificial Sequence
  Description of Artificial Sequence: Synthetic oligonucleotide
  Sense strand starting at position 1532 of SEQ ID NO: 1241263
caaacaguggcucacugau

SEQ ID NO: 1258925 - RNA, 19 nt, Artificial Sequence
  Description of Artificial Sequence: Synthetic oligonucleotide
  Antisense strand to SEQ ID NO: 1258924
aucagugagccacuguuug

SEQ ID NO: 1258926 - RNA, 19 nt, Artificial Sequence
  Description of Artificial Sequence: Synthetic oligonucleotide
  Sense strand starting at position 1538 of SEQ ID NO: 1241263
guggcucacugaucaagga

SEQ ID NO: 1258927 - RNA, 19 nt, Artificial Sequence
  Description of Artificial Sequence: Synthetic oligonucleotide
  Antisense strand to SEQ ID NO: 1258926
uccuugaucagugagccac

SEQ ID NO: 1258928 - RNA, 19 nt, Artificial Sequence
  Description of Artificial Sequence: Synthetic oligonucleotide
  Sense strand starting at position 1588 of SEQ ID NO: 1241263
gacugagaaucacucgauc

SEQ ID NO: 1258929 - RNA, 19 nt, Artificial Sequence
  Description of Artificial Sequence: Synthetic oligonucleotide
  Antisense strand to SEQ ID NO: 1258928
gaucgagugauucucaguc

SEQ ID NO: 1258930 - RNA, 19 nt, Artificial Sequence
  Description of Artificial Sequence: Synthetic oligonucleotide
  Sense strand starting at position 2022 of SEQ ID NO: 1241263
gaaccugggucauugauga

SEQ ID NO: 1258931 - RNA, 19 nt, Artificial Sequence
  Description of Artificial Sequence: Synthetic oligonucleotide
  Antisense strand to SEQ ID NO: 1258930
ucaucaaugacccagguuc

SEQ ID NO: 1258932 - RNA, 19 nt, Artificial Sequence
  Description of Artificial Sequence: Synthetic oligonucleotide
  Sense strand starting at position 2131 of SEQ ID NO: 1241263
aagcuagcuugaguugaau

SEQ ID NO: 1258933 - RNA, 19 nt, Artificial Sequence
  Description of Artificial Sequence: Synthetic oligonucleotide
  Antisense strand to SEQ ID NO: 1258932
auucaacucaagcuagcuu

SEQ ID NO: 1258934 - RNA, 19 nt, Artificial Sequence
  Description of Artificial Sequence: Synthetic oligonucleotide
  Sense strand starting at position 2133 of SEQ ID NO: 1241263
gcuagcuugaguugaauau

SEQ ID NO: 1258935 - RNA, 19 nt, Artificial Sequence
  Description of Artificial Sequence: Synthetic oligonucleotide
  Antisense strand to SEQ ID NO: 1258934
auauucaacucaagcuagc

SEQ ID NO: 1258936 - RNA, 19 nt, Artificial Sequence
  Description of Artificial Sequence: Synthetic oligonucleotide
  Sense strand starting at position 2134 of SEQ ID NO: 1241263
cuagcuugaguugaauauu

SEQ ID NO: 1258937 - RNA, 19 nt, Artificial Sequence
  Description of Artificial Sequence: Synthetic oligonucleotide
  Antisense strand to SEQ ID NO: 1258936
aauauucaacucaagcuag

SEQ ID NO: 1258938 - RNA, 19 nt, Artificial Sequence
  Description of Artificial Sequence: Synthetic oligonucleotide
  Sense strand starting at position 2137 of SEQ ID NO: 1241263
gcuugaguugaauauucug

SEQ ID NO: 1258939 - RNA, 19 nt, Artificial Sequence
  Description of Artificial Sequence: Synthetic oligonucleotide
  Antisense strand to SEQ ID NO: 1258938
cagaauauucaacucaagc

SEQ ID NO: 1258940 - RNA, 19 nt, Artificial Sequence
  Description of Artificial Sequence: Synthetic oligonucleotide
  Sense strand starting at position 2140 of SEQ ID NO: 1241263
ugaguugaauauucuggga

SEQ ID NO: 1258941 - RNA, 19 nt, Artificial Sequence
  Description of Artificial Sequence: Synthetic oligonucleotide
  Antisense strand to SEQ ID NO: 1258940
ucccagaauauucaacuca

SEQ ID NO: 1258942 - RNA, 19 nt, Artificial Sequence
  Description of Artificial Sequence: Synthetic oligonucleotide
  Sense strand starting at position 2806 of SEQ ID NO: 1241263
gccaucaggccacaaauau

SEQ ID NO: 1258943 - RNA, 19 nt, Artificial Sequence
  Description of Artificial Sequence: Synthetic oligonucleotide
  Antisense strand to SEQ ID NO: 1258942
auauuuguggccugauggc

SEQ ID NO: 1258944 - RNA, 19 nt, Artificial Sequence
  Description of Artificial Sequence: Synthetic oligonucleotide
  Sense strand starting at position 2969 of SEQ ID NO: 1241263
auuuguccuuaggaauacu

SEQ ID NO: 1258945 - RNA, 19 nt, Artificial Sequence
  Description of Artificial Sequence: Synthetic oligonucleotide
  Antisense strand to SEQ ID NO: 1258944
aguauuccuaaggacaaau

SEQ ID NO: 1258946 - RNA, 19 nt, Artificial Sequence
  Description of Artificial Sequence: Synthetic oligonucleotide
  Sense strand starting at position 3071 of SEQ ID NO: 1241263
caguucuuccucggcacaa

SEQ ID NO: 1258947 - RNA, 19 nt, Artificial Sequence
  Description of Artificial Sequence: Synthetic oligonucleotide
  Antisense strand to SEQ ID NO: 1258946
uugugccgaggaagaacug

SEQ ID NO: 1258948 - RNA, 19 nt, Artificial Sequence
  Description of Artificial Sequence: Synthetic oligonucleotide
  Sense strand starting at position 3073 of SEQ ID NO: 1241263
guucuuccucggcacaaga

SEQ ID NO: 1258949 - RNA, 19 nt, Artificial Sequence
  Description of Artificial Sequence: Synthetic oligonucleotide
  Antisense strand to SEQ ID NO: 1258948
ucuugugccgaggaagaac

SEQ ID NO: 1258950 - RNA, 19 nt, Artificial Sequence
  Description of Artificial Sequence: Synthetic oligonucleotide
  Sense strand starting at position 3222 of SEQ ID NO: 1241263
gcccuagaccuccaauguu

SEQ ID NO: 1258951 - RNA, 19 nt, Artificial Sequence
  Description of Artificial Sequence: Synthetic oligonucleotide
  Antisense strand to SEQ ID NO: 1258950
aacauuggaggucuagggc

SEQ ID NO: 1258952 - RNA, 19 nt, Artificial Sequence
  Description of Artificial Sequence: Synthetic oligonucleotide
  Sense strand starting at position 3285 of SEQ ID NO: 1241263
uguggauccuauuccuaca

SEQ ID NO: 1258953 - RNA, 19 nt, Artificial Sequence
  Description of Artificial Sequence: Synthetic oligonucleotide
  Antisense strand to SEQ ID NO: 1258952
uguaggaauaggauccaca

SEQ ID NO: 1258954 - RNA, 19 nt, Artificial Sequence
  Description of Artificial Sequence: Synthetic oligonucleotide
  Sense strand starting at position 3359 of SEQ ID NO: 1241263
gguucuguuccuggcauuu

SEQ ID NO: 1258955 - RNA, 19 nt, Artificial Sequence
  Description of Artificial Sequence: Synthetic oligonucleotide
  Antisense strand to SEQ ID NO: 1258954
aaaugccaggaacagaacc

SEQ ID NO: 1258956 - RNA, 19 nt, Artificial Sequence
  Description of Artificial Sequence: Synthetic oligonucleotide
  Sense strand starting at position 3475 of SEQ ID NO: 1241263
auagguagcugguuucuaa

SEQ ID NO: 1258957 - RNA, 19 nt, Artificial Sequence
  Description of Artificial Sequence: Synthetic oligonucleotide
  Antisense strand to SEQ ID NO: 1258956
uuagaaaccagcuaccuau

SEQ ID NO: 1258958 - RNA, 19 nt, Artificial Sequence
  Description of Artificial Sequence: Synthetic oligonucleotide
  Sense strand starting at position 3662 of SEQ ID NO: 1241263
agauuaagguuucuaucag

SEQ ID NO: 1258959 - RNA, 19 nt, Artificial Sequence
  Description of Artificial Sequence: Synthetic oligonucleotide
  Antisense strand to SEQ ID NO: 1258958
cugauagaaaccuuaaucu

SEQ ID NO: 1258960 - RNA, 19 nt, Artificial Sequence
  Description of Artificial Sequence: Synthetic oligonucleotide
  Sense strand starting at position 3771 of SEQ ID NO: 1241263
agcacuacacucugugaua

SEQ ID NO: 1258961 - RNA, 19 nt, Artificial Sequence
  Description of Artificial Sequence: Synthetic oligonucleotide
  Antisense strand to SEQ ID NO: 1258960
uaucacagaguguagugcu

SEQ ID NO: 1258962 - RNA, 19 nt, Artificial Sequence
  Description of Artificial Sequence: Synthetic oligonucleotide
  Sense strand starting at position 3772 of SEQ ID NO: 1241263
gcacuacacucugugauau

SEQ ID NO: 1258963 - RNA, 19 nt, Artificial Sequence
  Description of Artificial Sequence: Synthetic oligonucleotide
  Antisense strand to SEQ ID NO: 1258962
auaucacagaguguagugc

SEQ ID NO: 1258964 - RNA, 19 nt, Artificial Sequence
  Description of Artificial Sequence: Synthetic oligonucleotide
  Sense strand starting at position 3783 of SEQ ID NO: 1241263
ugugauaucuagucccaaa

SEQ ID NO: 1258965 - RNA, 19 nt, Artificial Sequence
  Description of Artificial Sequence: Synthetic oligonucleotide
  Antisense strand to SEQ ID NO: 1258964
uuugggacuagauaucaca

SEQ ID NO: 1258966 - RNA, 19 nt, Artificial Sequence
  Description of Artificial Sequence: Synthetic oligonucleotide
  Sense strand starting at position 15 of SEQ ID NO: 1241264
cuggcuuaucccgaaccca

SEQ ID NO: 1258967 - RNA, 19 nt, Artificial Sequence
  Description of Artificial Sequence: Synthetic oligonucleotide
  Antisense strand to SEQ ID NO: 1258966
uggguucgggauaagccag

SEQ ID NO: 1258968 - RNA, 19 nt, Artificial Sequence
  Description of Artificial Sequence: Synthetic oligonucleotide
  Sense strand starting at position 312 of SEQ ID NO: 1241264
accugaaaguccuaagaac

SEQ ID NO: 1258969 - RNA, 19 nt, Artificial Sequence
  Description of Artificial Sequence: Synthetic oligonucleotide
  Antisense strand to SEQ ID NO: 1258968
guucuuaggacuuucaggu

SEQ ID NO: 1258970 - RNA, 19 nt, Artificial Sequence
  Description of Artificial Sequence: Synthetic oligonucleotide
  Sense strand starting at position 333 of SEQ ID NO: 1241264
uuacuuaucguguagacca

SEQ ID NO: 1258971 - RNA, 19 nt, Artificial Sequence
  Description of Artificial Sequence: Synthetic oligonucleotide
  Antisense strand to SEQ ID NO: 1258970
uggucuacacgauaaguaa

SEQ ID NO: 1258972 - RNA, 19 nt, Artificial Sequence
  Description of Artificial Sequence: Synthetic oligonucleotide
  Sense strand starting at position 349 of SEQ ID NO: 1241264
ccaguaacgugucccuuua

SEQ ID NO: 1258973 - RNA, 19 nt, Artificial Sequence
  Description of Artificial Sequence: Synthetic oligonucleotide
  Antisense strand to SEQ ID NO: 1258972
uaaagggacacguuacugg

SEQ ID NO: 1258974 - RNA, 19 nt, Artificial Sequence
  Description of Artificial Sequence: Synthetic oligonucleotide
  Sense strand starting at position 540 of SEQ ID NO: 1241264
gaaaucugaugugcuaacu

SEQ ID NO: 1258975 - RNA, 19 nt, Artificial Sequence
  Description of Artificial Sequence: Synthetic oligonucleotide
  Antisense strand to SEQ ID NO: 1258974
aguuagcacaucagauuuc

SEQ ID NO: 1258976 - RNA, 19 nt, Artificial Sequence
  Description of Artificial Sequence: Synthetic oligonucleotide
  Sense strand starting at position 1857 of SEQ ID NO: 1241264
gccguaauuguuucccgga

SEQ ID NO: 1258977 - RNA, 19 nt, Artificial Sequence
  Description of Artificial Sequence: Synthetic oligonucleotide
  Antisense strand to SEQ ID NO: 1258976
uccgggaaacaauuacggc

SEQ ID NO: 1258978 - RNA, 19 nt, Artificial Sequence
  Description of Artificial Sequence: Synthetic oligonucleotide
  Sense strand starting at position 1859 of SEQ ID NO: 1241264
cguaauuguuucccggaga

SEQ ID NO: 1258979 - RNA, 19 nt, Artificial Sequence
  Description of Artificial Sequence: Synthetic oligonucleotide
  Antisense strand to SEQ ID NO: 1258978
ucuccgggaaacaauuacg

SEQ ID NO: 1258980 - RNA, 19 nt, Artificial Sequence
  Description of Artificial Sequence: Synthetic oligonucleotide
  Sense strand starting at position 1862 of SEQ ID NO: 1241264
aauuguuucccggagagcu

SEQ ID NO: 1258981 - RNA, 19 nt, Artificial Sequence
  Description of Artificial Sequence: Synthetic oligonucleotide
  Antisense strand to SEQ ID NO: 1258980
agcucuccgggaaacaauu

SEQ ID NO: 1258982 - RNA, 19 nt, Artificial Sequence
  Description of Artificial Sequence: Synthetic oligonucleotide
  Sense strand starting at position 1864 of SEQ ID NO: 1241264
uuguuucccggagagcuua

SEQ ID NO: 1258983 - RNA, 19 nt, Artificial Sequence
  Description of Artificial Sequence: Synthetic oligonucleotide
  Antisense strand to SEQ ID NO: 1258982
uaagcucuccgggaaacaa

SEQ ID NO: 1258984 - RNA, 19 nt, Artificial Sequence
  Description of Artificial Sequence: Synthetic oligonucleotide
  Sense strand starting at position 2021 of SEQ ID NO: 1241264
cccagauaaugagaaauag

SEQ ID NO: 1258985 - RNA, 19 nt, Artificial Sequence
  Description of Artificial Sequence: Synthetic oligonucleotide
  Antisense strand to SEQ ID NO: 1258984
cuauuucucauuaucuggg

SEQ ID NO: 1258986 - RNA, 19 nt, Artificial Sequence
  Description of Artificial Sequence: Synthetic oligonucleotide
  Sense strand starting at position 2115 of SEQ ID NO: 1241264
aaauaucggugggaauuaa

SEQ ID NO: 1258987 - RNA, 19 nt, Artificial Sequence
  Description of Artificial Sequence: Synthetic oligonucleotide
  Antisense strand to SEQ ID NO: 1258986
uuaauucccaccgauauuu

SEQ ID NO: 1258988 - RNA, 19 nt, Artificial Sequence
  Description of Artificial Sequence: Synthetic oligonucleotide
  Sense strand starting at position 2131 of SEQ ID NO: 1241264
uaaauaaguggcuggcuua

SEQ ID NO: 1258989 - RNA, 19 nt, Artificial Sequence
  Description of Artificial Sequence: Synthetic oligonucleotide
  Antisense strand to SEQ ID NO: 1258988
uaagccagccacuuauuua

SEQ ID NO: 1258990 - RNA, 19 nt, Artificial Sequence
  Description of Artificial Sequence: Synthetic oligonucleotide
  Sense strand starting at position 2132 of SEQ ID NO: 1241264
aaauaaguggcuggcuuaa

SEQ ID NO: 1258991 - RNA, 19 nt, Artificial Sequence
  Description of Artificial Sequence: Synthetic oligonucleotide
  Antisense strand to SEQ ID NO: 1258990
uuaagccagccacuuauuu

SEQ ID NO: 1258992 - RNA, 19 nt, Artificial Sequence
  Description of Artificial Sequence: Synthetic oligonucleotide
  Sense strand starting at position 2210 of SEQ ID NO: 1241264
gccgguuugcuccagguga

SEQ ID NO: 1258993 - RNA, 19 nt, Artificial Sequence
  Description of Artificial Sequence: Synthetic oligonucleotide
  Antisense strand to SEQ ID NO: 1258992
ucaccuggagcaaaccggc

SEQ ID NO: 1258994 - RNA, 19 nt, Artificial Sequence
  Description of Artificial Sequence: Synthetic oligonucleotide
  Sense strand starting at position 2362 of SEQ ID NO: 1241264
aaguauggcuagucggaau

SEQ ID NO: 1258995 - RNA, 19 nt, Artificial Sequence
  Description of Artificial Sequence: Synthetic oligonucleotide
  Antisense strand to SEQ ID NO: 1258994
auuccgacuagccauacuu

SEQ ID NO: 1258996 - RNA, 19 nt, Artificial Sequence
  Description of Artificial Sequence: Synthetic oligonucleotide
  Sense strand starting at position 2369 of SEQ ID NO: 1241264
gcuagucggaaucgagaua

SEQ ID NO: 1258997 - RNA, 19 nt, Artificial Sequence
  Description of Artificial Sequence: Synthetic oligonucleotide
  Antisense strand to SEQ ID NO: 1258996
uaucucgauuccgacuagc

SEQ ID NO: 1258998 - RNA, 19 nt, Artificial Sequence
  Description of Artificial Sequence: Synthetic oligonucleotide
  Sense strand starting at position 2370 of SEQ ID NO: 1241264
cuagucggaaucgagauau

SEQ ID NO: 1258999 - RNA, 19 nt, Artificial Sequence
  Description of Artificial Sequence: Synthetic oligonucleotide
  Antisense strand to SEQ ID NO: 1258998
auaucucgauuccgacuag

SEQ ID NO: 1259000 - RNA, 19 nt, Artificial Sequence
  Description of Artificial Sequence: Synthetic oligonucleotide
  Sense strand starting at position 2420 of SEQ ID NO: 1241264
uuguuacauguugaaguga

SEQ ID NO: 1259001 - RNA, 19 nt, Artificial Sequence
  Description of Artificial Sequence: Synthetic oligonucleotide
  Antisense strand to SEQ ID NO: 1259000
ucacuucaacauguaacaa

SEQ ID NO: 1259002 - RNA, 19 nt, Artificial Sequence
  Description of Artificial Sequence: Synthetic oligonucleotide
  Sense strand starting at position 2514 of SEQ ID NO: 1241264
ucaccuguggccugcauua

SEQ ID NO: 1259003 - RNA, 19 nt, Artificial Sequence
  Description of Artificial Sequence: Synthetic oligonucleotide
  Antisense strand to SEQ ID NO: 1259002
uaaugcaggccacagguga

SEQ ID NO: 1259004 - RNA, 19 nt, Artificial Sequence
  Description of Artificial Sequence: Synthetic oligonucleotide
  Sense strand starting at position 2516 of SEQ ID NO: 1241264
accuguggccugcauuaua

SEQ ID NO: 1259005 - RNA, 19 nt, Artificial Sequence
  Description of Artificial Sequence: Synthetic oligonucleotide
  Antisense strand to SEQ ID NO: 1259004
uauaaugcaggccacaggu

SEQ ID NO: 1259006 - RNA, 19 nt, Artificial Sequence
  Description of Artificial Sequence: Synthetic oligonucleotide
  Sense strand starting at position 2590 of SEQ ID NO: 1241264
cugugagguaggugcuuua

SEQ ID NO: 1259007 - RNA, 19 nt, Artificial Sequence
  Description of Artificial Sequence: Synthetic oligonucleotide
  Antisense strand to SEQ ID NO: 1259006
uaaagcaccuaccucacag

SEQ ID NO: 1259008 - RNA, 19 nt, Artificial Sequence
  Description of Artificial Sequence: Synthetic oligonucleotide
  Sense strand starting at position 2593 of SEQ ID NO: 1241264
ugagguaggugcuuuaacu

SEQ ID NO: 1259009 - RNA, 19 nt, Artificial Sequence
  Description of Artificial Sequence: Synthetic oligonucleotide
  Antisense strand to SEQ ID NO: 1259008
aguuaaagcaccuaccuca

SEQ ID NO: 1259010 - RNA, 19 nt, Artificial Sequence
  Description of Artificial Sequence: Synthetic oligonucleotide
  Sense strand starting at position 2600 of SEQ ID NO: 1241264
ggugcuuuaacugugugca

SEQ ID NO: 1259011 - RNA, 19 nt, Artificial Sequence
  Description of Artificial Sequence: Synthetic oligonucleotide
  Antisense strand to SEQ ID NO: 1259010
ugcacacaguuaaagcacc

SEQ ID NO: 1259012 - RNA, 19 nt, Artificial Sequence
  Description of Artificial Sequence: Synthetic oligonucleotide
  Sense strand starting at position 2633 of SEQ ID NO: 1241264
ugcuuuaacugugugcaca

SEQ ID NO: 1259013 - RNA, 19 nt, Artificial Sequence
  Description of Artificial Sequence: Synthetic oligonucleotide
  Antisense strand to SEQ ID NO: 1259012
ugugcacacaguuaaagca

SEQ ID NO: 1259014 - RNA, 19 nt, Artificial Sequence
  Description of Artificial Sequence: Synthetic oligonucleotide
  Sense strand starting at position 2634 of SEQ ID NO: 1241264
gcuuuaacugugugcacau

SEQ ID NO: 1259015 - RNA, 19 nt, Artificial Sequence
  Description of Artificial Sequence: Synthetic oligonucleotide
  Antisense strand to SEQ ID NO: 1259014
augugcacacaguuaaagc

SEQ ID NO: 1259016 - RNA, 19 nt, Artificial Sequence
  Description of Artificial Sequence: Synthetic oligonucleotide
  Sense strand starting at position 2635 of SEQ ID NO: 1241264
cuuuaacugugugcacauu

SEQ ID NO: 1259017 - RNA, 19 nt, Artificial Sequence
  Description of Artificial Sequence: Synthetic oligonucleotide
  Antisense strand to SEQ ID NO: 1259016
aaugugcacacaguuaaag

SEQ ID NO: 1259018 - RNA, 19 nt, Artificial Sequence
  Description of Artificial Sequence: Synthetic oligonucleotide
  Sense strand starting at position 3026 of SEQ ID NO: 1241264
guaaguagccaguaaguga

SEQ ID NO: 1259019 - RNA, 19 nt, Artificial Sequence
  Description of Artificial Sequence: Synthetic oligonucleotide
  Antisense strand to SEQ ID NO: 1259018
ucacuuacuggcuacuuac

SEQ ID NO: 1259020 - RNA, 19 nt, Artificial Sequence
  Description of Artificial Sequence: Synthetic oligonucleotide
  Sense strand starting at position 3041 of SEQ ID NO: 1241264
gugaacaacugagauuuga

SEQ ID NO: 1259021 - RNA, 19 nt, Artificial Sequence
  Description of Artificial Sequence: Synthetic oligonucleotide
  Antisense strand to SEQ ID NO: 1259020
ucaaaucucaguuguucac

SEQ ID NO: 1259022 - RNA, 19 nt, Artificial Sequence
  Description of Artificial Sequence: Synthetic oligonucleotide
  Sense strand starting at position 3131 of SEQ ID NO: 1241264
uaugaauuggcuuaagguu

SEQ ID NO: 1259023 - RNA, 19 nt, Artificial Sequence
  Description of Artificial Sequence: Synthetic oligonucleotide
  Antisense strand to SEQ ID NO: 1259022
aaccuuaagccaauucaua

SEQ ID NO: 1259024 - RNA, 19 nt, Artificial Sequence
  Description of Artificial Sequence: Synthetic oligonucleotide
  Sense strand starting at position 3314 of SEQ ID NO: 1241264
aauaucggugggcguuaaa

SEQ ID NO: 1259025 - RNA, 19 nt, Artificial Sequence
  Description of Artificial Sequence: Synthetic oligonucleotide
  Antisense strand to SEQ ID NO: 1259024
uuuaacgcccaccgauauu

SEQ ID NO: 1259026 - RNA, 19 nt, Artificial Sequence
  Description of Artificial Sequence: Synthetic oligonucleotide
  Sense strand starting at position 3317 of SEQ ID NO: 1241264
aucggugggcguuaaauaa

SEQ ID NO: 1259027 - RNA, 19 nt, Artificial Sequence
  Description of Artificial Sequence: Synthetic oligonucleotide
  Antisense strand to SEQ ID NO: 1259026
uuauuuaacgcccaccgau

SEQ ID NO: 1259028 - RNA, 19 nt, Artificial Sequence
  Description of Artificial Sequence: Synthetic oligonucleotide
  Sense strand starting at position 3328 of SEQ ID NO: 1241264
uuaaauaagugucuggcuu

SEQ ID NO: 1259029 - RNA, 19 nt, Artificial Sequence
  Description of Artificial Sequence: Synthetic oligonucleotide
  Antisense strand to SEQ ID NO: 1259028
aagccagacacuuauuuaa

SEQ ID NO: 1259030 - RNA, 19 nt, Artificial Sequence
  Description of Artificial Sequence: Synthetic oligonucleotide
  Sense strand starting at position 3329 of SEQ ID NO: 1241264
uaaauaagugucuggcuua

SEQ ID NO: 1259031 - RNA, 19 nt, Artificial Sequence
  Description of Artificial Sequence: Synthetic oligonucleotide
  Antisense strand to SEQ ID NO: 1259030
uaagccagacacuuauuua

SEQ ID NO: 1259032 - RNA, 19 nt, Artificial Sequence
  Description of Artificial Sequence: Synthetic oligonucleotide
  Sense strand starting at position 3332 of SEQ ID NO: 1241264
auaagugucuggcuuaaag

SEQ ID NO: 1259033 - RNA, 19 nt, Artificial Sequence
  Description of Artificial Sequence: Synthetic oligonucleotide
  Antisense strand to SEQ ID NO: 1259032
cuuuaagccagacacuuau

SEQ ID NO: 1259034 - RNA, 19 nt, Artificial Sequence
  Description of Artificial Sequence: Synthetic oligonucleotide
  Sense strand starting at position 3334 of SEQ ID NO: 1241264
aagugucuggcuuaaagaa

SEQ ID NO: 1259035 - RNA, 19 nt, Artificial Sequence
  Description of Artificial Sequence: Synthetic oligonucleotide
  Antisense strand to SEQ ID NO: 1259034
uucuuuaagccagacacuu

SEQ ID NO: 1259036 - RNA, 19 nt, Artificial Sequence
  Description of Artificial Sequence: Synthetic oligonucleotide
  Sense strand starting at position 3344 of SEQ ID NO: 1241264
cuuaaagaacaucgucuua

SEQ ID NO: 1259037 - RNA, 19 nt, Artificial Sequence
  Description of Artificial Sequence: Synthetic oligonucleotide
  Antisense strand to SEQ ID NO: 1259036
uaagacgauguucuuuaag

SEQ ID NO: 1259038 - RNA, 19 nt, Artificial Sequence
  Description of Artificial Sequence: Synthetic oligonucleotide
  Sense strand starting at position 3378 of SEQ ID NO: 1241264
uagauaucucuucggugga

SEQ ID NO: 1259039 - RNA, 19 nt, Artificial Sequence
  Description of Artificial Sequence: Synthetic oligonucleotide
  Antisense strand to SEQ ID NO: 1259038
uccaccgaagagauaucua

SEQ ID NO: 1259040 - RNA, 19 nt, Artificial Sequence
  Description of Artificial Sequence: Synthetic oligonucleotide
  Sense strand starting at position 3380 of SEQ ID NO: 1241264
gauaucucuucgguggacu

SEQ ID NO: 1259041 - RNA, 19 nt, Artificial Sequence
  Description of Artificial Sequence: Synthetic oligonucleotide
  Antisense strand to SEQ ID NO: 1259040
aguccaccgaagagauauc

SEQ ID NO: 1259042 - RNA, 19 nt, Artificial Sequence
  Description of Artificial Sequence: Synthetic oligonucleotide
  Sense strand starting at position 3454 of SEQ ID NO: 1241264
cucuauuggcaguggaaau

SEQ ID NO: 1259043 - RNA, 19 nt, Artificial Sequence
  Description of Artificial Sequence: Synthetic oligonucleotide
  Antisense strand to SEQ ID NO: 1259042
auuuccacugccaauagag

SEQ ID NO: 1259044 - RNA, 19 nt, Artificial Sequence
  Description of Artificial Sequence: Synthetic oligonucleotide
  Sense strand starting at position 3455 of SEQ ID NO: 1241264
ucuauuggcaguggaaauu

SEQ ID NO: 1259045 - RNA, 19 nt, Artificial Sequence
  Description of Artificial Sequence: Synthetic oligonucleotide
  Antisense strand to SEQ ID NO: 1259044
aauuuccacugccaauaga

SEQ ID NO: 1259046 - RNA, 19 nt, Artificial Sequence
  Description of Artificial Sequence: Synthetic oligonucleotide
  Sense strand starting at position 338 of SEQ ID NO: 1241265
auguuaccaugaucaaugu

SEQ ID NO: 1259047 - RNA, 19 nt, Artificial Sequence
  Description of Artificial Sequence: Synthetic oligonucleotide
  Antisense strand to SEQ ID NO: 1259046
acauugaucaugguaacau

SEQ ID NO: 1259048 - RNA, 19 nt, Artificial Sequence
  Description of Artificial Sequence: Synthetic oligonucleotide
  Sense strand starting at position 354 of SEQ ID NO: 1241265
uguuuauagugaccauguu

SEQ ID NO: 1259049 - RNA, 19 nt, Artificial Sequence
  Description of Artificial Sequence: Synthetic oligonucleotide
  Antisense strand to SEQ ID NO: 1259048
aacauggucacuauaaaca

SEQ ID NO: 1259050 - RNA, 19 nt, Artificial Sequence
  Description of Artificial Sequence: Synthetic oligonucleotide
  Sense strand starting at position 355 of SEQ ID NO: 1241265
guuuauagugaccauguua

SEQ ID NO: 1259051 - RNA, 19 nt, Artificial Sequence
  Description of Artificial Sequence: Synthetic oligonucleotide
  Antisense strand to SEQ ID NO: 1259050
uaacauggucacuauaaac

SEQ ID NO: 1259052 - RNA, 19 nt, Artificial Sequence
  Description of Artificial Sequence: Synthetic oligonucleotide
  Sense strand starting at position 538 of SEQ ID NO: 1241265
cuggcuauuccagaaccua

SEQ ID NO: 1259053 - RNA, 19 nt, Artificial Sequence
  Description of Artificial Sequence: Synthetic oligonucleotide
  Antisense strand to SEQ ID NO: 1259052
uagguucuggaauagccag

SEQ ID NO: 1259054 - RNA, 19 nt, Artificial Sequence
  Description of Artificial Sequence: Synthetic oligonucleotide
  Sense strand starting at position 603 of SEQ ID NO: 1241265
cuggcuuaucccgaaccca

SEQ ID NO: 1259055 - RNA, 19 nt, Artificial Sequence
  Description of Artificial Sequence: Synthetic oligonucleotide
  Antisense strand to SEQ ID NO: 1259054
uggguucgggauaagccag

SEQ ID NO: 1259056 - RNA, 19 nt, Artificial Sequence
  Description of Artificial Sequence: Synthetic oligonucleotide
  Sense strand starting at position 900 of SEQ ID NO: 1241265
accugaaaguccuaagaac

SEQ ID NO: 1259057 - RNA, 19 nt, Artificial Sequence
  Description of Artificial Sequence: Synthetic oligonucleotide
  Antisense strand to SEQ ID NO: 1259056
guucuuaggacuuucaggu

SEQ ID NO: 1259058 - RNA, 19 nt, Artificial Sequence
  Description of Artificial Sequence: Synthetic oligonucleotide
  Sense strand starting at position 921 of SEQ ID NO: 1241265
uuacuuaucguguagacca

SEQ ID NO: 1259059 - RNA, 19 nt, Artificial Sequence
  Description of Artificial Sequence: Synthetic oligonucleotide
  Antisense strand to SEQ ID NO: 1259058
uggucuacacgauaaguaa

SEQ ID NO: 1259060 - RNA, 19 nt, Artificial Sequence
  Description of Artificial Sequence: Synthetic oligonucleotide
  Sense strand starting at position 937 of SEQ ID NO: 1241265
ccaguaacgugucccuuua

SEQ ID NO: 1259061 - RNA, 19 nt, Artificial Sequence
  Description of Artificial Sequence: Synthetic oligonucleotide
  Antisense strand to SEQ ID NO: 1259060
uaaagggacacguuacugg

SEQ ID NO: 1259062 - RNA, 19 nt, Artificial Sequence
  Description of Artificial Sequence: Synthetic oligonucleotide
  Sense strand starting at position 1128 of SEQ ID NO: 1241265
gaaaucugaugugcuaacu

SEQ ID NO: 1259063 - RNA, 19 nt, Artificial Sequence
  Description of Artificial Sequence: Synthetic oligonucleotide
  Antisense strand to SEQ ID NO: 1259062
aguuagcacaucagauuuc

SEQ ID NO: 1259064 - RNA, 19 nt, Artificial Sequence
  Description of Artificial Sequence: Synthetic oligonucleotide
  Sense strand starting at position 2445 of SEQ ID NO: 1241265
gccguaauuguuucccgga

SEQ ID NO: 1259065 - RNA, 19 nt, Artificial Sequence
  Description of Artificial Sequence: Synthetic oligonucleotide
  Antisense strand to SEQ ID NO: 1259064
uccgggaaacaauuacggc

SEQ ID NO: 1259066 - RNA, 19 nt, Artificial Sequence
  Description of Artificial Sequence: Synthetic oligonucleotide
  Sense strand starting at position 2447 of SEQ ID NO: 1241265
cguaauuguuucccggaga

SEQ ID NO: 1259067 - RNA, 19 nt, Artificial Sequence
  Description of Artificial Sequence: Synthetic oligonucleotide
  Antisense strand to SEQ ID NO: 1259066
ucuccgggaaacaauuacg

SEQ ID NO: 1259068 - RNA, 19 nt, Artificial Sequence
  Description of Artificial Sequence: Synthetic oligonucleotide
  Sense strand starting at position 2450 of SEQ ID NO: 1241265
aauuguuucccggagagcu

SEQ ID NO: 1259069 - RNA, 19 nt, Artificial Sequence
  Description of Artificial Sequence: Synthetic oligonucleotide
  Antisense strand to SEQ ID NO: 1259068
agcucuccgggaaacaauu

SEQ ID NO: 1259070 - RNA, 19 nt, Artificial Sequence
  Description of Artificial Sequence: Synthetic oligonucleotide
  Sense strand starting at position 2452 of SEQ ID NO: 1241265
uuguuucccggagagcuua

SEQ ID NO: 1259071 - RNA, 19 nt, Artificial Sequence
  Description of Artificial Sequence: Synthetic oligonucleotide
  Antisense strand to SEQ ID NO: 1259070
uaagcucuccgggaaacaa

SEQ ID NO: 1259072 - RNA, 19 nt, Artificial Sequence
  Description of Artificial Sequence: Synthetic oligonucleotide
  Sense strand starting at position 2609 of SEQ ID NO: 1241265
cccagauaaugagaaauag

SEQ ID NO: 1259073 - RNA, 19 nt, Artificial Sequence
  Description of Artificial Sequence: Synthetic oligonucleotide
  Antisense strand to SEQ ID NO: 1259072
cuauuucucauuaucuggg

SEQ ID NO: 1259074 - RNA, 19 nt, Artificial Sequence
  Description of Artificial Sequence: Synthetic oligonucleotide
  Sense strand starting at position 2703 of SEQ ID NO: 1241265
aaauaucggugggaauuaa

SEQ ID NO: 1259075 - RNA, 19 nt, Artificial Sequence
  Description of Artificial Sequence: Synthetic oligonucleotide
  Antisense strand to SEQ ID NO: 1259074
uuaauucccaccgauauuu

SEQ ID NO: 1259076 - RNA, 19 nt, Artificial Sequence
  Description of Artificial Sequence: Synthetic oligonucleotide
  Sense strand starting at position 2719 of SEQ ID NO: 1241265
uaaauaaguggcuggcuua

SEQ ID NO: 1259077 - RNA, 19 nt, Artificial Sequence
  Description of Artificial Sequence: Synthetic oligonucleotide
  Antisense strand to SEQ ID NO: 1259076
uaagccagccacuuauuua

SEQ ID NO: 1259078 - RNA, 19 nt, Artificial Sequence
  Description of Artificial Sequence: Synthetic oligonucleotide
  Sense strand starting at position 2720 of SEQ ID NO: 1241265
aaauaaguggcuggcuuaa

SEQ ID NO: 1259079 - RNA, 19 nt, Artificial Sequence
  Description of Artificial Sequence: Synthetic oligonucleotide
  Antisense strand to SEQ ID NO: 1259078
uuaagccagccacuuauuu

SEQ ID NO: 1259080 - RNA, 19 nt, Artificial Sequence
  Description of Artificial Sequence: Synthetic oligonucleotide
  Sense strand starting at position 2798 of SEQ ID NO: 1241265
gccgguuugcuccagguga

SEQ ID NO: 1259081 - RNA, 19 nt, Artificial Sequence
  Description of Artificial Sequence: Synthetic oligonucleotide
  Antisense strand to SEQ ID NO: 1259080
ucaccuggagcaaaccggc

SEQ ID NO: 1259082 - RNA, 19 nt, Artificial Sequence
  Description of Artificial Sequence: Synthetic oligonucleotide
  Sense strand starting at position 2950 of SEQ ID NO: 1241265
aaguauggcuagucggaau

SEQ ID NO: 1259083 - RNA, 19 nt, Artificial Sequence
  Description of Artificial Sequence: Synthetic oligonucleotide
  Antisense strand to SEQ ID NO: 1259082
auuccgacuagccauacuu

SEQ ID NO: 1259084 - RNA, 19 nt, Artificial Sequence
  Description of Artificial Sequence: Synthetic oligonucleotide
  Sense strand starting at position 2957 of SEQ ID NO: 1241265
gcuagucggaaucgagaua

SEQ ID NO: 1259085 - RNA, 19 nt, Artificial Sequence
  Description of Artificial Sequence: Synthetic oligonucleotide
  Antisense strand to SEQ ID NO: 1259084
uaucucgauuccgacuagc

SEQ ID NO: 1259086 - RNA, 19 nt, Artificial Sequence
  Description of Artificial Sequence: Synthetic oligonucleotide
  Sense strand starting at position 2958 of SEQ ID NO: 1241265
cuagucggaaucgagauau

SEQ ID NO: 1259087 - RNA, 19 nt, Artificial Sequence
  Description of Artificial Sequence: Synthetic oligonucleotide
  Antisense strand to SEQ ID NO: 1259086
auaucucgauuccgacuag

SEQ ID NO: 1259088 - RNA, 19 nt, Artificial Sequence
  Description of Artificial Sequence: Synthetic oligonucleotide
  Sense strand starting at position 3008 of SEQ ID NO: 1241265
uuguuacauguugaaguga

SEQ ID NO: 1259089 - RNA, 19 nt, Artificial Sequence
  Description of Artificial Sequence: Synthetic oligonucleotide
  Antisense strand to SEQ ID NO: 1259088
ucacuucaacauguaacaa

SEQ ID NO: 1259090 - RNA, 19 nt, Artificial Sequence
  Description of Artificial Sequence: Synthetic oligonucleotide
  Sense strand starting at position 3102 of SEQ ID NO: 1241265
ucaccuguggccugcauua

SEQ ID NO: 1259091 - RNA, 19 nt, Artificial Sequence
  Description of Artificial Sequence: Synthetic oligonucleotide
  Antisense strand to SEQ ID NO: 1259090
uaaugcaggccacagguga

SEQ ID NO: 1259092 - RNA, 19 nt, Artificial Sequence
  Description of Artificial Sequence: Synthetic oligonucleotide
  Sense strand starting at position 3104 of SEQ ID NO: 1241265
accuguggccugcauuaua

SEQ ID NO: 1259093 - RNA, 19 nt, Artificial Sequence
  Description of Artificial Sequence: Synthetic oligonucleotide
  Antisense strand to SEQ ID NO: 1259092
uauaaugcaggccacaggu

SEQ ID NO: 1259094 - RNA, 19 nt, Artificial Sequence
  Description of Artificial Sequence: Synthetic oligonucleotide
  Sense strand starting at position 3178 of SEQ ID NO: 1241265
cugugagguaggugcuuua

SEQ ID NO: 1259095 - RNA, 19 nt, Artificial Sequence
  Description of Artificial Sequence: Synthetic oligonucleotide
  Antisense strand to SEQ ID NO: 1259094
uaaagcaccuaccucacag

SEQ ID NO: 1259096 - RNA, 19 nt, Artificial Sequence
  Description of Artificial Sequence: Synthetic oligonucleotide
  Sense strand starting at position 3181 of SEQ ID NO: 1241265
ugagguaggugcuuuaacu

SEQ ID NO: 1259097 - RNA, 19 nt, Artificial Sequence
  Description of Artificial Sequence: Synthetic oligonucleotide
  Antisense strand to SEQ ID NO: 1259096
aguuaaagcaccuaccuca

SEQ ID NO: 1259098 - RNA, 19 nt, Artificial Sequence
  Description of Artificial Sequence: Synthetic oligonucleotide
  Sense strand starting at position 3188 of SEQ ID NO: 1241265
ggugcuuuaacugugugca

SEQ ID NO: 1259099 - RNA, 19 nt, Artificial Sequence
  Description of Artificial Sequence: Synthetic oligonucleotide
  Antisense strand to SEQ ID NO: 1259098
ugcacacaguuaaagcacc

SEQ ID NO: 1259100 - RNA, 19 nt, Artificial Sequence
  Description of Artificial Sequence: Synthetic oligonucleotide
  Sense strand starting at position 3223 of SEQ ID NO: 1241265
cuuuaacugugugcacauu

SEQ ID NO: 1259101 - RNA, 19 nt, Artificial Sequence
  Description of Artificial Sequence: Synthetic oligonucleotide
  Antisense strand to SEQ ID NO: 1259100
aaugugcacacaguuaaag

SEQ ID NO: 1259102 - RNA, 19 nt, Artificial Sequence
  Description of Artificial Sequence: Synthetic oligonucleotide
  Sense strand starting at position 3614 of SEQ ID NO: 1241265
guaaguagccaguaaguga

SEQ ID NO: 1259103 - RNA, 19 nt, Artificial Sequence
  Description of Artificial Sequence: Synthetic oligonucleotide
  Antisense strand to SEQ ID NO: 1259102
ucacuuacuggcuacuuac

SEQ ID NO: 1259104 - RNA, 19 nt, Artificial Sequence
  Description of Artificial Sequence: Synthetic oligonucleotide
  Sense strand starting at position 3629 of SEQ ID NO: 1241265
gugaacaacugagauuuga

SEQ ID NO: 1259105 - RNA, 19 nt, Artificial Sequence
  Description of Artificial Sequence: Synthetic oligonucleotide
  Antisense strand to SEQ ID NO: 1259104
ucaaaucucaguuguucac

SEQ ID NO: 1259106 - RNA, 19 nt, Artificial Sequence
  Description of Artificial Sequence: Synthetic oligonucleotide
  Sense strand starting at position 3719 of SEQ ID NO: 1241265
uaugaauuggcuuaagguu

SEQ ID NO: 1259107 - RNA, 19 nt, Artificial Sequence
  Description of Artificial Sequence: Synthetic oligonucleotide
  Antisense strand to SEQ ID NO: 1259106
aaccuuaagccaauucaua

SEQ ID NO: 1259108 - RNA, 19 nt, Artificial Sequence
  Description of Artificial Sequence: Synthetic oligonucleotide
  Sense strand starting at position 3902 of SEQ ID NO: 1241265
aauaucggugggcguuaaa

SEQ ID NO: 1259109 - RNA, 19 nt, Artificial Sequence
  Description of Artificial Sequence: Synthetic oligonucleotide
  Antisense strand to SEQ ID NO: 1259108
uuuaacgcccaccgauauu

SEQ ID NO: 1259110 - RNA, 19 nt, Artificial Sequence
  Description of Artificial Sequence: Synthetic oligonucleotide
  Sense strand starting at position 3905 of SEQ ID NO: 1241265
aucggugggcguuaaauaa

SEQ ID NO: 1259111 - RNA, 19 nt, Artificial Sequence
  Description of Artificial Sequence: Synthetic oligonucleotide
  Antisense strand to SEQ ID NO: 1259110
uuauuuaacgcccaccgau

SEQ ID NO: 1259112 - RNA, 19 nt, Artificial Sequence
  Description of Artificial Sequence: Synthetic oligonucleotide
  Sense strand starting at position 3916 of SEQ ID NO: 1241265
uuaaauaagugucuggcuu

SEQ ID NO: 1259113 - RNA, 19 nt, Artificial Sequence
  Description of Artificial Sequence: Synthetic oligonucleotide
  Antisense strand to SEQ ID NO: 1259112
aagccagacacuuauuuaa

SEQ ID NO: 1259114 - RNA, 19 nt, Artificial Sequence
  Description of Artificial Sequence: Synthetic oligonucleotide
  Sense strand starting at position 3917 of SEQ ID NO: 1241265
uaaauaagugucuggcuua

SEQ ID NO: 1259115 - RNA, 19 nt, Artificial Sequence
  Description of Artificial Sequence: Synthetic oligonucleotide
  Antisense strand to SEQ ID NO: 1259114
uaagccagacacuuauuua

SEQ ID NO: 1259116 - RNA, 19 nt, Artificial Sequence
  Description of Artificial Sequence: Synthetic oligonucleotide
  Sense strand starting at position 3920 of SEQ ID NO: 1241265
auaagugucuggcuuaaag

SEQ ID NO: 1259117 - RNA, 19 nt, Artificial Sequence
  Description of Artificial Sequence: Synthetic oligonucleotide
  Antisense strand to SEQ ID NO: 1259116
cuuuaagccagacacuuau

SEQ ID NO: 1259118 - RNA, 19 nt, Artificial Sequence
  Description of Artificial Sequence: Synthetic oligonucleotide
  Sense strand starting at position 3922 of SEQ ID NO: 1241265
aagugucuggcuuaaagaa

SEQ ID NO: 1259119 - RNA, 19 nt, Artificial Sequence
  Description of Artificial Sequence: Synthetic oligonucleotide
  Antisense strand to SEQ ID NO: 1259118
uucuuuaagccagacacuu

SEQ ID NO: 1259120 - RNA, 19 nt, Artificial Sequence
  Description of Artificial Sequence: Synthetic oligonucleotide
  Sense strand starting at position 3932 of SEQ ID NO: 1241265
cuuaaagaacaucgucuua

SEQ ID NO: 1259121 - RNA, 19 nt, Artificial Sequence
  Description of Artificial Sequence: Synthetic oligonucleotide
  Antisense strand to SEQ ID NO: 1259120
uaagacgauguucuuuaag

SEQ ID NO: 1259122 - RNA, 19 nt, Artificial Sequence
  Description of Artificial Sequence: Synthetic oligonucleotide
  Sense strand starting at position 3966 of SEQ ID NO: 1241265
uagauaucucuucggugga

SEQ ID NO: 1259123 - RNA, 19 nt, Artificial Sequence
  Description of Artificial Sequence: Synthetic oligonucleotide
  Antisense strand to SEQ ID NO: 1259122
uccaccgaagagauaucua

SEQ ID NO: 1259124 - RNA, 19 nt, Artificial Sequence
  Description of Artificial Sequence: Synthetic oligonucleotide
  Sense strand starting at position 3968 of SEQ ID NO: 1241265
gauaucucuucgguggacu

SEQ ID NO: 1259125 - RNA, 19 nt, Artificial Sequence
  Description of Artificial Sequence: Synthetic oligonucleotide
  Antisense strand to SEQ ID NO: 1259124
aguccaccgaagagauauc

SEQ ID NO: 1259126 - RNA, 19 nt, Artificial Sequence
  Description of Artificial Sequence: Synthetic oligonucleotide
  Sense strand starting at position 4 of SEQ ID NO: 1241266
gaguacugggucuguaaac

SEQ ID NO: 1259127 - RNA, 19 nt, Artificial Sequence
  Description of Artificial Sequence: Synthetic oligonucleotide
  Antisense strand to SEQ ID NO: 1259126
guuuacagacccaguacuc

SEQ ID NO: 1259128 - RNA, 19 nt, Artificial Sequence
  Description of Artificial Sequence: Synthetic oligonucleotide
  Sense strand starting at position 5 of SEQ ID NO: 1241266
aguacugggucuguaaacu

SEQ ID NO: 1259129 - RNA, 19 nt, Artificial Sequence
  Description of Artificial Sequence: Synthetic oligonucleotide
  Antisense strand to SEQ ID NO: 1259128
aguuuacagacccaguacu

SEQ ID NO: 1259130 - RNA, 19 nt, Artificial Sequence
  Description of Artificial Sequence: Synthetic oligonucleotide
  Sense strand starting at position 114 of SEQ ID NO: 1241266
gcuuguaugaauuaaguag

SEQ ID NO: 1259131 - RNA, 19 nt, Artificial Sequence
  Description of Artificial Sequence: Synthetic oligonucleotide
  Antisense strand to SEQ ID NO: 1259130
cuacuuaauucauacaagc

SEQ ID NO: 1259132 - RNA, 19 nt, Artificial Sequence
  Description of Artificial Sequence: Synthetic oligonucleotide
  Sense strand starting at position 234 of SEQ ID NO: 1241266
gucucuacuguccauuaca

SEQ ID NO: 1259133 - RNA, 19 nt, Artificial Sequence
  Description of Artificial Sequence: Synthetic oligonucleotide
  Antisense strand to SEQ ID NO: 1259132
uguaauggacaguagagac

SEQ ID NO: 1259134 - RNA, 19 nt, Artificial Sequence
  Description of Artificial Sequence: Synthetic oligonucleotide
  Sense strand starting at position 488 of SEQ ID NO: 1241266
cugggauaaguaggucuga

SEQ ID NO: 1259135 - RNA, 19 nt, Artificial Sequence
  Description of Artificial Sequence: Synthetic oligonucleotide
  Antisense strand to SEQ ID NO: 1259134
ucagaccuacuuaucccag

SEQ ID NO: 1259136 - RNA, 19 nt, Artificial Sequence
  Description of Artificial Sequence: Synthetic oligonucleotide
  Sense strand starting at position 489 of SEQ ID NO: 1241266
ugggauaaguaggucugaa

SEQ ID NO: 1259137 - RNA, 19 nt, Artificial Sequence
  Description of Artificial Sequence: Synthetic oligonucleotide
  Antisense strand to SEQ ID NO: 1259136
uucagaccuacuuauccca

SEQ ID NO: 1259138 - RNA, 19 nt, Artificial Sequence
  Description of Artificial Sequence: Synthetic oligonucleotide
  Sense strand starting at position 497 of SEQ ID NO: 1241266
guaggucugaaguaacuaa

SEQ ID NO: 1259139 - RNA, 19 nt, Artificial Sequence
  Description of Artificial Sequence: Synthetic oligonucleotide
  Antisense strand to SEQ ID NO: 1259138
uuaguuacuucagaccuac

SEQ ID NO: 1259140 - RNA, 19 nt, Artificial Sequence
  Description of Artificial Sequence: Synthetic oligonucleotide
  Sense strand starting at position 670 of SEQ ID NO: 1241266
cucccagagcugcaacauu

SEQ ID NO: 1259141 - RNA, 19 nt, Artificial Sequence
  Description of Artificial Sequence: Synthetic oligonucleotide
  Antisense strand to SEQ ID NO: 1259140
aauguugcagcucugggag

SEQ ID NO: 1259142 - RNA, 19 nt, Artificial Sequence
  Description of Artificial Sequence: Synthetic oligonucleotide
  Sense strand starting at position 1287 of SEQ ID NO: 1241266
cagccacucguauaauaug

SEQ ID NO: 1259143 - RNA, 19 nt, Artificial Sequence
  Description of Artificial Sequence: Synthetic oligonucleotide
  Antisense strand to SEQ ID NO: 1259142
cauauuauacgaguggcug

SEQ ID NO: 1259144 - RNA, 19 nt, Artificial Sequence
  Description of Artificial Sequence: Synthetic oligonucleotide
  Sense strand starting at position 1553 of SEQ ID NO: 1241266
ucucaugagcugugaauca

SEQ ID NO: 1259145 - RNA, 19 nt, Artificial Sequence
  Description of Artificial Sequence: Synthetic oligonucleotide
  Antisense strand to SEQ ID NO: 1259144
ugauucacagcucaugaga

SEQ ID NO: 1259146 - RNA, 19 nt, Artificial Sequence
  Description of Artificial Sequence: Synthetic oligonucleotide
  Sense strand starting at position 1564 of SEQ ID NO: 1241266
gugaaucaggaguggcaaa

SEQ ID NO: 1259147 - RNA, 19 nt, Artificial Sequence
  Description of Artificial Sequence: Synthetic oligonucleotide
  Antisense strand to SEQ ID NO: 1259146
uuugccacuccugauucac

SEQ ID NO: 1259148 - RNA, 19 nt, Artificial Sequence
  Description of Artificial Sequence: Synthetic oligonucleotide
  Sense strand starting at position 1571 of SEQ ID NO: 1241266
aggaguggcaaaugcauua

SEQ ID NO: 1259149 - RNA, 19 nt, Artificial Sequence
  Description of Artificial Sequence: Synthetic oligonucleotide
  Antisense strand to SEQ ID NO: 1259148
uaaugcauuugccacuccu

SEQ ID NO: 1259150 - RNA, 19 nt, Artificial Sequence
  Description of Artificial Sequence: Synthetic oligonucleotide
  Sense strand starting at position 1897 of SEQ ID NO: 1241266
cagucagucugagucucaa

SEQ ID NO: 1259151 - RNA, 19 nt, Artificial Sequence
  Description of Artificial Sequence: Synthetic oligonucleotide
  Antisense strand to SEQ ID NO: 1259150
uugagacucagacugacug

SEQ ID NO: 1259152 - RNA, 19 nt, Artificial Sequence
  Description of Artificial Sequence: Synthetic oligonucleotide
  Sense strand starting at position 2454 of SEQ ID NO: 1241266
aucccacuauaguugugaa

SEQ ID NO: 1259153 - RNA, 19 nt, Artificial Sequence
  Description of Artificial Sequence: Synthetic oligonucleotide
  Antisense strand to SEQ ID NO: 1259152
uucacaacuauagugggau

SEQ ID NO: 1259154 - RNA, 19 nt, Artificial Sequence
  Description of Artificial Sequence: Synthetic oligonucleotide
  Sense strand starting at position 2548 of SEQ ID NO: 1241266
uguugaaugagguggaugu

SEQ ID NO: 1259155 - RNA, 19 nt, Artificial Sequence
  Description of Artificial Sequence: Synthetic oligonucleotide
  Antisense strand to SEQ ID NO: 1259154
acauccaccucauucaaca

SEQ ID NO: 1259156 - RNA, 19 nt, Artificial Sequence
  Description of Artificial Sequence: Synthetic oligonucleotide
  Sense strand starting at position 2561 of SEQ ID NO: 1241266
ggauguguugugugauuua

SEQ ID NO: 1259157 - RNA, 19 nt, Artificial Sequence
  Description of Artificial Sequence: Synthetic oligonucleotide
  Antisense strand to SEQ ID NO: 1259156
uaaaucacacaacacaucc

SEQ ID NO: 1259158 - RNA, 19 nt, Artificial Sequence
  Description of Artificial Sequence: Synthetic oligonucleotide
  Sense strand starting at position 2564 of SEQ ID NO: 1241266
uguguugugugauuuaaga

SEQ ID NO: 1259159 - RNA, 19 nt, Artificial Sequence
  Description of Artificial Sequence: Synthetic oligonucleotide
  Antisense strand to SEQ ID NO: 1259158
ucuuaaaucacacaacaca

SEQ ID NO: 1259160 - RNA, 19 nt, Artificial Sequence
  Description of Artificial Sequence: Synthetic oligonucleotide
  Sense strand starting at position 2635 of SEQ ID NO: 1241266
cuucuauuaugagugguua

SEQ ID NO: 1259161 - RNA, 19 nt, Artificial Sequence
  Description of Artificial Sequence: Synthetic oligonucleotide
  Antisense strand to SEQ ID NO: 1259160
uaaccacucauaauagaag

SEQ ID NO: 1259162 - RNA, 19 nt, Artificial Sequence
  Description of Artificial Sequence: Synthetic oligonucleotide
  Sense strand starting at position 2636 of SEQ ID NO: 1241266
uucuauuaugagugguuau

SEQ ID NO: 1259163 - RNA, 19 nt, Artificial Sequence
  Description of Artificial Sequence: Synthetic oligonucleotide
  Antisense strand to SEQ ID NO: 1259162
auaaccacucauaauagaa

SEQ ID NO: 1259164 - RNA, 19 nt, Artificial Sequence
  Description of Artificial Sequence: Synthetic oligonucleotide
  Sense strand starting at position 2647 of SEQ ID NO: 1241266
gugguuauauauuccagau

SEQ ID NO: 1259165 - RNA, 19 nt, Artificial Sequence
  Description of Artificial Sequence: Synthetic oligonucleotide
  Antisense strand to SEQ ID NO: 1259164
aucuggaauauauaaccac

SEQ ID NO: 1259166 - RNA, 19 nt, Artificial Sequence
  Description of Artificial Sequence: Synthetic oligonucleotide
  Sense strand starting at position 2660 of SEQ ID NO: 1241266
ccagaugcauuccuagcaa

SEQ ID NO: 1259167 - RNA, 19 nt, Artificial Sequence
  Description of Artificial Sequence: Synthetic oligonucleotide
  Antisense strand to SEQ ID NO: 1259166
uugcuaggaaugcaucugg

SEQ ID NO: 1259168 - RNA, 19 nt, Artificial Sequence
  Description of Artificial Sequence: Synthetic oligonucleotide
  Sense strand starting at position 2763 of SEQ ID NO: 1241266
cuauaagguuauguaacaa

SEQ ID NO: 1259169 - RNA, 19 nt, Artificial Sequence
  Description of Artificial Sequence: Synthetic oligonucleotide
  Antisense strand to SEQ ID NO: 1259168
uuguuacauaaccuuauag

SEQ ID NO: 1259170 - RNA, 19 nt, Artificial Sequence
  Description of Artificial Sequence: Synthetic oligonucleotide
  Sense strand starting at position 2791 of SEQ ID NO: 1241266
aauguuuccuaagugagag

SEQ ID NO: 1259171 - RNA, 19 nt, Artificial Sequence
  Description of Artificial Sequence: Synthetic oligonucleotide
  Antisense strand to SEQ ID NO: 1259170
cucucacuuaggaaacauu

SEQ ID NO: 1259172 - RNA, 19 nt, Artificial Sequence
  Description of Artificial Sequence: Synthetic oligonucleotide
  Sense strand starting at position 2792 of SEQ ID NO: 1241266
auguuuccuaagugagagu

SEQ ID NO: 1259173 - RNA, 19 nt, Artificial Sequence
  Description of Artificial Sequence: Synthetic oligonucleotide
  Antisense strand to SEQ ID NO: 1259172
acucucacuuaggaaacau

SEQ ID NO: 1259174 - RNA, 19 nt, Artificial Sequence
  Description of Artificial Sequence: Synthetic oligonucleotide
  Sense strand starting at position 2793 of SEQ ID NO: 1241266
uguuuccuaagugagagua

SEQ ID NO: 1259175 - RNA, 19 nt, Artificial Sequence
  Description of Artificial Sequence: Synthetic oligonucleotide
  Antisense strand to SEQ ID NO: 1259174
uacucucacuuaggaaaca

SEQ ID NO: 1259176 - RNA, 19 nt, Artificial Sequence
  Description of Artificial Sequence: Synthetic oligonucleotide
  Sense strand starting at position 3068 of SEQ ID NO: 1241266
aguugauguagucauaacu

SEQ ID NO: 1259177 - RNA, 19 nt, Artificial Sequence
  Description of Artificial Sequence: Synthetic oligonucleotide
  Antisense strand to SEQ ID NO: 1259176
aguuaugacuacaucaacu

SEQ ID NO: 1259178 - RNA, 19 nt, Artificial Sequence
  Description of Artificial Sequence: Synthetic oligonucleotide
  Sense strand starting at position 3107 of SEQ ID NO: 1241266
gggagcucacguuagaaag

SEQ ID NO: 1259179 - RNA, 19 nt, Artificial Sequence
  Description of Artificial Sequence: Synthetic oligonucleotide
  Antisense strand to SEQ ID NO: 1259178
cuuucuaacgugagcuccc

SEQ ID NO: 1259180 - RNA, 19 nt, Artificial Sequence
  Description of Artificial Sequence: Synthetic oligonucleotide
  Sense strand starting at position 3216 of SEQ ID NO: 1241266
agguuucucuaacuaagca

SEQ ID NO: 1259181 - RNA, 19 nt, Artificial Sequence
  Description of Artificial Sequence: Synthetic oligonucleotide
  Antisense strand to SEQ ID NO: 1259180
ugcuuaguuagagaaaccu

SEQ ID NO: 1259182 - RNA, 19 nt, Artificial Sequence
  Description of Artificial Sequence: Synthetic oligonucleotide
  Sense strand starting at position 3238 of SEQ ID NO: 1241266
uugacauauuggguuggau

SEQ ID NO: 1259183 - RNA, 19 nt, Artificial Sequence
  Description of Artificial Sequence: Synthetic oligonucleotide
  Antisense strand to SEQ ID NO: 1259182
auccaacccaauaugucaa

SEQ ID NO: 1259184 - RNA, 19 nt, Artificial Sequence
  Description of Artificial Sequence: Synthetic oligonucleotide
  Sense strand starting at position 3241 of SEQ ID NO: 1241266
acauauuggguuggauaau

SEQ ID NO: 1259185 - RNA, 19 nt, Artificial Sequence
  Description of Artificial Sequence: Synthetic oligonucleotide
  Antisense strand to SEQ ID NO: 1259184
auuauccaacccaauaugu

SEQ ID NO: 1259186 - RNA, 19 nt, Artificial Sequence
  Description of Artificial Sequence: Synthetic oligonucleotide
  Sense strand starting at position 3412 of SEQ ID NO: 1241266
ugucauuuagaacgcauau

SEQ ID NO: 1259187 - RNA, 19 nt, Artificial Sequence
  Description of Artificial Sequence: Synthetic oligonucleotide
  Antisense strand to SEQ ID NO: 1259186
auaugcguucuaaaugaca

SEQ ID NO: 1259188 - RNA, 19 nt, Artificial Sequence
  Description of Artificial Sequence: Synthetic oligonucleotide
  Sense strand starting at position 3512 of SEQ ID NO: 1241266
uuggucuugcuuuaaagaa

SEQ ID NO: 1259189 - RNA, 19 nt, Artificial Sequence
  Description of Artificial Sequence: Synthetic oligonucleotide
  Antisense strand to SEQ ID NO: 1259188
uucuuuaaagcaagaccaa

SEQ ID NO: 1259190 - RNA, 19 nt, Artificial Sequence
  Description of Artificial Sequence: Synthetic oligonucleotide
  Sense strand starting at position 3686 of SEQ ID NO: 1241266
uggguuucuggugaugaga

SEQ ID NO: 1259191 - RNA, 19 nt, Artificial Sequence
  Description of Artificial Sequence: Synthetic oligonucleotide
  Antisense strand to SEQ ID NO: 1259190
ucucaucaccagaaaccca

SEQ ID NO: 1259192 - RNA, 19 nt, Artificial Sequence
  Description of Artificial Sequence: Synthetic oligonucleotide
  Sense strand starting at position 3689 of SEQ ID NO: 1241266
guuucuggugaugagaauu

SEQ ID NO: 1259193 - RNA, 19 nt, Artificial Sequence
  Description of Artificial Sequence: Synthetic oligonucleotide
  Antisense strand to SEQ ID NO: 1259192
aauucucaucaccagaaac

SEQ ID NO: 1259194 - RNA, 19 nt, Artificial Sequence
  Description of Artificial Sequence: Synthetic oligonucleotide
  Sense strand starting at position 3717 of SEQ ID NO: 1241266
aucugugauuuacauagau

SEQ ID NO: 1259195 - RNA, 19 nt, Artificial Sequence
  Description of Artificial Sequence: Synthetic oligonucleotide
  Antisense strand to SEQ ID NO: 1259194
aucuauguaaaucacagau

SEQ ID NO: 1259196 - RNA, 19 nt, Artificial Sequence
  Description of Artificial Sequence: Synthetic oligonucleotide
  Sense strand starting at position 3958 of SEQ ID NO: 1241266
agagaaaucucuguucuuu

SEQ ID NO: 1259197 - RNA, 19 nt, Artificial Sequence
  Description of Artificial Sequence: Synthetic oligonucleotide
  Antisense strand to SEQ ID NO: 1259196
aaagaacagagauuucucu

SEQ ID NO: 1259198 - RNA, 19 nt, Artificial Sequence
  Description of Artificial Sequence: Synthetic oligonucleotide
  Sense strand starting at position 3971 of SEQ ID NO: 1241266
uucuuucuacagcgaugaa

SEQ ID NO: 1259199 - RNA, 19 nt, Artificial Sequence
  Description of Artificial Sequence: Synthetic oligonucleotide
  Antisense strand to SEQ ID NO: 1259198
uucaucgcuguagaaagaa

SEQ ID NO: 1259200 - RNA, 19 nt, Artificial Sequence
  Description of Artificial Sequence: Synthetic oligonucleotide
  Sense strand starting at position 3974 of SEQ ID NO: 1241266
uuucuacagcgaugaaacu

SEQ ID NO: 1259201 - RNA, 19 nt, Artificial Sequence
  Description of Artificial Sequence: Synthetic oligonucleotide
  Antisense strand to SEQ ID NO: 1259200
aguuucaucgcuguagaaa

SEQ ID NO: 1259202 - RNA, 19 nt, Artificial Sequence
  Description of Artificial Sequence: Synthetic oligonucleotide
  Sense strand starting at position 3981 of SEQ ID NO: 1241266
agcgaugaaacucagugau

SEQ ID NO: 1259203 - RNA, 19 nt, Artificial Sequence
  Description of Artificial Sequence: Synthetic oligonucleotide
  Antisense strand to SEQ ID NO: 1259202
aucacugaguuucaucgcu

SEQ ID NO: 1259204 - RNA, 19 nt, Artificial Sequence
  Description of Artificial Sequence: Synthetic oligonucleotide
  Sense strand starting at position 3983 of SEQ ID NO: 1241266
cgaugaaacucagugauau

SEQ ID NO: 1259205 - RNA, 19 nt, Artificial Sequence
  Description of Artificial Sequence: Synthetic oligonucleotide
  Antisense strand to SEQ ID NO: 1259204
auaucacugaguuucaucg

SEQ ID NO: 1259206 - RNA, 19 nt, Artificial Sequence
  Description of Artificial Sequence: Synthetic oligonucleotide
  Sense strand starting at position 256 of SEQ ID NO: 1241267
cucuuuggguuacuaucaa

SEQ ID NO: 1259207 - RNA, 19 nt, Artificial Sequence
  Description of Artificial Sequence: Synthetic oligonucleotide
  Antisense strand to SEQ ID NO: 1259206
uugauaguaacccaaagag

SEQ ID NO: 1259208 - RNA, 19 nt, Artificial Sequence
  Description of Artificial Sequence: Synthetic oligonucleotide
  Sense strand starting at position 460 of SEQ ID NO: 1241267
cgucucuauuauuucgagu

SEQ ID NO: 1259209 - RNA, 19 nt, Artificial Sequence
  Description of Artificial Sequence: Synthetic oligonucleotide
  Antisense strand to SEQ ID NO: 1259208
acucgaaauaauagagacg

SEQ ID NO: 1259210 - RNA, 19 nt, Artificial Sequence
  Description of Artificial Sequence: Synthetic oligonucleotide
  Sense strand starting at position 616 of SEQ ID NO: 1241267
ggaaaccaagauugucuau

SEQ ID NO: 1259211 - RNA, 19 nt, Artificial Sequence
  Description of Artificial Sequence: Synthetic oligonucleotide
  Antisense strand to SEQ ID NO: 1259210
auagacaaucuugguuucc

SEQ ID NO: 1259212 - RNA, 19 nt, Artificial Sequence
  Description of Artificial Sequence: Synthetic oligonucleotide
  Sense strand starting at position 702 of SEQ ID NO: 1241267
uuagaagucauaugggcau

SEQ ID NO: 1259213 - RNA, 19 nt, Artificial Sequence
  Description of Artificial Sequence: Synthetic oligonucleotide
  Antisense strand to SEQ ID NO: 1259212
augcccauaugacuucuaa

SEQ ID NO: 1259214 - RNA, 19 nt, Artificial Sequence
  Description of Artificial Sequence: Synthetic oligonucleotide
  Sense strand starting at position 706 of SEQ ID NO: 1241267
aagucauaugggcauagca

SEQ ID NO: 1259215 - RNA, 19 nt, Artificial Sequence
  Description of Artificial Sequence: Synthetic oligonucleotide
  Antisense strand to SEQ ID NO: 1259214
ugcuaugcccauaugacuu

SEQ ID NO: 1259216 - RNA, 19 nt, Artificial Sequence
  Description of Artificial Sequence: Synthetic oligonucleotide
  Sense strand starting at position 935 of SEQ ID NO: 1241267
ucauaacagcucugagauu

SEQ ID NO: 1259217 - RNA, 19 nt, Artificial Sequence
  Description of Artificial Sequence: Synthetic oligonucleotide
  Antisense strand to SEQ ID NO: 1259216
aaucucagagcuguuauga

SEQ ID NO: 1259218 - RNA, 19 nt, Artificial Sequence
  Description of Artificial Sequence: Synthetic oligonucleotide
  Sense strand starting at position 1020 of SEQ ID NO: 1241267
ggaggcuucccuuacaaau

SEQ ID NO: 1259219 - RNA, 19 nt, Artificial Sequence
  Description of Artificial Sequence: Synthetic oligonucleotide
  Antisense strand to SEQ ID NO: 1259218
auuuguaagggaagccucc

SEQ ID NO: 1259220 - RNA, 19 nt, Artificial Sequence
  Description of Artificial Sequence: Synthetic oligonucleotide
  Sense strand starting at position 1266 of SEQ ID NO: 1241267
gagaguucugaguagcauu

SEQ ID NO: 1259221 - RNA, 19 nt, Artificial Sequence
  Description of Artificial Sequence: Synthetic oligonucleotide
  Antisense strand to SEQ ID NO: 1259220
aaugcuacucagaacucuc

SEQ ID NO: 1259222 - RNA, 19 nt, Artificial Sequence
  Description of Artificial Sequence: Synthetic oligonucleotide
  Sense strand starting at position 1372 of SEQ ID NO: 1241267
aguuuauggcaagagcaga

SEQ ID NO: 1259223 - RNA, 19 nt, Artificial Sequence
  Description of Artificial Sequence: Synthetic oligonucleotide
  Antisense strand to SEQ ID NO: 1259222
ucugcucuugccauaaacu

SEQ ID NO: 1259224 - RNA, 19 nt, Artificial Sequence
  Description of Artificial Sequence: Synthetic oligonucleotide
  Sense strand starting at position 1500 of SEQ ID NO: 1241267
guagaaagauuccuuauua

SEQ ID NO: 1259225 - RNA, 19 nt, Artificial Sequence
  Description of Artificial Sequence: Synthetic oligonucleotide
  Antisense strand to SEQ ID NO: 1259224
uaauaaggaaucuuucuac

SEQ ID NO: 1259226 - RNA, 19 nt, Artificial Sequence
  Description of Artificial Sequence: Synthetic oligonucleotide
  Sense strand starting at position 1528 of SEQ ID NO: 1241267
gagucauuauggcuuaaua

SEQ ID NO: 1259227 - RNA, 19 nt, Artificial Sequence
  Description of Artificial Sequence: Synthetic oligonucleotide
  Antisense strand to SEQ ID NO: 1259226
uauuaagccauaaugacuc

SEQ ID NO: 1259228 - RNA, 19 nt, Artificial Sequence
  Description of Artificial Sequence: Synthetic oligonucleotide
  Sense strand starting at position 1573 of SEQ ID NO: 1241267
gcaacagguguggaaagua

SEQ ID NO: 1259229 - RNA, 19 nt, Artificial Sequence
  Description of Artificial Sequence: Synthetic oligonucleotide
  Antisense strand to SEQ ID NO: 1259228
uacuuuccacaccuguugc

SEQ ID NO: 1259230 - RNA, 19 nt, Artificial Sequence
  Description of Artificial Sequence: Synthetic oligonucleotide
  Sense strand starting at position 1747 of SEQ ID NO: 1241267
ggaggaagcucuuccagac

SEQ ID NO: 1259231 - RNA, 19 nt, Artificial Sequence
  Description of Artificial Sequence: Synthetic oligonucleotide
  Antisense strand to SEQ ID NO: 1259230
gucuggaagagcuuccucc

SEQ ID NO: 1259232 - RNA, 19 nt, Artificial Sequence
  Description of Artificial Sequence: Synthetic oligonucleotide
  Sense strand starting at position 1851 of SEQ ID NO: 1241267
agcagaaugaccgagucau

SEQ ID NO: 1259233 - RNA, 19 nt, Artificial Sequence
  Description of Artificial Sequence: Synthetic oligonucleotide
  Antisense strand to SEQ ID NO: 1259232
augacucggucauucugcu

SEQ ID NO: 1259234 - RNA, 19 nt, Artificial Sequence
  Description of Artificial Sequence: Synthetic oligonucleotide
  Sense strand starting at position 2286 of SEQ ID NO: 1241267
uggcguacucgucccuaau

SEQ ID NO: 1259235 - RNA, 19 nt, Artificial Sequence
  Description of Artificial Sequence: Synthetic oligonucleotide
  Antisense strand to SEQ ID NO: 1259234
auuagggacgaguacgcca

SEQ ID NO: 1259236 - RNA, 19 nt, Artificial Sequence
  Description of Artificial Sequence: Synthetic oligonucleotide
  Sense strand starting at position 2287 of SEQ ID NO: 1241267
ggcguacucgucccuaauc

SEQ ID NO: 1259237 - RNA, 19 nt, Artificial Sequence
  Description of Artificial Sequence: Synthetic oligonucleotide
  Antisense strand to SEQ ID NO: 1259236
gauuagggacgaguacgcc

SEQ ID NO: 1259238 - RNA, 19 nt, Artificial Sequence
  Description of Artificial Sequence: Synthetic oligonucleotide
  Sense strand starting at position 2317 of SEQ ID NO: 1241267
gucagaguccguuaaagac

SEQ ID NO: 1259239 - RNA, 19 nt, Artificial Sequence
  Description of Artificial Sequence: Synthetic oligonucleotide
  Antisense strand to SEQ ID NO: 1259238
gucuuuaacggacucugac

SEQ ID NO: 1259240 - RNA, 19 nt, Artificial Sequence
  Description of Artificial Sequence: Synthetic oligonucleotide
  Sense strand starting at position 2472 of SEQ ID NO: 1241267
uuaaaugugcuuuaagggu

SEQ ID NO: 1259241 - RNA, 19 nt, Artificial Sequence
  Description of Artificial Sequence: Synthetic oligonucleotide
  Antisense strand to SEQ ID NO: 1259240
acccuuaaagcacauuuaa

SEQ ID NO: 1259242 - RNA, 19 nt, Artificial Sequence
  Description of Artificial Sequence: Synthetic oligonucleotide
  Sense strand starting at position 2724 of SEQ ID NO: 1241267
agccuaaucuugguaaaga

SEQ ID NO: 1259243 - RNA, 19 nt, Artificial Sequence
  Description of Artificial Sequence: Synthetic oligonucleotide
  Antisense strand to SEQ ID NO: 1259242
ucuuuaccaagauuaggcu

SEQ ID NO: 1259244 - RNA, 19 nt, Artificial Sequence
  Description of Artificial Sequence: Synthetic oligonucleotide
  Sense strand starting at position 2735 of SEQ ID NO: 1241267
gguaaagaucuugacguca

SEQ ID NO: 1259245 - RNA, 19 nt, Artificial Sequence
  Description of Artificial Sequence: Synthetic oligonucleotide
  Antisense strand to SEQ ID NO: 1259244
ugacgucaagaucuuuacc

SEQ ID NO: 1259246 - RNA, 19 nt, Artificial Sequence
  Description of Artificial Sequence: Synthetic oligonucleotide
  Sense strand starting at position 2743 of SEQ ID NO: 1241267
ucuugacgucauugagaaa

SEQ ID NO: 1259247 - RNA, 19 nt, Artificial Sequence
  Description of Artificial Sequence: Synthetic oligonucleotide
  Antisense strand to SEQ ID NO: 1259246
uuucucaaugacgucaaga

SEQ ID NO: 1259248 - RNA, 19 nt, Artificial Sequence
  Description of Artificial Sequence: Synthetic oligonucleotide
  Sense strand starting at position 2767 of SEQ ID NO: 1241267
cuuuacuuuggccaggauu

SEQ ID NO: 1259249 - RNA, 19 nt, Artificial Sequence
  Description of Artificial Sequence: Synthetic oligonucleotide
  Antisense strand to SEQ ID NO: 1259248
aauccuggccaaaguaaag

SEQ ID NO: 1259250 - RNA, 19 nt, Artificial Sequence
  Description of Artificial Sequence: Synthetic oligonucleotide
  Sense strand starting at position 2913 of SEQ ID NO: 1241267
gcuuccaaacuuugggaaa

SEQ ID NO: 1259251 - RNA, 19 nt, Artificial Sequence
  Description of Artificial Sequence: Synthetic oligonucleotide
  Antisense strand to SEQ ID NO: 1259250
uuucccaaaguuuggaagc

SEQ ID NO: 1259252 - RNA, 19 nt, Artificial Sequence
  Description of Artificial Sequence: Synthetic oligonucleotide
  Sense strand starting at position 2941 of SEQ ID NO: 1241267
auauaaugugcagauugau

SEQ ID NO: 1259253 - RNA, 19 nt, Artificial Sequence
  Description of Artificial Sequence: Synthetic oligonucleotide
  Antisense strand to SEQ ID NO: 1259252
aucaaucugcacauuauau

SEQ ID NO: 1259254 - RNA, 19 nt, Artificial Sequence
  Description of Artificial Sequence: Synthetic oligonucleotide
  Sense strand starting at position 2944 of SEQ ID NO: 1241267
uaaugugcagauugauaug

SEQ ID NO: 1259255 - RNA, 19 nt, Artificial Sequence
  Description of Artificial Sequence: Synthetic oligonucleotide
  Antisense strand to SEQ ID NO: 1259254
cauaucaaucugcacauua

SEQ ID NO: 1259256 - RNA, 19 nt, Artificial Sequence
  Description of Artificial Sequence: Synthetic oligonucleotide
  Sense strand starting at position 3155 of SEQ ID NO: 1241267
ugaccuagguccuuuaaau

SEQ ID NO: 1259257 - RNA, 19 nt, Artificial Sequence
  Description of Artificial Sequence: Synthetic oligonucleotide
  Antisense strand to SEQ ID NO: 1259256
auuuaaaggaccuagguca

SEQ ID NO: 1259258 - RNA, 19 nt, Artificial Sequence
  Description of Artificial Sequence: Synthetic oligonucleotide
  Sense strand starting at position 3208 of SEQ ID NO: 1241267
aaaugaguuguagguggaa

SEQ ID NO: 1259259 - RNA, 19 nt, Artificial Sequence
  Description of Artificial Sequence: Synthetic oligonucleotide
  Antisense strand to SEQ ID NO: 1259258
uuccaccuacaacucauuu

SEQ ID NO: 1259260 - RNA, 19 nt, Artificial Sequence
  Description of Artificial Sequence: Synthetic oligonucleotide
  Sense strand starting at position 3435 of SEQ ID NO: 1241267
aagccauaaggcugagaaa

SEQ ID NO: 1259261 - RNA, 19 nt, Artificial Sequence
  Description of Artificial Sequence: Synthetic oligonucleotide
  Antisense strand to SEQ ID NO: 1259260
uuucucagccuuauggcuu

SEQ ID NO: 1259262 - RNA, 19 nt, Artificial Sequence
  Description of Artificial Sequence: Synthetic oligonucleotide
  Sense strand starting at position 3563 of SEQ ID NO: 1241267
auuaaauguaugggaaguu

SEQ ID NO: 1259263 - RNA, 19 nt, Artificial Sequence
  Description of Artificial Sequence: Synthetic oligonucleotide
  Antisense strand to SEQ ID NO: 1259262
aacuucccauacauuuaau

SEQ ID NO: 1259264 - RNA, 19 nt, Artificial Sequence
  Description of Artificial Sequence: Synthetic oligonucleotide
  Sense strand starting at position 3576 of SEQ ID NO: 1241267
gaaguuaagagccgacuga

SEQ ID NO: 1259265 - RNA, 19 nt, Artificial Sequence
  Description of Artificial Sequence: Synthetic oligonucleotide
  Antisense strand to SEQ ID NO: 1259264
ucagucggcucuuaacuuc

SEQ ID NO: 1259266 - RNA, 19 nt, Artificial Sequence
  Description of Artificial Sequence: Synthetic oligonucleotide
  Sense strand starting at position 3577 of SEQ ID NO: 1241267
aaguuaagagccgacugaa

SEQ ID NO: 1259267 - RNA, 19 nt, Artificial Sequence
  Description of Artificial Sequence: Synthetic oligonucleotide
  Antisense strand to SEQ ID NO: 1259266
uucagucggcucuuaacuu

SEQ ID NO: 1259268 - RNA, 19 nt, Artificial Sequence
  Description of Artificial Sequence: Synthetic oligonucleotide
  Sense strand starting at position 3640 of SEQ ID NO: 1241267
ucccaugagucuuuaggac

SEQ ID NO: 1259269 - RNA, 19 nt, Artificial Sequence
  Description of Artificial Sequence: Synthetic oligonucleotide
  Antisense strand to SEQ ID NO: 1259268
guccuaaagacucauggga

SEQ ID NO: 1259270 - RNA, 19 nt, Artificial Sequence
  Description of Artificial Sequence: Synthetic oligonucleotide
  Sense strand starting at position 3646 of SEQ ID NO: 1241267
gagucuuuaggacagguau

SEQ ID NO: 1259271 - RNA, 19 nt, Artificial Sequence
  Description of Artificial Sequence: Synthetic oligonucleotide
  Antisense strand to SEQ ID NO: 1259270
auaccuguccuaaagacuc

SEQ ID NO: 1259272 - RNA, 19 nt, Artificial Sequence
  Description of Artificial Sequence: Synthetic oligonucleotide
  Sense strand starting at position 3672 of SEQ ID NO: 1241267
gacaaugcuuuggcagaau

SEQ ID NO: 1259273 - RNA, 19 nt, Artificial Sequence
  Description of Artificial Sequence: Synthetic oligonucleotide
  Antisense strand to SEQ ID NO: 1259272
auucugccaaagcauuguc

SEQ ID NO: 1259274 - RNA, 19 nt, Artificial Sequence
  Description of Artificial Sequence: Synthetic oligonucleotide
  Sense strand starting at position 3732 of SEQ ID NO: 1241267
ccuaauagaucacugaguu

SEQ ID NO: 1259275 - RNA, 19 nt, Artificial Sequence
  Description of Artificial Sequence: Synthetic oligonucleotide
  Antisense strand to SEQ ID NO: 1259274
aacucagugaucuauuagg

SEQ ID NO: 1259276 - RNA, 19 nt, Artificial Sequence
  Description of Artificial Sequence: Synthetic oligonucleotide
  Sense strand starting at position 3733 of SEQ ID NO: 1241267
cuaauagaucacugaguuu

SEQ ID NO: 1259277 - RNA, 19 nt, Artificial Sequence
  Description of Artificial Sequence: Synthetic oligonucleotide
  Antisense strand to SEQ ID NO: 1259276
aaacucagugaucuauuag

SEQ ID NO: 1259278 - RNA, 19 nt, Artificial Sequence
  Description of Artificial Sequence: Synthetic oligonucleotide
  Sense strand starting at position 3773 of SEQ ID NO: 1241267
uuuagauacuggguaauag

SEQ ID NO: 1259279 - RNA, 19 nt, Artificial Sequence
  Description of Artificial Sequence: Synthetic oligonucleotide
  Antisense strand to SEQ ID NO: 1259278
cuauuacccaguaucuaaa

SEQ ID NO: 1259280 - RNA, 19 nt, Artificial Sequence
  Description of Artificial Sequence: Synthetic oligonucleotide
  Sense strand starting at position 3815 of SEQ ID NO: 1241267
agagcuuaggcauaagcua

SEQ ID NO: 1259281 - RNA, 19 nt, Artificial Sequence
  Description of Artificial Sequence: Synthetic oligonucleotide
  Antisense strand to SEQ ID NO: 1259280
uagcuuaugccuaagcucu

SEQ ID NO: 1259282 - RNA, 19 nt, Artificial Sequence
  Description of Artificial Sequence: Synthetic oligonucleotide
  Sense strand starting at position 3934 of SEQ ID NO: 1241267
auuaauuugucguccuguu

SEQ ID NO: 1259283 - RNA, 19 nt, Artificial Sequence
  Description of Artificial Sequence: Synthetic oligonucleotide
  Antisense strand to SEQ ID NO: 1259282
aacaggacgacaaauuaau

SEQ ID NO: 1259284 - RNA, 19 nt, Artificial Sequence
  Description of Artificial Sequence: Synthetic oligonucleotide
  Sense strand starting at position 3953 of SEQ ID NO: 1241267
agcugaauucugcauauua

SEQ ID NO: 1259285 - RNA, 19 nt, Artificial Sequence
  Description of Artificial Sequence: Synthetic oligonucleotide
  Antisense strand to SEQ ID NO: 1259284
uaauaugcagaauucagcu

SEQ ID NO: 1259286 - RNA, 19 nt, Artificial Sequence
  Description of Artificial Sequence: Synthetic oligonucleotide
  Sense strand starting at position 150 of SEQ ID NO: 1241268
cucuuuggguuacuaucaa

SEQ ID NO: 1259287 - RNA, 19 nt, Artificial Sequence
  Description of Artificial Sequence: Synthetic oligonucleotide
  Antisense strand to SEQ ID NO: 1259286
uugauaguaacccaaagag

SEQ ID NO: 1259288 - RNA, 19 nt, Artificial Sequence
  Description of Artificial Sequence: Synthetic oligonucleotide
  Sense strand starting at position 510 of SEQ ID NO: 1241268
ggaaaccaagauugucuau

SEQ ID NO: 1259289 - RNA, 19 nt, Artificial Sequence
  Description of Artificial Sequence: Synthetic oligonucleotide
  Antisense strand to SEQ ID NO: 1259288
auagacaaucuugguuucc

SEQ ID NO: 1259290 - RNA, 19 nt, Artificial Sequence
  Description of Artificial Sequence: Synthetic oligonucleotide
  Sense strand starting at position 596 of SEQ ID NO: 1241268
uuagaagucauaugggcau

SEQ ID NO: 1259291 - RNA, 19 nt, Artificial Sequence
  Description of Artificial Sequence: Synthetic oligonucleotide
  Antisense strand to SEQ ID NO: 1259290
augcccauaugacuucuaa

SEQ ID NO: 1259292 - RNA, 19 nt, Artificial Sequence
  Description of Artificial Sequence: Synthetic oligonucleotide
  Sense strand starting at position 600 of SEQ ID NO: 1241268
aagucauaugggcauagca

SEQ ID NO: 1259293 - RNA, 19 nt, Artificial Sequence
  Description of Artificial Sequence: Synthetic oligonucleotide
  Antisense strand to SEQ ID NO: 1259292
ugcuaugcccauaugacuu

SEQ ID NO: 1259294 - RNA, 19 nt, Artificial Sequence
  Description of Artificial Sequence: Synthetic oligonucleotide
  Sense strand starting at position 829 of SEQ ID NO: 1241268
ucauaacagcucugagauu

SEQ ID NO: 1259295 - RNA, 19 nt, Artificial Sequence
  Description of Artificial Sequence: Synthetic oligonucleotide
  Antisense strand to SEQ ID NO: 1259294
aaucucagagcuguuauga

SEQ ID NO: 1259296 - RNA, 19 nt, Artificial Sequence
  Description of Artificial Sequence: Synthetic oligonucleotide
  Sense strand starting at position 914 of SEQ ID NO: 1241268
ggaggcuucccuuacaaau

SEQ ID NO: 1259297 - RNA, 19 nt, Artificial Sequence
  Description of Artificial Sequence: Synthetic oligonucleotide
  Antisense strand to SEQ ID NO: 1259296
auuuguaagggaagccucc

SEQ ID NO: 1259298 - RNA, 19 nt, Artificial Sequence
  Description of Artificial Sequence: Synthetic oligonucleotide
  Sense strand starting at position 1160 of SEQ ID NO: 1241268
gagaguucugaguagcauu

SEQ ID NO: 1259299 - RNA, 19 nt, Artificial Sequence
  Description of Artificial Sequence: Synthetic oligonucleotide
  Antisense strand to SEQ ID NO: 1259298
aaugcuacucagaacucuc

SEQ ID NO: 1259300 - RNA, 19 nt, Artificial Sequence
  Description of Artificial Sequence: Synthetic oligonucleotide
  Sense strand starting at position 1266 of SEQ ID NO: 1241268
aguuuauggcaagagcaga

SEQ ID NO: 1259301 - RNA, 19 nt, Artificial Sequence
  Description of Artificial Sequence: Synthetic oligonucleotide
  Antisense strand to SEQ ID NO: 1259300
ucugcucuugccauaaacu

SEQ ID NO: 1259302 - RNA, 19 nt, Artificial Sequence
  Description of Artificial Sequence: Synthetic oligonucleotide
  Sense strand starting at position 1394 of SEQ ID NO: 1241268
guagaaagauuccuuauua

SEQ ID NO: 1259303 - RNA, 19 nt, Artificial Sequence
  Description of Artificial Sequence: Synthetic oligonucleotide
  Antisense strand to SEQ ID NO: 1259302
uaauaaggaaucuuucuac

SEQ ID NO: 1259304 - RNA, 19 nt, Artificial Sequence
  Description of Artificial Sequence: Synthetic oligonucleotide
  Sense strand starting at position 1422 of SEQ ID NO: 1241268
gagucauuauggcuuaaua

SEQ ID NO: 1259305 - RNA, 19 nt, Artificial Sequence
  Description of Artificial Sequence: Synthetic oligonucleotide
  Antisense strand to SEQ ID NO: 1259304
uauuaagccauaaugacuc

SEQ ID NO: 1259306 - RNA, 19 nt, Artificial Sequence
  Description of Artificial Sequence: Synthetic oligonucleotide
  Sense strand starting at position 1467 of SEQ ID NO: 1241268
gcaacagguguggaaagua

SEQ ID NO: 1259307 - RNA, 19 nt, Artificial Sequence
  Description of Artificial Sequence: Synthetic oligonucleotide
  Antisense strand to SEQ ID NO: 1259306
uacuuuccacaccuguugc

SEQ ID NO: 1259308 - RNA, 19 nt, Artificial Sequence
  Description of Artificial Sequence: Synthetic oligonucleotide
  Sense strand starting at position 1641 of SEQ ID NO: 1241268
ggaggaagcucuuccagac

SEQ ID NO: 1259309 - RNA, 19 nt, Artificial Sequence
  Description of Artificial Sequence: Synthetic oligonucleotide
  Antisense strand to SEQ ID NO: 1259308
gucuggaagagcuuccucc

SEQ ID NO: 1259310 - RNA, 19 nt, Artificial Sequence
  Description of Artificial Sequence: Synthetic oligonucleotide
  Sense strand starting at position 1745 of SEQ ID NO: 1241268
agcagaaugaccgagucau

SEQ ID NO: 1259311 - RNA, 19 nt, Artificial Sequence
  Description of Artificial Sequence: Synthetic oligonucleotide
  Antisense strand to SEQ ID NO: 1259310
augacucggucauucugcu

SEQ ID NO: 1259312 - RNA, 19 nt, Artificial Sequence
  Description of Artificial Sequence: Synthetic oligonucleotide
  Sense strand starting at position 2180 of SEQ ID NO: 1241268
uggcguacucgucccuaau

SEQ ID NO: 1259313 - RNA, 19 nt, Artificial Sequence
  Description of Artificial Sequence: Synthetic oligonucleotide
  Antisense strand to SEQ ID NO: 1259312
auuagggacgaguacgcca

SEQ ID NO: 1259314 - RNA, 19 nt, Artificial Sequence
  Description of Artificial Sequence: Synthetic oligonucleotide
  Sense strand starting at position 2181 of SEQ ID NO: 1241268
ggcguacucgucccuaauc

SEQ ID NO: 1259315 - RNA, 19 nt, Artificial Sequence
  Description of Artificial Sequence: Synthetic oligonucleotide
  Antisense strand to SEQ ID NO: 1259314
gauuagggacgaguacgcc

SEQ ID NO: 1259316 - RNA, 19 nt, Artificial Sequence
  Description of Artificial Sequence: Synthetic oligonucleotide
  Sense strand starting at position 2211 of SEQ ID NO: 1241268
gucagaguccguuaaagac

SEQ ID NO: 1259317 - RNA, 19 nt, Artificial Sequence
  Description of Artificial Sequence: Synthetic oligonucleotide
  Antisense strand to SEQ ID NO: 1259316
gucuuuaacggacucugac

SEQ ID NO: 1259318 - RNA, 19 nt, Artificial Sequence
  Description of Artificial Sequence: Synthetic oligonucleotide
  Sense strand starting at position 2366 of SEQ ID NO: 1241268
uuaaaugugcuuuaagggu

SEQ ID NO: 1259319 - RNA, 19 nt, Artificial Sequence
  Description of Artificial Sequence: Synthetic oligonucleotide
  Antisense strand to SEQ ID NO: 1259318
acccuuaaagcacauuuaa

SEQ ID NO: 1259320 - RNA, 19 nt, Artificial Sequence
  Description of Artificial Sequence: Synthetic oligonucleotide
  Sense strand starting at position 2618 of SEQ ID NO: 1241268
agccuaaucuugguaaaga

SEQ ID NO: 1259321 - RNA, 19 nt, Artificial Sequence
  Description of Artificial Sequence: Synthetic oligonucleotide
  Antisense strand to SEQ ID NO: 1259320
ucuuuaccaagauuaggcu

SEQ ID NO: 1259322 - RNA, 19 nt, Artificial Sequence
  Description of Artificial Sequence: Synthetic oligonucleotide
  Sense strand starting at position 2629 of SEQ ID NO: 1241268
gguaaagaucuugacguca

SEQ ID NO: 1259323 - RNA, 19 nt, Artificial Sequence
  Description of Artificial Sequence: Synthetic oligonucleotide
  Antisense strand to SEQ ID NO: 1259322
ugacgucaagaucuuuacc

SEQ ID NO: 1259324 - RNA, 19 nt, Artificial Sequence
  Description of Artificial Sequence: Synthetic oligonucleotide
  Sense strand starting at position 2637 of SEQ ID NO: 1241268
ucuugacgucauugagaaa

SEQ ID NO: 1259325 - RNA, 19 nt, Artificial Sequence
  Description of Artificial Sequence: Synthetic oligonucleotide
  Antisense strand to SEQ ID NO: 1259324
uuucucaaugacgucaaga

SEQ ID NO: 1259326 - RNA, 19 nt, Artificial Sequence
  Description of Artificial Sequence: Synthetic oligonucleotide
  Sense strand starting at position 2661 of SEQ ID NO: 1241268
cuuuacuuuggccaggauu

SEQ ID NO: 1259327 - RNA, 19 nt, Artificial Sequence
  Description of Artificial Sequence: Synthetic oligonucleotide
  Antisense strand to SEQ ID NO: 1259326
aauccuggccaaaguaaag

SEQ ID NO: 1259328 - RNA, 19 nt, Artificial Sequence
  Description of Artificial Sequence: Synthetic oligonucleotide
  Sense strand starting at position 2807 of SEQ ID NO: 1241268
gcuuccaaacuuugggaaa

SEQ ID NO: 1259329 - RNA, 19 nt, Artificial Sequence
  Description of Artificial Sequence: Synthetic oligonucleotide
  Antisense strand to SEQ ID NO: 1259328
uuucccaaaguuuggaagc

SEQ ID NO: 1259330 - RNA, 19 nt, Artificial Sequence
  Description of Artificial Sequence: Synthetic oligonucleotide
  Sense strand starting at position 2835 of SEQ ID NO: 1241268
auauaaugugcagauugau

SEQ ID NO: 1259331 - RNA, 19 nt, Artificial Sequence
  Description of Artificial Sequence: Synthetic oligonucleotide
  Antisense strand to SEQ ID NO: 1259330
aucaaucugcacauuauau

SEQ ID NO: 1259332 - RNA, 19 nt, Artificial Sequence
  Description of Artificial Sequence: Synthetic oligonucleotide
  Sense strand starting at position 2838 of SEQ ID NO: 1241268
uaaugugcagauugauaug

SEQ ID NO: 1259333 - RNA, 19 nt, Artificial Sequence
  Description of Artificial Sequence: Synthetic oligonucleotide
  Antisense strand to SEQ ID NO: 1259332
cauaucaaucugcacauua

SEQ ID NO: 1259334 - RNA, 19 nt, Artificial Sequence
  Description of Artificial Sequence: Synthetic oligonucleotide
  Sense strand starting at position 3049 of SEQ ID NO: 1241268
ugaccuagguccuuuaaau

SEQ ID NO: 1259335 - RNA, 19 nt, Artificial Sequence
  Description of Artificial Sequence: Synthetic oligonucleotide
  Antisense strand to SEQ ID NO: 1259334
auuuaaaggaccuagguca

SEQ ID NO: 1259336 - RNA, 19 nt, Artificial Sequence
  Description of Artificial Sequence: Synthetic oligonucleotide
  Sense strand starting at position 3102 of SEQ ID NO: 1241268
aaaugaguuguagguggaa

SEQ ID NO: 1259337 - RNA, 19 nt, Artificial Sequence
  Description of Artificial Sequence: Synthetic oligonucleotide
  Antisense strand to SEQ ID NO: 1259336
uuccaccuacaacucauuu

SEQ ID NO: 1259338 - RNA, 19 nt, Artificial Sequence
  Description of Artificial Sequence: Synthetic oligonucleotide
  Sense strand starting at position 3329 of SEQ ID NO: 1241268
aagccauaaggcugagaaa

SEQ ID NO: 1259339 - RNA, 19 nt, Artificial Sequence
  Description of Artificial Sequence: Synthetic oligonucleotide
  Antisense strand to SEQ ID NO: 1259338
uuucucagccuuauggcuu

SEQ ID NO: 1259340 - RNA, 19 nt, Artificial Sequence
  Description of Artificial Sequence: Synthetic oligonucleotide
  Sense strand starting at position 3457 of SEQ ID NO: 1241268
auuaaauguaugggaaguu

SEQ ID NO: 1259341 - RNA, 19 nt, Artificial Sequence
  Description of Artificial Sequence: Synthetic oligonucleotide
  Antisense strand to SEQ ID NO: 1259340
aacuucccauacauuuaau

SEQ ID NO: 1259342 - RNA, 19 nt, Artificial Sequence
  Description of Artificial Sequence: Synthetic oligonucleotide
  Sense strand starting at position 3470 of SEQ ID NO: 1241268
gaaguuaagagccgacuga

SEQ ID NO: 1259343 - RNA, 19 nt, Artificial Sequence
  Description of Artificial Sequence: Synthetic oligonucleotide
  Antisense strand to SEQ ID NO: 1259342
ucagucggcucuuaacuuc

SEQ ID NO: 1259344 - RNA, 19 nt, Artificial Sequence
  Description of Artificial Sequence: Synthetic oligonucleotide
  Sense strand starting at position 3471 of SEQ ID NO: 1241268
aaguuaagagccgacugaa

SEQ ID NO: 1259345 - RNA, 19 nt, Artificial Sequence
  Description of Artificial Sequence: Synthetic oligonucleotide
  Antisense strand to SEQ ID NO: 1259344
uucagucggcucuuaacuu

SEQ ID NO: 1259346 - RNA, 19 nt, Artificial Sequence
  Description of Artificial Sequence: Synthetic oligonucleotide
  Sense strand starting at position 3534 of SEQ ID NO: 1241268
ucccaugagucuuuaggac

SEQ ID NO: 1259347 - RNA, 19 nt, Artificial Sequence
  Description of Artificial Sequence: Synthetic oligonucleotide
  Antisense strand to SEQ ID NO: 1259346
guccuaaagacucauggga

SEQ ID NO: 1259348 - RNA, 19 nt, Artificial Sequence
  Description of Artificial Sequence: Synthetic oligonucleotide
  Sense strand starting at position 3540 of SEQ ID NO: 1241268
gagucuuuaggacagguau

SEQ ID NO: 1259349 - RNA, 19 nt, Artificial Sequence
  Description of Artificial Sequence: Synthetic oligonucleotide
  Antisense strand to SEQ ID NO: 1259348
auaccuguccuaaagacuc

SEQ ID NO: 1259350 - RNA, 19 nt, Artificial Sequence
  Description of Artificial Sequence: Synthetic oligonucleotide
  Sense strand starting at position 3566 of SEQ ID NO: 1241268
gacaaugcuuuggcagaau

SEQ ID NO: 1259351 - RNA, 19 nt, Artificial Sequence
  Description of Artificial Sequence: Synthetic oligonucleotide
  Antisense strand to SEQ ID NO: 1259350
auucugccaaagcauuguc

SEQ ID NO: 1259352 - RNA, 19 nt, Artificial Sequence
  Description of Artificial Sequence: Synthetic oligonucleotide
  Sense strand starting at position 3626 of SEQ ID NO: 1241268
ccuaauagaucacugaguu

SEQ ID NO: 1259353 - RNA, 19 nt, Artificial Sequence
  Description of Artificial Sequence: Synthetic oligonucleotide
  Antisense strand to SEQ ID NO: 1259352
aacucagugaucuauuagg

SEQ ID NO: 1259354 - RNA, 19 nt, Artificial Sequence
  Description of Artificial Sequence: Synthetic oligonucleotide
  Sense strand starting at position 3627 of SEQ ID NO: 1241268
cuaauagaucacugaguuu

SEQ ID NO: 1259355 - RNA, 19 nt, Artificial Sequence
  Description of Artificial Sequence: Synthetic oligonucleotide
  Antisense strand to SEQ ID NO: 1259354
aaacucagugaucuauuag

SEQ ID NO: 1259356 - RNA, 19 nt, Artificial Sequence
  Description of Artificial Sequence: Synthetic oligonucleotide
  Sense strand starting at position 3667 of SEQ ID NO: 1241268
uuuagauacuggguaauag

SEQ ID NO: 1259357 - RNA, 19 nt, Artificial Sequence
  Description of Artificial Sequence: Synthetic oligonucleotide
  Antisense strand to SEQ ID NO: 1259356
cuauuacccaguaucuaaa

SEQ ID NO: 1259358 - RNA, 19 nt, Artificial Sequence
  Description of Artificial Sequence: Synthetic oligonucleotide
  Sense strand starting at position 3709 of SEQ ID NO: 1241268
agagcuuaggcauaagcua

SEQ ID NO: 1259359 - RNA, 19 nt, Artificial Sequence
  Description of Artificial Sequence: Synthetic oligonucleotide
  Antisense strand to SEQ ID NO: 1259358
uagcuuaugccuaagcucu

SEQ ID NO: 1259360 - RNA, 19 nt, Artificial Sequence
  Description of Artificial Sequence: Synthetic oligonucleotide
  Sense strand starting at position 3847 of SEQ ID NO: 1241268
agcugaauucugcauauua

SEQ ID NO: 1259361 - RNA, 19 nt, Artificial Sequence
  Description of Artificial Sequence: Synthetic oligonucleotide
  Antisense strand to SEQ ID NO: 1259360
uaauaugcagaauucagcu

SEQ ID NO: 1259362 - RNA, 19 nt, Artificial Sequence
  Description of Artificial Sequence: Synthetic oligonucleotide
  Sense strand starting at position 3923 of SEQ ID NO: 1241268
aaagaaugccuuuagguuc

SEQ ID NO: 1259363 - RNA, 19 nt, Artificial Sequence
  Description of Artificial Sequence: Synthetic oligonucleotide
  Antisense strand to SEQ ID NO: 1259362
gaaccuaaaggcauucuuu

SEQ ID NO: 1259364 - RNA, 19 nt, Artificial Sequence
  Description of Artificial Sequence: Synthetic oligonucleotide
  Sense strand starting at position 3950 of SEQ ID NO: 1241268
cagggauucuuguccacuu

SEQ ID NO: 1259365 - RNA, 19 nt, Artificial Sequence
  Description of Artificial Sequence: Synthetic oligonucleotide
  Antisense strand to SEQ ID NO: 1259364
aaguggacaagaaucccug

SEQ ID NO: 1259366 - RNA, 19 nt, Artificial Sequence
  Description of Artificial Sequence: Synthetic oligonucleotide
  Sense strand starting at position 1985 of SEQ ID NO: 1241269
ccuagaaaucuugggcuga

SEQ ID NO: 1259367 - RNA, 19 nt, Artificial Sequence
  Description of Artificial Sequence: Synthetic oligonucleotide
  Antisense strand to SEQ ID NO: 1259366
ucagcccaagauuucuagg

SEQ ID NO: 1259368 - RNA, 19 nt, Artificial Sequence
  Description of Artificial Sequence: Synthetic oligonucleotide
  Sense strand starting at position 1986 of SEQ ID NO: 1241269
cuagaaaucuugggcugag

SEQ ID NO: 1259369 - RNA, 19 nt, Artificial Sequence
  Description of Artificial Sequence: Synthetic oligonucleotide
  Antisense strand to SEQ ID NO: 1259368
cucagcccaagauuucuag

SEQ ID NO: 1259370 - RNA, 19 nt, Artificial Sequence
  Description of Artificial Sequence: Synthetic oligonucleotide
  Sense strand starting at position 3509 of SEQ ID NO: 1241269
aacuucuucucgggacgga

SEQ ID NO: 1259371 - RNA, 19 nt, Artificial Sequence
  Description of Artificial Sequence: Synthetic oligonucleotide
  Antisense strand to SEQ ID NO: 1259370
uccgucccgagaagaaguu

SEQ ID NO: 1259372 - RNA, 19 nt, Artificial Sequence
  Description of Artificial Sequence: Synthetic oligonucleotide
  Sense strand starting at position 3582 of SEQ ID NO: 1241269
gggcgaaucgcuuucggca

SEQ ID NO: 1259373 - RNA, 19 nt, Artificial Sequence
  Description of Artificial Sequence: Synthetic oligonucleotide
  Antisense strand to SEQ ID NO: 1259372
ugccgaaagcgauucgccc

SEQ ID NO: 1259374 - RNA, 19 nt, Artificial Sequence
  Description of Artificial Sequence: Synthetic oligonucleotide
  Sense strand starting at position 3774 of SEQ ID NO: 1241269
ccgagugugccuggaggau

SEQ ID NO: 1259375 - RNA, 19 nt, Artificial Sequence
  Description of Artificial Sequence: Synthetic oligonucleotide
  Antisense strand to SEQ ID NO: 1259374
auccuccaggcacacucgg

SEQ ID NO: 1259376 - RNA, 19 nt, Artificial Sequence
  Description of Artificial Sequence: Synthetic oligonucleotide
  Sense strand starting at position 3775 of SEQ ID NO: 1241269
cgagugugccuggaggauu

SEQ ID NO: 1259377 - RNA, 19 nt, Artificial Sequence
  Description of Artificial Sequence: Synthetic oligonucleotide
  Antisense strand to SEQ ID NO: 1259376
aauccuccaggcacacucg

SEQ ID NO: 1259378 - RNA, 19 nt, Artificial Sequence
  Description of Artificial Sequence: Synthetic oligonucleotide
  Sense strand starting at position 3843 of SEQ ID NO: 1241269
aggcgauuucucugcuguc

SEQ ID NO: 1259379 - RNA, 19 nt, Artificial Sequence
  Description of Artificial Sequence: Synthetic oligonucleotide
  Antisense strand to SEQ ID NO: 1259378
gacagcagagaaaucgccu

SEQ ID NO: 1259380 - RNA, 19 nt, Artificial Sequence
  Description of Artificial Sequence: Synthetic oligonucleotide
  Sense strand starting at position 3844 of SEQ ID NO: 1241269
ggcgauuucucugcugucu

SEQ ID NO: 1259381 - RNA, 19 nt, Artificial Sequence
  Description of Artificial Sequence: Synthetic oligonucleotide
  Antisense strand to SEQ ID NO: 1259380
agacagcagagaaaucgcc

SEQ ID NO: 1259382 - RNA, 19 nt, Artificial Sequence
  Description of Artificial Sequence: Synthetic oligonucleotide
  Sense strand starting at position 3928 of SEQ ID NO: 1241269
gcgucagugcuccuaagcu

SEQ ID NO: 1259383 - RNA, 19 nt, Artificial Sequence
  Description of Artificial Sequence: Synthetic oligonucleotide
  Antisense strand to SEQ ID NO: 1259382
agcuuaggagcacugacgc

SEQ ID NO: 1259384 - RNA, 19 nt, Artificial Sequence
  Description of Artificial Sequence: Synthetic oligonucleotide
  Sense strand starting at position 3968 of SEQ ID NO: 1241269
gggucuuucaggugggcua

SEQ ID NO: 1259385 - RNA, 19 nt, Artificial Sequence
  Description of Artificial Sequence: Synthetic oligonucleotide
  Antisense strand to SEQ ID NO: 1259384
uagcccaccugaaagaccc

SEQ ID NO: 1259386 - RNA, 19 nt, Artificial Sequence
  Description of Artificial Sequence: Synthetic oligonucleotide
  Sense strand starting at position 139 of SEQ ID NO: 1241270
auuacauaagcaugaguga

SEQ ID NO: 1259387 - RNA, 19 nt, Artificial Sequence
  Description of Artificial Sequence: Synthetic oligonucleotide
  Antisense strand to SEQ ID NO: 1259386
ucacucaugcuuauguaau

SEQ ID NO: 1259388 - RNA, 19 nt, Artificial Sequence
  Description of Artificial Sequence: Synthetic oligonucleotide
  Sense strand starting at position 140 of SEQ ID NO: 1241270
uuacauaagcaugagugau

SEQ ID NO: 1259389 - RNA, 19 nt, Artificial Sequence
  Description of Artificial Sequence: Synthetic oligonucleotide
  Antisense strand to SEQ ID NO: 1259388
aucacucaugcuuauguaa

SEQ ID NO: 1259390 - RNA, 19 nt, Artificial Sequence
  Description of Artificial Sequence: Synthetic oligonucleotide
  Sense strand starting at position 142 of SEQ ID NO: 1241270
acauaagcaugagugauua

SEQ ID NO: 1259391 - RNA, 19 nt, Artificial Sequence
  Description of Artificial Sequence: Synthetic oligonucleotide
  Antisense strand to SEQ ID NO: 1259390
uaaucacucaugcuuaugu

SEQ ID NO: 1259392 - RNA, 19 nt, Artificial Sequence
  Description of Artificial Sequence: Synthetic oligonucleotide
  Sense strand starting at position 146 of SEQ ID NO: 1241270
aagcaugagugauuaaauc

SEQ ID NO: 1259393 - RNA, 19 nt, Artificial Sequence
  Description of Artificial Sequence: Synthetic oligonucleotide
  Antisense strand to SEQ ID NO: 1259392
gauuuaaucacucaugcuu

SEQ ID NO: 1259394 - RNA, 19 nt, Artificial Sequence
  Description of Artificial Sequence: Synthetic oligonucleotide
  Sense strand starting at position 154 of SEQ ID NO: 1241270
gugauuaaaucauugacca

SEQ ID NO: 1259395 - RNA, 19 nt, Artificial Sequence
  Description of Artificial Sequence: Synthetic oligonucleotide
  Antisense strand to SEQ ID NO: 1259394
uggucaaugauuuaaucac

SEQ ID NO: 1259396 - RNA, 19 nt, Artificial Sequence
  Description of Artificial Sequence: Synthetic oligonucleotide
  Sense strand starting at position 236 of SEQ ID NO: 1241270
augccaacucucgagaaau

SEQ ID NO: 1259397 - RNA, 19 nt, Artificial Sequence
  Description of Artificial Sequence: Synthetic oligonucleotide
  Antisense strand to SEQ ID NO: 1259396
auuucucgagaguuggcau

SEQ ID NO: 1259398 - RNA, 19 nt, Artificial Sequence
  Description of Artificial Sequence: Synthetic oligonucleotide
  Sense strand starting at position 248 of SEQ ID NO: 1241270
gagaaauccugccuugguc

SEQ ID NO: 1259399 - RNA, 19 nt, Artificial Sequence
  Description of Artificial Sequence: Synthetic oligonucleotide
  Antisense strand to SEQ ID NO: 1259398
gaccaaggcaggauuucuc

SEQ ID NO: 1259400 - RNA, 19 nt, Artificial Sequence
  Description of Artificial Sequence: Synthetic oligonucleotide
  Sense strand starting at position 684 of SEQ ID NO: 1241270
gaucuuugagaauguauuc

SEQ ID NO: 1259401 - RNA, 19 nt, Artificial Sequence
  Description of Artificial Sequence: Synthetic oligonucleotide
  Antisense strand to SEQ ID NO: 1259400
gaauacauucucaaagauc

SEQ ID NO: 1259402 - RNA, 19 nt, Artificial Sequence
  Description of Artificial Sequence: Synthetic oligonucleotide
  Sense strand starting at position 844 of SEQ ID NO: 1241270
ucagaagucuuggcaguua

SEQ ID NO: 1259403 - RNA, 19 nt, Artificial Sequence
  Description of Artificial Sequence: Synthetic oligonucleotide
  Antisense strand to SEQ ID NO: 1259402
uaacugccaagacuucuga

SEQ ID NO: 1259404 - RNA, 19 nt, Artificial Sequence
  Description of Artificial Sequence: Synthetic oligonucleotide
  Sense strand starting at position 1034 of SEQ ID NO: 1241270
acgagaaucugucugaccu

SEQ ID NO: 1259405 - RNA, 19 nt, Artificial Sequence
  Description of Artificial Sequence: Synthetic oligonucleotide
  Antisense strand to SEQ ID NO: 1259404
aggucagacagauucucgu

SEQ ID NO: 1259406 - RNA, 19 nt, Artificial Sequence
  Description of Artificial Sequence: Synthetic oligonucleotide
  Sense strand starting at position 1035 of SEQ ID NO: 1241270
cgagaaucugucugaccug

SEQ ID NO: 1259407 - RNA, 19 nt, Artificial Sequence
  Description of Artificial Sequence: Synthetic oligonucleotide
  Antisense strand to SEQ ID NO: 1259406
caggucagacagauucucg

SEQ ID NO: 1259408 - RNA, 19 nt, Artificial Sequence
  Description of Artificial Sequence: Synthetic oligonucleotide
  Sense strand starting at position 1038 of SEQ ID NO: 1241270
gaaucugucugaccugcau

SEQ ID NO: 1259409 - RNA, 19 nt, Artificial Sequence
  Description of Artificial Sequence: Synthetic oligonucleotide
  Antisense strand to SEQ ID NO: 1259408
augcaggucagacagauuc

SEQ ID NO: 1259410 - RNA, 19 nt, Artificial Sequence
  Description of Artificial Sequence: Synthetic oligonucleotide
  Sense strand starting at position 1090 of SEQ ID NO: 1241270
gugacaauggacugugcuu

SEQ ID NO: 1259411 - RNA, 19 nt, Artificial Sequence
  Description of Artificial Sequence: Synthetic oligonucleotide
  Antisense strand to SEQ ID NO: 1259410
aagcacaguccauugucac

SEQ ID NO: 1259412 - RNA, 19 nt, Artificial Sequence
  Description of Artificial Sequence: Synthetic oligonucleotide
  Sense strand starting at position 1153 of SEQ ID NO: 1241270
uucgcuaaagauugaagaa

SEQ ID NO: 1259413 - RNA, 19 nt, Artificial Sequence
  Description of Artificial Sequence: Synthetic oligonucleotide
  Antisense strand to SEQ ID NO: 1259412
uucuucaaucuuuagcgaa

SEQ ID NO: 1259414 - RNA, 19 nt, Artificial Sequence
  Description of Artificial Sequence: Synthetic oligonucleotide
  Sense strand starting at position 1268 of SEQ ID NO: 1241270
ccugaaagguaguuaacua

SEQ ID NO: 1259415 - RNA, 19 nt, Artificial Sequence
  Description of Artificial Sequence: Synthetic oligonucleotide
  Antisense strand to SEQ ID NO: 1259414
uaguuaacuaccuuucagg

SEQ ID NO: 1259416 - RNA, 19 nt, Artificial Sequence
  Description of Artificial Sequence: Synthetic oligonucleotide
  Sense strand starting at position 1413 of SEQ ID NO: 1241270
gcguuuccuccagcuugaa

SEQ ID NO: 1259417 - RNA, 19 nt, Artificial Sequence
  Description of Artificial Sequence: Synthetic oligonucleotide
  Antisense strand to SEQ ID NO: 1259416
uucaagcuggaggaaacgc

SEQ ID NO: 1259418 - RNA, 19 nt, Artificial Sequence
  Description of Artificial Sequence: Synthetic oligonucleotide
  Sense strand starting at position 1416 of SEQ ID NO: 1241270
uuuccuccagcuugaaagu

SEQ ID NO: 1259419 - RNA, 19 nt, Artificial Sequence
  Description of Artificial Sequence: Synthetic oligonucleotide
  Antisense strand to SEQ ID NO: 1259418
acuuucaagcuggaggaaa

SEQ ID NO: 1259420 - RNA, 19 nt, Artificial Sequence
  Description of Artificial Sequence: Synthetic oligonucleotide
  Sense strand starting at position 1429 of SEQ ID NO: 1241270
gaaaguccagaaugcguua

SEQ ID NO: 1259421 - RNA, 19 nt, Artificial Sequence
  Description of Artificial Sequence: Synthetic oligonucleotide
  Antisense strand to SEQ ID NO: 1259420
uaacgcauucuggacuuuc

SEQ ID NO: 1259422 - RNA, 19 nt, Artificial Sequence
  Description of Artificial Sequence: Synthetic oligonucleotide
  Sense strand starting at position 1434 of SEQ ID NO: 1241270
uccagaaugcguuaaucuu

SEQ ID NO: 1259423 - RNA, 19 nt, Artificial Sequence
  Description of Artificial Sequence: Synthetic oligonucleotide
  Antisense strand to SEQ ID NO: 1259422
aagauuaacgcauucugga

SEQ ID NO: 1259424 - RNA, 19 nt, Artificial Sequence
  Description of Artificial Sequence: Synthetic oligonucleotide
  Sense strand starting at position 1444 of SEQ ID NO: 1241270
guuaaucuugcuugacuag

SEQ ID NO: 1259425 - RNA, 19 nt, Artificial Sequence
  Description of Artificial Sequence: Synthetic oligonucleotide
  Antisense strand to SEQ ID NO: 1259424
cuagucaagcaagauuaac

SEQ ID NO: 1259426 - RNA, 19 nt, Artificial Sequence
  Description of Artificial Sequence: Synthetic oligonucleotide
  Sense strand starting at position 1445 of SEQ ID NO: 1241270
uuaaucuugcuugacuaga

SEQ ID NO: 1259427 - RNA, 19 nt, Artificial Sequence
  Description of Artificial Sequence: Synthetic oligonucleotide
  Antisense strand to SEQ ID NO: 1259426
ucuagucaagcaagauuaa

SEQ ID NO: 1259428 - RNA, 19 nt, Artificial Sequence
  Description of Artificial Sequence: Synthetic oligonucleotide
  Sense strand starting at position 1520 of SEQ ID NO: 1241270
uaaugucggagcuagugaa

SEQ ID NO: 1259429 - RNA, 19 nt, Artificial Sequence
  Description of Artificial Sequence: Synthetic oligonucleotide
  Antisense strand to SEQ ID NO: 1259428
uucacuagcuccgacauua

SEQ ID NO: 1259430 - RNA, 19 nt, Artificial Sequence
  Description of Artificial Sequence: Synthetic oligonucleotide
  Sense strand starting at position 1574 of SEQ ID NO: 1241270
uggugaaacgcugacuauu

SEQ ID NO: 1259431 - RNA, 19 nt, Artificial Sequence
  Description of Artificial Sequence: Synthetic oligonucleotide
  Antisense strand to SEQ ID NO: 1259430
aauagucagcguuucacca

SEQ ID NO: 1259432 - RNA, 19 nt, Artificial Sequence
  Description of Artificial Sequence: Synthetic oligonucleotide
  Sense strand starting at position 1749 of SEQ ID NO: 1241270
caguguucuccguccagcu

SEQ ID NO: 1259433 - RNA, 19 nt, Artificial Sequence
  Description of Artificial Sequence: Synthetic oligonucleotide
  Antisense strand to SEQ ID NO: 1259432
agcuggacggagaacacug

SEQ ID NO: 1259434 - RNA, 19 nt, Artificial Sequence
  Description of Artificial Sequence: Synthetic oligonucleotide
  Sense strand starting at position 1979 of SEQ ID NO: 1241270
cgaggcuugcgauugguuu

SEQ ID NO: 1259435 - RNA, 19 nt, Artificial Sequence
  Description of Artificial Sequence: Synthetic oligonucleotide
  Antisense strand to SEQ ID NO: 1259434
aaaccaaucgcaagccucg

SEQ ID NO: 1259436 - RNA, 19 nt, Artificial Sequence
  Description of Artificial Sequence: Synthetic oligonucleotide
  Sense strand starting at position 1997 of SEQ ID NO: 1241270
ugcuccgugcgauauuuga

SEQ ID NO: 1259437 - RNA, 19 nt, Artificial Sequence
  Description of Artificial Sequence: Synthetic oligonucleotide
  Antisense strand to SEQ ID NO: 1259436
ucaaauaucgcacggagca

SEQ ID NO: 1259438 - RNA, 19 nt, Artificial Sequence
  Description of Artificial Sequence: Synthetic oligonucleotide
  Sense strand starting at position 2705 of SEQ ID NO: 1241270
guaaacagcuguguaacua

SEQ ID NO: 1259439 - RNA, 19 nt, Artificial Sequence
  Description of Artificial Sequence: Synthetic oligonucleotide
  Antisense strand to SEQ ID NO: 1259438
uaguuacacagcuguuuac

SEQ ID NO: 1259440 - RNA, 19 nt, Artificial Sequence
  Description of Artificial Sequence: Synthetic oligonucleotide
  Sense strand starting at position 2757 of SEQ ID NO: 1241270
ucagaagaguggccuguuu

SEQ ID NO: 1259441 - RNA, 19 nt, Artificial Sequence
  Description of Artificial Sequence: Synthetic oligonucleotide
  Antisense strand to SEQ ID NO: 1259440
aaacaggccacucuucuga

SEQ ID NO: 1259442 - RNA, 19 nt, Artificial Sequence
  Description of Artificial Sequence: Synthetic oligonucleotide
  Sense strand starting at position 2759 of SEQ ID NO: 1241270
agaagaguggccuguuucu

SEQ ID NO: 1259443 - RNA, 19 nt, Artificial Sequence
  Description of Artificial Sequence: Synthetic oligonucleotide
  Antisense strand to SEQ ID NO: 1259442
agaaacaggccacucuucu

SEQ ID NO: 1259444 - RNA, 19 nt, Artificial Sequence
  Description of Artificial Sequence: Synthetic oligonucleotide
  Sense strand starting at position 2838 of SEQ ID NO: 1241270
gaaggugauagguacucuu

SEQ ID NO: 1259445 - RNA, 19 nt, Artificial Sequence
  Description of Artificial Sequence: Synthetic oligonucleotide
  Antisense strand to SEQ ID NO: 1259444
aagaguaccuaucaccuuc

SEQ ID NO: 1259446 - RNA, 19 nt, Artificial Sequence
  Description of Artificial Sequence: Synthetic oligonucleotide
  Sense strand starting at position 2863 of SEQ ID NO: 1241270
cugcgugaaccagaaguua

SEQ ID NO: 1259447 - RNA, 19 nt, Artificial Sequence
  Description of Artificial Sequence: Synthetic oligonucleotide
  Antisense strand to SEQ ID NO: 1259446
uaacuucugguucacgcag

SEQ ID NO: 1259448 - RNA, 19 nt, Artificial Sequence
  Description of Artificial Sequence: Synthetic oligonucleotide
  Sense strand starting at position 2883 of SEQ ID NO: 1241270
uaguguuuguuauugagag

SEQ ID NO: 1259449 - RNA, 19 nt, Artificial Sequence
  Description of Artificial Sequence: Synthetic oligonucleotide
  Antisense strand to SEQ ID NO: 1259448
cucucaauaacaaacacua

SEQ ID NO: 1259450 - RNA, 19 nt, Artificial Sequence
  Description of Artificial Sequence: Synthetic oligonucleotide
  Sense strand starting at position 2889 of SEQ ID NO: 1241270
uuguuauugagaggcauuc

SEQ ID NO: 1259451 - RNA, 19 nt, Artificial Sequence
  Description of Artificial Sequence: Synthetic oligonucleotide
  Antisense strand to SEQ ID NO: 1259450
gaaugccucucaauaacaa

SEQ ID NO: 1259452 - RNA, 19 nt, Artificial Sequence
  Description of Artificial Sequence: Synthetic oligonucleotide
  Sense strand starting at position 2891 of SEQ ID NO: 1241270
guuauugagaggcauucca

SEQ ID NO: 1259453 - RNA, 19 nt, Artificial Sequence
  Description of Artificial Sequence: Synthetic oligonucleotide
  Antisense strand to SEQ ID NO: 1259452
uggaaugccucucaauaac

SEQ ID NO: 1259454 - RNA, 19 nt, Artificial Sequence
  Description of Artificial Sequence: Synthetic oligonucleotide
  Sense strand starting at position 2963 of SEQ ID NO: 1241270
ggugaugaugagcaaaguu

SEQ ID NO: 1259455 - RNA, 19 nt, Artificial Sequence
  Description of Artificial Sequence: Synthetic oligonucleotide
  Antisense strand to SEQ ID NO: 1259454
aacuuugcucaucaucacc

SEQ ID NO: 1259456 - RNA, 19 nt, Artificial Sequence
  Description of Artificial Sequence: Synthetic oligonucleotide
  Sense strand starting at position 3057 of SEQ ID NO: 1241270
ggucauucuggguauguuu

SEQ ID NO: 1259457 - RNA, 19 nt, Artificial Sequence
  Description of Artificial Sequence: Synthetic oligonucleotide
  Antisense strand to SEQ ID NO: 1259456
aaacauacccagaaugacc

SEQ ID NO: 1259458 - RNA, 19 nt, Artificial Sequence
  Description of Artificial Sequence: Synthetic oligonucleotide
  Sense strand starting at position 3059 of SEQ ID NO: 1241270
ucauucuggguauguuuaa

SEQ ID NO: 1259459 - RNA, 19 nt, Artificial Sequence
  Description of Artificial Sequence: Synthetic oligonucleotide
  Antisense strand to SEQ ID NO: 1259458
uuaaacauacccagaauga

SEQ ID NO: 1259460 - RNA, 19 nt, Artificial Sequence
  Description of Artificial Sequence: Synthetic oligonucleotide
  Sense strand starting at position 3204 of SEQ ID NO: 1241270
acccaugucuaacuuugua

SEQ ID NO: 1259461 - RNA, 19 nt, Artificial Sequence
  Description of Artificial Sequence: Synthetic oligonucleotide
  Antisense strand to SEQ ID NO: 1259460
uacaaaguuagacaugggu

SEQ ID NO: 1259462 - RNA, 19 nt, Artificial Sequence
  Description of Artificial Sequence: Synthetic oligonucleotide
  Sense strand starting at position 3208 of SEQ ID NO: 1241270
augucuaacuuuguaagga

SEQ ID NO: 1259463 - RNA, 19 nt, Artificial Sequence
  Description of Artificial Sequence: Synthetic oligonucleotide
  Antisense strand to SEQ ID NO: 1259462
uccuuacaaaguuagacau

SEQ ID NO: 1259464 - RNA, 19 nt, Artificial Sequence
  Description of Artificial Sequence: Synthetic oligonucleotide
  Sense strand starting at position 3363 of SEQ ID NO: 1241270
uguggcuugcgcuuguaau

SEQ ID NO: 1259465 - RNA, 19 nt, Artificial Sequence
  Description of Artificial Sequence: Synthetic oligonucleotide
  Antisense strand to SEQ ID NO: 1259464
auuacaagcgcaagccaca

SEQ ID NO: 1259466 - RNA, 19 nt, Artificial Sequence
  Description of Artificial Sequence: Synthetic oligonucleotide
  Sense strand starting at position 45 of SEQ ID NO: 1241271
ccggugguccugggaagua

SEQ ID NO: 1259467 - RNA, 19 nt, Artificial Sequence
  Description of Artificial Sequence: Synthetic oligonucleotide
  Antisense strand to SEQ ID NO: 1259466
uacuucccaggaccaccgg

SEQ ID NO: 1259468 - RNA, 19 nt, Artificial Sequence
  Description of Artificial Sequence: Synthetic oligonucleotide
  Sense strand starting at position 293 of SEQ ID NO: 1241271
agcuguuugcugcagcgua

SEQ ID NO: 1259469 - RNA, 19 nt, Artificial Sequence
  Description of Artificial Sequence: Synthetic oligonucleotide
  Antisense strand to SEQ ID NO: 1259468
uacgcugcagcaaacagcu

SEQ ID NO: 1259470 - RNA, 19 nt, Artificial Sequence
  Description of Artificial Sequence: Synthetic oligonucleotide
  Sense strand starting at position 527 of SEQ ID NO: 1241271
ggcugucuucgcccacaca

SEQ ID NO: 1259471 - RNA, 19 nt, Artificial Sequence
  Description of Artificial Sequence: Synthetic oligonucleotide
  Antisense strand to SEQ ID NO: 1259470
ugugugggcgaagacagcc

SEQ ID NO: 1259472 - RNA, 19 nt, Artificial Sequence
  Description of Artificial Sequence: Synthetic oligonucleotide
  Sense strand starting at position 614 of SEQ ID NO: 1241271
uuccuauccgagcauggau

SEQ ID NO: 1259473 - RNA, 19 nt, Artificial Sequence
  Description of Artificial Sequence: Synthetic oligonucleotide
  Antisense strand to SEQ ID NO: 1259472
auccaugcucggauaggaa

SEQ ID NO: 1259474 - RNA, 19 nt, Artificial Sequence
  Description of Artificial Sequence: Synthetic oligonucleotide
  Sense strand starting at position 665 of SEQ ID NO: 1241271
ccacguucccagcaaugaa

SEQ ID NO: 1259475 - RNA, 19 nt, Artificial Sequence
  Description of Artificial Sequence: Synthetic oligonucleotide
  Antisense strand to SEQ ID NO: 1259474
uucauugcugggaacgugg

SEQ ID NO: 1259476 - RNA, 19 nt, Artificial Sequence
  Description of Artificial Sequence: Synthetic oligonucleotide
  Sense strand starting at position 879 of SEQ ID NO: 1241271
gguguucaacuccgggaaa

SEQ ID NO: 1259477 - RNA, 19 nt, Artificial Sequence
  Description of Artificial Sequence: Synthetic oligonucleotide
  Antisense strand to SEQ ID NO: 1259476
uuucccggaguugaacacc

SEQ ID NO: 1259478 - RNA, 19 nt, Artificial Sequence
  Description of Artificial Sequence: Synthetic oligonucleotide
  Sense strand starting at position 925 of SEQ ID NO: 1241271
cccaguaaggcgucugcau

SEQ ID NO: 1259479 - RNA, 19 nt, Artificial Sequence
  Description of Artificial Sequence: Synthetic oligonucleotide
  Antisense strand to SEQ ID NO: 1259478
augcagacgccuuacuggg

SEQ ID NO: 1259480 - RNA, 19 nt, Artificial Sequence
  Description of Artificial Sequence: Synthetic oligonucleotide
  Sense strand starting at position 926 of SEQ ID NO: 1241271
ccaguaaggcgucugcauu

SEQ ID NO: 1259481 - RNA, 19 nt, Artificial Sequence
  Description of Artificial Sequence: Synthetic oligonucleotide
  Antisense strand to SEQ ID NO: 1259480
aaugcagacgccuuacugg

SEQ ID NO: 1259482 - RNA, 19 nt, Artificial Sequence
  Description of Artificial Sequence: Synthetic oligonucleotide
  Sense strand starting at position 1007 of SEQ ID NO: 1241271
cccagacucuucgcauuaa

SEQ ID NO: 1259483 - RNA, 19 nt, Artificial Sequence
  Description of Artificial Sequence: Synthetic oligonucleotide
  Antisense strand to SEQ ID NO: 1259482
uuaaugcgaagagucuggg

SEQ ID NO: 1259484 - RNA, 19 nt, Artificial Sequence
  Description of Artificial Sequence: Synthetic oligonucleotide
  Sense strand starting at position 1008 of SEQ ID NO: 1241271
ccagacucuucgcauuaaa

SEQ ID NO: 1259485 - RNA, 19 nt, Artificial Sequence
  Description of Artificial Sequence: Synthetic oligonucleotide
  Antisense strand to SEQ ID NO: 1259484
uuuaaugcgaagagucugg

SEQ ID NO: 1259486 - RNA, 19 nt, Artificial Sequence
  Description of Artificial Sequence: Synthetic oligonucleotide
  Sense strand starting at position 1081 of SEQ ID NO: 1241271
cuuagagauucugacacuu

SEQ ID NO: 1259487 - RNA, 19 nt, Artificial Sequence
  Description of Artificial Sequence: Synthetic oligonucleotide
  Antisense strand to SEQ ID NO: 1259486
aagugucagaaucucuaag

SEQ ID NO: 1259488 - RNA, 19 nt, Artificial Sequence
  Description of Artificial Sequence: Synthetic oligonucleotide
  Sense strand starting at position 1115 of SEQ ID NO: 1241271
gugugcauuuacucaacca

SEQ ID NO: 1259489 - RNA, 19 nt, Artificial Sequence
  Description of Artificial Sequence: Synthetic oligonucleotide
  Antisense strand to SEQ ID NO: 1259488
ugguugaguaaaugcacac

SEQ ID NO: 1259490 - RNA, 19 nt, Artificial Sequence
  Description of Artificial Sequence: Synthetic oligonucleotide
  Sense strand starting at position 1206 of SEQ ID NO: 1241271
caacucucucgcugucaga

SEQ ID NO: 1259491 - RNA, 19 nt, Artificial Sequence
  Description of Artificial Sequence: Synthetic oligonucleotide
  Antisense strand to SEQ ID NO: 1259490
ucugacagcgagagaguug

SEQ ID NO: 1259492 - RNA, 19 nt, Artificial Sequence
  Description of Artificial Sequence: Synthetic oligonucleotide
  Sense strand starting at position 1213 of SEQ ID NO: 1241271
cucgcugucagagacagau

SEQ ID NO: 1259493 - RNA, 19 nt, Artificial Sequence
  Description of Artificial Sequence: Synthetic oligonucleotide
  Antisense strand to SEQ ID NO: 1259492
aucugucucugacagcgag

SEQ ID NO: 1259494 - RNA, 19 nt, Artificial Sequence
  Description of Artificial Sequence: Synthetic oligonucleotide
  Sense strand starting at position 2145 of SEQ ID NO: 1241271
gggugcacucuuggcuaga

SEQ ID NO: 1259495 - RNA, 19 nt, Artificial Sequence
  Description of Artificial Sequence: Synthetic oligonucleotide
  Antisense strand to SEQ ID NO: 1259494
ucuagccaagagugcaccc

SEQ ID NO: 1259496 - RNA, 19 nt, Artificial Sequence
  Description of Artificial Sequence: Synthetic oligonucleotide
  Sense strand starting at position 2247 of SEQ ID NO: 1241271
uaggacaagucgcaggaau

SEQ ID NO: 1259497 - RNA, 19 nt, Artificial Sequence
  Description of Artificial Sequence: Synthetic oligonucleotide
  Antisense strand to SEQ ID NO: 1259496
auuccugcgacuuguccua

SEQ ID NO: 1259498 - RNA, 19 nt, Artificial Sequence
  Description of Artificial Sequence: Synthetic oligonucleotide
  Sense strand starting at position 2321 of SEQ ID NO: 1241271
aaacacuuaucgcugaagu

SEQ ID NO: 1259499 - RNA, 19 nt, Artificial Sequence
  Description of Artificial Sequence: Synthetic oligonucleotide
  Antisense strand to SEQ ID NO: 1259498
acuucagcgauaaguguuu

SEQ ID NO: 1259500 - RNA, 19 nt, Artificial Sequence
  Description of Artificial Sequence: Synthetic oligonucleotide
  Sense strand starting at position 2322 of SEQ ID NO: 1241271
aacacuuaucgcugaaguc

SEQ ID NO: 1259501 - RNA, 19 nt, Artificial Sequence
  Description of Artificial Sequence: Synthetic oligonucleotide
  Antisense strand to SEQ ID NO: 1259500
gacuucagcgauaaguguu

SEQ ID NO: 1259502 - RNA, 19 nt, Artificial Sequence
  Description of Artificial Sequence: Synthetic oligonucleotide
  Sense strand starting at position 2386 of SEQ ID NO: 1241271
gcacuaugaagaugugaac

SEQ ID NO: 1259503 - RNA, 19 nt, Artificial Sequence
  Description of Artificial Sequence: Synthetic oligonucleotide
  Antisense strand to SEQ ID NO: 1259502
guucacaucuucauagugc

SEQ ID NO: 1259504 - RNA, 19 nt, Artificial Sequence
  Description of Artificial Sequence: Synthetic oligonucleotide
  Sense strand starting at position 2389 of SEQ ID NO: 1241271
cuaugaagaugugaacuaa

SEQ ID NO: 1259505 - RNA, 19 nt, Artificial Sequence
  Description of Artificial Sequence: Synthetic oligonucleotide
  Antisense strand to SEQ ID NO: 1259504
uuaguucacaucuucauag

SEQ ID NO: 1259506 - RNA, 19 nt, Artificial Sequence
  Description of Artificial Sequence: Synthetic oligonucleotide
  Sense strand starting at position 2399 of SEQ ID NO: 1241271
gugaacuaagcacauaauu

SEQ ID NO: 1259507 - RNA, 19 nt, Artificial Sequence
  Description of Artificial Sequence: Synthetic oligonucleotide
  Antisense strand to SEQ ID NO: 1259506
aauuaugugcuuaguucac

SEQ ID NO: 1259508 - RNA, 19 nt, Artificial Sequence
  Description of Artificial Sequence: Synthetic oligonucleotide
  Sense strand starting at position 2777 of SEQ ID NO: 1241271
ggccuuagccgcgcugaaa

SEQ ID NO: 1259509 - RNA, 19 nt, Artificial Sequence
  Description of Artificial Sequence: Synthetic oligonucleotide
  Antisense strand to SEQ ID NO: 1259508
uuucagcgcggcuaaggcc

SEQ ID NO: 1259510 - RNA, 19 nt, Artificial Sequence
  Description of Artificial Sequence: Synthetic oligonucleotide
  Sense strand starting at position 2869 of SEQ ID NO: 1241271
gcugacucguggucacaca

SEQ ID NO: 1259511 - RNA, 19 nt, Artificial Sequence
  Description of Artificial Sequence: Synthetic oligonucleotide
  Antisense strand to SEQ ID NO: 1259510
ugugugaccacgagucagc

SEQ ID NO: 1259512 - RNA, 19 nt, Artificial Sequence
  Description of Artificial Sequence: Synthetic oligonucleotide
  Sense strand starting at position 2930 of SEQ ID NO: 1241271
gcaucugucuuuguccaca

SEQ ID NO: 1259513 - RNA, 19 nt, Artificial Sequence
  Description of Artificial Sequence: Synthetic oligonucleotide
  Antisense strand to SEQ ID NO: 1259512
uguggacaaagacagaugc

SEQ ID NO: 1259514 - RNA, 19 nt, Artificial Sequence
  Description of Artificial Sequence: Synthetic oligonucleotide
  Sense strand starting at position 3014 of SEQ ID NO: 1241271
gcacguauuccagacucac

SEQ ID NO: 1259515 - RNA, 19 nt, Artificial Sequence
  Description of Artificial Sequence: Synthetic oligonucleotide
  Antisense strand to SEQ ID NO: 1259514
gugagucuggaauacgugc

SEQ ID NO: 1259516 - RNA, 19 nt, Artificial Sequence
  Description of Artificial Sequence: Synthetic oligonucleotide
  Sense strand starting at position 3078 of SEQ ID NO: 1241271
gaggaugcugauugccaga

SEQ ID NO: 1259517 - RNA, 19 nt, Artificial Sequence
  Description of Artificial Sequence: Synthetic oligonucleotide
  Antisense strand to SEQ ID NO: 1259516
ucuggcaaucagcauccuc

SEQ ID NO: 1259518 - RNA, 19 nt, Artificial Sequence
  Description of Artificial Sequence: Synthetic oligonucleotide
  Sense strand starting at position 3080 of SEQ ID NO: 1241271
ggaugcugauugccagaga

SEQ ID NO: 1259519 - RNA, 19 nt, Artificial Sequence
  Description of Artificial Sequence: Synthetic oligonucleotide
  Antisense strand to SEQ ID NO: 1259518
ucucuggcaaucagcaucc

SEQ ID NO: 1259520 - RNA, 19 nt, Artificial Sequence
  Description of Artificial Sequence: Synthetic oligonucleotide
  Sense strand starting at position 3129 of SEQ ID NO: 1241271
gggagugcuccucagacac

SEQ ID NO: 1259521 - RNA, 19 nt, Artificial Sequence
  Description of Artificial Sequence: Synthetic oligonucleotide
  Antisense strand to SEQ ID NO: 1259520
gugucugaggagcacuccc

SEQ ID NO: 1259522 - RNA, 19 nt, Artificial Sequence
  Description of Artificial Sequence: Synthetic oligonucleotide
  Sense strand starting at position 3322 of SEQ ID NO: 1241271
gggugggucguuuaggaua

SEQ ID NO: 1259523 - RNA, 19 nt, Artificial Sequence
  Description of Artificial Sequence: Synthetic oligonucleotide
  Antisense strand to SEQ ID NO: 1259522
uauccuaaacgacccaccc

SEQ ID NO: 1259524 - RNA, 19 nt, Artificial Sequence
  Description of Artificial Sequence: Synthetic oligonucleotide
  Sense strand starting at position 3327 of SEQ ID NO: 1241271
ggucguuuaggauacuuaa

SEQ ID NO: 1259525 - RNA, 19 nt, Artificial Sequence
  Description of Artificial Sequence: Synthetic oligonucleotide
  Antisense strand to SEQ ID NO: 1259524
uuaaguauccuaaacgacc

SEQ ID NO: 1259526 - RNA, 19 nt, Artificial Sequence
  Description of Artificial Sequence: Synthetic oligonucleotide
  Sense strand starting at position 3442 of SEQ ID NO: 1241271
ugaucucaccacugugaac

SEQ ID NO: 1259527 - RNA, 19 nt, Artificial Sequence
  Description of Artificial Sequence: Synthetic oligonucleotide
  Antisense strand to SEQ ID NO: 1259526
guucacaguggugagauca

SEQ ID NO: 1259528 - RNA, 19 nt, Artificial Sequence
  Description of Artificial Sequence: Synthetic oligonucleotide
  Sense strand starting at position 3528 of SEQ ID NO: 1241271
ccaucuuagccauagaugu

SEQ ID NO: 1259529 - RNA, 19 nt, Artificial Sequence
  Description of Artificial Sequence: Synthetic oligonucleotide
  Antisense strand to SEQ ID NO: 1259528
acaucuauggcuaagaugg

SEQ ID NO: 1259530 - RNA, 19 nt, Artificial Sequence
  Description of Artificial Sequence: Synthetic oligonucleotide
  Sense strand starting at position 3586 of SEQ ID NO: 1241271
cuaagucagugcuccagua

SEQ ID NO: 1259531 - RNA, 19 nt, Artificial Sequence
  Description of Artificial Sequence: Synthetic oligonucleotide
  Antisense strand to SEQ ID NO: 1259530
uacuggagcacugacuuag

SEQ ID NO: 1259532 - RNA, 19 nt, Artificial Sequence
  Description of Artificial Sequence: Synthetic oligonucleotide
  Sense strand starting at position 3588 of SEQ ID NO: 1241271
aagucagugcuccaguaag

SEQ ID NO: 1259533 - RNA, 19 nt, Artificial Sequence
  Description of Artificial Sequence: Synthetic oligonucleotide
  Antisense strand to SEQ ID NO: 1259532
cuuacuggagcacugacuu

SEQ ID NO: 1259534 - RNA, 19 nt, Artificial Sequence
  Description of Artificial Sequence: Synthetic oligonucleotide
  Sense strand starting at position 3710 of SEQ ID NO: 1241271
cccugauguuaucugcaga

SEQ ID NO: 1259535 - RNA, 19 nt, Artificial Sequence
  Description of Artificial Sequence: Synthetic oligonucleotide
  Antisense strand to SEQ ID NO: 1259534
ucugcagauaacaucaggg

SEQ ID NO: 1259536 - RNA, 19 nt, Artificial Sequence
  Description of Artificial Sequence: Synthetic oligonucleotide
  Sense strand starting at position 3713 of SEQ ID NO: 1241271
ugauguuaucugcagaaug

SEQ ID NO: 1259537 - RNA, 19 nt, Artificial Sequence
  Description of Artificial Sequence: Synthetic oligonucleotide
  Antisense strand to SEQ ID NO: 1259536
cauucugcagauaacauca

SEQ ID NO: 1259538 - RNA, 19 nt, Artificial Sequence
  Description of Artificial Sequence: Synthetic oligonucleotide
  Sense strand starting at position 3724 of SEQ ID NO: 1241271
gcagaaugcccagauaggu

SEQ ID NO: 1259539 - RNA, 19 nt, Artificial Sequence
  Description of Artificial Sequence: Synthetic oligonucleotide
  Antisense strand to SEQ ID NO: 1259538
accuaucugggcauucugc

SEQ ID NO: 1259540 - RNA, 19 nt, Artificial Sequence
  Description of Artificial Sequence: Synthetic oligonucleotide
  Sense strand starting at position 3819 of SEQ ID NO: 1241271
cuugcauuccugugacccu

SEQ ID NO: 1259541 - RNA, 19 nt, Artificial Sequence
  Description of Artificial Sequence: Synthetic oligonucleotide
  Antisense strand to SEQ ID NO: 1259540
agggucacaggaaugcaag

SEQ ID NO: 1259542 - RNA, 19 nt, Artificial Sequence
  Description of Artificial Sequence: Synthetic oligonucleotide
  Sense strand starting at position 3848 of SEQ ID NO: 1241271
guggacucuuuccucaagu

SEQ ID NO: 1259543 - RNA, 19 nt, Artificial Sequence
  Description of Artificial Sequence: Synthetic oligonucleotide
  Antisense strand to SEQ ID NO: 1259542
acuugaggaaagaguccac

SEQ ID NO: 1259544 - RNA, 19 nt, Artificial Sequence
  Description of Artificial Sequence: Synthetic oligonucleotide
  Sense strand starting at position 3850 of SEQ ID NO: 1241271
ggacucuuuccucaaguca

SEQ ID NO: 1259545 - RNA, 19 nt, Artificial Sequence
  Description of Artificial Sequence: Synthetic oligonucleotide
  Antisense strand to SEQ ID NO: 1259544
ugacuugaggaaagagucc

SEQ ID NO: 1259546 - RNA, 19 nt, Artificial Sequence
  Description of Artificial Sequence: Synthetic oligonucleotide
  Sense strand starting at position 3 of SEQ ID NO: 1241272
cccuguuaccuagaacagu

SEQ ID NO: 1259547 - RNA, 19 nt, Artificial Sequence
  Description of Artificial Sequence: Synthetic oligonucleotide
  Antisense strand to SEQ ID NO: 1259546
acuguucuagguaacaggg

SEQ ID NO: 1259548 - RNA, 19 nt, Artificial Sequence
  Description of Artificial Sequence: Synthetic oligonucleotide
  Sense strand starting at position 44 of SEQ ID NO: 1241272
aauaaaugaucuguugagu

SEQ ID NO: 1259549 - RNA, 19 nt, Artificial Sequence
  Description of Artificial Sequence: Synthetic oligonucleotide
  Antisense strand to SEQ ID NO: 1259548
acucaacagaucauuuauu

SEQ ID NO: 1259550 - RNA, 19 nt, Artificial Sequence
  Description of Artificial Sequence: Synthetic oligonucleotide
  Sense strand starting at position 47 of SEQ ID NO: 1241272
aaaugaucuguugagucca

SEQ ID NO: 1259551 - RNA, 19 nt, Artificial Sequence
  Description of Artificial Sequence: Synthetic oligonucleotide
  Antisense strand to SEQ ID NO: 1259550
uggacucaacagaucauuu

SEQ ID NO: 1259552 - RNA, 19 nt, Artificial Sequence
  Description of Artificial Sequence: Synthetic oligonucleotide
  Sense strand starting at position 52 of SEQ ID NO: 1241272
aucuguugaguccaugagu

SEQ ID NO: 1259553 - RNA, 19 nt, Artificial Sequence
  Description of Artificial Sequence: Synthetic oligonucleotide
  Antisense strand to SEQ ID NO: 1259552
acucauggacucaacagau

SEQ ID NO: 1259554 - RNA, 19 nt, Artificial Sequence
  Description of Artificial Sequence: Synthetic oligonucleotide
  Sense strand starting at position 55 of SEQ ID NO: 1241272
uguugaguccaugaguaaa

SEQ ID NO: 1259555 - RNA, 19 nt, Artificial Sequence
  Description of Artificial Sequence: Synthetic oligonucleotide
  Antisense strand to SEQ ID NO: 1259554
uuuacucauggacucaaca

SEQ ID NO: 1259556 - RNA, 19 nt, Artificial Sequence
  Description of Artificial Sequence: Synthetic oligonucleotide
  Sense strand starting at position 57 of SEQ ID NO: 1241272
uugaguccaugaguaaaug

SEQ ID NO: 1259557 - RNA, 19 nt, Artificial Sequence
  Description of Artificial Sequence: Synthetic oligonucleotide
  Antisense strand to SEQ ID NO: 1259556
cauuuacucauggacucaa

SEQ ID NO: 1259558 - RNA, 19 nt, Artificial Sequence
  Description of Artificial Sequence: Synthetic oligonucleotide
  Sense strand starting at position 107 of SEQ ID NO: 1241272
ucagguagaccuggcuuau

SEQ ID NO: 1259559 - RNA, 19 nt, Artificial Sequence
  Description of Artificial Sequence: Synthetic oligonucleotide
  Antisense strand to SEQ ID NO: 1259558
auaagccaggucuaccuga

SEQ ID NO: 1259560 - RNA, 19 nt, Artificial Sequence
  Description of Artificial Sequence: Synthetic oligonucleotide
  Sense strand starting at position 168 of SEQ ID NO: 1241272
cuugucuuggguuaugcau

SEQ ID NO: 1259561 - RNA, 19 nt, Artificial Sequence
  Description of Artificial Sequence: Synthetic oligonucleotide
  Antisense strand to SEQ ID NO: 1259560
augcauaacccaagacaag

SEQ ID NO: 1259562 - RNA, 19 nt, Artificial Sequence
  Description of Artificial Sequence: Synthetic oligonucleotide
  Sense strand starting at position 255 of SEQ ID NO: 1241272
auauaaaugcuuggcacaa

SEQ ID NO: 1259563 - RNA, 19 nt, Artificial Sequence
  Description of Artificial Sequence: Synthetic oligonucleotide
  Antisense strand to SEQ ID NO: 1259562
uugugccaagcauuuauau

SEQ ID NO: 1259564 - RNA, 19 nt, Artificial Sequence
  Description of Artificial Sequence: Synthetic oligonucleotide
  Sense strand starting at position 308 of SEQ ID NO: 1241272
auacuuaggcuaggcauau

SEQ ID NO: 1259565 - RNA, 19 nt, Artificial Sequence
  Description of Artificial Sequence: Synthetic oligonucleotide
  Antisense strand to SEQ ID NO: 1259564
auaugccuagccuaaguau

SEQ ID NO: 1259566 - RNA, 19 nt, Artificial Sequence
  Description of Artificial Sequence: Synthetic oligonucleotide
  Sense strand starting at position 309 of SEQ ID NO: 1241272
uacuuaggcuaggcauaua

SEQ ID NO: 1259567 - RNA, 19 nt, Artificial Sequence
  Description of Artificial Sequence: Synthetic oligonucleotide
  Antisense strand to SEQ ID NO: 1259566
uauaugccuagccuaagua

SEQ ID NO: 1259568 - RNA, 19 nt, Artificial Sequence
  Description of Artificial Sequence: Synthetic oligonucleotide
  Sense strand starting at position 312 of SEQ ID NO: 1241272
uuaggcuaggcauauaaca

SEQ ID NO: 1259569 - RNA, 19 nt, Artificial Sequence
  Description of Artificial Sequence: Synthetic oligonucleotide
  Antisense strand to SEQ ID NO: 1259568
uguuauaugccuagccuaa

SEQ ID NO: 1259570 - RNA, 19 nt, Artificial Sequence
  Description of Artificial Sequence: Synthetic oligonucleotide
  Sense strand starting at position 498 of SEQ ID NO: 1241272
uccucagggucuuugugaa

SEQ ID NO: 1259571 - RNA, 19 nt, Artificial Sequence
  Description of Artificial Sequence: Synthetic oligonucleotide
  Antisense strand to SEQ ID NO: 1259570
uucacaaagacccugagga

SEQ ID NO: 1259572 - RNA, 19 nt, Artificial Sequence
  Description of Artificial Sequence: Synthetic oligonucleotide
  Sense strand starting at position 875 of SEQ ID NO: 1241272
cggccauggccauaacuuu

SEQ ID NO: 1259573 - RNA, 19 nt, Artificial Sequence
  Description of Artificial Sequence: Synthetic oligonucleotide
  Antisense strand to SEQ ID NO: 1259572
aaaguuauggccauggccg

SEQ ID NO: 1259574 - RNA, 19 nt, Artificial Sequence
  Description of Artificial Sequence: Synthetic oligonucleotide
  Sense strand starting at position 961 of SEQ ID NO: 1241272
gccuuuguuggcuuguuua

SEQ ID NO: 1259575 - RNA, 19 nt, Artificial Sequence
  Description of Artificial Sequence: Synthetic oligonucleotide
  Antisense strand to SEQ ID NO: 1259574
uaaacaagccaacaaaggc

SEQ ID NO: 1259576 - RNA, 19 nt, Artificial Sequence
  Description of Artificial Sequence: Synthetic oligonucleotide
  Sense strand starting at position 1018 of SEQ ID NO: 1241272
gggcaagaacuguacacuu

SEQ ID NO: 1259577 - RNA, 19 nt, Artificial Sequence
  Description of Artificial Sequence: Synthetic oligonucleotide
  Antisense strand to SEQ ID NO: 1259576
aaguguacaguucuugccc

SEQ ID NO: 1259578 - RNA, 19 nt, Artificial Sequence
  Description of Artificial Sequence: Synthetic oligonucleotide
  Sense strand starting at position 1100 of SEQ ID NO: 1241272
gagcuaaaugaauaagcga

SEQ ID NO: 1259579 - RNA, 19 nt, Artificial Sequence
  Description of Artificial Sequence: Synthetic oligonucleotide
  Antisense strand to SEQ ID NO: 1259578
ucgcuuauucauuuagcuc

SEQ ID NO: 1259580 - RNA, 19 nt, Artificial Sequence
  Description of Artificial Sequence: Synthetic oligonucleotide
  Sense strand starting at position 1132 of SEQ ID NO: 1241272
uguagcauugcgucucacu

SEQ ID NO: 1259581 - RNA, 19 nt, Artificial Sequence
  Description of Artificial Sequence: Synthetic oligonucleotide
  Antisense strand to SEQ ID NO: 1259580
agugagacgcaaugcuaca

SEQ ID NO: 1259582 - RNA, 19 nt, Artificial Sequence
  Description of Artificial Sequence: Synthetic oligonucleotide
  Sense strand starting at position 1133 of SEQ ID NO: 1241272
guagcauugcgucucacua

SEQ ID NO: 1259583 - RNA, 19 nt, Artificial Sequence
  Description of Artificial Sequence: Synthetic oligonucleotide
  Antisense strand to SEQ ID NO: 1259582
uagugagacgcaaugcuac

SEQ ID NO: 1259584 - RNA, 19 nt, Artificial Sequence
  Description of Artificial Sequence: Synthetic oligonucleotide
  Sense strand starting at position 1392 of SEQ ID NO: 1241272
gguggugacaggugaaucu

SEQ ID NO: 1259585 - RNA, 19 nt, Artificial Sequence
  Description of Artificial Sequence: Synthetic oligonucleotide
  Antisense strand to SEQ ID NO: 1259584
agauucaccugucaccacc

SEQ ID NO: 1259586 - RNA, 19 nt, Artificial Sequence
  Description of Artificial Sequence: Synthetic oligonucleotide
  Sense strand starting at position 1411 of SEQ ID NO: 1241272
cguaacuccgaagguaaau

SEQ ID NO: 1259587 - RNA, 19 nt, Artificial Sequence
  Description of Artificial Sequence: Synthetic oligonucleotide
  Antisense strand to SEQ ID NO: 1259586
auuuaccuucggaguuacg

SEQ ID NO: 1259588 - RNA, 19 nt, Artificial Sequence
  Description of Artificial Sequence: Synthetic oligonucleotide
  Sense strand starting at position 1579 of SEQ ID NO: 1241272
cccuaacucugagucaagu

SEQ ID NO: 1259589 - RNA, 19 nt, Artificial Sequence
  Description of Artificial Sequence: Synthetic oligonucleotide
  Antisense strand to SEQ ID NO: 1259588
acuugacucagaguuaggg

SEQ ID NO: 1259590 - RNA, 19 nt, Artificial Sequence
  Description of Artificial Sequence: Synthetic oligonucleotide
  Sense strand starting at position 2355 of SEQ ID NO: 1241272
acugaaaccuuggcagaca

SEQ ID NO: 1259591 - RNA, 19 nt, Artificial Sequence
  Description of Artificial Sequence: Synthetic oligonucleotide
  Antisense strand to SEQ ID NO: 1259590
ugucugccaagguuucagu

SEQ ID NO: 1259592 - RNA, 19 nt, Artificial Sequence
  Description of Artificial Sequence: Synthetic oligonucleotide
  Sense strand starting at position 2371 of SEQ ID NO: 1241272
acaugcaugccugaucuua

SEQ ID NO: 1259593 - RNA, 19 nt, Artificial Sequence
  Description of Artificial Sequence: Synthetic oligonucleotide
  Antisense strand to SEQ ID NO: 1259592
uaagaucaggcaugcaugu

SEQ ID NO: 1259594 - RNA, 19 nt, Artificial Sequence
  Description of Artificial Sequence: Synthetic oligonucleotide
  Sense strand starting at position 2373 of SEQ ID NO: 1241272
augcaugccugaucuuaca

SEQ ID NO: 1259595 - RNA, 19 nt, Artificial Sequence
  Description of Artificial Sequence: Synthetic oligonucleotide
  Antisense strand to SEQ ID NO: 1259594
uguaagaucaggcaugcau

SEQ ID NO: 1259596 - RNA, 19 nt, Artificial Sequence
  Description of Artificial Sequence: Synthetic oligonucleotide
  Sense strand starting at position 2548 of SEQ ID NO: 1241272
uuacgagucggauaucuuc

SEQ ID NO: 1259597 - RNA, 19 nt, Artificial Sequence
  Description of Artificial Sequence: Synthetic oligonucleotide
  Antisense strand to SEQ ID NO: 1259596
gaagauauccgacucguaa

SEQ ID NO: 1259598 - RNA, 19 nt, Artificial Sequence
  Description of Artificial Sequence: Synthetic oligonucleotide
  Sense strand starting at position 2961 of SEQ ID NO: 1241272
uuaaaccucuggcugaauu

SEQ ID NO: 1259599 - RNA, 19 nt, Artificial Sequence
  Description of Artificial Sequence: Synthetic oligonucleotide
  Antisense strand to SEQ ID NO: 1259598
aauucagccagagguuuaa

SEQ ID NO: 1259600 - RNA, 19 nt, Artificial Sequence
  Description of Artificial Sequence: Synthetic oligonucleotide
  Sense strand starting at position 3374 of SEQ ID NO: 1241272
uccuuuauaucugugucaa

SEQ ID NO: 1259601 - RNA, 19 nt, Artificial Sequence
  Description of Artificial Sequence: Synthetic oligonucleotide
  Antisense strand to SEQ ID NO: 1259600
uugacacagauauaaagga

SEQ ID NO: 1259602 - RNA, 19 nt, Artificial Sequence
  Description of Artificial Sequence: Synthetic oligonucleotide
  Sense strand starting at position 3375 of SEQ ID NO: 1241272
ccuuuauaucugugucaaa

SEQ ID NO: 1259603 - RNA, 19 nt, Artificial Sequence
  Description of Artificial Sequence: Synthetic oligonucleotide
  Antisense strand to SEQ ID NO: 1259602
uuugacacagauauaaagg

SEQ ID NO: 1259604 - RNA, 19 nt, Artificial Sequence
  Description of Artificial Sequence: Synthetic oligonucleotide
  Sense strand starting at position 3376 of SEQ ID NO: 1241272
cuuuauaucugugucaaag

SEQ ID NO: 1259605 - RNA, 19 nt, Artificial Sequence
  Description of Artificial Sequence: Synthetic oligonucleotide
  Antisense strand to SEQ ID NO: 1259604
cuuugacacagauauaaag

SEQ ID NO: 1259606 - RNA, 19 nt, Artificial Sequence
  Description of Artificial Sequence: Synthetic oligonucleotide
  Sense strand starting at position 3387 of SEQ ID NO: 1241272
ugucaaagauccuucugag

SEQ ID NO: 1259607 - RNA, 19 nt, Artificial Sequence
  Description of Artificial Sequence: Synthetic oligonucleotide
  Antisense strand to SEQ ID NO: 1259606
cucagaaggaucuuugaca

SEQ ID NO: 1259608 - RNA, 19 nt, Artificial Sequence
  Description of Artificial Sequence: Synthetic oligonucleotide
  Sense strand starting at position 3747 of SEQ ID NO: 1241272
uccugucacuccucugauu

SEQ ID NO: 1259609 - RNA, 19 nt, Artificial Sequence
  Description of Artificial Sequence: Synthetic oligonucleotide
  Antisense strand to SEQ ID NO: 1259608
aaucagaggagugacagga

SEQ ID NO: 1259610 - RNA, 19 nt, Artificial Sequence
  Description of Artificial Sequence: Synthetic oligonucleotide
  Sense strand starting at position 3780 of SEQ ID NO: 1241272
cuucuccuggucggauaaa

SEQ ID NO: 1259611 - RNA, 19 nt, Artificial Sequence
  Description of Artificial Sequence: Synthetic oligonucleotide
  Antisense strand to SEQ ID NO: 1259610
uuuauccgaccaggagaag

SEQ ID NO: 1259612 - RNA, 19 nt, Artificial Sequence
  Description of Artificial Sequence: Synthetic oligonucleotide
  Sense strand starting at position 3813 of SEQ ID NO: 1241272
guuuaucucccuuguagga

SEQ ID NO: 1259613 - RNA, 19 nt, Artificial Sequence
  Description of Artificial Sequence: Synthetic oligonucleotide
  Antisense strand to SEQ ID NO: 1259612
uccuacaagggagauaaac

SEQ ID NO: 1259614 - RNA, 19 nt, Artificial Sequence
  Description of Artificial Sequence: Synthetic oligonucleotide
  Sense strand starting at position 3820 of SEQ ID NO: 1241272
ucccuuguaggauaaagua

SEQ ID NO: 1259615 - RNA, 19 nt, Artificial Sequence
  Description of Artificial Sequence: Synthetic oligonucleotide
  Antisense strand to SEQ ID NO: 1259614
uacuuuauccuacaaggga

SEQ ID NO: 1259616 - RNA, 19 nt, Artificial Sequence
  Description of Artificial Sequence: Synthetic oligonucleotide
  Sense strand starting at position 3853 of SEQ ID NO: 1241272
uggccaggcaccugauaau

SEQ ID NO: 1259617 - RNA, 19 nt, Artificial Sequence
  Description of Artificial Sequence: Synthetic oligonucleotide
  Antisense strand to SEQ ID NO: 1259616
auuaucaggugccuggcca

SEQ ID NO: 1259618 - RNA, 19 nt, Artificial Sequence
  Description of Artificial Sequence: Synthetic oligonucleotide
  Sense strand starting at position 3877 of SEQ ID NO: 1241272
cucugauuauguucugauu

SEQ ID NO: 1259619 - RNA, 19 nt, Artificial Sequence
  Description of Artificial Sequence: Synthetic oligonucleotide
  Antisense strand to SEQ ID NO: 1259618
aaucagaacauaaucagag

SEQ ID NO: 1259620 - RNA, 19 nt, Artificial Sequence
  Description of Artificial Sequence: Synthetic oligonucleotide
  Sense strand starting at position 3911 of SEQ ID NO: 1241272
cacagauugugagcuuuag

SEQ ID NO: 1259621 - RNA, 19 nt, Artificial Sequence
  Description of Artificial Sequence: Synthetic oligonucleotide
  Antisense strand to SEQ ID NO: 1259620
cuaaagcucacaaucugug

SEQ ID NO: 1259622 - RNA, 19 nt, Artificial Sequence
  Description of Artificial Sequence: Synthetic oligonucleotide
  Sense strand starting at position 3915 of SEQ ID NO: 1241272
gauugugagcuuuagucaa

SEQ ID NO: 1259623 - RNA, 19 nt, Artificial Sequence
  Description of Artificial Sequence: Synthetic oligonucleotide
  Antisense strand to SEQ ID NO: 1259622
uugacuaaagcucacaauc

SEQ ID NO: 1259624 - RNA, 19 nt, Artificial Sequence
  Description of Artificial Sequence: Synthetic oligonucleotide
  Sense strand starting at position 3950 of SEQ ID NO: 1241272
uagccuugcugagcuauuu

SEQ ID NO: 1259625 - RNA, 19 nt, Artificial Sequence
  Description of Artificial Sequence: Synthetic oligonucleotide
  Antisense strand to SEQ ID NO: 1259624
aaauagcucagcaaggcua

SEQ ID NO: 1259626 - RNA, 19 nt, Artificial Sequence
  Description of Artificial Sequence: Synthetic oligonucleotide
  Sense strand starting at position 58 of SEQ ID NO: 1241273
uccaaagaaucguuguuua

SEQ ID NO: 1259627 - RNA, 19 nt, Artificial Sequence
  Description of Artificial Sequence: Synthetic oligonucleotide
  Antisense strand to SEQ ID NO: 1259626
uaaacaacgauucuuugga

SEQ ID NO: 1259628 - RNA, 19 nt, Artificial Sequence
  Description of Artificial Sequence: Synthetic oligonucleotide
  Sense strand starting at position 61 of SEQ ID NO: 1241273
aaagaaucguuguuuacac

SEQ ID NO: 1259629 - RNA, 19 nt, Artificial Sequence
  Description of Artificial Sequence: Synthetic oligonucleotide
  Antisense strand to SEQ ID NO: 1259628
guguaaacaacgauucuuu

SEQ ID NO: 1259630 - RNA, 19 nt, Artificial Sequence
  Description of Artificial Sequence: Synthetic oligonucleotide
  Sense strand starting at position 68 of SEQ ID NO: 1241273
cguuguuuacaccauaaua

SEQ ID NO: 1259631 - RNA, 19 nt, Artificial Sequence
  Description of Artificial Sequence: Synthetic oligonucleotide
  Antisense strand to SEQ ID NO: 1259630
uauuaugguguaaacaacg

SEQ ID NO: 1259632 - RNA, 19 nt, Artificial Sequence
  Description of Artificial Sequence: Synthetic oligonucleotide
  Sense strand starting at position 101 of SEQ ID NO: 1241273
guccauggcucucuggaga

SEQ ID NO: 1259633 - RNA, 19 nt, Artificial Sequence
  Description of Artificial Sequence: Synthetic oligonucleotide
  Antisense strand to SEQ ID NO: 1259632
ucuccagagagccauggac

SEQ ID NO: 1259634 - RNA, 19 nt, Artificial Sequence
  Description of Artificial Sequence: Synthetic oligonucleotide
  Sense strand starting at position 125 of SEQ ID NO: 1241273
ccaguucuaucacugcauu

SEQ ID NO: 1259635 - RNA, 19 nt, Artificial Sequence
  Description of Artificial Sequence: Synthetic oligonucleotide
  Antisense strand to SEQ ID NO: 1259634
aaugcagugauagaacugg

SEQ ID NO: 1259636 - RNA, 19 nt, Artificial Sequence
  Description of Artificial Sequence: Synthetic oligonucleotide
  Sense strand starting at position 128 of SEQ ID NO: 1241273
guucuaucacugcauuguu

SEQ ID NO: 1259637 - RNA, 19 nt, Artificial Sequence
  Description of Artificial Sequence: Synthetic oligonucleotide
  Antisense strand to SEQ ID NO: 1259636
aacaaugcagugauagaac

SEQ ID NO: 1259638 - RNA, 19 nt, Artificial Sequence
  Description of Artificial Sequence: Synthetic oligonucleotide
  Sense strand starting at position 131 of SEQ ID NO: 1241273
cuaucacugcauuguuuga

SEQ ID NO: 1259639 - RNA, 19 nt, Artificial Sequence
  Description of Artificial Sequence: Synthetic oligonucleotide
  Antisense strand to SEQ ID NO: 1259638
ucaaacaaugcagugauag

SEQ ID NO: 1259640 - RNA, 19 nt, Artificial Sequence
  Description of Artificial Sequence: Synthetic oligonucleotide
  Sense strand starting at position 135 of SEQ ID NO: 1241273
cacugcauuguuugaagaa

SEQ ID NO: 1259641 - RNA, 19 nt, Artificial Sequence
  Description of Artificial Sequence: Synthetic oligonucleotide
  Antisense strand to SEQ ID NO: 1259640
uucuucaaacaaugcagug

SEQ ID NO: 1259642 - RNA, 19 nt, Artificial Sequence
  Description of Artificial Sequence: Synthetic oligonucleotide
  Sense strand starting at position 213 of SEQ ID NO: 1241273
ggaauaaacuaagucuugu

SEQ ID NO: 1259643 - RNA, 19 nt, Artificial Sequence
  Description of Artificial Sequence: Synthetic oligonucleotide
  Antisense strand to SEQ ID NO: 1259642
acaagacuuaguuuauucc

SEQ ID NO: 1259644 - RNA, 19 nt, Artificial Sequence
  Description of Artificial Sequence: Synthetic oligonucleotide
  Sense strand starting at position 221 of SEQ ID NO: 1241273
cuaagucuugugcggagaa

SEQ ID NO: 1259645 - RNA, 19 nt, Artificial Sequence
  Description of Artificial Sequence: Synthetic oligonucleotide
  Antisense strand to SEQ ID NO: 1259644
uucuccgcacaagacuuag

SEQ ID NO: 1259646 - RNA, 19 nt, Artificial Sequence
  Description of Artificial Sequence: Synthetic oligonucleotide
  Sense strand starting at position 318 of SEQ ID NO: 1241273
caagguuucuuuguccuga

SEQ ID NO: 1259647 - RNA, 19 nt, Artificial Sequence
  Description of Artificial Sequence: Synthetic oligonucleotide
  Antisense strand to SEQ ID NO: 1259646
ucaggacaaagaaaccuug

SEQ ID NO: 1259648 - RNA, 19 nt, Artificial Sequence
  Description of Artificial Sequence: Synthetic oligonucleotide
  Sense strand starting at position 319 of SEQ ID NO: 1241273
aagguuucuuuguccugau

SEQ ID NO: 1259649 - RNA, 19 nt, Artificial Sequence
  Description of Artificial Sequence: Synthetic oligonucleotide
  Antisense strand to SEQ ID NO: 1259648
aucaggacaaagaaaccuu

SEQ ID NO: 1259650 - RNA, 19 nt, Artificial Sequence
  Description of Artificial Sequence: Synthetic oligonucleotide
  Sense strand starting at position 320 of SEQ ID NO: 1241273
agguuucuuuguccugauu

SEQ ID NO: 1259651 - RNA, 19 nt, Artificial Sequence
  Description of Artificial Sequence: Synthetic oligonucleotide
  Antisense strand to SEQ ID NO: 1259650
aaucaggacaaagaaaccu

SEQ ID NO: 1259652 - RNA, 19 nt, Artificial Sequence
  Description of Artificial Sequence: Synthetic oligonucleotide
  Sense strand starting at position 323 of SEQ ID NO: 1241273
uuucuuuguccugauuaca

SEQ ID NO: 1259653 - RNA, 19 nt, Artificial Sequence
  Description of Artificial Sequence: Synthetic oligonucleotide
  Antisense strand to SEQ ID NO: 1259652
uguaaucaggacaaagaaa

SEQ ID NO: 1259654 - RNA, 19 nt, Artificial Sequence
  Description of Artificial Sequence: Synthetic oligonucleotide
  Sense strand starting at position 467 of SEQ ID NO: 1241273
ucucucuucccgcagaaga

SEQ ID NO: 1259655 - RNA, 19 nt, Artificial Sequence
  Description of Artificial Sequence: Synthetic oligonucleotide
  Antisense strand to SEQ ID NO: 1259654
ucuucugcgggaagagaga

SEQ ID NO: 1259656 - RNA, 19 nt, Artificial Sequence
  Description of Artificial Sequence: Synthetic oligonucleotide
  Sense strand starting at position 976 of SEQ ID NO: 1241273
ucagguuuccucgagucga

SEQ ID NO: 1259657 - RNA, 19 nt, Artificial Sequence
  Description of Artificial Sequence: Synthetic oligonucleotide
  Antisense strand to SEQ ID NO: 1259656
ucgacucgaggaaaccuga

SEQ ID NO: 1259658 - RNA, 19 nt, Artificial Sequence
  Description of Artificial Sequence: Synthetic oligonucleotide
  Sense strand starting at position 1748 of SEQ ID NO: 1241273
cggugaucuccgccucgua

SEQ ID NO: 1259659 - RNA, 19 nt, Artificial Sequence
  Description of Artificial Sequence: Synthetic oligonucleotide
  Antisense strand to SEQ ID NO: 1259658
uacgaggcggagaucaccg

SEQ ID NO: 1259660 - RNA, 19 nt, Artificial Sequence
  Description of Artificial Sequence: Synthetic oligonucleotide
  Sense strand starting at position 1800 of SEQ ID NO: 1241273
ggcguacugggagaacauu

SEQ ID NO: 1259661 - RNA, 19 nt, Artificial Sequence
  Description of Artificial Sequence: Synthetic oligonucleotide
  Antisense strand to SEQ ID NO: 1259660
aauguucucccaguacgcc

SEQ ID NO: 1259662 - RNA, 19 nt, Artificial Sequence
  Description of Artificial Sequence: Synthetic oligonucleotide
  Sense strand starting at position 1808 of SEQ ID NO: 1241273
gggagaacauucgccggaa

SEQ ID NO: 1259663 - RNA, 19 nt, Artificial Sequence
  Description of Artificial Sequence: Synthetic oligonucleotide
  Antisense strand to SEQ ID NO: 1259662
uuccggcgaauguucuccc

SEQ ID NO: 1259664 - RNA, 19 nt, Artificial Sequence
  Description of Artificial Sequence: Synthetic oligonucleotide
  Sense strand starting at position 1809 of SEQ ID NO: 1241273
ggagaacauucgccggaac

SEQ ID NO: 1259665 - RNA, 19 nt, Artificial Sequence
  Description of Artificial Sequence: Synthetic oligonucleotide
  Antisense strand to SEQ ID NO: 1259664
guuccggcgaauguucucc

SEQ ID NO: 1259666 - RNA, 19 nt, Artificial Sequence
  Description of Artificial Sequence: Synthetic oligonucleotide
  Sense strand starting at position 1810 of SEQ ID NO: 1241273
gagaacauucgccggaacu

SEQ ID NO: 1259667 - RNA, 19 nt, Artificial Sequence
  Description of Artificial Sequence: Synthetic oligonucleotide
  Antisense strand to SEQ ID NO: 1259666
aguuccggcgaauguucuc

SEQ ID NO: 1259668 - RNA, 19 nt, Artificial Sequence
  Description of Artificial Sequence: Synthetic oligonucleotide
  Sense strand starting at position 1811 of SEQ ID NO: 1241273
agaacauucgccggaacuc

SEQ ID NO: 1259669 - RNA, 19 nt, Artificial Sequence
  Description of Artificial Sequence: Synthetic oligonucleotide
  Antisense strand to SEQ ID NO: 1259668
gaguuccggcgaauguucu

SEQ ID NO: 1259670 - RNA, 19 nt, Artificial Sequence
  Description of Artificial Sequence: Synthetic oligonucleotide
  Sense strand starting at position 1951 of SEQ ID NO: 1241273
aggcgaucagucugacacu

SEQ ID NO: 1259671 - RNA, 19 nt, Artificial Sequence
  Description of Artificial Sequence: Synthetic oligonucleotide
  Antisense strand to SEQ ID NO: 1259670
agugucagacugaucgccu

SEQ ID NO: 1259672 - RNA, 19 nt, Artificial Sequence
  Description of Artificial Sequence: Synthetic oligonucleotide
  Sense strand starting at position 1989 of SEQ ID NO: 1241273
agaguuucugggcagcgua

SEQ ID NO: 1259673 - RNA, 19 nt, Artificial Sequence
  Description of Artificial Sequence: Synthetic oligonucleotide
  Antisense strand to SEQ ID NO: 1259672
uacgcugcccagaaacucu

SEQ ID NO: 1259674 - RNA, 19 nt, Artificial Sequence
  Description of Artificial Sequence: Synthetic oligonucleotide
  Sense strand starting at position 2103 of SEQ ID NO: 1241273
gguagagaucaugguggaa

SEQ ID NO: 1259675 - RNA, 19 nt, Artificial Sequence
  Description of Artificial Sequence: Synthetic oligonucleotide
  Antisense strand to SEQ ID NO: 1259674
uuccaccaugaucucuacc

SEQ ID NO: 1259676 - RNA, 19 nt, Artificial Sequence
  Description of Artificial Sequence: Synthetic oligonucleotide
  Sense strand starting at position 2942 of SEQ ID NO: 1241273
cugggauuacagugacuca

SEQ ID NO: 1259677 - RNA, 19 nt, Artificial Sequence
  Description of Artificial Sequence: Synthetic oligonucleotide
  Antisense strand to SEQ ID NO: 1259676
ugagucacuguaaucccag

SEQ ID NO: 1259678 - RNA, 19 nt, Artificial Sequence
  Description of Artificial Sequence: Synthetic oligonucleotide
  Sense strand starting at position 3142 of SEQ ID NO: 1241273
cccaaaugcccuuagagua

SEQ ID NO: 1259679 - RNA, 19 nt, Artificial Sequence
  Description of Artificial Sequence: Synthetic oligonucleotide
  Antisense strand to SEQ ID NO: 1259678
uacucuaagggcauuuggg

SEQ ID NO: 1259680 - RNA, 19 nt, Artificial Sequence
  Description of Artificial Sequence: Synthetic oligonucleotide
  Sense strand starting at position 3152 of SEQ ID NO: 1241273
cuuagaguauuugacacaa

SEQ ID NO: 1259681 - RNA, 19 nt, Artificial Sequence
  Description of Artificial Sequence: Synthetic oligonucleotide
  Antisense strand to SEQ ID NO: 1259680
uugugucaaauacucuaag

SEQ ID NO: 1259682 - RNA, 19 nt, Artificial Sequence
  Description of Artificial Sequence: Synthetic oligonucleotide
  Sense strand starting at position 3175 of SEQ ID NO: 1241273
cuuagaacauucucaaggu

SEQ ID NO: 1259683 - RNA, 19 nt, Artificial Sequence
  Description of Artificial Sequence: Synthetic oligonucleotide
  Antisense strand to SEQ ID NO: 1259682
accuugagaauguucuaag

SEQ ID NO: 1259684 - RNA, 19 nt, Artificial Sequence
  Description of Artificial Sequence: Synthetic oligonucleotide
  Sense strand starting at position 3179 of SEQ ID NO: 1241273
gaacauucucaaggugaca

SEQ ID NO: 1259685 - RNA, 19 nt, Artificial Sequence
  Description of Artificial Sequence: Synthetic oligonucleotide
  Antisense strand to SEQ ID NO: 1259684
ugucaccuugagaauguuc

SEQ ID NO: 1259686 - RNA, 19 nt, Artificial Sequence
  Description of Artificial Sequence: Synthetic oligonucleotide
  Sense strand starting at position 3245 of SEQ ID NO: 1241273
ggaacugauugagcagguu

SEQ ID NO: 1259687 - RNA, 19 nt, Artificial Sequence
  Description of Artificial Sequence: Synthetic oligonucleotide
  Antisense strand to SEQ ID NO: 1259686
aaccugcucaaucaguucc

SEQ ID NO: 1259688 - RNA, 19 nt, Artificial Sequence
  Description of Artificial Sequence: Synthetic oligonucleotide
  Sense strand starting at position 3351 of SEQ ID NO: 1241273
auugguaauuggucaauuc

SEQ ID NO: 1259689 - RNA, 19 nt, Artificial Sequence
  Description of Artificial Sequence: Synthetic oligonucleotide
  Antisense strand to SEQ ID NO: 1259688
gaauugaccaauuaccaau

SEQ ID NO: 1259690 - RNA, 19 nt, Artificial Sequence
  Description of Artificial Sequence: Synthetic oligonucleotide
  Sense strand starting at position 3404 of SEQ ID NO: 1241273
acaguugauguuggcauua

SEQ ID NO: 1259691 - RNA, 19 nt, Artificial Sequence
  Description of Artificial Sequence: Synthetic oligonucleotide
  Antisense strand to SEQ ID NO: 1259690
uaaugccaacaucaacugu

SEQ ID NO: 1259692 - RNA, 19 nt, Artificial Sequence
  Description of Artificial Sequence: Synthetic oligonucleotide
  Sense strand starting at position 3416 of SEQ ID NO: 1241273
ggcauuaccucagugacaa

SEQ ID NO: 1259693 - RNA, 19 nt, Artificial Sequence
  Description of Artificial Sequence: Synthetic oligonucleotide
  Antisense strand to SEQ ID NO: 1259692
uugucacugagguaaugcc

SEQ ID NO: 1259694 - RNA, 19 nt, Artificial Sequence
  Description of Artificial Sequence: Synthetic oligonucleotide
  Sense strand starting at position 3417 of SEQ ID NO: 1241273
gcauuaccucagugacaag

SEQ ID NO: 1259695 - RNA, 19 nt, Artificial Sequence
  Description of Artificial Sequence: Synthetic oligonucleotide
  Antisense strand to SEQ ID NO: 1259694
cuugucacugagguaaugc

SEQ ID NO: 1259696 - RNA, 19 nt, Artificial Sequence
  Description of Artificial Sequence: Synthetic oligonucleotide
  Sense strand starting at position 3641 of SEQ ID NO: 1241273
agguguccauuugagugau

SEQ ID NO: 1259697 - RNA, 19 nt, Artificial Sequence
  Description of Artificial Sequence: Synthetic oligonucleotide
  Antisense strand to SEQ ID NO: 1259696
aucacucaaauggacaccu

SEQ ID NO: 1259698 - RNA, 19 nt, Artificial Sequence
  Description of Artificial Sequence: Synthetic oligonucleotide
  Sense strand starting at position 3655 of SEQ ID NO: 1241273
gugauuaaugcauaagcua

SEQ ID NO: 1259699 - RNA, 19 nt, Artificial Sequence
  Description of Artificial Sequence: Synthetic oligonucleotide
  Antisense strand to SEQ ID NO: 1259698
uagcuuaugcauuaaucac

SEQ ID NO: 1259700 - RNA, 19 nt, Artificial Sequence
  Description of Artificial Sequence: Synthetic oligonucleotide
  Sense strand starting at position 3670 of SEQ ID NO: 1241273
gcuacucaggcuugaaaug

SEQ ID NO: 1259701 - RNA, 19 nt, Artificial Sequence
  Description of Artificial Sequence: Synthetic oligonucleotide
  Antisense strand to SEQ ID NO: 1259700
cauuucaagccugaguagc

SEQ ID NO: 1259702 - RNA, 19 nt, Artificial Sequence
  Description of Artificial Sequence: Synthetic oligonucleotide
  Sense strand starting at position 3735 of SEQ ID NO: 1241273
aucuuauggucucuuggaa

SEQ ID NO: 1259703 - RNA, 19 nt, Artificial Sequence
  Description of Artificial Sequence: Synthetic oligonucleotide
  Antisense strand to SEQ ID NO: 1259702
uuccaagagaccauaagau

SEQ ID NO: 1259704 - RNA, 19 nt, Artificial Sequence
  Description of Artificial Sequence: Synthetic oligonucleotide
  Sense strand starting at position 3843 of SEQ ID NO: 1241273
cugccaguucugcaaaugu

SEQ ID NO: 1259705 - RNA, 19 nt, Artificial Sequence
  Description of Artificial Sequence: Synthetic oligonucleotide
  Antisense strand to SEQ ID NO: 1259704
acauuugcagaacuggcag

SEQ ID NO: 1259706 - RNA, 19 nt, Artificial Sequence
  Description of Artificial Sequence: Synthetic oligonucleotide
  Sense strand starting at position 50 of SEQ ID NO: 1241274
auaagacagugguuacaua

SEQ ID NO: 1259707 - RNA, 19 nt, Artificial Sequence
  Description of Artificial Sequence: Synthetic oligonucleotide
  Antisense strand to SEQ ID NO: 1259706
uauguaaccacugucuuau

SEQ ID NO: 1259708 - RNA, 19 nt, Artificial Sequence
  Description of Artificial Sequence: Synthetic oligonucleotide
  Sense strand starting at position 368 of SEQ ID NO: 1241274
auuacaggccucugggauu

SEQ ID NO: 1259709 - RNA, 19 nt, Artificial Sequence
  Description of Artificial Sequence: Synthetic oligonucleotide
  Antisense strand to SEQ ID NO: 1259708
aaucccagaggccuguaau

SEQ ID NO: 1259710 - RNA, 19 nt, Artificial Sequence
  Description of Artificial Sequence: Synthetic oligonucleotide
  Sense strand starting at position 528 of SEQ ID NO: 1241274
uuguaagcauauucuauga

SEQ ID NO: 1259711 - RNA, 19 nt, Artificial Sequence
  Description of Artificial Sequence: Synthetic oligonucleotide
  Antisense strand to SEQ ID NO: 1259710
ucauagaauaugcuuacaa

SEQ ID NO: 1259712 - RNA, 19 nt, Artificial Sequence
  Description of Artificial Sequence: Synthetic oligonucleotide
  Sense strand starting at position 566 of SEQ ID NO: 1241274
ccaauaauguguuuguuag

SEQ ID NO: 1259713 - RNA, 19 nt, Artificial Sequence
  Description of Artificial Sequence: Synthetic oligonucleotide
  Antisense strand to SEQ ID NO: 1259712
cuaacaaacacauuauugg

SEQ ID NO: 1259714 - RNA, 19 nt, Artificial Sequence
  Description of Artificial Sequence: Synthetic oligonucleotide
  Sense strand starting at position 567 of SEQ ID NO: 1241274
caauaauguguuuguuaga

SEQ ID NO: 1259715 - RNA, 19 nt, Artificial Sequence
  Description of Artificial Sequence: Synthetic oligonucleotide
  Antisense strand to SEQ ID NO: 1259714
ucuaacaaacacauuauug

SEQ ID NO: 1259716 - RNA, 19 nt, Artificial Sequence
  Description of Artificial Sequence: Synthetic oligonucleotide
  Sense strand starting at position 588 of SEQ ID NO: 1241274
guaucccugucaucauuaa

SEQ ID NO: 1259717 - RNA, 19 nt, Artificial Sequence
  Description of Artificial Sequence: Synthetic oligonucleotide
  Antisense strand to SEQ ID NO: 1259716
uuaaugaugacagggauac

SEQ ID NO: 1259718 - RNA, 19 nt, Artificial Sequence
  Description of Artificial Sequence: Synthetic oligonucleotide
  Sense strand starting at position 595 of SEQ ID NO: 1241274
ugucaucauuaagugacuu

SEQ ID NO: 1259719 - RNA, 19 nt, Artificial Sequence
  Description of Artificial Sequence: Synthetic oligonucleotide
  Antisense strand to SEQ ID NO: 1259718
aagucacuuaaugaugaca

SEQ ID NO: 1259720 - RNA, 19 nt, Artificial Sequence
  Description of Artificial Sequence: Synthetic oligonucleotide
  Sense strand starting at position 609 of SEQ ID NO: 1241274
gacuuauaacuguacuggu

SEQ ID NO: 1259721 - RNA, 19 nt, Artificial Sequence
  Description of Artificial Sequence: Synthetic oligonucleotide
  Antisense strand to SEQ ID NO: 1259720
accaguacaguuauaaguc

SEQ ID NO: 1259722 - RNA, 19 nt, Artificial Sequence
  Description of Artificial Sequence: Synthetic oligonucleotide
  Sense strand starting at position 682 of SEQ ID NO: 1241274
auauuuaggucugagccuu

SEQ ID NO: 1259723 - RNA, 19 nt, Artificial Sequence
  Description of Artificial Sequence: Synthetic oligonucleotide
  Antisense strand to SEQ ID NO: 1259722
aaggcucagaccuaaauau

SEQ ID NO: 1259724 - RNA, 19 nt, Artificial Sequence
  Description of Artificial Sequence: Synthetic oligonucleotide
  Sense strand starting at position 891 of SEQ ID NO: 1241274
cuuauauagcacuggaauc

SEQ ID NO: 1259725 - RNA, 19 nt, Artificial Sequence
  Description of Artificial Sequence: Synthetic oligonucleotide
  Antisense strand to SEQ ID NO: 1259724
gauuccagugcuauauaag

SEQ ID NO: 1259726 - RNA, 19 nt, Artificial Sequence
  Description of Artificial Sequence: Synthetic oligonucleotide
  Sense strand starting at position 1075 of SEQ ID NO: 1241274
ugaggagcaucucuaggua

SEQ ID NO: 1259727 - RNA, 19 nt, Artificial Sequence
  Description of Artificial Sequence: Synthetic oligonucleotide
  Antisense strand to SEQ ID NO: 1259726
uaccuagagaugcuccuca

SEQ ID NO: 1259728 - RNA, 19 nt, Artificial Sequence
  Description of Artificial Sequence: Synthetic oligonucleotide
  Sense strand starting at position 1110 of SEQ ID NO: 1241274
aagagcucucauuggauag

SEQ ID NO: 1259729 - RNA, 19 nt, Artificial Sequence
  Description of Artificial Sequence: Synthetic oligonucleotide
  Antisense strand to SEQ ID NO: 1259728
cuauccaaugagagcucuu

SEQ ID NO: 1259730 - RNA, 19 nt, Artificial Sequence
  Description of Artificial Sequence: Synthetic oligonucleotide
  Sense strand starting at position 1111 of SEQ ID NO: 1241274
agagcucucauuggauaga

SEQ ID NO: 1259731 - RNA, 19 nt, Artificial Sequence
  Description of Artificial Sequence: Synthetic oligonucleotide
  Antisense strand to SEQ ID NO: 1259730
ucuauccaaugagagcucu

SEQ ID NO: 1259732 - RNA, 19 nt, Artificial Sequence
  Description of Artificial Sequence: Synthetic oligonucleotide
  Sense strand starting at position 1125 of SEQ ID NO: 1241274
auagacagcugguagauuu

SEQ ID NO: 1259733 - RNA, 19 nt, Artificial Sequence
  Description of Artificial Sequence: Synthetic oligonucleotide
  Antisense strand to SEQ ID NO: 1259732
aaaucuaccagcugucuau

SEQ ID NO: 1259734 - RNA, 19 nt, Artificial Sequence
  Description of Artificial Sequence: Synthetic oligonucleotide
  Sense strand starting at position 1193 of SEQ ID NO: 1241274
uuauaaucacuugaggugu

SEQ ID NO: 1259735 - RNA, 19 nt, Artificial Sequence
  Description of Artificial Sequence: Synthetic oligonucleotide
  Antisense strand to SEQ ID NO: 1259734
acaccucaagugauuauaa

SEQ ID NO: 1259736 - RNA, 19 nt, Artificial Sequence
  Description of Artificial Sequence: Synthetic oligonucleotide
  Sense strand starting at position 1204 of SEQ ID NO: 1241274
ugagguguguugucgaaau

SEQ ID NO: 1259737 - RNA, 19 nt, Artificial Sequence
  Description of Artificial Sequence: Synthetic oligonucleotide
  Antisense strand to SEQ ID NO: 1259736
auuucgacaacacaccuca

SEQ ID NO: 1259738 - RNA, 19 nt, Artificial Sequence
  Description of Artificial Sequence: Synthetic oligonucleotide
  Sense strand starting at position 1208 of SEQ ID NO: 1241274
guguguugucgaaaugcac

SEQ ID NO: 1259739 - RNA, 19 nt, Artificial Sequence
  Description of Artificial Sequence: Synthetic oligonucleotide
  Antisense strand to SEQ ID NO: 1259738
gugcauuucgacaacacac

SEQ ID NO: 1259740 - RNA, 19 nt, Artificial Sequence
  Description of Artificial Sequence: Synthetic oligonucleotide
  Sense strand starting at position 1323 of SEQ ID NO: 1241274
uauccaucagagugugcuu

SEQ ID NO: 1259741 - RNA, 19 nt, Artificial Sequence
  Description of Artificial Sequence: Synthetic oligonucleotide
  Antisense strand to SEQ ID NO: 1259740
aagcacacucugauggaua

SEQ ID NO: 1259742 - RNA, 19 nt, Artificial Sequence
  Description of Artificial Sequence: Synthetic oligonucleotide
  Sense strand starting at position 1325 of SEQ ID NO: 1241274
uccaucagagugugcuuua

SEQ ID NO: 1259743 - RNA, 19 nt, Artificial Sequence
  Description of Artificial Sequence: Synthetic oligonucleotide
  Antisense strand to SEQ ID NO: 1259742
uaaagcacacucugaugga

SEQ ID NO: 1259744 - RNA, 19 nt, Artificial Sequence
  Description of Artificial Sequence: Synthetic oligonucleotide
  Sense strand starting at position 1328 of SEQ ID NO: 1241274
aucagagugugcuuuacag

SEQ ID NO: 1259745 - RNA, 19 nt, Artificial Sequence
  Description of Artificial Sequence: Synthetic oligonucleotide
  Antisense strand to SEQ ID NO: 1259744
cuguaaagcacacucugau

SEQ ID NO: 1259746 - RNA, 19 nt, Artificial Sequence
  Description of Artificial Sequence: Synthetic oligonucleotide
  Sense strand starting at position 1340 of SEQ ID NO: 1241274
uuuacagugucaccuaaua

SEQ ID NO: 1259747 - RNA, 19 nt, Artificial Sequence
  Description of Artificial Sequence: Synthetic oligonucleotide
  Antisense strand to SEQ ID NO: 1259746
uauuaggugacacuguaaa

SEQ ID NO: 1259748 - RNA, 19 nt, Artificial Sequence
  Description of Artificial Sequence: Synthetic oligonucleotide
  Sense strand starting at position 1352 of SEQ ID NO: 1241274
ccuaauaacugcccucgua

SEQ ID NO: 1259749 - RNA, 19 nt, Artificial Sequence
  Description of Artificial Sequence: Synthetic oligonucleotide
  Antisense strand to SEQ ID NO: 1259748
uacgagggcaguuauuagg

SEQ ID NO: 1259750 - RNA, 19 nt, Artificial Sequence
  Description of Artificial Sequence: Synthetic oligonucleotide
  Sense strand starting at position 1415 of SEQ ID NO: 1241274
gcugcaauccguguuauac

SEQ ID NO: 1259751 - RNA, 19 nt, Artificial Sequence
  Description of Artificial Sequence: Synthetic oligonucleotide
  Antisense strand to SEQ ID NO: 1259750
guauaacacggauugcagc

SEQ ID NO: 1259752 - RNA, 19 nt, Artificial Sequence
  Description of Artificial Sequence: Synthetic oligonucleotide
  Sense strand starting at position 1818 of SEQ ID NO: 1241274
cccgaaagguacucaccau

SEQ ID NO: 1259753 - RNA, 19 nt, Artificial Sequence
  Description of Artificial Sequence: Synthetic oligonucleotide
  Antisense strand to SEQ ID NO: 1259752
auggugaguaccuuucggg

SEQ ID NO: 1259754 - RNA, 19 nt, Artificial Sequence
  Description of Artificial Sequence: Synthetic oligonucleotide
  Sense strand starting at position 2104 of SEQ ID NO: 1241274
agugacuuguccgccuaaa

SEQ ID NO: 1259755 - RNA, 19 nt, Artificial Sequence
  Description of Artificial Sequence: Synthetic oligonucleotide
  Antisense strand to SEQ ID NO: 1259754
uuuaggcggacaagucacu

SEQ ID NO: 1259756 - RNA, 19 nt, Artificial Sequence
  Description of Artificial Sequence: Synthetic oligonucleotide
  Sense strand starting at position 2181 of SEQ ID NO: 1241274
auuccuuugcccuaacgau

SEQ ID NO: 1259757 - RNA, 19 nt, Artificial Sequence
  Description of Artificial Sequence: Synthetic oligonucleotide
  Antisense strand to SEQ ID NO: 1259756
aucguuagggcaaaggaau

SEQ ID NO: 1259758 - RNA, 19 nt, Artificial Sequence
  Description of Artificial Sequence: Synthetic oligonucleotide
  Sense strand starting at position 2344 of SEQ ID NO: 1241274
agcugaaagcucgguucca

SEQ ID NO: 1259759 - RNA, 19 nt, Artificial Sequence
  Description of Artificial Sequence: Synthetic oligonucleotide
  Antisense strand to SEQ ID NO: 1259758
uggaaccgagcuuucagcu

SEQ ID NO: 1259760 - RNA, 19 nt, Artificial Sequence
  Description of Artificial Sequence: Synthetic oligonucleotide
  Sense strand starting at position 2501 of SEQ ID NO: 1241274
uacgcugcuguuuauaauu

SEQ ID NO: 1259761 - RNA, 19 nt, Artificial Sequence
  Description of Artificial Sequence: Synthetic oligonucleotide
  Antisense strand to SEQ ID NO: 1259760
aauuauaaacagcagcgua

SEQ ID NO: 1259762 - RNA, 19 nt, Artificial Sequence
  Description of Artificial Sequence: Synthetic oligonucleotide
  Sense strand starting at position 2595 of SEQ ID NO: 1241274
ggacuuuauccugagcaca

SEQ ID NO: 1259763 - RNA, 19 nt, Artificial Sequence
  Description of Artificial Sequence: Synthetic oligonucleotide
  Antisense strand to SEQ ID NO: 1259762
ugugcucaggauaaagucc

SEQ ID NO: 1259764 - RNA, 19 nt, Artificial Sequence
  Description of Artificial Sequence: Synthetic oligonucleotide
  Sense strand starting at position 2597 of SEQ ID NO: 1241274
acuuuauccugagcacaga

SEQ ID NO: 1259765 - RNA, 19 nt, Artificial Sequence
  Description of Artificial Sequence: Synthetic oligonucleotide
  Antisense strand to SEQ ID NO: 1259764
ucugugcucaggauaaagu

SEQ ID NO: 1259766 - RNA, 19 nt, Artificial Sequence
  Description of Artificial Sequence: Synthetic oligonucleotide
  Sense strand starting at position 2999 of SEQ ID NO: 1241274
guuaguaguauugaacauc

SEQ ID NO: 1259767 - RNA, 19 nt, Artificial Sequence
  Description of Artificial Sequence: Synthetic oligonucleotide
  Antisense strand to SEQ ID NO: 1259766
gauguucaauacuacuaac

SEQ ID NO: 1259768 - RNA, 19 nt, Artificial Sequence
  Description of Artificial Sequence: Synthetic oligonucleotide
  Sense strand starting at position 3049 of SEQ ID NO: 1241274
acaauugacuugcugaaag

SEQ ID NO: 1259769 - RNA, 19 nt, Artificial Sequence
  Description of Artificial Sequence: Synthetic oligonucleotide
  Antisense strand to SEQ ID NO: 1259768
cuuucagcaagucaauugu

SEQ ID NO: 1259770 - RNA, 19 nt, Artificial Sequence
  Description of Artificial Sequence: Synthetic oligonucleotide
  Sense strand starting at position 3369 of SEQ ID NO: 1241274
gaguuugaggcuuagguga

SEQ ID NO: 1259771 - RNA, 19 nt, Artificial Sequence
  Description of Artificial Sequence: Synthetic oligonucleotide
  Antisense strand to SEQ ID NO: 1259770
ucaccuaagccucaaacuc

SEQ ID NO: 1259772 - RNA, 19 nt, Artificial Sequence
  Description of Artificial Sequence: Synthetic oligonucleotide
  Sense strand starting at position 3376 of SEQ ID NO: 1241274
aggcuuaggugagcucuaa

SEQ ID NO: 1259773 - RNA, 19 nt, Artificial Sequence
  Description of Artificial Sequence: Synthetic oligonucleotide
  Antisense strand to SEQ ID NO: 1259772
uuagagcucaccuaagccu

SEQ ID NO: 1259774 - RNA, 19 nt, Artificial Sequence
  Description of Artificial Sequence: Synthetic oligonucleotide
  Sense strand starting at position 3380 of SEQ ID NO: 1241274
uuaggugagcucuaauugu

SEQ ID NO: 1259775 - RNA, 19 nt, Artificial Sequence
  Description of Artificial Sequence: Synthetic oligonucleotide
  Antisense strand to SEQ ID NO: 1259774
acaauuagagcucaccuaa

SEQ ID NO: 1259776 - RNA, 19 nt, Artificial Sequence
  Description of Artificial Sequence: Synthetic oligonucleotide
  Sense strand starting at position 3513 of SEQ ID NO: 1241274
aaaggauauuaugaggguu

SEQ ID NO: 1259777 - RNA, 19 nt, Artificial Sequence
  Description of Artificial Sequence: Synthetic oligonucleotide
  Antisense strand to SEQ ID NO: 1259776
aacccucauaauauccuuu

SEQ ID NO: 1259778 - RNA, 19 nt, Artificial Sequence
  Description of Artificial Sequence: Synthetic oligonucleotide
  Sense strand starting at position 3573 of SEQ ID NO: 1241274
uauguagugaucugguaag

SEQ ID NO: 1259779 - RNA, 19 nt, Artificial Sequence
  Description of Artificial Sequence: Synthetic oligonucleotide
  Antisense strand to SEQ ID NO: 1259778
cuuaccagaucacuacaua

SEQ ID NO: 1259780 - RNA, 19 nt, Artificial Sequence
  Description of Artificial Sequence: Synthetic oligonucleotide
  Sense strand starting at position 3585 of SEQ ID NO: 1241274
ugguaaguuuaaguucuuu

SEQ ID NO: 1259781 - RNA, 19 nt, Artificial Sequence
  Description of Artificial Sequence: Synthetic oligonucleotide
  Antisense strand to SEQ ID NO: 1259780
aaagaacuuaaacuuacca

SEQ ID NO: 1259782 - RNA, 19 nt, Artificial Sequence
  Description of Artificial Sequence: Synthetic oligonucleotide
  Sense strand starting at position 3600 of SEQ ID NO: 1241274
cuuugauacuuucugagau

SEQ ID NO: 1259783 - RNA, 19 nt, Artificial Sequence
  Description of Artificial Sequence: Synthetic oligonucleotide
  Antisense strand to SEQ ID NO: 1259782
aucucagaaaguaucaaag

SEQ ID NO: 1259784 - RNA, 19 nt, Artificial Sequence
  Description of Artificial Sequence: Synthetic oligonucleotide
  Sense strand starting at position 3885 of SEQ ID NO: 1241274
gugggucugcuugcucuua

SEQ ID NO: 1259785 - RNA, 19 nt, Artificial Sequence
  Description of Artificial Sequence: Synthetic oligonucleotide
  Antisense strand to SEQ ID NO: 1259784
uaagagcaagcagacccac

SEQ ID NO: 1259786 - RNA, 19 nt, Artificial Sequence
  Description of Artificial Sequence: Synthetic oligonucleotide
  Sense strand starting at position 6 of SEQ ID NO: 1241275
acggcuuucccaggaggaa

SEQ ID NO: 1259787 - RNA, 19 nt, Artificial Sequence
  Description of Artificial Sequence: Synthetic oligonucleotide
  Antisense strand to SEQ ID NO: 1259786
uuccuccugggaaagccgu

SEQ ID NO: 1259788 - RNA, 19 nt, Artificial Sequence
  Description of Artificial Sequence: Synthetic oligonucleotide
  Sense strand starting at position 43 of SEQ ID NO: 1241275
ugaaauagguucucuaacu

SEQ ID NO: 1259789 - RNA, 19 nt, Artificial Sequence
  Description of Artificial Sequence: Synthetic oligonucleotide
  Antisense strand to SEQ ID NO: 1259788
aguuagagaaccuauuuca

SEQ ID NO: 1259790 - RNA, 19 nt, Artificial Sequence
  Description of Artificial Sequence: Synthetic oligonucleotide
  Sense strand starting at position 48 of SEQ ID NO: 1241275
uagguucucuaacuugagu

SEQ ID NO: 1259791 - RNA, 19 nt, Artificial Sequence
  Description of Artificial Sequence: Synthetic oligonucleotide
  Antisense strand to SEQ ID NO: 1259790
acucaaguuagagaaccua

SEQ ID NO: 1259792 - RNA, 19 nt, Artificial Sequence
  Description of Artificial Sequence: Synthetic oligonucleotide
  Sense strand starting at position 51 of SEQ ID NO: 1241275
guucucuaacuugaguuua

SEQ ID NO: 1259793 - RNA, 19 nt, Artificial Sequence
  Description of Artificial Sequence: Synthetic oligonucleotide
  Antisense strand to SEQ ID NO: 1259792
uaaacucaaguuagagaac

SEQ ID NO: 1259794 - RNA, 19 nt, Artificial Sequence
  Description of Artificial Sequence: Synthetic oligonucleotide
  Sense strand starting at position 92 of SEQ ID NO: 1241275
ugugauuucggcuggaaau

SEQ ID NO: 1259795 - RNA, 19 nt, Artificial Sequence
  Description of Artificial Sequence: Synthetic oligonucleotide
  Antisense strand to SEQ ID NO: 1259794
auuuccagccgaaaucaca

SEQ ID NO: 1259796 - RNA, 19 nt, Artificial Sequence
  Description of Artificial Sequence: Synthetic oligonucleotide
  Sense strand starting at position 157 of SEQ ID NO: 1241275
gguguugcagcgaaagcaa

SEQ ID NO: 1259797 - RNA, 19 nt, Artificial Sequence
  Description of Artificial Sequence: Synthetic oligonucleotide
  Antisense strand to SEQ ID NO: 1259796
uugcuuucgcugcaacacc

SEQ ID NO: 1259798 - RNA, 19 nt, Artificial Sequence
  Description of Artificial Sequence: Synthetic oligonucleotide
  Sense strand starting at position 194 of SEQ ID NO: 1241275
cgaaguuacgcccauuuau

SEQ ID NO: 1259799 - RNA, 19 nt, Artificial Sequence
  Description of Artificial Sequence: Synthetic oligonucleotide
  Antisense strand to SEQ ID NO: 1259798
auaaaugggcguaacuucg

SEQ ID NO: 1259800 - RNA, 19 nt, Artificial Sequence
  Description of Artificial Sequence: Synthetic oligonucleotide
  Sense strand starting at position 228 of SEQ ID NO: 1241275
uuucuuucuugggugaaac

SEQ ID NO: 1259801 - RNA, 19 nt, Artificial Sequence
  Description of Artificial Sequence: Synthetic oligonucleotide
  Antisense strand to SEQ ID NO: 1259800
guuucacccaagaaagaaa

SEQ ID NO: 1259802 - RNA, 19 nt, Artificial Sequence
  Description of Artificial Sequence: Synthetic oligonucleotide
  Sense strand starting at position 419 of SEQ ID NO: 1241275
ggcgcaaacacguccgauu

SEQ ID NO: 1259803 - RNA, 19 nt, Artificial Sequence
  Description of Artificial Sequence: Synthetic oligonucleotide
  Antisense strand to SEQ ID NO: 1259802
aaucggacguguuugcgcc

SEQ ID NO: 1259804 - RNA, 19 nt, Artificial Sequence
  Description of Artificial Sequence: Synthetic oligonucleotide
  Sense strand starting at position 448 of SEQ ID NO: 1241275
auuccuuugcguuaggaac

SEQ ID NO: 1259805 - RNA, 19 nt, Artificial Sequence
  Description of Artificial Sequence: Synthetic oligonucleotide
  Antisense strand to SEQ ID NO: 1259804
guuccuaacgcaaaggaau

SEQ ID NO: 1259806 - RNA, 19 nt, Artificial Sequence
  Description of Artificial Sequence: Synthetic oligonucleotide
  Sense strand starting at position 527 of SEQ ID NO: 1241275
cgagaaugcgcugaauuaa

SEQ ID NO: 1259807 - RNA, 19 nt, Artificial Sequence
  Description of Artificial Sequence: Synthetic oligonucleotide
  Antisense strand to SEQ ID NO: 1259806
uuaauucagcgcauucucg

SEQ ID NO: 1259808 - RNA, 19 nt, Artificial Sequence
  Description of Artificial Sequence: Synthetic oligonucleotide
  Sense strand starting at position 1225 of SEQ ID NO: 1241275
gccagcucgcucgcaaaua

SEQ ID NO: 1259809 - RNA, 19 nt, Artificial Sequence
  Description of Artificial Sequence: Synthetic oligonucleotide
  Antisense strand to SEQ ID NO: 1259808
uauuugcgagcgagcuggc

SEQ ID NO: 1259810 - RNA, 19 nt, Artificial Sequence
  Description of Artificial Sequence: Synthetic oligonucleotide
  Sense strand starting at position 1363 of SEQ ID NO: 1241275
gcuccaacuccggaagguu

SEQ ID NO: 1259811 - RNA, 19 nt, Artificial Sequence
  Description of Artificial Sequence: Synthetic oligonucleotide
  Antisense strand to SEQ ID NO: 1259810
aaccuuccggaguuggagc

SEQ ID NO: 1259812 - RNA, 19 nt, Artificial Sequence
  Description of Artificial Sequence: Synthetic oligonucleotide
  Sense strand starting at position 1371 of SEQ ID NO: 1241275
uccggaagguuugcacaaa

SEQ ID NO: 1259813 - RNA, 19 nt, Artificial Sequence
  Description of Artificial Sequence: Synthetic oligonucleotide
  Antisense strand to SEQ ID NO: 1259812
uuugugcaaaccuuccgga

SEQ ID NO: 1259814 - RNA, 19 nt, Artificial Sequence
  Description of Artificial Sequence: Synthetic oligonucleotide
  Sense strand starting at position 1898 of SEQ ID NO: 1241275
auugaaaccacgcggaaua

SEQ ID NO: 1259815 - RNA, 19 nt, Artificial Sequence
  Description of Artificial Sequence: Synthetic oligonucleotide
  Antisense strand to SEQ ID NO: 1259814
uauuccgcgugguuucaau

SEQ ID NO: 1259816 - RNA, 19 nt, Artificial Sequence
  Description of Artificial Sequence: Synthetic oligonucleotide
  Sense strand starting at position 1987 of SEQ ID NO: 1241275
acagaauauugucucagag

SEQ ID NO: 1259817 - RNA, 19 nt, Artificial Sequence
  Description of Artificial Sequence: Synthetic oligonucleotide
  Antisense strand to SEQ ID NO: 1259816
cucugagacaauauucugu

SEQ ID NO: 1259818 - RNA, 19 nt, Artificial Sequence
  Description of Artificial Sequence: Synthetic oligonucleotide
  Sense strand starting at position 2114 of SEQ ID NO: 1241275
uaguuauuaggagagcugu

SEQ ID NO: 1259819 - RNA, 19 nt, Artificial Sequence
  Description of Artificial Sequence: Synthetic oligonucleotide
  Antisense strand to SEQ ID NO: 1259818
acagcucuccuaauaacua

SEQ ID NO: 1259820 - RNA, 19 nt, Artificial Sequence
  Description of Artificial Sequence: Synthetic oligonucleotide
  Sense strand starting at position 2244 of SEQ ID NO: 1241275
agaguauuauaguuugguu

SEQ ID NO: 1259821 - RNA, 19 nt, Artificial Sequence
  Description of Artificial Sequence: Synthetic oligonucleotide
  Antisense strand to SEQ ID NO: 1259820
aaccaaacuauaauacucu

SEQ ID NO: 1259822 - RNA, 19 nt, Artificial Sequence
  Description of Artificial Sequence: Synthetic oligonucleotide
  Sense strand starting at position 2435 of SEQ ID NO: 1241275
ugccguuucguguuaacaa

SEQ ID NO: 1259823 - RNA, 19 nt, Artificial Sequence
  Description of Artificial Sequence: Synthetic oligonucleotide
  Antisense strand to SEQ ID NO: 1259822
uuguuaacacgaaacggca

SEQ ID NO: 1259824 - RNA, 19 nt, Artificial Sequence
  Description of Artificial Sequence: Synthetic oligonucleotide
  Sense strand starting at position 2464 of SEQ ID NO: 1241275
gugcucugccguuugcuaa

SEQ ID NO: 1259825 - RNA, 19 nt, Artificial Sequence
  Description of Artificial Sequence: Synthetic oligonucleotide
  Antisense strand to SEQ ID NO: 1259824
uuagcaaacggcagagcac

SEQ ID NO: 1259826 - RNA, 19 nt, Artificial Sequence
  Description of Artificial Sequence: Synthetic oligonucleotide
  Sense strand starting at position 2507 of SEQ ID NO: 1241275
auauucuuauucccgaagu

SEQ ID NO: 1259827 - RNA, 19 nt, Artificial Sequence
  Description of Artificial Sequence: Synthetic oligonucleotide
  Antisense strand to SEQ ID NO: 1259826
acuucgggaauaagaauau

SEQ ID NO: 1259828 - RNA, 19 nt, Artificial Sequence
  Description of Artificial Sequence: Synthetic oligonucleotide
  Sense strand starting at position 2509 of SEQ ID NO: 1241275
auucuuauucccgaagugu

SEQ ID NO: 1259829 - RNA, 19 nt, Artificial Sequence
  Description of Artificial Sequence: Synthetic oligonucleotide
  Antisense strand to SEQ ID NO: 1259828
acacuucgggaauaagaau

SEQ ID NO: 1259830 - RNA, 19 nt, Artificial Sequence
  Description of Artificial Sequence: Synthetic oligonucleotide
  Sense strand starting at position 2922 of SEQ ID NO: 1241275
gcgauucuggcgucaccuu

SEQ ID NO: 1259831 - RNA, 19 nt, Artificial Sequence
  Description of Artificial Sequence: Synthetic oligonucleotide
  Antisense strand to SEQ ID NO: 1259830
aaggugacgccagaaucgc

SEQ ID NO: 1259832 - RNA, 19 nt, Artificial Sequence
  Description of Artificial Sequence: Synthetic oligonucleotide
  Sense strand starting at position 2977 of SEQ ID NO: 1241275
ugaauaauccgaugugacc

SEQ ID NO: 1259833 - RNA, 19 nt, Artificial Sequence
  Description of Artificial Sequence: Synthetic oligonucleotide
  Antisense strand to SEQ ID NO: 1259832
ggucacaucggauuauuca

SEQ ID NO: 1259834 - RNA, 19 nt, Artificial Sequence
  Description of Artificial Sequence: Synthetic oligonucleotide
  Sense strand starting at position 3129 of SEQ ID NO: 1241275
gcauuaaaucgcgaauagg

SEQ ID NO: 1259835 - RNA, 19 nt, Artificial Sequence
  Description of Artificial Sequence: Synthetic oligonucleotide
  Antisense strand to SEQ ID NO: 1259834
ccuauucgcgauuuaaugc

SEQ ID NO: 1259836 - RNA, 19 nt, Artificial Sequence
  Description of Artificial Sequence: Synthetic oligonucleotide
  Sense strand starting at position 3132 of SEQ ID NO: 1241275
uuaaaucgcgaauagggua

SEQ ID NO: 1259837 - RNA, 19 nt, Artificial Sequence
  Description of Artificial Sequence: Synthetic oligonucleotide
  Antisense strand to SEQ ID NO: 1259836
uacccuauucgcgauuuaa

SEQ ID NO: 1259838 - RNA, 19 nt, Artificial Sequence
  Description of Artificial Sequence: Synthetic oligonucleotide
  Sense strand starting at position 3156 of SEQ ID NO: 1241275
cucguuagcauacagaagu

SEQ ID NO: 1259839 - RNA, 19 nt, Artificial Sequence
  Description of Artificial Sequence: Synthetic oligonucleotide
  Antisense strand to SEQ ID NO: 1259838
acuucuguaugcuaacgag

SEQ ID NO: 1259840 - RNA, 19 nt, Artificial Sequence
  Description of Artificial Sequence: Synthetic oligonucleotide
  Sense strand starting at position 3167 of SEQ ID NO: 1241275
acagaagucuggcuaccau

SEQ ID NO: 1259841 - RNA, 19 nt, Artificial Sequence
  Description of Artificial Sequence: Synthetic oligonucleotide
  Antisense strand to SEQ ID NO: 1259840
augguagccagacuucugu

SEQ ID NO: 1259842 - RNA, 19 nt, Artificial Sequence
  Description of Artificial Sequence: Synthetic oligonucleotide
  Sense strand starting at position 3432 of SEQ ID NO: 1241275
acuccucucugcguauuua

SEQ ID NO: 1259843 - RNA, 19 nt, Artificial Sequence
  Description of Artificial Sequence: Synthetic oligonucleotide
  Antisense strand to SEQ ID NO: 1259842
uaaauacgcagagaggagu

SEQ ID NO: 1259844 - RNA, 19 nt, Artificial Sequence
  Description of Artificial Sequence: Synthetic oligonucleotide
  Sense strand starting at position 3433 of SEQ ID NO: 1241275
cuccucucugcguauuuaa

SEQ ID NO: 1259845 - RNA, 19 nt, Artificial Sequence
  Description of Artificial Sequence: Synthetic oligonucleotide
  Antisense strand to SEQ ID NO: 1259844
uuaaauacgcagagaggag

SEQ ID NO: 1259846 - RNA, 19 nt, Artificial Sequence
  Description of Artificial Sequence: Synthetic oligonucleotide
  Sense strand starting at position 3436 of SEQ ID NO: 1241275
cucucugcguauuuaagaa

SEQ ID NO: 1259847 - RNA, 19 nt, Artificial Sequence
  Description of Artificial Sequence: Synthetic oligonucleotide
  Antisense strand to SEQ ID NO: 1259846
uucuuaaauacgcagagag

SEQ ID NO: 1259848 - RNA, 19 nt, Artificial Sequence
  Description of Artificial Sequence: Synthetic oligonucleotide
  Sense strand starting at position 3466 of SEQ ID NO: 1241275
uucuauagauuccuuugua

SEQ ID NO: 1259849 - RNA, 19 nt, Artificial Sequence
  Description of Artificial Sequence: Synthetic oligonucleotide
  Antisense strand to SEQ ID NO: 1259848
uacaaaggaaucuauagaa

SEQ ID NO: 1259850 - RNA, 19 nt, Artificial Sequence
  Description of Artificial Sequence: Synthetic oligonucleotide
  Sense strand starting at position 3494 of SEQ ID NO: 1241275
cauagcaucuuggcagaga

SEQ ID NO: 1259851 - RNA, 19 nt, Artificial Sequence
  Description of Artificial Sequence: Synthetic oligonucleotide
  Antisense strand to SEQ ID NO: 1259850
ucucugccaagaugcuaug

SEQ ID NO: 1259852 - RNA, 19 nt, Artificial Sequence
  Description of Artificial Sequence: Synthetic oligonucleotide
  Sense strand starting at position 3497 of SEQ ID NO: 1241275
agcaucuuggcagagauua

SEQ ID NO: 1259853 - RNA, 19 nt, Artificial Sequence
  Description of Artificial Sequence: Synthetic oligonucleotide
  Antisense strand to SEQ ID NO: 1259852
uaaucucugccaagaugcu

SEQ ID NO: 1259854 - RNA, 19 nt, Artificial Sequence
  Description of Artificial Sequence: Synthetic oligonucleotide
  Sense strand starting at position 3658 of SEQ ID NO: 1241275
acccaagaaguaugaguuu

SEQ ID NO: 1259855 - RNA, 19 nt, Artificial Sequence
  Description of Artificial Sequence: Synthetic oligonucleotide
  Antisense strand to SEQ ID NO: 1259854
aaacucauacuucuugggu

SEQ ID NO: 1259856 - RNA, 19 nt, Artificial Sequence
  Description of Artificial Sequence: Synthetic oligonucleotide
  Sense strand starting at position 3661 of SEQ ID NO: 1241275
caagaaguaugaguuugaa

SEQ ID NO: 1259857 - RNA, 19 nt, Artificial Sequence
  Description of Artificial Sequence: Synthetic oligonucleotide
  Antisense strand to SEQ ID NO: 1259856
uucaaacucauacuucuug

SEQ ID NO: 1259858 - RNA, 19 nt, Artificial Sequence
  Description of Artificial Sequence: Synthetic oligonucleotide
  Sense strand starting at position 3664 of SEQ ID NO: 1241275
gaaguaugaguuugaauua

SEQ ID NO: 1259859 - RNA, 19 nt, Artificial Sequence
  Description of Artificial Sequence: Synthetic oligonucleotide
  Antisense strand to SEQ ID NO: 1259858
uaauucaaacucauacuuc

SEQ ID NO: 1259860 - RNA, 19 nt, Artificial Sequence
  Description of Artificial Sequence: Synthetic oligonucleotide
  Sense strand starting at position 3696 of SEQ ID NO: 1241275
ccaauaaccucuuugaggu

SEQ ID NO: 1259861 - RNA, 19 nt, Artificial Sequence
  Description of Artificial Sequence: Synthetic oligonucleotide
  Antisense strand to SEQ ID NO: 1259860
accucaaagagguuauugg

SEQ ID NO: 1259862 - RNA, 19 nt, Artificial Sequence
  Description of Artificial Sequence: Synthetic oligonucleotide
  Sense strand starting at position 3760 of SEQ ID NO: 1241275
uuacaugcagccugauaaa

SEQ ID NO: 1259863 - RNA, 19 nt, Artificial Sequence
  Description of Artificial Sequence: Synthetic oligonucleotide
  Antisense strand to SEQ ID NO: 1259862
uuuaucaggcugcauguaa

SEQ ID NO: 1259864 - RNA, 19 nt, Artificial Sequence
  Description of Artificial Sequence: Synthetic oligonucleotide
  Sense strand starting at position 3793 of SEQ ID NO: 1241275
gcauguccugaacaagauu

SEQ ID NO: 1259865 - RNA, 19 nt, Artificial Sequence
  Description of Artificial Sequence: Synthetic oligonucleotide
  Antisense strand to SEQ ID NO: 1259864
aaucuuguucaggacaugc

SEQ ID NO: 1259866 - RNA, 19 nt, Artificial Sequence
  Description of Artificial Sequence: Synthetic oligonucleotide
  Sense strand starting at position 171 of SEQ ID NO: 1241276
uugugaucugaucagugca

SEQ ID NO: 1259867 - RNA, 19 nt, Artificial Sequence
  Description of Artificial Sequence: Synthetic oligonucleotide
  Antisense strand to SEQ ID NO: 1259866
ugcacugaucagaucacaa

SEQ ID NO: 1259868 - RNA, 19 nt, Artificial Sequence
  Description of Artificial Sequence: Synthetic oligonucleotide
  Sense strand starting at position 214 of SEQ ID NO: 1241276
cacccuguugggcaguaau

SEQ ID NO: 1259869 - RNA, 19 nt, Artificial Sequence
  Description of Artificial Sequence: Synthetic oligonucleotide
  Antisense strand to SEQ ID NO: 1259868
auuacugcccaacagggug

SEQ ID NO: 1259870 - RNA, 19 nt, Artificial Sequence
  Description of Artificial Sequence: Synthetic oligonucleotide
  Sense strand starting at position 217 of SEQ ID NO: 1241276
ccuguugggcaguaauaag

SEQ ID NO: 1259871 - RNA, 19 nt, Artificial Sequence
  Description of Artificial Sequence: Synthetic oligonucleotide
  Antisense strand to SEQ ID NO: 1259870
cuuauuacugcccaacagg

SEQ ID NO: 1259872 - RNA, 19 nt, Artificial Sequence
  Description of Artificial Sequence: Synthetic oligonucleotide
  Sense strand starting at position 465 of SEQ ID NO: 1241276
ugaauuauugaauguccca

SEQ ID NO: 1259873 - RNA, 19 nt, Artificial Sequence
  Description of Artificial Sequence: Synthetic oligonucleotide
  Antisense strand to SEQ ID NO: 1259872
ugggacauucaauaauuca

SEQ ID NO: 1259874 - RNA, 19 nt, Artificial Sequence
  Description of Artificial Sequence: Synthetic oligonucleotide
  Sense strand starting at position 472 of SEQ ID NO: 1241276
uugaaugucccacguggaa

SEQ ID NO: 1259875 - RNA, 19 nt, Artificial Sequence
  Description of Artificial Sequence: Synthetic oligonucleotide
  Antisense strand to SEQ ID NO: 1259874
uuccacgugggacauucaa

SEQ ID NO: 1259876 - RNA, 19 nt, Artificial Sequence
  Description of Artificial Sequence: Synthetic oligonucleotide
  Sense strand starting at position 552 of SEQ ID NO: 1241276
cuggaaaucugagcuuguu

SEQ ID NO: 1259877 - RNA, 19 nt, Artificial Sequence
  Description of Artificial Sequence: Synthetic oligonucleotide
  Antisense strand to SEQ ID NO: 1259876
aacaagcucagauuuccag

SEQ ID NO: 1259878 - RNA, 19 nt, Artificial Sequence
  Description of Artificial Sequence: Synthetic oligonucleotide
  Sense strand starting at position 555 of SEQ ID NO: 1241276
gaaaucugagcuuguuucu

SEQ ID NO: 1259879 - RNA, 19 nt, Artificial Sequence
  Description of Artificial Sequence: Synthetic oligonucleotide
  Antisense strand to SEQ ID NO: 1259878
agaaacaagcucagauuuc

SEQ ID NO: 1259880 - RNA, 19 nt, Artificial Sequence
  Description of Artificial Sequence: Synthetic oligonucleotide
  Sense strand starting at position 613 of SEQ ID NO: 1241276
ugaggaaaccuuuguguga

SEQ ID NO: 1259881 - RNA, 19 nt, Artificial Sequence
  Description of Artificial Sequence: Synthetic oligonucleotide
  Antisense strand to SEQ ID NO: 1259880
ucacacaaagguuuccuca

SEQ ID NO: 1259882 - RNA, 19 nt, Artificial Sequence
  Description of Artificial Sequence: Synthetic oligonucleotide
  Sense strand starting at position 617 of SEQ ID NO: 1241276
gaaaccuuugugugaccau

SEQ ID NO: 1259883 - RNA, 19 nt, Artificial Sequence
  Description of Artificial Sequence: Synthetic oligonucleotide
  Antisense strand to SEQ ID NO: 1259882
auggucacacaaagguuuc

SEQ ID NO: 1259884 - RNA, 19 nt, Artificial Sequence
  Description of Artificial Sequence: Synthetic oligonucleotide
  Sense strand starting at position 891 of SEQ ID NO: 1241276
auuguuuccugaucagcaa

SEQ ID NO: 1259885 - RNA, 19 nt, Artificial Sequence
  Description of Artificial Sequence: Synthetic oligonucleotide
  Antisense strand to SEQ ID NO: 1259884
uugcugaucaggaaacaau

SEQ ID NO: 1259886 - RNA, 19 nt, Artificial Sequence
  Description of Artificial Sequence: Synthetic oligonucleotide
  Sense strand starting at position 979 of SEQ ID NO: 1241276
uggugucccucucccaaua

SEQ ID NO: 1259887 - RNA, 19 nt, Artificial Sequence
  Description of Artificial Sequence: Synthetic oligonucleotide
  Antisense strand to SEQ ID NO: 1259886
uauugggagagggacacca

SEQ ID NO: 1259888 - RNA, 19 nt, Artificial Sequence
  Description of Artificial Sequence: Synthetic oligonucleotide
  Sense strand starting at position 1277 of SEQ ID NO: 1241276
ccacuaaccggccagaauu

SEQ ID NO: 1259889 - RNA, 19 nt, Artificial Sequence
  Description of Artificial Sequence: Synthetic oligonucleotide
  Antisense strand to SEQ ID NO: 1259888
aauucuggccgguuagugg

SEQ ID NO: 1259890 - RNA, 19 nt, Artificial Sequence
  Description of Artificial Sequence: Synthetic oligonucleotide
  Sense strand starting at position 1473 of SEQ ID NO: 1241276
acggcuuucccaggaggaa

SEQ ID NO: 1259891 - RNA, 19 nt, Artificial Sequence
  Description of Artificial Sequence: Synthetic oligonucleotide
  Antisense strand to SEQ ID NO: 1259890
uuccuccugggaaagccgu

SEQ ID NO: 1259892 - RNA, 19 nt, Artificial Sequence
  Description of Artificial Sequence: Synthetic oligonucleotide
  Sense strand starting at position 1510 of SEQ ID NO: 1241276
ugaaauagguucucuaacu

SEQ ID NO: 1259893 - RNA, 19 nt, Artificial Sequence
  Description of Artificial Sequence: Synthetic oligonucleotide
  Antisense strand to SEQ ID NO: 1259892
aguuagagaaccuauuuca

SEQ ID NO: 1259894 - RNA, 19 nt, Artificial Sequence
  Description of Artificial Sequence: Synthetic oligonucleotide
  Sense strand starting at position 1515 of SEQ ID NO: 1241276
uagguucucuaacuugagu

SEQ ID NO: 1259895 - RNA, 19 nt, Artificial Sequence
  Description of Artificial Sequence: Synthetic oligonucleotide
  Antisense strand to SEQ ID NO: 1259894
acucaaguuagagaaccua

SEQ ID NO: 1259896 - RNA, 19 nt, Artificial Sequence
  Description of Artificial Sequence: Synthetic oligonucleotide
  Sense strand starting at position 1518 of SEQ ID NO: 1241276
guucucuaacuugaguuua

SEQ ID NO: 1259897 - RNA, 19 nt, Artificial Sequence
  Description of Artificial Sequence: Synthetic oligonucleotide
  Antisense strand to SEQ ID NO: 1259896
uaaacucaaguuagagaac

SEQ ID NO: 1259898 - RNA, 19 nt, Artificial Sequence
  Description of Artificial Sequence: Synthetic oligonucleotide
  Sense strand starting at position 1528 of SEQ ID NO: 1241276
uugaguuuaccagguggca

SEQ ID NO: 1259899 - RNA, 19 nt, Artificial Sequence
  Description of Artificial Sequence: Synthetic oligonucleotide
  Antisense strand to SEQ ID NO: 1259898
ugccaccugguaaacucaa

SEQ ID NO: 1259900 - RNA, 19 nt, Artificial Sequence
  Description of Artificial Sequence: Synthetic oligonucleotide
  Sense strand starting at position 1559 of SEQ ID NO: 1241276
ugugauuucggcuggaaau

SEQ ID NO: 1259901 - RNA, 19 nt, Artificial Sequence
  Description of Artificial Sequence: Synthetic oligonucleotide
  Antisense strand to SEQ ID NO: 1259900
auuuccagccgaaaucaca

SEQ ID NO: 1259902 - RNA, 19 nt, Artificial Sequence
  Description of Artificial Sequence: Synthetic oligonucleotide
  Sense strand starting at position 1624 of SEQ ID NO: 1241276
gguguugcagcgaaagcaa

SEQ ID NO: 1259903 - RNA, 19 nt, Artificial Sequence
  Description of Artificial Sequence: Synthetic oligonucleotide
  Antisense strand to SEQ ID NO: 1259902
uugcuuucgcugcaacacc

SEQ ID NO: 1259904 - RNA, 19 nt, Artificial Sequence
  Description of Artificial Sequence: Synthetic oligonucleotide
  Sense strand starting at position 1661 of SEQ ID NO: 1241276
cgaaguuacgcccauuuau

SEQ ID NO: 1259905 - RNA, 19 nt, Artificial Sequence
  Description of Artificial Sequence: Synthetic oligonucleotide
  Antisense strand to SEQ ID NO: 1259904
auaaaugggcguaacuucg

SEQ ID NO: 1259906 - RNA, 19 nt, Artificial Sequence
  Description of Artificial Sequence: Synthetic oligonucleotide
  Sense strand starting at position 1695 of SEQ ID NO: 1241276
uuucuuucuugggugaaac

SEQ ID NO: 1259907 - RNA, 19 nt, Artificial Sequence
  Description of Artificial Sequence: Synthetic oligonucleotide
  Antisense strand to SEQ ID NO: 1259906
guuucacccaagaaagaaa

SEQ ID NO: 1259908 - RNA, 19 nt, Artificial Sequence
  Description of Artificial Sequence: Synthetic oligonucleotide
  Sense strand starting at position 1886 of SEQ ID NO: 1241276
ggcgcaaacacguccgauu

SEQ ID NO: 1259909 - RNA, 19 nt, Artificial Sequence
  Description of Artificial Sequence: Synthetic oligonucleotide
  Antisense strand to SEQ ID NO: 1259908
aaucggacguguuugcgcc

SEQ ID NO: 1259910 - RNA, 19 nt, Artificial Sequence
  Description of Artificial Sequence: Synthetic oligonucleotide
  Sense strand starting at position 1915 of SEQ ID NO: 1241276
auuccuuugcguuaggaac

SEQ ID NO: 1259911 - RNA, 19 nt, Artificial Sequence
  Description of Artificial Sequence: Synthetic oligonucleotide
  Antisense strand to SEQ ID NO: 1259910
guuccuaacgcaaaggaau

SEQ ID NO: 1259912 - RNA, 19 nt, Artificial Sequence
  Description of Artificial Sequence: Synthetic oligonucleotide
  Sense strand starting at position 1991 of SEQ ID NO: 1241276
agacgagaaugcgcugaau

SEQ ID NO: 1259913 - RNA, 19 nt, Artificial Sequence
  Description of Artificial Sequence: Synthetic oligonucleotide
  Antisense strand to SEQ ID NO: 1259912
auucagcgcauucucgucu

SEQ ID NO: 1259914 - RNA, 19 nt, Artificial Sequence
  Description of Artificial Sequence: Synthetic oligonucleotide
  Sense strand starting at position 1994 of SEQ ID NO: 1241276
cgagaaugcgcugaauuaa

SEQ ID NO: 1259915 - RNA, 19 nt, Artificial Sequence
  Description of Artificial Sequence: Synthetic oligonucleotide
  Antisense strand to SEQ ID NO: 1259914
uuaauucagcgcauucucg

SEQ ID NO: 1259916 - RNA, 19 nt, Artificial Sequence
  Description of Artificial Sequence: Synthetic oligonucleotide
  Sense strand starting at position 2402 of SEQ ID NO: 1241276
gcagaaauuggcuguugga

SEQ ID NO: 1259917 - RNA, 19 nt, Artificial Sequence
  Description of Artificial Sequence: Synthetic oligonucleotide
  Antisense strand to SEQ ID NO: 1259916
uccaacagccaauuucugc

SEQ ID NO: 1259918 - RNA, 19 nt, Artificial Sequence
  Description of Artificial Sequence: Synthetic oligonucleotide
  Sense strand starting at position 2692 of SEQ ID NO: 1241276
gccagcucgcucgcaaaua

SEQ ID NO: 1259919 - RNA, 19 nt, Artificial Sequence
  Description of Artificial Sequence: Synthetic oligonucleotide
  Antisense strand to SEQ ID NO: 1259918
uauuugcgagcgagcuggc

SEQ ID NO: 1259920 - RNA, 19 nt, Artificial Sequence
  Description of Artificial Sequence: Synthetic oligonucleotide
  Sense strand starting at position 2830 of SEQ ID NO: 1241276
gcuccaacuccggaagguu

SEQ ID NO: 1259921 - RNA, 19 nt, Artificial Sequence
  Description of Artificial Sequence: Synthetic oligonucleotide
  Antisense strand to SEQ ID NO: 1259920
aaccuuccggaguuggagc

SEQ ID NO: 1259922 - RNA, 19 nt, Artificial Sequence
  Description of Artificial Sequence: Synthetic oligonucleotide
  Sense strand starting at position 2838 of SEQ ID NO: 1241276
uccggaagguuugcacaaa

SEQ ID NO: 1259923 - RNA, 19 nt, Artificial Sequence
  Description of Artificial Sequence: Synthetic oligonucleotide
  Antisense strand to SEQ ID NO: 1259922
uuugugcaaaccuuccgga

SEQ ID NO: 1259924 - RNA, 19 nt, Artificial Sequence
  Description of Artificial Sequence: Synthetic oligonucleotide
  Sense strand starting at position 3167 of SEQ ID NO: 1241276
ucugcaauuuagcagaaca

SEQ ID NO: 1259925 - RNA, 19 nt, Artificial Sequence
  Description of Artificial Sequence: Synthetic oligonucleotide
  Antisense strand to SEQ ID NO: 1259924
uguucugcuaaauugcaga

SEQ ID NO: 1259926 - RNA, 19 nt, Artificial Sequence
  Description of Artificial Sequence: Synthetic oligonucleotide
  Sense strand starting at position 3365 of SEQ ID NO: 1241276
auugaaaccacgcggaaua

SEQ ID NO: 1259927 - RNA, 19 nt, Artificial Sequence
  Description of Artificial Sequence: Synthetic oligonucleotide
  Antisense strand to SEQ ID NO: 1259926
uauuccgcgugguuucaau

SEQ ID NO: 1259928 - RNA, 19 nt, Artificial Sequence
  Description of Artificial Sequence: Synthetic oligonucleotide
  Sense strand starting at position 3454 of SEQ ID NO: 1241276
acagaauauugucucagag

SEQ ID NO: 1259929 - RNA, 19 nt, Artificial Sequence
  Description of Artificial Sequence: Synthetic oligonucleotide
  Antisense strand to SEQ ID NO: 1259928
cucugagacaauauucugu

SEQ ID NO: 1259930 - RNA, 19 nt, Artificial Sequence
  Description of Artificial Sequence: Synthetic oligonucleotide
  Sense strand starting at position 3581 of SEQ ID NO: 1241276
uaguuauuaggagagcugu

SEQ ID NO: 1259931 - RNA, 19 nt, Artificial Sequence
  Description of Artificial Sequence: Synthetic oligonucleotide
  Antisense strand to SEQ ID NO: 1259930
acagcucuccuaauaacua

SEQ ID NO: 1259932 - RNA, 19 nt, Artificial Sequence
  Description of Artificial Sequence: Synthetic oligonucleotide
  Sense strand starting at position 3711 of SEQ ID NO: 1241276
agaguauuauaguuugguu

SEQ ID NO: 1259933 - RNA, 19 nt, Artificial Sequence
  Description of Artificial Sequence: Synthetic oligonucleotide
  Antisense strand to SEQ ID NO: 1259932
aaccaaacuauaauacucu

SEQ ID NO: 1259934 - RNA, 19 nt, Artificial Sequence
  Description of Artificial Sequence: Synthetic oligonucleotide
  Sense strand starting at position 3766 of SEQ ID NO: 1241276
ugcgcucccggacagaaau

SEQ ID NO: 1259935 - RNA, 19 nt, Artificial Sequence
  Description of Artificial Sequence: Synthetic oligonucleotide
  Antisense strand to SEQ ID NO: 1259934
auuucuguccgggagcgca

SEQ ID NO: 1259936 - RNA, 19 nt, Artificial Sequence
  Description of Artificial Sequence: Synthetic oligonucleotide
  Sense strand starting at position 3902 of SEQ ID NO: 1241276
ugccguuucguguuaacaa

SEQ ID NO: 1259937 - RNA, 19 nt, Artificial Sequence
  Description of Artificial Sequence: Synthetic oligonucleotide
  Antisense strand to SEQ ID NO: 1259936
uuguuaacacgaaacggca

SEQ ID NO: 1259938 - RNA, 19 nt, Artificial Sequence
  Description of Artificial Sequence: Synthetic oligonucleotide
  Sense strand starting at position 3930 of SEQ ID NO: 1241276
ugugcucugccguuugcua

SEQ ID NO: 1259939 - RNA, 19 nt, Artificial Sequence
  Description of Artificial Sequence: Synthetic oligonucleotide
  Antisense strand to SEQ ID NO: 1259938
uagcaaacggcagagcaca

SEQ ID NO: 1259940 - RNA, 19 nt, Artificial Sequence
  Description of Artificial Sequence: Synthetic oligonucleotide
  Sense strand starting at position 3931 of SEQ ID NO: 1241276
gugcucugccguuugcuaa

SEQ ID NO: 1259941 - RNA, 19 nt, Artificial Sequence
  Description of Artificial Sequence: Synthetic oligonucleotide
  Antisense strand to SEQ ID NO: 1259940
uuagcaaacggcagagcac

SEQ ID NO: 1259942 - RNA, 19 nt, Artificial Sequence
  Description of Artificial Sequence: Synthetic oligonucleotide
  Sense strand starting at position 3974 of SEQ ID NO: 1241276
auauucuuauucccgaagu

SEQ ID NO: 1259943 - RNA, 19 nt, Artificial Sequence
  Description of Artificial Sequence: Synthetic oligonucleotide
  Antisense strand to SEQ ID NO: 1259942
acuucgggaauaagaauau

SEQ ID NO: 1259944 - RNA, 19 nt, Artificial Sequence
  Description of Artificial Sequence: Synthetic oligonucleotide
  Sense strand starting at position 3976 of SEQ ID NO: 1241276
auucuuauucccgaagugu

SEQ ID NO: 1259945 - RNA, 19 nt, Artificial Sequence
  Description of Artificial Sequence: Synthetic oligonucleotide
  Antisense strand to SEQ ID NO: 1259944
acacuucgggaauaagaau

SEQ ID NO: 1259946 - RNA, 19 nt, Artificial Sequence
  Description of Artificial Sequence: Synthetic oligonucleotide
  Sense strand starting at position 496 of SEQ ID NO: 1241277
gugaauuucugggaaagga

SEQ ID NO: 1259947 - RNA, 19 nt, Artificial Sequence
  Description of Artificial Sequence: Synthetic oligonucleotide
  Antisense strand to SEQ ID NO: 1259946
uccuuucccagaaauucac

SEQ ID NO: 1259948 - RNA, 19 nt, Artificial Sequence
  Description of Artificial Sequence: Synthetic oligonucleotide
  Sense strand starting at position 887 of SEQ ID NO: 1241277
gggcgacagaucgagaauu

SEQ ID NO: 1259949 - RNA, 19 nt, Artificial Sequence
  Description of Artificial Sequence: Synthetic oligonucleotide
  Antisense strand to SEQ ID NO: 1259948
aauucucgaucugucgccc

SEQ ID NO: 1259950 - RNA, 19 nt, Artificial Sequence
  Description of Artificial Sequence: Synthetic oligonucleotide
  Sense strand starting at position 889 of SEQ ID NO: 1241277
gcgacagaucgagaauuca

SEQ ID NO: 1259951 - RNA, 19 nt, Artificial Sequence
  Description of Artificial Sequence: Synthetic oligonucleotide
  Antisense strand to SEQ ID NO: 1259950
ugaauucucgaucugucgc

SEQ ID NO: 1259952 - RNA, 19 nt, Artificial Sequence
  Description of Artificial Sequence: Synthetic oligonucleotide
  Sense strand starting at position 1051 of SEQ ID NO: 1241277
gaaguuucugaguaucuac

SEQ ID NO: 1259953 - RNA, 19 nt, Artificial Sequence
  Description of Artificial Sequence: Synthetic oligonucleotide
  Antisense strand to SEQ ID NO: 1259952
guagauacucagaaacuuc

SEQ ID NO: 1259954 - RNA, 19 nt, Artificial Sequence
  Description of Artificial Sequence: Synthetic oligonucleotide
  Sense strand starting at position 1246 of SEQ ID NO: 1241277
uuuggagaaauguguuuga

SEQ ID NO: 1259955 - RNA, 19 nt, Artificial Sequence
  Description of Artificial Sequence: Synthetic oligonucleotide
  Antisense strand to SEQ ID NO: 1259954
ucaaacacauuucuccaaa

SEQ ID NO: 1259956 - RNA, 19 nt, Artificial Sequence
  Description of Artificial Sequence: Synthetic oligonucleotide
  Sense strand starting at position 1249 of SEQ ID NO: 1241277
ggagaaauguguuugauaa

SEQ ID NO: 1259957 - RNA, 19 nt, Artificial Sequence
  Description of Artificial Sequence: Synthetic oligonucleotide
  Antisense strand to SEQ ID NO: 1259956
uuaucaaacacauuucucc

SEQ ID NO: 1259958 - RNA, 19 nt, Artificial Sequence
  Description of Artificial Sequence: Synthetic oligonucleotide
  Sense strand starting at position 1250 of SEQ ID NO: 1241277
gagaaauguguuugauaag

SEQ ID NO: 1259959 - RNA, 19 nt, Artificial Sequence
  Description of Artificial Sequence: Synthetic oligonucleotide
  Antisense strand to SEQ ID NO: 1259958
cuuaucaaacacauuucuc

SEQ ID NO: 1259960 - RNA, 19 nt, Artificial Sequence
  Description of Artificial Sequence: Synthetic oligonucleotide
  Sense strand starting at position 1303 of SEQ ID NO: 1241277
ucaguuggaaauuggucaa

SEQ ID NO: 1259961 - RNA, 19 nt, Artificial Sequence
  Description of Artificial Sequence: Synthetic oligonucleotide
  Antisense strand to SEQ ID NO: 1259960
uugaccaauuuccaacuga

SEQ ID NO: 1259962 - RNA, 19 nt, Artificial Sequence
  Description of Artificial Sequence: Synthetic oligonucleotide
  Sense strand starting at position 1344 of SEQ ID NO: 1241277
auagaauuguuucuuagga

SEQ ID NO: 1259963 - RNA, 19 nt, Artificial Sequence
  Description of Artificial Sequence: Synthetic oligonucleotide
  Antisense strand to SEQ ID NO: 1259962
uccuaagaaacaauucuau

SEQ ID NO: 1259964 - RNA, 19 nt, Artificial Sequence
  Description of Artificial Sequence: Synthetic oligonucleotide
  Sense strand starting at position 1345 of SEQ ID NO: 1241277
uagaauuguuucuuaggaa

SEQ ID NO: 1259965 - RNA, 19 nt, Artificial Sequence
  Description of Artificial Sequence: Synthetic oligonucleotide
  Antisense strand to SEQ ID NO: 1259964
uuccuaagaaacaauucua

SEQ ID NO: 1259966 - RNA, 19 nt, Artificial Sequence
  Description of Artificial Sequence: Synthetic oligonucleotide
  Sense strand starting at position 1732 of SEQ ID NO: 1241277
ggacgagucaccgagacaa

SEQ ID NO: 1259967 - RNA, 19 nt, Artificial Sequence
  Description of Artificial Sequence: Synthetic oligonucleotide
  Antisense strand to SEQ ID NO: 1259966
uugucucggugacucgucc

SEQ ID NO: 1259968 - RNA, 19 nt, Artificial Sequence
  Description of Artificial Sequence: Synthetic oligonucleotide
  Sense strand starting at position 2242 of SEQ ID NO: 1241277
cagaaagcuuagguuccaa

SEQ ID NO: 1259969 - RNA, 19 nt, Artificial Sequence
  Description of Artificial Sequence: Synthetic oligonucleotide
  Antisense strand to SEQ ID NO: 1259968
uuggaaccuaagcuuucug

SEQ ID NO: 1259970 - RNA, 19 nt, Artificial Sequence
  Description of Artificial Sequence: Synthetic oligonucleotide
  Sense strand starting at position 2295 of SEQ ID NO: 1241277
ucauguuaugcccauauga

SEQ ID NO: 1259971 - RNA, 19 nt, Artificial Sequence
  Description of Artificial Sequence: Synthetic oligonucleotide
  Antisense strand to SEQ ID NO: 1259970
ucauaugggcauaacauga

SEQ ID NO: 1259972 - RNA, 19 nt, Artificial Sequence
  Description of Artificial Sequence: Synthetic oligonucleotide
  Sense strand starting at position 2297 of SEQ ID NO: 1241277
auguuaugcccauaugaaa

SEQ ID NO: 1259973 - RNA, 19 nt, Artificial Sequence
  Description of Artificial Sequence: Synthetic oligonucleotide
  Antisense strand to SEQ ID NO: 1259972
uuucauaugggcauaacau

SEQ ID NO: 1259974 - RNA, 19 nt, Artificial Sequence
  Description of Artificial Sequence: Synthetic oligonucleotide
  Sense strand starting at position 2430 of SEQ ID NO: 1241277
ucgggaaugccauaaauua

SEQ ID NO: 1259975 - RNA, 19 nt, Artificial Sequence
  Description of Artificial Sequence: Synthetic oligonucleotide
  Antisense strand to SEQ ID NO: 1259974
uaauuuauggcauucccga

SEQ ID NO: 1259976 - RNA, 19 nt, Artificial Sequence
  Description of Artificial Sequence: Synthetic oligonucleotide
  Sense strand starting at position 2475 of SEQ ID NO: 1241277
auugguaugcuauacgaau

SEQ ID NO: 1259977 - RNA, 19 nt, Artificial Sequence
  Description of Artificial Sequence: Synthetic oligonucleotide
  Antisense strand to SEQ ID NO: 1259976
auucguauagcauaccaau

SEQ ID NO: 1259978 - RNA, 19 nt, Artificial Sequence
  Description of Artificial Sequence: Synthetic oligonucleotide
  Sense strand starting at position 2481 of SEQ ID NO: 1241277
augcuauacgaauacacau

SEQ ID NO: 1259979 - RNA, 19 nt, Artificial Sequence
  Description of Artificial Sequence: Synthetic oligonucleotide
  Antisense strand to SEQ ID NO: 1259978
auguguauucguauagcau

SEQ ID NO: 1259980 - RNA, 19 nt, Artificial Sequence
  Description of Artificial Sequence: Synthetic oligonucleotide
  Sense strand starting at position 2502 of SEQ ID NO: 1241277
uuuagaagauauccuuguu

SEQ ID NO: 1259981 - RNA, 19 nt, Artificial Sequence
  Description of Artificial Sequence: Synthetic oligonucleotide
  Antisense strand to SEQ ID NO: 1259980
aacaaggauaucuucuaaa

SEQ ID NO: 1259982 - RNA, 19 nt, Artificial Sequence
  Description of Artificial Sequence: Synthetic oligonucleotide
  Sense strand starting at position 2527 of SEQ ID NO: 1241277
guucuuauccaagaaagua

SEQ ID NO: 1259983 - RNA, 19 nt, Artificial Sequence
  Description of Artificial Sequence: Synthetic oligonucleotide
  Antisense strand to SEQ ID NO: 1259982
uacuuucuuggauaagaac

SEQ ID NO: 1259984 - RNA, 19 nt, Artificial Sequence
  Description of Artificial Sequence: Synthetic oligonucleotide
  Sense strand starting at position 2853 of SEQ ID NO: 1241277
agaugacaucacugacagu

SEQ ID NO: 1259985 - RNA, 19 nt, Artificial Sequence
  Description of Artificial Sequence: Synthetic oligonucleotide
  Antisense strand to SEQ ID NO: 1259984
acugucagugaugucaucu

SEQ ID NO: 1259986 - RNA, 19 nt, Artificial Sequence
  Description of Artificial Sequence: Synthetic oligonucleotide
  Sense strand starting at position 2871 of SEQ ID NO: 1241277
uguugcuauccauacaaag

SEQ ID NO: 1259987 - RNA, 19 nt, Artificial Sequence
  Description of Artificial Sequence: Synthetic oligonucleotide
  Antisense strand to SEQ ID NO: 1259986
cuuuguauggauagcaaca

SEQ ID NO: 1259988 - RNA, 19 nt, Artificial Sequence
  Description of Artificial Sequence: Synthetic oligonucleotide
  Sense strand starting at position 2886 of SEQ ID NO: 1241277
aaaguagugugacugaaga

SEQ ID NO: 1259989 - RNA, 19 nt, Artificial Sequence
  Description of Artificial Sequence: Synthetic oligonucleotide
  Antisense strand to SEQ ID NO: 1259988
ucuucagucacacuacuuu

SEQ ID NO: 1259990 - RNA, 19 nt, Artificial Sequence
  Description of Artificial Sequence: Synthetic oligonucleotide
  Sense strand starting at position 2953 of SEQ ID NO: 1241277
gcuuguuugcugguuaucu

SEQ ID NO: 1259991 - RNA, 19 nt, Artificial Sequence
  Description of Artificial Sequence: Synthetic oligonucleotide
  Antisense strand to SEQ ID NO: 1259990
agauaaccagcaaacaagc

SEQ ID NO: 1259992 - RNA, 19 nt, Artificial Sequence
  Description of Artificial Sequence: Synthetic oligonucleotide
  Sense strand starting at position 2961 of SEQ ID NO: 1241277
gcugguuaucuugcagcca

SEQ ID NO: 1259993 - RNA, 19 nt, Artificial Sequence
  Description of Artificial Sequence: Synthetic oligonucleotide
  Antisense strand to SEQ ID NO: 1259992
uggcugcaagauaaccagc

SEQ ID NO: 1259994 - RNA, 19 nt, Artificial Sequence
  Description of Artificial Sequence: Synthetic oligonucleotide
  Sense strand starting at position 3041 of SEQ ID NO: 1241277
cagggauuccaacaguugu

SEQ ID NO: 1259995 - RNA, 19 nt, Artificial Sequence
  Description of Artificial Sequence: Synthetic oligonucleotide
  Antisense strand to SEQ ID NO: 1259994
acaacuguuggaaucccug

SEQ ID NO: 1259996 - RNA, 19 nt, Artificial Sequence
  Description of Artificial Sequence: Synthetic oligonucleotide
  Sense strand starting at position 3057 of SEQ ID NO: 1241277
uguugacauuugucugcaa

SEQ ID NO: 1259997 - RNA, 19 nt, Artificial Sequence
  Description of Artificial Sequence: Synthetic oligonucleotide
  Antisense strand to SEQ ID NO: 1259996
uugcagacaaaugucaaca

SEQ ID NO: 1259998 - RNA, 19 nt, Artificial Sequence
  Description of Artificial Sequence: Synthetic oligonucleotide
  Sense strand starting at position 3058 of SEQ ID NO: 1241277
guugacauuugucugcaaa

SEQ ID NO: 1259999 - RNA, 19 nt, Artificial Sequence
  Description of Artificial Sequence: Synthetic oligonucleotide
  Antisense strand to SEQ ID NO: 1259998
uuugcagacaaaugucaac

SEQ ID NO: 1260000 - RNA, 19 nt, Artificial Sequence
  Description of Artificial Sequence: Synthetic oligonucleotide
  Sense strand starting at position 3060 of SEQ ID NO: 1241277
ugacauuugucugcaaagc

SEQ ID NO: 1260001 - RNA, 19 nt, Artificial Sequence
  Description of Artificial Sequence: Synthetic oligonucleotide
  Antisense strand to SEQ ID NO: 1260000
gcuuugcagacaaauguca

SEQ ID NO: 1260002 - RNA, 19 nt, Artificial Sequence
  Description of Artificial Sequence: Synthetic oligonucleotide
  Sense strand starting at position 3203 of SEQ ID NO: 1241277
agcuaugucccagaauaag

SEQ ID NO: 1260003 - RNA, 19 nt, Artificial Sequence
  Description of Artificial Sequence: Synthetic oligonucleotide
  Antisense strand to SEQ ID NO: 1260002
cuuauucugggacauagcu

SEQ ID NO: 1260004 - RNA, 19 nt, Artificial Sequence
  Description of Artificial Sequence: Synthetic oligonucleotide
  Sense strand starting at position 3310 of SEQ ID NO: 1241277
cagagaggguuucuuuaac

SEQ ID NO: 1260005 - RNA, 19 nt, Artificial Sequence
  Description of Artificial Sequence: Synthetic oligonucleotide
  Antisense strand to SEQ ID NO: 1260004
guuaaagaaacccucucug

SEQ ID NO: 1260006 - RNA, 19 nt, Artificial Sequence
  Description of Artificial Sequence: Synthetic oligonucleotide
  Sense strand starting at position 3341 of SEQ ID NO: 1241277
ccuuccugugaguagaaua

SEQ ID NO: 1260007 - RNA, 19 nt, Artificial Sequence
  Description of Artificial Sequence: Synthetic oligonucleotide
  Antisense strand to SEQ ID NO: 1260006
uauucuacucacaggaagg

SEQ ID NO: 1260008 - RNA, 19 nt, Artificial Sequence
  Description of Artificial Sequence: Synthetic oligonucleotide
  Sense strand starting at position 3415 of SEQ ID NO: 1241277
ccuccuauugagugaggau

SEQ ID NO: 1260009 - RNA, 19 nt, Artificial Sequence
  Description of Artificial Sequence: Synthetic oligonucleotide
  Antisense strand to SEQ ID NO: 1260008
auccucacucaauaggagg

SEQ ID NO: 1260010 - RNA, 19 nt, Artificial Sequence
  Description of Artificial Sequence: Synthetic oligonucleotide
  Sense strand starting at position 3464 of SEQ ID NO: 1241277
ggcuguggcucacuuauuu

SEQ ID NO: 1260011 - RNA, 19 nt, Artificial Sequence
  Description of Artificial Sequence: Synthetic oligonucleotide
  Antisense strand to SEQ ID NO: 1260010
aaauaagugagccacagcc

SEQ ID NO: 1260012 - RNA, 19 nt, Artificial Sequence
  Description of Artificial Sequence: Synthetic oligonucleotide
  Sense strand starting at position 3528 of SEQ ID NO: 1241277
agcauuuccuuucuguauu

SEQ ID NO: 1260013 - RNA, 19 nt, Artificial Sequence
  Description of Artificial Sequence: Synthetic oligonucleotide
  Antisense strand to SEQ ID NO: 1260012
aauacagaaaggaaaugcu

SEQ ID NO: 1260014 - RNA, 19 nt, Artificial Sequence
  Description of Artificial Sequence: Synthetic oligonucleotide
  Sense strand starting at position 3592 of SEQ ID NO: 1241277
gaaggacaugcaugcaaua

SEQ ID NO: 1260015 - RNA, 19 nt, Artificial Sequence
  Description of Artificial Sequence: Synthetic oligonucleotide
  Antisense strand to SEQ ID NO: 1260014
uauugcaugcauguccuuc

SEQ ID NO: 1260016 - RNA, 19 nt, Artificial Sequence
  Description of Artificial Sequence: Synthetic oligonucleotide
  Sense strand starting at position 3654 of SEQ ID NO: 1241277
gaauuaugucaguaagcca

SEQ ID NO: 1260017 - RNA, 19 nt, Artificial Sequence
  Description of Artificial Sequence: Synthetic oligonucleotide
  Antisense strand to SEQ ID NO: 1260016
uggcuuacugacauaauuc

SEQ ID NO: 1260018 - RNA, 19 nt, Artificial Sequence
  Description of Artificial Sequence: Synthetic oligonucleotide
  Sense strand starting at position 3868 of SEQ ID NO: 1241277
uuaaguuggcuuuacaaga

SEQ ID NO: 1260019 - RNA, 19 nt, Artificial Sequence
  Description of Artificial Sequence: Synthetic oligonucleotide
  Antisense strand to SEQ ID NO: 1260018
ucuuguaaagccaacuuaa

SEQ ID NO: 1260020 - RNA, 19 nt, Artificial Sequence
  Description of Artificial Sequence: Synthetic oligonucleotide
  Sense strand starting at position 3894 of SEQ ID NO: 1241277
gguucacuggaaugugaga

SEQ ID NO: 1260021 - RNA, 19 nt, Artificial Sequence
  Description of Artificial Sequence: Synthetic oligonucleotide
  Antisense strand to SEQ ID NO: 1260020
ucucacauuccagugaacc

SEQ ID NO: 1260022 - RNA, 19 nt, Artificial Sequence
  Description of Artificial Sequence: Synthetic oligonucleotide
  Sense strand starting at position 3901 of SEQ ID NO: 1241277
uggaaugugagagagcuuu

SEQ ID NO: 1260023 - RNA, 19 nt, Artificial Sequence
  Description of Artificial Sequence: Synthetic oligonucleotide
  Antisense strand to SEQ ID NO: 1260022
aaagcucucucacauucca

SEQ ID NO: 1260024 - RNA, 19 nt, Artificial Sequence
  Description of Artificial Sequence: Synthetic oligonucleotide
  Sense strand starting at position 3922 of SEQ ID NO: 1241277
cuugucauuguaugagaaa

SEQ ID NO: 1260025 - RNA, 19 nt, Artificial Sequence
  Description of Artificial Sequence: Synthetic oligonucleotide
  Antisense strand to SEQ ID NO: 1260024
uuucucauacaaugacaag

SEQ ID NO: 1260026 - RNA, 19 nt, Artificial Sequence
  Description of Artificial Sequence: Synthetic oligonucleotide
  Sense strand starting at position 2 of SEQ ID NO: 1241278
ugauuauaucugggucaaa

SEQ ID NO: 1260027 - RNA, 19 nt, Artificial Sequence
  Description of Artificial Sequence: Synthetic oligonucleotide
  Antisense strand to SEQ ID NO: 1260026
uuugacccagauauaauca

SEQ ID NO: 1260028 - RNA, 19 nt, Artificial Sequence
  Description of Artificial Sequence: Synthetic oligonucleotide
  Sense strand starting at position 3 of SEQ ID NO: 1241278
gauuauaucugggucaaac

SEQ ID NO: 1260029 - RNA, 19 nt, Artificial Sequence
  Description of Artificial Sequence: Synthetic oligonucleotide
  Antisense strand to SEQ ID NO: 1260028
guuugacccagauauaauc

SEQ ID NO: 1260030 - RNA, 19 nt, Artificial Sequence
  Description of Artificial Sequence: Synthetic oligonucleotide
  Sense strand starting at position 39 of SEQ ID NO: 1241278
acuuuagcuguauaguaca

SEQ ID NO: 1260031 - RNA, 19 nt, Artificial Sequence
  Description of Artificial Sequence: Synthetic oligonucleotide
  Antisense strand to SEQ ID NO: 1260030
uguacuauacagcuaaagu

SEQ ID NO: 1260032 - RNA, 19 nt, Artificial Sequence
  Description of Artificial Sequence: Synthetic oligonucleotide
  Sense strand starting at position 126 of SEQ ID NO: 1241278
guggcuuccacuuaggaau

SEQ ID NO: 1260033 - RNA, 19 nt, Artificial Sequence
  Description of Artificial Sequence: Synthetic oligonucleotide
  Antisense strand to SEQ ID NO: 1260032
auuccuaaguggaagccac

SEQ ID NO: 1260034 - RNA, 19 nt, Artificial Sequence
  Description of Artificial Sequence: Synthetic oligonucleotide
  Sense strand starting at position 208 of SEQ ID NO: 1241278
ugguuuauuugccuugaac

SEQ ID NO: 1260035 - RNA, 19 nt, Artificial Sequence
  Description of Artificial Sequence: Synthetic oligonucleotide
  Antisense strand to SEQ ID NO: 1260034
guucaaggcaaauaaacca

SEQ ID NO: 1260036 - RNA, 19 nt, Artificial Sequence
  Description of Artificial Sequence: Synthetic oligonucleotide
  Sense strand starting at position 210 of SEQ ID NO: 1241278
guuuauuugccuugaacau

SEQ ID NO: 1260037 - RNA, 19 nt, Artificial Sequence
  Description of Artificial Sequence: Synthetic oligonucleotide
  Antisense strand to SEQ ID NO: 1260036
auguucaaggcaaauaaac

SEQ ID NO: 1260038 - RNA, 19 nt, Artificial Sequence
  Description of Artificial Sequence: Synthetic oligonucleotide
  Sense strand starting at position 221 of SEQ ID NO: 1241278
uugaacauuccacguggau

SEQ ID NO: 1260039 - RNA, 19 nt, Artificial Sequence
  Description of Artificial Sequence: Synthetic oligonucleotide
  Antisense strand to SEQ ID NO: 1260038
auccacguggaauguucaa

SEQ ID NO: 1260040 - RNA, 19 nt, Artificial Sequence
  Description of Artificial Sequence: Synthetic oligonucleotide
  Sense strand starting at position 297 of SEQ ID NO: 1241278
agggaagcaucuucugagu

SEQ ID NO: 1260041 - RNA, 19 nt, Artificial Sequence
  Description of Artificial Sequence: Synthetic oligonucleotide
  Antisense strand to SEQ ID NO: 1260040
acucagaagaugcuucccu

SEQ ID NO: 1260042 - RNA, 19 nt, Artificial Sequence
  Description of Artificial Sequence: Synthetic oligonucleotide
  Sense strand starting at position 302 of SEQ ID NO: 1241278
agcaucuucugaguaagaa

SEQ ID NO: 1260043 - RNA, 19 nt, Artificial Sequence
  Description of Artificial Sequence: Synthetic oligonucleotide
  Antisense strand to SEQ ID NO: 1260042
uucuuacucagaagaugcu

SEQ ID NO: 1260044 - RNA, 19 nt, Artificial Sequence
  Description of Artificial Sequence: Synthetic oligonucleotide
  Sense strand starting at position 303 of SEQ ID NO: 1241278
gcaucuucugaguaagaau

SEQ ID NO: 1260045 - RNA, 19 nt, Artificial Sequence
  Description of Artificial Sequence: Synthetic oligonucleotide
  Antisense strand to SEQ ID NO: 1260044
auucuuacucagaagaugc

SEQ ID NO: 1260046 - RNA, 19 nt, Artificial Sequence
  Description of Artificial Sequence: Synthetic oligonucleotide
  Sense strand starting at position 312 of SEQ ID NO: 1241278
gaguaagaauagccuuuga

SEQ ID NO: 1260047 - RNA, 19 nt, Artificial Sequence
  Description of Artificial Sequence: Synthetic oligonucleotide
  Antisense strand to SEQ ID NO: 1260046
ucaaaggcuauucuuacuc

SEQ ID NO: 1260048 - RNA, 19 nt, Artificial Sequence
  Description of Artificial Sequence: Synthetic oligonucleotide
  Sense strand starting at position 481 of SEQ ID NO: 1241278
uggacaucauccuuagguu

SEQ ID NO: 1260049 - RNA, 19 nt, Artificial Sequence
  Description of Artificial Sequence: Synthetic oligonucleotide
  Antisense strand to SEQ ID NO: 1260048
aaccuaaggaugaugucca

SEQ ID NO: 1260050 - RNA, 19 nt, Artificial Sequence
  Description of Artificial Sequence: Synthetic oligonucleotide
  Sense strand starting at position 518 of SEQ ID NO: 1241278
acccaaagugguuguaaug

SEQ ID NO: 1260051 - RNA, 19 nt, Artificial Sequence
  Description of Artificial Sequence: Synthetic oligonucleotide
  Antisense strand to SEQ ID NO: 1260050
cauuacaaccacuuugggu

SEQ ID NO: 1260052 - RNA, 19 nt, Artificial Sequence
  Description of Artificial Sequence: Synthetic oligonucleotide
  Sense strand starting at position 528 of SEQ ID NO: 1241278
guuguaaugggcuacaaag

SEQ ID NO: 1260053 - RNA, 19 nt, Artificial Sequence
  Description of Artificial Sequence: Synthetic oligonucleotide
  Antisense strand to SEQ ID NO: 1260052
cuuuguagcccauuacaac

SEQ ID NO: 1260054 - RNA, 19 nt, Artificial Sequence
  Description of Artificial Sequence: Synthetic oligonucleotide
  Sense strand starting at position 539 of SEQ ID NO: 1241278
cuacaaagugguuguaaug

SEQ ID NO: 1260055 - RNA, 19 nt, Artificial Sequence
  Description of Artificial Sequence: Synthetic oligonucleotide
  Antisense strand to SEQ ID NO: 1260054
cauuacaaccacuuuguag

SEQ ID NO: 1260056 - RNA, 19 nt, Artificial Sequence
  Description of Artificial Sequence: Synthetic oligonucleotide
  Sense strand starting at position 623 of SEQ ID NO: 1241278
cgaucauuauuugaggaga

SEQ ID NO: 1260057 - RNA, 19 nt, Artificial Sequence
  Description of Artificial Sequence: Synthetic oligonucleotide
  Antisense strand to SEQ ID NO: 1260056
ucuccucaaauaaugaucg

SEQ ID NO: 1260058 - RNA, 19 nt, Artificial Sequence
  Description of Artificial Sequence: Synthetic oligonucleotide
  Sense strand starting at position 625 of SEQ ID NO: 1241278
aucauuauuugaggagaca

SEQ ID NO: 1260059 - RNA, 19 nt, Artificial Sequence
  Description of Artificial Sequence: Synthetic oligonucleotide
  Antisense strand to SEQ ID NO: 1260058
ugucuccucaaauaaugau

SEQ ID NO: 1260060 - RNA, 19 nt, Artificial Sequence
  Description of Artificial Sequence: Synthetic oligonucleotide
  Sense strand starting at position 736 of SEQ ID NO: 1241278
auuacaggguuaucauuaa

SEQ ID NO: 1260061 - RNA, 19 nt, Artificial Sequence
  Description of Artificial Sequence: Synthetic oligonucleotide
  Antisense strand to SEQ ID NO: 1260060
uuaaugauaacccuguaau

SEQ ID NO: 1260062 - RNA, 19 nt, Artificial Sequence
  Description of Artificial Sequence: Synthetic oligonucleotide
  Sense strand starting at position 854 of SEQ ID NO: 1241278
uggugaccuugggugaaau

SEQ ID NO: 1260063 - RNA, 19 nt, Artificial Sequence
  Description of Artificial Sequence: Synthetic oligonucleotide
  Antisense strand to SEQ ID NO: 1260062
auuucacccaaggucacca

SEQ ID NO: 1260064 - RNA, 19 nt, Artificial Sequence
  Description of Artificial Sequence: Synthetic oligonucleotide
  Sense strand starting at position 855 of SEQ ID NO: 1241278
ggugaccuugggugaaauc

SEQ ID NO: 1260065 - RNA, 19 nt, Artificial Sequence
  Description of Artificial Sequence: Synthetic oligonucleotide
  Antisense strand to SEQ ID NO: 1260064
gauuucacccaaggucacc

SEQ ID NO: 1260066 - RNA, 19 nt, Artificial Sequence
  Description of Artificial Sequence: Synthetic oligonucleotide
  Sense strand starting at position 856 of SEQ ID NO: 1241278
gugaccuugggugaaauca

SEQ ID NO: 1260067 - RNA, 19 nt, Artificial Sequence
  Description of Artificial Sequence: Synthetic oligonucleotide
  Antisense strand to SEQ ID NO: 1260066
ugauuucacccaaggucac

SEQ ID NO: 1260068 - RNA, 19 nt, Artificial Sequence
  Description of Artificial Sequence: Synthetic oligonucleotide
  Sense strand starting at position 2303 of SEQ ID NO: 1241278
uauagugaaucagugaugu

SEQ ID NO: 1260069 - RNA, 19 nt, Artificial Sequence
  Description of Artificial Sequence: Synthetic oligonucleotide
  Antisense strand to SEQ ID NO: 1260068
acaucacugauucacuaua

SEQ ID NO: 1260070 - RNA, 19 nt, Artificial Sequence
  Description of Artificial Sequence: Synthetic oligonucleotide
  Sense strand starting at position 2327 of SEQ ID NO: 1241278
gcgagagcuaacguuuagu

SEQ ID NO: 1260071 - RNA, 19 nt, Artificial Sequence
  Description of Artificial Sequence: Synthetic oligonucleotide
  Antisense strand to SEQ ID NO: 1260070
acuaaacguuagcucucgc

SEQ ID NO: 1260072 - RNA, 19 nt, Artificial Sequence
  Description of Artificial Sequence: Synthetic oligonucleotide
  Sense strand starting at position 2398 of SEQ ID NO: 1241278
auguucucucauugaauga

SEQ ID NO: 1260073 - RNA, 19 nt, Artificial Sequence
  Description of Artificial Sequence: Synthetic oligonucleotide
  Antisense strand to SEQ ID NO: 1260072
ucauucaaugagagaacau

SEQ ID NO: 1260074 - RNA, 19 nt, Artificial Sequence
  Description of Artificial Sequence: Synthetic oligonucleotide
  Sense strand starting at position 2402 of SEQ ID NO: 1241278
ucucucauugaaugaauga

SEQ ID NO: 1260075 - RNA, 19 nt, Artificial Sequence
  Description of Artificial Sequence: Synthetic oligonucleotide
  Antisense strand to SEQ ID NO: 1260074
ucauucauucaaugagaga

SEQ ID NO: 1260076 - RNA, 19 nt, Artificial Sequence
  Description of Artificial Sequence: Synthetic oligonucleotide
  Sense strand starting at position 2416 of SEQ ID NO: 1241278
aaugaaugacuacguauca

SEQ ID NO: 1260077 - RNA, 19 nt, Artificial Sequence
  Description of Artificial Sequence: Synthetic oligonucleotide
  Antisense strand to SEQ ID NO: 1260076
ugauacguagucauucauu

SEQ ID NO: 1260078 - RNA, 19 nt, Artificial Sequence
  Description of Artificial Sequence: Synthetic oligonucleotide
  Sense strand starting at position 2455 of SEQ ID NO: 1241278
acagauguguuauuagaua

SEQ ID NO: 1260079 - RNA, 19 nt, Artificial Sequence
  Description of Artificial Sequence: Synthetic oligonucleotide
  Antisense strand to SEQ ID NO: 1260078
uaucuaauaacacaucugu

SEQ ID NO: 1260080 - RNA, 19 nt, Artificial Sequence
  Description of Artificial Sequence: Synthetic oligonucleotide
  Sense strand starting at position 2589 of SEQ ID NO: 1241278
aagguuaagccaggaauga

SEQ ID NO: 1260081 - RNA, 19 nt, Artificial Sequence
  Description of Artificial Sequence: Synthetic oligonucleotide
  Antisense strand to SEQ ID NO: 1260080
ucauuccuggcuuaaccuu

SEQ ID NO: 1260082 - RNA, 19 nt, Artificial Sequence
  Description of Artificial Sequence: Synthetic oligonucleotide
  Sense strand starting at position 2640 of SEQ ID NO: 1241278
gggaucugguuccuaauga

SEQ ID NO: 1260083 - RNA, 19 nt, Artificial Sequence
  Description of Artificial Sequence: Synthetic oligonucleotide
  Antisense strand to SEQ ID NO: 1260082
ucauuaggaaccagauccc

SEQ ID NO: 1260084 - RNA, 19 nt, Artificial Sequence
  Description of Artificial Sequence: Synthetic oligonucleotide
  Sense strand starting at position 3083 of SEQ ID NO: 1241278
aucuuuguaguuuagagau

SEQ ID NO: 1260085 - RNA, 19 nt, Artificial Sequence
  Description of Artificial Sequence: Synthetic oligonucleotide
  Antisense strand to SEQ ID NO: 1260084
aucucuaaacuacaaagau

SEQ ID NO: 1260086 - RNA, 19 nt, Artificial Sequence
  Description of Artificial Sequence: Synthetic oligonucleotide
  Sense strand starting at position 3099 of SEQ ID NO: 1241278
gaugguagguucuucuaag

SEQ ID NO: 1260087 - RNA, 19 nt, Artificial Sequence
  Description of Artificial Sequence: Synthetic oligonucleotide
  Antisense strand to SEQ ID NO: 1260086
cuuagaagaaccuaccauc

SEQ ID NO: 1260088 - RNA, 19 nt, Artificial Sequence
  Description of Artificial Sequence: Synthetic oligonucleotide
  Sense strand starting at position 3255 of SEQ ID NO: 1241278
gaguccugauugguggaau

SEQ ID NO: 1260089 - RNA, 19 nt, Artificial Sequence
  Description of Artificial Sequence: Synthetic oligonucleotide
  Antisense strand to SEQ ID NO: 1260088
auuccaccaaucaggacuc

SEQ ID NO: 1260090 - RNA, 19 nt, Artificial Sequence
  Description of Artificial Sequence: Synthetic oligonucleotide
  Sense strand starting at position 3273 of SEQ ID NO: 1241278
ugaugaugguaugauuuga

SEQ ID NO: 1260091 - RNA, 19 nt, Artificial Sequence
  Description of Artificial Sequence: Synthetic oligonucleotide
  Antisense strand to SEQ ID NO: 1260090
ucaaaucauaccaucauca

SEQ ID NO: 1260092 - RNA, 19 nt, Artificial Sequence
  Description of Artificial Sequence: Synthetic oligonucleotide
  Sense strand starting at position 3396 of SEQ ID NO: 1241278
aucagaugauucuugucuu

SEQ ID NO: 1260093 - RNA, 19 nt, Artificial Sequence
  Description of Artificial Sequence: Synthetic oligonucleotide
  Antisense strand to SEQ ID NO: 1260092
aagacaagaaucaucugau

SEQ ID NO: 1260094 - RNA, 19 nt, Artificial Sequence
  Description of Artificial Sequence: Synthetic oligonucleotide
  Sense strand starting at position 3399 of SEQ ID NO: 1241278
agaugauucuugucuuuaa

SEQ ID NO: 1260095 - RNA, 19 nt, Artificial Sequence
  Description of Artificial Sequence: Synthetic oligonucleotide
  Antisense strand to SEQ ID NO: 1260094
uuaaagacaagaaucaucu

SEQ ID NO: 1260096 - RNA, 19 nt, Artificial Sequence
  Description of Artificial Sequence: Synthetic oligonucleotide
  Sense strand starting at position 3400 of SEQ ID NO: 1241278
gaugauucuugucuuuaag

SEQ ID NO: 1260097 - RNA, 19 nt, Artificial Sequence
  Description of Artificial Sequence: Synthetic oligonucleotide
  Antisense strand to SEQ ID NO: 1260096
cuuaaagacaagaaucauc

SEQ ID NO: 1260098 - RNA, 19 nt, Artificial Sequence
  Description of Artificial Sequence: Synthetic oligonucleotide
  Sense strand starting at position 3402 of SEQ ID NO: 1241278
ugauucuugucuuuaagga

SEQ ID NO: 1260099 - RNA, 19 nt, Artificial Sequence
  Description of Artificial Sequence: Synthetic oligonucleotide
  Antisense strand to SEQ ID NO: 1260098
uccuuaaagacaagaauca

SEQ ID NO: 1260100 - RNA, 19 nt, Artificial Sequence
  Description of Artificial Sequence: Synthetic oligonucleotide
  Sense strand starting at position 3503 of SEQ ID NO: 1241278
cgaguaaucuuccuggaaa

SEQ ID NO: 1260101 - RNA, 19 nt, Artificial Sequence
  Description of Artificial Sequence: Synthetic oligonucleotide
  Antisense strand to SEQ ID NO: 1260100
uuuccaggaagauuacucg

SEQ ID NO: 1260102 - RNA, 19 nt, Artificial Sequence
  Description of Artificial Sequence: Synthetic oligonucleotide
  Sense strand starting at position 3703 of SEQ ID NO: 1241278
aucugugaacucugaauag

SEQ ID NO: 1260103 - RNA, 19 nt, Artificial Sequence
  Description of Artificial Sequence: Synthetic oligonucleotide
  Antisense strand to SEQ ID NO: 1260102
cuauucagaguucacagau

SEQ ID NO: 1260104 - RNA, 19 nt, Artificial Sequence
  Description of Artificial Sequence: Synthetic oligonucleotide
  Sense strand starting at position 3968 of SEQ ID NO: 1241278
ccgaacaaucaguguacaa

SEQ ID NO: 1260105 - RNA, 19 nt, Artificial Sequence
  Description of Artificial Sequence: Synthetic oligonucleotide
  Antisense strand to SEQ ID NO: 1260104
uuguacacugauuguucgg

SEQ ID NO: 1260106 - RNA, 19 nt, Artificial Sequence
  Description of Artificial Sequence: Synthetic oligonucleotide
  Sense strand starting at position 64 of SEQ ID NO: 1241279
gugcuauguguagucuuau

SEQ ID NO: 1260107 - RNA, 19 nt, Artificial Sequence
  Description of Artificial Sequence: Synthetic oligonucleotide
  Antisense strand to SEQ ID NO: 1260106
auaagacuacacauagcac

SEQ ID NO: 1260108 - RNA, 19 nt, Artificial Sequence
  Description of Artificial Sequence: Synthetic oligonucleotide
  Sense strand starting at position 65 of SEQ ID NO: 1241279
ugcuauguguagucuuauc

SEQ ID NO: 1260109 - RNA, 19 nt, Artificial Sequence
  Description of Artificial Sequence: Synthetic oligonucleotide
  Antisense strand to SEQ ID NO: 1260108
gauaagacuacacauagca

SEQ ID NO: 1260110 - RNA, 19 nt, Artificial Sequence
  Description of Artificial Sequence: Synthetic oligonucleotide
  Sense strand starting at position 70 of SEQ ID NO: 1241279
uguguagucuuaucuuuga

SEQ ID NO: 1260111 - RNA, 19 nt, Artificial Sequence
  Description of Artificial Sequence: Synthetic oligonucleotide
  Antisense strand to SEQ ID NO: 1260110
ucaaagauaagacuacaca

SEQ ID NO: 1260112 - RNA, 19 nt, Artificial Sequence
  Description of Artificial Sequence: Synthetic oligonucleotide
  Sense strand starting at position 95 of SEQ ID NO: 1241279
agucucaugucuucgguca

SEQ ID NO: 1260113 - RNA, 19 nt, Artificial Sequence
  Description of Artificial Sequence: Synthetic oligonucleotide
  Antisense strand to SEQ ID NO: 1260112
ugaccgaagacaugagacu

SEQ ID NO: 1260114 - RNA, 19 nt, Artificial Sequence
  Description of Artificial Sequence: Synthetic oligonucleotide
  Sense strand starting at position 222 of SEQ ID NO: 1241279
ccauuuggcucagagccua

SEQ ID NO: 1260115 - RNA, 19 nt, Artificial Sequence
  Description of Artificial Sequence: Synthetic oligonucleotide
  Antisense strand to SEQ ID NO: 1260114
uaggcucugagccaaaugg

SEQ ID NO: 1260116 - RNA, 19 nt, Artificial Sequence
  Description of Artificial Sequence: Synthetic oligonucleotide
  Sense strand starting at position 245 of SEQ ID NO: 1241279
aggcaauacugucugauaa

SEQ ID NO: 1260117 - RNA, 19 nt, Artificial Sequence
  Description of Artificial Sequence: Synthetic oligonucleotide
  Antisense strand to SEQ ID NO: 1260116
uuaucagacaguauugccu

SEQ ID NO: 1260118 - RNA, 19 nt, Artificial Sequence
  Description of Artificial Sequence: Synthetic oligonucleotide
  Sense strand starting at position 246 of SEQ ID NO: 1241279
ggcaauacugucugauaac

SEQ ID NO: 1260119 - RNA, 19 nt, Artificial Sequence
  Description of Artificial Sequence: Synthetic oligonucleotide
  Antisense strand to SEQ ID NO: 1260118
guuaucagacaguauugcc

SEQ ID NO: 1260120 - RNA, 19 nt, Artificial Sequence
  Description of Artificial Sequence: Synthetic oligonucleotide
  Sense strand starting at position 735 of SEQ ID NO: 1241279
agggaauccugguaucuau

SEQ ID NO: 1260121 - RNA, 19 nt, Artificial Sequence
  Description of Artificial Sequence: Synthetic oligonucleotide
  Antisense strand to SEQ ID NO: 1260120
auagauaccaggauucccu

SEQ ID NO: 1260122 - RNA, 19 nt, Artificial Sequence
  Description of Artificial Sequence: Synthetic oligonucleotide
  Sense strand starting at position 742 of SEQ ID NO: 1241279
ccugguaucuauccucacu

SEQ ID NO: 1260123 - RNA, 19 nt, Artificial Sequence
  Description of Artificial Sequence: Synthetic oligonucleotide
  Antisense strand to SEQ ID NO: 1260122
agugaggauagauaccagg

SEQ ID NO: 1260124 - RNA, 19 nt, Artificial Sequence
  Description of Artificial Sequence: Synthetic oligonucleotide
  Sense strand starting at position 815 of SEQ ID NO: 1241279
ccaugacaauaugaggaaa

SEQ ID NO: 1260125 - RNA, 19 nt, Artificial Sequence
  Description of Artificial Sequence: Synthetic oligonucleotide
  Antisense strand to SEQ ID NO: 1260124
uuuccucauauugucaugg

SEQ ID NO: 1260126 - RNA, 19 nt, Artificial Sequence
  Description of Artificial Sequence: Synthetic oligonucleotide
  Sense strand starting at position 887 of SEQ ID NO: 1241279
ccaggcuguuccuuuacua

SEQ ID NO: 1260127 - RNA, 19 nt, Artificial Sequence
  Description of Artificial Sequence: Synthetic oligonucleotide
  Antisense strand to SEQ ID NO: 1260126
uaguaaaggaacagccugg

SEQ ID NO: 1260128 - RNA, 19 nt, Artificial Sequence
  Description of Artificial Sequence: Synthetic oligonucleotide
  Sense strand starting at position 916 of SEQ ID NO: 1241279
gagauucucucgccucaga

SEQ ID NO: 1260129 - RNA, 19 nt, Artificial Sequence
  Description of Artificial Sequence: Synthetic oligonucleotide
  Antisense strand to SEQ ID NO: 1260128
ucugaggcgagagaaucuc

SEQ ID NO: 1260130 - RNA, 19 nt, Artificial Sequence
  Description of Artificial Sequence: Synthetic oligonucleotide
  Sense strand starting at position 975 of SEQ ID NO: 1241279
cagccaaaguuguuaauga

SEQ ID NO: 1260131 - RNA, 19 nt, Artificial Sequence
  Description of Artificial Sequence: Synthetic oligonucleotide
  Antisense strand to SEQ ID NO: 1260130
ucauuaacaacuuuggcug

SEQ ID NO: 1260132 - RNA, 19 nt, Artificial Sequence
  Description of Artificial Sequence: Synthetic oligonucleotide
  Sense strand starting at position 990 of SEQ ID NO: 1241279
augaaagcauggcuuuaca

SEQ ID NO: 1260133 - RNA, 19 nt, Artificial Sequence
  Description of Artificial Sequence: Synthetic oligonucleotide
  Antisense strand to SEQ ID NO: 1260132
uguaaagccaugcuuucau

SEQ ID NO: 1260134 - RNA, 19 nt, Artificial Sequence
  Description of Artificial Sequence: Synthetic oligonucleotide
  Sense strand starting at position 1047 of SEQ ID NO: 1241279
agaauaggaucugcugaca

SEQ ID NO: 1260135 - RNA, 19 nt, Artificial Sequence
  Description of Artificial Sequence: Synthetic oligonucleotide
  Antisense strand to SEQ ID NO: 1260134
ugucagcagauccuauucu

SEQ ID NO: 1260136 - RNA, 19 nt, Artificial Sequence
  Description of Artificial Sequence: Synthetic oligonucleotide
  Sense strand starting at position 1060 of SEQ ID NO: 1241279
cugacagcuuaagaaauaa

SEQ ID NO: 1260137 - RNA, 19 nt, Artificial Sequence
  Description of Artificial Sequence: Synthetic oligonucleotide
  Antisense strand to SEQ ID NO: 1260136
uuauuucuuaagcugucag

SEQ ID NO: 1260138 - RNA, 19 nt, Artificial Sequence
  Description of Artificial Sequence: Synthetic oligonucleotide
  Sense strand starting at position 1076 of SEQ ID NO: 1241279
uaacuaaauuuguguggaa

SEQ ID NO: 1260139 - RNA, 19 nt, Artificial Sequence
  Description of Artificial Sequence: Synthetic oligonucleotide
  Antisense strand to SEQ ID NO: 1260138
uuccacacaaauuuaguua

SEQ ID NO: 1260140 - RNA, 19 nt, Artificial Sequence
  Description of Artificial Sequence: Synthetic oligonucleotide
  Sense strand starting at position 1079 of SEQ ID NO: 1241279
cuaaauuuguguggaaaua

SEQ ID NO: 1260141 - RNA, 19 nt, Artificial Sequence
  Description of Artificial Sequence: Synthetic oligonucleotide
  Antisense strand to SEQ ID NO: 1260140
uauuuccacacaaauuuag

SEQ ID NO: 1260142 - RNA, 19 nt, Artificial Sequence
  Description of Artificial Sequence: Synthetic oligonucleotide
  Sense strand starting at position 1114 of SEQ ID NO: 1241279
ucaaguuucccugguagaa

SEQ ID NO: 1260143 - RNA, 19 nt, Artificial Sequence
  Description of Artificial Sequence: Synthetic oligonucleotide
  Antisense strand to SEQ ID NO: 1260142
uucuaccagggaaacuuga

SEQ ID NO: 1260144 - RNA, 19 nt, Artificial Sequence
  Description of Artificial Sequence: Synthetic oligonucleotide
  Sense strand starting at position 1116 of SEQ ID NO: 1241279
aaguuucccugguagaaua

SEQ ID NO: 1260145 - RNA, 19 nt, Artificial Sequence
  Description of Artificial Sequence: Synthetic oligonucleotide
  Antisense strand to SEQ ID NO: 1260144
uauucuaccagggaaacuu

SEQ ID NO: 1260146 - RNA, 19 nt, Artificial Sequence
  Description of Artificial Sequence: Synthetic oligonucleotide
  Sense strand starting at position 1118 of SEQ ID NO: 1241279
guuucccugguagaauaaa

SEQ ID NO: 1260147 - RNA, 19 nt, Artificial Sequence
  Description of Artificial Sequence: Synthetic oligonucleotide
  Antisense strand to SEQ ID NO: 1260146
uuuauucuaccagggaaac

SEQ ID NO: 1260148 - RNA, 19 nt, Artificial Sequence
  Description of Artificial Sequence: Synthetic oligonucleotide
  Sense strand starting at position 1196 of SEQ ID NO: 1241279
cuacaaugcucugccaaga

SEQ ID NO: 1260149 - RNA, 19 nt, Artificial Sequence
  Description of Artificial Sequence: Synthetic oligonucleotide
  Antisense strand to SEQ ID NO: 1260148
ucuuggcagagcauuguag

SEQ ID NO: 1260150 - RNA, 19 nt, Artificial Sequence
  Description of Artificial Sequence: Synthetic oligonucleotide
  Sense strand starting at position 1201 of SEQ ID NO: 1241279
augcucugccaagaaauau

SEQ ID NO: 1260151 - RNA, 19 nt, Artificial Sequence
  Description of Artificial Sequence: Synthetic oligonucleotide
  Antisense strand to SEQ ID NO: 1260150
auauuucuuggcagagcau

SEQ ID NO: 1260152 - RNA, 19 nt, Artificial Sequence
  Description of Artificial Sequence: Synthetic oligonucleotide
  Sense strand starting at position 1246 of SEQ ID NO: 1241279
acuauaagccucuggaaga

SEQ ID NO: 1260153 - RNA, 19 nt, Artificial Sequence
  Description of Artificial Sequence: Synthetic oligonucleotide
  Antisense strand to SEQ ID NO: 1260152
ucuuccagaggcuuauagu

SEQ ID NO: 1260154 - RNA, 19 nt, Artificial Sequence
  Description of Artificial Sequence: Synthetic oligonucleotide
  Sense strand starting at position 1275 of SEQ ID NO: 1241279
augauuuaucucuguagcu

SEQ ID NO: 1260155 - RNA, 19 nt, Artificial Sequence
  Description of Artificial Sequence: Synthetic oligonucleotide
  Antisense strand to SEQ ID NO: 1260154
agcuacagagauaaaucau

SEQ ID NO: 1260156 - RNA, 19 nt, Artificial Sequence
  Description of Artificial Sequence: Synthetic oligonucleotide
  Sense strand starting at position 1276 of SEQ ID NO: 1241279
ugauuuaucucuguagcuc

SEQ ID NO: 1260157 - RNA, 19 nt, Artificial Sequence
  Description of Artificial Sequence: Synthetic oligonucleotide
  Antisense strand to SEQ ID NO: 1260156
gagcuacagagauaaauca

SEQ ID NO: 1260158 - RNA, 19 nt, Artificial Sequence
  Description of Artificial Sequence: Synthetic oligonucleotide
  Sense strand starting at position 1401 of SEQ ID NO: 1241279
cauuaaguccugugagccu

SEQ ID NO: 1260159 - RNA, 19 nt, Artificial Sequence
  Description of Artificial Sequence: Synthetic oligonucleotide
  Antisense strand to SEQ ID NO: 1260158
aggcucacaggacuuaaug

SEQ ID NO: 1260160 - RNA, 19 nt, Artificial Sequence
  Description of Artificial Sequence: Synthetic oligonucleotide
  Sense strand starting at position 1424 of SEQ ID NO: 1241279
acaaacauaguguguuaua

SEQ ID NO: 1260161 - RNA, 19 nt, Artificial Sequence
  Description of Artificial Sequence: Synthetic oligonucleotide
  Antisense strand to SEQ ID NO: 1260160
uauaacacacuauguuugu

SEQ ID NO: 1260162 - RNA, 19 nt, Artificial Sequence
  Description of Artificial Sequence: Synthetic oligonucleotide
  Sense strand starting at position 1488 of SEQ ID NO: 1241279
acaggugaguaaucgagga

SEQ ID NO: 1260163 - RNA, 19 nt, Artificial Sequence
  Description of Artificial Sequence: Synthetic oligonucleotide
  Antisense strand to SEQ ID NO: 1260162
uccucgauuacucaccugu

SEQ ID NO: 1260164 - RNA, 19 nt, Artificial Sequence
  Description of Artificial Sequence: Synthetic oligonucleotide
  Sense strand starting at position 1492 of SEQ ID NO: 1241279
gugaguaaucgaggauaac

SEQ ID NO: 1260165 - RNA, 19 nt, Artificial Sequence
  Description of Artificial Sequence: Synthetic oligonucleotide
  Antisense strand to SEQ ID NO: 1260164
guuauccucgauuacucac

SEQ ID NO: 1260166 - RNA, 19 nt, Artificial Sequence
  Description of Artificial Sequence: Synthetic oligonucleotide
  Sense strand starting at position 1677 of SEQ ID NO: 1241279
uuuggcuucgcacaaguaa

SEQ ID NO: 1260167 - RNA, 19 nt, Artificial Sequence
  Description of Artificial Sequence: Synthetic oligonucleotide
  Antisense strand to SEQ ID NO: 1260166
uuacuugugcgaagccaaa

SEQ ID NO: 1260168 - RNA, 19 nt, Artificial Sequence
  Description of Artificial Sequence: Synthetic oligonucleotide
  Sense strand starting at position 1863 of SEQ ID NO: 1241279
gggucguagucauccggaa

SEQ ID NO: 1260169 - RNA, 19 nt, Artificial Sequence
  Description of Artificial Sequence: Synthetic oligonucleotide
  Antisense strand to SEQ ID NO: 1260168
uuccggaugacuacgaccc

SEQ ID NO: 1260170 - RNA, 19 nt, Artificial Sequence
  Description of Artificial Sequence: Synthetic oligonucleotide
  Sense strand starting at position 2445 of SEQ ID NO: 1241279
gcagcuucugcuuacagga

SEQ ID NO: 1260171 - RNA, 19 nt, Artificial Sequence
  Description of Artificial Sequence: Synthetic oligonucleotide
  Antisense strand to SEQ ID NO: 1260170
uccuguaagcagaagcugc

SEQ ID NO: 1260172 - RNA, 19 nt, Artificial Sequence
  Description of Artificial Sequence: Synthetic oligonucleotide
  Sense strand starting at position 2469 of SEQ ID NO: 1241279
gcagcuaccuugucaccaa

SEQ ID NO: 1260173 - RNA, 19 nt, Artificial Sequence
  Description of Artificial Sequence: Synthetic oligonucleotide
  Antisense strand to SEQ ID NO: 1260172
uuggugacaagguagcugc

SEQ ID NO: 1260174 - RNA, 19 nt, Artificial Sequence
  Description of Artificial Sequence: Synthetic oligonucleotide
  Sense strand starting at position 2851 of SEQ ID NO: 1241279
ucgggagacuguuucuaac

SEQ ID NO: 1260175 - RNA, 19 nt, Artificial Sequence
  Description of Artificial Sequence: Synthetic oligonucleotide
  Antisense strand to SEQ ID NO: 1260174
guuagaaacagucucccga

SEQ ID NO: 1260176 - RNA, 19 nt, Artificial Sequence
  Description of Artificial Sequence: Synthetic oligonucleotide
  Sense strand starting at position 2854 of SEQ ID NO: 1241279
ggagacuguuucuaacccu

SEQ ID NO: 1260177 - RNA, 19 nt, Artificial Sequence
  Description of Artificial Sequence: Synthetic oligonucleotide
  Antisense strand to SEQ ID NO: 1260176
aggguuagaaacagucucc

SEQ ID NO: 1260178 - RNA, 19 nt, Artificial Sequence
  Description of Artificial Sequence: Synthetic oligonucleotide
  Sense strand starting at position 3950 of SEQ ID NO: 1241279
uugguacucugcuuuggaa

SEQ ID NO: 1260179 - RNA, 19 nt, Artificial Sequence
  Description of Artificial Sequence: Synthetic oligonucleotide
  Antisense strand to SEQ ID NO: 1260178
uuccaaagcagaguaccaa

SEQ ID NO: 1260180 - RNA, 19 nt, Artificial Sequence
  Description of Artificial Sequence: Synthetic oligonucleotide
  Sense strand starting at position 3952 of SEQ ID NO: 1241279
gguacucugcuuuggaaau

SEQ ID NO: 1260181 - RNA, 19 nt, Artificial Sequence
  Description of Artificial Sequence: Synthetic oligonucleotide
  Antisense strand to SEQ ID NO: 1260180
auuuccaaagcagaguacc

SEQ ID NO: 1260182 - RNA, 19 nt, Artificial Sequence
  Description of Artificial Sequence: Synthetic oligonucleotide
  Sense strand starting at position 3958 of SEQ ID NO: 1241279
cugcuuuggaaaugugaaa

SEQ ID NO: 1260183 - RNA, 19 nt, Artificial Sequence
  Description of Artificial Sequence: Synthetic oligonucleotide
  Antisense strand to SEQ ID NO: 1260182
uuucacauuuccaaagcag

SEQ ID NO: 1260184 - RNA, 19 nt, Artificial Sequence
  Description of Artificial Sequence: Synthetic oligonucleotide
  Sense strand starting at position 3980 of SEQ ID NO: 1241279
cuguguaaauguuaagaaa

SEQ ID NO: 1260185 - RNA, 19 nt, Artificial Sequence
  Description of Artificial Sequence: Synthetic oligonucleotide
  Antisense strand to SEQ ID NO: 1260184
uuucuuaacauuuacacag

SEQ ID NO: 1260186 - RNA, 19 nt, Artificial Sequence
  Description of Artificial Sequence: Synthetic oligonucleotide
  Sense strand starting at position 487 of SEQ ID NO: 1241280
auugcuauuugguuccaua

SEQ ID NO: 1260187 - RNA, 19 nt, Artificial Sequence
  Description of Artificial Sequence: Synthetic oligonucleotide
  Antisense strand to SEQ ID NO: 1260186
uauggaaccaaauagcaau

SEQ ID NO: 1260188 - RNA, 19 nt, Artificial Sequence
  Description of Artificial Sequence: Synthetic oligonucleotide
  Sense strand starting at position 873 of SEQ ID NO: 1241280
gccugugagagcuaacaca

SEQ ID NO: 1260189 - RNA, 19 nt, Artificial Sequence
  Description of Artificial Sequence: Synthetic oligonucleotide
  Antisense strand to SEQ ID NO: 1260188
uguguuagcucucacaggc

SEQ ID NO: 1260190 - RNA, 19 nt, Artificial Sequence
  Description of Artificial Sequence: Synthetic oligonucleotide
  Sense strand starting at position 1012 of SEQ ID NO: 1241280
aggagaucauguguccaau

SEQ ID NO: 1260191 - RNA, 19 nt, Artificial Sequence
  Description of Artificial Sequence: Synthetic oligonucleotide
  Antisense strand to SEQ ID NO: 1260190
auuggacacaugaucuccu

SEQ ID NO: 1260192 - RNA, 19 nt, Artificial Sequence
  Description of Artificial Sequence: Synthetic oligonucleotide
  Sense strand starting at position 1014 of SEQ ID NO: 1241280
gagaucauguguccaauag

SEQ ID NO: 1260193 - RNA, 19 nt, Artificial Sequence
  Description of Artificial Sequence: Synthetic oligonucleotide
  Antisense strand to SEQ ID NO: 1260192
cuauuggacacaugaucuc

SEQ ID NO: 1260194 - RNA, 19 nt, Artificial Sequence
  Description of Artificial Sequence: Synthetic oligonucleotide
  Sense strand starting at position 1094 of SEQ ID NO: 1241280
uguagaagaugaguaacua

SEQ ID NO: 1260195 - RNA, 19 nt, Artificial Sequence
  Description of Artificial Sequence: Synthetic oligonucleotide
  Antisense strand to SEQ ID NO: 1260194
uaguuacucaucuucuaca

SEQ ID NO: 1260196 - RNA, 19 nt, Artificial Sequence
  Description of Artificial Sequence: Synthetic oligonucleotide
  Sense strand starting at position 1120 of SEQ ID NO: 1241280
ggugguuccuaggcagaag

SEQ ID NO: 1260197 - RNA, 19 nt, Artificial Sequence
  Description of Artificial Sequence: Synthetic oligonucleotide
  Antisense strand to SEQ ID NO: 1260196
cuucugccuaggaaccacc

SEQ ID NO: 1260198 - RNA, 19 nt, Artificial Sequence
  Description of Artificial Sequence: Synthetic oligonucleotide
  Sense strand starting at position 1131 of SEQ ID NO: 1241280
ggcagaaggcauugauucu

SEQ ID NO: 1260199 - RNA, 19 nt, Artificial Sequence
  Description of Artificial Sequence: Synthetic oligonucleotide
  Antisense strand to SEQ ID NO: 1260198
agaaucaaugccuucugcc

SEQ ID NO: 1260200 - RNA, 19 nt, Artificial Sequence
  Description of Artificial Sequence: Synthetic oligonucleotide
  Sense strand starting at position 1229 of SEQ ID NO: 1241280
cccaaagucugggugaaac

SEQ ID NO: 1260201 - RNA, 19 nt, Artificial Sequence
  Description of Artificial Sequence: Synthetic oligonucleotide
  Antisense strand to SEQ ID NO: 1260200
guuucacccagacuuuggg

SEQ ID NO: 1260202 - RNA, 19 nt, Artificial Sequence
  Description of Artificial Sequence: Synthetic oligonucleotide
  Sense strand starting at position 1237 of SEQ ID NO: 1241280
cugggugaaacaugugauc

SEQ ID NO: 1260203 - RNA, 19 nt, Artificial Sequence
  Description of Artificial Sequence: Synthetic oligonucleotide
  Antisense strand to SEQ ID NO: 1260202
gaucacauguuucacccag

SEQ ID NO: 1260204 - RNA, 19 nt, Artificial Sequence
  Description of Artificial Sequence: Synthetic oligonucleotide
  Sense strand starting at position 1239 of SEQ ID NO: 1241280
gggugaaacaugugaucau

SEQ ID NO: 1260205 - RNA, 19 nt, Artificial Sequence
  Description of Artificial Sequence: Synthetic oligonucleotide
  Antisense strand to SEQ ID NO: 1260204
augaucacauguuucaccc

SEQ ID NO: 1260206 - RNA, 19 nt, Artificial Sequence
  Description of Artificial Sequence: Synthetic oligonucleotide
  Sense strand starting at position 1242 of SEQ ID NO: 1241280
ugaaacaugugaucauuau

SEQ ID NO: 1260207 - RNA, 19 nt, Artificial Sequence
  Description of Artificial Sequence: Synthetic oligonucleotide
  Antisense strand to SEQ ID NO: 1260206
auaaugaucacauguuuca

SEQ ID NO: 1260208 - RNA, 19 nt, Artificial Sequence
  Description of Artificial Sequence: Synthetic oligonucleotide
  Sense strand starting at position 1324 of SEQ ID NO: 1241280
uuuguuagagcuuauugac

SEQ ID NO: 1260209 - RNA, 19 nt, Artificial Sequence
  Description of Artificial Sequence: Synthetic oligonucleotide
  Antisense strand to SEQ ID NO: 1260208
gucaauaagcucuaacaaa

SEQ ID NO: 1260210 - RNA, 19 nt, Artificial Sequence
  Description of Artificial Sequence: Synthetic oligonucleotide
  Sense strand starting at position 1503 of SEQ ID NO: 1241280
aggaguauuccuggcccua

SEQ ID NO: 1260211 - RNA, 19 nt, Artificial Sequence
  Description of Artificial Sequence: Synthetic oligonucleotide
  Antisense strand to SEQ ID NO: 1260210
uagggccaggaauacuccu

SEQ ID NO: 1260212 - RNA, 19 nt, Artificial Sequence
  Description of Artificial Sequence: Synthetic oligonucleotide
  Sense strand starting at position 1667 of SEQ ID NO: 1241280
ggguuccucaucuguggaa

SEQ ID NO: 1260213 - RNA, 19 nt, Artificial Sequence
  Description of Artificial Sequence: Synthetic oligonucleotide
  Antisense strand to SEQ ID NO: 1260212
uuccacagaugaggaaccc

SEQ ID NO: 1260214 - RNA, 19 nt, Artificial Sequence
  Description of Artificial Sequence: Synthetic oligonucleotide
  Sense strand starting at position 1810 of SEQ ID NO: 1241280
gacugaggcuaaccagaau

SEQ ID NO: 1260215 - RNA, 19 nt, Artificial Sequence
  Description of Artificial Sequence: Synthetic oligonucleotide
  Antisense strand to SEQ ID NO: 1260214
auucugguuagccucaguc

SEQ ID NO: 1260216 - RNA, 19 nt, Artificial Sequence
  Description of Artificial Sequence: Synthetic oligonucleotide
  Sense strand starting at position 2044 of SEQ ID NO: 1241280
ccuggaaaucuacagcagu

SEQ ID NO: 1260217 - RNA, 19 nt, Artificial Sequence
  Description of Artificial Sequence: Synthetic oligonucleotide
  Antisense strand to SEQ ID NO: 1260216
acugcuguagauuuccagg

SEQ ID NO: 1260218 - RNA, 19 nt, Artificial Sequence
  Description of Artificial Sequence: Synthetic oligonucleotide
  Sense strand starting at position 2190 of SEQ ID NO: 1241280
aacaguagccucgagcaaa

SEQ ID NO: 1260219 - RNA, 19 nt, Artificial Sequence
  Description of Artificial Sequence: Synthetic oligonucleotide
  Antisense strand to SEQ ID NO: 1260218
uuugcucgaggcuacuguu

SEQ ID NO: 1260220 - RNA, 19 nt, Artificial Sequence
  Description of Artificial Sequence: Synthetic oligonucleotide
  Sense strand starting at position 2364 of SEQ ID NO: 1241280
ugcuauguuacaugggaac

SEQ ID NO: 1260221 - RNA, 19 nt, Artificial Sequence
  Description of Artificial Sequence: Synthetic oligonucleotide
  Antisense strand to SEQ ID NO: 1260220
guucccauguaacauagca

SEQ ID NO: 1260222 - RNA, 19 nt, Artificial Sequence
  Description of Artificial Sequence: Synthetic oligonucleotide
  Sense strand starting at position 3017 of SEQ ID NO: 1241280
aauguugugaauugugaga

SEQ ID NO: 1260223 - RNA, 19 nt, Artificial Sequence
  Description of Artificial Sequence: Synthetic oligonucleotide
  Antisense strand to SEQ ID NO: 1260222
ucucacaauucacaacauu

SEQ ID NO: 1260224 - RNA, 19 nt, Artificial Sequence
  Description of Artificial Sequence: Synthetic oligonucleotide
  Sense strand starting at position 3030 of SEQ ID NO: 1241280
gugagaccuucauugagag

SEQ ID NO: 1260225 - RNA, 19 nt, Artificial Sequence
  Description of Artificial Sequence: Synthetic oligonucleotide
  Antisense strand to SEQ ID NO: 1260224
cucucaaugaaggucucac

SEQ ID NO: 1260226 - RNA, 19 nt, Artificial Sequence
  Description of Artificial Sequence: Synthetic oligonucleotide
  Sense strand starting at position 3049 of SEQ ID NO: 1241280
gugaaagaauaucuaguga

SEQ ID NO: 1260227 - RNA, 19 nt, Artificial Sequence
  Description of Artificial Sequence: Synthetic oligonucleotide
  Antisense strand to SEQ ID NO: 1260226
ucacuagauauucuuucac

SEQ ID NO: 1260228 - RNA, 19 nt, Artificial Sequence
  Description of Artificial Sequence: Synthetic oligonucleotide
  Sense strand starting at position 3076 of SEQ ID NO: 1241280
gccaaauagcuaugaauga

SEQ ID NO: 1260229 - RNA, 19 nt, Artificial Sequence
  Description of Artificial Sequence: Synthetic oligonucleotide
  Antisense strand to SEQ ID NO: 1260228
ucauucauagcuauuuggc

SEQ ID NO: 1260230 - RNA, 19 nt, Artificial Sequence
  Description of Artificial Sequence: Synthetic oligonucleotide
  Sense strand starting at position 3098 of SEQ ID NO: 1241280
gguagccaguaucugaaau

SEQ ID NO: 1260231 - RNA, 19 nt, Artificial Sequence
  Description of Artificial Sequence: Synthetic oligonucleotide
  Antisense strand to SEQ ID NO: 1260230
auuucagauacuggcuacc

SEQ ID NO: 1260232 - RNA, 19 nt, Artificial Sequence
  Description of Artificial Sequence: Synthetic oligonucleotide
  Sense strand starting at position 3196 of SEQ ID NO: 1241280
uggccauaguuucuacaau

SEQ ID NO: 1260233 - RNA, 19 nt, Artificial Sequence
  Description of Artificial Sequence: Synthetic oligonucleotide
  Antisense strand to SEQ ID NO: 1260232
auuguagaaacuauggcca

SEQ ID NO: 1260234 - RNA, 19 nt, Artificial Sequence
  Description of Artificial Sequence: Synthetic oligonucleotide
  Sense strand starting at position 3224 of SEQ ID NO: 1241280
cguaacaucugacugugaa

SEQ ID NO: 1260235 - RNA, 19 nt, Artificial Sequence
  Description of Artificial Sequence: Synthetic oligonucleotide
  Antisense strand to SEQ ID NO: 1260234
uucacagucagauguuacg

SEQ ID NO: 1260236 - RNA, 19 nt, Artificial Sequence
  Description of Artificial Sequence: Synthetic oligonucleotide
  Sense strand starting at position 3225 of SEQ ID NO: 1241280
guaacaucugacugugaag

SEQ ID NO: 1260237 - RNA, 19 nt, Artificial Sequence
  Description of Artificial Sequence: Synthetic oligonucleotide
  Antisense strand to SEQ ID NO: 1260236
cuucacagucagauguuac

SEQ ID NO: 1260238 - RNA, 19 nt, Artificial Sequence
  Description of Artificial Sequence: Synthetic oligonucleotide
  Sense strand starting at position 3227 of SEQ ID NO: 1241280
aacaucugacugugaagua

SEQ ID NO: 1260239 - RNA, 19 nt, Artificial Sequence
  Description of Artificial Sequence: Synthetic oligonucleotide
  Antisense strand to SEQ ID NO: 1260238
uacuucacagucagauguu

SEQ ID NO: 1260240 - RNA, 19 nt, Artificial Sequence
  Description of Artificial Sequence: Synthetic oligonucleotide
  Sense strand starting at position 3234 of SEQ ID NO: 1241280
gacugugaaguauagguca

SEQ ID NO: 1260241 - RNA, 19 nt, Artificial Sequence
  Description of Artificial Sequence: Synthetic oligonucleotide
  Antisense strand to SEQ ID NO: 1260240
ugaccuauacuucacaguc

SEQ ID NO: 1260242 - RNA, 19 nt, Artificial Sequence
  Description of Artificial Sequence: Synthetic oligonucleotide
  Sense strand starting at position 3236 of SEQ ID NO: 1241280
cugugaaguauaggucaca

SEQ ID NO: 1260243 - RNA, 19 nt, Artificial Sequence
  Description of Artificial Sequence: Synthetic oligonucleotide
  Antisense strand to SEQ ID NO: 1260242
ugugaccuauacuucacag

SEQ ID NO: 1260244 - RNA, 19 nt, Artificial Sequence
  Description of Artificial Sequence: Synthetic oligonucleotide
  Sense strand starting at position 3237 of SEQ ID NO: 1241280
ugugaaguauaggucacaa

SEQ ID NO: 1260245 - RNA, 19 nt, Artificial Sequence
  Description of Artificial Sequence: Synthetic oligonucleotide
  Antisense strand to SEQ ID NO: 1260244
uugugaccuauacuucaca

SEQ ID NO: 1260246 - RNA, 19 nt, Artificial Sequence
  Description of Artificial Sequence: Synthetic oligonucleotide
  Sense strand starting at position 3424 of SEQ ID NO: 1241280
ggcaaaugugaccaauacu

SEQ ID NO: 1260247 - RNA, 19 nt, Artificial Sequence
  Description of Artificial Sequence: Synthetic oligonucleotide
  Antisense strand to SEQ ID NO: 1260246
aguauuggucacauuugcc

SEQ ID NO: 1260248 - RNA, 19 nt, Artificial Sequence
  Description of Artificial Sequence: Synthetic oligonucleotide
  Sense strand starting at position 3564 of SEQ ID NO: 1241280
gccaccuuauuguuggaau

SEQ ID NO: 1260249 - RNA, 19 nt, Artificial Sequence
  Description of Artificial Sequence: Synthetic oligonucleotide
  Antisense strand to SEQ ID NO: 1260248
auuccaacaauaagguggc

SEQ ID NO: 1260250 - RNA, 19 nt, Artificial Sequence
  Description of Artificial Sequence: Synthetic oligonucleotide
  Sense strand starting at position 3566 of SEQ ID NO: 1241280
caccuuauuguuggaauga

SEQ ID NO: 1260251 - RNA, 19 nt, Artificial Sequence
  Description of Artificial Sequence: Synthetic oligonucleotide
  Antisense strand to SEQ ID NO: 1260250
ucauuccaacaauaaggug

SEQ ID NO: 1260252 - RNA, 19 nt, Artificial Sequence
  Description of Artificial Sequence: Synthetic oligonucleotide
  Sense strand starting at position 3634 of SEQ ID NO: 1241280
ugaagcaguccuugaguaa

SEQ ID NO: 1260253 - RNA, 19 nt, Artificial Sequence
  Description of Artificial Sequence: Synthetic oligonucleotide
  Antisense strand to SEQ ID NO: 1260252
uuacucaaggacugcuuca

SEQ ID NO: 1260254 - RNA, 19 nt, Artificial Sequence
  Description of Artificial Sequence: Synthetic oligonucleotide
  Sense strand starting at position 3635 of SEQ ID NO: 1241280
gaagcaguccuugaguaau

SEQ ID NO: 1260255 - RNA, 19 nt, Artificial Sequence
  Description of Artificial Sequence: Synthetic oligonucleotide
  Antisense strand to SEQ ID NO: 1260254
auuacucaaggacugcuuc

SEQ ID NO: 1260256 - RNA, 19 nt, Artificial Sequence
  Description of Artificial Sequence: Synthetic oligonucleotide
  Sense strand starting at position 3637 of SEQ ID NO: 1241280
agcaguccuugaguaauag

SEQ ID NO: 1260257 - RNA, 19 nt, Artificial Sequence
  Description of Artificial Sequence: Synthetic oligonucleotide
  Antisense strand to SEQ ID NO: 1260256
cuauuacucaaggacugcu

SEQ ID NO: 1260258 - RNA, 19 nt, Artificial Sequence
  Description of Artificial Sequence: Synthetic oligonucleotide
  Sense strand starting at position 3638 of SEQ ID NO: 1241280
gcaguccuugaguaauaga

SEQ ID NO: 1260259 - RNA, 19 nt, Artificial Sequence
  Description of Artificial Sequence: Synthetic oligonucleotide
  Antisense strand to SEQ ID NO: 1260258
ucuauuacucaaggacugc

SEQ ID NO: 1260260 - RNA, 19 nt, Artificial Sequence
  Description of Artificial Sequence: Synthetic oligonucleotide
  Sense strand starting at position 3657 of SEQ ID NO: 1241280
aaaucaugugcugauagac

SEQ ID NO: 1260261 - RNA, 19 nt, Artificial Sequence
  Description of Artificial Sequence: Synthetic oligonucleotide
  Antisense strand to SEQ ID NO: 1260260
gucuaucagcacaugauuu

SEQ ID NO: 1260262 - RNA, 19 nt, Artificial Sequence
  Description of Artificial Sequence: Synthetic oligonucleotide
  Sense strand starting at position 3760 of SEQ ID NO: 1241280
ggaacaauucugggccucu

SEQ ID NO: 1260263 - RNA, 19 nt, Artificial Sequence
  Description of Artificial Sequence: Synthetic oligonucleotide
  Antisense strand to SEQ ID NO: 1260262
agaggcccagaauuguucc

SEQ ID NO: 1260264 - RNA, 19 nt, Artificial Sequence
  Description of Artificial Sequence: Synthetic oligonucleotide
  Sense strand starting at position 3862 of SEQ ID NO: 1241280
augugcauugucuauugaa

SEQ ID NO: 1260265 - RNA, 19 nt, Artificial Sequence
  Description of Artificial Sequence: Synthetic oligonucleotide
  Antisense strand to SEQ ID NO: 1260264
uucaauagacaaugcacau

SEQ ID NO: 1260266 - RNA, 19 nt, Artificial Sequence
  Description of Artificial Sequence: Synthetic oligonucleotide
  Sense strand starting at position 425 of SEQ ID NO: 1241281
agaagaugcuaauucucau

SEQ ID NO: 1260267 - RNA, 19 nt, Artificial Sequence
  Description of Artificial Sequence: Synthetic oligonucleotide
  Antisense strand to SEQ ID NO: 1260266
augagaauuagcaucuucu

SEQ ID NO: 1260268 - RNA, 19 nt, Artificial Sequence
  Description of Artificial Sequence: Synthetic oligonucleotide
  Sense strand starting at position 431 of SEQ ID NO: 1241281
ugcuaauucucauuagaga

SEQ ID NO: 1260269 - RNA, 19 nt, Artificial Sequence
  Description of Artificial Sequence: Synthetic oligonucleotide
  Antisense strand to SEQ ID NO: 1260268
ucucuaaugagaauuagca

SEQ ID NO: 1260270 - RNA, 19 nt, Artificial Sequence
  Description of Artificial Sequence: Synthetic oligonucleotide
  Sense strand starting at position 486 of SEQ ID NO: 1241281
guguaagcgaaacacauaa

SEQ ID NO: 1260271 - RNA, 19 nt, Artificial Sequence
  Description of Artificial Sequence: Synthetic oligonucleotide
  Antisense strand to SEQ ID NO: 1260270
uuauguguuucgcuuacac

SEQ ID NO: 1260272 - RNA, 19 nt, Artificial Sequence
  Description of Artificial Sequence: Synthetic oligonucleotide
  Sense strand starting at position 626 of SEQ ID NO: 1241281
aggagaucauguguccaaa

SEQ ID NO: 1260273 - RNA, 19 nt, Artificial Sequence
  Description of Artificial Sequence: Synthetic oligonucleotide
  Antisense strand to SEQ ID NO: 1260272
uuuggacacaugaucuccu

SEQ ID NO: 1260274 - RNA, 19 nt, Artificial Sequence
  Description of Artificial Sequence: Synthetic oligonucleotide
  Sense strand starting at position 659 of SEQ ID NO: 1241281
uaagguuuauguccuugaa

SEQ ID NO: 1260275 - RNA, 19 nt, Artificial Sequence
  Description of Artificial Sequence: Synthetic oligonucleotide
  Antisense strand to SEQ ID NO: 1260274
uucaaggacauaaaccuua

SEQ ID NO: 1260276 - RNA, 19 nt, Artificial Sequence
  Description of Artificial Sequence: Synthetic oligonucleotide
  Sense strand starting at position 677 of SEQ ID NO: 1241281
aguggaaaggguugucaga

SEQ ID NO: 1260277 - RNA, 19 nt, Artificial Sequence
  Description of Artificial Sequence: Synthetic oligonucleotide
  Antisense strand to SEQ ID NO: 1260276
ucugacaacccuuuccacu

SEQ ID NO: 1260278 - RNA, 19 nt, Artificial Sequence
  Description of Artificial Sequence: Synthetic oligonucleotide
  Sense strand starting at position 679 of SEQ ID NO: 1241281
uggaaaggguugucagauu

SEQ ID NO: 1260279 - RNA, 19 nt, Artificial Sequence
  Description of Artificial Sequence: Synthetic oligonucleotide
  Antisense strand to SEQ ID NO: 1260278
aaucugacaacccuuucca

SEQ ID NO: 1260280 - RNA, 19 nt, Artificial Sequence
  Description of Artificial Sequence: Synthetic oligonucleotide
  Sense strand starting at position 717 of SEQ ID NO: 1241281
gaguaacuacuugggaagu

SEQ ID NO: 1260281 - RNA, 19 nt, Artificial Sequence
  Description of Artificial Sequence: Synthetic oligonucleotide
  Antisense strand to SEQ ID NO: 1260280
acuucccaaguaguuacuc

SEQ ID NO: 1260282 - RNA, 19 nt, Artificial Sequence
  Description of Artificial Sequence: Synthetic oligonucleotide
  Sense strand starting at position 733 of SEQ ID NO: 1241281
agugguuccuagguaggaa

SEQ ID NO: 1260283 - RNA, 19 nt, Artificial Sequence
  Description of Artificial Sequence: Synthetic oligonucleotide
  Antisense strand to SEQ ID NO: 1260282
uuccuaccuaggaaccacu

SEQ ID NO: 1260284 - RNA, 19 nt, Artificial Sequence
  Description of Artificial Sequence: Synthetic oligonucleotide
  Sense strand starting at position 938 of SEQ ID NO: 1241281
acaaaugaucuugguuugu

SEQ ID NO: 1260285 - RNA, 19 nt, Artificial Sequence
  Description of Artificial Sequence: Synthetic oligonucleotide
  Antisense strand to SEQ ID NO: 1260284
acaaaccaagaucauuugu

SEQ ID NO: 1260286 - RNA, 19 nt, Artificial Sequence
  Description of Artificial Sequence: Synthetic oligonucleotide
  Sense strand starting at position 940 of SEQ ID NO: 1241281
aaaugaucuugguuuguca

SEQ ID NO: 1260287 - RNA, 19 nt, Artificial Sequence
  Description of Artificial Sequence: Synthetic oligonucleotide
  Antisense strand to SEQ ID NO: 1260286
ugacaaaccaagaucauuu

SEQ ID NO: 1260288 - RNA, 19 nt, Artificial Sequence
  Description of Artificial Sequence: Synthetic oligonucleotide
  Sense strand starting at position 942 of SEQ ID NO: 1241281
augaucuugguuugucaga

SEQ ID NO: 1260289 - RNA, 19 nt, Artificial Sequence
  Description of Artificial Sequence: Synthetic oligonucleotide
  Antisense strand to SEQ ID NO: 1260288
ucugacaaaccaagaucau

SEQ ID NO: 1260290 - RNA, 19 nt, Artificial Sequence
  Description of Artificial Sequence: Synthetic oligonucleotide
  Sense strand starting at position 1415 of SEQ ID NO: 1241281
uuugaaagagucuaccguu

SEQ ID NO: 1260291 - RNA, 19 nt, Artificial Sequence
  Description of Artificial Sequence: Synthetic oligonucleotide
  Antisense strand to SEQ ID NO: 1260290
aacgguagacucuuucaaa

SEQ ID NO: 1260292 - RNA, 19 nt, Artificial Sequence
  Description of Artificial Sequence: Synthetic oligonucleotide
  Sense strand starting at position 1422 of SEQ ID NO: 1241281
gagucuaccguuuaaacua

SEQ ID NO: 1260293 - RNA, 19 nt, Artificial Sequence
  Description of Artificial Sequence: Synthetic oligonucleotide
  Antisense strand to SEQ ID NO: 1260292
uaguuuaaacgguagacuc

SEQ ID NO: 1260294 - RNA, 19 nt, Artificial Sequence
  Description of Artificial Sequence: Synthetic oligonucleotide
  Sense strand starting at position 1440 of SEQ ID NO: 1241281
agugcucuguccucauuua

SEQ ID NO: 1260295 - RNA, 19 nt, Artificial Sequence
  Description of Artificial Sequence: Synthetic oligonucleotide
  Antisense strand to SEQ ID NO: 1260294
uaaaugaggacagagcacu

SEQ ID NO: 1260296 - RNA, 19 nt, Artificial Sequence
  Description of Artificial Sequence: Synthetic oligonucleotide
  Sense strand starting at position 1519 of SEQ ID NO: 1241281
guguccucagauggacuua

SEQ ID NO: 1260297 - RNA, 19 nt, Artificial Sequence
  Description of Artificial Sequence: Synthetic oligonucleotide
  Antisense strand to SEQ ID NO: 1260296
uaaguccaucugaggacac

SEQ ID NO: 1260298 - RNA, 19 nt, Artificial Sequence
  Description of Artificial Sequence: Synthetic oligonucleotide
  Sense strand starting at position 1566 of SEQ ID NO: 1241281
ucuaaugagacgcauguau

SEQ ID NO: 1260299 - RNA, 19 nt, Artificial Sequence
  Description of Artificial Sequence: Synthetic oligonucleotide
  Antisense strand to SEQ ID NO: 1260298
auacaugcgucucauuaga

SEQ ID NO: 1260300 - RNA, 19 nt, Artificial Sequence
  Description of Artificial Sequence: Synthetic oligonucleotide
  Sense strand starting at position 1603 of SEQ ID NO: 1241281
augucaaauguccacauca

SEQ ID NO: 1260301 - RNA, 19 nt, Artificial Sequence
  Description of Artificial Sequence: Synthetic oligonucleotide
  Antisense strand to SEQ ID NO: 1260300
ugauguggacauuugacau

SEQ ID NO: 1260302 - RNA, 19 nt, Artificial Sequence
  Description of Artificial Sequence: Synthetic oligonucleotide
  Sense strand starting at position 1605 of SEQ ID NO: 1241281
gucaaauguccacaucaga

SEQ ID NO: 1260303 - RNA, 19 nt, Artificial Sequence
  Description of Artificial Sequence: Synthetic oligonucleotide
  Antisense strand to SEQ ID NO: 1260302
ucugauguggacauuugac

SEQ ID NO: 1260304 - RNA, 19 nt, Artificial Sequence
  Description of Artificial Sequence: Synthetic oligonucleotide
  Sense strand starting at position 1762 of SEQ ID NO: 1241281
agggaaagccuguaucagu

SEQ ID NO: 1260305 - RNA, 19 nt, Artificial Sequence
  Description of Artificial Sequence: Synthetic oligonucleotide
  Antisense strand to SEQ ID NO: 1260304
acugauacaggcuuucccu

SEQ ID NO: 1260306 - RNA, 19 nt, Artificial Sequence
  Description of Artificial Sequence: Synthetic oligonucleotide
  Sense strand starting at position 1783 of SEQ ID NO: 1241281
gacugaggcugaccagaau

SEQ ID NO: 1260307 - RNA, 19 nt, Artificial Sequence
  Description of Artificial Sequence: Synthetic oligonucleotide
  Antisense strand to SEQ ID NO: 1260306
auucuggucagccucaguc

SEQ ID NO: 1260308 - RNA, 19 nt, Artificial Sequence
  Description of Artificial Sequence: Synthetic oligonucleotide
  Sense strand starting at position 2014 of SEQ ID NO: 1241281
ccuggaaaucugcagcagu

SEQ ID NO: 1260309 - RNA, 19 nt, Artificial Sequence
  Description of Artificial Sequence: Synthetic oligonucleotide
  Antisense strand to SEQ ID NO: 1260308
acugcugcagauuuccagg

SEQ ID NO: 1260310 - RNA, 19 nt, Artificial Sequence
  Description of Artificial Sequence: Synthetic oligonucleotide
  Sense strand starting at position 2096 of SEQ ID NO: 1241281
ggaauagccuuauuaugug

SEQ ID NO: 1260311 - RNA, 19 nt, Artificial Sequence
  Description of Artificial Sequence: Synthetic oligonucleotide
  Antisense strand to SEQ ID NO: 1260310
cacauaauaaggcuauucc

SEQ ID NO: 1260312 - RNA, 19 nt, Artificial Sequence
  Description of Artificial Sequence: Synthetic oligonucleotide
  Sense strand starting at position 2125 of SEQ ID NO: 1241281
uguaucuucucaucuggaa

SEQ ID NO: 1260313 - RNA, 19 nt, Artificial Sequence
  Description of Artificial Sequence: Synthetic oligonucleotide
  Antisense strand to SEQ ID NO: 1260312
uuccagaugagaagauaca

SEQ ID NO: 1260314 - RNA, 19 nt, Artificial Sequence
  Description of Artificial Sequence: Synthetic oligonucleotide
  Sense strand starting at position 2139 of SEQ ID NO: 1241281
uggaacacuugaguuuauu

SEQ ID NO: 1260315 - RNA, 19 nt, Artificial Sequence
  Description of Artificial Sequence: Synthetic oligonucleotide
  Antisense strand to SEQ ID NO: 1260314
aauaaacucaaguguucca

SEQ ID NO: 1260316 - RNA, 19 nt, Artificial Sequence
  Description of Artificial Sequence: Synthetic oligonucleotide
  Sense strand starting at position 2261 of SEQ ID NO: 1241281
uggugcuaucaguagacaa

SEQ ID NO: 1260317 - RNA, 19 nt, Artificial Sequence
  Description of Artificial Sequence: Synthetic oligonucleotide
  Antisense strand to SEQ ID NO: 1260316
uugucuacugauagcacca

SEQ ID NO: 1260318 - RNA, 19 nt, Artificial Sequence
  Description of Artificial Sequence: Synthetic oligonucleotide
  Sense strand starting at position 2310 of SEQ ID NO: 1241281
gacaaaguucugggaaguc

SEQ ID NO: 1260319 - RNA, 19 nt, Artificial Sequence
  Description of Artificial Sequence: Synthetic oligonucleotide
  Antisense strand to SEQ ID NO: 1260318
gacuucccagaacuuuguc

SEQ ID NO: 1260320 - RNA, 19 nt, Artificial Sequence
  Description of Artificial Sequence: Synthetic oligonucleotide
  Sense strand starting at position 2384 of SEQ ID NO: 1241281
cauugugaacugugggacu

SEQ ID NO: 1260321 - RNA, 19 nt, Artificial Sequence
  Description of Artificial Sequence: Synthetic oligonucleotide
  Antisense strand to SEQ ID NO: 1260320
agucccacaguucacaaug

SEQ ID NO: 1260322 - RNA, 19 nt, Artificial Sequence
  Description of Artificial Sequence: Synthetic oligonucleotide
  Sense strand starting at position 2386 of SEQ ID NO: 1241281
uugugaacugugggacuuu

SEQ ID NO: 1260323 - RNA, 19 nt, Artificial Sequence
  Description of Artificial Sequence: Synthetic oligonucleotide
  Antisense strand to SEQ ID NO: 1260322
aaagucccacaguucacaa

SEQ ID NO: 1260324 - RNA, 19 nt, Artificial Sequence
  Description of Artificial Sequence: Synthetic oligonucleotide
  Sense strand starting at position 2397 of SEQ ID NO: 1241281
gggacuuucguugagaggu

SEQ ID NO: 1260325 - RNA, 19 nt, Artificial Sequence
  Description of Artificial Sequence: Synthetic oligonucleotide
  Antisense strand to SEQ ID NO: 1260324
accucucaacgaaaguccc

SEQ ID NO: 1260326 - RNA, 19 nt, Artificial Sequence
  Description of Artificial Sequence: Synthetic oligonucleotide
  Sense strand starting at position 2403 of SEQ ID NO: 1241281
uucguugagaggugaaaga

SEQ ID NO: 1260327 - RNA, 19 nt, Artificial Sequence
  Description of Artificial Sequence: Synthetic oligonucleotide
  Antisense strand to SEQ ID NO: 1260326
ucuuucaccucucaacgaa

SEQ ID NO: 1260328 - RNA, 19 nt, Artificial Sequence
  Description of Artificial Sequence: Synthetic oligonucleotide
  Sense strand starting at position 2414 of SEQ ID NO: 1241281
gugaaagaguaucuaguga

SEQ ID NO: 1260329 - RNA, 19 nt, Artificial Sequence
  Description of Artificial Sequence: Synthetic oligonucleotide
  Antisense strand to SEQ ID NO: 1260328
ucacuagauacucuuucac

SEQ ID NO: 1260330 - RNA, 19 nt, Artificial Sequence
  Description of Artificial Sequence: Synthetic oligonucleotide
  Sense strand starting at position 2430 of SEQ ID NO: 1241281
ugaaacugguggccagaua

SEQ ID NO: 1260331 - RNA, 19 nt, Artificial Sequence
  Description of Artificial Sequence: Synthetic oligonucleotide
  Antisense strand to SEQ ID NO: 1260330
uaucuggccaccaguuuca

SEQ ID NO: 1260332 - RNA, 19 nt, Artificial Sequence
  Description of Artificial Sequence: Synthetic oligonucleotide
  Sense strand starting at position 2439 of SEQ ID NO: 1241281
uggccagauaguuaugauu

SEQ ID NO: 1260333 - RNA, 19 nt, Artificial Sequence
  Description of Artificial Sequence: Synthetic oligonucleotide
  Antisense strand to SEQ ID NO: 1260332
aaucauaacuaucuggcca

SEQ ID NO: 1260334 - RNA, 19 nt, Artificial Sequence
  Description of Artificial Sequence: Synthetic oligonucleotide
  Sense strand starting at position 2490 of SEQ ID NO: 1241281
uuuguuauugucgaugaaa

SEQ ID NO: 1260335 - RNA, 19 nt, Artificial Sequence
  Description of Artificial Sequence: Synthetic oligonucleotide
  Antisense strand to SEQ ID NO: 1260334
uuucaucgacaauaacaaa

SEQ ID NO: 1260336 - RNA, 19 nt, Artificial Sequence
  Description of Artificial Sequence: Synthetic oligonucleotide
  Sense strand starting at position 2493 of SEQ ID NO: 1241281
guuauugucgaugaaacga

SEQ ID NO: 1260337 - RNA, 19 nt, Artificial Sequence
  Description of Artificial Sequence: Synthetic oligonucleotide
  Antisense strand to SEQ ID NO: 1260336
ucguuucaucgacaauaac

SEQ ID NO: 1260338 - RNA, 19 nt, Artificial Sequence
  Description of Artificial Sequence: Synthetic oligonucleotide
  Sense strand starting at position 3159 of SEQ ID NO: 1241281
agagaccaauucuuucgaa

SEQ ID NO: 1260339 - RNA, 19 nt, Artificial Sequence
  Description of Artificial Sequence: Synthetic oligonucleotide
  Antisense strand to SEQ ID NO: 1260338
uucgaaagaauuggucucu

SEQ ID NO: 1260340 - RNA, 19 nt, Artificial Sequence
  Description of Artificial Sequence: Synthetic oligonucleotide
  Sense strand starting at position 3545 of SEQ ID NO: 1241281
agaguuuaguccucauuaa

SEQ ID NO: 1260341 - RNA, 19 nt, Artificial Sequence
  Description of Artificial Sequence: Synthetic oligonucleotide
  Antisense strand to SEQ ID NO: 1260340
uuaaugaggacuaaacucu

SEQ ID NO: 1260342 - RNA, 19 nt, Artificial Sequence
  Description of Artificial Sequence: Synthetic oligonucleotide
  Sense strand starting at position 3840 of SEQ ID NO: 1241281
ccuaaauugguauaugcaa

SEQ ID NO: 1260343 - RNA, 19 nt, Artificial Sequence
  Description of Artificial Sequence: Synthetic oligonucleotide
  Antisense strand to SEQ ID NO: 1260342
uugcauauaccaauuuagg

SEQ ID NO: 1260344 - RNA, 19 nt, Artificial Sequence
  Description of Artificial Sequence: Synthetic oligonucleotide
  Sense strand starting at position 3848 of SEQ ID NO: 1241281
gguauaugcaacgaauauu

SEQ ID NO: 1260345 - RNA, 19 nt, Artificial Sequence
  Description of Artificial Sequence: Synthetic oligonucleotide
  Antisense strand to SEQ ID NO: 1260344
aauauucguugcauauacc

SEQ ID NO: 1260346 - RNA, 19 nt, Artificial Sequence
  Description of Artificial Sequence: Synthetic oligonucleotide
  Sense strand starting at position 21 of SEQ ID NO: 1241282
agcugucuggucuaaugag

SEQ ID NO: 1260347 - RNA, 19 nt, Artificial Sequence
  Description of Artificial Sequence: Synthetic oligonucleotide
  Antisense strand to SEQ ID NO: 1260346
cucauuagaccagacagcu

SEQ ID NO: 1260348 - RNA, 19 nt, Artificial Sequence
  Description of Artificial Sequence: Synthetic oligonucleotide
  Sense strand starting at position 30 of SEQ ID NO: 1241282
gucuaaugagagugaggga

SEQ ID NO: 1260349 - RNA, 19 nt, Artificial Sequence
  Description of Artificial Sequence: Synthetic oligonucleotide
  Antisense strand to SEQ ID NO: 1260348
ucccucacucucauuagac

SEQ ID NO: 1260350 - RNA, 19 nt, Artificial Sequence
  Description of Artificial Sequence: Synthetic oligonucleotide
  Sense strand starting at position 162 of SEQ ID NO: 1241282
ugucucucgaaugaaugua

SEQ ID NO: 1260351 - RNA, 19 nt, Artificial Sequence
  Description of Artificial Sequence: Synthetic oligonucleotide
  Antisense strand to SEQ ID NO: 1260350
uacauucauucgagagaca

SEQ ID NO: 1260352 - RNA, 19 nt, Artificial Sequence
  Description of Artificial Sequence: Synthetic oligonucleotide
  Sense strand starting at position 218 of SEQ ID NO: 1241282
ggaaacuugcccuacucaa

SEQ ID NO: 1260353 - RNA, 19 nt, Artificial Sequence
  Description of Artificial Sequence: Synthetic oligonucleotide
  Antisense strand to SEQ ID NO: 1260352
uugaguagggcaaguuucc

SEQ ID NO: 1260354 - RNA, 19 nt, Artificial Sequence
  Description of Artificial Sequence: Synthetic oligonucleotide
  Sense strand starting at position 265 of SEQ ID NO: 1241282
cucucauuauuggugaauu

SEQ ID NO: 1260355 - RNA, 19 nt, Artificial Sequence
  Description of Artificial Sequence: Synthetic oligonucleotide
  Antisense strand to SEQ ID NO: 1260354
aauucaccaauaaugagag

SEQ ID NO: 1260356 - RNA, 19 nt, Artificial Sequence
  Description of Artificial Sequence: Synthetic oligonucleotide
  Sense strand starting at position 276 of SEQ ID NO: 1241282
ggugaauuggugcaaucuu

SEQ ID NO: 1260357 - RNA, 19 nt, Artificial Sequence
  Description of Artificial Sequence: Synthetic oligonucleotide
  Antisense strand to SEQ ID NO: 1260356
aagauugcaccaauucacc

SEQ ID NO: 1260358 - RNA, 19 nt, Artificial Sequence
  Description of Artificial Sequence: Synthetic oligonucleotide
  Sense strand starting at position 329 of SEQ ID NO: 1241282
guacauauuccaugaccua

SEQ ID NO: 1260359 - RNA, 19 nt, Artificial Sequence
  Description of Artificial Sequence: Synthetic oligonucleotide
  Antisense strand to SEQ ID NO: 1260358
uaggucauggaauauguac

SEQ ID NO: 1260360 - RNA, 19 nt, Artificial Sequence
  Description of Artificial Sequence: Synthetic oligonucleotide
  Sense strand starting at position 351 of SEQ ID NO: 1241282
guuauacuucuaggaacuu

SEQ ID NO: 1260361 - RNA, 19 nt, Artificial Sequence
  Description of Artificial Sequence: Synthetic oligonucleotide
  Antisense strand to SEQ ID NO: 1260360
aaguuccuagaaguauaac

SEQ ID NO: 1260362 - RNA, 19 nt, Artificial Sequence
  Description of Artificial Sequence: Synthetic oligonucleotide
  Sense strand starting at position 392 of SEQ ID NO: 1241282
aggacauaaauguguguau

SEQ ID NO: 1260363 - RNA, 19 nt, Artificial Sequence
  Description of Artificial Sequence: Synthetic oligonucleotide
  Antisense strand to SEQ ID NO: 1260362
auacacacauuuauguccu

SEQ ID NO: 1260364 - RNA, 19 nt, Artificial Sequence
  Description of Artificial Sequence: Synthetic oligonucleotide
  Sense strand starting at position 394 of SEQ ID NO: 1241282
gacauaaauguguguauca

SEQ ID NO: 1260365 - RNA, 19 nt, Artificial Sequence
  Description of Artificial Sequence: Synthetic oligonucleotide
  Antisense strand to SEQ ID NO: 1260364
ugauacacacauuuauguc

SEQ ID NO: 1260366 - RNA, 19 nt, Artificial Sequence
  Description of Artificial Sequence: Synthetic oligonucleotide
  Sense strand starting at position 613 of SEQ ID NO: 1241282
uauguaugucauggauaga

SEQ ID NO: 1260367 - RNA, 19 nt, Artificial Sequence
  Description of Artificial Sequence: Synthetic oligonucleotide
  Antisense strand to SEQ ID NO: 1260366
ucuauccaugacauacaua

SEQ ID NO: 1260368 - RNA, 19 nt, Artificial Sequence
  Description of Artificial Sequence: Synthetic oligonucleotide
  Sense strand starting at position 796 of SEQ ID NO: 1241282
gaaagagacuaugucaugu

SEQ ID NO: 1260369 - RNA, 19 nt, Artificial Sequence
  Description of Artificial Sequence: Synthetic oligonucleotide
  Antisense strand to SEQ ID NO: 1260368
acaugacauagucucuuuc

SEQ ID NO: 1260370 - RNA, 19 nt, Artificial Sequence
  Description of Artificial Sequence: Synthetic oligonucleotide
  Sense strand starting at position 877 of SEQ ID NO: 1241282
agcaucuuguauuuauagu

SEQ ID NO: 1260371 - RNA, 19 nt, Artificial Sequence
  Description of Artificial Sequence: Synthetic oligonucleotide
  Antisense strand to SEQ ID NO: 1260370
acuauaaauacaagaugcu

SEQ ID NO: 1260372 - RNA, 19 nt, Artificial Sequence
  Description of Artificial Sequence: Synthetic oligonucleotide
  Sense strand starting at position 972 of SEQ ID NO: 1241282
agguguuaagaggaagcua

SEQ ID NO: 1260373 - RNA, 19 nt, Artificial Sequence
  Description of Artificial Sequence: Synthetic oligonucleotide
  Antisense strand to SEQ ID NO: 1260372
uagcuuccucuuaacaccu

SEQ ID NO: 1260374 - RNA, 19 nt, Artificial Sequence
  Description of Artificial Sequence: Synthetic oligonucleotide
  Sense strand starting at position 1002 of SEQ ID NO: 1241282
uggacacaucucugaaauu

SEQ ID NO: 1260375 - RNA, 19 nt, Artificial Sequence
  Description of Artificial Sequence: Synthetic oligonucleotide
  Antisense strand to SEQ ID NO: 1260374
aauuucagagaugugucca

SEQ ID NO: 1260376 - RNA, 19 nt, Artificial Sequence
  Description of Artificial Sequence: Synthetic oligonucleotide
  Sense strand starting at position 1133 of SEQ ID NO: 1241282
gagggcuuguacccaaaca

SEQ ID NO: 1260377 - RNA, 19 nt, Artificial Sequence
  Description of Artificial Sequence: Synthetic oligonucleotide
  Antisense strand to SEQ ID NO: 1260376
uguuuggguacaagcccuc

SEQ ID NO: 1260378 - RNA, 19 nt, Artificial Sequence
  Description of Artificial Sequence: Synthetic oligonucleotide
  Sense strand starting at position 1174 of SEQ ID NO: 1241282
guccucucugcugagauau

SEQ ID NO: 1260379 - RNA, 19 nt, Artificial Sequence
  Description of Artificial Sequence: Synthetic oligonucleotide
  Antisense strand to SEQ ID NO: 1260378
auaucucagcagagaggac

SEQ ID NO: 1260380 - RNA, 19 nt, Artificial Sequence
  Description of Artificial Sequence: Synthetic oligonucleotide
  Sense strand starting at position 1185 of SEQ ID NO: 1241282
ugagauauccuuugugauc

SEQ ID NO: 1260381 - RNA, 19 nt, Artificial Sequence
  Description of Artificial Sequence: Synthetic oligonucleotide
  Antisense strand to SEQ ID NO: 1260380
gaucacaaaggauaucuca

SEQ ID NO: 1260382 - RNA, 19 nt, Artificial Sequence
  Description of Artificial Sequence: Synthetic oligonucleotide
  Sense strand starting at position 1186 of SEQ ID NO: 1241282
gagauauccuuugugaucu

SEQ ID NO: 1260383 - RNA, 19 nt, Artificial Sequence
  Description of Artificial Sequence: Synthetic oligonucleotide
  Antisense strand to SEQ ID NO: 1260382
agaucacaaaggauaucuc

SEQ ID NO: 1260384 - RNA, 19 nt, Artificial Sequence
  Description of Artificial Sequence: Synthetic oligonucleotide
  Sense strand starting at position 1213 of SEQ ID NO: 1241282
ugcuuuaaauaccugaaga

SEQ ID NO: 1260385 - RNA, 19 nt, Artificial Sequence
  Description of Artificial Sequence: Synthetic oligonucleotide
  Antisense strand to SEQ ID NO: 1260384
ucuucagguauuuaaagca

SEQ ID NO: 1260386 - RNA, 19 nt, Artificial Sequence
  Description of Artificial Sequence: Synthetic oligonucleotide
  Sense strand starting at position 1242 of SEQ ID NO: 1241282
gcuuuaguuaaugagacag

SEQ ID NO: 1260387 - RNA, 19 nt, Artificial Sequence
  Description of Artificial Sequence: Synthetic oligonucleotide
  Antisense strand to SEQ ID NO: 1260386
cugucucauuaacuaaagc

SEQ ID NO: 1260388 - RNA, 19 nt, Artificial Sequence
  Description of Artificial Sequence: Synthetic oligonucleotide
  Sense strand starting at position 1402 of SEQ ID NO: 1241282
ucuuaaacaugggcugaaa

SEQ ID NO: 1260389 - RNA, 19 nt, Artificial Sequence
  Description of Artificial Sequence: Synthetic oligonucleotide
  Antisense strand to SEQ ID NO: 1260388
uuucagcccauguuuaaga

SEQ ID NO: 1260390 - RNA, 19 nt, Artificial Sequence
  Description of Artificial Sequence: Synthetic oligonucleotide
  Sense strand starting at position 1404 of SEQ ID NO: 1241282
uuaaacaugggcugaaauu

SEQ ID NO: 1260391 - RNA, 19 nt, Artificial Sequence
  Description of Artificial Sequence: Synthetic oligonucleotide
  Antisense strand to SEQ ID NO: 1260390
aauuucagcccauguuuaa

SEQ ID NO: 1260392 - RNA, 19 nt, Artificial Sequence
  Description of Artificial Sequence: Synthetic oligonucleotide
  Sense strand starting at position 1875 of SEQ ID NO: 1241282
gaagaacaucgcgacuaca

SEQ ID NO: 1260393 - RNA, 19 nt, Artificial Sequence
  Description of Artificial Sequence: Synthetic oligonucleotide
  Antisense strand to SEQ ID NO: 1260392
uguagucgcgauguucuuc

SEQ ID NO: 1260394 - RNA, 19 nt, Artificial Sequence
  Description of Artificial Sequence: Synthetic oligonucleotide
  Sense strand starting at position 2010 of SEQ ID NO: 1241282
gucuccucccauuggacaa

SEQ ID NO: 1260395 - RNA, 19 nt, Artificial Sequence
  Description of Artificial Sequence: Synthetic oligonucleotide
  Antisense strand to SEQ ID NO: 1260394
uuguccaaugggaggagac

SEQ ID NO: 1260396 - RNA, 19 nt, Artificial Sequence
  Description of Artificial Sequence: Synthetic oligonucleotide
  Sense strand starting at position 2069 of SEQ ID NO: 1241282
agagucuuuguuuaauuac

SEQ ID NO: 1260397 - RNA, 19 nt, Artificial Sequence
  Description of Artificial Sequence: Synthetic oligonucleotide
  Antisense strand to SEQ ID NO: 1260396
guaauuaaacaaagacucu

SEQ ID NO: 1260398 - RNA, 19 nt, Artificial Sequence
  Description of Artificial Sequence: Synthetic oligonucleotide
  Sense strand starting at position 2247 of SEQ ID NO: 1241282
uccaucuugcaauagguua

SEQ ID NO: 1260399 - RNA, 19 nt, Artificial Sequence
  Description of Artificial Sequence: Synthetic oligonucleotide
  Antisense strand to SEQ ID NO: 1260398
uaaccuauugcaagaugga

SEQ ID NO: 1260400 - RNA, 19 nt, Artificial Sequence
  Description of Artificial Sequence: Synthetic oligonucleotide
  Sense strand starting at position 2292 of SEQ ID NO: 1241282
uaugcuaaacguuauagga

SEQ ID NO: 1260401 - RNA, 19 nt, Artificial Sequence
  Description of Artificial Sequence: Synthetic oligonucleotide
  Antisense strand to SEQ ID NO: 1260400
uccuauaacguuuagcaua

SEQ ID NO: 1260402 - RNA, 19 nt, Artificial Sequence
  Description of Artificial Sequence: Synthetic oligonucleotide
  Sense strand starting at position 2352 of SEQ ID NO: 1241282
gagccaaguccaggauucu

SEQ ID NO: 1260403 - RNA, 19 nt, Artificial Sequence
  Description of Artificial Sequence: Synthetic oligonucleotide
  Antisense strand to SEQ ID NO: 1260402
agaauccuggacuuggcuc

SEQ ID NO: 1260404 - RNA, 19 nt, Artificial Sequence
  Description of Artificial Sequence: Synthetic oligonucleotide
  Sense strand starting at position 2378 of SEQ ID NO: 1241282
aucagcaagucauugggau

SEQ ID NO: 1260405 - RNA, 19 nt, Artificial Sequence
  Description of Artificial Sequence: Synthetic oligonucleotide
  Antisense strand to SEQ ID NO: 1260404
aucccaaugacuugcugau

SEQ ID NO: 1260406 - RNA, 19 nt, Artificial Sequence
  Description of Artificial Sequence: Synthetic oligonucleotide
  Sense strand starting at position 2422 of SEQ ID NO: 1241282
cuguuauguccucaagaua

SEQ ID NO: 1260407 - RNA, 19 nt, Artificial Sequence
  Description of Artificial Sequence: Synthetic oligonucleotide
  Antisense strand to SEQ ID NO: 1260406
uaucuugaggacauaacag

SEQ ID NO: 1260408 - RNA, 19 nt, Artificial Sequence
  Description of Artificial Sequence: Synthetic oligonucleotide
  Sense strand starting at position 2527 of SEQ ID NO: 1241282
cacucaguccucuggaaga

SEQ ID NO: 1260409 - RNA, 19 nt, Artificial Sequence
  Description of Artificial Sequence: Synthetic oligonucleotide
  Antisense strand to SEQ ID NO: 1260408
ucuuccagaggacugagug

SEQ ID NO: 1260410 - RNA, 19 nt, Artificial Sequence
  Description of Artificial Sequence: Synthetic oligonucleotide
  Sense strand starting at position 2545 of SEQ ID NO: 1241282
agaugccuagugugaaaga

SEQ ID NO: 1260411 - RNA, 19 nt, Artificial Sequence
  Description of Artificial Sequence: Synthetic oligonucleotide
  Antisense strand to SEQ ID NO: 1260410
ucuuucacacuaggcaucu

SEQ ID NO: 1260412 - RNA, 19 nt, Artificial Sequence
  Description of Artificial Sequence: Synthetic oligonucleotide
  Sense strand starting at position 2695 of SEQ ID NO: 1241282
ggaacagacauucgagguu

SEQ ID NO: 1260413 - RNA, 19 nt, Artificial Sequence
  Description of Artificial Sequence: Synthetic oligonucleotide
  Antisense strand to SEQ ID NO: 1260412
aaccucgaaugucuguucc

SEQ ID NO: 1260414 - RNA, 19 nt, Artificial Sequence
  Description of Artificial Sequence: Synthetic oligonucleotide
  Sense strand starting at position 2712 of SEQ ID NO: 1241282
uucugaguccaaugggaac

SEQ ID NO: 1260415 - RNA, 19 nt, Artificial Sequence
  Description of Artificial Sequence: Synthetic oligonucleotide
  Antisense strand to SEQ ID NO: 1260414
guucccauuggacucagaa

SEQ ID NO: 1260416 - RNA, 19 nt, Artificial Sequence
  Description of Artificial Sequence: Synthetic oligonucleotide
  Sense strand starting at position 2913 of SEQ ID NO: 1241282
auuaguuaacuagagcgaa

SEQ ID NO: 1260417 - RNA, 19 nt, Artificial Sequence
  Description of Artificial Sequence: Synthetic oligonucleotide
  Antisense strand to SEQ ID NO: 1260416
uucgcucuaguuaacuaau

SEQ ID NO: 1260418 - RNA, 19 nt, Artificial Sequence
  Description of Artificial Sequence: Synthetic oligonucleotide
  Sense strand starting at position 2917 of SEQ ID NO: 1241282
guuaacuagagcgaaguua

SEQ ID NO: 1260419 - RNA, 19 nt, Artificial Sequence
  Description of Artificial Sequence: Synthetic oligonucleotide
  Antisense strand to SEQ ID NO: 1260418
uaacuucgcucuaguuaac

SEQ ID NO: 1260420 - RNA, 19 nt, Artificial Sequence
  Description of Artificial Sequence: Synthetic oligonucleotide
  Sense strand starting at position 3502 of SEQ ID NO: 1241282
gugcguggucccagaaagu

SEQ ID NO: 1260421 - RNA, 19 nt, Artificial Sequence
  Description of Artificial Sequence: Synthetic oligonucleotide
  Antisense strand to SEQ ID NO: 1260420
acuuucugggaccacgcac

SEQ ID NO: 1260422 - RNA, 19 nt, Artificial Sequence
  Description of Artificial Sequence: Synthetic oligonucleotide
  Sense strand starting at position 3568 of SEQ ID NO: 1241282
ucgguuucccaguauagga

SEQ ID NO: 1260423 - RNA, 19 nt, Artificial Sequence
  Description of Artificial Sequence: Synthetic oligonucleotide
  Antisense strand to SEQ ID NO: 1260422
uccuauacugggaaaccga

SEQ ID NO: 1260424 - RNA, 19 nt, Artificial Sequence
  Description of Artificial Sequence: Synthetic oligonucleotide
  Sense strand starting at position 3608 of SEQ ID NO: 1241282
uagaguuguccugagggug

SEQ ID NO: 1260425 - RNA, 19 nt, Artificial Sequence
  Description of Artificial Sequence: Synthetic oligonucleotide
  Antisense strand to SEQ ID NO: 1260424
cacccucaggacaacucua

SEQ ID NO: 1260426 - RNA, 19 nt, Artificial Sequence
  Description of Artificial Sequence: Synthetic oligonucleotide
  Sense strand starting at position 50 of SEQ ID NO: 1241283
caaccuacuugggucaaga

SEQ ID NO: 1260427 - RNA, 19 nt, Artificial Sequence
  Description of Artificial Sequence: Synthetic oligonucleotide
  Antisense strand to SEQ ID NO: 1260426
ucuugacccaaguagguug

SEQ ID NO: 1260428 - RNA, 19 nt, Artificial Sequence
  Description of Artificial Sequence: Synthetic oligonucleotide
  Sense strand starting at position 79 of SEQ ID NO: 1241283
auacuuauugugcaucaca

SEQ ID NO: 1260429 - RNA, 19 nt, Artificial Sequence
  Description of Artificial Sequence: Synthetic oligonucleotide
  Antisense strand to SEQ ID NO: 1260428
ugugaugcacaauaaguau

SEQ ID NO: 1260430 - RNA, 19 nt, Artificial Sequence
  Description of Artificial Sequence: Synthetic oligonucleotide
  Sense strand starting at position 110 of SEQ ID NO: 1241283
guauguucuguugacacaa

SEQ ID NO: 1260431 - RNA, 19 nt, Artificial Sequence
  Description of Artificial Sequence: Synthetic oligonucleotide
  Antisense strand to SEQ ID NO: 1260430
uugugucaacagaacauac

SEQ ID NO: 1260432 - RNA, 19 nt, Artificial Sequence
  Description of Artificial Sequence: Synthetic oligonucleotide
  Sense strand starting at position 216 of SEQ ID NO: 1241283
acagcugggcccuaauuaa

SEQ ID NO: 1260433 - RNA, 19 nt, Artificial Sequence
  Description of Artificial Sequence: Synthetic oligonucleotide
  Antisense strand to SEQ ID NO: 1260432
uuaauuagggcccagcugu

SEQ ID NO: 1260434 - RNA, 19 nt, Artificial Sequence
  Description of Artificial Sequence: Synthetic oligonucleotide
  Sense strand starting at position 241 of SEQ ID NO: 1241283
agcugucuggucuaaugag

SEQ ID NO: 1260435 - RNA, 19 nt, Artificial Sequence
  Description of Artificial Sequence: Synthetic oligonucleotide
  Antisense strand to SEQ ID NO: 1260434
cucauuagaccagacagcu

SEQ ID NO: 1260436 - RNA, 19 nt, Artificial Sequence
  Description of Artificial Sequence: Synthetic oligonucleotide
  Sense strand starting at position 250 of SEQ ID NO: 1241283
gucuaaugagagugaggga

SEQ ID NO: 1260437 - RNA, 19 nt, Artificial Sequence
  Description of Artificial Sequence: Synthetic oligonucleotide
  Antisense strand to SEQ ID NO: 1260436
ucccucacucucauuagac

SEQ ID NO: 1260438 - RNA, 19 nt, Artificial Sequence
  Description of Artificial Sequence: Synthetic oligonucleotide
  Sense strand starting at position 382 of SEQ ID NO: 1241283
ugucucucgaaugaaugua

SEQ ID NO: 1260439 - RNA, 19 nt, Artificial Sequence
  Description of Artificial Sequence: Synthetic oligonucleotide
  Antisense strand to SEQ ID NO: 1260438
uacauucauucgagagaca

SEQ ID NO: 1260440 - RNA, 19 nt, Artificial Sequence
  Description of Artificial Sequence: Synthetic oligonucleotide
  Sense strand starting at position 438 of SEQ ID NO: 1241283
ggaaacuugcccuacucaa

SEQ ID NO: 1260441 - RNA, 19 nt, Artificial Sequence
  Description of Artificial Sequence: Synthetic oligonucleotide
  Antisense strand to SEQ ID NO: 1260440
uugaguagggcaaguuucc

SEQ ID NO: 1260442 - RNA, 19 nt, Artificial Sequence
  Description of Artificial Sequence: Synthetic oligonucleotide
  Sense strand starting at position 485 of SEQ ID NO: 1241283
cucucauuauuggugaauu

SEQ ID NO: 1260443 - RNA, 19 nt, Artificial Sequence
  Description of Artificial Sequence: Synthetic oligonucleotide
  Antisense strand to SEQ ID NO: 1260442
aauucaccaauaaugagag

SEQ ID NO: 1260444 - RNA, 19 nt, Artificial Sequence
  Description of Artificial Sequence: Synthetic oligonucleotide
  Sense strand starting at position 496 of SEQ ID NO: 1241283
ggugaauuggugcaaucuu

SEQ ID NO: 1260445 - RNA, 19 nt, Artificial Sequence
  Description of Artificial Sequence: Synthetic oligonucleotide
  Antisense strand to SEQ ID NO: 1260444
aagauugcaccaauucacc

SEQ ID NO: 1260446 - RNA, 19 nt, Artificial Sequence
  Description of Artificial Sequence: Synthetic oligonucleotide
  Sense strand starting at position 549 of SEQ ID NO: 1241283
guacauauuccaugaccua

SEQ ID NO: 1260447 - RNA, 19 nt, Artificial Sequence
  Description of Artificial Sequence: Synthetic oligonucleotide
  Antisense strand to SEQ ID NO: 1260446
uaggucauggaauauguac

SEQ ID NO: 1260448 - RNA, 19 nt, Artificial Sequence
  Description of Artificial Sequence: Synthetic oligonucleotide
  Sense strand starting at position 571 of SEQ ID NO: 1241283
guuauacuucuaggaacuu

SEQ ID NO: 1260449 - RNA, 19 nt, Artificial Sequence
  Description of Artificial Sequence: Synthetic oligonucleotide
  Antisense strand to SEQ ID NO: 1260448
aaguuccuagaaguauaac

SEQ ID NO: 1260450 - RNA, 19 nt, Artificial Sequence
  Description of Artificial Sequence: Synthetic oligonucleotide
  Sense strand starting at position 612 of SEQ ID NO: 1241283
aggacauaaauguguguau

SEQ ID NO: 1260451 - RNA, 19 nt, Artificial Sequence
  Description of Artificial Sequence: Synthetic oligonucleotide
  Antisense strand to SEQ ID NO: 1260450
auacacacauuuauguccu

SEQ ID NO: 1260452 - RNA, 19 nt, Artificial Sequence
  Description of Artificial Sequence: Synthetic oligonucleotide
  Sense strand starting at position 833 of SEQ ID NO: 1241283
uauguaugucauggauaga

SEQ ID NO: 1260453 - RNA, 19 nt, Artificial Sequence
  Description of Artificial Sequence: Synthetic oligonucleotide
  Antisense strand to SEQ ID NO: 1260452
ucuauccaugacauacaua

SEQ ID NO: 1260454 - RNA, 19 nt, Artificial Sequence
  Description of Artificial Sequence: Synthetic oligonucleotide
  Sense strand starting at position 1016 of SEQ ID NO: 1241283
gaaagagacuaugucaugu

SEQ ID NO: 1260455 - RNA, 19 nt, Artificial Sequence
  Description of Artificial Sequence: Synthetic oligonucleotide
  Antisense strand to SEQ ID NO: 1260454
acaugacauagucucuuuc

SEQ ID NO: 1260456 - RNA, 19 nt, Artificial Sequence
  Description of Artificial Sequence: Synthetic oligonucleotide
  Sense strand starting at position 1097 of SEQ ID NO: 1241283
agcaucuuguauuuauagu

SEQ ID NO: 1260457 - RNA, 19 nt, Artificial Sequence
  Description of Artificial Sequence: Synthetic oligonucleotide
  Antisense strand to SEQ ID NO: 1260456
acuauaaauacaagaugcu

SEQ ID NO: 1260458 - RNA, 19 nt, Artificial Sequence
  Description of Artificial Sequence: Synthetic oligonucleotide
  Sense strand starting at position 1192 of SEQ ID NO: 1241283
agguguuaagaggaagcua

SEQ ID NO: 1260459 - RNA, 19 nt, Artificial Sequence
  Description of Artificial Sequence: Synthetic oligonucleotide
  Antisense strand to SEQ ID NO: 1260458
uagcuuccucuuaacaccu

SEQ ID NO: 1260460 - RNA, 19 nt, Artificial Sequence
  Description of Artificial Sequence: Synthetic oligonucleotide
  Sense strand starting at position 1222 of SEQ ID NO: 1241283
uggacacaucucugaaauu

SEQ ID NO: 1260461 - RNA, 19 nt, Artificial Sequence
  Description of Artificial Sequence: Synthetic oligonucleotide
  Antisense strand to SEQ ID NO: 1260460
aauuucagagaugugucca

SEQ ID NO: 1260462 - RNA, 19 nt, Artificial Sequence
  Description of Artificial Sequence: Synthetic oligonucleotide
  Sense strand starting at position 1353 of SEQ ID NO: 1241283
gagggcuuguacccaaaca

SEQ ID NO: 1260463 - RNA, 19 nt, Artificial Sequence
  Description of Artificial Sequence: Synthetic oligonucleotide
  Antisense strand to SEQ ID NO: 1260462
uguuuggguacaagcccuc

SEQ ID NO: 1260464 - RNA, 19 nt, Artificial Sequence
  Description of Artificial Sequence: Synthetic oligonucleotide
  Sense strand starting at position 1405 of SEQ ID NO: 1241283
ugagauauccuuugugauc

SEQ ID NO: 1260465 - RNA, 19 nt, Artificial Sequence
  Description of Artificial Sequence: Synthetic oligonucleotide
  Antisense strand to SEQ ID NO: 1260464
gaucacaaaggauaucuca

SEQ ID NO: 1260466 - RNA, 19 nt, Artificial Sequence
  Description of Artificial Sequence: Synthetic oligonucleotide
  Sense strand starting at position 1406 of SEQ ID NO: 1241283
gagauauccuuugugaucu

SEQ ID NO: 1260467 - RNA, 19 nt, Artificial Sequence
  Description of Artificial Sequence: Synthetic oligonucleotide
  Antisense strand to SEQ ID NO: 1260466
agaucacaaaggauaucuc

SEQ ID NO: 1260468 - RNA, 19 nt, Artificial Sequence
  Description of Artificial Sequence: Synthetic oligonucleotide
  Sense strand starting at position 1433 of SEQ ID NO: 1241283
ugcuuuaaauaccugaaga

SEQ ID NO: 1260469 - RNA, 19 nt, Artificial Sequence
  Description of Artificial Sequence: Synthetic oligonucleotide
  Antisense strand to SEQ ID NO: 1260468
ucuucagguauuuaaagca

SEQ ID NO: 1260470 - RNA, 19 nt, Artificial Sequence
  Description of Artificial Sequence: Synthetic oligonucleotide
  Sense strand starting at position 1462 of SEQ ID NO: 1241283
gcuuuaguuaaugagacag

SEQ ID NO: 1260471 - RNA, 19 nt, Artificial Sequence
  Description of Artificial Sequence: Synthetic oligonucleotide
  Antisense strand to SEQ ID NO: 1260470
cugucucauuaacuaaagc

SEQ ID NO: 1260472 - RNA, 19 nt, Artificial Sequence
  Description of Artificial Sequence: Synthetic oligonucleotide
  Sense strand starting at position 1622 of SEQ ID NO: 1241283
ucuuaaacaugggcugaaa

SEQ ID NO: 1260473 - RNA, 19 nt, Artificial Sequence
  Description of Artificial Sequence: Synthetic oligonucleotide
  Antisense strand to SEQ ID NO: 1260472
uuucagcccauguuuaaga

SEQ ID NO: 1260474 - RNA, 19 nt, Artificial Sequence
  Description of Artificial Sequence: Synthetic oligonucleotide
  Sense strand starting at position 1624 of SEQ ID NO: 1241283
uuaaacaugggcugaaauu

SEQ ID NO: 1260475 - RNA, 19 nt, Artificial Sequence
  Description of Artificial Sequence: Synthetic oligonucleotide
  Antisense strand to SEQ ID NO: 1260474
aauuucagcccauguuuaa

SEQ ID NO: 1260476 - RNA, 19 nt, Artificial Sequence
  Description of Artificial Sequence: Synthetic oligonucleotide
  Sense strand starting at position 2095 of SEQ ID NO: 1241283
gaagaacaucgcgacuaca

SEQ ID NO: 1260477 - RNA, 19 nt, Artificial Sequence
  Description of Artificial Sequence: Synthetic oligonucleotide
  Antisense strand to SEQ ID NO: 1260476
uguagucgcgauguucuuc

SEQ ID NO: 1260478 - RNA, 19 nt, Artificial Sequence
  Description of Artificial Sequence: Synthetic oligonucleotide
  Sense strand starting at position 2289 of SEQ ID NO: 1241283
agagucuuuguuuaauuac

SEQ ID NO: 1260479 - RNA, 19 nt, Artificial Sequence
  Description of Artificial Sequence: Synthetic oligonucleotide
  Antisense strand to SEQ ID NO: 1260478
guaauuaaacaaagacucu

SEQ ID NO: 1260480 - RNA, 19 nt, Artificial Sequence
  Description of Artificial Sequence: Synthetic oligonucleotide
  Sense strand starting at position 2467 of SEQ ID NO: 1241283
uccaucuugcaauagguua

SEQ ID NO: 1260481 - RNA, 19 nt, Artificial Sequence
  Description of Artificial Sequence: Synthetic oligonucleotide
  Antisense strand to SEQ ID NO: 1260480
uaaccuauugcaagaugga

SEQ ID NO: 1260482 - RNA, 19 nt, Artificial Sequence
  Description of Artificial Sequence: Synthetic oligonucleotide
  Sense strand starting at position 2512 of SEQ ID NO: 1241283
uaugcuaaacguuauagga

SEQ ID NO: 1260483 - RNA, 19 nt, Artificial Sequence
  Description of Artificial Sequence: Synthetic oligonucleotide
  Antisense strand to SEQ ID NO: 1260482
uccuauaacguuuagcaua

SEQ ID NO: 1260484 - RNA, 19 nt, Artificial Sequence
  Description of Artificial Sequence: Synthetic oligonucleotide
  Sense strand starting at position 2598 of SEQ ID NO: 1241283
aucagcaagucauugggau

SEQ ID NO: 1260485 - RNA, 19 nt, Artificial Sequence
  Description of Artificial Sequence: Synthetic oligonucleotide
  Antisense strand to SEQ ID NO: 1260484
aucccaaugacuugcugau

SEQ ID NO: 1260486 - RNA, 19 nt, Artificial Sequence
  Description of Artificial Sequence: Synthetic oligonucleotide
  Sense strand starting at position 2642 of SEQ ID NO: 1241283
cuguuauguccucaagaua

SEQ ID NO: 1260487 - RNA, 19 nt, Artificial Sequence
  Description of Artificial Sequence: Synthetic oligonucleotide
  Antisense strand to SEQ ID NO: 1260486
uaucuugaggacauaacag

SEQ ID NO: 1260488 - RNA, 19 nt, Artificial Sequence
  Description of Artificial Sequence: Synthetic oligonucleotide
  Sense strand starting at position 2747 of SEQ ID NO: 1241283
cacucaguccucuggaaga

SEQ ID NO: 1260489 - RNA, 19 nt, Artificial Sequence
  Description of Artificial Sequence: Synthetic oligonucleotide
  Antisense strand to SEQ ID NO: 1260488
ucuuccagaggacugagug

SEQ ID NO: 1260490 - RNA, 19 nt, Artificial Sequence
  Description of Artificial Sequence: Synthetic oligonucleotide
  Sense strand starting at position 2765 of SEQ ID NO: 1241283
agaugccuagugugaaaga

SEQ ID NO: 1260491 - RNA, 19 nt, Artificial Sequence
  Description of Artificial Sequence: Synthetic oligonucleotide
  Antisense strand to SEQ ID NO: 1260490
ucuuucacacuaggcaucu

SEQ ID NO: 1260492 - RNA, 19 nt, Artificial Sequence
  Description of Artificial Sequence: Synthetic oligonucleotide
  Sense strand starting at position 2915 of SEQ ID NO: 1241283
ggaacagacauucgagguu

SEQ ID NO: 1260493 - RNA, 19 nt, Artificial Sequence
  Description of Artificial Sequence: Synthetic oligonucleotide
  Antisense strand to SEQ ID NO: 1260492
aaccucgaaugucuguucc

SEQ ID NO: 1260494 - RNA, 19 nt, Artificial Sequence
  Description of Artificial Sequence: Synthetic oligonucleotide
  Sense strand starting at position 2932 of SEQ ID NO: 1241283
uucugaguccaaugggaac

SEQ ID NO: 1260495 - RNA, 19 nt, Artificial Sequence
  Description of Artificial Sequence: Synthetic oligonucleotide
  Antisense strand to SEQ ID NO: 1260494
guucccauuggacucagaa

SEQ ID NO: 1260496 - RNA, 19 nt, Artificial Sequence
  Description of Artificial Sequence: Synthetic oligonucleotide
  Sense strand starting at position 3133 of SEQ ID NO: 1241283
auuaguuaacuagagcgaa

SEQ ID NO: 1260497 - RNA, 19 nt, Artificial Sequence
  Description of Artificial Sequence: Synthetic oligonucleotide
  Antisense strand to SEQ ID NO: 1260496
uucgcucuaguuaacuaau

SEQ ID NO: 1260498 - RNA, 19 nt, Artificial Sequence
  Description of Artificial Sequence: Synthetic oligonucleotide
  Sense strand starting at position 3137 of SEQ ID NO: 1241283
guuaacuagagcgaaguua

SEQ ID NO: 1260499 - RNA, 19 nt, Artificial Sequence
  Description of Artificial Sequence: Synthetic oligonucleotide
  Antisense strand to SEQ ID NO: 1260498
uaacuucgcucuaguuaac

SEQ ID NO: 1260500 - RNA, 19 nt, Artificial Sequence
  Description of Artificial Sequence: Synthetic oligonucleotide
  Sense strand starting at position 3722 of SEQ ID NO: 1241283
gugcguggucccagaaagu

SEQ ID NO: 1260501 - RNA, 19 nt, Artificial Sequence
  Description of Artificial Sequence: Synthetic oligonucleotide
  Antisense strand to SEQ ID NO: 1260500
acuuucugggaccacgcac

SEQ ID NO: 1260502 - RNA, 19 nt, Artificial Sequence
  Description of Artificial Sequence: Synthetic oligonucleotide
  Sense strand starting at position 3788 of SEQ ID NO: 1241283
ucgguuucccaguauagga

SEQ ID NO: 1260503 - RNA, 19 nt, Artificial Sequence
  Description of Artificial Sequence: Synthetic oligonucleotide
  Antisense strand to SEQ ID NO: 1260502
uccuauacugggaaaccga

SEQ ID NO: 1260504 - RNA, 19 nt, Artificial Sequence
  Description of Artificial Sequence: Synthetic oligonucleotide
  Sense strand starting at position 3828 of SEQ ID NO: 1241283
uagaguuguccugagggug

SEQ ID NO: 1260505 - RNA, 19 nt, Artificial Sequence
  Description of Artificial Sequence: Synthetic oligonucleotide
  Antisense strand to SEQ ID NO: 1260504
cacccucaggacaacucua

SEQ ID NO: 1260506 - RNA, 19 nt, Artificial Sequence
  Description of Artificial Sequence: Synthetic oligonucleotide
  Sense strand starting at position 315 of SEQ ID NO: 1241284
aauggaguuuggucugaga

SEQ ID NO: 1260507 - RNA, 19 nt, Artificial Sequence
  Description of Artificial Sequence: Synthetic oligonucleotide
  Antisense strand to SEQ ID NO: 1260506
ucucagaccaaacuccauu

SEQ ID NO: 1260508 - RNA, 19 nt, Artificial Sequence
  Description of Artificial Sequence: Synthetic oligonucleotide
  Sense strand starting at position 317 of SEQ ID NO: 1241284
uggaguuuggucugagaaa

SEQ ID NO: 1260509 - RNA, 19 nt, Artificial Sequence
  Description of Artificial Sequence: Synthetic oligonucleotide
  Antisense strand to SEQ ID NO: 1260508
uuucucagaccaaacucca

SEQ ID NO: 1260510 - RNA, 19 nt, Artificial Sequence
  Description of Artificial Sequence: Synthetic oligonucleotide
  Sense strand starting at position 468 of SEQ ID NO: 1241284
gaaucuuaggcaggaccua

SEQ ID NO: 1260511 - RNA, 19 nt, Artificial Sequence
  Description of Artificial Sequence: Synthetic oligonucleotide
  Antisense strand to SEQ ID NO: 1260510
uagguccugccuaagauuc

SEQ ID NO: 1260512 - RNA, 19 nt, Artificial Sequence
  Description of Artificial Sequence: Synthetic oligonucleotide
  Sense strand starting at position 503 of SEQ ID NO: 1241284
gaacaaagcugccuggauu

SEQ ID NO: 1260513 - RNA, 19 nt, Artificial Sequence
  Description of Artificial Sequence: Synthetic oligonucleotide
  Antisense strand to SEQ ID NO: 1260512
aauccaggcagcuuuguuc

SEQ ID NO: 1260514 - RNA, 19 nt, Artificial Sequence
  Description of Artificial Sequence: Synthetic oligonucleotide
  Sense strand starting at position 579 of SEQ ID NO: 1241284
gguguuaggacugaguucu

SEQ ID NO: 1260515 - RNA, 19 nt, Artificial Sequence
  Description of Artificial Sequence: Synthetic oligonucleotide
  Antisense strand to SEQ ID NO: 1260514
agaacucaguccuaacacc

SEQ ID NO: 1260516 - RNA, 19 nt, Artificial Sequence
  Description of Artificial Sequence: Synthetic oligonucleotide
  Sense strand starting at position 632 of SEQ ID NO: 1241284
gcaggacagaguuguugau

SEQ ID NO: 1260517 - RNA, 19 nt, Artificial Sequence
  Description of Artificial Sequence: Synthetic oligonucleotide
  Antisense strand to SEQ ID NO: 1260516
aucaacaacucuguccugc

SEQ ID NO: 1260518 - RNA, 19 nt, Artificial Sequence
  Description of Artificial Sequence: Synthetic oligonucleotide
  Sense strand starting at position 726 of SEQ ID NO: 1241284
gccuaauguagguggcaga

SEQ ID NO: 1260519 - RNA, 19 nt, Artificial Sequence
  Description of Artificial Sequence: Synthetic oligonucleotide
  Antisense strand to SEQ ID NO: 1260518
ucugccaccuacauuaggc

SEQ ID NO: 1260520 - RNA, 19 nt, Artificial Sequence
  Description of Artificial Sequence: Synthetic oligonucleotide
  Sense strand starting at position 1080 of SEQ ID NO: 1241284
gcagauaggacucgggcua

SEQ ID NO: 1260521 - RNA, 19 nt, Artificial Sequence
  Description of Artificial Sequence: Synthetic oligonucleotide
  Antisense strand to SEQ ID NO: 1260520
uagcccgaguccuaucugc

SEQ ID NO: 1260522 - RNA, 19 nt, Artificial Sequence
  Description of Artificial Sequence: Synthetic oligonucleotide
  Sense strand starting at position 2732 of SEQ ID NO: 1241284
gagggacgauccuuccaaa

SEQ ID NO: 1260523 - RNA, 19 nt, Artificial Sequence
  Description of Artificial Sequence: Synthetic oligonucleotide
  Antisense strand to SEQ ID NO: 1260522
uuuggaaggaucgucccuc

SEQ ID NO: 1260524 - RNA, 19 nt, Artificial Sequence
  Description of Artificial Sequence: Synthetic oligonucleotide
  Sense strand starting at position 2904 of SEQ ID NO: 1241284
ggcuuucuccgggagcuuu

SEQ ID NO: 1260525 - RNA, 19 nt, Artificial Sequence
  Description of Artificial Sequence: Synthetic oligonucleotide
  Antisense strand to SEQ ID NO: 1260524
aaagcucccggagaaagcc

SEQ ID NO: 1260526 - RNA, 19 nt, Artificial Sequence
  Description of Artificial Sequence: Synthetic oligonucleotide
  Sense strand starting at position 3134 of SEQ ID NO: 1241284
cauggauucuggcccuagu

SEQ ID NO: 1260527 - RNA, 19 nt, Artificial Sequence
  Description of Artificial Sequence: Synthetic oligonucleotide
  Antisense strand to SEQ ID NO: 1260526
acuagggccagaauccaug

SEQ ID NO: 1260528 - RNA, 19 nt, Artificial Sequence
  Description of Artificial Sequence: Synthetic oligonucleotide
  Sense strand starting at position 3198 of SEQ ID NO: 1241284
gguugugcggccucuuaca

SEQ ID NO: 1260529 - RNA, 19 nt, Artificial Sequence
  Description of Artificial Sequence: Synthetic oligonucleotide
  Antisense strand to SEQ ID NO: 1260528
uguaagaggccgcacaacc

SEQ ID NO: 1260530 - RNA, 19 nt, Artificial Sequence
  Description of Artificial Sequence: Synthetic oligonucleotide
  Sense strand starting at position 3312 of SEQ ID NO: 1241284
cuagaacucuuccagagga

SEQ ID NO: 1260531 - RNA, 19 nt, Artificial Sequence
  Description of Artificial Sequence: Synthetic oligonucleotide
  Antisense strand to SEQ ID NO: 1260530
uccucuggaagaguucuag

SEQ ID NO: 1260532 - RNA, 19 nt, Artificial Sequence
  Description of Artificial Sequence: Synthetic oligonucleotide
  Sense strand starting at position 3391 of SEQ ID NO: 1241284
gcuccucugcccugggaua

SEQ ID NO: 1260533 - RNA, 19 nt, Artificial Sequence
  Description of Artificial Sequence: Synthetic oligonucleotide
  Antisense strand to SEQ ID NO: 1260532
uaucccagggcagaggagc

SEQ ID NO: 1260534 - RNA, 19 nt, Artificial Sequence
  Description of Artificial Sequence: Synthetic oligonucleotide
  Sense strand starting at position 3392 of SEQ ID NO: 1241284
cuccucugcccugggauaa

SEQ ID NO: 1260535 - RNA, 19 nt, Artificial Sequence
  Description of Artificial Sequence: Synthetic oligonucleotide
  Antisense strand to SEQ ID NO: 1260534
uuaucccagggcagaggag

SEQ ID NO: 1260536 - RNA, 19 nt, Artificial Sequence
  Description of Artificial Sequence: Synthetic oligonucleotide
  Sense strand starting at position 3403 of SEQ ID NO: 1241284
ugggauaacuccuuagugu

SEQ ID NO: 1260537 - RNA, 19 nt, Artificial Sequence
  Description of Artificial Sequence: Synthetic oligonucleotide
  Antisense strand to SEQ ID NO: 1260536
acacuaaggaguuauccca

SEQ ID NO: 1260538 - RNA, 19 nt, Artificial Sequence
  Description of Artificial Sequence: Synthetic oligonucleotide
  Sense strand starting at position 3404 of SEQ ID NO: 1241284
gggauaacuccuuagugug

SEQ ID NO: 1260539 - RNA, 19 nt, Artificial Sequence
  Description of Artificial Sequence: Synthetic oligonucleotide
  Antisense strand to SEQ ID NO: 1260538
cacacuaaggaguuauccc

SEQ ID NO: 1260540 - RNA, 19 nt, Artificial Sequence
  Description of Artificial Sequence: Synthetic oligonucleotide
  Sense strand starting at position 3435 of SEQ ID NO: 1241284
ggaccuucccucugggaca

SEQ ID NO: 1260541 - RNA, 19 nt, Artificial Sequence
  Description of Artificial Sequence: Synthetic oligonucleotide
  Antisense strand to SEQ ID NO: 1260540
ugucccagagggaaggucc

SEQ ID NO: 1260542 - RNA, 19 nt, Artificial Sequence
  Description of Artificial Sequence: Synthetic oligonucleotide
  Sense strand starting at position 3465 of SEQ ID NO: 1241284
gccucucaggcuugaguga

SEQ ID NO: 1260543 - RNA, 19 nt, Artificial Sequence
  Description of Artificial Sequence: Synthetic oligonucleotide
  Antisense strand to SEQ ID NO: 1260542
ucacucaagccugagaggc

SEQ ID NO: 1260544 - RNA, 19 nt, Artificial Sequence
  Description of Artificial Sequence: Synthetic oligonucleotide
  Sense strand starting at position 3466 of SEQ ID NO: 1241284
ccucucaggcuugagugaa

SEQ ID NO: 1260545 - RNA, 19 nt, Artificial Sequence
  Description of Artificial Sequence: Synthetic oligonucleotide
  Antisense strand to SEQ ID NO: 1260544
uucacucaagccugagagg

SEQ ID NO: 1260546 - RNA, 19 nt, Artificial Sequence
  Description of Artificial Sequence: Synthetic oligonucleotide
  Sense strand starting at position 3504 of SEQ ID NO: 1241284
ugagguuccugguauuuaa

SEQ ID NO: 1260547 - RNA, 19 nt, Artificial Sequence
  Description of Artificial Sequence: Synthetic oligonucleotide
  Antisense strand to SEQ ID NO: 1260546
uuaaauaccaggaaccuca

SEQ ID NO: 1260548 - RNA, 19 nt, Artificial Sequence
  Description of Artificial Sequence: Synthetic oligonucleotide
  Sense strand starting at position 3540 of SEQ ID NO: 1241284
aggauugaaagcuguggua

SEQ ID NO: 1260549 - RNA, 19 nt, Artificial Sequence
  Description of Artificial Sequence: Synthetic oligonucleotide
  Antisense strand to SEQ ID NO: 1260548
uaccacagcuuucaauccu

SEQ ID NO: 1260550 - RNA, 19 nt, Artificial Sequence
  Description of Artificial Sequence: Synthetic oligonucleotide
  Sense strand starting at position 3542 of SEQ ID NO: 1241284
gauugaaagcugugguaua

SEQ ID NO: 1260551 - RNA, 19 nt, Artificial Sequence
  Description of Artificial Sequence: Synthetic oligonucleotide
  Antisense strand to SEQ ID NO: 1260550
uauaccacagcuuucaauc

SEQ ID NO: 1260552 - RNA, 19 nt, Artificial Sequence
  Description of Artificial Sequence: Synthetic oligonucleotide
  Sense strand starting at position 3565 of SEQ ID NO: 1241284
ggauguuuacauugaacaa

SEQ ID NO: 1260553 - RNA, 19 nt, Artificial Sequence
  Description of Artificial Sequence: Synthetic oligonucleotide
  Antisense strand to SEQ ID NO: 1260552
uuguucaauguaaacaucc

SEQ ID NO: 1260554 - RNA, 19 nt, Artificial Sequence
  Description of Artificial Sequence: Synthetic oligonucleotide
  Sense strand starting at position 3608 of SEQ ID NO: 1241284
agagaaugacucugugcau

SEQ ID NO: 1260555 - RNA, 19 nt, Artificial Sequence
  Description of Artificial Sequence: Synthetic oligonucleotide
  Antisense strand to SEQ ID NO: 1260554
augcacagagucauucucu

SEQ ID NO: 1260556 - RNA, 19 nt, Artificial Sequence
  Description of Artificial Sequence: Synthetic oligonucleotide
  Sense strand starting at position 3609 of SEQ ID NO: 1241284
gagaaugacucugugcaua

SEQ ID NO: 1260557 - RNA, 19 nt, Artificial Sequence
  Description of Artificial Sequence: Synthetic oligonucleotide
  Antisense strand to SEQ ID NO: 1260556
uaugcacagagucauucuc

SEQ ID NO: 1260558 - RNA, 19 nt, Artificial Sequence
  Description of Artificial Sequence: Synthetic oligonucleotide
  Sense strand starting at position 3611 of SEQ ID NO: 1241284
gaaugacucugugcauaac

SEQ ID NO: 1260559 - RNA, 19 nt, Artificial Sequence
  Description of Artificial Sequence: Synthetic oligonucleotide
  Antisense strand to SEQ ID NO: 1260558
guuaugcacagagucauuc

SEQ ID NO: 1260560 - RNA, 19 nt, Artificial Sequence
  Description of Artificial Sequence: Synthetic oligonucleotide
  Sense strand starting at position 3638 of SEQ ID NO: 1241284
gagacaagaucagaaaugu

SEQ ID NO: 1260561 - RNA, 19 nt, Artificial Sequence
  Description of Artificial Sequence: Synthetic oligonucleotide
  Antisense strand to SEQ ID NO: 1260560
acauuucugaucuugucuc

SEQ ID NO: 1260562 - RNA, 19 nt, Artificial Sequence
  Description of Artificial Sequence: Synthetic oligonucleotide
  Sense strand starting at position 3658 of SEQ ID NO: 1241284
auauaaggcccuuggugaa

SEQ ID NO: 1260563 - RNA, 19 nt, Artificial Sequence
  Description of Artificial Sequence: Synthetic oligonucleotide
  Antisense strand to SEQ ID NO: 1260562
uucaccaagggccuuauau

SEQ ID NO: 1260564 - RNA, 19 nt, Artificial Sequence
  Description of Artificial Sequence: Synthetic oligonucleotide
  Sense strand starting at position 3729 of SEQ ID NO: 1241284
cuaggcauuuccuaggaga

SEQ ID NO: 1260565 - RNA, 19 nt, Artificial Sequence
  Description of Artificial Sequence: Synthetic oligonucleotide
  Antisense strand to SEQ ID NO: 1260564
ucuccuaggaaaugccuag

SEQ ID NO: 1260566 - RNA, 19 nt, Artificial Sequence
  Description of Artificial Sequence: Synthetic oligonucleotide
  Sense strand starting at position 3732 of SEQ ID NO: 1241284
ggcauuuccuaggagagug

SEQ ID NO: 1260567 - RNA, 19 nt, Artificial Sequence
  Description of Artificial Sequence: Synthetic oligonucleotide
  Antisense strand to SEQ ID NO: 1260566
cacucuccuaggaaaugcc

SEQ ID NO: 1260568 - RNA, 19 nt, Artificial Sequence
  Description of Artificial Sequence: Synthetic oligonucleotide
  Sense strand starting at position 3743 of SEQ ID NO: 1241284
ggagaguguggucaggaca

SEQ ID NO: 1260569 - RNA, 19 nt, Artificial Sequence
  Description of Artificial Sequence: Synthetic oligonucleotide
  Antisense strand to SEQ ID NO: 1260568
uguccugaccacacucucc

SEQ ID NO: 1260570 - RNA, 19 nt, Artificial Sequence
  Description of Artificial Sequence: Synthetic oligonucleotide
  Sense strand starting at position 3803 of SEQ ID NO: 1241284
ugaagaaaccucugcugga

SEQ ID NO: 1260571 - RNA, 19 nt, Artificial Sequence
  Description of Artificial Sequence: Synthetic oligonucleotide
  Antisense strand to SEQ ID NO: 1260570
uccagcagagguuucuuca

SEQ ID NO: 1260572 - RNA, 19 nt, Artificial Sequence
  Description of Artificial Sequence: Synthetic oligonucleotide
  Sense strand starting at position 3804 of SEQ ID NO: 1241284
gaagaaaccucugcuggaa

SEQ ID NO: 1260573 - RNA, 19 nt, Artificial Sequence
  Description of Artificial Sequence: Synthetic oligonucleotide
  Antisense strand to SEQ ID NO: 1260572
uuccagcagagguuucuuc

SEQ ID NO: 1260574 - RNA, 19 nt, Artificial Sequence
  Description of Artificial Sequence: Synthetic oligonucleotide
  Sense strand starting at position 3852 of SEQ ID NO: 1241284
gggagagauucugggauaa

SEQ ID NO: 1260575 - RNA, 19 nt, Artificial Sequence
  Description of Artificial Sequence: Synthetic oligonucleotide
  Antisense strand to SEQ ID NO: 1260574
uuaucccagaaucucuccc

SEQ ID NO: 1260576 - RNA, 19 nt, Artificial Sequence
  Description of Artificial Sequence: Synthetic oligonucleotide
  Sense strand starting at position 3854 of SEQ ID NO: 1241284
gagagauucugggauaaac

SEQ ID NO: 1260577 - RNA, 19 nt, Artificial Sequence
  Description of Artificial Sequence: Synthetic oligonucleotide
  Antisense strand to SEQ ID NO: 1260576
guuuaucccagaaucucuc

SEQ ID NO: 1260578 - RNA, 19 nt, Artificial Sequence
  Description of Artificial Sequence: Synthetic oligonucleotide
  Sense strand starting at position 3882 of SEQ ID NO: 1241284
gggauaaacuguguuggcu

SEQ ID NO: 1260579 - RNA, 19 nt, Artificial Sequence
  Description of Artificial Sequence: Synthetic oligonucleotide
  Antisense strand to SEQ ID NO: 1260578
agccaacacaguuuauccc

SEQ ID NO: 1260580 - RNA, 19 nt, Artificial Sequence
  Description of Artificial Sequence: Synthetic oligonucleotide
  Sense strand starting at position 3905 of SEQ ID NO: 1241284
gcuggcucuccaugaugga

SEQ ID NO: 1260581 - RNA, 19 nt, Artificial Sequence
  Description of Artificial Sequence: Synthetic oligonucleotide
  Antisense strand to SEQ ID NO: 1260580
uccaucauggagagccagc

SEQ ID NO: 1260582 - RNA, 19 nt, Artificial Sequence
  Description of Artificial Sequence: Synthetic oligonucleotide
  Sense strand starting at position 3906 of SEQ ID NO: 1241284
cuggcucuccaugauggaa

SEQ ID NO: 1260583 - RNA, 19 nt, Artificial Sequence
  Description of Artificial Sequence: Synthetic oligonucleotide
  Antisense strand to SEQ ID NO: 1260582
uuccaucauggagagccag

SEQ ID NO: 1260584 - RNA, 19 nt, Artificial Sequence
  Description of Artificial Sequence: Synthetic oligonucleotide
  Sense strand starting at position 3919 of SEQ ID NO: 1241284
auggaagacuccugaauag

SEQ ID NO: 1260585 - RNA, 19 nt, Artificial Sequence
  Description of Artificial Sequence: Synthetic oligonucleotide
  Antisense strand to SEQ ID NO: 1260584
cuauucaggagucuuccau

SEQ ID NO: 1260586 - RNA, 19 nt, Artificial Sequence
  Description of Artificial Sequence: Synthetic oligonucleotide
  Sense strand starting at position 26 of SEQ ID NO: 1241285
uuuacuugggugcauuaau

SEQ ID NO: 1260587 - RNA, 19 nt, Artificial Sequence
  Description of Artificial Sequence: Synthetic oligonucleotide
  Antisense strand to SEQ ID NO: 1260586
auuaaugcacccaaguaaa

SEQ ID NO: 1260588 - RNA, 19 nt, Artificial Sequence
  Description of Artificial Sequence: Synthetic oligonucleotide
  Sense strand starting at position 216 of SEQ ID NO: 1241285
gaacaauggucuguucuga

SEQ ID NO: 1260589 - RNA, 19 nt, Artificial Sequence
  Description of Artificial Sequence: Synthetic oligonucleotide
  Antisense strand to SEQ ID NO: 1260588
ucagaacagaccauuguuc

SEQ ID NO: 1260590 - RNA, 19 nt, Artificial Sequence
  Description of Artificial Sequence: Synthetic oligonucleotide
  Sense strand starting at position 274 of SEQ ID NO: 1241285
uuuauugucaaagaguggu

SEQ ID NO: 1260591 - RNA, 19 nt, Artificial Sequence
  Description of Artificial Sequence: Synthetic oligonucleotide
  Antisense strand to SEQ ID NO: 1260590
accacucuuugacaauaaa

SEQ ID NO: 1260592 - RNA, 19 nt, Artificial Sequence
  Description of Artificial Sequence: Synthetic oligonucleotide
  Sense strand starting at position 278 of SEQ ID NO: 1241285
uugucaaagagugguacau

SEQ ID NO: 1260593 - RNA, 19 nt, Artificial Sequence
  Description of Artificial Sequence: Synthetic oligonucleotide
  Antisense strand to SEQ ID NO: 1260592
auguaccacucuuugacaa

SEQ ID NO: 1260594 - RNA, 19 nt, Artificial Sequence
  Description of Artificial Sequence: Synthetic oligonucleotide
  Sense strand starting at position 439 of SEQ ID NO: 1241285
acuaucauuugaggaaaga

SEQ ID NO: 1260595 - RNA, 19 nt, Artificial Sequence
  Description of Artificial Sequence: Synthetic oligonucleotide
  Antisense strand to SEQ ID NO: 1260594
ucuuuccucaaaugauagu

SEQ ID NO: 1260596 - RNA, 19 nt, Artificial Sequence
  Description of Artificial Sequence: Synthetic oligonucleotide
  Sense strand starting at position 537 of SEQ ID NO: 1241285
cuguguuuccaagauaaau

SEQ ID NO: 1260597 - RNA, 19 nt, Artificial Sequence
  Description of Artificial Sequence: Synthetic oligonucleotide
  Antisense strand to SEQ ID NO: 1260596
auuuaucuuggaaacacag

SEQ ID NO: 1260598 - RNA, 19 nt, Artificial Sequence
  Description of Artificial Sequence: Synthetic oligonucleotide
  Sense strand starting at position 731 of SEQ ID NO: 1241285
agucaagaagauggucuaa

SEQ ID NO: 1260599 - RNA, 19 nt, Artificial Sequence
  Description of Artificial Sequence: Synthetic oligonucleotide
  Antisense strand to SEQ ID NO: 1260598
uuagaccaucuucuugacu

SEQ ID NO: 1260600 - RNA, 19 nt, Artificial Sequence
  Description of Artificial Sequence: Synthetic oligonucleotide
  Sense strand starting at position 881 of SEQ ID NO: 1241285
guagaaaucucuucugacc

SEQ ID NO: 1260601 - RNA, 19 nt, Artificial Sequence
  Description of Artificial Sequence: Synthetic oligonucleotide
  Antisense strand to SEQ ID NO: 1260600
ggucagaagagauuucuac

SEQ ID NO: 1260602 - RNA, 19 nt, Artificial Sequence
  Description of Artificial Sequence: Synthetic oligonucleotide
  Sense strand starting at position 923 of SEQ ID NO: 1241285
gcuuuaaaguaggcauuua

SEQ ID NO: 1260603 - RNA, 19 nt, Artificial Sequence
  Description of Artificial Sequence: Synthetic oligonucleotide
  Antisense strand to SEQ ID NO: 1260602
uaaaugccuacuuuaaagc

SEQ ID NO: 1260604 - RNA, 19 nt, Artificial Sequence
  Description of Artificial Sequence: Synthetic oligonucleotide
  Sense strand starting at position 999 of SEQ ID NO: 1241285
uccuuuggaucuuugagaa

SEQ ID NO: 1260605 - RNA, 19 nt, Artificial Sequence
  Description of Artificial Sequence: Synthetic oligonucleotide
  Antisense strand to SEQ ID NO: 1260604
uucucaaagauccaaagga

SEQ ID NO: 1260606 - RNA, 19 nt, Artificial Sequence
  Description of Artificial Sequence: Synthetic oligonucleotide
  Sense strand starting at position 1011 of SEQ ID NO: 1241285
uugagaaccucgucuuaaa

SEQ ID NO: 1260607 - RNA, 19 nt, Artificial Sequence
  Description of Artificial Sequence: Synthetic oligonucleotide
  Antisense strand to SEQ ID NO: 1260606
uuuaagacgagguucucaa

SEQ ID NO: 1260608 - RNA, 19 nt, Artificial Sequence
  Description of Artificial Sequence: Synthetic oligonucleotide
  Sense strand starting at position 1096 of SEQ ID NO: 1241285
gaaggucaucaucaugguu

SEQ ID NO: 1260609 - RNA, 19 nt, Artificial Sequence
  Description of Artificial Sequence: Synthetic oligonucleotide
  Antisense strand to SEQ ID NO: 1260608
aaccaugaugaugaccuuc

SEQ ID NO: 1260610 - RNA, 19 nt, Artificial Sequence
  Description of Artificial Sequence: Synthetic oligonucleotide
  Sense strand starting at position 1133 of SEQ ID NO: 1241285
uugacuuucgcucagagga

SEQ ID NO: 1260611 - RNA, 19 nt, Artificial Sequence
  Description of Artificial Sequence: Synthetic oligonucleotide
  Antisense strand to SEQ ID NO: 1260610
uccucugagcgaaagucaa

SEQ ID NO: 1260612 - RNA, 19 nt, Artificial Sequence
  Description of Artificial Sequence: Synthetic oligonucleotide
  Sense strand starting at position 1454 of SEQ ID NO: 1241285
cgcaggugucgcuuggaga

SEQ ID NO: 1260613 - RNA, 19 nt, Artificial Sequence
  Description of Artificial Sequence: Synthetic oligonucleotide
  Antisense strand to SEQ ID NO: 1260612
ucuccaagcgacaccugcg

SEQ ID NO: 1260614 - RNA, 19 nt, Artificial Sequence
  Description of Artificial Sequence: Synthetic oligonucleotide
  Sense strand starting at position 1569 of SEQ ID NO: 1241285
ccaggaaguuguccaggua

SEQ ID NO: 1260615 - RNA, 19 nt, Artificial Sequence
  Description of Artificial Sequence: Synthetic oligonucleotide
  Antisense strand to SEQ ID NO: 1260614
uaccuggacaacuuccugg

SEQ ID NO: 1260616 - RNA, 19 nt, Artificial Sequence
  Description of Artificial Sequence: Synthetic oligonucleotide
  Sense strand starting at position 1618 of SEQ ID NO: 1241285
gauguacuccagggcaauu

SEQ ID NO: 1260617 - RNA, 19 nt, Artificial Sequence
  Description of Artificial Sequence: Synthetic oligonucleotide
  Antisense strand to SEQ ID NO: 1260616
aauugcccuggaguacauc

SEQ ID NO: 1260618 - RNA, 19 nt, Artificial Sequence
  Description of Artificial Sequence: Synthetic oligonucleotide
  Sense strand starting at position 1670 of SEQ ID NO: 1241285
ggcaucucgcccgcagaau

SEQ ID NO: 1260619 - RNA, 19 nt, Artificial Sequence
  Description of Artificial Sequence: Synthetic oligonucleotide
  Antisense strand to SEQ ID NO: 1260618
auucugcgggcgagaugcc

SEQ ID NO: 1260620 - RNA, 19 nt, Artificial Sequence
  Description of Artificial Sequence: Synthetic oligonucleotide
  Sense strand starting at position 1825 of SEQ ID NO: 1241285
aagggaaaguuucucgcaa

SEQ ID NO: 1260621 - RNA, 19 nt, Artificial Sequence
  Description of Artificial Sequence: Synthetic oligonucleotide
  Antisense strand to SEQ ID NO: 1260620
uugcgagaaacuuucccuu

SEQ ID NO: 1260622 - RNA, 19 nt, Artificial Sequence
  Description of Artificial Sequence: Synthetic oligonucleotide
  Sense strand starting at position 2206 of SEQ ID NO: 1241285
uuuagaaugcgcuggauuu

SEQ ID NO: 1260623 - RNA, 19 nt, Artificial Sequence
  Description of Artificial Sequence: Synthetic oligonucleotide
  Antisense strand to SEQ ID NO: 1260622
aaauccagcgcauucuaaa

SEQ ID NO: 1260624 - RNA, 19 nt, Artificial Sequence
  Description of Artificial Sequence: Synthetic oligonucleotide
  Sense strand starting at position 2207 of SEQ ID NO: 1241285
uuagaaugcgcuggauuug

SEQ ID NO: 1260625 - RNA, 19 nt, Artificial Sequence
  Description of Artificial Sequence: Synthetic oligonucleotide
  Antisense strand to SEQ ID NO: 1260624
caaauccagcgcauucuaa

SEQ ID NO: 1260626 - RNA, 19 nt, Artificial Sequence
  Description of Artificial Sequence: Synthetic oligonucleotide
  Sense strand starting at position 2400 of SEQ ID NO: 1241285
gggugucuuuccuuauuua

SEQ ID NO: 1260627 - RNA, 19 nt, Artificial Sequence
  Description of Artificial Sequence: Synthetic oligonucleotide
  Antisense strand to SEQ ID NO: 1260626
uaaauaaggaaagacaccc

SEQ ID NO: 1260628 - RNA, 19 nt, Artificial Sequence
  Description of Artificial Sequence: Synthetic oligonucleotide
  Sense strand starting at position 2571 of SEQ ID NO: 1241285
aagaaaugcugagucauau

SEQ ID NO: 1260629 - RNA, 19 nt, Artificial Sequence
  Description of Artificial Sequence: Synthetic oligonucleotide
  Antisense strand to SEQ ID NO: 1260628
auaugacucagcauuucuu

SEQ ID NO: 1260630 - RNA, 19 nt, Artificial Sequence
  Description of Artificial Sequence: Synthetic oligonucleotide
  Sense strand starting at position 2582 of SEQ ID NO: 1241285
agucauaucugauugaacu

SEQ ID NO: 1260631 - RNA, 19 nt, Artificial Sequence
  Description of Artificial Sequence: Synthetic oligonucleotide
  Antisense strand to SEQ ID NO: 1260630
aguucaaucagauaugacu

SEQ ID NO: 1260632 - RNA, 19 nt, Artificial Sequence
  Description of Artificial Sequence: Synthetic oligonucleotide
  Sense strand starting at position 2583 of SEQ ID NO: 1241285
gucauaucugauugaacuc

SEQ ID NO: 1260633 - RNA, 19 nt, Artificial Sequence
  Description of Artificial Sequence: Synthetic oligonucleotide
  Antisense strand to SEQ ID NO: 1260632
gaguucaaucagauaugac

SEQ ID NO: 1260634 - RNA, 19 nt, Artificial Sequence
  Description of Artificial Sequence: Synthetic oligonucleotide
  Sense strand starting at position 2590 of SEQ ID NO: 1241285
cugauugaacucugcaaau

SEQ ID NO: 1260635 - RNA, 19 nt, Artificial Sequence
  Description of Artificial Sequence: Synthetic oligonucleotide
  Antisense strand to SEQ ID NO: 1260634
auuugcagaguucaaucag

SEQ ID NO: 1260636 - RNA, 19 nt, Artificial Sequence
  Description of Artificial Sequence: Synthetic oligonucleotide
  Sense strand starting at position 2709 of SEQ ID NO: 1241285
uucuguaacagucagaggu

SEQ ID NO: 1260637 - RNA, 19 nt, Artificial Sequence
  Description of Artificial Sequence: Synthetic oligonucleotide
  Antisense strand to SEQ ID NO: 1260636
accucugacuguuacagaa

SEQ ID NO: 1260638 - RNA, 19 nt, Artificial Sequence
  Description of Artificial Sequence: Synthetic oligonucleotide
  Sense strand starting at position 2811 of SEQ ID NO: 1241285
cugagaagacuuugguuau

SEQ ID NO: 1260639 - RNA, 19 nt, Artificial Sequence
  Description of Artificial Sequence: Synthetic oligonucleotide
  Antisense strand to SEQ ID NO: 1260638
auaaccaaagucuucucag

SEQ ID NO: 1260640 - RNA, 19 nt, Artificial Sequence
  Description of Artificial Sequence: Synthetic oligonucleotide
  Sense strand starting at position 2814 of SEQ ID NO: 1241285
agaagacuuugguuaucua

SEQ ID NO: 1260641 - RNA, 19 nt, Artificial Sequence
  Description of Artificial Sequence: Synthetic oligonucleotide
  Antisense strand to SEQ ID NO: 1260640
uagauaaccaaagucuucu

SEQ ID NO: 1260642 - RNA, 19 nt, Artificial Sequence
  Description of Artificial Sequence: Synthetic oligonucleotide
  Sense strand starting at position 2818 of SEQ ID NO: 1241285
gacuuugguuaucuacaga

SEQ ID NO: 1260643 - RNA, 19 nt, Artificial Sequence
  Description of Artificial Sequence: Synthetic oligonucleotide
  Antisense strand to SEQ ID NO: 1260642
ucuguagauaaccaaaguc

SEQ ID NO: 1260644 - RNA, 19 nt, Artificial Sequence
  Description of Artificial Sequence: Synthetic oligonucleotide
  Sense strand starting at position 2909 of SEQ ID NO: 1241285
ucauaaauugcaugcaaag

SEQ ID NO: 1260645 - RNA, 19 nt, Artificial Sequence
  Description of Artificial Sequence: Synthetic oligonucleotide
  Antisense strand to SEQ ID NO: 1260644
cuuugcaugcaauuuauga

SEQ ID NO: 1260646 - RNA, 19 nt, Artificial Sequence
  Description of Artificial Sequence: Synthetic oligonucleotide
  Sense strand starting at position 2920 of SEQ ID NO: 1241285
augcaaagcuauuuguacu

SEQ ID NO: 1260647 - RNA, 19 nt, Artificial Sequence
  Description of Artificial Sequence: Synthetic oligonucleotide
  Antisense strand to SEQ ID NO: 1260646
aguacaaauagcuuugcau

SEQ ID NO: 1260648 - RNA, 19 nt, Artificial Sequence
  Description of Artificial Sequence: Synthetic oligonucleotide
  Sense strand starting at position 3156 of SEQ ID NO: 1241285
aggugagguuucuccacau

SEQ ID NO: 1260649 - RNA, 19 nt, Artificial Sequence
  Description of Artificial Sequence: Synthetic oligonucleotide
  Antisense strand to SEQ ID NO: 1260648
auguggagaaaccucaccu

SEQ ID NO: 1260650 - RNA, 19 nt, Artificial Sequence
  Description of Artificial Sequence: Synthetic oligonucleotide
  Sense strand starting at position 3356 of SEQ ID NO: 1241285
uuguuuauuguggaagcaa

SEQ ID NO: 1260651 - RNA, 19 nt, Artificial Sequence
  Description of Artificial Sequence: Synthetic oligonucleotide
  Antisense strand to SEQ ID NO: 1260650
uugcuuccacaauaaacaa

SEQ ID NO: 1260652 - RNA, 19 nt, Artificial Sequence
  Description of Artificial Sequence: Synthetic oligonucleotide
  Sense strand starting at position 3604 of SEQ ID NO: 1241285
guuauauugagagagguuc

SEQ ID NO: 1260653 - RNA, 19 nt, Artificial Sequence
  Description of Artificial Sequence: Synthetic oligonucleotide
  Antisense strand to SEQ ID NO: 1260652
gaaccucucucaauauaac

SEQ ID NO: 1260654 - RNA, 19 nt, Artificial Sequence
  Description of Artificial Sequence: Synthetic oligonucleotide
  Sense strand starting at position 3612 of SEQ ID NO: 1241285
gagagagguucucugccaa

SEQ ID NO: 1260655 - RNA, 19 nt, Artificial Sequence
  Description of Artificial Sequence: Synthetic oligonucleotide
  Antisense strand to SEQ ID NO: 1260654
uuggcagagaaccucucuc

SEQ ID NO: 1260656 - RNA, 19 nt, Artificial Sequence
  Description of Artificial Sequence: Synthetic oligonucleotide
  Sense strand starting at position 3659 of SEQ ID NO: 1241285
uaccuuugagcaggaggua

SEQ ID NO: 1260657 - RNA, 19 nt, Artificial Sequence
  Description of Artificial Sequence: Synthetic oligonucleotide
  Antisense strand to SEQ ID NO: 1260656
uaccuccugcucaaaggua

SEQ ID NO: 1260658 - RNA, 19 nt, Artificial Sequence
  Description of Artificial Sequence: Synthetic oligonucleotide
  Sense strand starting at position 3695 of SEQ ID NO: 1241285
ggccaucacugcucaaaga

SEQ ID NO: 1260659 - RNA, 19 nt, Artificial Sequence
  Description of Artificial Sequence: Synthetic oligonucleotide
  Antisense strand to SEQ ID NO: 1260658
ucuuugagcagugauggcc

SEQ ID NO: 1260660 - RNA, 19 nt, Artificial Sequence
  Description of Artificial Sequence: Synthetic oligonucleotide
  Sense strand starting at position 3711 of SEQ ID NO: 1241285
agagcucuugucuaaauuc

SEQ ID NO: 1260661 - RNA, 19 nt, Artificial Sequence
  Description of Artificial Sequence: Synthetic oligonucleotide
  Antisense strand to SEQ ID NO: 1260660
gaauuuagacaagagcucu

SEQ ID NO: 1260662 - RNA, 19 nt, Artificial Sequence
  Description of Artificial Sequence: Synthetic oligonucleotide
  Sense strand starting at position 3813 of SEQ ID NO: 1241285
cugggaacucaaugucuga

SEQ ID NO: 1260663 - RNA, 19 nt, Artificial Sequence
  Description of Artificial Sequence: Synthetic oligonucleotide
  Antisense strand to SEQ ID NO: 1260662
ucagacauugaguucccag

SEQ ID NO: 1260664 - RNA, 19 nt, Artificial Sequence
  Description of Artificial Sequence: Synthetic oligonucleotide
  Sense strand starting at position 3875 of SEQ ID NO: 1241285
gcuuaucuggaaggaucua

SEQ ID NO: 1260665 - RNA, 19 nt, Artificial Sequence
  Description of Artificial Sequence: Synthetic oligonucleotide
  Antisense strand to SEQ ID NO: 1260664
uagauccuuccagauaagc

SEQ ID NO: 1260666 - RNA, 19 nt, Artificial Sequence
  Description of Artificial Sequence: Synthetic oligonucleotide
  Sense strand starting at position 164 of SEQ ID NO: 1241286
auugucccuucuguaagaa

SEQ ID NO: 1260667 - RNA, 19 nt, Artificial Sequence
  Description of Artificial Sequence: Synthetic oligonucleotide
  Antisense strand to SEQ ID NO: 1260666
uucuuacagaagggacaau

SEQ ID NO: 1260668 - RNA, 19 nt, Artificial Sequence
  Description of Artificial Sequence: Synthetic oligonucleotide
  Sense strand starting at position 327 of SEQ ID NO: 1241286
cugguaccacaggguuaau

SEQ ID NO: 1260669 - RNA, 19 nt, Artificial Sequence
  Description of Artificial Sequence: Synthetic oligonucleotide
  Antisense strand to SEQ ID NO: 1260668
auuaacccugugguaccag

SEQ ID NO: 1260670 - RNA, 19 nt, Artificial Sequence
  Description of Artificial Sequence: Synthetic oligonucleotide
  Sense strand starting at position 336 of SEQ ID NO: 1241286
caggguuaaugugcuuaaa

SEQ ID NO: 1260671 - RNA, 19 nt, Artificial Sequence
  Description of Artificial Sequence: Synthetic oligonucleotide
  Antisense strand to SEQ ID NO: 1260670
uuuaagcacauuaacccug

SEQ ID NO: 1260672 - RNA, 19 nt, Artificial Sequence
  Description of Artificial Sequence: Synthetic oligonucleotide
  Sense strand starting at position 338 of SEQ ID NO: 1241286
ggguuaaugugcuuaaagu

SEQ ID NO: 1260673 - RNA, 19 nt, Artificial Sequence
  Description of Artificial Sequence: Synthetic oligonucleotide
  Antisense strand to SEQ ID NO: 1260672
acuuuaagcacauuaaccc

SEQ ID NO: 1260674 - RNA, 19 nt, Artificial Sequence
  Description of Artificial Sequence: Synthetic oligonucleotide
  Sense strand starting at position 339 of SEQ ID NO: 1241286
gguuaaugugcuuaaagug

SEQ ID NO: 1260675 - RNA, 19 nt, Artificial Sequence
  Description of Artificial Sequence: Synthetic oligonucleotide
  Antisense strand to SEQ ID NO: 1260674
cacuuuaagcacauuaacc

SEQ ID NO: 1260676 - RNA, 19 nt, Artificial Sequence
  Description of Artificial Sequence: Synthetic oligonucleotide
  Sense strand starting at position 354 of SEQ ID NO: 1241286
agugaaaugucacaauuuc

SEQ ID NO: 1260677 - RNA, 19 nt, Artificial Sequence
  Description of Artificial Sequence: Synthetic oligonucleotide
  Antisense strand to SEQ ID NO: 1260676
gaaauugugacauuucacu

SEQ ID NO: 1260678 - RNA, 19 nt, Artificial Sequence
  Description of Artificial Sequence: Synthetic oligonucleotide
  Sense strand starting at position 679 of SEQ ID NO: 1241286
uaaagagagcuucggccua

SEQ ID NO: 1260679 - RNA, 19 nt, Artificial Sequence
  Description of Artificial Sequence: Synthetic oligonucleotide
  Antisense strand to SEQ ID NO: 1260678
uaggccgaagcucucuuua

SEQ ID NO: 1260680 - RNA, 19 nt, Artificial Sequence
  Description of Artificial Sequence: Synthetic oligonucleotide
  Sense strand starting at position 681 of SEQ ID NO: 1241286
aagagagcuucggccuaaa

SEQ ID NO: 1260681 - RNA, 19 nt, Artificial Sequence
  Description of Artificial Sequence: Synthetic oligonucleotide
  Antisense strand to SEQ ID NO: 1260680
uuuaggccgaagcucucuu

SEQ ID NO: 1260682 - RNA, 19 nt, Artificial Sequence
  Description of Artificial Sequence: Synthetic oligonucleotide
  Sense strand starting at position 851 of SEQ ID NO: 1241286
auagaaaugguauacgugu

SEQ ID NO: 1260683 - RNA, 19 nt, Artificial Sequence
  Description of Artificial Sequence: Synthetic oligonucleotide
  Antisense strand to SEQ ID NO: 1260682
acacguauaccauuucuau

SEQ ID NO: 1260684 - RNA, 19 nt, Artificial Sequence
  Description of Artificial Sequence: Synthetic oligonucleotide
  Sense strand starting at position 862 of SEQ ID NO: 1241286
auacguguacguguguaua

SEQ ID NO: 1260685 - RNA, 19 nt, Artificial Sequence
  Description of Artificial Sequence: Synthetic oligonucleotide
  Antisense strand to SEQ ID NO: 1260684
uauacacacguacacguau

SEQ ID NO: 1260686 - RNA, 19 nt, Artificial Sequence
  Description of Artificial Sequence: Synthetic oligonucleotide
  Sense strand starting at position 889 of SEQ ID NO: 1241286
gauagugaaggaggucuau

SEQ ID NO: 1260687 - RNA, 19 nt, Artificial Sequence
  Description of Artificial Sequence: Synthetic oligonucleotide
  Antisense strand to SEQ ID NO: 1260686
auagaccuccuucacuauc

SEQ ID NO: 1260688 - RNA, 19 nt, Artificial Sequence
  Description of Artificial Sequence: Synthetic oligonucleotide
  Sense strand starting at position 966 of SEQ ID NO: 1241286
ccuaauagagucuguucca

SEQ ID NO: 1260689 - RNA, 19 nt, Artificial Sequence
  Description of Artificial Sequence: Synthetic oligonucleotide
  Antisense strand to SEQ ID NO: 1260688
uggaacagacucuauuagg

SEQ ID NO: 1260690 - RNA, 19 nt, Artificial Sequence
  Description of Artificial Sequence: Synthetic oligonucleotide
  Sense strand starting at position 986 of SEQ ID NO: 1241286
uccacagaucuguagucua

SEQ ID NO: 1260691 - RNA, 19 nt, Artificial Sequence
  Description of Artificial Sequence: Synthetic oligonucleotide
  Antisense strand to SEQ ID NO: 1260690
uagacuacagaucugugga

SEQ ID NO: 1260692 - RNA, 19 nt, Artificial Sequence
  Description of Artificial Sequence: Synthetic oligonucleotide
  Sense strand starting at position 989 of SEQ ID NO: 1241286
acagaucuguagucuauca

SEQ ID NO: 1260693 - RNA, 19 nt, Artificial Sequence
  Description of Artificial Sequence: Synthetic oligonucleotide
  Antisense strand to SEQ ID NO: 1260692
ugauagacuacagaucugu

SEQ ID NO: 1260694 - RNA, 19 nt, Artificial Sequence
  Description of Artificial Sequence: Synthetic oligonucleotide
  Sense strand starting at position 991 of SEQ ID NO: 1241286
agaucuguagucuaucaag

SEQ ID NO: 1260695 - RNA, 19 nt, Artificial Sequence
  Description of Artificial Sequence: Synthetic oligonucleotide
  Antisense strand to SEQ ID NO: 1260694
cuugauagacuacagaucu

SEQ ID NO: 1260696 - RNA, 19 nt, Artificial Sequence
  Description of Artificial Sequence: Synthetic oligonucleotide
  Sense strand starting at position 1007 of SEQ ID NO: 1241286
aaggguuggucuguaagga

SEQ ID NO: 1260697 - RNA, 19 nt, Artificial Sequence
  Description of Artificial Sequence: Synthetic oligonucleotide
  Antisense strand to SEQ ID NO: 1260696
uccuuacagaccaacccuu

SEQ ID NO: 1260698 - RNA, 19 nt, Artificial Sequence
  Description of Artificial Sequence: Synthetic oligonucleotide
  Sense strand starting at position 1008 of SEQ ID NO: 1241286
aggguuggucuguaaggaa

SEQ ID NO: 1260699 - RNA, 19 nt, Artificial Sequence
  Description of Artificial Sequence: Synthetic oligonucleotide
  Antisense strand to SEQ ID NO: 1260698
uuccuuacagaccaacccu

SEQ ID NO: 1260700 - RNA, 19 nt, Artificial Sequence
  Description of Artificial Sequence: Synthetic oligonucleotide
  Sense strand starting at position 1033 of SEQ ID NO: 1241286
agaggauuacuuugguccu

SEQ ID NO: 1260701 - RNA, 19 nt, Artificial Sequence
  Description of Artificial Sequence: Synthetic oligonucleotide
  Antisense strand to SEQ ID NO: 1260700
aggaccaaaguaauccucu

SEQ ID NO: 1260702 - RNA, 19 nt, Artificial Sequence
  Description of Artificial Sequence: Synthetic oligonucleotide
  Sense strand starting at position 1147 of SEQ ID NO: 1241286
agaggcuucuguucccuua

SEQ ID NO: 1260703 - RNA, 19 nt, Artificial Sequence
  Description of Artificial Sequence: Synthetic oligonucleotide
  Antisense strand to SEQ ID NO: 1260702
uaagggaacagaagccucu

SEQ ID NO: 1260704 - RNA, 19 nt, Artificial Sequence
  Description of Artificial Sequence: Synthetic oligonucleotide
  Sense strand starting at position 1432 of SEQ ID NO: 1241286
ccaauaaagucuccgagca

SEQ ID NO: 1260705 - RNA, 19 nt, Artificial Sequence
  Description of Artificial Sequence: Synthetic oligonucleotide
  Antisense strand to SEQ ID NO: 1260704
ugcucggagacuuuauugg

SEQ ID NO: 1260706 - RNA, 19 nt, Artificial Sequence
  Description of Artificial Sequence: Synthetic oligonucleotide
  Sense strand starting at position 1675 of SEQ ID NO: 1241286
aagugaggccugggaaauu

SEQ ID NO: 1260707 - RNA, 19 nt, Artificial Sequence
  Description of Artificial Sequence: Synthetic oligonucleotide
  Antisense strand to SEQ ID NO: 1260706
aauuucccaggccucacuu

SEQ ID NO: 1260708 - RNA, 19 nt, Artificial Sequence
  Description of Artificial Sequence: Synthetic oligonucleotide
  Sense strand starting at position 2121 of SEQ ID NO: 1241286
ucggguuguucaguuauaa

SEQ ID NO: 1260709 - RNA, 19 nt, Artificial Sequence
  Description of Artificial Sequence: Synthetic oligonucleotide
  Antisense strand to SEQ ID NO: 1260708
uuauaacugaacaacccga

SEQ ID NO: 1260710 - RNA, 19 nt, Artificial Sequence
  Description of Artificial Sequence: Synthetic oligonucleotide
  Sense strand starting at position 2488 of SEQ ID NO: 1241286
ggagguucaugucucugaa

SEQ ID NO: 1260711 - RNA, 19 nt, Artificial Sequence
  Description of Artificial Sequence: Synthetic oligonucleotide
  Antisense strand to SEQ ID NO: 1260710
uucagagacaugaaccucc

SEQ ID NO: 1260712 - RNA, 19 nt, Artificial Sequence
  Description of Artificial Sequence: Synthetic oligonucleotide
  Sense strand starting at position 2546 of SEQ ID NO: 1241286
gccuaacacgucuaacaga

SEQ ID NO: 1260713 - RNA, 19 nt, Artificial Sequence
  Description of Artificial Sequence: Synthetic oligonucleotide
  Antisense strand to SEQ ID NO: 1260712
ucuguuagacguguuaggc

SEQ ID NO: 1260714 - RNA, 19 nt, Artificial Sequence
  Description of Artificial Sequence: Synthetic oligonucleotide
  Sense strand starting at position 2559 of SEQ ID NO: 1241286
aacagaagacggcgaaauu

SEQ ID NO: 1260715 - RNA, 19 nt, Artificial Sequence
  Description of Artificial Sequence: Synthetic oligonucleotide
  Antisense strand to SEQ ID NO: 1260714
aauuucgccgucuucuguu

SEQ ID NO: 1260716 - RNA, 19 nt, Artificial Sequence
  Description of Artificial Sequence: Synthetic oligonucleotide
  Sense strand starting at position 2584 of SEQ ID NO: 1241286
gaggaagauuaaggagauu

SEQ ID NO: 1260717 - RNA, 19 nt, Artificial Sequence
  Description of Artificial Sequence: Synthetic oligonucleotide
  Antisense strand to SEQ ID NO: 1260716
aaucuccuuaaucuuccuc

SEQ ID NO: 1260718 - RNA, 19 nt, Artificial Sequence
  Description of Artificial Sequence: Synthetic oligonucleotide
  Sense strand starting at position 2636 of SEQ ID NO: 1241286
auccucugauuuggacaga

SEQ ID NO: 1260719 - RNA, 19 nt, Artificial Sequence
  Description of Artificial Sequence: Synthetic oligonucleotide
  Antisense strand to SEQ ID NO: 1260718
ucuguccaaaucagaggau

SEQ ID NO: 1260720 - RNA, 19 nt, Artificial Sequence
  Description of Artificial Sequence: Synthetic oligonucleotide
  Sense strand starting at position 2637 of SEQ ID NO: 1241286
uccucugauuuggacagaa

SEQ ID NO: 1260721 - RNA, 19 nt, Artificial Sequence
  Description of Artificial Sequence: Synthetic oligonucleotide
  Antisense strand to SEQ ID NO: 1260720
uucuguccaaaucagagga

SEQ ID NO: 1260722 - RNA, 19 nt, Artificial Sequence
  Description of Artificial Sequence: Synthetic oligonucleotide
  Sense strand starting at position 2744 of SEQ ID NO: 1241286
ugaauugucucaguuaaua

SEQ ID NO: 1260723 - RNA, 19 nt, Artificial Sequence
  Description of Artificial Sequence: Synthetic oligonucleotide
  Antisense strand to SEQ ID NO: 1260722
uauuaacugagacaauuca

SEQ ID NO: 1260724 - RNA, 19 nt, Artificial Sequence
  Description of Artificial Sequence: Synthetic oligonucleotide
  Sense strand starting at position 2756 of SEQ ID NO: 1241286
guuaauaaggucugaaaua

SEQ ID NO: 1260725 - RNA, 19 nt, Artificial Sequence
  Description of Artificial Sequence: Synthetic oligonucleotide
  Antisense strand to SEQ ID NO: 1260724
uauuucagaccuuauuaac

SEQ ID NO: 1260726 - RNA, 19 nt, Artificial Sequence
  Description of Artificial Sequence: Synthetic oligonucleotide
  Sense strand starting at position 2757 of SEQ ID NO: 1241286
uuaauaaggucugaaauag

SEQ ID NO: 1260727 - RNA, 19 nt, Artificial Sequence
  Description of Artificial Sequence: Synthetic oligonucleotide
  Antisense strand to SEQ ID NO: 1260726
cuauuucagaccuuauuaa

SEQ ID NO: 1260728 - RNA, 19 nt, Artificial Sequence
  Description of Artificial Sequence: Synthetic oligonucleotide
  Sense strand starting at position 2768 of SEQ ID NO: 1241286
ugaaauagguccucuuauc

SEQ ID NO: 1260729 - RNA, 19 nt, Artificial Sequence
  Description of Artificial Sequence: Synthetic oligonucleotide
  Antisense strand to SEQ ID NO: 1260728
gauaagaggaccuauuuca

SEQ ID NO: 1260730 - RNA, 19 nt, Artificial Sequence
  Description of Artificial Sequence: Synthetic oligonucleotide
  Sense strand starting at position 2873 of SEQ ID NO: 1241286
acccaaaguauguguguaa

SEQ ID NO: 1260731 - RNA, 19 nt, Artificial Sequence
  Description of Artificial Sequence: Synthetic oligonucleotide
  Antisense strand to SEQ ID NO: 1260730
uuacacacauacuuugggu

SEQ ID NO: 1260732 - RNA, 19 nt, Artificial Sequence
  Description of Artificial Sequence: Synthetic oligonucleotide
  Sense strand starting at position 2874 of SEQ ID NO: 1241286
cccaaaguauguguguaau

SEQ ID NO: 1260733 - RNA, 19 nt, Artificial Sequence
  Description of Artificial Sequence: Synthetic oligonucleotide
  Antisense strand to SEQ ID NO: 1260732
auuacacacauacuuuggg

SEQ ID NO: 1260734 - RNA, 19 nt, Artificial Sequence
  Description of Artificial Sequence: Synthetic oligonucleotide
  Sense strand starting at position 2877 of SEQ ID NO: 1241286
aaaguauguguguaauaga

SEQ ID NO: 1260735 - RNA, 19 nt, Artificial Sequence
  Description of Artificial Sequence: Synthetic oligonucleotide
  Antisense strand to SEQ ID NO: 1260734
ucuauuacacacauacuuu

SEQ ID NO: 1260736 - RNA, 19 nt, Artificial Sequence
  Description of Artificial Sequence: Synthetic oligonucleotide
  Sense strand starting at position 3162 of SEQ ID NO: 1241286
augcaaagcugauuaaaca

SEQ ID NO: 1260737 - RNA, 19 nt, Artificial Sequence
  Description of Artificial Sequence: Synthetic oligonucleotide
  Antisense strand to SEQ ID NO: 1260736
uguuuaaucagcuuugcau

SEQ ID NO: 1260738 - RNA, 19 nt, Artificial Sequence
  Description of Artificial Sequence: Synthetic oligonucleotide
  Sense strand starting at position 3207 of SEQ ID NO: 1241286
uuaacaaucugagaaguaa

SEQ ID NO: 1260739 - RNA, 19 nt, Artificial Sequence
  Description of Artificial Sequence: Synthetic oligonucleotide
  Antisense strand to SEQ ID NO: 1260738
uuacuucucagauuguuaa

SEQ ID NO: 1260740 - RNA, 19 nt, Artificial Sequence
  Description of Artificial Sequence: Synthetic oligonucleotide
  Sense strand starting at position 3458 of SEQ ID NO: 1241286
aguccuagcccuugcaaua

SEQ ID NO: 1260741 - RNA, 19 nt, Artificial Sequence
  Description of Artificial Sequence: Synthetic oligonucleotide
  Antisense strand to SEQ ID NO: 1260740
uauugcaagggcuaggacu

SEQ ID NO: 1260742 - RNA, 19 nt, Artificial Sequence
  Description of Artificial Sequence: Synthetic oligonucleotide
  Sense strand starting at position 3507 of SEQ ID NO: 1241286
gaaagaaacugucccuguu

SEQ ID NO: 1260743 - RNA, 19 nt, Artificial Sequence
  Description of Artificial Sequence: Synthetic oligonucleotide
  Antisense strand to SEQ ID NO: 1260742
aacagggacaguuucuuuc

SEQ ID NO: 1260744 - RNA, 19 nt, Artificial Sequence
  Description of Artificial Sequence: Synthetic oligonucleotide
  Sense strand starting at position 3630 of SEQ ID NO: 1241286
auguauuagcaaugagcau

SEQ ID NO: 1260745 - RNA, 19 nt, Artificial Sequence
  Description of Artificial Sequence: Synthetic oligonucleotide
  Antisense strand to SEQ ID NO: 1260744
augcucauugcuaauacau

SEQ ID NO: 1260746 - RNA, 19 nt, Artificial Sequence
  Description of Artificial Sequence: Synthetic oligonucleotide
  Sense strand starting at position 642 of SEQ ID NO: 1241287
ccugcauagucaguuauuu

SEQ ID NO: 1260747 - RNA, 19 nt, Artificial Sequence
  Description of Artificial Sequence: Synthetic oligonucleotide
  Antisense strand to SEQ ID NO: 1260746
aaauaacugacuaugcagg

SEQ ID NO: 1260748 - RNA, 19 nt, Artificial Sequence
  Description of Artificial Sequence: Synthetic oligonucleotide
  Sense strand starting at position 707 of SEQ ID NO: 1241287
gucaaacugcuauaaugga

SEQ ID NO: 1260749 - RNA, 19 nt, Artificial Sequence
  Description of Artificial Sequence: Synthetic oligonucleotide
  Antisense strand to SEQ ID NO: 1260748
uccauuauagcaguuugac

SEQ ID NO: 1260750 - RNA, 19 nt, Artificial Sequence
  Description of Artificial Sequence: Synthetic oligonucleotide
  Sense strand starting at position 769 of SEQ ID NO: 1241287
gacaacucucgugauaauu

SEQ ID NO: 1260751 - RNA, 19 nt, Artificial Sequence
  Description of Artificial Sequence: Synthetic oligonucleotide
  Antisense strand to SEQ ID NO: 1260750
aauuaucacgagaguuguc

SEQ ID NO: 1260752 - RNA, 19 nt, Artificial Sequence
  Description of Artificial Sequence: Synthetic oligonucleotide
  Sense strand starting at position 810 of SEQ ID NO: 1241287
uaggaaugcucucugaaug

SEQ ID NO: 1260753 - RNA, 19 nt, Artificial Sequence
  Description of Artificial Sequence: Synthetic oligonucleotide
  Antisense strand to SEQ ID NO: 1260752
cauucagagagcauuccua

SEQ ID NO: 1260754 - RNA, 19 nt, Artificial Sequence
  Description of Artificial Sequence: Synthetic oligonucleotide
  Sense strand starting at position 830 of SEQ ID NO: 1241287
uaguucuugguauaggagu

SEQ ID NO: 1260755 - RNA, 19 nt, Artificial Sequence
  Description of Artificial Sequence: Synthetic oligonucleotide
  Antisense strand to SEQ ID NO: 1260754
acuccuauaccaagaacua

SEQ ID NO: 1260756 - RNA, 19 nt, Artificial Sequence
  Description of Artificial Sequence: Synthetic oligonucleotide
  Sense strand starting at position 841 of SEQ ID NO: 1241287
auaggagugcuacauaagu

SEQ ID NO: 1260757 - RNA, 19 nt, Artificial Sequence
  Description of Artificial Sequence: Synthetic oligonucleotide
  Antisense strand to SEQ ID NO: 1260756
acuuauguagcacuccuau

SEQ ID NO: 1260758 - RNA, 19 nt, Artificial Sequence
  Description of Artificial Sequence: Synthetic oligonucleotide
  Sense strand starting at position 843 of SEQ ID NO: 1241287
aggagugcuacauaaguaa

SEQ ID NO: 1260759 - RNA, 19 nt, Artificial Sequence
  Description of Artificial Sequence: Synthetic oligonucleotide
  Antisense strand to SEQ ID NO: 1260758
uuacuuauguagcacuccu

SEQ ID NO: 1260760 - RNA, 19 nt, Artificial Sequence
  Description of Artificial Sequence: Synthetic oligonucleotide
  Sense strand starting at position 892 of SEQ ID NO: 1241287
gaaaguuaucaccgaaucu

SEQ ID NO: 1260761 - RNA, 19 nt, Artificial Sequence
  Description of Artificial Sequence: Synthetic oligonucleotide
  Antisense strand to SEQ ID NO: 1260760
agauucggugauaacuuuc

SEQ ID NO: 1260762 - RNA, 19 nt, Artificial Sequence
  Description of Artificial Sequence: Synthetic oligonucleotide
  Sense strand starting at position 916 of SEQ ID NO: 1241287
aacauuacugugcaugaga

SEQ ID NO: 1260763 - RNA, 19 nt, Artificial Sequence
  Description of Artificial Sequence: Synthetic oligonucleotide
  Antisense strand to SEQ ID NO: 1260762
ucucaugcacaguaauguu

SEQ ID NO: 1260764 - RNA, 19 nt, Artificial Sequence
  Description of Artificial Sequence: Synthetic oligonucleotide
  Sense strand starting at position 918 of SEQ ID NO: 1241287
cauuacugugcaugagaca

SEQ ID NO: 1260765 - RNA, 19 nt, Artificial Sequence
  Description of Artificial Sequence: Synthetic oligonucleotide
  Antisense strand to SEQ ID NO: 1260764
ugucucaugcacaguaaug

SEQ ID NO: 1260766 - RNA, 19 nt, Artificial Sequence
  Description of Artificial Sequence: Synthetic oligonucleotide
  Sense strand starting at position 919 of SEQ ID NO: 1241287
auuacugugcaugagacaa

SEQ ID NO: 1260767 - RNA, 19 nt, Artificial Sequence
  Description of Artificial Sequence: Synthetic oligonucleotide
  Antisense strand to SEQ ID NO: 1260766
uugucucaugcacaguaau

SEQ ID NO: 1260768 - RNA, 19 nt, Artificial Sequence
  Description of Artificial Sequence: Synthetic oligonucleotide
  Sense strand starting at position 1008 of SEQ ID NO: 1241287
gacagagauuguuccuuga

SEQ ID NO: 1260769 - RNA, 19 nt, Artificial Sequence
  Description of Artificial Sequence: Synthetic oligonucleotide
  Antisense strand to SEQ ID NO: 1260768
ucaaggaacaaucucuguc

SEQ ID NO: 1260770 - RNA, 19 nt, Artificial Sequence
  Description of Artificial Sequence: Synthetic oligonucleotide
  Sense strand starting at position 1010 of SEQ ID NO: 1241287
cagagauuguuccuugaau

SEQ ID NO: 1260771 - RNA, 19 nt, Artificial Sequence
  Description of Artificial Sequence: Synthetic oligonucleotide
  Antisense strand to SEQ ID NO: 1260770
auucaaggaacaaucucug

SEQ ID NO: 1260772 - RNA, 19 nt, Artificial Sequence
  Description of Artificial Sequence: Synthetic oligonucleotide
  Sense strand starting at position 1011 of SEQ ID NO: 1241287
agagauuguuccuugaaua

SEQ ID NO: 1260773 - RNA, 19 nt, Artificial Sequence
  Description of Artificial Sequence: Synthetic oligonucleotide
  Antisense strand to SEQ ID NO: 1260772
uauucaaggaacaaucucu

SEQ ID NO: 1260774 - RNA, 19 nt, Artificial Sequence
  Description of Artificial Sequence: Synthetic oligonucleotide
  Sense strand starting at position 1012 of SEQ ID NO: 1241287
gagauuguuccuugaauaa

SEQ ID NO: 1260775 - RNA, 19 nt, Artificial Sequence
  Description of Artificial Sequence: Synthetic oligonucleotide
  Antisense strand to SEQ ID NO: 1260774
uuauucaaggaacaaucuc

SEQ ID NO: 1260776 - RNA, 19 nt, Artificial Sequence
  Description of Artificial Sequence: Synthetic oligonucleotide
  Sense strand starting at position 1142 of SEQ ID NO: 1241287
ucagcaugacuguguauuu

SEQ ID NO: 1260777 - RNA, 19 nt, Artificial Sequence
  Description of Artificial Sequence: Synthetic oligonucleotide
  Antisense strand to SEQ ID NO: 1260776
aaauacacagucaugcuga

SEQ ID NO: 1260778 - RNA, 19 nt, Artificial Sequence
  Description of Artificial Sequence: Synthetic oligonucleotide
  Sense strand starting at position 1143 of SEQ ID NO: 1241287
cagcaugacuguguauuua

SEQ ID NO: 1260779 - RNA, 19 nt, Artificial Sequence
  Description of Artificial Sequence: Synthetic oligonucleotide
  Antisense strand to SEQ ID NO: 1260778
uaaauacacagucaugcug

SEQ ID NO: 1260780 - RNA, 19 nt, Artificial Sequence
  Description of Artificial Sequence: Synthetic oligonucleotide
  Sense strand starting at position 1823 of SEQ ID NO: 1241287
aagugaguuccuggagaaa

SEQ ID NO: 1260781 - RNA, 19 nt, Artificial Sequence
  Description of Artificial Sequence: Synthetic oligonucleotide
  Antisense strand to SEQ ID NO: 1260780
uuucuccaggaacucacuu

SEQ ID NO: 1260782 - RNA, 19 nt, Artificial Sequence
  Description of Artificial Sequence: Synthetic oligonucleotide
  Sense strand starting at position 1851 of SEQ ID NO: 1241287
ggauuagucaccugaggua

SEQ ID NO: 1260783 - RNA, 19 nt, Artificial Sequence
  Description of Artificial Sequence: Synthetic oligonucleotide
  Antisense strand to SEQ ID NO: 1260782
uaccucaggugacuaaucc

SEQ ID NO: 1260784 - RNA, 19 nt, Artificial Sequence
  Description of Artificial Sequence: Synthetic oligonucleotide
  Sense strand starting at position 2177 of SEQ ID NO: 1241287
auuccuugccucugaagaa

SEQ ID NO: 1260785 - RNA, 19 nt, Artificial Sequence
  Description of Artificial Sequence: Synthetic oligonucleotide
  Antisense strand to SEQ ID NO: 1260784
uucuucagaggcaaggaau

SEQ ID NO: 1260786 - RNA, 19 nt, Artificial Sequence
  Description of Artificial Sequence: Synthetic oligonucleotide
  Sense strand starting at position 2654 of SEQ ID NO: 1241287
cgcgaauguaaguaaagga

SEQ ID NO: 1260787 - RNA, 19 nt, Artificial Sequence
  Description of Artificial Sequence: Synthetic oligonucleotide
  Antisense strand to SEQ ID NO: 1260786
uccuuuacuuacauucgcg

SEQ ID NO: 1260788 - RNA, 19 nt, Artificial Sequence
  Description of Artificial Sequence: Synthetic oligonucleotide
  Sense strand starting at position 2746 of SEQ ID NO: 1241287
ccuuguuuccugggaggau

SEQ ID NO: 1260789 - RNA, 19 nt, Artificial Sequence
  Description of Artificial Sequence: Synthetic oligonucleotide
  Antisense strand to SEQ ID NO: 1260788
auccucccaggaaacaagg

SEQ ID NO: 1260790 - RNA, 19 nt, Artificial Sequence
  Description of Artificial Sequence: Synthetic oligonucleotide
  Sense strand starting at position 2823 of SEQ ID NO: 1241287
ucgcgcauuccuccugagu

SEQ ID NO: 1260791 - RNA, 19 nt, Artificial Sequence
  Description of Artificial Sequence: Synthetic oligonucleotide
  Antisense strand to SEQ ID NO: 1260790
acucaggaggaaugcgcga

SEQ ID NO: 1260792 - RNA, 19 nt, Artificial Sequence
  Description of Artificial Sequence: Synthetic oligonucleotide
  Sense strand starting at position 2829 of SEQ ID NO: 1241287
auuccuccugagugaauca

SEQ ID NO: 1260793 - RNA, 19 nt, Artificial Sequence
  Description of Artificial Sequence: Synthetic oligonucleotide
  Antisense strand to SEQ ID NO: 1260792
ugauucacucaggaggaau

SEQ ID NO: 1260794 - RNA, 19 nt, Artificial Sequence
  Description of Artificial Sequence: Synthetic oligonucleotide
  Sense strand starting at position 3031 of SEQ ID NO: 1241287
cagacauucgucuggaaag

SEQ ID NO: 1260795 - RNA, 19 nt, Artificial Sequence
  Description of Artificial Sequence: Synthetic oligonucleotide
  Antisense strand to SEQ ID NO: 1260794
cuuuccagacgaaugucug

SEQ ID NO: 1260796 - RNA, 19 nt, Artificial Sequence
  Description of Artificial Sequence: Synthetic oligonucleotide
  Sense strand starting at position 3061 of SEQ ID NO: 1241287
uuuaauaaaugcucugaga

SEQ ID NO: 1260797 - RNA, 19 nt, Artificial Sequence
  Description of Artificial Sequence: Synthetic oligonucleotide
  Antisense strand to SEQ ID NO: 1260796
ucucagagcauuuauuaaa

SEQ ID NO: 1260798 - RNA, 19 nt, Artificial Sequence
  Description of Artificial Sequence: Synthetic oligonucleotide
  Sense strand starting at position 3189 of SEQ ID NO: 1241287
ccaagaucccgccaaaugu

SEQ ID NO: 1260799 - RNA, 19 nt, Artificial Sequence
  Description of Artificial Sequence: Synthetic oligonucleotide
  Antisense strand to SEQ ID NO: 1260798
acauuuggcgggaucuugg

SEQ ID NO: 1260800 - RNA, 19 nt, Artificial Sequence
  Description of Artificial Sequence: Synthetic oligonucleotide
  Sense strand starting at position 3354 of SEQ ID NO: 1241287
gggcucucuccaggaugaa

SEQ ID NO: 1260801 - RNA, 19 nt, Artificial Sequence
  Description of Artificial Sequence: Synthetic oligonucleotide
  Antisense strand to SEQ ID NO: 1260800
uucauccuggagagagccc

SEQ ID NO: 1260802 - RNA, 19 nt, Artificial Sequence
  Description of Artificial Sequence: Synthetic oligonucleotide
  Sense strand starting at position 3368 of SEQ ID NO: 1241287
augaaagagugucuuaauc

SEQ ID NO: 1260803 - RNA, 19 nt, Artificial Sequence
  Description of Artificial Sequence: Synthetic oligonucleotide
  Antisense strand to SEQ ID NO: 1260802
gauuaagacacucuuucau

SEQ ID NO: 1260804 - RNA, 19 nt, Artificial Sequence
  Description of Artificial Sequence: Synthetic oligonucleotide
  Sense strand starting at position 3418 of SEQ ID NO: 1241287
aagaacucaugcuugggaa

SEQ ID NO: 1260805 - RNA, 19 nt, Artificial Sequence
  Description of Artificial Sequence: Synthetic oligonucleotide
  Antisense strand to SEQ ID NO: 1260804
uucccaagcaugaguucuu

SEQ ID NO: 1260806 - RNA, 19 nt, Artificial Sequence
  Description of Artificial Sequence: Synthetic oligonucleotide
  Sense strand starting at position 3419 of SEQ ID NO: 1241287
agaacucaugcuugggaau

SEQ ID NO: 1260807 - RNA, 19 nt, Artificial Sequence
  Description of Artificial Sequence: Synthetic oligonucleotide
  Antisense strand to SEQ ID NO: 1260806
auucccaagcaugaguucu

SEQ ID NO: 1260808 - RNA, 19 nt, Artificial Sequence
  Description of Artificial Sequence: Synthetic oligonucleotide
  Sense strand starting at position 3420 of SEQ ID NO: 1241287
gaacucaugcuugggaaua

SEQ ID NO: 1260809 - RNA, 19 nt, Artificial Sequence
  Description of Artificial Sequence: Synthetic oligonucleotide
  Antisense strand to SEQ ID NO: 1260808
uauucccaagcaugaguuc

SEQ ID NO: 1260810 - RNA, 19 nt, Artificial Sequence
  Description of Artificial Sequence: Synthetic oligonucleotide
  Sense strand starting at position 3470 of SEQ ID NO: 1241287
ccugaauucuuugucagga

SEQ ID NO: 1260811 - RNA, 19 nt, Artificial Sequence
  Description of Artificial Sequence: Synthetic oligonucleotide
  Antisense strand to SEQ ID NO: 1260810
uccugacaaagaauucagg

SEQ ID NO: 1260812 - RNA, 19 nt, Artificial Sequence
  Description of Artificial Sequence: Synthetic oligonucleotide
  Sense strand starting at position 3471 of SEQ ID NO: 1241287
cugaauucuuugucaggaa

SEQ ID NO: 1260813 - RNA, 19 nt, Artificial Sequence
  Description of Artificial Sequence: Synthetic oligonucleotide
  Antisense strand to SEQ ID NO: 1260812
uuccugacaaagaauucag

SEQ ID NO: 1260814 - RNA, 19 nt, Artificial Sequence
  Description of Artificial Sequence: Synthetic oligonucleotide
  Sense strand starting at position 3506 of SEQ ID NO: 1241287
agguguuuggcuaguuugu

SEQ ID NO: 1260815 - RNA, 19 nt, Artificial Sequence
  Description of Artificial Sequence: Synthetic oligonucleotide
  Antisense strand to SEQ ID NO: 1260814
acaaacuagccaaacaccu

SEQ ID NO: 1260816 - RNA, 19 nt, Artificial Sequence
  Description of Artificial Sequence: Synthetic oligonucleotide
  Sense strand starting at position 3507 of SEQ ID NO: 1241287
gguguuuggcuaguuugua

SEQ ID NO: 1260817 - RNA, 19 nt, Artificial Sequence
  Description of Artificial Sequence: Synthetic oligonucleotide
  Antisense strand to SEQ ID NO: 1260816
uacaaacuagccaaacacc

SEQ ID NO: 1260818 - RNA, 19 nt, Artificial Sequence
  Description of Artificial Sequence: Synthetic oligonucleotide
  Sense strand starting at position 3727 of SEQ ID NO: 1241287
ggcggcugagauuauagau

SEQ ID NO: 1260819 - RNA, 19 nt, Artificial Sequence
  Description of Artificial Sequence: Synthetic oligonucleotide
  Antisense strand to SEQ ID NO: 1260818
aucuauaaucucagccgcc

SEQ ID NO: 1260820 - RNA, 19 nt, Artificial Sequence
  Description of Artificial Sequence: Synthetic oligonucleotide
  Sense strand starting at position 3872 of SEQ ID NO: 1241287
cauucuguccuuugagaga

SEQ ID NO: 1260821 - RNA, 19 nt, Artificial Sequence
  Description of Artificial Sequence: Synthetic oligonucleotide
  Antisense strand to SEQ ID NO: 1260820
ucucucaaaggacagaaug

SEQ ID NO: 1260822 - RNA, 19 nt, Artificial Sequence
  Description of Artificial Sequence: Synthetic oligonucleotide
  Sense strand starting at position 3888 of SEQ ID NO: 1241287
agaaucugaggaugcuuaa

SEQ ID NO: 1260823 - RNA, 19 nt, Artificial Sequence
  Description of Artificial Sequence: Synthetic oligonucleotide
  Antisense strand to SEQ ID NO: 1260822
uuaagcauccucagauucu

SEQ ID NO: 1260824 - RNA, 19 nt, Artificial Sequence
  Description of Artificial Sequence: Synthetic oligonucleotide
  Sense strand starting at position 3953 of SEQ ID NO: 1241287
gugacuaaauagcucuuaa

SEQ ID NO: 1260825 - RNA, 19 nt, Artificial Sequence
  Description of Artificial Sequence: Synthetic oligonucleotide
  Antisense strand to SEQ ID NO: 1260824
uuaagagcuauuuagucac

SEQ ID NO: 1260826 - RNA, 19 nt, Artificial Sequence
  Description of Artificial Sequence: Synthetic oligonucleotide
  Sense strand starting at position 61 of SEQ ID NO: 1241288
aguuuauuaccuuggcaau

SEQ ID NO: 1260827 - RNA, 19 nt, Artificial Sequence
  Description of Artificial Sequence: Synthetic oligonucleotide
  Antisense strand to SEQ ID NO: 1260826
auugccaagguaauaaacu

SEQ ID NO: 1260828 - RNA, 19 nt, Artificial Sequence
  Description of Artificial Sequence: Synthetic oligonucleotide
  Sense strand starting at position 62 of SEQ ID NO: 1241288
guuuauuaccuuggcaauc

SEQ ID NO: 1260829 - RNA, 19 nt, Artificial Sequence
  Description of Artificial Sequence: Synthetic oligonucleotide
  Antisense strand to SEQ ID NO: 1260828
gauugccaagguaauaaac

SEQ ID NO: 1260830 - RNA, 19 nt, Artificial Sequence
  Description of Artificial Sequence: Synthetic oligonucleotide
  Sense strand starting at position 340 of SEQ ID NO: 1241288
gcgcaacagcucugaaaga

SEQ ID NO: 1260831 - RNA, 19 nt, Artificial Sequence
  Description of Artificial Sequence: Synthetic oligonucleotide
  Antisense strand to SEQ ID NO: 1260830
ucuuucagagcuguugcgc

SEQ ID NO: 1260832 - RNA, 19 nt, Artificial Sequence
  Description of Artificial Sequence: Synthetic oligonucleotide
  Sense strand starting at position 396 of SEQ ID NO: 1241288
acaucaucgcuggauggaa

SEQ ID NO: 1260833 - RNA, 19 nt, Artificial Sequence
  Description of Artificial Sequence: Synthetic oligonucleotide
  Antisense strand to SEQ ID NO: 1260832
uuccauccagcgaugaugu

SEQ ID NO: 1260834 - RNA, 19 nt, Artificial Sequence
  Description of Artificial Sequence: Synthetic oligonucleotide
  Sense strand starting at position 425 of SEQ ID NO: 1241288
uuuacauccuaguuaugcu

SEQ ID NO: 1260835 - RNA, 19 nt, Artificial Sequence
  Description of Artificial Sequence: Synthetic oligonucleotide
  Antisense strand to SEQ ID NO: 1260834
agcauaacuaggauguaaa

SEQ ID NO: 1260836 - RNA, 19 nt, Artificial Sequence
  Description of Artificial Sequence: Synthetic oligonucleotide
  Sense strand starting at position 509 of SEQ ID NO: 1241288
guacaaucugcgggaacau

SEQ ID NO: 1260837 - RNA, 19 nt, Artificial Sequence
  Description of Artificial Sequence: Synthetic oligonucleotide
  Antisense strand to SEQ ID NO: 1260836
auguucccgcagauuguac

SEQ ID NO: 1260838 - RNA, 19 nt, Artificial Sequence
  Description of Artificial Sequence: Synthetic oligonucleotide
  Sense strand starting at position 510 of SEQ ID NO: 1241288
uacaaucugcgggaacaua

SEQ ID NO: 1260839 - RNA, 19 nt, Artificial Sequence
  Description of Artificial Sequence: Synthetic oligonucleotide
  Antisense strand to SEQ ID NO: 1260838
uauguucccgcagauugua

SEQ ID NO: 1260840 - RNA, 19 nt, Artificial Sequence
  Description of Artificial Sequence: Synthetic oligonucleotide
  Sense strand starting at position 552 of SEQ ID NO: 1241288
cugugacugguagggaaau

SEQ ID NO: 1260841 - RNA, 19 nt, Artificial Sequence
  Description of Artificial Sequence: Synthetic oligonucleotide
  Antisense strand to SEQ ID NO: 1260840
auuucccuaccagucacag

SEQ ID NO: 1260842 - RNA, 19 nt, Artificial Sequence
  Description of Artificial Sequence: Synthetic oligonucleotide
  Sense strand starting at position 565 of SEQ ID NO: 1241288
ggaaaugccugacaagaaa

SEQ ID NO: 1260843 - RNA, 19 nt, Artificial Sequence
  Description of Artificial Sequence: Synthetic oligonucleotide
  Antisense strand to SEQ ID NO: 1260842
uuucuugucaggcauuucc

SEQ ID NO: 1260844 - RNA, 19 nt, Artificial Sequence
  Description of Artificial Sequence: Synthetic oligonucleotide
  Sense strand starting at position 769 of SEQ ID NO: 1241288
agggaacuguucucuacaa

SEQ ID NO: 1260845 - RNA, 19 nt, Artificial Sequence
  Description of Artificial Sequence: Synthetic oligonucleotide
  Antisense strand to SEQ ID NO: 1260844
uuguagagaacaguucccu

SEQ ID NO: 1260846 - RNA, 19 nt, Artificial Sequence
  Description of Artificial Sequence: Synthetic oligonucleotide
  Sense strand starting at position 770 of SEQ ID NO: 1241288
gggaacuguucucuacaac

SEQ ID NO: 1260847 - RNA, 19 nt, Artificial Sequence
  Description of Artificial Sequence: Synthetic oligonucleotide
  Antisense strand to SEQ ID NO: 1260846
guuguagagaacaguuccc

SEQ ID NO: 1260848 - RNA, 19 nt, Artificial Sequence
  Description of Artificial Sequence: Synthetic oligonucleotide
  Sense strand starting at position 771 of SEQ ID NO: 1241288
ggaacuguucucuacaacu

SEQ ID NO: 1260849 - RNA, 19 nt, Artificial Sequence
  Description of Artificial Sequence: Synthetic oligonucleotide
  Antisense strand to SEQ ID NO: 1260848
aguuguagagaacaguucc

SEQ ID NO: 1260850 - RNA, 19 nt, Artificial Sequence
  Description of Artificial Sequence: Synthetic oligonucleotide
  Sense strand starting at position 1151 of SEQ ID NO: 1241288
gcgcgcgaugacucacaaa

SEQ ID NO: 1260851 - RNA, 19 nt, Artificial Sequence
  Description of Artificial Sequence: Synthetic oligonucleotide
  Antisense strand to SEQ ID NO: 1260850
uuugugagucaucgcgcgc

SEQ ID NO: 1260852 - RNA, 19 nt, Artificial Sequence
  Description of Artificial Sequence: Synthetic oligonucleotide
  Sense strand starting at position 1736 of SEQ ID NO: 1241288
gacucaccucuggaauguu

SEQ ID NO: 1260853 - RNA, 19 nt, Artificial Sequence
  Description of Artificial Sequence: Synthetic oligonucleotide
  Antisense strand to SEQ ID NO: 1260852
aacauuccagaggugaguc

SEQ ID NO: 1260854 - RNA, 19 nt, Artificial Sequence
  Description of Artificial Sequence: Synthetic oligonucleotide
  Sense strand starting at position 2540 of SEQ ID NO: 1241288
gcccuuaauugguuuggaa

SEQ ID NO: 1260855 - RNA, 19 nt, Artificial Sequence
  Description of Artificial Sequence: Synthetic oligonucleotide
  Antisense strand to SEQ ID NO: 1260854
uuccaaaccaauuaagggc

SEQ ID NO: 1260856 - RNA, 19 nt, Artificial Sequence
  Description of Artificial Sequence: Synthetic oligonucleotide
  Sense strand starting at position 2542 of SEQ ID NO: 1241288
ccuuaauugguuuggaauc

SEQ ID NO: 1260857 - RNA, 19 nt, Artificial Sequence
  Description of Artificial Sequence: Synthetic oligonucleotide
  Antisense strand to SEQ ID NO: 1260856
gauuccaaaccaauuaagg

SEQ ID NO: 1260858 - RNA, 19 nt, Artificial Sequence
  Description of Artificial Sequence: Synthetic oligonucleotide
  Sense strand starting at position 2617 of SEQ ID NO: 1241288
cugcucucccaggguugaa

SEQ ID NO: 1260859 - RNA, 19 nt, Artificial Sequence
  Description of Artificial Sequence: Synthetic oligonucleotide
  Antisense strand to SEQ ID NO: 1260858
uucaacccugggagagcag

SEQ ID NO: 1260860 - RNA, 19 nt, Artificial Sequence
  Description of Artificial Sequence: Synthetic oligonucleotide
  Sense strand starting at position 2702 of SEQ ID NO: 1241288
ucuaguuuaugacuuguga

SEQ ID NO: 1260861 - RNA, 19 nt, Artificial Sequence
  Description of Artificial Sequence: Synthetic oligonucleotide
  Antisense strand to SEQ ID NO: 1260860
ucacaagucauaaacuaga

SEQ ID NO: 1260862 - RNA, 19 nt, Artificial Sequence
  Description of Artificial Sequence: Synthetic oligonucleotide
  Sense strand starting at position 2713 of SEQ ID NO: 1241288
acuugugaauucuuugaua

SEQ ID NO: 1260863 - RNA, 19 nt, Artificial Sequence
  Description of Artificial Sequence: Synthetic oligonucleotide
  Antisense strand to SEQ ID NO: 1260862
uaucaaagaauucacaagu

SEQ ID NO: 1260864 - RNA, 19 nt, Artificial Sequence
  Description of Artificial Sequence: Synthetic oligonucleotide
  Sense strand starting at position 2715 of SEQ ID NO: 1241288
uugugaauucuuugauaag

SEQ ID NO: 1260865 - RNA, 19 nt, Artificial Sequence
  Description of Artificial Sequence: Synthetic oligonucleotide
  Antisense strand to SEQ ID NO: 1260864
cuuaucaaagaauucacaa

SEQ ID NO: 1260866 - RNA, 19 nt, Artificial Sequence
  Description of Artificial Sequence: Synthetic oligonucleotide
  Sense strand starting at position 2752 of SEQ ID NO: 1241288
aggcauuuauaaugagauu

SEQ ID NO: 1260867 - RNA, 19 nt, Artificial Sequence
  Description of Artificial Sequence: Synthetic oligonucleotide
  Antisense strand to SEQ ID NO: 1260866
aaucucauuauaaaugccu

SEQ ID NO: 1260868 - RNA, 19 nt, Artificial Sequence
  Description of Artificial Sequence: Synthetic oligonucleotide
  Sense strand starting at position 2763 of SEQ ID NO: 1241288
augagauuccaauguauuc

SEQ ID NO: 1260869 - RNA, 19 nt, Artificial Sequence
  Description of Artificial Sequence: Synthetic oligonucleotide
  Antisense strand to SEQ ID NO: 1260868
gaauacauuggaaucucau

SEQ ID NO: 1260870 - RNA, 19 nt, Artificial Sequence
  Description of Artificial Sequence: Synthetic oligonucleotide
  Sense strand starting at position 3116 of SEQ ID NO: 1241288
gagagaggcucucauauuu

SEQ ID NO: 1260871 - RNA, 19 nt, Artificial Sequence
  Description of Artificial Sequence: Synthetic oligonucleotide
  Antisense strand to SEQ ID NO: 1260870
aaauaugagagccucucuc

SEQ ID NO: 1260872 - RNA, 19 nt, Artificial Sequence
  Description of Artificial Sequence: Synthetic oligonucleotide
  Sense strand starting at position 3133 of SEQ ID NO: 1241288
uuuaguucuguugaaacuc

SEQ ID NO: 1260873 - RNA, 19 nt, Artificial Sequence
  Description of Artificial Sequence: Synthetic oligonucleotide
  Antisense strand to SEQ ID NO: 1260872
gaguuucaacagaacuaaa

SEQ ID NO: 1260874 - RNA, 19 nt, Artificial Sequence
  Description of Artificial Sequence: Synthetic oligonucleotide
  Sense strand starting at position 3270 of SEQ ID NO: 1241288
ccugcacucuggucucuaa

SEQ ID NO: 1260875 - RNA, 19 nt, Artificial Sequence
  Description of Artificial Sequence: Synthetic oligonucleotide
  Antisense strand to SEQ ID NO: 1260874
uuagagaccagagugcagg

SEQ ID NO: 1260876 - RNA, 19 nt, Artificial Sequence
  Description of Artificial Sequence: Synthetic oligonucleotide
  Sense strand starting at position 3289 of SEQ ID NO: 1241288
ggugcagucaucgagaagu

SEQ ID NO: 1260877 - RNA, 19 nt, Artificial Sequence
  Description of Artificial Sequence: Synthetic oligonucleotide
  Antisense strand to SEQ ID NO: 1260876
acuucucgaugacugcacc

SEQ ID NO: 1260878 - RNA, 19 nt, Artificial Sequence
  Description of Artificial Sequence: Synthetic oligonucleotide
  Sense strand starting at position 3342 of SEQ ID NO: 1241288
agagaaauguugcugagga

SEQ ID NO: 1260879 - RNA, 19 nt, Artificial Sequence
  Description of Artificial Sequence: Synthetic oligonucleotide
  Antisense strand to SEQ ID NO: 1260878
uccucagcaacauuucucu

SEQ ID NO: 1260880 - RNA, 19 nt, Artificial Sequence
  Description of Artificial Sequence: Synthetic oligonucleotide
  Sense strand starting at position 3403 of SEQ ID NO: 1241288
uugcauuugcacugagguu

SEQ ID NO: 1260881 - RNA, 19 nt, Artificial Sequence
  Description of Artificial Sequence: Synthetic oligonucleotide
  Antisense strand to SEQ ID NO: 1260880
aaccucagugcaaaugcaa

SEQ ID NO: 1260882 - RNA, 19 nt, Artificial Sequence
  Description of Artificial Sequence: Synthetic oligonucleotide
  Sense strand starting at position 3409 of SEQ ID NO: 1241288
uugcacugagguuagaauu

SEQ ID NO: 1260883 - RNA, 19 nt, Artificial Sequence
  Description of Artificial Sequence: Synthetic oligonucleotide
  Antisense strand to SEQ ID NO: 1260882
aauucuaaccucagugcaa

SEQ ID NO: 1260884 - RNA, 19 nt, Artificial Sequence
  Description of Artificial Sequence: Synthetic oligonucleotide
  Sense strand starting at position 3417 of SEQ ID NO: 1241288
agguuagaauuggcagcua

SEQ ID NO: 1260885 - RNA, 19 nt, Artificial Sequence
  Description of Artificial Sequence: Synthetic oligonucleotide
  Antisense strand to SEQ ID NO: 1260884
uagcugccaauucuaaccu

SEQ ID NO: 1260886 - RNA, 19 nt, Artificial Sequence
  Description of Artificial Sequence: Synthetic oligonucleotide
  Sense strand starting at position 3457 of SEQ ID NO: 1241288
ccaagaucgugcuuccaua

SEQ ID NO: 1260887 - RNA, 19 nt, Artificial Sequence
  Description of Artificial Sequence: Synthetic oligonucleotide
  Antisense strand to SEQ ID NO: 1260886
uauggaagcacgaucuugg

SEQ ID NO: 1260888 - RNA, 19 nt, Artificial Sequence
  Description of Artificial Sequence: Synthetic oligonucleotide
  Sense strand starting at position 3551 of SEQ ID NO: 1241288
ggugauuuguguccuuuag

SEQ ID NO: 1260889 - RNA, 19 nt, Artificial Sequence
  Description of Artificial Sequence: Synthetic oligonucleotide
  Antisense strand to SEQ ID NO: 1260888
cuaaaggacacaaaucacc

SEQ ID NO: 1260890 - RNA, 19 nt, Artificial Sequence
  Description of Artificial Sequence: Synthetic oligonucleotide
  Sense strand starting at position 3711 of SEQ ID NO: 1241288
gagcaugacuuagcaguau

SEQ ID NO: 1260891 - RNA, 19 nt, Artificial Sequence
  Description of Artificial Sequence: Synthetic oligonucleotide
  Antisense strand to SEQ ID NO: 1260890
auacugcuaagucaugcuc

SEQ ID NO: 1260892 - RNA, 19 nt, Artificial Sequence
  Description of Artificial Sequence: Synthetic oligonucleotide
  Sense strand starting at position 3715 of SEQ ID NO: 1241288
augacuuagcaguauugaa

SEQ ID NO: 1260893 - RNA, 19 nt, Artificial Sequence
  Description of Artificial Sequence: Synthetic oligonucleotide
  Antisense strand to SEQ ID NO: 1260892
uucaauacugcuaagucau

SEQ ID NO: 1260894 - RNA, 19 nt, Artificial Sequence
  Description of Artificial Sequence: Synthetic oligonucleotide
  Sense strand starting at position 3776 of SEQ ID NO: 1241288
uuuagaaacucuguuggaa

SEQ ID NO: 1260895 - RNA, 19 nt, Artificial Sequence
  Description of Artificial Sequence: Synthetic oligonucleotide
  Antisense strand to SEQ ID NO: 1260894
uuccaacagaguuucuaaa

SEQ ID NO: 1260896 - RNA, 19 nt, Artificial Sequence
  Description of Artificial Sequence: Synthetic oligonucleotide
  Sense strand starting at position 3779 of SEQ ID NO: 1241288
agaaacucuguuggaaagu

SEQ ID NO: 1260897 - RNA, 19 nt, Artificial Sequence
  Description of Artificial Sequence: Synthetic oligonucleotide
  Antisense strand to SEQ ID NO: 1260896
acuuuccaacagaguuucu

SEQ ID NO: 1260898 - RNA, 19 nt, Artificial Sequence
  Description of Artificial Sequence: Synthetic oligonucleotide
  Sense strand starting at position 3790 of SEQ ID NO: 1241288
uggaaaguauaggcaugaa

SEQ ID NO: 1260899 - RNA, 19 nt, Artificial Sequence
  Description of Artificial Sequence: Synthetic oligonucleotide
  Antisense strand to SEQ ID NO: 1260898
uucaugccuauacuuucca

SEQ ID NO: 1260900 - RNA, 19 nt, Artificial Sequence
  Description of Artificial Sequence: Synthetic oligonucleotide
  Sense strand starting at position 3793 of SEQ ID NO: 1241288
aaaguauaggcaugaaacu

SEQ ID NO: 1260901 - RNA, 19 nt, Artificial Sequence
  Description of Artificial Sequence: Synthetic oligonucleotide
  Antisense strand to SEQ ID NO: 1260900
aguuucaugccuauacuuu

SEQ ID NO: 1260902 - RNA, 19 nt, Artificial Sequence
  Description of Artificial Sequence: Synthetic oligonucleotide
  Sense strand starting at position 3802 of SEQ ID NO: 1241288
gcaugaaacuagucugagg

SEQ ID NO: 1260903 - RNA, 19 nt, Artificial Sequence
  Description of Artificial Sequence: Synthetic oligonucleotide
  Antisense strand to SEQ ID NO: 1260902
ccucagacuaguuucaugc

SEQ ID NO: 1260904 - RNA, 19 nt, Artificial Sequence
  Description of Artificial Sequence: Synthetic oligonucleotide
  Sense strand starting at position 3944 of SEQ ID NO: 1241288
guguaccacucauuuguau

SEQ ID NO: 1260905 - RNA, 19 nt, Artificial Sequence
  Description of Artificial Sequence: Synthetic oligonucleotide
  Antisense strand to SEQ ID NO: 1260904
auacaaaugagugguacac

SEQ ID NO: 1260906 - RNA, 19 nt, Artificial Sequence
  Description of Artificial Sequence: Synthetic oligonucleotide
  Sense strand starting at position 171 of SEQ ID NO: 1241289
aauauuuggugggaucuau

SEQ ID NO: 1260907 - RNA, 19 nt, Artificial Sequence
  Description of Artificial Sequence: Synthetic oligonucleotide
  Antisense strand to SEQ ID NO: 1260906
auagaucccaccaaauauu

SEQ ID NO: 1260908 - RNA, 19 nt, Artificial Sequence
  Description of Artificial Sequence: Synthetic oligonucleotide
  Sense strand starting at position 180 of SEQ ID NO: 1241289
ugggaucuauuugaaugaa

SEQ ID NO: 1260909 - RNA, 19 nt, Artificial Sequence
  Description of Artificial Sequence: Synthetic oligonucleotide
  Antisense strand to SEQ ID NO: 1260908
uucauucaaauagauccca

SEQ ID NO: 1260910 - RNA, 19 nt, Artificial Sequence
  Description of Artificial Sequence: Synthetic oligonucleotide
  Sense strand starting at position 201 of SEQ ID NO: 1241289
aggaguuuggaucguuaca

SEQ ID NO: 1260911 - RNA, 19 nt, Artificial Sequence
  Description of Artificial Sequence: Synthetic oligonucleotide
  Antisense strand to SEQ ID NO: 1260910
uguaacgauccaaacuccu

SEQ ID NO: 1260912 - RNA, 19 nt, Artificial Sequence
  Description of Artificial Sequence: Synthetic oligonucleotide
  Sense strand starting at position 203 of SEQ ID NO: 1241289
gaguuuggaucguuacagu

SEQ ID NO: 1260913 - RNA, 19 nt, Artificial Sequence
  Description of Artificial Sequence: Synthetic oligonucleotide
  Antisense strand to SEQ ID NO: 1260912
acuguaacgauccaaacuc

SEQ ID NO: 1260914 - RNA, 19 nt, Artificial Sequence
  Description of Artificial Sequence: Synthetic oligonucleotide
  Sense strand starting at position 221 of SEQ ID NO: 1241289
uuaacuagaucucuggcua

SEQ ID NO: 1260915 - RNA, 19 nt, Artificial Sequence
  Description of Artificial Sequence: Synthetic oligonucleotide
  Antisense strand to SEQ ID NO: 1260914
uagccagagaucuaguuaa

SEQ ID NO: 1260916 - RNA, 19 nt, Artificial Sequence
  Description of Artificial Sequence: Synthetic oligonucleotide
  Sense strand starting at position 225 of SEQ ID NO: 1241289
cuagaucucuggcuacuca

SEQ ID NO: 1260917 - RNA, 19 nt, Artificial Sequence
  Description of Artificial Sequence: Synthetic oligonucleotide
  Antisense strand to SEQ ID NO: 1260916
ugaguagccagagaucuag

SEQ ID NO: 1260918 - RNA, 19 nt, Artificial Sequence
  Description of Artificial Sequence: Synthetic oligonucleotide
  Sense strand starting at position 442 of SEQ ID NO: 1241289
guaguagacucaggauuuc

SEQ ID NO: 1260919 - RNA, 19 nt, Artificial Sequence
  Description of Artificial Sequence: Synthetic oligonucleotide
  Antisense strand to SEQ ID NO: 1260918
gaaauccugagucuacuac

SEQ ID NO: 1260920 - RNA, 19 nt, Artificial Sequence
  Description of Artificial Sequence: Synthetic oligonucleotide
  Sense strand starting at position 638 of SEQ ID NO: 1241289
cuuguaagguaauuagcua

SEQ ID NO: 1260921 - RNA, 19 nt, Artificial Sequence
  Description of Artificial Sequence: Synthetic oligonucleotide
  Antisense strand to SEQ ID NO: 1260920
uagcuaauuaccuuacaag

SEQ ID NO: 1260922 - RNA, 19 nt, Artificial Sequence
  Description of Artificial Sequence: Synthetic oligonucleotide
  Sense strand starting at position 642 of SEQ ID NO: 1241289
uaagguaauuagcuagcau

SEQ ID NO: 1260923 - RNA, 19 nt, Artificial Sequence
  Description of Artificial Sequence: Synthetic oligonucleotide
  Antisense strand to SEQ ID NO: 1260922
augcuagcuaauuaccuua

SEQ ID NO: 1260924 - RNA, 19 nt, Artificial Sequence
  Description of Artificial Sequence: Synthetic oligonucleotide
  Sense strand starting at position 682 of SEQ ID NO: 1241289
gcucaaagacuuugaagac

SEQ ID NO: 1260925 - RNA, 19 nt, Artificial Sequence
  Description of Artificial Sequence: Synthetic oligonucleotide
  Antisense strand to SEQ ID NO: 1260924
gucuucaaagucuuugagc

SEQ ID NO: 1260926 - RNA, 19 nt, Artificial Sequence
  Description of Artificial Sequence: Synthetic oligonucleotide
  Sense strand starting at position 683 of SEQ ID NO: 1241289
cucaaagacuuugaagacu

SEQ ID NO: 1260927 - RNA, 19 nt, Artificial Sequence
  Description of Artificial Sequence: Synthetic oligonucleotide
  Antisense strand to SEQ ID NO: 1260926
agucuucaaagucuuugag

SEQ ID NO: 1260928 - RNA, 19 nt, Artificial Sequence
  Description of Artificial Sequence: Synthetic oligonucleotide
  Sense strand starting at position 709 of SEQ ID NO: 1241289
uaauaugcccuguggacuu

SEQ ID NO: 1260929 - RNA, 19 nt, Artificial Sequence
  Description of Artificial Sequence: Synthetic oligonucleotide
  Antisense strand to SEQ ID NO: 1260928
aaguccacagggcauauua

SEQ ID NO: 1260930 - RNA, 19 nt, Artificial Sequence
  Description of Artificial Sequence: Synthetic oligonucleotide
  Sense strand starting at position 734 of SEQ ID NO: 1241289
gcuuuacuuacacguugga

SEQ ID NO: 1260931 - RNA, 19 nt, Artificial Sequence
  Description of Artificial Sequence: Synthetic oligonucleotide
  Antisense strand to SEQ ID NO: 1260930
uccaacguguaaguaaagc

SEQ ID NO: 1260932 - RNA, 19 nt, Artificial Sequence
  Description of Artificial Sequence: Synthetic oligonucleotide
  Sense strand starting at position 918 of SEQ ID NO: 1241289
gcaguuuauuaccuuggca

SEQ ID NO: 1260933 - RNA, 19 nt, Artificial Sequence
  Description of Artificial Sequence: Synthetic oligonucleotide
  Antisense strand to SEQ ID NO: 1260932
ugccaagguaauaaacugc

SEQ ID NO: 1260934 - RNA, 19 nt, Artificial Sequence
  Description of Artificial Sequence: Synthetic oligonucleotide
  Sense strand starting at position 920 of SEQ ID NO: 1241289
aguuuauuaccuuggcaau

SEQ ID NO: 1260935 - RNA, 19 nt, Artificial Sequence
  Description of Artificial Sequence: Synthetic oligonucleotide
  Antisense strand to SEQ ID NO: 1260934
auugccaagguaauaaacu

SEQ ID NO: 1260936 - RNA, 19 nt, Artificial Sequence
  Description of Artificial Sequence: Synthetic oligonucleotide
  Sense strand starting at position 921 of SEQ ID NO: 1241289
guuuauuaccuuggcaauc

SEQ ID NO: 1260937 - RNA, 19 nt, Artificial Sequence
  Description of Artificial Sequence: Synthetic oligonucleotide
  Antisense strand to SEQ ID NO: 1260936
gauugccaagguaauaaac

SEQ ID NO: 1260938 - RNA, 19 nt, Artificial Sequence
  Description of Artificial Sequence: Synthetic oligonucleotide
  Sense strand starting at position 1199 of SEQ ID NO: 1241289
gcgcaacagcucugaaaga

SEQ ID NO: 1260939 - RNA, 19 nt, Artificial Sequence
  Description of Artificial Sequence: Synthetic oligonucleotide
  Antisense strand to SEQ ID NO: 1260938
ucuuucagagcuguugcgc

SEQ ID NO: 1260940 - RNA, 19 nt, Artificial Sequence
  Description of Artificial Sequence: Synthetic oligonucleotide
  Sense strand starting at position 1255 of SEQ ID NO: 1241289
acaucaucgcuggauggaa

SEQ ID NO: 1260941 - RNA, 19 nt, Artificial Sequence
  Description of Artificial Sequence: Synthetic oligonucleotide
  Antisense strand to SEQ ID NO: 1260940
uuccauccagcgaugaugu

SEQ ID NO: 1260942 - RNA, 19 nt, Artificial Sequence
  Description of Artificial Sequence: Synthetic oligonucleotide
  Sense strand starting at position 1284 of SEQ ID NO: 1241289
uuuacauccuaguuaugcu

SEQ ID NO: 1260943 - RNA, 19 nt, Artificial Sequence
  Description of Artificial Sequence: Synthetic oligonucleotide
  Antisense strand to SEQ ID NO: 1260942
agcauaacuaggauguaaa

SEQ ID NO: 1260944 - RNA, 19 nt, Artificial Sequence
  Description of Artificial Sequence: Synthetic oligonucleotide
  Sense strand starting at position 1294 of SEQ ID NO: 1241289
aguuaugcuucugcuuaac

SEQ ID NO: 1260945 - RNA, 19 nt, Artificial Sequence
  Description of Artificial Sequence: Synthetic oligonucleotide
  Antisense strand to SEQ ID NO: 1260944
guuaagcagaagcauaacu

SEQ ID NO: 1260946 - RNA, 19 nt, Artificial Sequence
  Description of Artificial Sequence: Synthetic oligonucleotide
  Sense strand starting at position 1368 of SEQ ID NO: 1241289
guacaaucugcgggaacau

SEQ ID NO: 1260947 - RNA, 19 nt, Artificial Sequence
  Description of Artificial Sequence: Synthetic oligonucleotide
  Antisense strand to SEQ ID NO: 1260946
auguucccgcagauuguac

SEQ ID NO: 1260948 - RNA, 19 nt, Artificial Sequence
  Description of Artificial Sequence: Synthetic oligonucleotide
  Sense strand starting at position 1369 of SEQ ID NO: 1241289
uacaaucugcgggaacaua

SEQ ID NO: 1260949 - RNA, 19 nt, Artificial Sequence
  Description of Artificial Sequence: Synthetic oligonucleotide
  Antisense strand to SEQ ID NO: 1260948
uauguucccgcagauugua

SEQ ID NO: 1260950 - RNA, 19 nt, Artificial Sequence
  Description of Artificial Sequence: Synthetic oligonucleotide
  Sense strand starting at position 1411 of SEQ ID NO: 1241289
cugugacugguagggaaau

SEQ ID NO: 1260951 - RNA, 19 nt, Artificial Sequence
  Description of Artificial Sequence: Synthetic oligonucleotide
  Antisense strand to SEQ ID NO: 1260950
auuucccuaccagucacag

SEQ ID NO: 1260952 - RNA, 19 nt, Artificial Sequence
  Description of Artificial Sequence: Synthetic oligonucleotide
  Sense strand starting at position 1424 of SEQ ID NO: 1241289
ggaaaugccugacaagaaa

SEQ ID NO: 1260953 - RNA, 19 nt, Artificial Sequence
  Description of Artificial Sequence: Synthetic oligonucleotide
  Antisense strand to SEQ ID NO: 1260952
uuucuugucaggcauuucc

SEQ ID NO: 1260954 - RNA, 19 nt, Artificial Sequence
  Description of Artificial Sequence: Synthetic oligonucleotide
  Sense strand starting at position 1628 of SEQ ID NO: 1241289
agggaacuguucucuacaa

SEQ ID NO: 1260955 - RNA, 19 nt, Artificial Sequence
  Description of Artificial Sequence: Synthetic oligonucleotide
  Antisense strand to SEQ ID NO: 1260954
uuguagagaacaguucccu

SEQ ID NO: 1260956 - RNA, 19 nt, Artificial Sequence
  Description of Artificial Sequence: Synthetic oligonucleotide
  Sense strand starting at position 1629 of SEQ ID NO: 1241289
gggaacuguucucuacaac

SEQ ID NO: 1260957 - RNA, 19 nt, Artificial Sequence
  Description of Artificial Sequence: Synthetic oligonucleotide
  Antisense strand to SEQ ID NO: 1260956
guuguagagaacaguuccc

SEQ ID NO: 1260958 - RNA, 19 nt, Artificial Sequence
  Description of Artificial Sequence: Synthetic oligonucleotide
  Sense strand starting at position 1630 of SEQ ID NO: 1241289
ggaacuguucucuacaacu

SEQ ID NO: 1260959 - RNA, 19 nt, Artificial Sequence
  Description of Artificial Sequence: Synthetic oligonucleotide
  Antisense strand to SEQ ID NO: 1260958
aguuguagagaacaguucc

SEQ ID NO: 1260960 - RNA, 19 nt, Artificial Sequence
  Description of Artificial Sequence: Synthetic oligonucleotide
  Sense strand starting at position 2010 of SEQ ID NO: 1241289
gcgcgcgaugacucacaaa

SEQ ID NO: 1260961 - RNA, 19 nt, Artificial Sequence
  Description of Artificial Sequence: Synthetic oligonucleotide
  Antisense strand to SEQ ID NO: 1260960
uuugugagucaucgcgcgc

SEQ ID NO: 1260962 - RNA, 19 nt, Artificial Sequence
  Description of Artificial Sequence: Synthetic oligonucleotide
  Sense strand starting at position 2595 of SEQ ID NO: 1241289
gacucaccucuggaauguu

SEQ ID NO: 1260963 - RNA, 19 nt, Artificial Sequence
  Description of Artificial Sequence: Synthetic oligonucleotide
  Antisense strand to SEQ ID NO: 1260962
aacauuccagaggugaguc

SEQ ID NO: 1260964 - RNA, 19 nt, Artificial Sequence
  Description of Artificial Sequence: Synthetic oligonucleotide
  Sense strand starting at position 3037 of SEQ ID NO: 1241289
gagccaucguccucgaaac

SEQ ID NO: 1260965 - RNA, 19 nt, Artificial Sequence
  Description of Artificial Sequence: Synthetic oligonucleotide
  Antisense strand to SEQ ID NO: 1260964
guuucgaggacgauggcuc

SEQ ID NO: 1260966 - RNA, 19 nt, Artificial Sequence
  Description of Artificial Sequence: Synthetic oligonucleotide
  Sense strand starting at position 3038 of SEQ ID NO: 1241289
agccaucguccucgaaacu

SEQ ID NO: 1260967 - RNA, 19 nt, Artificial Sequence
  Description of Artificial Sequence: Synthetic oligonucleotide
  Antisense strand to SEQ ID NO: 1260966
aguuucgaggacgauggcu

SEQ ID NO: 1260968 - RNA, 19 nt, Artificial Sequence
  Description of Artificial Sequence: Synthetic oligonucleotide
  Sense strand starting at position 3399 of SEQ ID NO: 1241289
gcccuuaauugguuuggaa

SEQ ID NO: 1260969 - RNA, 19 nt, Artificial Sequence
  Description of Artificial Sequence: Synthetic oligonucleotide
  Antisense strand to SEQ ID NO: 1260968
uuccaaaccaauuaagggc

SEQ ID NO: 1260970 - RNA, 19 nt, Artificial Sequence
  Description of Artificial Sequence: Synthetic oligonucleotide
  Sense strand starting at position 3401 of SEQ ID NO: 1241289
ccuuaauugguuuggaauc

SEQ ID NO: 1260971 - RNA, 19 nt, Artificial Sequence
  Description of Artificial Sequence: Synthetic oligonucleotide
  Antisense strand to SEQ ID NO: 1260970
gauuccaaaccaauuaagg

SEQ ID NO: 1260972 - RNA, 19 nt, Artificial Sequence
  Description of Artificial Sequence: Synthetic oligonucleotide
  Sense strand starting at position 3476 of SEQ ID NO: 1241289
cugcucucccaggguugaa

SEQ ID NO: 1260973 - RNA, 19 nt, Artificial Sequence
  Description of Artificial Sequence: Synthetic oligonucleotide
  Antisense strand to SEQ ID NO: 1260972
uucaacccugggagagcag

SEQ ID NO: 1260974 - RNA, 19 nt, Artificial Sequence
  Description of Artificial Sequence: Synthetic oligonucleotide
  Sense strand starting at position 3561 of SEQ ID NO: 1241289
ucuaguuuaugacuuguga

SEQ ID NO: 1260975 - RNA, 19 nt, Artificial Sequence
  Description of Artificial Sequence: Synthetic oligonucleotide
  Antisense strand to SEQ ID NO: 1260974
ucacaagucauaaacuaga

SEQ ID NO: 1260976 - RNA, 19 nt, Artificial Sequence
  Description of Artificial Sequence: Synthetic oligonucleotide
  Sense strand starting at position 3572 of SEQ ID NO: 1241289
acuugugaauucuuugaua

SEQ ID NO: 1260977 - RNA, 19 nt, Artificial Sequence
  Description of Artificial Sequence: Synthetic oligonucleotide
  Antisense strand to SEQ ID NO: 1260976
uaucaaagaauucacaagu

SEQ ID NO: 1260978 - RNA, 19 nt, Artificial Sequence
  Description of Artificial Sequence: Synthetic oligonucleotide
  Sense strand starting at position 3574 of SEQ ID NO: 1241289
uugugaauucuuugauaag

SEQ ID NO: 1260979 - RNA, 19 nt, Artificial Sequence
  Description of Artificial Sequence: Synthetic oligonucleotide
  Antisense strand to SEQ ID NO: 1260978
cuuaucaaagaauucacaa

SEQ ID NO: 1260980 - RNA, 19 nt, Artificial Sequence
  Description of Artificial Sequence: Synthetic oligonucleotide
  Sense strand starting at position 3611 of SEQ ID NO: 1241289
aggcauuuauaaugagauu

SEQ ID NO: 1260981 - RNA, 19 nt, Artificial Sequence
  Description of Artificial Sequence: Synthetic oligonucleotide
  Antisense strand to SEQ ID NO: 1260980
aaucucauuauaaaugccu

SEQ ID NO: 1260982 - RNA, 19 nt, Artificial Sequence
  Description of Artificial Sequence: Synthetic oligonucleotide
  Sense strand starting at position 3622 of SEQ ID NO: 1241289
augagauuccaauguauuc

SEQ ID NO: 1260983 - RNA, 19 nt, Artificial Sequence
  Description of Artificial Sequence: Synthetic oligonucleotide
  Antisense strand to SEQ ID NO: 1260982
gaauacauuggaaucucau

SEQ ID NO: 1260984 - RNA, 19 nt, Artificial Sequence
  Description of Artificial Sequence: Synthetic oligonucleotide
  Sense strand starting at position 3975 of SEQ ID NO: 1241289
gagagaggcucucauauuu

SEQ ID NO: 1260985 - RNA, 19 nt, Artificial Sequence
  Description of Artificial Sequence: Synthetic oligonucleotide
  Antisense strand to SEQ ID NO: 1260984
aaauaugagagccucucuc

SEQ ID NO: 1260986 - RNA, 19 nt, Artificial Sequence
  Description of Artificial Sequence: Synthetic oligonucleotide
  Sense strand starting at position 293 of SEQ ID NO: 1241290
cugacacuuccaggcuuaa

SEQ ID NO: 1260987 - RNA, 19 nt, Artificial Sequence
  Description of Artificial Sequence: Synthetic oligonucleotide
  Antisense strand to SEQ ID NO: 1260986
uuaagccuggaagugucag

SEQ ID NO: 1260988 - RNA, 19 nt, Artificial Sequence
  Description of Artificial Sequence: Synthetic oligonucleotide
  Sense strand starting at position 492 of SEQ ID NO: 1241290
aggguagaguuccugggau

SEQ ID NO: 1260989 - RNA, 19 nt, Artificial Sequence
  Description of Artificial Sequence: Synthetic oligonucleotide
  Antisense strand to SEQ ID NO: 1260988
aucccaggaacucuacccu

SEQ ID NO: 1260990 - RNA, 19 nt, Artificial Sequence
  Description of Artificial Sequence: Synthetic oligonucleotide
  Sense strand starting at position 494 of SEQ ID NO: 1241290
gguagaguuccugggauag

SEQ ID NO: 1260991 - RNA, 19 nt, Artificial Sequence
  Description of Artificial Sequence: Synthetic oligonucleotide
  Antisense strand to SEQ ID NO: 1260990
cuaucccaggaacucuacc

SEQ ID NO: 1260992 - RNA, 19 nt, Artificial Sequence
  Description of Artificial Sequence: Synthetic oligonucleotide
  Sense strand starting at position 659 of SEQ ID NO: 1241290
agcucagacccagaucuau

SEQ ID NO: 1260993 - RNA, 19 nt, Artificial Sequence
  Description of Artificial Sequence: Synthetic oligonucleotide
  Antisense strand to SEQ ID NO: 1260992
auagaucugggucugagcu

SEQ ID NO: 1260994 - RNA, 19 nt, Artificial Sequence
  Description of Artificial Sequence: Synthetic oligonucleotide
  Sense strand starting at position 669 of SEQ ID NO: 1241290
cagaucuauccugggcauu

SEQ ID NO: 1260995 - RNA, 19 nt, Artificial Sequence
  Description of Artificial Sequence: Synthetic oligonucleotide
  Antisense strand to SEQ ID NO: 1260994
aaugcccaggauagaucug

SEQ ID NO: 1260996 - RNA, 19 nt, Artificial Sequence
  Description of Artificial Sequence: Synthetic oligonucleotide
  Sense strand starting at position 681 of SEQ ID NO: 1241290
gggcauuugcagugcaaag

SEQ ID NO: 1260997 - RNA, 19 nt, Artificial Sequence
  Description of Artificial Sequence: Synthetic oligonucleotide
  Antisense strand to SEQ ID NO: 1260996
cuuugcacugcaaaugccc

SEQ ID NO: 1260998 - RNA, 19 nt, Artificial Sequence
  Description of Artificial Sequence: Synthetic oligonucleotide
  Sense strand starting at position 732 of SEQ ID NO: 1241290
acaauagccuguguauaaa

SEQ ID NO: 1260999 - RNA, 19 nt, Artificial Sequence
  Description of Artificial Sequence: Synthetic oligonucleotide
  Antisense strand to SEQ ID NO: 1260998
uuuauacacaggcuauugu

SEQ ID NO: 1261000 - RNA, 19 nt, Artificial Sequence
  Description of Artificial Sequence: Synthetic oligonucleotide
  Sense strand starting at position 735 of SEQ ID NO: 1241290
auagccuguguauaaacau

SEQ ID NO: 1261001 - RNA, 19 nt, Artificial Sequence
  Description of Artificial Sequence: Synthetic oligonucleotide
  Antisense strand to SEQ ID NO: 1261000
auguuuauacacaggcuau

SEQ ID NO: 1261002 - RNA, 19 nt, Artificial Sequence
  Description of Artificial Sequence: Synthetic oligonucleotide
  Sense strand starting at position 773 of SEQ ID NO: 1241290
cugugcaaucacgcuguaa

SEQ ID NO: 1261003 - RNA, 19 nt, Artificial Sequence
  Description of Artificial Sequence: Synthetic oligonucleotide
  Antisense strand to SEQ ID NO: 1261002
uuacagcgugauugcacag

SEQ ID NO: 1261004 - RNA, 19 nt, Artificial Sequence
  Description of Artificial Sequence: Synthetic oligonucleotide
  Sense strand starting at position 774 of SEQ ID NO: 1241290
ugugcaaucacgcuguaau

SEQ ID NO: 1261005 - RNA, 19 nt, Artificial Sequence
  Description of Artificial Sequence: Synthetic oligonucleotide
  Antisense strand to SEQ ID NO: 1261004
auuacagcgugauugcaca

SEQ ID NO: 1261006 - RNA, 19 nt, Artificial Sequence
  Description of Artificial Sequence: Synthetic oligonucleotide
  Sense strand starting at position 955 of SEQ ID NO: 1241290
cuaguuacucugcaggaau

SEQ ID NO: 1261007 - RNA, 19 nt, Artificial Sequence
  Description of Artificial Sequence: Synthetic oligonucleotide
  Antisense strand to SEQ ID NO: 1261006
auuccugcagaguaacuag

SEQ ID NO: 1261008 - RNA, 19 nt, Artificial Sequence
  Description of Artificial Sequence: Synthetic oligonucleotide
  Sense strand starting at position 1034 of SEQ ID NO: 1241290
gggaaccaccgucaaaguu

SEQ ID NO: 1261009 - RNA, 19 nt, Artificial Sequence
  Description of Artificial Sequence: Synthetic oligonucleotide
  Antisense strand to SEQ ID NO: 1261008
aacuuugacggugguuccc

SEQ ID NO: 1261010 - RNA, 19 nt, Artificial Sequence
  Description of Artificial Sequence: Synthetic oligonucleotide
  Sense strand starting at position 1241 of SEQ ID NO: 1241290
caugguugggaaggguaaa

SEQ ID NO: 1261011 - RNA, 19 nt, Artificial Sequence
  Description of Artificial Sequence: Synthetic oligonucleotide
  Antisense strand to SEQ ID NO: 1261010
uuuacccuucccaaccaug

SEQ ID NO: 1261012 - RNA, 19 nt, Artificial Sequence
  Description of Artificial Sequence: Synthetic oligonucleotide
  Sense strand starting at position 1455 of SEQ ID NO: 1241290
gaggucauuucccagggaa

SEQ ID NO: 1261013 - RNA, 19 nt, Artificial Sequence
  Description of Artificial Sequence: Synthetic oligonucleotide
  Antisense strand to SEQ ID NO: 1261012
uucccugggaaaugaccuc

SEQ ID NO: 1261014 - RNA, 19 nt, Artificial Sequence
  Description of Artificial Sequence: Synthetic oligonucleotide
  Sense strand starting at position 2487 of SEQ ID NO: 1241290
ucgucauuucuacggguua

SEQ ID NO: 1261015 - RNA, 19 nt, Artificial Sequence
  Description of Artificial Sequence: Synthetic oligonucleotide
  Antisense strand to SEQ ID NO: 1261014
uaacccguagaaaugacga

SEQ ID NO: 1261016 - RNA, 19 nt, Artificial Sequence
  Description of Artificial Sequence: Synthetic oligonucleotide
  Sense strand starting at position 2489 of SEQ ID NO: 1241290
gucauuucuacggguuaua

SEQ ID NO: 1261017 - RNA, 19 nt, Artificial Sequence
  Description of Artificial Sequence: Synthetic oligonucleotide
  Antisense strand to SEQ ID NO: 1261016
uauaacccguagaaaugac

SEQ ID NO: 1261018 - RNA, 19 nt, Artificial Sequence
  Description of Artificial Sequence: Synthetic oligonucleotide
  Sense strand starting at position 2501 of SEQ ID NO: 1241290
gguuauaagugagcaagac

SEQ ID NO: 1261019 - RNA, 19 nt, Artificial Sequence
  Description of Artificial Sequence: Synthetic oligonucleotide
  Antisense strand to SEQ ID NO: 1261018
gucuugcucacuuauaacc

SEQ ID NO: 1261020 - RNA, 19 nt, Artificial Sequence
  Description of Artificial Sequence: Synthetic oligonucleotide
  Sense strand starting at position 2505 of SEQ ID NO: 1241290
auaagugagcaagacguuu

SEQ ID NO: 1261021 - RNA, 19 nt, Artificial Sequence
  Description of Artificial Sequence: Synthetic oligonucleotide
  Antisense strand to SEQ ID NO: 1261020
aaacgucuugcucacuuau

SEQ ID NO: 1261022 - RNA, 19 nt, Artificial Sequence
  Description of Artificial Sequence: Synthetic oligonucleotide
  Sense strand starting at position 2719 of SEQ ID NO: 1241290
aggcaauaguaauccugaa

SEQ ID NO: 1261023 - RNA, 19 nt, Artificial Sequence
  Description of Artificial Sequence: Synthetic oligonucleotide
  Antisense strand to SEQ ID NO: 1261022
uucaggauuacuauugccu

SEQ ID NO: 1261024 - RNA, 19 nt, Artificial Sequence
  Description of Artificial Sequence: Synthetic oligonucleotide
  Sense strand starting at position 2796 of SEQ ID NO: 1241290
ccuuuaagauaaguagcaa

SEQ ID NO: 1261025 - RNA, 19 nt, Artificial Sequence
  Description of Artificial Sequence: Synthetic oligonucleotide
  Antisense strand to SEQ ID NO: 1261024
uugcuacuuaucuuaaagg

SEQ ID NO: 1261026 - RNA, 19 nt, Artificial Sequence
  Description of Artificial Sequence: Synthetic oligonucleotide
  Sense strand starting at position 2854 of SEQ ID NO: 1241290
aucucauaaggcuggagaa

SEQ ID NO: 1261027 - RNA, 19 nt, Artificial Sequence
  Description of Artificial Sequence: Synthetic oligonucleotide
  Antisense strand to SEQ ID NO: 1261026
uucuccagccuuaugagau

SEQ ID NO: 1261028 - RNA, 19 nt, Artificial Sequence
  Description of Artificial Sequence: Synthetic oligonucleotide
  Sense strand starting at position 2855 of SEQ ID NO: 1241290
ucucauaaggcuggagaaa

SEQ ID NO: 1261029 - RNA, 19 nt, Artificial Sequence
  Description of Artificial Sequence: Synthetic oligonucleotide
  Antisense strand to SEQ ID NO: 1261028
uuucuccagccuuaugaga

SEQ ID NO: 1261030 - RNA, 19 nt, Artificial Sequence
  Description of Artificial Sequence: Synthetic oligonucleotide
  Sense strand starting at position 3014 of SEQ ID NO: 1241290
ucaguuagggcucaacaau

SEQ ID NO: 1261031 - RNA, 19 nt, Artificial Sequence
  Description of Artificial Sequence: Synthetic oligonucleotide
  Antisense strand to SEQ ID NO: 1261030
auuguugagcccuaacuga

SEQ ID NO: 1261032 - RNA, 19 nt, Artificial Sequence
  Description of Artificial Sequence: Synthetic oligonucleotide
  Sense strand starting at position 3062 of SEQ ID NO: 1241290
cuagcacauuggccagaua

SEQ ID NO: 1261033 - RNA, 19 nt, Artificial Sequence
  Description of Artificial Sequence: Synthetic oligonucleotide
  Antisense strand to SEQ ID NO: 1261032
uaucuggccaaugugcuag

SEQ ID NO: 1261034 - RNA, 19 nt, Artificial Sequence
  Description of Artificial Sequence: Synthetic oligonucleotide
  Sense strand starting at position 3182 of SEQ ID NO: 1241290
aaaugacauuugggaaaug

SEQ ID NO: 1261035 - RNA, 19 nt, Artificial Sequence
  Description of Artificial Sequence: Synthetic oligonucleotide
  Antisense strand to SEQ ID NO: 1261034
cauuucccaaaugucauuu

SEQ ID NO: 1261036 - RNA, 19 nt, Artificial Sequence
  Description of Artificial Sequence: Synthetic oligonucleotide
  Sense strand starting at position 3249 of SEQ ID NO: 1241290
aagauaggcguaugaagau

SEQ ID NO: 1261037 - RNA, 19 nt, Artificial Sequence
  Description of Artificial Sequence: Synthetic oligonucleotide
  Antisense strand to SEQ ID NO: 1261036
aucuucauacgccuaucuu

SEQ ID NO: 1261038 - RNA, 19 nt, Artificial Sequence
  Description of Artificial Sequence: Synthetic oligonucleotide
  Sense strand starting at position 3285 of SEQ ID NO: 1241290
caugaaauccuccacguug

SEQ ID NO: 1261039 - RNA, 19 nt, Artificial Sequence
  Description of Artificial Sequence: Synthetic oligonucleotide
  Antisense strand to SEQ ID NO: 1261038
caacguggaggauuucaug

SEQ ID NO: 1261040 - RNA, 19 nt, Artificial Sequence
  Description of Artificial Sequence: Synthetic oligonucleotide
  Sense strand starting at position 3383 of SEQ ID NO: 1241290
auaauacugcuuugagaaa

SEQ ID NO: 1261041 - RNA, 19 nt, Artificial Sequence
  Description of Artificial Sequence: Synthetic oligonucleotide
  Antisense strand to SEQ ID NO: 1261040
uuucucaaagcaguauuau

SEQ ID NO: 1261042 - RNA, 19 nt, Artificial Sequence
  Description of Artificial Sequence: Synthetic oligonucleotide
  Sense strand starting at position 3466 of SEQ ID NO: 1241290
gggagauggugaagggauu

SEQ ID NO: 1261043 - RNA, 19 nt, Artificial Sequence
  Description of Artificial Sequence: Synthetic oligonucleotide
  Antisense strand to SEQ ID NO: 1261042
aaucccuucaccaucuccc

SEQ ID NO: 1261044 - RNA, 19 nt, Artificial Sequence
  Description of Artificial Sequence: Synthetic oligonucleotide
  Sense strand starting at position 3510 of SEQ ID NO: 1241290
gaaguaauuccuuagugca

SEQ ID NO: 1261045 - RNA, 19 nt, Artificial Sequence
  Description of Artificial Sequence: Synthetic oligonucleotide
  Antisense strand to SEQ ID NO: 1261044
ugcacuaaggaauuacuuc

SEQ ID NO: 1261046 - RNA, 19 nt, Artificial Sequence
  Description of Artificial Sequence: Synthetic oligonucleotide
  Sense strand starting at position 3684 of SEQ ID NO: 1241290
cugcaugcccaggaguaau

SEQ ID NO: 1261047 - RNA, 19 nt, Artificial Sequence
  Description of Artificial Sequence: Synthetic oligonucleotide
  Antisense strand to SEQ ID NO: 1261046
auuacuccugggcaugcag

SEQ ID NO: 1261048 - RNA, 19 nt, Artificial Sequence
  Description of Artificial Sequence: Synthetic oligonucleotide
  Sense strand starting at position 3696 of SEQ ID NO: 1241290
gaguaauuagcagacagug

SEQ ID NO: 1261049 - RNA, 19 nt, Artificial Sequence
  Description of Artificial Sequence: Synthetic oligonucleotide
  Antisense strand to SEQ ID NO: 1261048
cacugucugcuaauuacuc

SEQ ID NO: 1261050 - RNA, 19 nt, Artificial Sequence
  Description of Artificial Sequence: Synthetic oligonucleotide
  Sense strand starting at position 3698 of SEQ ID NO: 1241290
guaauuagcagacagugua

SEQ ID NO: 1261051 - RNA, 19 nt, Artificial Sequence
  Description of Artificial Sequence: Synthetic oligonucleotide
  Antisense strand to SEQ ID NO: 1261050
uacacugucugcuaauuac

SEQ ID NO: 1261052 - RNA, 19 nt, Artificial Sequence
  Description of Artificial Sequence: Synthetic oligonucleotide
  Sense strand starting at position 3701 of SEQ ID NO: 1241290
auuagcagacaguguaaau

SEQ ID NO: 1261053 - RNA, 19 nt, Artificial Sequence
  Description of Artificial Sequence: Synthetic oligonucleotide
  Antisense strand to SEQ ID NO: 1261052
auuuacacugucugcuaau

SEQ ID NO: 1261054 - RNA, 19 nt, Artificial Sequence
  Description of Artificial Sequence: Synthetic oligonucleotide
  Sense strand starting at position 3720 of SEQ ID NO: 1241290
gugugaaggccugacacuu

SEQ ID NO: 1261055 - RNA, 19 nt, Artificial Sequence
  Description of Artificial Sequence: Synthetic oligonucleotide
  Antisense strand to SEQ ID NO: 1261054
aagugucaggccuucacac

SEQ ID NO: 1261056 - RNA, 19 nt, Artificial Sequence
  Description of Artificial Sequence: Synthetic oligonucleotide
  Sense strand starting at position 3844 of SEQ ID NO: 1241290
gaucucugccuccagguau

SEQ ID NO: 1261057 - RNA, 19 nt, Artificial Sequence
  Description of Artificial Sequence: Synthetic oligonucleotide
  Antisense strand to SEQ ID NO: 1261056
auaccuggaggcagagauc

SEQ ID NO: 1261058 - RNA, 19 nt, Artificial Sequence
  Description of Artificial Sequence: Synthetic oligonucleotide
  Sense strand starting at position 3898 of SEQ ID NO: 1241290
agcugaauccauugacuga

SEQ ID NO: 1261059 - RNA, 19 nt, Artificial Sequence
  Description of Artificial Sequence: Synthetic oligonucleotide
  Antisense strand to SEQ ID NO: 1261058
ucagucaauggauucagcu

SEQ ID NO: 1261060 - RNA, 19 nt, Artificial Sequence
  Description of Artificial Sequence: Synthetic oligonucleotide
  Sense strand starting at position 3905 of SEQ ID NO: 1241290
uccauugacugaguucuga

SEQ ID NO: 1261061 - RNA, 19 nt, Artificial Sequence
  Description of Artificial Sequence: Synthetic oligonucleotide
  Antisense strand to SEQ ID NO: 1261060
ucagaacucagucaaugga

SEQ ID NO: 1261062 - RNA, 19 nt, Artificial Sequence
  Description of Artificial Sequence: Synthetic oligonucleotide
  Sense strand starting at position 3926 of SEQ ID NO: 1241290
aauagaauauggccaguga

SEQ ID NO: 1261063 - RNA, 19 nt, Artificial Sequence
  Description of Artificial Sequence: Synthetic oligonucleotide
  Antisense strand to SEQ ID NO: 1261062
ucacuggccauauucuauu

SEQ ID NO: 1261064 - RNA, 19 nt, Artificial Sequence
  Description of Artificial Sequence: Synthetic oligonucleotide
  Sense strand starting at position 3944 of SEQ ID NO: 1241290
augugaucuuacuucugag

SEQ ID NO: 1261065 - RNA, 19 nt, Artificial Sequence
  Description of Artificial Sequence: Synthetic oligonucleotide
  Antisense strand to SEQ ID NO: 1261064
cucagaaguaagaucacau

SEQ ID NO: 1261066 - RNA, 19 nt, Artificial Sequence
  Description of Artificial Sequence: Synthetic oligonucleotide
  Sense strand starting at position 156 of SEQ ID NO: 1241291
acaagaagaucccagauca

SEQ ID NO: 1261067 - RNA, 19 nt, Artificial Sequence
  Description of Artificial Sequence: Synthetic oligonucleotide
  Antisense strand to SEQ ID NO: 1261066
ugaucugggaucuucuugu

SEQ ID NO: 1261068 - RNA, 19 nt, Artificial Sequence
  Description of Artificial Sequence: Synthetic oligonucleotide
  Sense strand starting at position 378 of SEQ ID NO: 1241291
cguaguugugaccaacaaa

SEQ ID NO: 1261069 - RNA, 19 nt, Artificial Sequence
  Description of Artificial Sequence: Synthetic oligonucleotide
  Antisense strand to SEQ ID NO: 1261068
uuuguuggucacaacuacg

SEQ ID NO: 1261070 - RNA, 19 nt, Artificial Sequence
  Description of Artificial Sequence: Synthetic oligonucleotide
  Sense strand starting at position 381 of SEQ ID NO: 1241291
aguugugaccaacaaaguu

SEQ ID NO: 1261071 - RNA, 19 nt, Artificial Sequence
  Description of Artificial Sequence: Synthetic oligonucleotide
  Antisense strand to SEQ ID NO: 1261070
aacuuuguuggucacaacu

SEQ ID NO: 1261072 - RNA, 19 nt, Artificial Sequence
  Description of Artificial Sequence: Synthetic oligonucleotide
  Sense strand starting at position 1637 of SEQ ID NO: 1241291
ucccgaggcugagaaguuu

SEQ ID NO: 1261073 - RNA, 19 nt, Artificial Sequence
  Description of Artificial Sequence: Synthetic oligonucleotide
  Antisense strand to SEQ ID NO: 1261072
aaacuucucagccucggga

SEQ ID NO: 1261074 - RNA, 19 nt, Artificial Sequence
  Description of Artificial Sequence: Synthetic oligonucleotide
  Sense strand starting at position 2247 of SEQ ID NO: 1241291
ugacgaaauguuuggaaac

SEQ ID NO: 1261075 - RNA, 19 nt, Artificial Sequence
  Description of Artificial Sequence: Synthetic oligonucleotide
  Antisense strand to SEQ ID NO: 1261074
guuuccaaacauuucguca

SEQ ID NO: 1261076 - RNA, 19 nt, Artificial Sequence
  Description of Artificial Sequence: Synthetic oligonucleotide
  Sense strand starting at position 2267 of SEQ ID NO: 1241291
cauugagccugccaggaaa

SEQ ID NO: 1261077 - RNA, 19 nt, Artificial Sequence
  Description of Artificial Sequence: Synthetic oligonucleotide
  Antisense strand to SEQ ID NO: 1261076
uuuccuggcaggcucaaug

SEQ ID NO: 1261078 - RNA, 19 nt, Artificial Sequence
  Description of Artificial Sequence: Synthetic oligonucleotide
  Sense strand starting at position 2317 of SEQ ID NO: 1241291
cgcuuucuuccacaaagaa

SEQ ID NO: 1261079 - RNA, 19 nt, Artificial Sequence
  Description of Artificial Sequence: Synthetic oligonucleotide
  Antisense strand to SEQ ID NO: 1261078
uucuuuguggaagaaagcg

SEQ ID NO: 1261080 - RNA, 19 nt, Artificial Sequence
  Description of Artificial Sequence: Synthetic oligonucleotide
  Sense strand starting at position 2354 of SEQ ID NO: 1241291
uacgguaaaucaugcacaa

SEQ ID NO: 1261081 - RNA, 19 nt, Artificial Sequence
  Description of Artificial Sequence: Synthetic oligonucleotide
  Antisense strand to SEQ ID NO: 1261080
uugugcaugauuuaccgua

SEQ ID NO: 1261082 - RNA, 19 nt, Artificial Sequence
  Description of Artificial Sequence: Synthetic oligonucleotide
  Sense strand starting at position 2392 of SEQ ID NO: 1241291
uuaacagacucuccgaguu

SEQ ID NO: 1261083 - RNA, 19 nt, Artificial Sequence
  Description of Artificial Sequence: Synthetic oligonucleotide
  Antisense strand to SEQ ID NO: 1261082
aacucggagagucuguuaa

SEQ ID NO: 1261084 - RNA, 19 nt, Artificial Sequence
  Description of Artificial Sequence: Synthetic oligonucleotide
  Sense strand starting at position 2439 of SEQ ID NO: 1241291
gcguguaaagguuauugag

SEQ ID NO: 1261085 - RNA, 19 nt, Artificial Sequence
  Description of Artificial Sequence: Synthetic oligonucleotide
  Antisense strand to SEQ ID NO: 1261084
cucaauaaccuuuacacgc

SEQ ID NO: 1261086 - RNA, 19 nt, Artificial Sequence
  Description of Artificial Sequence: Synthetic oligonucleotide
  Sense strand starting at position 2441 of SEQ ID NO: 1241291
guguaaagguuauugagaa

SEQ ID NO: 1261087 - RNA, 19 nt, Artificial Sequence
  Description of Artificial Sequence: Synthetic oligonucleotide
  Antisense strand to SEQ ID NO: 1261086
uucucaauaaccuuuacac

SEQ ID NO: 1261088 - RNA, 19 nt, Artificial Sequence
  Description of Artificial Sequence: Synthetic oligonucleotide
  Sense strand starting at position 2445 of SEQ ID NO: 1241291
aaagguuauugagaaacug

SEQ ID NO: 1261089 - RNA, 19 nt, Artificial Sequence
  Description of Artificial Sequence: Synthetic oligonucleotide
  Antisense strand to SEQ ID NO: 1261088
caguuucucaauaaccuuu

SEQ ID NO: 1261090 - RNA, 19 nt, Artificial Sequence
  Description of Artificial Sequence: Synthetic oligonucleotide
  Sense strand starting at position 2495 of SEQ ID NO: 1241291
caucgcuuaggugaggaaa

SEQ ID NO: 1261091 - RNA, 19 nt, Artificial Sequence
  Description of Artificial Sequence: Synthetic oligonucleotide
  Antisense strand to SEQ ID NO: 1261090
uuuccucaccuaagcgaug

SEQ ID NO: 1261092 - RNA, 19 nt, Artificial Sequence
  Description of Artificial Sequence: Synthetic oligonucleotide
  Sense strand starting at position 2608 of SEQ ID NO: 1241291
gaucaauucucagguccag

SEQ ID NO: 1261093 - RNA, 19 nt, Artificial Sequence
  Description of Artificial Sequence: Synthetic oligonucleotide
  Antisense strand to SEQ ID NO: 1261092
cuggaccugagaauugauc

SEQ ID NO: 1261094 - RNA, 19 nt, Artificial Sequence
  Description of Artificial Sequence: Synthetic oligonucleotide
  Sense strand starting at position 2643 of SEQ ID NO: 1241291
gccugacuggugggaagau

SEQ ID NO: 1261095 - RNA, 19 nt, Artificial Sequence
  Description of Artificial Sequence: Synthetic oligonucleotide
  Antisense strand to SEQ ID NO: 1261094
aucuucccaccagucaggc

SEQ ID NO: 1261096 - RNA, 19 nt, Artificial Sequence
  Description of Artificial Sequence: Synthetic oligonucleotide
  Sense strand starting at position 3051 of SEQ ID NO: 1241291
uggaucuucugcccagaaa

SEQ ID NO: 1261097 - RNA, 19 nt, Artificial Sequence
  Description of Artificial Sequence: Synthetic oligonucleotide
  Antisense strand to SEQ ID NO: 1261096
uuucugggcagaagaucca

SEQ ID NO: 1261098 - RNA, 19 nt, Artificial Sequence
  Description of Artificial Sequence: Synthetic oligonucleotide
  Sense strand starting at position 3052 of SEQ ID NO: 1241291
ggaucuucugcccagaaau

SEQ ID NO: 1261099 - RNA, 19 nt, Artificial Sequence
  Description of Artificial Sequence: Synthetic oligonucleotide
  Antisense strand to SEQ ID NO: 1261098
auuucugggcagaagaucc

SEQ ID NO: 1261100 - RNA, 19 nt, Artificial Sequence
  Description of Artificial Sequence: Synthetic oligonucleotide
  Sense strand starting at position 3193 of SEQ ID NO: 1241291
gcuuauuugcaccauguua

SEQ ID NO: 1261101 - RNA, 19 nt, Artificial Sequence
  Description of Artificial Sequence: Synthetic oligonucleotide
  Antisense strand to SEQ ID NO: 1261100
uaacauggugcaaauaagc

SEQ ID NO: 1261102 - RNA, 19 nt, Artificial Sequence
  Description of Artificial Sequence: Synthetic oligonucleotide
  Sense strand starting at position 3195 of SEQ ID NO: 1241291
uuauuugcaccauguuaug

SEQ ID NO: 1261103 - RNA, 19 nt, Artificial Sequence
  Description of Artificial Sequence: Synthetic oligonucleotide
  Antisense strand to SEQ ID NO: 1261102
cauaacauggugcaaauaa

SEQ ID NO: 1261104 - RNA, 19 nt, Artificial Sequence
  Description of Artificial Sequence: Synthetic oligonucleotide
  Sense strand starting at position 3198 of SEQ ID NO: 1241291
uuugcaccauguuaugaua

SEQ ID NO: 1261105 - RNA, 19 nt, Artificial Sequence
  Description of Artificial Sequence: Synthetic oligonucleotide
  Antisense strand to SEQ ID NO: 1261104
uaucauaacauggugcaaa

SEQ ID NO: 1261106 - RNA, 19 nt, Artificial Sequence
  Description of Artificial Sequence: Synthetic oligonucleotide
  Sense strand starting at position 3200 of SEQ ID NO: 1241291
ugcaccauguuaugauaga

SEQ ID NO: 1261107 - RNA, 19 nt, Artificial Sequence
  Description of Artificial Sequence: Synthetic oligonucleotide
  Antisense strand to SEQ ID NO: 1261106
ucuaucauaacauggugca

SEQ ID NO: 1261108 - RNA, 19 nt, Artificial Sequence
  Description of Artificial Sequence: Synthetic oligonucleotide
  Sense strand starting at position 3201 of SEQ ID NO: 1241291
gcaccauguuaugauagau

SEQ ID NO: 1261109 - RNA, 19 nt, Artificial Sequence
  Description of Artificial Sequence: Synthetic oligonucleotide
  Antisense strand to SEQ ID NO: 1261108
aucuaucauaacauggugc

SEQ ID NO: 1261110 - RNA, 19 nt, Artificial Sequence
  Description of Artificial Sequence: Synthetic oligonucleotide
  Sense strand starting at position 3265 of SEQ ID NO: 1241291
agguaauuaugccacagga

SEQ ID NO: 1261111 - RNA, 19 nt, Artificial Sequence
  Description of Artificial Sequence: Synthetic oligonucleotide
  Antisense strand to SEQ ID NO: 1261110
uccuguggcauaauuaccu

SEQ ID NO: 1261112 - RNA, 19 nt, Artificial Sequence
  Description of Artificial Sequence: Synthetic oligonucleotide
  Sense strand starting at position 3267 of SEQ ID NO: 1241291
guaauuaugccacaggacu

SEQ ID NO: 1261113 - RNA, 19 nt, Artificial Sequence
  Description of Artificial Sequence: Synthetic oligonucleotide
  Antisense strand to SEQ ID NO: 1261112
aguccuguggcauaauuac

SEQ ID NO: 1261114 - RNA, 19 nt, Artificial Sequence
  Description of Artificial Sequence: Synthetic oligonucleotide
  Sense strand starting at position 3322 of SEQ ID NO: 1241291
gauccaugauucugugauu

SEQ ID NO: 1261115 - RNA, 19 nt, Artificial Sequence
  Description of Artificial Sequence: Synthetic oligonucleotide
  Antisense strand to SEQ ID NO: 1261114
aaucacagaaucauggauc

SEQ ID NO: 1261116 - RNA, 19 nt, Artificial Sequence
  Description of Artificial Sequence: Synthetic oligonucleotide
  Sense strand starting at position 3323 of SEQ ID NO: 1241291
auccaugauucugugauua

SEQ ID NO: 1261117 - RNA, 19 nt, Artificial Sequence
  Description of Artificial Sequence: Synthetic oligonucleotide
  Antisense strand to SEQ ID NO: 1261116
uaaucacagaaucauggau

SEQ ID NO: 1261118 - RNA, 19 nt, Artificial Sequence
  Description of Artificial Sequence: Synthetic oligonucleotide
  Sense strand starting at position 3325 of SEQ ID NO: 1241291
ccaugauucugugauuaca

SEQ ID NO: 1261119 - RNA, 19 nt, Artificial Sequence
  Description of Artificial Sequence: Synthetic oligonucleotide
  Antisense strand to SEQ ID NO: 1261118
uguaaucacagaaucaugg

SEQ ID NO: 1261120 - RNA, 19 nt, Artificial Sequence
  Description of Artificial Sequence: Synthetic oligonucleotide
  Sense strand starting at position 3327 of SEQ ID NO: 1241291
augauucugugauuacagu

SEQ ID NO: 1261121 - RNA, 19 nt, Artificial Sequence
  Description of Artificial Sequence: Synthetic oligonucleotide
  Antisense strand to SEQ ID NO: 1261120
acuguaaucacagaaucau

SEQ ID NO: 1261122 - RNA, 19 nt, Artificial Sequence
  Description of Artificial Sequence: Synthetic oligonucleotide
  Sense strand starting at position 3328 of SEQ ID NO: 1241291
ugauucugugauuacagua

SEQ ID NO: 1261123 - RNA, 19 nt, Artificial Sequence
  Description of Artificial Sequence: Synthetic oligonucleotide
  Antisense strand to SEQ ID NO: 1261122
uacuguaaucacagaauca

SEQ ID NO: 1261124 - RNA, 19 nt, Artificial Sequence
  Description of Artificial Sequence: Synthetic oligonucleotide
  Sense strand starting at position 3333 of SEQ ID NO: 1241291
cugugauuacaguaaguga

SEQ ID NO: 1261125 - RNA, 19 nt, Artificial Sequence
  Description of Artificial Sequence: Synthetic oligonucleotide
  Antisense strand to SEQ ID NO: 1261124
ucacuuacuguaaucacag

SEQ ID NO: 1261126 - RNA, 19 nt, Artificial Sequence
  Description of Artificial Sequence: Synthetic oligonucleotide
  Sense strand starting at position 3336 of SEQ ID NO: 1241291
ugauuacaguaagugaaua

SEQ ID NO: 1261127 - RNA, 19 nt, Artificial Sequence
  Description of Artificial Sequence: Synthetic oligonucleotide
  Antisense strand to SEQ ID NO: 1261126
uauucacuuacuguaauca

SEQ ID NO: 1261128 - RNA, 19 nt, Artificial Sequence
  Description of Artificial Sequence: Synthetic oligonucleotide
  Sense strand starting at position 3401 of SEQ ID NO: 1241291
cgauuuagcaucugugaug

SEQ ID NO: 1261129 - RNA, 19 nt, Artificial Sequence
  Description of Artificial Sequence: Synthetic oligonucleotide
  Antisense strand to SEQ ID NO: 1261128
caucacagaugcuaaaucg

SEQ ID NO: 1261130 - RNA, 19 nt, Artificial Sequence
  Description of Artificial Sequence: Synthetic oligonucleotide
  Sense strand starting at position 3404 of SEQ ID NO: 1241291
uuuagcaucugugaugaca

SEQ ID NO: 1261131 - RNA, 19 nt, Artificial Sequence
  Description of Artificial Sequence: Synthetic oligonucleotide
  Antisense strand to SEQ ID NO: 1261130
ugucaucacagaugcuaaa

SEQ ID NO: 1261132 - RNA, 19 nt, Artificial Sequence
  Description of Artificial Sequence: Synthetic oligonucleotide
  Sense strand starting at position 3407 of SEQ ID NO: 1241291
agcaucugugaugacagua

SEQ ID NO: 1261133 - RNA, 19 nt, Artificial Sequence
  Description of Artificial Sequence: Synthetic oligonucleotide
  Antisense strand to SEQ ID NO: 1261132
uacugucaucacagaugcu

SEQ ID NO: 1261134 - RNA, 19 nt, Artificial Sequence
  Description of Artificial Sequence: Synthetic oligonucleotide
  Sense strand starting at position 3412 of SEQ ID NO: 1241291
cugugaugacaguauuguu

SEQ ID NO: 1261135 - RNA, 19 nt, Artificial Sequence
  Description of Artificial Sequence: Synthetic oligonucleotide
  Antisense strand to SEQ ID NO: 1261134
aacaauacugucaucacag

SEQ ID NO: 1261136 - RNA, 19 nt, Artificial Sequence
  Description of Artificial Sequence: Synthetic oligonucleotide
  Sense strand starting at position 3456 of SEQ ID NO: 1241291
cauacagucuccugaagag

SEQ ID NO: 1261137 - RNA, 19 nt, Artificial Sequence
  Description of Artificial Sequence: Synthetic oligonucleotide
  Antisense strand to SEQ ID NO: 1261136
cucuucaggagacuguaug

SEQ ID NO: 1261138 - RNA, 19 nt, Artificial Sequence
  Description of Artificial Sequence: Synthetic oligonucleotide
  Sense strand starting at position 3472 of SEQ ID NO: 1241291
gagcccugcaugugaguuu

SEQ ID NO: 1261139 - RNA, 19 nt, Artificial Sequence
  Description of Artificial Sequence: Synthetic oligonucleotide
  Antisense strand to SEQ ID NO: 1261138
aaacucacaugcagggcuc

SEQ ID NO: 1261140 - RNA, 19 nt, Artificial Sequence
  Description of Artificial Sequence: Synthetic oligonucleotide
  Sense strand starting at position 3534 of SEQ ID NO: 1241291
agugaauugcaccagguca

SEQ ID NO: 1261141 - RNA, 19 nt, Artificial Sequence
  Description of Artificial Sequence: Synthetic oligonucleotide
  Antisense strand to SEQ ID NO: 1261140
ugaccuggugcaauucacu

SEQ ID NO: 1261142 - RNA, 19 nt, Artificial Sequence
  Description of Artificial Sequence: Synthetic oligonucleotide
  Sense strand starting at position 3912 of SEQ ID NO: 1241291
cagggauguucccaaccaa

SEQ ID NO: 1261143 - RNA, 19 nt, Artificial Sequence
  Description of Artificial Sequence: Synthetic oligonucleotide
  Antisense strand to SEQ ID NO: 1261142
uugguugggaacaucccug

SEQ ID NO: 1261144 - RNA, 19 nt, Artificial Sequence
  Description of Artificial Sequence: Synthetic oligonucleotide
  Sense strand starting at position 3948 of SEQ ID NO: 1241291
gaagcacauugcuagaaga

SEQ ID NO: 1261145 - RNA, 19 nt, Artificial Sequence
  Description of Artificial Sequence: Synthetic oligonucleotide
  Antisense strand to SEQ ID NO: 1261144
ucuucuagcaaugugcuuc

SEQ ID NO: 1261146 - RNA, 19 nt, Artificial Sequence
  Description of Artificial Sequence: Synthetic oligonucleotide
  Sense strand starting at position 207 of SEQ ID NO: 1241292
ggagacaggugcucagaua

SEQ ID NO: 1261147 - RNA, 19 nt, Artificial Sequence
  Description of Artificial Sequence: Synthetic oligonucleotide
  Antisense strand to SEQ ID NO: 1261146
uaucugagcaccugucucc

SEQ ID NO: 1261148 - RNA, 19 nt, Artificial Sequence
  Description of Artificial Sequence: Synthetic oligonucleotide
  Sense strand starting at position 349 of SEQ ID NO: 1241292
augguaaucauaggacagu

SEQ ID NO: 1261149 - RNA, 19 nt, Artificial Sequence
  Description of Artificial Sequence: Synthetic oligonucleotide
  Antisense strand to SEQ ID NO: 1261148
acuguccuaugauuaccau

SEQ ID NO: 1261150 - RNA, 19 nt, Artificial Sequence
  Description of Artificial Sequence: Synthetic oligonucleotide
  Sense strand starting at position 358 of SEQ ID NO: 1241292
auaggacagugucuguaau

SEQ ID NO: 1261151 - RNA, 19 nt, Artificial Sequence
  Description of Artificial Sequence: Synthetic oligonucleotide
  Antisense strand to SEQ ID NO: 1261150
auuacagacacuguccuau

SEQ ID NO: 1261152 - RNA, 19 nt, Artificial Sequence
  Description of Artificial Sequence: Synthetic oligonucleotide
  Sense strand starting at position 359 of SEQ ID NO: 1241292
uaggacagugucuguaaua

SEQ ID NO: 1261153 - RNA, 19 nt, Artificial Sequence
  Description of Artificial Sequence: Synthetic oligonucleotide
  Antisense strand to SEQ ID NO: 1261152
uauuacagacacuguccua

SEQ ID NO: 1261154 - RNA, 19 nt, Artificial Sequence
  Description of Artificial Sequence: Synthetic oligonucleotide
  Sense strand starting at position 360 of SEQ ID NO: 1241292
aggacagugucuguaauaa

SEQ ID NO: 1261155 - RNA, 19 nt, Artificial Sequence
  Description of Artificial Sequence: Synthetic oligonucleotide
  Antisense strand to SEQ ID NO: 1261154
uuauuacagacacuguccu

SEQ ID NO: 1261156 - RNA, 19 nt, Artificial Sequence
  Description of Artificial Sequence: Synthetic oligonucleotide
  Sense strand starting at position 455 of SEQ ID NO: 1241292
cgguagaucuuggugugga

SEQ ID NO: 1261157 - RNA, 19 nt, Artificial Sequence
  Description of Artificial Sequence: Synthetic oligonucleotide
  Antisense strand to SEQ ID NO: 1261156
uccacaccaagaucuaccg

SEQ ID NO: 1261158 - RNA, 19 nt, Artificial Sequence
  Description of Artificial Sequence: Synthetic oligonucleotide
  Sense strand starting at position 458 of SEQ ID NO: 1241292
uagaucuugguguggaaau

SEQ ID NO: 1261159 - RNA, 19 nt, Artificial Sequence
  Description of Artificial Sequence: Synthetic oligonucleotide
  Antisense strand to SEQ ID NO: 1261158
auuuccacaccaagaucua

SEQ ID NO: 1261160 - RNA, 19 nt, Artificial Sequence
  Description of Artificial Sequence: Synthetic oligonucleotide
  Sense strand starting at position 539 of SEQ ID NO: 1241292
uugcuccauguauaugauu

SEQ ID NO: 1261161 - RNA, 19 nt, Artificial Sequence
  Description of Artificial Sequence: Synthetic oligonucleotide
  Antisense strand to SEQ ID NO: 1261160
aaucauauacauggagcaa

SEQ ID NO: 1261162 - RNA, 19 nt, Artificial Sequence
  Description of Artificial Sequence: Synthetic oligonucleotide
  Sense strand starting at position 675 of SEQ ID NO: 1241292
caguuaaagcaagaucagu

SEQ ID NO: 1261163 - RNA, 19 nt, Artificial Sequence
  Description of Artificial Sequence: Synthetic oligonucleotide
  Antisense strand to SEQ ID NO: 1261162
acugaucuugcuuuaacug

SEQ ID NO: 1261164 - RNA, 19 nt, Artificial Sequence
  Description of Artificial Sequence: Synthetic oligonucleotide
  Sense strand starting at position 680 of SEQ ID NO: 1241292
aaagcaagaucagucuguu

SEQ ID NO: 1261165 - RNA, 19 nt, Artificial Sequence
  Description of Artificial Sequence: Synthetic oligonucleotide
  Antisense strand to SEQ ID NO: 1261164
aacagacugaucuugcuuu

SEQ ID NO: 1261166 - RNA, 19 nt, Artificial Sequence
  Description of Artificial Sequence: Synthetic oligonucleotide
  Sense strand starting at position 1145 of SEQ ID NO: 1241292
cuccuaagcguuugaugaa

SEQ ID NO: 1261167 - RNA, 19 nt, Artificial Sequence
  Description of Artificial Sequence: Synthetic oligonucleotide
  Antisense strand to SEQ ID NO: 1261166
uucaucaaacgcuuaggag

SEQ ID NO: 1261168 - RNA, 19 nt, Artificial Sequence
  Description of Artificial Sequence: Synthetic oligonucleotide
  Sense strand starting at position 1152 of SEQ ID NO: 1241292
gcguuugaugaaggaaaga

SEQ ID NO: 1261169 - RNA, 19 nt, Artificial Sequence
  Description of Artificial Sequence: Synthetic oligonucleotide
  Antisense strand to SEQ ID NO: 1261168
ucuuuccuucaucaaacgc

SEQ ID NO: 1261170 - RNA, 19 nt, Artificial Sequence
  Description of Artificial Sequence: Synthetic oligonucleotide
  Sense strand starting at position 1393 of SEQ ID NO: 1241292
ggccaucaguaauuaaauu

SEQ ID NO: 1261171 - RNA, 19 nt, Artificial Sequence
  Description of Artificial Sequence: Synthetic oligonucleotide
  Antisense strand to SEQ ID NO: 1261170
aauuuaauuacugauggcc

SEQ ID NO: 1261172 - RNA, 19 nt, Artificial Sequence
  Description of Artificial Sequence: Synthetic oligonucleotide
  Sense strand starting at position 1940 of SEQ ID NO: 1241292
ggaggaggucccgauugca

SEQ ID NO: 1261173 - RNA, 19 nt, Artificial Sequence
  Description of Artificial Sequence: Synthetic oligonucleotide
  Antisense strand to SEQ ID NO: 1261172
ugcaaucgggaccuccucc

SEQ ID NO: 1261174 - RNA, 19 nt, Artificial Sequence
  Description of Artificial Sequence: Synthetic oligonucleotide
  Sense strand starting at position 2377 of SEQ ID NO: 1241292
guggcucuguacucuagau

SEQ ID NO: 1261175 - RNA, 19 nt, Artificial Sequence
  Description of Artificial Sequence: Synthetic oligonucleotide
  Antisense strand to SEQ ID NO: 1261174
aucuagaguacagagccac

SEQ ID NO: 1261176 - RNA, 19 nt, Artificial Sequence
  Description of Artificial Sequence: Synthetic oligonucleotide
  Sense strand starting at position 2483 of SEQ ID NO: 1241292
aggauuuaaugagauaugu

SEQ ID NO: 1261177 - RNA, 19 nt, Artificial Sequence
  Description of Artificial Sequence: Synthetic oligonucleotide
  Antisense strand to SEQ ID NO: 1261176
acauaucucauuaaauccu

SEQ ID NO: 1261178 - RNA, 19 nt, Artificial Sequence
  Description of Artificial Sequence: Synthetic oligonucleotide
  Sense strand starting at position 2526 of SEQ ID NO: 1241292
uagugcuucgcagcacauu

SEQ ID NO: 1261179 - RNA, 19 nt, Artificial Sequence
  Description of Artificial Sequence: Synthetic oligonucleotide
  Antisense strand to SEQ ID NO: 1261178
aaugugcugcgaagcacua

SEQ ID NO: 1261180 - RNA, 19 nt, Artificial Sequence
  Description of Artificial Sequence: Synthetic oligonucleotide
  Sense strand starting at position 2565 of SEQ ID NO: 1241292
aggauaaggcccugaauua

SEQ ID NO: 1261181 - RNA, 19 nt, Artificial Sequence
  Description of Artificial Sequence: Synthetic oligonucleotide
  Antisense strand to SEQ ID NO: 1261180
uaauucagggccuuauccu

SEQ ID NO: 1261182 - RNA, 19 nt, Artificial Sequence
  Description of Artificial Sequence: Synthetic oligonucleotide
  Sense strand starting at position 2585 of SEQ ID NO: 1241292
agaacaaucccauggaguu

SEQ ID NO: 1261183 - RNA, 19 nt, Artificial Sequence
  Description of Artificial Sequence: Synthetic oligonucleotide
  Antisense strand to SEQ ID NO: 1261182
aacuccaugggauuguucu

SEQ ID NO: 1261184 - RNA, 19 nt, Artificial Sequence
  Description of Artificial Sequence: Synthetic oligonucleotide
  Sense strand starting at position 2586 of SEQ ID NO: 1241292
gaacaaucccauggaguuu

SEQ ID NO: 1261185 - RNA, 19 nt, Artificial Sequence
  Description of Artificial Sequence: Synthetic oligonucleotide
  Antisense strand to SEQ ID NO: 1261184
aaacuccaugggauuguuc

SEQ ID NO: 1261186 - RNA, 19 nt, Artificial Sequence
  Description of Artificial Sequence: Synthetic oligonucleotide
  Sense strand starting at position 2597 of SEQ ID NO: 1241292
uggaguuuacagcaagauc

SEQ ID NO: 1261187 - RNA, 19 nt, Artificial Sequence
  Description of Artificial Sequence: Synthetic oligonucleotide
  Antisense strand to SEQ ID NO: 1261186
gaucuugcuguaaacucca

SEQ ID NO: 1261188 - RNA, 19 nt, Artificial Sequence
  Description of Artificial Sequence: Synthetic oligonucleotide
  Sense strand starting at position 2747 of SEQ ID NO: 1241292
aauguccugcgauguauuu

SEQ ID NO: 1261189 - RNA, 19 nt, Artificial Sequence
  Description of Artificial Sequence: Synthetic oligonucleotide
  Antisense strand to SEQ ID NO: 1261188
aaauacaucgcaggacauu

SEQ ID NO: 1261190 - RNA, 19 nt, Artificial Sequence
  Description of Artificial Sequence: Synthetic oligonucleotide
  Sense strand starting at position 2777 of SEQ ID NO: 1241292
gugccuuggaagcauuauu

SEQ ID NO: 1261191 - RNA, 19 nt, Artificial Sequence
  Description of Artificial Sequence: Synthetic oligonucleotide
  Antisense strand to SEQ ID NO: 1261190
aauaaugcuuccaaggcac

SEQ ID NO: 1261192 - RNA, 19 nt, Artificial Sequence
  Description of Artificial Sequence: Synthetic oligonucleotide
  Sense strand starting at position 3154 of SEQ ID NO: 1241292
uccguaguucuccauaguu

SEQ ID NO: 1261193 - RNA, 19 nt, Artificial Sequence
  Description of Artificial Sequence: Synthetic oligonucleotide
  Antisense strand to SEQ ID NO: 1261192
aacuauggagaacuacgga

SEQ ID NO: 1261194 - RNA, 19 nt, Artificial Sequence
  Description of Artificial Sequence: Synthetic oligonucleotide
  Sense strand starting at position 3162 of SEQ ID NO: 1241292
ucuccauaguucucccagu

SEQ ID NO: 1261195 - RNA, 19 nt, Artificial Sequence
  Description of Artificial Sequence: Synthetic oligonucleotide
  Antisense strand to SEQ ID NO: 1261194
acugggagaacuauggaga

SEQ ID NO: 1261196 - RNA, 19 nt, Artificial Sequence
  Description of Artificial Sequence: Synthetic oligonucleotide
  Sense strand starting at position 3215 of SEQ ID NO: 1241292
ugaugaggauucuuucuuu

SEQ ID NO: 1261197 - RNA, 19 nt, Artificial Sequence
  Description of Artificial Sequence: Synthetic oligonucleotide
  Antisense strand to SEQ ID NO: 1261196
aaagaaagaauccucauca

SEQ ID NO: 1261198 - RNA, 19 nt, Artificial Sequence
  Description of Artificial Sequence: Synthetic oligonucleotide
  Sense strand starting at position 3240 of SEQ ID NO: 1241292
uccugauguugaccacaga

SEQ ID NO: 1261199 - RNA, 19 nt, Artificial Sequence
  Description of Artificial Sequence: Synthetic oligonucleotide
  Antisense strand to SEQ ID NO: 1261198
ucuguggucaacaucagga

SEQ ID NO: 1261200 - RNA, 19 nt, Artificial Sequence
  Description of Artificial Sequence: Synthetic oligonucleotide
  Sense strand starting at position 3272 of SEQ ID NO: 1241292
guauccaaagccugauuau

SEQ ID NO: 1261201 - RNA, 19 nt, Artificial Sequence
  Description of Artificial Sequence: Synthetic oligonucleotide
  Antisense strand to SEQ ID NO: 1261200
auaaucaggcuuuggauac

SEQ ID NO: 1261202 - RNA, 19 nt, Artificial Sequence
  Description of Artificial Sequence: Synthetic oligonucleotide
  Sense strand starting at position 3281 of SEQ ID NO: 1241292
gccugauuauucccauaag

SEQ ID NO: 1261203 - RNA, 19 nt, Artificial Sequence
  Description of Artificial Sequence: Synthetic oligonucleotide
  Antisense strand to SEQ ID NO: 1261202
cuuaugggaauaaucaggc

SEQ ID NO: 1261204 - RNA, 19 nt, Artificial Sequence
  Description of Artificial Sequence: Synthetic oligonucleotide
  Sense strand starting at position 3284 of SEQ ID NO: 1241292
ugauuauucccauaagggc

SEQ ID NO: 1261205 - RNA, 19 nt, Artificial Sequence
  Description of Artificial Sequence: Synthetic oligonucleotide
  Antisense strand to SEQ ID NO: 1261204
gcccuuaugggaauaauca

SEQ ID NO: 1261206 - RNA, 19 nt, Artificial Sequence
  Description of Artificial Sequence: Synthetic oligonucleotide
  Sense strand starting at position 3293 of SEQ ID NO: 1241292
ccauaagggcucugugcaa

SEQ ID NO: 1261207 - RNA, 19 nt, Artificial Sequence
  Description of Artificial Sequence: Synthetic oligonucleotide
  Antisense strand to SEQ ID NO: 1261206
uugcacagagcccuuaugg

SEQ ID NO: 1261208 - RNA, 19 nt, Artificial Sequence
  Description of Artificial Sequence: Synthetic oligonucleotide
  Sense strand starting at position 3332 of SEQ ID NO: 1241292
uccugagaccucuggauga

SEQ ID NO: 1261209 - RNA, 19 nt, Artificial Sequence
  Description of Artificial Sequence: Synthetic oligonucleotide
  Antisense strand to SEQ ID NO: 1261208
ucauccagaggucucagga

SEQ ID NO: 1261210 - RNA, 19 nt, Artificial Sequence
  Description of Artificial Sequence: Synthetic oligonucleotide
  Sense strand starting at position 3432 of SEQ ID NO: 1241292
ggugaaggacuuggacuau

SEQ ID NO: 1261211 - RNA, 19 nt, Artificial Sequence
  Description of Artificial Sequence: Synthetic oligonucleotide
  Antisense strand to SEQ ID NO: 1261210
auaguccaaguccuucacc

SEQ ID NO: 1261212 - RNA, 19 nt, Artificial Sequence
  Description of Artificial Sequence: Synthetic oligonucleotide
  Sense strand starting at position 3551 of SEQ ID NO: 1241292
gaagguaagugagauaaga

SEQ ID NO: 1261213 - RNA, 19 nt, Artificial Sequence
  Description of Artificial Sequence: Synthetic oligonucleotide
  Antisense strand to SEQ ID NO: 1261212
ucuuaucucacuuaccuuc

SEQ ID NO: 1261214 - RNA, 19 nt, Artificial Sequence
  Description of Artificial Sequence: Synthetic oligonucleotide
  Sense strand starting at position 3642 of SEQ ID NO: 1241292
ucaagauuacagugggcau

SEQ ID NO: 1261215 - RNA, 19 nt, Artificial Sequence
  Description of Artificial Sequence: Synthetic oligonucleotide
  Antisense strand to SEQ ID NO: 1261214
augcccacuguaaucuuga

SEQ ID NO: 1261216 - RNA, 19 nt, Artificial Sequence
  Description of Artificial Sequence: Synthetic oligonucleotide
  Sense strand starting at position 3661 of SEQ ID NO: 1241292
cuaagucaucuuugucuuu

SEQ ID NO: 1261217 - RNA, 19 nt, Artificial Sequence
  Description of Artificial Sequence: Synthetic oligonucleotide
  Antisense strand to SEQ ID NO: 1261216
aaagacaaagaugacuuag

SEQ ID NO: 1261218 - RNA, 19 nt, Artificial Sequence
  Description of Artificial Sequence: Synthetic oligonucleotide
  Sense strand starting at position 3815 of SEQ ID NO: 1241292
ccggguucaguacauagau

SEQ ID NO: 1261219 - RNA, 19 nt, Artificial Sequence
  Description of Artificial Sequence: Synthetic oligonucleotide
  Antisense strand to SEQ ID NO: 1261218
aucuauguacugaacccgg

SEQ ID NO: 1261220 - RNA, 19 nt, Artificial Sequence
  Description of Artificial Sequence: Synthetic oligonucleotide
  Sense strand starting at position 3844 of SEQ ID NO: 1241292
cacccuuuggguugacaau

SEQ ID NO: 1261221 - RNA, 19 nt, Artificial Sequence
  Description of Artificial Sequence: Synthetic oligonucleotide
  Antisense strand to SEQ ID NO: 1261220
auugucaacccaaagggug

SEQ ID NO: 1261222 - RNA, 19 nt, Artificial Sequence
  Description of Artificial Sequence: Synthetic oligonucleotide
  Sense strand starting at position 3845 of SEQ ID NO: 1241292
acccuuuggguugacaauu

SEQ ID NO: 1261223 - RNA, 19 nt, Artificial Sequence
  Description of Artificial Sequence: Synthetic oligonucleotide
  Antisense strand to SEQ ID NO: 1261222
aauugucaacccaaagggu

SEQ ID NO: 1261224 - RNA, 19 nt, Artificial Sequence
  Description of Artificial Sequence: Synthetic oligonucleotide
  Sense strand starting at position 3869 of SEQ ID NO: 1241292
cagguugcugcugaugaua

SEQ ID NO: 1261225 - RNA, 19 nt, Artificial Sequence
  Description of Artificial Sequence: Synthetic oligonucleotide
  Antisense strand to SEQ ID NO: 1261224
uaucaucagcagcaaccug

SEQ ID NO: 1261226 - RNA, 19 nt, Artificial Sequence
  Description of Artificial Sequence: Synthetic oligonucleotide
  Sense strand starting at position 2 of SEQ ID NO: 1241293
gugaucuuauuguuugauu

SEQ ID NO: 1261227 - RNA, 19 nt, Artificial Sequence
  Description of Artificial Sequence: Synthetic oligonucleotide
  Antisense strand to SEQ ID NO: 1261226
aaucaaacaauaagaucac

SEQ ID NO: 1261228 - RNA, 19 nt, Artificial Sequence
  Description of Artificial Sequence: Synthetic oligonucleotide
  Sense strand starting at position 13 of SEQ ID NO: 1241293
guuugauucuaguuaaggu

SEQ ID NO: 1261229 - RNA, 19 nt, Artificial Sequence
  Description of Artificial Sequence: Synthetic oligonucleotide
  Antisense strand to SEQ ID NO: 1261228
accuuaacuagaaucaaac

SEQ ID NO: 1261230 - RNA, 19 nt, Artificial Sequence
  Description of Artificial Sequence: Synthetic oligonucleotide
  Sense strand starting at position 196 of SEQ ID NO: 1241293
ugacuaaacugcuauuuag

SEQ ID NO: 1261231 - RNA, 19 nt, Artificial Sequence
  Description of Artificial Sequence: Synthetic oligonucleotide
  Antisense strand to SEQ ID NO: 1261230
cuaaauagcaguuuaguca

SEQ ID NO: 1261232 - RNA, 19 nt, Artificial Sequence
  Description of Artificial Sequence: Synthetic oligonucleotide
  Sense strand starting at position 203 of SEQ ID NO: 1241293
acugcuauuuaggaacagu

SEQ ID NO: 1261233 - RNA, 19 nt, Artificial Sequence
  Description of Artificial Sequence: Synthetic oligonucleotide
  Antisense strand to SEQ ID NO: 1261232
acuguuccuaaauagcagu

SEQ ID NO: 1261234 - RNA, 19 nt, Artificial Sequence
  Description of Artificial Sequence: Synthetic oligonucleotide
  Sense strand starting at position 294 of SEQ ID NO: 1241293
auaauacgcccacagauua

SEQ ID NO: 1261235 - RNA, 19 nt, Artificial Sequence
  Description of Artificial Sequence: Synthetic oligonucleotide
  Antisense strand to SEQ ID NO: 1261234
uaaucugugggcguauuau

SEQ ID NO: 1261236 - RNA, 19 nt, Artificial Sequence
  Description of Artificial Sequence: Synthetic oligonucleotide
  Sense strand starting at position 310 of SEQ ID NO: 1241293
uuaaauuuguaagaccuga

SEQ ID NO: 1261237 - RNA, 19 nt, Artificial Sequence
  Description of Artificial Sequence: Synthetic oligonucleotide
  Antisense strand to SEQ ID NO: 1261236
ucaggucuuacaaauuuaa

SEQ ID NO: 1261238 - RNA, 19 nt, Artificial Sequence
  Description of Artificial Sequence: Synthetic oligonucleotide
  Sense strand starting at position 542 of SEQ ID NO: 1241293
uaaaguauuccagggacca

SEQ ID NO: 1261239 - RNA, 19 nt, Artificial Sequence
  Description of Artificial Sequence: Synthetic oligonucleotide
  Antisense strand to SEQ ID NO: 1261238
uggucccuggaauacuuua

SEQ ID NO: 1261240 - RNA, 19 nt, Artificial Sequence
  Description of Artificial Sequence: Synthetic oligonucleotide
  Sense strand starting at position 543 of SEQ ID NO: 1241293
aaaguauuccagggaccac

SEQ ID NO: 1261241 - RNA, 19 nt, Artificial Sequence
  Description of Artificial Sequence: Synthetic oligonucleotide
  Antisense strand to SEQ ID NO: 1261240
guggucccuggaauacuuu

SEQ ID NO: 1261242 - RNA, 19 nt, Artificial Sequence
  Description of Artificial Sequence: Synthetic oligonucleotide
  Sense strand starting at position 632 of SEQ ID NO: 1241293
ggaaacuggcguuaaauuc

SEQ ID NO: 1261243 - RNA, 19 nt, Artificial Sequence
  Description of Artificial Sequence: Synthetic oligonucleotide
  Antisense strand to SEQ ID NO: 1261242
gaauuuaacgccaguuucc

SEQ ID NO: 1261244 - RNA, 19 nt, Artificial Sequence
  Description of Artificial Sequence: Synthetic oligonucleotide
  Sense strand starting at position 671 of SEQ ID NO: 1241293
cuuuaauuccacugaagag

SEQ ID NO: 1261245 - RNA, 19 nt, Artificial Sequence
  Description of Artificial Sequence: Synthetic oligonucleotide
  Antisense strand to SEQ ID NO: 1261244
cucuucaguggaauuaaag

SEQ ID NO: 1261246 - RNA, 19 nt, Artificial Sequence
  Description of Artificial Sequence: Synthetic oligonucleotide
  Sense strand starting at position 858 of SEQ ID NO: 1241293
gugacaaacaggugucgaa

SEQ ID NO: 1261247 - RNA, 19 nt, Artificial Sequence
  Description of Artificial Sequence: Synthetic oligonucleotide
  Antisense strand to SEQ ID NO: 1261246
uucgacaccuguuugucac

SEQ ID NO: 1261248 - RNA, 19 nt, Artificial Sequence
  Description of Artificial Sequence: Synthetic oligonucleotide
  Sense strand starting at position 927 of SEQ ID NO: 1241293
ccaguugucaaagggucua

SEQ ID NO: 1261249 - RNA, 19 nt, Artificial Sequence
  Description of Artificial Sequence: Synthetic oligonucleotide
  Antisense strand to SEQ ID NO: 1261248
uagacccuuugacaacugg

SEQ ID NO: 1261250 - RNA, 19 nt, Artificial Sequence
  Description of Artificial Sequence: Synthetic oligonucleotide
  Sense strand starting at position 1024 of SEQ ID NO: 1241293
ggcccuuugauggagcaau

SEQ ID NO: 1261251 - RNA, 19 nt, Artificial Sequence
  Description of Artificial Sequence: Synthetic oligonucleotide
  Antisense strand to SEQ ID NO: 1261250
auugcuccaucaaagggcc

SEQ ID NO: 1261252 - RNA, 19 nt, Artificial Sequence
  Description of Artificial Sequence: Synthetic oligonucleotide
  Sense strand starting at position 1083 of SEQ ID NO: 1241293
uugugcgugaauuaucaca

SEQ ID NO: 1261253 - RNA, 19 nt, Artificial Sequence
  Description of Artificial Sequence: Synthetic oligonucleotide
  Antisense strand to SEQ ID NO: 1261252
ugugauaauucacgcacaa

SEQ ID NO: 1261254 - RNA, 19 nt, Artificial Sequence
  Description of Artificial Sequence: Synthetic oligonucleotide
  Sense strand starting at position 1153 of SEQ ID NO: 1241293
ugccaaugagacugaaauc

SEQ ID NO: 1261255 - RNA, 19 nt, Artificial Sequence
  Description of Artificial Sequence: Synthetic oligonucleotide
  Antisense strand to SEQ ID NO: 1261254
gauuucagucucauuggca

SEQ ID NO: 1261256 - RNA, 19 nt, Artificial Sequence
  Description of Artificial Sequence: Synthetic oligonucleotide
  Sense strand starting at position 1205 of SEQ ID NO: 1241293
gaugccauauugguggaua

SEQ ID NO: 1261257 - RNA, 19 nt, Artificial Sequence
  Description of Artificial Sequence: Synthetic oligonucleotide
  Antisense strand to SEQ ID NO: 1261256
uauccaccaauauggcauc

SEQ ID NO: 1261258 - RNA, 19 nt, Artificial Sequence
  Description of Artificial Sequence: Synthetic oligonucleotide
  Sense strand starting at position 1207 of SEQ ID NO: 1241293
ugccauauugguggauaug

SEQ ID NO: 1261259 - RNA, 19 nt, Artificial Sequence
  Description of Artificial Sequence: Synthetic oligonucleotide
  Antisense strand to SEQ ID NO: 1261258
cauauccaccaauauggca

SEQ ID NO: 1261260 - RNA, 19 nt, Artificial Sequence
  Description of Artificial Sequence: Synthetic oligonucleotide
  Sense strand starting at position 1208 of SEQ ID NO: 1241293
gccauauugguggauauga

SEQ ID NO: 1261261 - RNA, 19 nt, Artificial Sequence
  Description of Artificial Sequence: Synthetic oligonucleotide
  Antisense strand to SEQ ID NO: 1261260
ucauauccaccaauauggc

SEQ ID NO: 1261262 - RNA, 19 nt, Artificial Sequence
  Description of Artificial Sequence: Synthetic oligonucleotide
  Sense strand starting at position 1446 of SEQ ID NO: 1241293
aggauuuguuucccgaguu

SEQ ID NO: 1261263 - RNA, 19 nt, Artificial Sequence
  Description of Artificial Sequence: Synthetic oligonucleotide
  Antisense strand to SEQ ID NO: 1261262
aacucgggaaacaaauccu

SEQ ID NO: 1261264 - RNA, 19 nt, Artificial Sequence
  Description of Artificial Sequence: Synthetic oligonucleotide
  Sense strand starting at position 2659 of SEQ ID NO: 1241293
cagagaggcuauccuggua

SEQ ID NO: 1261265 - RNA, 19 nt, Artificial Sequence
  Description of Artificial Sequence: Synthetic oligonucleotide
  Antisense strand to SEQ ID NO: 1261264
uaccaggauagccucucug

SEQ ID NO: 1261266 - RNA, 19 nt, Artificial Sequence
  Description of Artificial Sequence: Synthetic oligonucleotide
  Sense strand starting at position 2724 of SEQ ID NO: 1241293
ucgcuuugugguuucucua

SEQ ID NO: 1261267 - RNA, 19 nt, Artificial Sequence
  Description of Artificial Sequence: Synthetic oligonucleotide
  Antisense strand to SEQ ID NO: 1261266
uagagaaaccacaaagcga

SEQ ID NO: 1261268 - RNA, 19 nt, Artificial Sequence
  Description of Artificial Sequence: Synthetic oligonucleotide
  Sense strand starting at position 2725 of SEQ ID NO: 1241293
cgcuuugugguuucucuau

SEQ ID NO: 1261269 - RNA, 19 nt, Artificial Sequence
  Description of Artificial Sequence: Synthetic oligonucleotide
  Antisense strand to SEQ ID NO: 1261268
auagagaaaccacaaagcg

SEQ ID NO: 1261270 - RNA, 19 nt, Artificial Sequence
  Description of Artificial Sequence: Synthetic oligonucleotide
  Sense strand starting at position 2731 of SEQ ID NO: 1241293
gugguuucucuaugaucag

SEQ ID NO: 1261271 - RNA, 19 nt, Artificial Sequence
  Description of Artificial Sequence: Synthetic oligonucleotide
  Antisense strand to SEQ ID NO: 1261270
cugaucauagagaaaccac

SEQ ID NO: 1261272 - RNA, 19 nt, Artificial Sequence
  Description of Artificial Sequence: Synthetic oligonucleotide
  Sense strand starting at position 2876 of SEQ ID NO: 1241293
auagaucuaugaguuugua

SEQ ID NO: 1261273 - RNA, 19 nt, Artificial Sequence
  Description of Artificial Sequence: Synthetic oligonucleotide
  Antisense strand to SEQ ID NO: 1261272
uacaaacucauagaucuau

SEQ ID NO: 1261274 - RNA, 19 nt, Artificial Sequence
  Description of Artificial Sequence: Synthetic oligonucleotide
  Sense strand starting at position 2879 of SEQ ID NO: 1241293
gaucuaugaguuuguaacu

SEQ ID NO: 1261275 - RNA, 19 nt, Artificial Sequence
  Description of Artificial Sequence: Synthetic oligonucleotide
  Antisense strand to SEQ ID NO: 1261274
aguuacaaacucauagauc

SEQ ID NO: 1261276 - RNA, 19 nt, Artificial Sequence
  Description of Artificial Sequence: Synthetic oligonucleotide
  Sense strand starting at position 2880 of SEQ ID NO: 1241293
aucuaugaguuuguaacuu

SEQ ID NO: 1261277 - RNA, 19 nt, Artificial Sequence
  Description of Artificial Sequence: Synthetic oligonucleotide
  Antisense strand to SEQ ID NO: 1261276
aaguuacaaacucauagau

SEQ ID NO: 1261278 - RNA, 19 nt, Artificial Sequence
  Description of Artificial Sequence: Synthetic oligonucleotide
  Sense strand starting at position 2922 of SEQ ID NO: 1241293
gcuguuaaugguucgcauu

SEQ ID NO: 1261279 - RNA, 19 nt, Artificial Sequence
  Description of Artificial Sequence: Synthetic oligonucleotide
  Antisense strand to SEQ ID NO: 1261278
aaugcgaaccauuaacagc

SEQ ID NO: 1261280 - RNA, 19 nt, Artificial Sequence
  Description of Artificial Sequence: Synthetic oligonucleotide
  Sense strand starting at position 2923 of SEQ ID NO: 1241293
cuguuaaugguucgcauuu

SEQ ID NO: 1261281 - RNA, 19 nt, Artificial Sequence
  Description of Artificial Sequence: Synthetic oligonucleotide
  Antisense strand to SEQ ID NO: 1261280
aaaugcgaaccauuaacag

SEQ ID NO: 1261282 - RNA, 19 nt, Artificial Sequence
  Description of Artificial Sequence: Synthetic oligonucleotide
  Sense strand starting at position 2961 of SEQ ID NO: 1241293
aaguaaagaugcgccaaau

SEQ ID NO: 1261283 - RNA, 19 nt, Artificial Sequence
  Description of Artificial Sequence: Synthetic oligonucleotide
  Antisense strand to SEQ ID NO: 1261282
auuuggcgcaucuuuacuu

SEQ ID NO: 1261284 - RNA, 19 nt, Artificial Sequence
  Description of Artificial Sequence: Synthetic oligonucleotide
  Sense strand starting at position 3032 of SEQ ID NO: 1241293
gaaugagcuuggucccaaa

SEQ ID NO: 1261285 - RNA, 19 nt, Artificial Sequence
  Description of Artificial Sequence: Synthetic oligonucleotide
  Antisense strand to SEQ ID NO: 1261284
uuugggaccaagcucauuc

SEQ ID NO: 1261286 - RNA, 19 nt, Artificial Sequence
  Description of Artificial Sequence: Synthetic oligonucleotide
  Sense strand starting at position 3111 of SEQ ID NO: 1241293
ucugaaaugguagguacua

SEQ ID NO: 1261287 - RNA, 19 nt, Artificial Sequence
  Description of Artificial Sequence: Synthetic oligonucleotide
  Antisense strand to SEQ ID NO: 1261286
uaguaccuaccauuucaga

SEQ ID NO: 1261288 - RNA, 19 nt, Artificial Sequence
  Description of Artificial Sequence: Synthetic oligonucleotide
  Sense strand starting at position 3112 of SEQ ID NO: 1241293
cugaaaugguagguacuaa

SEQ ID NO: 1261289 - RNA, 19 nt, Artificial Sequence
  Description of Artificial Sequence: Synthetic oligonucleotide
  Antisense strand to SEQ ID NO: 1261288
uuaguaccuaccauuucag

SEQ ID NO: 1261290 - RNA, 19 nt, Artificial Sequence
  Description of Artificial Sequence: Synthetic oligonucleotide
  Sense strand starting at position 3235 of SEQ ID NO: 1241293
cagcuuggacaucaguaga

SEQ ID NO: 1261291 - RNA, 19 nt, Artificial Sequence
  Description of Artificial Sequence: Synthetic oligonucleotide
  Antisense strand to SEQ ID NO: 1261290
ucuacugauguccaagcug

SEQ ID NO: 1261292 - RNA, 19 nt, Artificial Sequence
  Description of Artificial Sequence: Synthetic oligonucleotide
  Sense strand starting at position 3310 of SEQ ID NO: 1241293
uuaguaaggacuggugcua

SEQ ID NO: 1261293 - RNA, 19 nt, Artificial Sequence
  Description of Artificial Sequence: Synthetic oligonucleotide
  Antisense strand to SEQ ID NO: 1261292
uagcaccaguccuuacuaa

SEQ ID NO: 1261294 - RNA, 19 nt, Artificial Sequence
  Description of Artificial Sequence: Synthetic oligonucleotide
  Sense strand starting at position 3350 of SEQ ID NO: 1241293
aguuuaagagcuuauuccu

SEQ ID NO: 1261295 - RNA, 19 nt, Artificial Sequence
  Description of Artificial Sequence: Synthetic oligonucleotide
  Antisense strand to SEQ ID NO: 1261294
aggaauaagcucuuaaacu

SEQ ID NO: 1261296 - RNA, 19 nt, Artificial Sequence
  Description of Artificial Sequence: Synthetic oligonucleotide
  Sense strand starting at position 3509 of SEQ ID NO: 1241293
gcagacauugugcagacaa

SEQ ID NO: 1261297 - RNA, 19 nt, Artificial Sequence
  Description of Artificial Sequence: Synthetic oligonucleotide
  Antisense strand to SEQ ID NO: 1261296
uugucugcacaaugucugc

SEQ ID NO: 1261298 - RNA, 19 nt, Artificial Sequence
  Description of Artificial Sequence: Synthetic oligonucleotide
  Sense strand starting at position 3511 of SEQ ID NO: 1241293
agacauugugcagacaagu

SEQ ID NO: 1261299 - RNA, 19 nt, Artificial Sequence
  Description of Artificial Sequence: Synthetic oligonucleotide
  Antisense strand to SEQ ID NO: 1261298
acuugucugcacaaugucu

SEQ ID NO: 1261300 - RNA, 19 nt, Artificial Sequence
  Description of Artificial Sequence: Synthetic oligonucleotide
  Sense strand starting at position 3519 of SEQ ID NO: 1241293
ugcagacaagugggaaaua

SEQ ID NO: 1261301 - RNA, 19 nt, Artificial Sequence
  Description of Artificial Sequence: Synthetic oligonucleotide
  Antisense strand to SEQ ID NO: 1261300
uauuucccacuugucugca

SEQ ID NO: 1261302 - RNA, 19 nt, Artificial Sequence
  Description of Artificial Sequence: Synthetic oligonucleotide
  Sense strand starting at position 3738 of SEQ ID NO: 1241293
ucugcagugcuccagaaau

SEQ ID NO: 1261303 - RNA, 19 nt, Artificial Sequence
  Description of Artificial Sequence: Synthetic oligonucleotide
  Antisense strand to SEQ ID NO: 1261302
auuucuggagcacugcaga

SEQ ID NO: 1261304 - RNA, 19 nt, Artificial Sequence
  Description of Artificial Sequence: Synthetic oligonucleotide
  Sense strand starting at position 3740 of SEQ ID NO: 1241293
ugcagugcuccagaaauga

SEQ ID NO: 1261305 - RNA, 19 nt, Artificial Sequence
  Description of Artificial Sequence: Synthetic oligonucleotide
  Antisense strand to SEQ ID NO: 1261304
ucauuucuggagcacugca

SEQ ID NO: 1261306 - RNA, 19 nt, Artificial Sequence
  Description of Artificial Sequence: Synthetic oligonucleotide
  Sense strand starting at position 75 of SEQ ID NO: 1241294
aaauaauuacuacggguuu

SEQ ID NO: 1261307 - RNA, 19 nt, Artificial Sequence
  Description of Artificial Sequence: Synthetic oligonucleotide
  Antisense strand to SEQ ID NO: 1261306
aaacccguaguaauuauuu

SEQ ID NO: 1261308 - RNA, 19 nt, Artificial Sequence
  Description of Artificial Sequence: Synthetic oligonucleotide
  Sense strand starting at position 127 of SEQ ID NO: 1241294
cuauuauaauaggucugua

SEQ ID NO: 1261309 - RNA, 19 nt, Artificial Sequence
  Description of Artificial Sequence: Synthetic oligonucleotide
  Antisense strand to SEQ ID NO: 1261308
uacagaccuauuauaauag

SEQ ID NO: 1261310 - RNA, 19 nt, Artificial Sequence
  Description of Artificial Sequence: Synthetic oligonucleotide
  Sense strand starting at position 130 of SEQ ID NO: 1241294
uuauaauaggucuguaacc

SEQ ID NO: 1261311 - RNA, 19 nt, Artificial Sequence
  Description of Artificial Sequence: Synthetic oligonucleotide
  Antisense strand to SEQ ID NO: 1261310
gguuacagaccuauuauaa

SEQ ID NO: 1261312 - RNA, 19 nt, Artificial Sequence
  Description of Artificial Sequence: Synthetic oligonucleotide
  Sense strand starting at position 132 of SEQ ID NO: 1241294
auaauaggucuguaacccu

SEQ ID NO: 1261313 - RNA, 19 nt, Artificial Sequence
  Description of Artificial Sequence: Synthetic oligonucleotide
  Antisense strand to SEQ ID NO: 1261312
aggguuacagaccuauuau

SEQ ID NO: 1261314 - RNA, 19 nt, Artificial Sequence
  Description of Artificial Sequence: Synthetic oligonucleotide
  Sense strand starting at position 135 of SEQ ID NO: 1241294
auaggucuguaacccuaau

SEQ ID NO: 1261315 - RNA, 19 nt, Artificial Sequence
  Description of Artificial Sequence: Synthetic oligonucleotide
  Antisense strand to SEQ ID NO: 1261314
auuaggguuacagaccuau

SEQ ID NO: 1261316 - RNA, 19 nt, Artificial Sequence
  Description of Artificial Sequence: Synthetic oligonucleotide
  Sense strand starting at position 186 of SEQ ID NO: 1241294
ugaaaugacuuaucaguua

SEQ ID NO: 1261317 - RNA, 19 nt, Artificial Sequence
  Description of Artificial Sequence: Synthetic oligonucleotide
  Antisense strand to SEQ ID NO: 1261316
uaacugauaagucauuuca

SEQ ID NO: 1261318 - RNA, 19 nt, Artificial Sequence
  Description of Artificial Sequence: Synthetic oligonucleotide
  Sense strand starting at position 461 of SEQ ID NO: 1241294
gggcuucuugccuacaaga

SEQ ID NO: 1261319 - RNA, 19 nt, Artificial Sequence
  Description of Artificial Sequence: Synthetic oligonucleotide
  Antisense strand to SEQ ID NO: 1261318
ucuuguaggcaagaagccc

SEQ ID NO: 1261320 - RNA, 19 nt, Artificial Sequence
  Description of Artificial Sequence: Synthetic oligonucleotide
  Sense strand starting at position 561 of SEQ ID NO: 1241294
acccaaaucguagaaucuu

SEQ ID NO: 1261321 - RNA, 19 nt, Artificial Sequence
  Description of Artificial Sequence: Synthetic oligonucleotide
  Antisense strand to SEQ ID NO: 1261320
aagauucuacgauuugggu

SEQ ID NO: 1261322 - RNA, 19 nt, Artificial Sequence
  Description of Artificial Sequence: Synthetic oligonucleotide
  Sense strand starting at position 567 of SEQ ID NO: 1241294
aucguagaaucuuugauaa

SEQ ID NO: 1261323 - RNA, 19 nt, Artificial Sequence
  Description of Artificial Sequence: Synthetic oligonucleotide
  Antisense strand to SEQ ID NO: 1261322
uuaucaaagauucuacgau

SEQ ID NO: 1261324 - RNA, 19 nt, Artificial Sequence
  Description of Artificial Sequence: Synthetic oligonucleotide
  Sense strand starting at position 674 of SEQ ID NO: 1241294
uaaucaguggccuagaaug

SEQ ID NO: 1261325 - RNA, 19 nt, Artificial Sequence
  Description of Artificial Sequence: Synthetic oligonucleotide
  Antisense strand to SEQ ID NO: 1261324
cauucuaggccacugauua

SEQ ID NO: 1261326 - RNA, 19 nt, Artificial Sequence
  Description of Artificial Sequence: Synthetic oligonucleotide
  Sense strand starting at position 676 of SEQ ID NO: 1241294
aucaguggccuagaaugau

SEQ ID NO: 1261327 - RNA, 19 nt, Artificial Sequence
  Description of Artificial Sequence: Synthetic oligonucleotide
  Antisense strand to SEQ ID NO: 1261326
aucauucuaggccacugau

SEQ ID NO: 1261328 - RNA, 19 nt, Artificial Sequence
  Description of Artificial Sequence: Synthetic oligonucleotide
  Sense strand starting at position 726 of SEQ ID NO: 1241294
guacuaagacacugauuga

SEQ ID NO: 1261329 - RNA, 19 nt, Artificial Sequence
  Description of Artificial Sequence: Synthetic oligonucleotide
  Antisense strand to SEQ ID NO: 1261328
ucaaucagugucuuaguac

SEQ ID NO: 1261330 - RNA, 19 nt, Artificial Sequence
  Description of Artificial Sequence: Synthetic oligonucleotide
  Sense strand starting at position 793 of SEQ ID NO: 1241294
ugggaccaacuuugaguua

SEQ ID NO: 1261331 - RNA, 19 nt, Artificial Sequence
  Description of Artificial Sequence: Synthetic oligonucleotide
  Antisense strand to SEQ ID NO: 1261330
uaacucaaaguugguccca

SEQ ID NO: 1261332 - RNA, 19 nt, Artificial Sequence
  Description of Artificial Sequence: Synthetic oligonucleotide
  Sense strand starting at position 796 of SEQ ID NO: 1241294
gaccaacuuugaguuauug

SEQ ID NO: 1261333 - RNA, 19 nt, Artificial Sequence
  Description of Artificial Sequence: Synthetic oligonucleotide
  Antisense strand to SEQ ID NO: 1261332
caauaacucaaaguugguc

SEQ ID NO: 1261334 - RNA, 19 nt, Artificial Sequence
  Description of Artificial Sequence: Synthetic oligonucleotide
  Sense strand starting at position 804 of SEQ ID NO: 1241294
uugaguuauuguccaagga

SEQ ID NO: 1261335 - RNA, 19 nt, Artificial Sequence
  Description of Artificial Sequence: Synthetic oligonucleotide
  Antisense strand to SEQ ID NO: 1261334
uccuuggacaauaacucaa

SEQ ID NO: 1261336 - RNA, 19 nt, Artificial Sequence
  Description of Artificial Sequence: Synthetic oligonucleotide
  Sense strand starting at position 911 of SEQ ID NO: 1241294
acuggaaaucagugaaguu

SEQ ID NO: 1261337 - RNA, 19 nt, Artificial Sequence
  Description of Artificial Sequence: Synthetic oligonucleotide
  Antisense strand to SEQ ID NO: 1261336
aacuucacugauuuccagu

SEQ ID NO: 1261338 - RNA, 19 nt, Artificial Sequence
  Description of Artificial Sequence: Synthetic oligonucleotide
  Sense strand starting at position 984 of SEQ ID NO: 1241294
uuuaacauccagugaauug

SEQ ID NO: 1261339 - RNA, 19 nt, Artificial Sequence
  Description of Artificial Sequence: Synthetic oligonucleotide
  Antisense strand to SEQ ID NO: 1261338
caauucacuggauguuaaa

SEQ ID NO: 1261340 - RNA, 19 nt, Artificial Sequence
  Description of Artificial Sequence: Synthetic oligonucleotide
  Sense strand starting at position 1128 of SEQ ID NO: 1241294
gcuugcugugcuuccauca

SEQ ID NO: 1261341 - RNA, 19 nt, Artificial Sequence
  Description of Artificial Sequence: Synthetic oligonucleotide
  Antisense strand to SEQ ID NO: 1261340
ugauggaagcacagcaagc

SEQ ID NO: 1261342 - RNA, 19 nt, Artificial Sequence
  Description of Artificial Sequence: Synthetic oligonucleotide
  Sense strand starting at position 1189 of SEQ ID NO: 1241294
uaagaaugcguuuaauaag

SEQ ID NO: 1261343 - RNA, 19 nt, Artificial Sequence
  Description of Artificial Sequence: Synthetic oligonucleotide
  Antisense strand to SEQ ID NO: 1261342
cuuauuaaacgcauucuua

SEQ ID NO: 1261344 - RNA, 19 nt, Artificial Sequence
  Description of Artificial Sequence: Synthetic oligonucleotide
  Sense strand starting at position 1206 of SEQ ID NO: 1241294
agaaauuucucacaggauc

SEQ ID NO: 1261345 - RNA, 19 nt, Artificial Sequence
  Description of Artificial Sequence: Synthetic oligonucleotide
  Antisense strand to SEQ ID NO: 1261344
gauccugugagaaauuucu

SEQ ID NO: 1261346 - RNA, 19 nt, Artificial Sequence
  Description of Artificial Sequence: Synthetic oligonucleotide
  Sense strand starting at position 1388 of SEQ ID NO: 1241294
gcauuuguaggguguuaac

SEQ ID NO: 1261347 - RNA, 19 nt, Artificial Sequence
  Description of Artificial Sequence: Synthetic oligonucleotide
  Antisense strand to SEQ ID NO: 1261346
guuaacacccuacaaaugc

SEQ ID NO: 1261348 - RNA, 19 nt, Artificial Sequence
  Description of Artificial Sequence: Synthetic oligonucleotide
  Sense strand starting at position 2552 of SEQ ID NO: 1241294
gugugucuugcugccuuau

SEQ ID NO: 1261349 - RNA, 19 nt, Artificial Sequence
  Description of Artificial Sequence: Synthetic oligonucleotide
  Antisense strand to SEQ ID NO: 1261348
auaaggcagcaagacacac

SEQ ID NO: 1261350 - RNA, 19 nt, Artificial Sequence
  Description of Artificial Sequence: Synthetic oligonucleotide
  Sense strand starting at position 2553 of SEQ ID NO: 1241294
ugugucuugcugccuuaua

SEQ ID NO: 1261351 - RNA, 19 nt, Artificial Sequence
  Description of Artificial Sequence: Synthetic oligonucleotide
  Antisense strand to SEQ ID NO: 1261350
uauaaggcagcaagacaca

SEQ ID NO: 1261352 - RNA, 19 nt, Artificial Sequence
  Description of Artificial Sequence: Synthetic oligonucleotide
  Sense strand starting at position 2555 of SEQ ID NO: 1241294
ugucuugcugccuuauagu

SEQ ID NO: 1261353 - RNA, 19 nt, Artificial Sequence
  Description of Artificial Sequence: Synthetic oligonucleotide
  Antisense strand to SEQ ID NO: 1261352
acuauaaggcagcaagaca

SEQ ID NO: 1261354 - RNA, 19 nt, Artificial Sequence
  Description of Artificial Sequence: Synthetic oligonucleotide
  Sense strand starting at position 2573 of SEQ ID NO: 1241294
ugcuuucggacccagacau

SEQ ID NO: 1261355 - RNA, 19 nt, Artificial Sequence
  Description of Artificial Sequence: Synthetic oligonucleotide
  Antisense strand to SEQ ID NO: 1261354
augucuggguccgaaagca

SEQ ID NO: 1261356 - RNA, 19 nt, Artificial Sequence
  Description of Artificial Sequence: Synthetic oligonucleotide
  Sense strand starting at position 2745 of SEQ ID NO: 1241294
cggaguaguaaggaguaca

SEQ ID NO: 1261357 - RNA, 19 nt, Artificial Sequence
  Description of Artificial Sequence: Synthetic oligonucleotide
  Antisense strand to SEQ ID NO: 1261356
uguacuccuuacuacuccg

SEQ ID NO: 1261358 - RNA, 19 nt, Artificial Sequence
  Description of Artificial Sequence: Synthetic oligonucleotide
  Sense strand starting at position 2748 of SEQ ID NO: 1241294
aguaguaaggaguacaguu

SEQ ID NO: 1261359 - RNA, 19 nt, Artificial Sequence
  Description of Artificial Sequence: Synthetic oligonucleotide
  Antisense strand to SEQ ID NO: 1261358
aacuguacuccuuacuacu

SEQ ID NO: 1261360 - RNA, 19 nt, Artificial Sequence
  Description of Artificial Sequence: Synthetic oligonucleotide
  Sense strand starting at position 2976 of SEQ ID NO: 1241294
guagacuuuagaugguaaa

SEQ ID NO: 1261361 - RNA, 19 nt, Artificial Sequence
  Description of Artificial Sequence: Synthetic oligonucleotide
  Antisense strand to SEQ ID NO: 1261360
uuuaccaucuaaagucuac

SEQ ID NO: 1261362 - RNA, 19 nt, Artificial Sequence
  Description of Artificial Sequence: Synthetic oligonucleotide
  Sense strand starting at position 2977 of SEQ ID NO: 1241294
uagacuuuagaugguaaac

SEQ ID NO: 1261363 - RNA, 19 nt, Artificial Sequence
  Description of Artificial Sequence: Synthetic oligonucleotide
  Antisense strand to SEQ ID NO: 1261362
guuuaccaucuaaagucua

SEQ ID NO: 1261364 - RNA, 19 nt, Artificial Sequence
  Description of Artificial Sequence: Synthetic oligonucleotide
  Sense strand starting at position 2989 of SEQ ID NO: 1241294
gguaaacugacaugugaga

SEQ ID NO: 1261365 - RNA, 19 nt, Artificial Sequence
  Description of Artificial Sequence: Synthetic oligonucleotide
  Antisense strand to SEQ ID NO: 1261364
ucucacaugucaguuuacc

SEQ ID NO: 1261366 - RNA, 19 nt, Artificial Sequence
  Description of Artificial Sequence: Synthetic oligonucleotide
  Sense strand starting at position 3359 of SEQ ID NO: 1241294
ugauuuccauaggaaauac

SEQ ID NO: 1261367 - RNA, 19 nt, Artificial Sequence
  Description of Artificial Sequence: Synthetic oligonucleotide
  Antisense strand to SEQ ID NO: 1261366
guauuuccuauggaaauca

SEQ ID NO: 1261368 - RNA, 19 nt, Artificial Sequence
  Description of Artificial Sequence: Synthetic oligonucleotide
  Sense strand starting at position 3451 of SEQ ID NO: 1241294
uccugugugguacagauau

SEQ ID NO: 1261369 - RNA, 19 nt, Artificial Sequence
  Description of Artificial Sequence: Synthetic oligonucleotide
  Antisense strand to SEQ ID NO: 1261368
auaucuguaccacacagga

SEQ ID NO: 1261370 - RNA, 19 nt, Artificial Sequence
  Description of Artificial Sequence: Synthetic oligonucleotide
  Sense strand starting at position 3453 of SEQ ID NO: 1241294
cugugugguacagauauau

SEQ ID NO: 1261371 - RNA, 19 nt, Artificial Sequence
  Description of Artificial Sequence: Synthetic oligonucleotide
  Antisense strand to SEQ ID NO: 1261370
auauaucuguaccacacag

SEQ ID NO: 1261372 - RNA, 19 nt, Artificial Sequence
  Description of Artificial Sequence: Synthetic oligonucleotide
  Sense strand starting at position 3510 of SEQ ID NO: 1241294
gccaguuacuaacuugaga

SEQ ID NO: 1261373 - RNA, 19 nt, Artificial Sequence
  Description of Artificial Sequence: Synthetic oligonucleotide
  Antisense strand to SEQ ID NO: 1261372
ucucaaguuaguaacuggc

SEQ ID NO: 1261374 - RNA, 19 nt, Artificial Sequence
  Description of Artificial Sequence: Synthetic oligonucleotide
  Sense strand starting at position 3535 of SEQ ID NO: 1241294
uaccguuucgucuuugauu

SEQ ID NO: 1261375 - RNA, 19 nt, Artificial Sequence
  Description of Artificial Sequence: Synthetic oligonucleotide
  Antisense strand to SEQ ID NO: 1261374
aaucaaagacgaaacggua

SEQ ID NO: 1261376 - RNA, 19 nt, Artificial Sequence
  Description of Artificial Sequence: Synthetic oligonucleotide
  Sense strand starting at position 3572 of SEQ ID NO: 1241294
gcaguuuacaugcaggaaa

SEQ ID NO: 1261377 - RNA, 19 nt, Artificial Sequence
  Description of Artificial Sequence: Synthetic oligonucleotide
  Antisense strand to SEQ ID NO: 1261376
uuuccugcauguaaacugc

SEQ ID NO: 1261378 - RNA, 19 nt, Artificial Sequence
  Description of Artificial Sequence: Synthetic oligonucleotide
  Sense strand starting at position 3574 of SEQ ID NO: 1241294
aguuuacaugcaggaaaua

SEQ ID NO: 1261379 - RNA, 19 nt, Artificial Sequence
  Description of Artificial Sequence: Synthetic oligonucleotide
  Antisense strand to SEQ ID NO: 1261378
uauuuccugcauguaaacu

SEQ ID NO: 1261380 - RNA, 19 nt, Artificial Sequence
  Description of Artificial Sequence: Synthetic oligonucleotide
  Sense strand starting at position 3639 of SEQ ID NO: 1241294
cugaaagaguuuccauucu

SEQ ID NO: 1261381 - RNA, 19 nt, Artificial Sequence
  Description of Artificial Sequence: Synthetic oligonucleotide
  Antisense strand to SEQ ID NO: 1261380
agaauggaaacucuuucag

SEQ ID NO: 1261382 - RNA, 19 nt, Artificial Sequence
  Description of Artificial Sequence: Synthetic oligonucleotide
  Sense strand starting at position 3835 of SEQ ID NO: 1241294
acuagugaguuccuugaaa

SEQ ID NO: 1261383 - RNA, 19 nt, Artificial Sequence
  Description of Artificial Sequence: Synthetic oligonucleotide
  Antisense strand to SEQ ID NO: 1261382
uuucaaggaacucacuagu

SEQ ID NO: 1261384 - RNA, 19 nt, Artificial Sequence
  Description of Artificial Sequence: Synthetic oligonucleotide
  Sense strand starting at position 3948 of SEQ ID NO: 1241294
auuaauuacugguuacaug

SEQ ID NO: 1261385 - RNA, 19 nt, Artificial Sequence
  Description of Artificial Sequence: Synthetic oligonucleotide
  Antisense strand to SEQ ID NO: 1261384
cauguaaccaguaauuaau

SEQ ID NO: 1261386 - RNA, 19 nt, Artificial Sequence
  Description of Artificial Sequence: Synthetic oligonucleotide
  Sense strand starting at position 18 of SEQ ID NO: 1241295
caugaucaugcuggcagau

SEQ ID NO: 1261387 - RNA, 19 nt, Artificial Sequence
  Description of Artificial Sequence: Synthetic oligonucleotide
  Antisense strand to SEQ ID NO: 1261386
aucugccagcaugaucaug

SEQ ID NO: 1261388 - RNA, 19 nt, Artificial Sequence
  Description of Artificial Sequence: Synthetic oligonucleotide
  Sense strand starting at position 30 of SEQ ID NO: 1241295
ggcagaugguauguauaau

SEQ ID NO: 1261389 - RNA, 19 nt, Artificial Sequence
  Description of Artificial Sequence: Synthetic oligonucleotide
  Antisense strand to SEQ ID NO: 1261388
auuauacauaccaucugcc

SEQ ID NO: 1261390 - RNA, 19 nt, Artificial Sequence
  Description of Artificial Sequence: Synthetic oligonucleotide
  Sense strand starting at position 31 of SEQ ID NO: 1241295
gcagaugguauguauaaua

SEQ ID NO: 1261391 - RNA, 19 nt, Artificial Sequence
  Description of Artificial Sequence: Synthetic oligonucleotide
  Antisense strand to SEQ ID NO: 1261390
uauuauacauaccaucugc

SEQ ID NO: 1261392 - RNA, 19 nt, Artificial Sequence
  Description of Artificial Sequence: Synthetic oligonucleotide
  Sense strand starting at position 873 of SEQ ID NO: 1241295
guuuacaaggcuuaucauu

SEQ ID NO: 1261393 - RNA, 19 nt, Artificial Sequence
  Description of Artificial Sequence: Synthetic oligonucleotide
  Antisense strand to SEQ ID NO: 1261392
aaugauaagccuuguaaac

SEQ ID NO: 1261394 - RNA, 19 nt, Artificial Sequence
  Description of Artificial Sequence: Synthetic oligonucleotide
  Sense strand starting at position 994 of SEQ ID NO: 1241295
ggaaggaguguacggauua

SEQ ID NO: 1261395 - RNA, 19 nt, Artificial Sequence
  Description of Artificial Sequence: Synthetic oligonucleotide
  Antisense strand to SEQ ID NO: 1261394
uaauccguacacuccuucc

SEQ ID NO: 1261396 - RNA, 19 nt, Artificial Sequence
  Description of Artificial Sequence: Synthetic oligonucleotide
  Sense strand starting at position 1126 of SEQ ID NO: 1241295
uggcuuggcacucagaaua

SEQ ID NO: 1261397 - RNA, 19 nt, Artificial Sequence
  Description of Artificial Sequence: Synthetic oligonucleotide
  Antisense strand to SEQ ID NO: 1261396
uauucugagugccaagcca

SEQ ID NO: 1261398 - RNA, 19 nt, Artificial Sequence
  Description of Artificial Sequence: Synthetic oligonucleotide
  Sense strand starting at position 1144 of SEQ ID NO: 1241295
accguaccuuccuuaauga

SEQ ID NO: 1261399 - RNA, 19 nt, Artificial Sequence
  Description of Artificial Sequence: Synthetic oligonucleotide
  Antisense strand to SEQ ID NO: 1261398
ucauuaaggaagguacggu

SEQ ID NO: 1261400 - RNA, 19 nt, Artificial Sequence
  Description of Artificial Sequence: Synthetic oligonucleotide
  Sense strand starting at position 1192 of SEQ ID NO: 1241295
gaauacuugugaguacacu

SEQ ID NO: 1261401 - RNA, 19 nt, Artificial Sequence
  Description of Artificial Sequence: Synthetic oligonucleotide
  Antisense strand to SEQ ID NO: 1261400
aguguacucacaaguauuc

SEQ ID NO: 1261402 - RNA, 19 nt, Artificial Sequence
  Description of Artificial Sequence: Synthetic oligonucleotide
  Sense strand starting at position 1306 of SEQ ID NO: 1241295
gguauuagcaaauggaaau

SEQ ID NO: 1261403 - RNA, 19 nt, Artificial Sequence
  Description of Artificial Sequence: Synthetic oligonucleotide
  Antisense strand to SEQ ID NO: 1261402
auuuccauuugcuaauacc

SEQ ID NO: 1261404 - RNA, 19 nt, Artificial Sequence
  Description of Artificial Sequence: Synthetic oligonucleotide
  Sense strand starting at position 1342 of SEQ ID NO: 1241295
gcaggaaguaucggccaca

SEQ ID NO: 1261405 - RNA, 19 nt, Artificial Sequence
  Description of Artificial Sequence: Synthetic oligonucleotide
  Antisense strand to SEQ ID NO: 1261404
uguggccgauacuuccugc

SEQ ID NO: 1261406 - RNA, 19 nt, Artificial Sequence
  Description of Artificial Sequence: Synthetic oligonucleotide
  Sense strand starting at position 2328 of SEQ ID NO: 1241295
ccggcuugugaggauuaca

SEQ ID NO: 1261407 - RNA, 19 nt, Artificial Sequence
  Description of Artificial Sequence: Synthetic oligonucleotide
  Antisense strand to SEQ ID NO: 1261406
uguaauccucacaagccgg

SEQ ID NO: 1261408 - RNA, 19 nt, Artificial Sequence
  Description of Artificial Sequence: Synthetic oligonucleotide
  Sense strand starting at position 2363 of SEQ ID NO: 1241295
ucuggcagaucucuacuau

SEQ ID NO: 1261409 - RNA, 19 nt, Artificial Sequence
  Description of Artificial Sequence: Synthetic oligonucleotide
  Antisense strand to SEQ ID NO: 1261408
auaguagagaucugccaga

SEQ ID NO: 1261410 - RNA, 19 nt, Artificial Sequence
  Description of Artificial Sequence: Synthetic oligonucleotide
  Sense strand starting at position 2364 of SEQ ID NO: 1241295
cuggcagaucucuacuaug

SEQ ID NO: 1261411 - RNA, 19 nt, Artificial Sequence
  Description of Artificial Sequence: Synthetic oligonucleotide
  Antisense strand to SEQ ID NO: 1261410
cauaguagagaucugccag

SEQ ID NO: 1261412 - RNA, 19 nt, Artificial Sequence
  Description of Artificial Sequence: Synthetic oligonucleotide
  Sense strand starting at position 2391 of SEQ ID NO: 1241295
uuaucuuaaacguguagag

SEQ ID NO: 1261413 - RNA, 19 nt, Artificial Sequence
  Description of Artificial Sequence: Synthetic oligonucleotide
  Antisense strand to SEQ ID NO: 1261412
cucuacacguuuaagauaa

SEQ ID NO: 1261414 - RNA, 19 nt, Artificial Sequence
  Description of Artificial Sequence: Synthetic oligonucleotide
  Sense strand starting at position 2393 of SEQ ID NO: 1241295
aucuuaaacguguagagga

SEQ ID NO: 1261415 - RNA, 19 nt, Artificial Sequence
  Description of Artificial Sequence: Synthetic oligonucleotide
  Antisense strand to SEQ ID NO: 1261414
uccucuacacguuuaagau

SEQ ID NO: 1261416 - RNA, 19 nt, Artificial Sequence
  Description of Artificial Sequence: Synthetic oligonucleotide
  Sense strand starting at position 2400 of SEQ ID NO: 1241295
acguguagaggauguauaa

SEQ ID NO: 1261417 - RNA, 19 nt, Artificial Sequence
  Description of Artificial Sequence: Synthetic oligonucleotide
  Antisense strand to SEQ ID NO: 1261416
uuauacauccucuacacgu

SEQ ID NO: 1261418 - RNA, 19 nt, Artificial Sequence
  Description of Artificial Sequence: Synthetic oligonucleotide
  Sense strand starting at position 2483 of SEQ ID NO: 1241295
caaguuggauaauuauuga

SEQ ID NO: 1261419 - RNA, 19 nt, Artificial Sequence
  Description of Artificial Sequence: Synthetic oligonucleotide
  Antisense strand to SEQ ID NO: 1261418
ucaauaauuauccaacuug

SEQ ID NO: 1261420 - RNA, 19 nt, Artificial Sequence
  Description of Artificial Sequence: Synthetic oligonucleotide
  Sense strand starting at position 2486 of SEQ ID NO: 1241295
guuggauaauuauugaggu

SEQ ID NO: 1261421 - RNA, 19 nt, Artificial Sequence
  Description of Artificial Sequence: Synthetic oligonucleotide
  Antisense strand to SEQ ID NO: 1261420
accucaauaauuauccaac

SEQ ID NO: 1261422 - RNA, 19 nt, Artificial Sequence
  Description of Artificial Sequence: Synthetic oligonucleotide
  Sense strand starting at position 2525 of SEQ ID NO: 1241295
cacugagguggguaauguu

SEQ ID NO: 1261423 - RNA, 19 nt, Artificial Sequence
  Description of Artificial Sequence: Synthetic oligonucleotide
  Antisense strand to SEQ ID NO: 1261422
aacauuacccaccucagug

SEQ ID NO: 1261424 - RNA, 19 nt, Artificial Sequence
  Description of Artificial Sequence: Synthetic oligonucleotide
  Sense strand starting at position 2610 of SEQ ID NO: 1241295
ggugguuucuggacacguu

SEQ ID NO: 1261425 - RNA, 19 nt, Artificial Sequence
  Description of Artificial Sequence: Synthetic oligonucleotide
  Antisense strand to SEQ ID NO: 1261424
aacguguccagaaaccacc

SEQ ID NO: 1261426 - RNA, 19 nt, Artificial Sequence
  Description of Artificial Sequence: Synthetic oligonucleotide
  Sense strand starting at position 2622 of SEQ ID NO: 1241295
acacguuggagucauacgu

SEQ ID NO: 1261427 - RNA, 19 nt, Artificial Sequence
  Description of Artificial Sequence: Synthetic oligonucleotide
  Antisense strand to SEQ ID NO: 1261426
acguaugacuccaacgugu

SEQ ID NO: 1261428 - RNA, 19 nt, Artificial Sequence
  Description of Artificial Sequence: Synthetic oligonucleotide
  Sense strand starting at position 2673 of SEQ ID NO: 1241295
cagaguuggcaccaaacuu

SEQ ID NO: 1261429 - RNA, 19 nt, Artificial Sequence
  Description of Artificial Sequence: Synthetic oligonucleotide
  Antisense strand to SEQ ID NO: 1261428
aaguuuggugccaacucug

SEQ ID NO: 1261430 - RNA, 19 nt, Artificial Sequence
  Description of Artificial Sequence: Synthetic oligonucleotide
  Sense strand starting at position 2688 of SEQ ID NO: 1241295
acuugagauguuuguaaag

SEQ ID NO: 1261431 - RNA, 19 nt, Artificial Sequence
  Description of Artificial Sequence: Synthetic oligonucleotide
  Antisense strand to SEQ ID NO: 1261430
cuuuacaaacaucucaagu

SEQ ID NO: 1261432 - RNA, 19 nt, Artificial Sequence
  Description of Artificial Sequence: Synthetic oligonucleotide
  Sense strand starting at position 2736 of SEQ ID NO: 1241295
cagaaaguuugggaaacau

SEQ ID NO: 1261433 - RNA, 19 nt, Artificial Sequence
  Description of Artificial Sequence: Synthetic oligonucleotide
  Antisense strand to SEQ ID NO: 1261432
auguuucccaaacuuucug

SEQ ID NO: 1261434 - RNA, 19 nt, Artificial Sequence
  Description of Artificial Sequence: Synthetic oligonucleotide
  Sense strand starting at position 2785 of SEQ ID NO: 1241295
ccuguagucucauuaucca

SEQ ID NO: 1261435 - RNA, 19 nt, Artificial Sequence
  Description of Artificial Sequence: Synthetic oligonucleotide
  Antisense strand to SEQ ID NO: 1261434
uggauaaugagacuacagg

SEQ ID NO: 1261436 - RNA, 19 nt, Artificial Sequence
  Description of Artificial Sequence: Synthetic oligonucleotide
  Sense strand starting at position 2847 of SEQ ID NO: 1241295
acgauagcccaauguacau

SEQ ID NO: 1261437 - RNA, 19 nt, Artificial Sequence
  Description of Artificial Sequence: Synthetic oligonucleotide
  Antisense strand to SEQ ID NO: 1261436
auguacauugggcuaucgu

SEQ ID NO: 1261438 - RNA, 19 nt, Artificial Sequence
  Description of Artificial Sequence: Synthetic oligonucleotide
  Sense strand starting at position 2968 of SEQ ID NO: 1241295
gugccaagggcuuaucaca

SEQ ID NO: 1261439 - RNA, 19 nt, Artificial Sequence
  Description of Artificial Sequence: Synthetic oligonucleotide
  Antisense strand to SEQ ID NO: 1261438
ugugauaagcccuuggcac

SEQ ID NO: 1261440 - RNA, 19 nt, Artificial Sequence
  Description of Artificial Sequence: Synthetic oligonucleotide
  Sense strand starting at position 3072 of SEQ ID NO: 1241295
gagaccuuauuccuuggau

SEQ ID NO: 1261441 - RNA, 19 nt, Artificial Sequence
  Description of Artificial Sequence: Synthetic oligonucleotide
  Antisense strand to SEQ ID NO: 1261440
auccaaggaauaaggucuc

SEQ ID NO: 1261442 - RNA, 19 nt, Artificial Sequence
  Description of Artificial Sequence: Synthetic oligonucleotide
  Sense strand starting at position 3073 of SEQ ID NO: 1241295
agaccuuauuccuuggauu

SEQ ID NO: 1261443 - RNA, 19 nt, Artificial Sequence
  Description of Artificial Sequence: Synthetic oligonucleotide
  Antisense strand to SEQ ID NO: 1261442
aauccaaggaauaaggucu

SEQ ID NO: 1261444 - RNA, 19 nt, Artificial Sequence
  Description of Artificial Sequence: Synthetic oligonucleotide
  Sense strand starting at position 3096 of SEQ ID NO: 1241295
augacccauuguuugagaa

SEQ ID NO: 1261445 - RNA, 19 nt, Artificial Sequence
  Description of Artificial Sequence: Synthetic oligonucleotide
  Antisense strand to SEQ ID NO: 1261444
uucucaaacaaugggucau

SEQ ID NO: 1261446 - RNA, 19 nt, Artificial Sequence
  Description of Artificial Sequence: Synthetic oligonucleotide
  Sense strand starting at position 3109 of SEQ ID NO: 1241295
ugagaaaccuggcuuuguu

SEQ ID NO: 1261447 - RNA, 19 nt, Artificial Sequence
  Description of Artificial Sequence: Synthetic oligonucleotide
  Antisense strand to SEQ ID NO: 1261446
aacaaagccagguuucuca

SEQ ID NO: 1261448 - RNA, 19 nt, Artificial Sequence
  Description of Artificial Sequence: Synthetic oligonucleotide
  Sense strand starting at position 3123 of SEQ ID NO: 1241295
uuguuucuacagugaguau

SEQ ID NO: 1261449 - RNA, 19 nt, Artificial Sequence
  Description of Artificial Sequence: Synthetic oligonucleotide
  Antisense strand to SEQ ID NO: 1261448
auacucacuguagaaacaa

SEQ ID NO: 1261450 - RNA, 19 nt, Artificial Sequence
  Description of Artificial Sequence: Synthetic oligonucleotide
  Sense strand starting at position 3147 of SEQ ID NO: 1241295
guccuauuagagugucuaa

SEQ ID NO: 1261451 - RNA, 19 nt, Artificial Sequence
  Description of Artificial Sequence: Synthetic oligonucleotide
  Antisense strand to SEQ ID NO: 1261450
uuagacacucuaauaggac

SEQ ID NO: 1261452 - RNA, 19 nt, Artificial Sequence
  Description of Artificial Sequence: Synthetic oligonucleotide
  Sense strand starting at position 3158 of SEQ ID NO: 1241295
gugucuaauuucuugcauc

SEQ ID NO: 1261453 - RNA, 19 nt, Artificial Sequence
  Description of Artificial Sequence: Synthetic oligonucleotide
  Antisense strand to SEQ ID NO: 1261452
gaugcaagaaauuagacac

SEQ ID NO: 1261454 - RNA, 19 nt, Artificial Sequence
  Description of Artificial Sequence: Synthetic oligonucleotide
  Sense strand starting at position 3522 of SEQ ID NO: 1241295
gucguagugagacagugua

SEQ ID NO: 1261455 - RNA, 19 nt, Artificial Sequence
  Description of Artificial Sequence: Synthetic oligonucleotide
  Antisense strand to SEQ ID NO: 1261454
uacacugucucacuacgac

SEQ ID NO: 1261456 - RNA, 19 nt, Artificial Sequence
  Description of Artificial Sequence: Synthetic oligonucleotide
  Sense strand starting at position 3612 of SEQ ID NO: 1241295
uggccuuaauuugaagaga

SEQ ID NO: 1261457 - RNA, 19 nt, Artificial Sequence
  Description of Artificial Sequence: Synthetic oligonucleotide
  Antisense strand to SEQ ID NO: 1261456
ucucuucaaauuaaggcca

SEQ ID NO: 1261458 - RNA, 19 nt, Artificial Sequence
  Description of Artificial Sequence: Synthetic oligonucleotide
  Sense strand starting at position 3671 of SEQ ID NO: 1241295
acccauuaccucuguggaa

SEQ ID NO: 1261459 - RNA, 19 nt, Artificial Sequence
  Description of Artificial Sequence: Synthetic oligonucleotide
  Antisense strand to SEQ ID NO: 1261458
uuccacagagguaaugggu

SEQ ID NO: 1261460 - RNA, 19 nt, Artificial Sequence
  Description of Artificial Sequence: Synthetic oligonucleotide
  Sense strand starting at position 3673 of SEQ ID NO: 1241295
ccauuaccucuguggaaga

SEQ ID NO: 1261461 - RNA, 19 nt, Artificial Sequence
  Description of Artificial Sequence: Synthetic oligonucleotide
  Antisense strand to SEQ ID NO: 1261460
ucuuccacagagguaaugg

SEQ ID NO: 1261462 - RNA, 19 nt, Artificial Sequence
  Description of Artificial Sequence: Synthetic oligonucleotide
  Sense strand starting at position 3816 of SEQ ID NO: 1241295
uuuauauaucaugguaccu

SEQ ID NO: 1261463 - RNA, 19 nt, Artificial Sequence
  Description of Artificial Sequence: Synthetic oligonucleotide
  Antisense strand to SEQ ID NO: 1261462
agguaccaugauauauaaa

SEQ ID NO: 1261464 - RNA, 19 nt, Artificial Sequence
  Description of Artificial Sequence: Synthetic oligonucleotide
  Sense strand starting at position 3953 of SEQ ID NO: 1241295
gauuaugguuucucaggca

SEQ ID NO: 1261465 - RNA, 19 nt, Artificial Sequence
  Description of Artificial Sequence: Synthetic oligonucleotide
  Antisense strand to SEQ ID NO: 1261464
ugccugagaaaccauaauc

SEQ ID NO: 1261466 - RNA, 19 nt, Artificial Sequence
  Description of Artificial Sequence: Synthetic oligonucleotide
  Sense strand starting at position 304 of SEQ ID NO: 1241296
agcccagacuuucugaaua

SEQ ID NO: 1261467 - RNA, 19 nt, Artificial Sequence
  Description of Artificial Sequence: Synthetic oligonucleotide
  Antisense strand to SEQ ID NO: 1261466
uauucagaaagucugggcu

SEQ ID NO: 1261468 - RNA, 19 nt, Artificial Sequence
  Description of Artificial Sequence: Synthetic oligonucleotide
  Sense strand starting at position 443 of SEQ ID NO: 1241296
ggaacuuggugacaagaga

SEQ ID NO: 1261469 - RNA, 19 nt, Artificial Sequence
  Description of Artificial Sequence: Synthetic oligonucleotide
  Antisense strand to SEQ ID NO: 1261468
ucucuugucaccaaguucc

SEQ ID NO: 1261470 - RNA, 19 nt, Artificial Sequence
  Description of Artificial Sequence: Synthetic oligonucleotide
  Sense strand starting at position 480 of SEQ ID NO: 1241296
cuguaauaaccugagcagu

SEQ ID NO: 1261471 - RNA, 19 nt, Artificial Sequence
  Description of Artificial Sequence: Synthetic oligonucleotide
  Antisense strand to SEQ ID NO: 1261470
acugcucagguuauuacag

SEQ ID NO: 1261472 - RNA, 19 nt, Artificial Sequence
  Description of Artificial Sequence: Synthetic oligonucleotide
  Sense strand starting at position 482 of SEQ ID NO: 1241296
guaauaaccugagcaguca

SEQ ID NO: 1261473 - RNA, 19 nt, Artificial Sequence
  Description of Artificial Sequence: Synthetic oligonucleotide
  Antisense strand to SEQ ID NO: 1261472
ugacugcucagguuauuac

SEQ ID NO: 1261474 - RNA, 19 nt, Artificial Sequence
  Description of Artificial Sequence: Synthetic oligonucleotide
  Sense strand starting at position 496 of SEQ ID NO: 1241296
agucaaagccuuuguuaaa

SEQ ID NO: 1261475 - RNA, 19 nt, Artificial Sequence
  Description of Artificial Sequence: Synthetic oligonucleotide
  Antisense strand to SEQ ID NO: 1261474
uuuaacaaaggcuuugacu

SEQ ID NO: 1261476 - RNA, 19 nt, Artificial Sequence
  Description of Artificial Sequence: Synthetic oligonucleotide
  Sense strand starting at position 497 of SEQ ID NO: 1241296
gucaaagccuuuguuaaau

SEQ ID NO: 1261477 - RNA, 19 nt, Artificial Sequence
  Description of Artificial Sequence: Synthetic oligonucleotide
  Antisense strand to SEQ ID NO: 1261476
auuuaacaaaggcuuugac

SEQ ID NO: 1261478 - RNA, 19 nt, Artificial Sequence
  Description of Artificial Sequence: Synthetic oligonucleotide
  Sense strand starting at position 559 of SEQ ID NO: 1241296
uacagaagucuuuguaagc

SEQ ID NO: 1261479 - RNA, 19 nt, Artificial Sequence
  Description of Artificial Sequence: Synthetic oligonucleotide
  Antisense strand to SEQ ID NO: 1261478
gcuuacaaagacuucugua

SEQ ID NO: 1261480 - RNA, 19 nt, Artificial Sequence
  Description of Artificial Sequence: Synthetic oligonucleotide
  Sense strand starting at position 560 of SEQ ID NO: 1241296
acagaagucuuuguaagcu

SEQ ID NO: 1261481 - RNA, 19 nt, Artificial Sequence
  Description of Artificial Sequence: Synthetic oligonucleotide
  Antisense strand to SEQ ID NO: 1261480
agcuuacaaagacuucugu

SEQ ID NO: 1261482 - RNA, 19 nt, Artificial Sequence
  Description of Artificial Sequence: Synthetic oligonucleotide
  Sense strand starting at position 638 of SEQ ID NO: 1241296
gcauucuugcaacagaggu

SEQ ID NO: 1261483 - RNA, 19 nt, Artificial Sequence
  Description of Artificial Sequence: Synthetic oligonucleotide
  Antisense strand to SEQ ID NO: 1261482
accucuguugcaagaaugc

SEQ ID NO: 1261484 - RNA, 19 nt, Artificial Sequence
  Description of Artificial Sequence: Synthetic oligonucleotide
  Sense strand starting at position 652 of SEQ ID NO: 1241296
gagguugcccuauacacua

SEQ ID NO: 1261485 - RNA, 19 nt, Artificial Sequence
  Description of Artificial Sequence: Synthetic oligonucleotide
  Antisense strand to SEQ ID NO: 1261484
uaguguauagggcaaccuc

SEQ ID NO: 1261486 - RNA, 19 nt, Artificial Sequence
  Description of Artificial Sequence: Synthetic oligonucleotide
  Sense strand starting at position 821 of SEQ ID NO: 1241296
aguacuuacugcccaaaga

SEQ ID NO: 1261487 - RNA, 19 nt, Artificial Sequence
  Description of Artificial Sequence: Synthetic oligonucleotide
  Antisense strand to SEQ ID NO: 1261486
ucuuugggcaguaaguacu

SEQ ID NO: 1261488 - RNA, 19 nt, Artificial Sequence
  Description of Artificial Sequence: Synthetic oligonucleotide
  Sense strand starting at position 888 of SEQ ID NO: 1241296
guggucaagugguuaucau

SEQ ID NO: 1261489 - RNA, 19 nt, Artificial Sequence
  Description of Artificial Sequence: Synthetic oligonucleotide
  Antisense strand to SEQ ID NO: 1261488
augauaaccacuugaccac

SEQ ID NO: 1261490 - RNA, 19 nt, Artificial Sequence
  Description of Artificial Sequence: Synthetic oligonucleotide
  Sense strand starting at position 889 of SEQ ID NO: 1241296
uggucaagugguuaucauu

SEQ ID NO: 1261491 - RNA, 19 nt, Artificial Sequence
  Description of Artificial Sequence: Synthetic oligonucleotide
  Antisense strand to SEQ ID NO: 1261490
aaugauaaccacuugacca

SEQ ID NO: 1261492 - RNA, 19 nt, Artificial Sequence
  Description of Artificial Sequence: Synthetic oligonucleotide
  Sense strand starting at position 969 of SEQ ID NO: 1241296
uuuggucacuuucuucgaa

SEQ ID NO: 1261493 - RNA, 19 nt, Artificial Sequence
  Description of Artificial Sequence: Synthetic oligonucleotide
  Antisense strand to SEQ ID NO: 1261492
uucgaagaaagugaccaaa

SEQ ID NO: 1261494 - RNA, 19 nt, Artificial Sequence
  Description of Artificial Sequence: Synthetic oligonucleotide
  Sense strand starting at position 970 of SEQ ID NO: 1241296
uuggucacuuucuucgaau

SEQ ID NO: 1261495 - RNA, 19 nt, Artificial Sequence
  Description of Artificial Sequence: Synthetic oligonucleotide
  Antisense strand to SEQ ID NO: 1261494
auucgaagaaagugaccaa

SEQ ID NO: 1261496 - RNA, 19 nt, Artificial Sequence
  Description of Artificial Sequence: Synthetic oligonucleotide
  Sense strand starting at position 971 of SEQ ID NO: 1241296
uggucacuuucuucgaauu

SEQ ID NO: 1261497 - RNA, 19 nt, Artificial Sequence
  Description of Artificial Sequence: Synthetic oligonucleotide
  Antisense strand to SEQ ID NO: 1261496
aauucgaagaaagugacca

SEQ ID NO: 1261498 - RNA, 19 nt, Artificial Sequence
  Description of Artificial Sequence: Synthetic oligonucleotide
  Sense strand starting at position 972 of SEQ ID NO: 1241296
ggucacuuucuucgaauug

SEQ ID NO: 1261499 - RNA, 19 nt, Artificial Sequence
  Description of Artificial Sequence: Synthetic oligonucleotide
  Antisense strand to SEQ ID NO: 1261498
caauucgaagaaagugacc

SEQ ID NO: 1261500 - RNA, 19 nt, Artificial Sequence
  Description of Artificial Sequence: Synthetic oligonucleotide
  Sense strand starting at position 984 of SEQ ID NO: 1241296
cgaauuggagcuuacugau

SEQ ID NO: 1261501 - RNA, 19 nt, Artificial Sequence
  Description of Artificial Sequence: Synthetic oligonucleotide
  Antisense strand to SEQ ID NO: 1261500
aucaguaagcuccaauucg

SEQ ID NO: 1261502 - RNA, 19 nt, Artificial Sequence
  Description of Artificial Sequence: Synthetic oligonucleotide
  Sense strand starting at position 1120 of SEQ ID NO: 1241296
acgcaauaccuagaggucu

SEQ ID NO: 1261503 - RNA, 19 nt, Artificial Sequence
  Description of Artificial Sequence: Synthetic oligonucleotide
  Antisense strand to SEQ ID NO: 1261502
agaccucuagguauugcgu

SEQ ID NO: 1261504 - RNA, 19 nt, Artificial Sequence
  Description of Artificial Sequence: Synthetic oligonucleotide
  Sense strand starting at position 1246 of SEQ ID NO: 1241296
aucugucagcuucgagaau

SEQ ID NO: 1261505 - RNA, 19 nt, Artificial Sequence
  Description of Artificial Sequence: Synthetic oligonucleotide
  Antisense strand to SEQ ID NO: 1261504
auucucgaagcugacagau

SEQ ID NO: 1261506 - RNA, 19 nt, Artificial Sequence
  Description of Artificial Sequence: Synthetic oligonucleotide
  Sense strand starting at position 1255 of SEQ ID NO: 1241296
cuucgagaauaguuagaca

SEQ ID NO: 1261507 - RNA, 19 nt, Artificial Sequence
  Description of Artificial Sequence: Synthetic oligonucleotide
  Antisense strand to SEQ ID NO: 1261506
ugucuaacuauucucgaag

SEQ ID NO: 1261508 - RNA, 19 nt, Artificial Sequence
  Description of Artificial Sequence: Synthetic oligonucleotide
  Sense strand starting at position 1643 of SEQ ID NO: 1241296
cccucuaccgaguaacaau

SEQ ID NO: 1261509 - RNA, 19 nt, Artificial Sequence
  Description of Artificial Sequence: Synthetic oligonucleotide
  Antisense strand to SEQ ID NO: 1261508
auuguuacucgguagaggg

SEQ ID NO: 1261510 - RNA, 19 nt, Artificial Sequence
  Description of Artificial Sequence: Synthetic oligonucleotide
  Sense strand starting at position 1650 of SEQ ID NO: 1241296
ccgaguaacaaucgggaga

SEQ ID NO: 1261511 - RNA, 19 nt, Artificial Sequence
  Description of Artificial Sequence: Synthetic oligonucleotide
  Antisense strand to SEQ ID NO: 1261510
ucucccgauuguuacucgg

SEQ ID NO: 1261512 - RNA, 19 nt, Artificial Sequence
  Description of Artificial Sequence: Synthetic oligonucleotide
  Sense strand starting at position 1789 of SEQ ID NO: 1241296
ggucaauccaccgacuaga

SEQ ID NO: 1261513 - RNA, 19 nt, Artificial Sequence
  Description of Artificial Sequence: Synthetic oligonucleotide
  Antisense strand to SEQ ID NO: 1261512
ucuagucgguggauugacc

SEQ ID NO: 1261514 - RNA, 19 nt, Artificial Sequence
  Description of Artificial Sequence: Synthetic oligonucleotide
  Sense strand starting at position 1932 of SEQ ID NO: 1241296
cgccaaacucucuucgcua

SEQ ID NO: 1261515 - RNA, 19 nt, Artificial Sequence
  Description of Artificial Sequence: Synthetic oligonucleotide
  Antisense strand to SEQ ID NO: 1261514
uagcgaagagaguuuggcg

SEQ ID NO: 1261516 - RNA, 19 nt, Artificial Sequence
  Description of Artificial Sequence: Synthetic oligonucleotide
  Sense strand starting at position 2006 of SEQ ID NO: 1241296
gccaauccucgcgagagga

SEQ ID NO: 1261517 - RNA, 19 nt, Artificial Sequence
  Description of Artificial Sequence: Synthetic oligonucleotide
  Antisense strand to SEQ ID NO: 1261516
uccucucgcgaggauuggc

SEQ ID NO: 1261518 - RNA, 19 nt, Artificial Sequence
  Description of Artificial Sequence: Synthetic oligonucleotide
  Sense strand starting at position 2029 of SEQ ID NO: 1241296
ccggaagucgucgaaagug

SEQ ID NO: 1261519 - RNA, 19 nt, Artificial Sequence
  Description of Artificial Sequence: Synthetic oligonucleotide
  Antisense strand to SEQ ID NO: 1261518
cacuuucgacgacuuccgg

SEQ ID NO: 1261520 - RNA, 19 nt, Artificial Sequence
  Description of Artificial Sequence: Synthetic oligonucleotide
  Sense strand starting at position 2300 of SEQ ID NO: 1241296
guaaguauccugggccgga

SEQ ID NO: 1261521 - RNA, 19 nt, Artificial Sequence
  Description of Artificial Sequence: Synthetic oligonucleotide
  Antisense strand to SEQ ID NO: 1261520
uccggcccaggauacuuac

SEQ ID NO: 1261522 - RNA, 19 nt, Artificial Sequence
  Description of Artificial Sequence: Synthetic oligonucleotide
  Sense strand starting at position 3147 of SEQ ID NO: 1241296
guuaauuucucagagguaa

SEQ ID NO: 1261523 - RNA, 19 nt, Artificial Sequence
  Description of Artificial Sequence: Synthetic oligonucleotide
  Antisense strand to SEQ ID NO: 1261522
uuaccucugagaaauuaac

SEQ ID NO: 1261524 - RNA, 19 nt, Artificial Sequence
  Description of Artificial Sequence: Synthetic oligonucleotide
  Sense strand starting at position 3191 of SEQ ID NO: 1241296
ucaggauggcugugagaua

SEQ ID NO: 1261525 - RNA, 19 nt, Artificial Sequence
  Description of Artificial Sequence: Synthetic oligonucleotide
  Antisense strand to SEQ ID NO: 1261524
uaucucacagccauccuga

SEQ ID NO: 1261526 - RNA, 19 nt, Artificial Sequence
  Description of Artificial Sequence: Synthetic oligonucleotide
  Sense strand starting at position 3196 of SEQ ID NO: 1241296
auggcugugagauaguagu

SEQ ID NO: 1261527 - RNA, 19 nt, Artificial Sequence
  Description of Artificial Sequence: Synthetic oligonucleotide
  Antisense strand to SEQ ID NO: 1261526
acuacuaucucacagccau

SEQ ID NO: 1261528 - RNA, 19 nt, Artificial Sequence
  Description of Artificial Sequence: Synthetic oligonucleotide
  Sense strand starting at position 3362 of SEQ ID NO: 1241296
uagauauuccacggaagau

SEQ ID NO: 1261529 - RNA, 19 nt, Artificial Sequence
  Description of Artificial Sequence: Synthetic oligonucleotide
  Antisense strand to SEQ ID NO: 1261528
aucuuccguggaauaucua

SEQ ID NO: 1261530 - RNA, 19 nt, Artificial Sequence
  Description of Artificial Sequence: Synthetic oligonucleotide
  Sense strand starting at position 3372 of SEQ ID NO: 1241296
acggaagauccuggaguau

SEQ ID NO: 1261531 - RNA, 19 nt, Artificial Sequence
  Description of Artificial Sequence: Synthetic oligonucleotide
  Antisense strand to SEQ ID NO: 1261530
auacuccaggaucuuccgu

SEQ ID NO: 1261532 - RNA, 19 nt, Artificial Sequence
  Description of Artificial Sequence: Synthetic oligonucleotide
  Sense strand starting at position 3419 of SEQ ID NO: 1241296
auuugagguucugugcauu

SEQ ID NO: 1261533 - RNA, 19 nt, Artificial Sequence
  Description of Artificial Sequence: Synthetic oligonucleotide
  Antisense strand to SEQ ID NO: 1261532
aaugcacagaaccucaaau

SEQ ID NO: 1261534 - RNA, 19 nt, Artificial Sequence
  Description of Artificial Sequence: Synthetic oligonucleotide
  Sense strand starting at position 3499 of SEQ ID NO: 1241296
uccagauuguuaucaagaa

SEQ ID NO: 1261535 - RNA, 19 nt, Artificial Sequence
  Description of Artificial Sequence: Synthetic oligonucleotide
  Antisense strand to SEQ ID NO: 1261534
uucuugauaacaaucugga

SEQ ID NO: 1261536 - RNA, 19 nt, Artificial Sequence
  Description of Artificial Sequence: Synthetic oligonucleotide
  Sense strand starting at position 3632 of SEQ ID NO: 1241296
gggacuuugucccuacaaa

SEQ ID NO: 1261537 - RNA, 19 nt, Artificial Sequence
  Description of Artificial Sequence: Synthetic oligonucleotide
  Antisense strand to SEQ ID NO: 1261536
uuuguagggacaaaguccc

SEQ ID NO: 1261538 - RNA, 19 nt, Artificial Sequence
  Description of Artificial Sequence: Synthetic oligonucleotide
  Sense strand starting at position 3633 of SEQ ID NO: 1241296
ggacuuugucccuacaaau

SEQ ID NO: 1261539 - RNA, 19 nt, Artificial Sequence
  Description of Artificial Sequence: Synthetic oligonucleotide
  Antisense strand to SEQ ID NO: 1261538
auuuguagggacaaagucc

SEQ ID NO: 1261540 - RNA, 19 nt, Artificial Sequence
  Description of Artificial Sequence: Synthetic oligonucleotide
  Sense strand starting at position 3842 of SEQ ID NO: 1241296
acacaccuuucugaggaaa

SEQ ID NO: 1261541 - RNA, 19 nt, Artificial Sequence
  Description of Artificial Sequence: Synthetic oligonucleotide
  Antisense strand to SEQ ID NO: 1261540
uuuccucagaaaggugugu

SEQ ID NO: 1261542 - RNA, 19 nt, Artificial Sequence
  Description of Artificial Sequence: Synthetic oligonucleotide
  Sense strand starting at position 3873 of SEQ ID NO: 1241296
uuuggaugucuguacuaga

SEQ ID NO: 1261543 - RNA, 19 nt, Artificial Sequence
  Description of Artificial Sequence: Synthetic oligonucleotide
  Antisense strand to SEQ ID NO: 1261542
ucuaguacagacauccaaa

SEQ ID NO: 1261544 - RNA, 19 nt, Artificial Sequence
  Description of Artificial Sequence: Synthetic oligonucleotide
  Sense strand starting at position 3881 of SEQ ID NO: 1241296
ucuguacuagaaugaaugu

SEQ ID NO: 1261545 - RNA, 19 nt, Artificial Sequence
  Description of Artificial Sequence: Synthetic oligonucleotide
  Antisense strand to SEQ ID NO: 1261544
acauucauucuaguacaga

SEQ ID NO: 1261546 - RNA, 19 nt, Artificial Sequence
  Description of Artificial Sequence: Synthetic oligonucleotide
  Sense strand starting at position 193 of SEQ ID NO: 1241297
agggaaguauuugaauaug

SEQ ID NO: 1261547 - RNA, 19 nt, Artificial Sequence
  Description of Artificial Sequence: Synthetic oligonucleotide
  Antisense strand to SEQ ID NO: 1261546
cauauucaaauacuucccu

SEQ ID NO: 1261548 - RNA, 19 nt, Artificial Sequence
  Description of Artificial Sequence: Synthetic oligonucleotide
  Sense strand starting at position 199 of SEQ ID NO: 1241297
guauuugaauaugagggua

SEQ ID NO: 1261549 - RNA, 19 nt, Artificial Sequence
  Description of Artificial Sequence: Synthetic oligonucleotide
  Antisense strand to SEQ ID NO: 1261548
uacccucauauucaaauac

SEQ ID NO: 1261550 - RNA, 19 nt, Artificial Sequence
  Description of Artificial Sequence: Synthetic oligonucleotide
  Sense strand starting at position 201 of SEQ ID NO: 1241297
auuugaauaugaggguauu

SEQ ID NO: 1261551 - RNA, 19 nt, Artificial Sequence
  Description of Artificial Sequence: Synthetic oligonucleotide
  Antisense strand to SEQ ID NO: 1261550
aauacccucauauucaaau

SEQ ID NO: 1261552 - RNA, 19 nt, Artificial Sequence
  Description of Artificial Sequence: Synthetic oligonucleotide
  Sense strand starting at position 212 of SEQ ID NO: 1241297
aggguauugugaaagagga

SEQ ID NO: 1261553 - RNA, 19 nt, Artificial Sequence
  Description of Artificial Sequence: Synthetic oligonucleotide
  Antisense strand to SEQ ID NO: 1261552
uccucuuucacaauacccu

SEQ ID NO: 1261554 - RNA, 19 nt, Artificial Sequence
  Description of Artificial Sequence: Synthetic oligonucleotide
  Sense strand starting at position 235 of SEQ ID NO: 1241297
uuuaaucacuaguuagaag

SEQ ID NO: 1261555 - RNA, 19 nt, Artificial Sequence
  Description of Artificial Sequence: Synthetic oligonucleotide
  Antisense strand to SEQ ID NO: 1261554
cuucuaacuagugauuaaa

SEQ ID NO: 1261556 - RNA, 19 nt, Artificial Sequence
  Description of Artificial Sequence: Synthetic oligonucleotide
  Sense strand starting at position 405 of SEQ ID NO: 1241297
uggacaucuucuuuccgua

SEQ ID NO: 1261557 - RNA, 19 nt, Artificial Sequence
  Description of Artificial Sequence: Synthetic oligonucleotide
  Antisense strand to SEQ ID NO: 1261556
uacggaaagaagaugucca

SEQ ID NO: 1261558 - RNA, 19 nt, Artificial Sequence
  Description of Artificial Sequence: Synthetic oligonucleotide
  Sense strand starting at position 410 of SEQ ID NO: 1241297
aucuucuuuccguaaagaa

SEQ ID NO: 1261559 - RNA, 19 nt, Artificial Sequence
  Description of Artificial Sequence: Synthetic oligonucleotide
  Antisense strand to SEQ ID NO: 1261558
uucuuuacggaaagaagau

SEQ ID NO: 1261560 - RNA, 19 nt, Artificial Sequence
  Description of Artificial Sequence: Synthetic oligonucleotide
  Sense strand starting at position 479 of SEQ ID NO: 1241297
cucgguguugcguuauauu

SEQ ID NO: 1261561 - RNA, 19 nt, Artificial Sequence
  Description of Artificial Sequence: Synthetic oligonucleotide
  Antisense strand to SEQ ID NO: 1261560
aauauaacgcaacaccgag

SEQ ID NO: 1261562 - RNA, 19 nt, Artificial Sequence
  Description of Artificial Sequence: Synthetic oligonucleotide
  Sense strand starting at position 487 of SEQ ID NO: 1241297
ugcguuauauuucuaauca

SEQ ID NO: 1261563 - RNA, 19 nt, Artificial Sequence
  Description of Artificial Sequence: Synthetic oligonucleotide
  Antisense strand to SEQ ID NO: 1261562
ugauuagaaauauaacgca

SEQ ID NO: 1261564 - RNA, 19 nt, Artificial Sequence
  Description of Artificial Sequence: Synthetic oligonucleotide
  Sense strand starting at position 535 of SEQ ID NO: 1241297
acuugauuguguguccuuu

SEQ ID NO: 1261565 - RNA, 19 nt, Artificial Sequence
  Description of Artificial Sequence: Synthetic oligonucleotide
  Antisense strand to SEQ ID NO: 1261564
aaaggacacacaaucaagu

SEQ ID NO: 1261566 - RNA, 19 nt, Artificial Sequence
  Description of Artificial Sequence: Synthetic oligonucleotide
  Sense strand starting at position 550 of SEQ ID NO: 1241297
cuuuguaaugauugaaggu

SEQ ID NO: 1261567 - RNA, 19 nt, Artificial Sequence
  Description of Artificial Sequence: Synthetic oligonucleotide
  Antisense strand to SEQ ID NO: 1261566
accuucaaucauuacaaag

SEQ ID NO: 1261568 - RNA, 19 nt, Artificial Sequence
  Description of Artificial Sequence: Synthetic oligonucleotide
  Sense strand starting at position 617 of SEQ ID NO: 1241297
uucccuuaguuuccuagau

SEQ ID NO: 1261569 - RNA, 19 nt, Artificial Sequence
  Description of Artificial Sequence: Synthetic oligonucleotide
  Antisense strand to SEQ ID NO: 1261568
aucuaggaaacuaagggaa

SEQ ID NO: 1261570 - RNA, 19 nt, Artificial Sequence
  Description of Artificial Sequence: Synthetic oligonucleotide
  Sense strand starting at position 618 of SEQ ID NO: 1241297
ucccuuaguuuccuagaua

SEQ ID NO: 1261571 - RNA, 19 nt, Artificial Sequence
  Description of Artificial Sequence: Synthetic oligonucleotide
  Antisense strand to SEQ ID NO: 1261570
uaucuaggaaacuaaggga

SEQ ID NO: 1261572 - RNA, 19 nt, Artificial Sequence
  Description of Artificial Sequence: Synthetic oligonucleotide
  Sense strand starting at position 727 of SEQ ID NO: 1241297
gcaucuuuccuuugacaug

SEQ ID NO: 1261573 - RNA, 19 nt, Artificial Sequence
  Description of Artificial Sequence: Synthetic oligonucleotide
  Antisense strand to SEQ ID NO: 1261572
caugucaaaggaaagaugc

SEQ ID NO: 1261574 - RNA, 19 nt, Artificial Sequence
  Description of Artificial Sequence: Synthetic oligonucleotide
  Sense strand starting at position 733 of SEQ ID NO: 1241297
uuccuuugacaugguauca

SEQ ID NO: 1261575 - RNA, 19 nt, Artificial Sequence
  Description of Artificial Sequence: Synthetic oligonucleotide
  Antisense strand to SEQ ID NO: 1261574
ugauaccaugucaaaggaa

SEQ ID NO: 1261576 - RNA, 19 nt, Artificial Sequence
  Description of Artificial Sequence: Synthetic oligonucleotide
  Sense strand starting at position 881 of SEQ ID NO: 1241297
uggcuuugacaagaguaau

SEQ ID NO: 1261577 - RNA, 19 nt, Artificial Sequence
  Description of Artificial Sequence: Synthetic oligonucleotide
  Antisense strand to SEQ ID NO: 1261576
auuacucuugucaaagcca

SEQ ID NO: 1261578 - RNA, 19 nt, Artificial Sequence
  Description of Artificial Sequence: Synthetic oligonucleotide
  Sense strand starting at position 935 of SEQ ID NO: 1241297
acuguaaguuucucucaau

SEQ ID NO: 1261579 - RNA, 19 nt, Artificial Sequence
  Description of Artificial Sequence: Synthetic oligonucleotide
  Antisense strand to SEQ ID NO: 1261578
auugagagaaacuuacagu

SEQ ID NO: 1261580 - RNA, 19 nt, Artificial Sequence
  Description of Artificial Sequence: Synthetic oligonucleotide
  Sense strand starting at position 991 of SEQ ID NO: 1241297
ugaucauaauccgcuugua

SEQ ID NO: 1261581 - RNA, 19 nt, Artificial Sequence
  Description of Artificial Sequence: Synthetic oligonucleotide
  Antisense strand to SEQ ID NO: 1261580
uacaagcggauuaugauca

SEQ ID NO: 1261582 - RNA, 19 nt, Artificial Sequence
  Description of Artificial Sequence: Synthetic oligonucleotide
  Sense strand starting at position 994 of SEQ ID NO: 1241297
ucauaauccgcuuguaauu

SEQ ID NO: 1261583 - RNA, 19 nt, Artificial Sequence
  Description of Artificial Sequence: Synthetic oligonucleotide
  Antisense strand to SEQ ID NO: 1261582
aauuacaagcggauuauga

SEQ ID NO: 1261584 - RNA, 19 nt, Artificial Sequence
  Description of Artificial Sequence: Synthetic oligonucleotide
  Sense strand starting at position 999 of SEQ ID NO: 1241297
auccgcuuguaauuaaacu

SEQ ID NO: 1261585 - RNA, 19 nt, Artificial Sequence
  Description of Artificial Sequence: Synthetic oligonucleotide
  Antisense strand to SEQ ID NO: 1261584
aguuuaauuacaagcggau

SEQ ID NO: 1261586 - RNA, 19 nt, Artificial Sequence
  Description of Artificial Sequence: Synthetic oligonucleotide
  Sense strand starting at position 1065 of SEQ ID NO: 1241297
cgggugucacgauaagaga

SEQ ID NO: 1261587 - RNA, 19 nt, Artificial Sequence
  Description of Artificial Sequence: Synthetic oligonucleotide
  Antisense strand to SEQ ID NO: 1261586
ucucuuaucgugacacccg

SEQ ID NO: 1261588 - RNA, 19 nt, Artificial Sequence
  Description of Artificial Sequence: Synthetic oligonucleotide
  Sense strand starting at position 1230 of SEQ ID NO: 1241297
acaaacgucuuagccagaa

SEQ ID NO: 1261589 - RNA, 19 nt, Artificial Sequence
  Description of Artificial Sequence: Synthetic oligonucleotide
  Antisense strand to SEQ ID NO: 1261588
uucuggcuaagacguuugu

SEQ ID NO: 1261590 - RNA, 19 nt, Artificial Sequence
  Description of Artificial Sequence: Synthetic oligonucleotide
  Sense strand starting at position 1284 of SEQ ID NO: 1241297
acacaaguuccuggucaag

SEQ ID NO: 1261591 - RNA, 19 nt, Artificial Sequence
  Description of Artificial Sequence: Synthetic oligonucleotide
  Antisense strand to SEQ ID NO: 1261590
cuugaccaggaacuugugu

SEQ ID NO: 1261592 - RNA, 19 nt, Artificial Sequence
  Description of Artificial Sequence: Synthetic oligonucleotide
  Sense strand starting at position 1286 of SEQ ID NO: 1241297
acaaguuccuggucaagag

SEQ ID NO: 1261593 - RNA, 19 nt, Artificial Sequence
  Description of Artificial Sequence: Synthetic oligonucleotide
  Antisense strand to SEQ ID NO: 1261592
cucuugaccaggaacuugu

SEQ ID NO: 1261594 - RNA, 19 nt, Artificial Sequence
  Description of Artificial Sequence: Synthetic oligonucleotide
  Sense strand starting at position 1542 of SEQ ID NO: 1241297
agucucauucccgguggga

SEQ ID NO: 1261595 - RNA, 19 nt, Artificial Sequence
  Description of Artificial Sequence: Synthetic oligonucleotide
  Antisense strand to SEQ ID NO: 1261594
ucccaccgggaaugagacu

SEQ ID NO: 1261596 - RNA, 19 nt, Artificial Sequence
  Description of Artificial Sequence: Synthetic oligonucleotide
  Sense strand starting at position 1544 of SEQ ID NO: 1241297
ucucauucccggugggaag

SEQ ID NO: 1261597 - RNA, 19 nt, Artificial Sequence
  Description of Artificial Sequence: Synthetic oligonucleotide
  Antisense strand to SEQ ID NO: 1261596
cuucccaccgggaaugaga

SEQ ID NO: 1261598 - RNA, 19 nt, Artificial Sequence
  Description of Artificial Sequence: Synthetic oligonucleotide
  Sense strand starting at position 2301 of SEQ ID NO: 1241297
uccguaucucaaugcgaga

SEQ ID NO: 1261599 - RNA, 19 nt, Artificial Sequence
  Description of Artificial Sequence: Synthetic oligonucleotide
  Antisense strand to SEQ ID NO: 1261598
ucucgcauugagauacgga

SEQ ID NO: 1261600 - RNA, 19 nt, Artificial Sequence
  Description of Artificial Sequence: Synthetic oligonucleotide
  Sense strand starting at position 2303 of SEQ ID NO: 1241297
cguaucucaaugcgagaca

SEQ ID NO: 1261601 - RNA, 19 nt, Artificial Sequence
  Description of Artificial Sequence: Synthetic oligonucleotide
  Antisense strand to SEQ ID NO: 1261600
ugucucgcauugagauacg

SEQ ID NO: 1261602 - RNA, 19 nt, Artificial Sequence
  Description of Artificial Sequence: Synthetic oligonucleotide
  Sense strand starting at position 2358 of SEQ ID NO: 1241297
ggcggagucuuaaagcuga

SEQ ID NO: 1261603 - RNA, 19 nt, Artificial Sequence
  Description of Artificial Sequence: Synthetic oligonucleotide
  Antisense strand to SEQ ID NO: 1261602
ucagcuuuaagacuccgcc

SEQ ID NO: 1261604 - RNA, 19 nt, Artificial Sequence
  Description of Artificial Sequence: Synthetic oligonucleotide
  Sense strand starting at position 2613 of SEQ ID NO: 1241297
agucaaauguggcuggcua

SEQ ID NO: 1261605 - RNA, 19 nt, Artificial Sequence
  Description of Artificial Sequence: Synthetic oligonucleotide
  Antisense strand to SEQ ID NO: 1261604
uagccagccacauuugacu

SEQ ID NO: 1261606 - RNA, 19 nt, Artificial Sequence
  Description of Artificial Sequence: Synthetic oligonucleotide
  Sense strand starting at position 2692 of SEQ ID NO: 1241297
ggccuagagaagugaggua

SEQ ID NO: 1261607 - RNA, 19 nt, Artificial Sequence
  Description of Artificial Sequence: Synthetic oligonucleotide
  Antisense strand to SEQ ID NO: 1261606
uaccucacuucucuaggcc

SEQ ID NO: 1261608 - RNA, 19 nt, Artificial Sequence
  Description of Artificial Sequence: Synthetic oligonucleotide
  Sense strand starting at position 2764 of SEQ ID NO: 1241297
cagaguugggacuagucua

SEQ ID NO: 1261609 - RNA, 19 nt, Artificial Sequence
  Description of Artificial Sequence: Synthetic oligonucleotide
  Antisense strand to SEQ ID NO: 1261608
uagacuagucccaacucug

SEQ ID NO: 1261610 - RNA, 19 nt, Artificial Sequence
  Description of Artificial Sequence: Synthetic oligonucleotide
  Sense strand starting at position 2772 of SEQ ID NO: 1241297
ggacuagucuauccgcuuu

SEQ ID NO: 1261611 - RNA, 19 nt, Artificial Sequence
  Description of Artificial Sequence: Synthetic oligonucleotide
  Antisense strand to SEQ ID NO: 1261610
aaagcggauagacuagucc

SEQ ID NO: 1261612 - RNA, 19 nt, Artificial Sequence
  Description of Artificial Sequence: Synthetic oligonucleotide
  Sense strand starting at position 2994 of SEQ ID NO: 1241297
gucucaaacuccucaagag

SEQ ID NO: 1261613 - RNA, 19 nt, Artificial Sequence
  Description of Artificial Sequence: Synthetic oligonucleotide
  Antisense strand to SEQ ID NO: 1261612
cucuugaggaguuugagac

SEQ ID NO: 1261614 - RNA, 19 nt, Artificial Sequence
  Description of Artificial Sequence: Synthetic oligonucleotide
  Sense strand starting at position 3480 of SEQ ID NO: 1241297
ggguuuaagugauucuuac

SEQ ID NO: 1261615 - RNA, 19 nt, Artificial Sequence
  Description of Artificial Sequence: Synthetic oligonucleotide
  Antisense strand to SEQ ID NO: 1261614
guaagaaucacuuaaaccc

SEQ ID NO: 1261616 - RNA, 19 nt, Artificial Sequence
  Description of Artificial Sequence: Synthetic oligonucleotide
  Sense strand starting at position 3693 of SEQ ID NO: 1241297
gguaguuucuaggugaaac

SEQ ID NO: 1261617 - RNA, 19 nt, Artificial Sequence
  Description of Artificial Sequence: Synthetic oligonucleotide
  Antisense strand to SEQ ID NO: 1261616
guuucaccuagaaacuacc

SEQ ID NO: 1261618 - RNA, 19 nt, Artificial Sequence
  Description of Artificial Sequence: Synthetic oligonucleotide
  Sense strand starting at position 3694 of SEQ ID NO: 1241297
guaguuucuaggugaaacu

SEQ ID NO: 1261619 - RNA, 19 nt, Artificial Sequence
  Description of Artificial Sequence: Synthetic oligonucleotide
  Antisense strand to SEQ ID NO: 1261618
aguuucaccuagaaacuac

SEQ ID NO: 1261620 - RNA, 19 nt, Artificial Sequence
  Description of Artificial Sequence: Synthetic oligonucleotide
  Sense strand starting at position 3723 of SEQ ID NO: 1241297
cgacaucuugcaugcacau

SEQ ID NO: 1261621 - RNA, 19 nt, Artificial Sequence
  Description of Artificial Sequence: Synthetic oligonucleotide
  Antisense strand to SEQ ID NO: 1261620
augugcaugcaagaugucg

SEQ ID NO: 1261622 - RNA, 19 nt, Artificial Sequence
  Description of Artificial Sequence: Synthetic oligonucleotide
  Sense strand starting at position 3791 of SEQ ID NO: 1241297
acccuagagcucugccuau

SEQ ID NO: 1261623 - RNA, 19 nt, Artificial Sequence
  Description of Artificial Sequence: Synthetic oligonucleotide
  Antisense strand to SEQ ID NO: 1261622
auaggcagagcucuagggu

SEQ ID NO: 1261624 - RNA, 19 nt, Artificial Sequence
  Description of Artificial Sequence: Synthetic oligonucleotide
  Sense strand starting at position 3896 of SEQ ID NO: 1241297
augucacauguacauauua

SEQ ID NO: 1261625 - RNA, 19 nt, Artificial Sequence
  Description of Artificial Sequence: Synthetic oligonucleotide
  Antisense strand to SEQ ID NO: 1261624
uaauauguacaugugacau

SEQ ID NO: 1261626 - RNA, 19 nt, Artificial Sequence
  Description of Artificial Sequence: Synthetic oligonucleotide
  Sense strand starting at position 149 of SEQ ID NO: 1241298
uucucaagguuucuagaug

SEQ ID NO: 1261627 - RNA, 19 nt, Artificial Sequence
  Description of Artificial Sequence: Synthetic oligonucleotide
  Antisense strand to SEQ ID NO: 1261626
caucuagaaaccuugagaa

SEQ ID NO: 1261628 - RNA, 19 nt, Artificial Sequence
  Description of Artificial Sequence: Synthetic oligonucleotide
  Sense strand starting at position 436 of SEQ ID NO: 1241298
aaauguaaacugugauuag

SEQ ID NO: 1261629 - RNA, 19 nt, Artificial Sequence
  Description of Artificial Sequence: Synthetic oligonucleotide
  Antisense strand to SEQ ID NO: 1261628
cuaaucacaguuuacauuu

SEQ ID NO: 1261630 - RNA, 19 nt, Artificial Sequence
  Description of Artificial Sequence: Synthetic oligonucleotide
  Sense strand starting at position 439 of SEQ ID NO: 1241298
uguaaacugugauuagauu

SEQ ID NO: 1261631 - RNA, 19 nt, Artificial Sequence
  Description of Artificial Sequence: Synthetic oligonucleotide
  Antisense strand to SEQ ID NO: 1261630
aaucuaaucacaguuuaca

SEQ ID NO: 1261632 - RNA, 19 nt, Artificial Sequence
  Description of Artificial Sequence: Synthetic oligonucleotide
  Sense strand starting at position 479 of SEQ ID NO: 1241298
uacgaaauguguccuaaac

SEQ ID NO: 1261633 - RNA, 19 nt, Artificial Sequence
  Description of Artificial Sequence: Synthetic oligonucleotide
  Antisense strand to SEQ ID NO: 1261632
guuuaggacacauuucgua

SEQ ID NO: 1261634 - RNA, 19 nt, Artificial Sequence
  Description of Artificial Sequence: Synthetic oligonucleotide
  Sense strand starting at position 513 of SEQ ID NO: 1241298
agaaacuucuaugucuuga

SEQ ID NO: 1261635 - RNA, 19 nt, Artificial Sequence
  Description of Artificial Sequence: Synthetic oligonucleotide
  Antisense strand to SEQ ID NO: 1261634
ucaagacauagaaguuucu

SEQ ID NO: 1261636 - RNA, 19 nt, Artificial Sequence
  Description of Artificial Sequence: Synthetic oligonucleotide
  Sense strand starting at position 518 of SEQ ID NO: 1241298
cuucuaugucuugagcaag

SEQ ID NO: 1261637 - RNA, 19 nt, Artificial Sequence
  Description of Artificial Sequence: Synthetic oligonucleotide
  Antisense strand to SEQ ID NO: 1261636
cuugcucaagacauagaag

SEQ ID NO: 1261638 - RNA, 19 nt, Artificial Sequence
  Description of Artificial Sequence: Synthetic oligonucleotide
  Sense strand starting at position 521 of SEQ ID NO: 1241298
cuaugucuugagcaagacu

SEQ ID NO: 1261639 - RNA, 19 nt, Artificial Sequence
  Description of Artificial Sequence: Synthetic oligonucleotide
  Antisense strand to SEQ ID NO: 1261638
agucuugcucaagacauag

SEQ ID NO: 1261640 - RNA, 19 nt, Artificial Sequence
  Description of Artificial Sequence: Synthetic oligonucleotide
  Sense strand starting at position 524 of SEQ ID NO: 1241298
ugucuugagcaagacuuaa

SEQ ID NO: 1261641 - RNA, 19 nt, Artificial Sequence
  Description of Artificial Sequence: Synthetic oligonucleotide
  Antisense strand to SEQ ID NO: 1261640
uuaagucuugcucaagaca

SEQ ID NO: 1261642 - RNA, 19 nt, Artificial Sequence
  Description of Artificial Sequence: Synthetic oligonucleotide
  Sense strand starting at position 643 of SEQ ID NO: 1241298
augccuguugaugaacaga

SEQ ID NO: 1261643 - RNA, 19 nt, Artificial Sequence
  Description of Artificial Sequence: Synthetic oligonucleotide
  Antisense strand to SEQ ID NO: 1261642
ucuguucaucaacaggcau

SEQ ID NO: 1261644 - RNA, 19 nt, Artificial Sequence
  Description of Artificial Sequence: Synthetic oligonucleotide
  Sense strand starting at position 653 of SEQ ID NO: 1241298
augaacagauccuuauagu

SEQ ID NO: 1261645 - RNA, 19 nt, Artificial Sequence
  Description of Artificial Sequence: Synthetic oligonucleotide
  Antisense strand to SEQ ID NO: 1261644
acuauaaggaucuguucau

SEQ ID NO: 1261646 - RNA, 19 nt, Artificial Sequence
  Description of Artificial Sequence: Synthetic oligonucleotide
  Sense strand starting at position 667 of SEQ ID NO: 1241298
auaguuuccuucuucuaga

SEQ ID NO: 1261647 - RNA, 19 nt, Artificial Sequence
  Description of Artificial Sequence: Synthetic oligonucleotide
  Antisense strand to SEQ ID NO: 1261646
ucuagaagaaggaaacuau

SEQ ID NO: 1261648 - RNA, 19 nt, Artificial Sequence
  Description of Artificial Sequence: Synthetic oligonucleotide
  Sense strand starting at position 720 of SEQ ID NO: 1241298
aggagucaaagauguuaau

SEQ ID NO: 1261649 - RNA, 19 nt, Artificial Sequence
  Description of Artificial Sequence: Synthetic oligonucleotide
  Antisense strand to SEQ ID NO: 1261648
auuaacaucuuugacuccu

SEQ ID NO: 1261650 - RNA, 19 nt, Artificial Sequence
  Description of Artificial Sequence: Synthetic oligonucleotide
  Sense strand starting at position 837 of SEQ ID NO: 1241298
cucacuagacaccgaguua

SEQ ID NO: 1261651 - RNA, 19 nt, Artificial Sequence
  Description of Artificial Sequence: Synthetic oligonucleotide
  Antisense strand to SEQ ID NO: 1261650
uaacucggugucuagugag

SEQ ID NO: 1261652 - RNA, 19 nt, Artificial Sequence
  Description of Artificial Sequence: Synthetic oligonucleotide
  Sense strand starting at position 886 of SEQ ID NO: 1241298
auggaaugcccauguaaau

SEQ ID NO: 1261653 - RNA, 19 nt, Artificial Sequence
  Description of Artificial Sequence: Synthetic oligonucleotide
  Antisense strand to SEQ ID NO: 1261652
auuuacaugggcauuccau

SEQ ID NO: 1261654 - RNA, 19 nt, Artificial Sequence
  Description of Artificial Sequence: Synthetic oligonucleotide
  Sense strand starting at position 1103 of SEQ ID NO: 1241298
guguuagagggcaguuguu

SEQ ID NO: 1261655 - RNA, 19 nt, Artificial Sequence
  Description of Artificial Sequence: Synthetic oligonucleotide
  Antisense strand to SEQ ID NO: 1261654
aacaacugcccucuaacac

SEQ ID NO: 1261656 - RNA, 19 nt, Artificial Sequence
  Description of Artificial Sequence: Synthetic oligonucleotide
  Sense strand starting at position 1196 of SEQ ID NO: 1241298
ugcugacauggcuaaggaa

SEQ ID NO: 1261657 - RNA, 19 nt, Artificial Sequence
  Description of Artificial Sequence: Synthetic oligonucleotide
  Antisense strand to SEQ ID NO: 1261656
uuccuuagccaugucagca

SEQ ID NO: 1261658 - RNA, 19 nt, Artificial Sequence
  Description of Artificial Sequence: Synthetic oligonucleotide
  Sense strand starting at position 1239 of SEQ ID NO: 1241298
ccuaucaucuugccugaga

SEQ ID NO: 1261659 - RNA, 19 nt, Artificial Sequence
  Description of Artificial Sequence: Synthetic oligonucleotide
  Antisense strand to SEQ ID NO: 1261658
ucucaggcaagaugauagg

SEQ ID NO: 1261660 - RNA, 19 nt, Artificial Sequence
  Description of Artificial Sequence: Synthetic oligonucleotide
  Sense strand starting at position 1240 of SEQ ID NO: 1241298
cuaucaucuugccugagac

SEQ ID NO: 1261661 - RNA, 19 nt, Artificial Sequence
  Description of Artificial Sequence: Synthetic oligonucleotide
  Antisense strand to SEQ ID NO: 1261660
gucucaggcaagaugauag

SEQ ID NO: 1261662 - RNA, 19 nt, Artificial Sequence
  Description of Artificial Sequence: Synthetic oligonucleotide
  Sense strand starting at position 1438 of SEQ ID NO: 1241298
cagugucuugaaugaagac

SEQ ID NO: 1261663 - RNA, 19 nt, Artificial Sequence
  Description of Artificial Sequence: Synthetic oligonucleotide
  Antisense strand to SEQ ID NO: 1261662
gucuucauucaagacacug

SEQ ID NO: 1261664 - RNA, 19 nt, Artificial Sequence
  Description of Artificial Sequence: Synthetic oligonucleotide
  Sense strand starting at position 1554 of SEQ ID NO: 1241298
gguuucucaccgcaggauu

SEQ ID NO: 1261665 - RNA, 19 nt, Artificial Sequence
  Description of Artificial Sequence: Synthetic oligonucleotide
  Antisense strand to SEQ ID NO: 1261664
aauccugcggugagaaacc

SEQ ID NO: 1261666 - RNA, 19 nt, Artificial Sequence
  Description of Artificial Sequence: Synthetic oligonucleotide
  Sense strand starting at position 2132 of SEQ ID NO: 1241298
aggauaguggcgcacagau

SEQ ID NO: 1261667 - RNA, 19 nt, Artificial Sequence
  Description of Artificial Sequence: Synthetic oligonucleotide
  Antisense strand to SEQ ID NO: 1261666
aucugugcgccacuauccu

SEQ ID NO: 1261668 - RNA, 19 nt, Artificial Sequence
  Description of Artificial Sequence: Synthetic oligonucleotide
  Sense strand starting at position 2315 of SEQ ID NO: 1241298
agaacagaugucugauucu

SEQ ID NO: 1261669 - RNA, 19 nt, Artificial Sequence
  Description of Artificial Sequence: Synthetic oligonucleotide
  Antisense strand to SEQ ID NO: 1261668
agaaucagacaucuguucu

SEQ ID NO: 1261670 - RNA, 19 nt, Artificial Sequence
  Description of Artificial Sequence: Synthetic oligonucleotide
  Sense strand starting at position 2318 of SEQ ID NO: 1241298
acagaugucugauucuaag

SEQ ID NO: 1261671 - RNA, 19 nt, Artificial Sequence
  Description of Artificial Sequence: Synthetic oligonucleotide
  Antisense strand to SEQ ID NO: 1261670
cuuagaaucagacaucugu

SEQ ID NO: 1261672 - RNA, 19 nt, Artificial Sequence
  Description of Artificial Sequence: Synthetic oligonucleotide
  Sense strand starting at position 2333 of SEQ ID NO: 1241298
uaaggagccaguggugaaa

SEQ ID NO: 1261673 - RNA, 19 nt, Artificial Sequence
  Description of Artificial Sequence: Synthetic oligonucleotide
  Antisense strand to SEQ ID NO: 1261672
uuucaccacuggcuccuua

SEQ ID NO: 1261674 - RNA, 19 nt, Artificial Sequence
  Description of Artificial Sequence: Synthetic oligonucleotide
  Sense strand starting at position 2472 of SEQ ID NO: 1241298
aaggccuuucgcguuagau

SEQ ID NO: 1261675 - RNA, 19 nt, Artificial Sequence
  Description of Artificial Sequence: Synthetic oligonucleotide
  Antisense strand to SEQ ID NO: 1261674
aucuaacgcgaaaggccuu

SEQ ID NO: 1261676 - RNA, 19 nt, Artificial Sequence
  Description of Artificial Sequence: Synthetic oligonucleotide
  Sense strand starting at position 2473 of SEQ ID NO: 1241298
aggccuuucgcguuagauc

SEQ ID NO: 1261677 - RNA, 19 nt, Artificial Sequence
  Description of Artificial Sequence: Synthetic oligonucleotide
  Antisense strand to SEQ ID NO: 1261676
gaucuaacgcgaaaggccu

SEQ ID NO: 1261678 - RNA, 19 nt, Artificial Sequence
  Description of Artificial Sequence: Synthetic oligonucleotide
  Sense strand starting at position 2499 of SEQ ID NO: 1241298
ccagguacuuccucgaacu

SEQ ID NO: 1261679 - RNA, 19 nt, Artificial Sequence
  Description of Artificial Sequence: Synthetic oligonucleotide
  Antisense strand to SEQ ID NO: 1261678
aguucgaggaaguaccugg

SEQ ID NO: 1261680 - RNA, 19 nt, Artificial Sequence
  Description of Artificial Sequence: Synthetic oligonucleotide
  Sense strand starting at position 2501 of SEQ ID NO: 1241298
agguacuuccucgaacuca

SEQ ID NO: 1261681 - RNA, 19 nt, Artificial Sequence
  Description of Artificial Sequence: Synthetic oligonucleotide
  Antisense strand to SEQ ID NO: 1261680
ugaguucgaggaaguaccu

SEQ ID NO: 1261682 - RNA, 19 nt, Artificial Sequence
  Description of Artificial Sequence: Synthetic oligonucleotide
  Sense strand starting at position 2709 of SEQ ID NO: 1241298
agucuuaacuggcuuuaag

SEQ ID NO: 1261683 - RNA, 19 nt, Artificial Sequence
  Description of Artificial Sequence: Synthetic oligonucleotide
  Antisense strand to SEQ ID NO: 1261682
cuuaaagccaguuaagacu

SEQ ID NO: 1261684 - RNA, 19 nt, Artificial Sequence
  Description of Artificial Sequence: Synthetic oligonucleotide
  Sense strand starting at position 2864 of SEQ ID NO: 1241298
aggguugugauccagaucu

SEQ ID NO: 1261685 - RNA, 19 nt, Artificial Sequence
  Description of Artificial Sequence: Synthetic oligonucleotide
  Antisense strand to SEQ ID NO: 1261684
agaucuggaucacaacccu

SEQ ID NO: 1261686 - RNA, 19 nt, Artificial Sequence
  Description of Artificial Sequence: Synthetic oligonucleotide
  Sense strand starting at position 2866 of SEQ ID NO: 1241298
gguugugauccagaucucu

SEQ ID NO: 1261687 - RNA, 19 nt, Artificial Sequence
  Description of Artificial Sequence: Synthetic oligonucleotide
  Antisense strand to SEQ ID NO: 1261686
agagaucuggaucacaacc

SEQ ID NO: 1261688 - RNA, 19 nt, Artificial Sequence
  Description of Artificial Sequence: Synthetic oligonucleotide
  Sense strand starting at position 2986 of SEQ ID NO: 1241298
gguugauaaagaugagguc

SEQ ID NO: 1261689 - RNA, 19 nt, Artificial Sequence
  Description of Artificial Sequence: Synthetic oligonucleotide
  Antisense strand to SEQ ID NO: 1261688
gaccucaucuuuaucaacc

SEQ ID NO: 1261690 - RNA, 19 nt, Artificial Sequence
  Description of Artificial Sequence: Synthetic oligonucleotide
  Sense strand starting at position 3159 of SEQ ID NO: 1241298
guccuugaggcagagaagu

SEQ ID NO: 1261691 - RNA, 19 nt, Artificial Sequence
  Description of Artificial Sequence: Synthetic oligonucleotide
  Antisense strand to SEQ ID NO: 1261690
acuucucugccucaaggac

SEQ ID NO: 1261692 - RNA, 19 nt, Artificial Sequence
  Description of Artificial Sequence: Synthetic oligonucleotide
  Sense strand starting at position 3176 of SEQ ID NO: 1241298
guuaguuuggacgggaaga

SEQ ID NO: 1261693 - RNA, 19 nt, Artificial Sequence
  Description of Artificial Sequence: Synthetic oligonucleotide
  Antisense strand to SEQ ID NO: 1261692
ucuucccguccaaacuaac

SEQ ID NO: 1261694 - RNA, 19 nt, Artificial Sequence
  Description of Artificial Sequence: Synthetic oligonucleotide
  Sense strand starting at position 3178 of SEQ ID NO: 1241298
uaguuuggacgggaagagu

SEQ ID NO: 1261695 - RNA, 19 nt, Artificial Sequence
  Description of Artificial Sequence: Synthetic oligonucleotide
  Antisense strand to SEQ ID NO: 1261694
acucuucccguccaaacua

SEQ ID NO: 1261696 - RNA, 19 nt, Artificial Sequence
  Description of Artificial Sequence: Synthetic oligonucleotide
  Sense strand starting at position 3669 of SEQ ID NO: 1241298
ggugguauauacuuguuaa

SEQ ID NO: 1261697 - RNA, 19 nt, Artificial Sequence
  Description of Artificial Sequence: Synthetic oligonucleotide
  Antisense strand to SEQ ID NO: 1261696
uuaacaaguauauaccacc

SEQ ID NO: 1261698 - RNA, 19 nt, Artificial Sequence
  Description of Artificial Sequence: Synthetic oligonucleotide
  Sense strand starting at position 3672 of SEQ ID NO: 1241298
gguauauacuuguuaacaa

SEQ ID NO: 1261699 - RNA, 19 nt, Artificial Sequence
  Description of Artificial Sequence: Synthetic oligonucleotide
  Antisense strand to SEQ ID NO: 1261698
uuguuaacaaguauauacc

SEQ ID NO: 1261700 - RNA, 19 nt, Artificial Sequence
  Description of Artificial Sequence: Synthetic oligonucleotide
  Sense strand starting at position 3845 of SEQ ID NO: 1241298
acaccagcucagugagaua

SEQ ID NO: 1261701 - RNA, 19 nt, Artificial Sequence
  Description of Artificial Sequence: Synthetic oligonucleotide
  Antisense strand to SEQ ID NO: 1261700
uaucucacugagcuggugu

SEQ ID NO: 1261702 - RNA, 19 nt, Artificial Sequence
  Description of Artificial Sequence: Synthetic oligonucleotide
  Sense strand starting at position 3850 of SEQ ID NO: 1241298
agcucagugagauauugac

SEQ ID NO: 1261703 - RNA, 19 nt, Artificial Sequence
  Description of Artificial Sequence: Synthetic oligonucleotide
  Antisense strand to SEQ ID NO: 1261702
gucaauaucucacugagcu

SEQ ID NO: 1261704 - RNA, 19 nt, Artificial Sequence
  Description of Artificial Sequence: Synthetic oligonucleotide
  Sense strand starting at position 3856 of SEQ ID NO: 1241298
gugagauauugacuccacu

SEQ ID NO: 1261705 - RNA, 19 nt, Artificial Sequence
  Description of Artificial Sequence: Synthetic oligonucleotide
  Antisense strand to SEQ ID NO: 1261704
aguggagucaauaucucac

SEQ ID NO: 1261706 - RNA, 19 nt, Artificial Sequence
  Description of Artificial Sequence: Synthetic oligonucleotide
  Sense strand starting at position 240 of SEQ ID NO: 1241299
gggaaugguaaagguauua

SEQ ID NO: 1261707 - RNA, 19 nt, Artificial Sequence
  Description of Artificial Sequence: Synthetic oligonucleotide
  Antisense strand to SEQ ID NO: 1261706
uaauaccuuuaccauuccc

SEQ ID NO: 1261708 - RNA, 19 nt, Artificial Sequence
  Description of Artificial Sequence: Synthetic oligonucleotide
  Sense strand starting at position 308 of SEQ ID NO: 1241299
uuagcagaacuuugauuau

SEQ ID NO: 1261709 - RNA, 19 nt, Artificial Sequence
  Description of Artificial Sequence: Synthetic oligonucleotide
  Antisense strand to SEQ ID NO: 1261708
auaaucaaaguucugcuaa

SEQ ID NO: 1261710 - RNA, 19 nt, Artificial Sequence
  Description of Artificial Sequence: Synthetic oligonucleotide
  Sense strand starting at position 311 of SEQ ID NO: 1241299
gcagaacuuugauuauaau

SEQ ID NO: 1261711 - RNA, 19 nt, Artificial Sequence
  Description of Artificial Sequence: Synthetic oligonucleotide
  Antisense strand to SEQ ID NO: 1261710
auuauaaucaaaguucugc

SEQ ID NO: 1261712 - RNA, 19 nt, Artificial Sequence
  Description of Artificial Sequence: Synthetic oligonucleotide
  Sense strand starting at position 404 of SEQ ID NO: 1241299
aguuauccacaauguuuau

SEQ ID NO: 1261713 - RNA, 19 nt, Artificial Sequence
  Description of Artificial Sequence: Synthetic oligonucleotide
  Antisense strand to SEQ ID NO: 1261712
auaaacauuguggauaacu

SEQ ID NO: 1261714 - RNA, 19 nt, Artificial Sequence
  Description of Artificial Sequence: Synthetic oligonucleotide
  Sense strand starting at position 960 of SEQ ID NO: 1241299
cuccauuaagagugacuua

SEQ ID NO: 1261715 - RNA, 19 nt, Artificial Sequence
  Description of Artificial Sequence: Synthetic oligonucleotide
  Antisense strand to SEQ ID NO: 1261714
uaagucacucuuaauggag

SEQ ID NO: 1261716 - RNA, 19 nt, Artificial Sequence
  Description of Artificial Sequence: Synthetic oligonucleotide
  Sense strand starting at position 963 of SEQ ID NO: 1241299
cauuaagagugacuuaagu

SEQ ID NO: 1261717 - RNA, 19 nt, Artificial Sequence
  Description of Artificial Sequence: Synthetic oligonucleotide
  Antisense strand to SEQ ID NO: 1261716
acuuaagucacucuuaaug

SEQ ID NO: 1261718 - RNA, 19 nt, Artificial Sequence
  Description of Artificial Sequence: Synthetic oligonucleotide
  Sense strand starting at position 1215 of SEQ ID NO: 1241299
agccgcaaucgugccauua

SEQ ID NO: 1261719 - RNA, 19 nt, Artificial Sequence
  Description of Artificial Sequence: Synthetic oligonucleotide
  Antisense strand to SEQ ID NO: 1261718
uaauggcacgauugcggcu

SEQ ID NO: 1261720 - RNA, 19 nt, Artificial Sequence
  Description of Artificial Sequence: Synthetic oligonucleotide
  Sense strand starting at position 1216 of SEQ ID NO: 1241299
gccgcaaucgugccauuau

SEQ ID NO: 1261721 - RNA, 19 nt, Artificial Sequence
  Description of Artificial Sequence: Synthetic oligonucleotide
  Antisense strand to SEQ ID NO: 1261720
auaauggcacgauugcggc

SEQ ID NO: 1261722 - RNA, 19 nt, Artificial Sequence
  Description of Artificial Sequence: Synthetic oligonucleotide
  Sense strand starting at position 1418 of SEQ ID NO: 1241299
gggugcuguaaguaaacua

SEQ ID NO: 1261723 - RNA, 19 nt, Artificial Sequence
  Description of Artificial Sequence: Synthetic oligonucleotide
  Antisense strand to SEQ ID NO: 1261722
uaguuuacuuacagcaccc

SEQ ID NO: 1261724 - RNA, 19 nt, Artificial Sequence
  Description of Artificial Sequence: Synthetic oligonucleotide
  Sense strand starting at position 1502 of SEQ ID NO: 1241299
uugagaaauggcuagcaac

SEQ ID NO: 1261725 - RNA, 19 nt, Artificial Sequence
  Description of Artificial Sequence: Synthetic oligonucleotide
  Antisense strand to SEQ ID NO: 1261724
guugcuagccauuucucaa

SEQ ID NO: 1261726 - RNA, 19 nt, Artificial Sequence
  Description of Artificial Sequence: Synthetic oligonucleotide
  Sense strand starting at position 1566 of SEQ ID NO: 1241299
guguucuagcgaucuugcu

SEQ ID NO: 1261727 - RNA, 19 nt, Artificial Sequence
  Description of Artificial Sequence: Synthetic oligonucleotide
  Antisense strand to SEQ ID NO: 1261726
agcaagaucgcuagaacac

SEQ ID NO: 1261728 - RNA, 19 nt, Artificial Sequence
  Description of Artificial Sequence: Synthetic oligonucleotide
  Sense strand starting at position 1603 of SEQ ID NO: 1241299
ugagguuccgcauacagau

SEQ ID NO: 1261729 - RNA, 19 nt, Artificial Sequence
  Description of Artificial Sequence: Synthetic oligonucleotide
  Antisense strand to SEQ ID NO: 1261728
aucuguaugcggaaccuca

SEQ ID NO: 1261730 - RNA, 19 nt, Artificial Sequence
  Description of Artificial Sequence: Synthetic oligonucleotide
  Sense strand starting at position 1609 of SEQ ID NO: 1241299
uccgcauacagaugugaua

SEQ ID NO: 1261731 - RNA, 19 nt, Artificial Sequence
  Description of Artificial Sequence: Synthetic oligonucleotide
  Antisense strand to SEQ ID NO: 1261730
uaucacaucuguaugcgga

SEQ ID NO: 1261732 - RNA, 19 nt, Artificial Sequence
  Description of Artificial Sequence: Synthetic oligonucleotide
  Sense strand starting at position 1611 of SEQ ID NO: 1241299
cgcauacagaugugauaac

SEQ ID NO: 1261733 - RNA, 19 nt, Artificial Sequence
  Description of Artificial Sequence: Synthetic oligonucleotide
  Antisense strand to SEQ ID NO: 1261732
guuaucacaucuguaugcg

SEQ ID NO: 1261734 - RNA, 19 nt, Artificial Sequence
  Description of Artificial Sequence: Synthetic oligonucleotide
  Sense strand starting at position 1618 of SEQ ID NO: 1241299
agaugugauaacuggcgau

SEQ ID NO: 1261735 - RNA, 19 nt, Artificial Sequence
  Description of Artificial Sequence: Synthetic oligonucleotide
  Antisense strand to SEQ ID NO: 1261734
aucgccaguuaucacaucu

SEQ ID NO: 1261736 - RNA, 19 nt, Artificial Sequence
  Description of Artificial Sequence: Synthetic oligonucleotide
  Sense strand starting at position 1660 of SEQ ID NO: 1241299
ccagguguuggccacaaca

SEQ ID NO: 1261737 - RNA, 19 nt, Artificial Sequence
  Description of Artificial Sequence: Synthetic oligonucleotide
  Antisense strand to SEQ ID NO: 1261736
uguuguggccaacaccugg

SEQ ID NO: 1261738 - RNA, 19 nt, Artificial Sequence
  Description of Artificial Sequence: Synthetic oligonucleotide
  Sense strand starting at position 1662 of SEQ ID NO: 1241299
agguguuggccacaacaca

SEQ ID NO: 1261739 - RNA, 19 nt, Artificial Sequence
  Description of Artificial Sequence: Synthetic oligonucleotide
  Antisense strand to SEQ ID NO: 1261738
uguguuguggccaacaccu

SEQ ID NO: 1261740 - RNA, 19 nt, Artificial Sequence
  Description of Artificial Sequence: Synthetic oligonucleotide
  Sense strand starting at position 1764 of SEQ ID NO: 1241299
auagaaugucauggcugga

SEQ ID NO: 1261741 - RNA, 19 nt, Artificial Sequence
  Description of Artificial Sequence: Synthetic oligonucleotide
  Antisense strand to SEQ ID NO: 1261740
uccagccaugacauucuau

SEQ ID NO: 1261742 - RNA, 19 nt, Artificial Sequence
  Description of Artificial Sequence: Synthetic oligonucleotide
  Sense strand starting at position 1767 of SEQ ID NO: 1241299
gaaugucauggcuggauau

SEQ ID NO: 1261743 - RNA, 19 nt, Artificial Sequence
  Description of Artificial Sequence: Synthetic oligonucleotide
  Antisense strand to SEQ ID NO: 1261742
auauccagccaugacauuc

SEQ ID NO: 1261744 - RNA, 19 nt, Artificial Sequence
  Description of Artificial Sequence: Synthetic oligonucleotide
  Sense strand starting at position 1768 of SEQ ID NO: 1241299
aaugucauggcuggauauu

SEQ ID NO: 1261745 - RNA, 19 nt, Artificial Sequence
  Description of Artificial Sequence: Synthetic oligonucleotide
  Antisense strand to SEQ ID NO: 1261744
aauauccagccaugacauu

SEQ ID NO: 1261746 - RNA, 19 nt, Artificial Sequence
  Description of Artificial Sequence: Synthetic oligonucleotide
  Sense strand starting at position 1806 of SEQ ID NO: 1241299
ggaggaagguauguauaug

SEQ ID NO: 1261747 - RNA, 19 nt, Artificial Sequence
  Description of Artificial Sequence: Synthetic oligonucleotide
  Antisense strand to SEQ ID NO: 1261746
cauauacauaccuuccucc

SEQ ID NO: 1261748 - RNA, 19 nt, Artificial Sequence
  Description of Artificial Sequence: Synthetic oligonucleotide
  Sense strand starting at position 1901 of SEQ ID NO: 1241299
uuauauccaugucuugaga

SEQ ID NO: 1261749 - RNA, 19 nt, Artificial Sequence
  Description of Artificial Sequence: Synthetic oligonucleotide
  Antisense strand to SEQ ID NO: 1261748
ucucaagacauggauauaa

SEQ ID NO: 1261750 - RNA, 19 nt, Artificial Sequence
  Description of Artificial Sequence: Synthetic oligonucleotide
  Sense strand starting at position 1951 of SEQ ID NO: 1241299
gcacaaaggucauuauaau

SEQ ID NO: 1261751 - RNA, 19 nt, Artificial Sequence
  Description of Artificial Sequence: Synthetic oligonucleotide
  Antisense strand to SEQ ID NO: 1261750
auuauaaugaccuuugugc

SEQ ID NO: 1261752 - RNA, 19 nt, Artificial Sequence
  Description of Artificial Sequence: Synthetic oligonucleotide
  Sense strand starting at position 1976 of SEQ ID NO: 1241299
aaagauucgugggcaagua

SEQ ID NO: 1261753 - RNA, 19 nt, Artificial Sequence
  Description of Artificial Sequence: Synthetic oligonucleotide
  Antisense strand to SEQ ID NO: 1261752
uacuugcccacgaaucuuu

SEQ ID NO: 1261754 - RNA, 19 nt, Artificial Sequence
  Description of Artificial Sequence: Synthetic oligonucleotide
  Sense strand starting at position 1977 of SEQ ID NO: 1241299
aagauucgugggcaaguau

SEQ ID NO: 1261755 - RNA, 19 nt, Artificial Sequence
  Description of Artificial Sequence: Synthetic oligonucleotide
  Antisense strand to SEQ ID NO: 1261754
auacuugcccacgaaucuu

SEQ ID NO: 1261756 - RNA, 19 nt, Artificial Sequence
  Description of Artificial Sequence: Synthetic oligonucleotide
  Sense strand starting at position 1989 of SEQ ID NO: 1241299
caaguauaauggcuguaaa

SEQ ID NO: 1261757 - RNA, 19 nt, Artificial Sequence
  Description of Artificial Sequence: Synthetic oligonucleotide
  Antisense strand to SEQ ID NO: 1261756
uuuacagccauuauacuug

SEQ ID NO: 1261758 - RNA, 19 nt, Artificial Sequence
  Description of Artificial Sequence: Synthetic oligonucleotide
  Sense strand starting at position 1990 of SEQ ID NO: 1241299
aaguauaauggcuguaaag

SEQ ID NO: 1261759 - RNA, 19 nt, Artificial Sequence
  Description of Artificial Sequence: Synthetic oligonucleotide
  Antisense strand to SEQ ID NO: 1261758
cuuuacagccauuauacuu

SEQ ID NO: 1261760 - RNA, 19 nt, Artificial Sequence
  Description of Artificial Sequence: Synthetic oligonucleotide
  Sense strand starting at position 1992 of SEQ ID NO: 1241299
guauaauggcuguaaagaa

SEQ ID NO: 1261761 - RNA, 19 nt, Artificial Sequence
  Description of Artificial Sequence: Synthetic oligonucleotide
  Antisense strand to SEQ ID NO: 1261760
uucuuuacagccauuauac

SEQ ID NO: 1261762 - RNA, 19 nt, Artificial Sequence
  Description of Artificial Sequence: Synthetic oligonucleotide
  Sense strand starting at position 2080 of SEQ ID NO: 1241299
aauacauacguuuguauga

SEQ ID NO: 1261763 - RNA, 19 nt, Artificial Sequence
  Description of Artificial Sequence: Synthetic oligonucleotide
  Antisense strand to SEQ ID NO: 1261762
ucauacaaacguauguauu

SEQ ID NO: 1261764 - RNA, 19 nt, Artificial Sequence
  Description of Artificial Sequence: Synthetic oligonucleotide
  Sense strand starting at position 2154 of SEQ ID NO: 1241299
gaaugugaggcaugaaacu

SEQ ID NO: 1261765 - RNA, 19 nt, Artificial Sequence
  Description of Artificial Sequence: Synthetic oligonucleotide
  Antisense strand to SEQ ID NO: 1261764
aguuucaugccucacauuc

SEQ ID NO: 1261766 - RNA, 19 nt, Artificial Sequence
  Description of Artificial Sequence: Synthetic oligonucleotide
  Sense strand starting at position 2205 of SEQ ID NO: 1241299
uuguuuguuuaaucaagag

SEQ ID NO: 1261767 - RNA, 19 nt, Artificial Sequence
  Description of Artificial Sequence: Synthetic oligonucleotide
  Antisense strand to SEQ ID NO: 1261766
cucuugauuaaacaaacaa

SEQ ID NO: 1261768 - RNA, 19 nt, Artificial Sequence
  Description of Artificial Sequence: Synthetic oligonucleotide
  Sense strand starting at position 2220 of SEQ ID NO: 1241299
agaguuuaagcacaagagu

SEQ ID NO: 1261769 - RNA, 19 nt, Artificial Sequence
  Description of Artificial Sequence: Synthetic oligonucleotide
  Antisense strand to SEQ ID NO: 1261768
acucuugugcuuaaacucu

SEQ ID NO: 1261770 - RNA, 19 nt, Artificial Sequence
  Description of Artificial Sequence: Synthetic oligonucleotide
  Sense strand starting at position 2223 of SEQ ID NO: 1241299
guuuaagcacaagaguuua

SEQ ID NO: 1261771 - RNA, 19 nt, Artificial Sequence
  Description of Artificial Sequence: Synthetic oligonucleotide
  Antisense strand to SEQ ID NO: 1261770
uaaacucuugugcuuaaac

SEQ ID NO: 1261772 - RNA, 19 nt, Artificial Sequence
  Description of Artificial Sequence: Synthetic oligonucleotide
  Sense strand starting at position 2231 of SEQ ID NO: 1241299
acaagaguuuaaucacgaa

SEQ ID NO: 1261773 - RNA, 19 nt, Artificial Sequence
  Description of Artificial Sequence: Synthetic oligonucleotide
  Antisense strand to SEQ ID NO: 1261772
uucgugauuaaacucuugu

SEQ ID NO: 1261774 - RNA, 19 nt, Artificial Sequence
  Description of Artificial Sequence: Synthetic oligonucleotide
  Sense strand starting at position 2335 of SEQ ID NO: 1241299
ccaaguaaacgcuaagaga

SEQ ID NO: 1261775 - RNA, 19 nt, Artificial Sequence
  Description of Artificial Sequence: Synthetic oligonucleotide
  Antisense strand to SEQ ID NO: 1261774
ucucuuagcguuuacuugg

SEQ ID NO: 1261776 - RNA, 19 nt, Artificial Sequence
  Description of Artificial Sequence: Synthetic oligonucleotide
  Sense strand starting at position 2773 of SEQ ID NO: 1241299
auggguauuagcugaagag

SEQ ID NO: 1261777 - RNA, 19 nt, Artificial Sequence
  Description of Artificial Sequence: Synthetic oligonucleotide
  Antisense strand to SEQ ID NO: 1261776
cucuucagcuaauacccau

SEQ ID NO: 1261778 - RNA, 19 nt, Artificial Sequence
  Description of Artificial Sequence: Synthetic oligonucleotide
  Sense strand starting at position 2789 of SEQ ID NO: 1241299
gagacugaccaguguaacu

SEQ ID NO: 1261779 - RNA, 19 nt, Artificial Sequence
  Description of Artificial Sequence: Synthetic oligonucleotide
  Antisense strand to SEQ ID NO: 1261778
aguuacacuggucagucuc

SEQ ID NO: 1261780 - RNA, 19 nt, Artificial Sequence
  Description of Artificial Sequence: Synthetic oligonucleotide
  Sense strand starting at position 2806 of SEQ ID NO: 1241299
cugugucacuuaucaaucu

SEQ ID NO: 1261781 - RNA, 19 nt, Artificial Sequence
  Description of Artificial Sequence: Synthetic oligonucleotide
  Antisense strand to SEQ ID NO: 1261780
agauugauaagugacacag

SEQ ID NO: 1261782 - RNA, 19 nt, Artificial Sequence
  Description of Artificial Sequence: Synthetic oligonucleotide
  Sense strand starting at position 3640 of SEQ ID NO: 1241299
ccaucauaguuaccuuuga

SEQ ID NO: 1261783 - RNA, 19 nt, Artificial Sequence
  Description of Artificial Sequence: Synthetic oligonucleotide
  Antisense strand to SEQ ID NO: 1261782
ucaaagguaacuaugaugg

SEQ ID NO: 1261784 - RNA, 19 nt, Artificial Sequence
  Description of Artificial Sequence: Synthetic oligonucleotide
  Sense strand starting at position 3738 of SEQ ID NO: 1241299
ugcugccaucuugaaguaa

SEQ ID NO: 1261785 - RNA, 19 nt, Artificial Sequence
  Description of Artificial Sequence: Synthetic oligonucleotide
  Antisense strand to SEQ ID NO: 1261784
uuacuucaagauggcagca

SEQ ID NO: 1261786 - RNA, 19 nt, Artificial Sequence
  Description of Artificial Sequence: Synthetic oligonucleotide
  Sense strand starting at position 70 of SEQ ID NO: 1241300
guccuaggcaucgguauuu

SEQ ID NO: 1261787 - RNA, 19 nt, Artificial Sequence
  Description of Artificial Sequence: Synthetic oligonucleotide
  Antisense strand to SEQ ID NO: 1261786
aaauaccgaugccuaggac

SEQ ID NO: 1261788 - RNA, 19 nt, Artificial Sequence
  Description of Artificial Sequence: Synthetic oligonucleotide
  Sense strand starting at position 86 of SEQ ID NO: 1241300
uuugguugucuccaccuaa

SEQ ID NO: 1261789 - RNA, 19 nt, Artificial Sequence
  Description of Artificial Sequence: Synthetic oligonucleotide
  Antisense strand to SEQ ID NO: 1261788
uuagguggagacaaccaaa

SEQ ID NO: 1261790 - RNA, 19 nt, Artificial Sequence
  Description of Artificial Sequence: Synthetic oligonucleotide
  Sense strand starting at position 437 of SEQ ID NO: 1241300
uucuuuacuugaucauugu

SEQ ID NO: 1261791 - RNA, 19 nt, Artificial Sequence
  Description of Artificial Sequence: Synthetic oligonucleotide
  Antisense strand to SEQ ID NO: 1261790
acaaugaucaaguaaagaa

SEQ ID NO: 1261792 - RNA, 19 nt, Artificial Sequence
  Description of Artificial Sequence: Synthetic oligonucleotide
  Sense strand starting at position 485 of SEQ ID NO: 1241300
ggaacaguucacuacggua

SEQ ID NO: 1261793 - RNA, 19 nt, Artificial Sequence
  Description of Artificial Sequence: Synthetic oligonucleotide
  Antisense strand to SEQ ID NO: 1261792
uaccguagugaacuguucc

SEQ ID NO: 1261794 - RNA, 19 nt, Artificial Sequence
  Description of Artificial Sequence: Synthetic oligonucleotide
  Sense strand starting at position 552 of SEQ ID NO: 1241300
aguggcacucaauaauuau

SEQ ID NO: 1261795 - RNA, 19 nt, Artificial Sequence
  Description of Artificial Sequence: Synthetic oligonucleotide
  Antisense strand to SEQ ID NO: 1261794
auaauuauugagugccacu

SEQ ID NO: 1261796 - RNA, 19 nt, Artificial Sequence
  Description of Artificial Sequence: Synthetic oligonucleotide
  Sense strand starting at position 580 of SEQ ID NO: 1241300
aaaugaauggcuuguacug

SEQ ID NO: 1261797 - RNA, 19 nt, Artificial Sequence
  Description of Artificial Sequence: Synthetic oligonucleotide
  Antisense strand to SEQ ID NO: 1261796
caguacaagccauucauuu

SEQ ID NO: 1261798 - RNA, 19 nt, Artificial Sequence
  Description of Artificial Sequence: Synthetic oligonucleotide
  Sense strand starting at position 606 of SEQ ID NO: 1241300
ucaucaguaccaugguuga

SEQ ID NO: 1261799 - RNA, 19 nt, Artificial Sequence
  Description of Artificial Sequence: Synthetic oligonucleotide
  Antisense strand to SEQ ID NO: 1261798
ucaaccaugguacugauga

SEQ ID NO: 1261800 - RNA, 19 nt, Artificial Sequence
  Description of Artificial Sequence: Synthetic oligonucleotide
  Sense strand starting at position 650 of SEQ ID NO: 1241300
guaacaaauugagagauaa

SEQ ID NO: 1261801 - RNA, 19 nt, Artificial Sequence
  Description of Artificial Sequence: Synthetic oligonucleotide
  Antisense strand to SEQ ID NO: 1261800
uuaucucucaauuuguuac

SEQ ID NO: 1261802 - RNA, 19 nt, Artificial Sequence
  Description of Artificial Sequence: Synthetic oligonucleotide
  Sense strand starting at position 797 of SEQ ID NO: 1241300
gucaauaucuacuugguau

SEQ ID NO: 1261803 - RNA, 19 nt, Artificial Sequence
  Description of Artificial Sequence: Synthetic oligonucleotide
  Antisense strand to SEQ ID NO: 1261802
auaccaaguagauauugac

SEQ ID NO: 1261804 - RNA, 19 nt, Artificial Sequence
  Description of Artificial Sequence: Synthetic oligonucleotide
  Sense strand starting at position 1085 of SEQ ID NO: 1241300
augggugaacguuauggua

SEQ ID NO: 1261805 - RNA, 19 nt, Artificial Sequence
  Description of Artificial Sequence: Synthetic oligonucleotide
  Antisense strand to SEQ ID NO: 1261804
uaccauaacguucacccau

SEQ ID NO: 1261806 - RNA, 19 nt, Artificial Sequence
  Description of Artificial Sequence: Synthetic oligonucleotide
  Sense strand starting at position 1092 of SEQ ID NO: 1241300
aacguuaugguauguacau

SEQ ID NO: 1261807 - RNA, 19 nt, Artificial Sequence
  Description of Artificial Sequence: Synthetic oligonucleotide
  Antisense strand to SEQ ID NO: 1261806
auguacauaccauaacguu

SEQ ID NO: 1261808 - RNA, 19 nt, Artificial Sequence
  Description of Artificial Sequence: Synthetic oligonucleotide
  Sense strand starting at position 1093 of SEQ ID NO: 1241300
acguuaugguauguacauu

SEQ ID NO: 1261809 - RNA, 19 nt, Artificial Sequence
  Description of Artificial Sequence: Synthetic oligonucleotide
  Antisense strand to SEQ ID NO: 1261808
aauguacauaccauaacgu

SEQ ID NO: 1261810 - RNA, 19 nt, Artificial Sequence
  Description of Artificial Sequence: Synthetic oligonucleotide
  Sense strand starting at position 1094 of SEQ ID NO: 1241300
cguuaugguauguacauua

SEQ ID NO: 1261811 - RNA, 19 nt, Artificial Sequence
  Description of Artificial Sequence: Synthetic oligonucleotide
  Antisense strand to SEQ ID NO: 1261810
uaauguacauaccauaacg

SEQ ID NO: 1261812 - RNA, 19 nt, Artificial Sequence
  Description of Artificial Sequence: Synthetic oligonucleotide
  Sense strand starting at position 1099 of SEQ ID NO: 1241300
ugguauguacauuauacuu

SEQ ID NO: 1261813 - RNA, 19 nt, Artificial Sequence
  Description of Artificial Sequence: Synthetic oligonucleotide
  Antisense strand to SEQ ID NO: 1261812
aaguauaauguacauacca

SEQ ID NO: 1261814 - RNA, 19 nt, Artificial Sequence
  Description of Artificial Sequence: Synthetic oligonucleotide
  Sense strand starting at position 1253 of SEQ ID NO: 1241300
gagcucugccaguaguuga

SEQ ID NO: 1261815 - RNA, 19 nt, Artificial Sequence
  Description of Artificial Sequence: Synthetic oligonucleotide
  Antisense strand to SEQ ID NO: 1261814
ucaacuacuggcagagcuc

SEQ ID NO: 1261816 - RNA, 19 nt, Artificial Sequence
  Description of Artificial Sequence: Synthetic oligonucleotide
  Sense strand starting at position 1353 of SEQ ID NO: 1241300
gaaccauauugggaugacu

SEQ ID NO: 1261817 - RNA, 19 nt, Artificial Sequence
  Description of Artificial Sequence: Synthetic oligonucleotide
  Antisense strand to SEQ ID NO: 1261816
agucaucccaauaugguuc

SEQ ID NO: 1261818 - RNA, 19 nt, Artificial Sequence
  Description of Artificial Sequence: Synthetic oligonucleotide
  Sense strand starting at position 1355 of SEQ ID NO: 1241300
accauauugggaugacugu

SEQ ID NO: 1261819 - RNA, 19 nt, Artificial Sequence
  Description of Artificial Sequence: Synthetic oligonucleotide
  Antisense strand to SEQ ID NO: 1261818
acagucaucccaauauggu

SEQ ID NO: 1261820 - RNA, 19 nt, Artificial Sequence
  Description of Artificial Sequence: Synthetic oligonucleotide
  Sense strand starting at position 2181 of SEQ ID NO: 1241300
cucccugauuggcucgaau

SEQ ID NO: 1261821 - RNA, 19 nt, Artificial Sequence
  Description of Artificial Sequence: Synthetic oligonucleotide
  Antisense strand to SEQ ID NO: 1261820
auucgagccaaucagggag

SEQ ID NO: 1261822 - RNA, 19 nt, Artificial Sequence
  Description of Artificial Sequence: Synthetic oligonucleotide
  Sense strand starting at position 2240 of SEQ ID NO: 1241300
gguuucuagccacaugcaa

SEQ ID NO: 1261823 - RNA, 19 nt, Artificial Sequence
  Description of Artificial Sequence: Synthetic oligonucleotide
  Antisense strand to SEQ ID NO: 1261822
uugcauguggcuagaaacc

SEQ ID NO: 1261824 - RNA, 19 nt, Artificial Sequence
  Description of Artificial Sequence: Synthetic oligonucleotide
  Sense strand starting at position 2625 of SEQ ID NO: 1241300
cccuaauggucccucugua

SEQ ID NO: 1261825 - RNA, 19 nt, Artificial Sequence
  Description of Artificial Sequence: Synthetic oligonucleotide
  Antisense strand to SEQ ID NO: 1261824
uacagagggaccauuaggg

SEQ ID NO: 1261826 - RNA, 19 nt, Artificial Sequence
  Description of Artificial Sequence: Synthetic oligonucleotide
  Sense strand starting at position 2730 of SEQ ID NO: 1241300
guaccuugcagcugaggaa

SEQ ID NO: 1261827 - RNA, 19 nt, Artificial Sequence
  Description of Artificial Sequence: Synthetic oligonucleotide
  Antisense strand to SEQ ID NO: 1261826
uuccucagcugcaagguac

SEQ ID NO: 1261828 - RNA, 19 nt, Artificial Sequence
  Description of Artificial Sequence: Synthetic oligonucleotide
  Sense strand starting at position 2925 of SEQ ID NO: 1241300
aguuuagugaggugacaag

SEQ ID NO: 1261829 - RNA, 19 nt, Artificial Sequence
  Description of Artificial Sequence: Synthetic oligonucleotide
  Antisense strand to SEQ ID NO: 1261828
cuugucaccucacuaaacu

SEQ ID NO: 1261830 - RNA, 19 nt, Artificial Sequence
  Description of Artificial Sequence: Synthetic oligonucleotide
  Sense strand starting at position 2946 of SEQ ID NO: 1241300
uugaucaaggguugcaaga

SEQ ID NO: 1261831 - RNA, 19 nt, Artificial Sequence
  Description of Artificial Sequence: Synthetic oligonucleotide
  Antisense strand to SEQ ID NO: 1261830
ucuugcaacccuugaucaa

SEQ ID NO: 1261832 - RNA, 19 nt, Artificial Sequence
  Description of Artificial Sequence: Synthetic oligonucleotide
  Sense strand starting at position 2955 of SEQ ID NO: 1241300
gguugcaagacugauuagu

SEQ ID NO: 1261833 - RNA, 19 nt, Artificial Sequence
  Description of Artificial Sequence: Synthetic oligonucleotide
  Antisense strand to SEQ ID NO: 1261832
acuaaucagucuugcaacc

SEQ ID NO: 1261834 - RNA, 19 nt, Artificial Sequence
  Description of Artificial Sequence: Synthetic oligonucleotide
  Sense strand starting at position 2957 of SEQ ID NO: 1241300
uugcaagacugauuaguga

SEQ ID NO: 1261835 - RNA, 19 nt, Artificial Sequence
  Description of Artificial Sequence: Synthetic oligonucleotide
  Antisense strand to SEQ ID NO: 1261834
ucacuaaucagucuugcaa

SEQ ID NO: 1261836 - RNA, 19 nt, Artificial Sequence
  Description of Artificial Sequence: Synthetic oligonucleotide
  Sense strand starting at position 2965 of SEQ ID NO: 1241300
cugauuagugacggauguu

SEQ ID NO: 1261837 - RNA, 19 nt, Artificial Sequence
  Description of Artificial Sequence: Synthetic oligonucleotide
  Antisense strand to SEQ ID NO: 1261836
aacauccgucacuaaucag

SEQ ID NO: 1261838 - RNA, 19 nt, Artificial Sequence
  Description of Artificial Sequence: Synthetic oligonucleotide
  Sense strand starting at position 2966 of SEQ ID NO: 1241300
ugauuagugacggauguuc

SEQ ID NO: 1261839 - RNA, 19 nt, Artificial Sequence
  Description of Artificial Sequence: Synthetic oligonucleotide
  Antisense strand to SEQ ID NO: 1261838
gaacauccgucacuaauca

SEQ ID NO: 1261840 - RNA, 19 nt, Artificial Sequence
  Description of Artificial Sequence: Synthetic oligonucleotide
  Sense strand starting at position 2968 of SEQ ID NO: 1241300
auuagugacggauguucaa

SEQ ID NO: 1261841 - RNA, 19 nt, Artificial Sequence
  Description of Artificial Sequence: Synthetic oligonucleotide
  Antisense strand to SEQ ID NO: 1261840
uugaacauccgucacuaau

SEQ ID NO: 1261842 - RNA, 19 nt, Artificial Sequence
  Description of Artificial Sequence: Synthetic oligonucleotide
  Sense strand starting at position 3251 of SEQ ID NO: 1241300
ccagguugcugagauuuac

SEQ ID NO: 1261843 - RNA, 19 nt, Artificial Sequence
  Description of Artificial Sequence: Synthetic oligonucleotide
  Antisense strand to SEQ ID NO: 1261842
guaaaucucagcaaccugg

SEQ ID NO: 1261844 - RNA, 19 nt, Artificial Sequence
  Description of Artificial Sequence: Synthetic oligonucleotide
  Sense strand starting at position 3427 of SEQ ID NO: 1241300
cuccuagaguuacuuucua

SEQ ID NO: 1261845 - RNA, 19 nt, Artificial Sequence
  Description of Artificial Sequence: Synthetic oligonucleotide
  Antisense strand to SEQ ID NO: 1261844
uagaaaguaacucuaggag

SEQ ID NO: 1261846 - RNA, 19 nt, Artificial Sequence
  Description of Artificial Sequence: Synthetic oligonucleotide
  Sense strand starting at position 3440 of SEQ ID NO: 1241300
uuucuaguuuggccucaga

SEQ ID NO: 1261847 - RNA, 19 nt, Artificial Sequence
  Description of Artificial Sequence: Synthetic oligonucleotide
  Antisense strand to SEQ ID NO: 1261846
ucugaggccaaacuagaaa

SEQ ID NO: 1261848 - RNA, 19 nt, Artificial Sequence
  Description of Artificial Sequence: Synthetic oligonucleotide
  Sense strand starting at position 3503 of SEQ ID NO: 1241300
gagaucgaaugcuuaacua

SEQ ID NO: 1261849 - RNA, 19 nt, Artificial Sequence
  Description of Artificial Sequence: Synthetic oligonucleotide
  Antisense strand to SEQ ID NO: 1261848
uaguuaagcauucgaucuc

SEQ ID NO: 1261850 - RNA, 19 nt, Artificial Sequence
  Description of Artificial Sequence: Synthetic oligonucleotide
  Sense strand starting at position 3570 of SEQ ID NO: 1241300
uccaguuuccggcaauaau

SEQ ID NO: 1261851 - RNA, 19 nt, Artificial Sequence
  Description of Artificial Sequence: Synthetic oligonucleotide
  Antisense strand to SEQ ID NO: 1261850
auuauugccggaaacugga

SEQ ID NO: 1261852 - RNA, 19 nt, Artificial Sequence
  Description of Artificial Sequence: Synthetic oligonucleotide
  Sense strand starting at position 3573 of SEQ ID NO: 1241300
aguuuccggcaauaaugaa

SEQ ID NO: 1261853 - RNA, 19 nt, Artificial Sequence
  Description of Artificial Sequence: Synthetic oligonucleotide
  Antisense strand to SEQ ID NO: 1261852
uucauuauugccggaaacu

SEQ ID NO: 1261854 - RNA, 19 nt, Artificial Sequence
  Description of Artificial Sequence: Synthetic oligonucleotide
  Sense strand starting at position 3592 of SEQ ID NO: 1241300
caaugccaccguuaguaau

SEQ ID NO: 1261855 - RNA, 19 nt, Artificial Sequence
  Description of Artificial Sequence: Synthetic oligonucleotide
  Antisense strand to SEQ ID NO: 1261854
auuacuaacgguggcauug

SEQ ID NO: 1261856 - RNA, 19 nt, Artificial Sequence
  Description of Artificial Sequence: Synthetic oligonucleotide
  Sense strand starting at position 3613 of SEQ ID NO: 1241300
uguaaaugucuuuguauag

SEQ ID NO: 1261857 - RNA, 19 nt, Artificial Sequence
  Description of Artificial Sequence: Synthetic oligonucleotide
  Antisense strand to SEQ ID NO: 1261856
cuauacaaagacauuuaca

SEQ ID NO: 1261858 - RNA, 19 nt, Artificial Sequence
  Description of Artificial Sequence: Synthetic oligonucleotide
  Sense strand starting at position 3614 of SEQ ID NO: 1241300
guaaaugucuuuguauaga

SEQ ID NO: 1261859 - RNA, 19 nt, Artificial Sequence
  Description of Artificial Sequence: Synthetic oligonucleotide
  Antisense strand to SEQ ID NO: 1261858
ucuauacaaagacauuuac

SEQ ID NO: 1261860 - RNA, 19 nt, Artificial Sequence
  Description of Artificial Sequence: Synthetic oligonucleotide
  Sense strand starting at position 3716 of SEQ ID NO: 1241300
aguucgggaguucgagaaa

SEQ ID NO: 1261861 - RNA, 19 nt, Artificial Sequence
  Description of Artificial Sequence: Synthetic oligonucleotide
  Antisense strand to SEQ ID NO: 1261860
uuucucgaacucccgaacu

SEQ ID NO: 1261862 - RNA, 19 nt, Artificial Sequence
  Description of Artificial Sequence: Synthetic oligonucleotide
  Sense strand starting at position 3719 of SEQ ID NO: 1241300
ucgggaguucgagaaauca

SEQ ID NO: 1261863 - RNA, 19 nt, Artificial Sequence
  Description of Artificial Sequence: Synthetic oligonucleotide
  Antisense strand to SEQ ID NO: 1261862
ugauuucucgaacucccga

SEQ ID NO: 1261864 - RNA, 19 nt, Artificial Sequence
  Description of Artificial Sequence: Synthetic oligonucleotide
  Sense strand starting at position 3728 of SEQ ID NO: 1241300
cgagaaaucagccggacca

SEQ ID NO: 1261865 - RNA, 19 nt, Artificial Sequence
  Description of Artificial Sequence: Synthetic oligonucleotide
  Antisense strand to SEQ ID NO: 1261864
ugguccggcugauuucucg

SEQ ID NO: 1261866 - RNA, 19 nt, Artificial Sequence
  Description of Artificial Sequence: Synthetic oligonucleotide
  Sense strand starting at position 220 of SEQ ID NO: 1241301
aguaaauguggaggaugua

SEQ ID NO: 1261867 - RNA, 19 nt, Artificial Sequence
  Description of Artificial Sequence: Synthetic oligonucleotide
  Antisense strand to SEQ ID NO: 1261866
uacauccuccacauuuacu

SEQ ID NO: 1261868 - RNA, 19 nt, Artificial Sequence
  Description of Artificial Sequence: Synthetic oligonucleotide
  Sense strand starting at position 264 of SEQ ID NO: 1241301
ugugacaaaugccuuuaaa

SEQ ID NO: 1261869 - RNA, 19 nt, Artificial Sequence
  Description of Artificial Sequence: Synthetic oligonucleotide
  Antisense strand to SEQ ID NO: 1261868
uuuaaaggcauuugucaca

SEQ ID NO: 1261870 - RNA, 19 nt, Artificial Sequence
  Description of Artificial Sequence: Synthetic oligonucleotide
  Sense strand starting at position 379 of SEQ ID NO: 1241301
ucucuauguggugaaguga

SEQ ID NO: 1261871 - RNA, 19 nt, Artificial Sequence
  Description of Artificial Sequence: Synthetic oligonucleotide
  Antisense strand to SEQ ID NO: 1261870
ucacuucaccacauagaga

SEQ ID NO: 1261872 - RNA, 19 nt, Artificial Sequence
  Description of Artificial Sequence: Synthetic oligonucleotide
  Sense strand starting at position 832 of SEQ ID NO: 1241301
uugagcucuucccuaagaa

SEQ ID NO: 1261873 - RNA, 19 nt, Artificial Sequence
  Description of Artificial Sequence: Synthetic oligonucleotide
  Antisense strand to SEQ ID NO: 1261872
uucuuagggaagagcucaa

SEQ ID NO: 1261874 - RNA, 19 nt, Artificial Sequence
  Description of Artificial Sequence: Synthetic oligonucleotide
  Sense strand starting at position 833 of SEQ ID NO: 1241301
ugagcucuucccuaagaaa

SEQ ID NO: 1261875 - RNA, 19 nt, Artificial Sequence
  Description of Artificial Sequence: Synthetic oligonucleotide
  Antisense strand to SEQ ID NO: 1261874
uuucuuagggaagagcuca

SEQ ID NO: 1261876 - RNA, 19 nt, Artificial Sequence
  Description of Artificial Sequence: Synthetic oligonucleotide
  Sense strand starting at position 952 of SEQ ID NO: 1241301
guggguuuccugggaggga

SEQ ID NO: 1261877 - RNA, 19 nt, Artificial Sequence
  Description of Artificial Sequence: Synthetic oligonucleotide
  Antisense strand to SEQ ID NO: 1261876
ucccucccaggaaacccac

SEQ ID NO: 1261878 - RNA, 19 nt, Artificial Sequence
  Description of Artificial Sequence: Synthetic oligonucleotide
  Sense strand starting at position 1094 of SEQ ID NO: 1241301
gccucuauuucccugggua

SEQ ID NO: 1261879 - RNA, 19 nt, Artificial Sequence
  Description of Artificial Sequence: Synthetic oligonucleotide
  Antisense strand to SEQ ID NO: 1261878
uacccagggaaauagaggc

SEQ ID NO: 1261880 - RNA, 19 nt, Artificial Sequence
  Description of Artificial Sequence: Synthetic oligonucleotide
  Sense strand starting at position 1189 of SEQ ID NO: 1241301
ugccuaaguccucagggua

SEQ ID NO: 1261881 - RNA, 19 nt, Artificial Sequence
  Description of Artificial Sequence: Synthetic oligonucleotide
  Antisense strand to SEQ ID NO: 1261880
uacccugaggacuuaggca

SEQ ID NO: 1261882 - RNA, 19 nt, Artificial Sequence
  Description of Artificial Sequence: Synthetic oligonucleotide
  Sense strand starting at position 1250 of SEQ ID NO: 1241301
cagucucgucaugauauau

SEQ ID NO: 1261883 - RNA, 19 nt, Artificial Sequence
  Description of Artificial Sequence: Synthetic oligonucleotide
  Antisense strand to SEQ ID NO: 1261882
auauaucaugacgagacug

SEQ ID NO: 1261884 - RNA, 19 nt, Artificial Sequence
  Description of Artificial Sequence: Synthetic oligonucleotide
  Sense strand starting at position 1599 of SEQ ID NO: 1241301
uuuggagaaucugccacau

SEQ ID NO: 1261885 - RNA, 19 nt, Artificial Sequence
  Description of Artificial Sequence: Synthetic oligonucleotide
  Antisense strand to SEQ ID NO: 1261884
auguggcagauucuccaaa

SEQ ID NO: 1261886 - RNA, 19 nt, Artificial Sequence
  Description of Artificial Sequence: Synthetic oligonucleotide
  Sense strand starting at position 1622 of SEQ ID NO: 1241301
ucuaaauccagugagugua

SEQ ID NO: 1261887 - RNA, 19 nt, Artificial Sequence
  Description of Artificial Sequence: Synthetic oligonucleotide
  Antisense strand to SEQ ID NO: 1261886
uacacucacuggauuuaga

SEQ ID NO: 1261888 - RNA, 19 nt, Artificial Sequence
  Description of Artificial Sequence: Synthetic oligonucleotide
  Sense strand starting at position 2039 of SEQ ID NO: 1241301
ggaguuauaucccugagug

SEQ ID NO: 1261889 - RNA, 19 nt, Artificial Sequence
  Description of Artificial Sequence: Synthetic oligonucleotide
  Antisense strand to SEQ ID NO: 1261888
cacucagggauauaacucc

SEQ ID NO: 1261890 - RNA, 19 nt, Artificial Sequence
  Description of Artificial Sequence: Synthetic oligonucleotide
  Sense strand starting at position 2040 of SEQ ID NO: 1241301
gaguuauaucccugaguga

SEQ ID NO: 1261891 - RNA, 19 nt, Artificial Sequence
  Description of Artificial Sequence: Synthetic oligonucleotide
  Antisense strand to SEQ ID NO: 1261890
ucacucagggauauaacuc

SEQ ID NO: 1261892 - RNA, 19 nt, Artificial Sequence
  Description of Artificial Sequence: Synthetic oligonucleotide
  Sense strand starting at position 2041 of SEQ ID NO: 1241301
aguuauaucccugagugau

SEQ ID NO: 1261893 - RNA, 19 nt, Artificial Sequence
  Description of Artificial Sequence: Synthetic oligonucleotide
  Antisense strand to SEQ ID NO: 1261892
aucacucagggauauaacu

SEQ ID NO: 1261894 - RNA, 19 nt, Artificial Sequence
  Description of Artificial Sequence: Synthetic oligonucleotide
  Sense strand starting at position 2051 of SEQ ID NO: 1241301
cugagugauggucagcaga

SEQ ID NO: 1261895 - RNA, 19 nt, Artificial Sequence
  Description of Artificial Sequence: Synthetic oligonucleotide
  Antisense strand to SEQ ID NO: 1261894
ucugcugaccaucacucag

SEQ ID NO: 1261896 - RNA, 19 nt, Artificial Sequence
  Description of Artificial Sequence: Synthetic oligonucleotide
  Sense strand starting at position 2153 of SEQ ID NO: 1241301
uagucuccugcugacagau

SEQ ID NO: 1261897 - RNA, 19 nt, Artificial Sequence
  Description of Artificial Sequence: Synthetic oligonucleotide
  Antisense strand to SEQ ID NO: 1261896
aucugucagcaggagacua

SEQ ID NO: 1261898 - RNA, 19 nt, Artificial Sequence
  Description of Artificial Sequence: Synthetic oligonucleotide
  Sense strand starting at position 2168 of SEQ ID NO: 1241301
agauaaaugcugcggaaac

SEQ ID NO: 1261899 - RNA, 19 nt, Artificial Sequence
  Description of Artificial Sequence: Synthetic oligonucleotide
  Antisense strand to SEQ ID NO: 1261898
guuuccgcagcauuuaucu

SEQ ID NO: 1261900 - RNA, 19 nt, Artificial Sequence
  Description of Artificial Sequence: Synthetic oligonucleotide
  Sense strand starting at position 2287 of SEQ ID NO: 1241301
gggcaucuugaguggauaa

SEQ ID NO: 1261901 - RNA, 19 nt, Artificial Sequence
  Description of Artificial Sequence: Synthetic oligonucleotide
  Antisense strand to SEQ ID NO: 1261900
uuauccacucaagaugccc

SEQ ID NO: 1261902 - RNA, 19 nt, Artificial Sequence
  Description of Artificial Sequence: Synthetic oligonucleotide
  Sense strand starting at position 2288 of SEQ ID NO: 1241301
ggcaucuugaguggauaaa

SEQ ID NO: 1261903 - RNA, 19 nt, Artificial Sequence
  Description of Artificial Sequence: Synthetic oligonucleotide
  Antisense strand to SEQ ID NO: 1261902
uuuauccacucaagaugcc

SEQ ID NO: 1261904 - RNA, 19 nt, Artificial Sequence
  Description of Artificial Sequence: Synthetic oligonucleotide
  Sense strand starting at position 2289 of SEQ ID NO: 1241301
gcaucuugaguggauaaau

SEQ ID NO: 1261905 - RNA, 19 nt, Artificial Sequence
  Description of Artificial Sequence: Synthetic oligonucleotide
  Antisense strand to SEQ ID NO: 1261904
auuuauccacucaagaugc

SEQ ID NO: 1261906 - RNA, 19 nt, Artificial Sequence
  Description of Artificial Sequence: Synthetic oligonucleotide
  Sense strand starting at position 2444 of SEQ ID NO: 1241301
accacagcugauugauaua

SEQ ID NO: 1261907 - RNA, 19 nt, Artificial Sequence
  Description of Artificial Sequence: Synthetic oligonucleotide
  Antisense strand to SEQ ID NO: 1261906
uauaucaaucagcuguggu

SEQ ID NO: 1261908 - RNA, 19 nt, Artificial Sequence
  Description of Artificial Sequence: Synthetic oligonucleotide
  Sense strand starting at position 2468 of SEQ ID NO: 1241301
guucucucuuuaccauaga

SEQ ID NO: 1261909 - RNA, 19 nt, Artificial Sequence
  Description of Artificial Sequence: Synthetic oligonucleotide
  Antisense strand to SEQ ID NO: 1261908
ucuaugguaaagagagaac

SEQ ID NO: 1261910 - RNA, 19 nt, Artificial Sequence
  Description of Artificial Sequence: Synthetic oligonucleotide
  Sense strand starting at position 2495 of SEQ ID NO: 1241301
uccuguaggcccuauacaa

SEQ ID NO: 1261911 - RNA, 19 nt, Artificial Sequence
  Description of Artificial Sequence: Synthetic oligonucleotide
  Antisense strand to SEQ ID NO: 1261910
uuguauagggccuacagga

SEQ ID NO: 1261912 - RNA, 19 nt, Artificial Sequence
  Description of Artificial Sequence: Synthetic oligonucleotide
  Sense strand starting at position 2502 of SEQ ID NO: 1241301
ggcccuauacaagauggua

SEQ ID NO: 1261913 - RNA, 19 nt, Artificial Sequence
  Description of Artificial Sequence: Synthetic oligonucleotide
  Antisense strand to SEQ ID NO: 1261912
uaccaucuuguauagggcc

SEQ ID NO: 1261914 - RNA, 19 nt, Artificial Sequence
  Description of Artificial Sequence: Synthetic oligonucleotide
  Sense strand starting at position 2548 of SEQ ID NO: 1241301
ugaggaaagugagauuugu

SEQ ID NO: 1261915 - RNA, 19 nt, Artificial Sequence
  Description of Artificial Sequence: Synthetic oligonucleotide
  Antisense strand to SEQ ID NO: 1261914
acaaaucucacuuuccuca

SEQ ID NO: 1261916 - RNA, 19 nt, Artificial Sequence
  Description of Artificial Sequence: Synthetic oligonucleotide
  Sense strand starting at position 2622 of SEQ ID NO: 1241301
agcacauuaugacuguaau

SEQ ID NO: 1261917 - RNA, 19 nt, Artificial Sequence
  Description of Artificial Sequence: Synthetic oligonucleotide
  Antisense strand to SEQ ID NO: 1261916
auuacagucauaaugugcu

SEQ ID NO: 1261918 - RNA, 19 nt, Artificial Sequence
  Description of Artificial Sequence: Synthetic oligonucleotide
  Sense strand starting at position 2623 of SEQ ID NO: 1241301
gcacauuaugacuguaaua

SEQ ID NO: 1261919 - RNA, 19 nt, Artificial Sequence
  Description of Artificial Sequence: Synthetic oligonucleotide
  Antisense strand to SEQ ID NO: 1261918
uauuacagucauaaugugc

SEQ ID NO: 1261920 - RNA, 19 nt, Artificial Sequence
  Description of Artificial Sequence: Synthetic oligonucleotide
  Sense strand starting at position 2652 of SEQ ID NO: 1241301
uugccaaauuucuaaggga

SEQ ID NO: 1261921 - RNA, 19 nt, Artificial Sequence
  Description of Artificial Sequence: Synthetic oligonucleotide
  Antisense strand to SEQ ID NO: 1261920
ucccuuagaaauuuggcaa

SEQ ID NO: 1261922 - RNA, 19 nt, Artificial Sequence
  Description of Artificial Sequence: Synthetic oligonucleotide
  Sense strand starting at position 2655 of SEQ ID NO: 1241301
ccaaauuucuaagggagaa

SEQ ID NO: 1261923 - RNA, 19 nt, Artificial Sequence
  Description of Artificial Sequence: Synthetic oligonucleotide
  Antisense strand to SEQ ID NO: 1261922
uucucccuuagaaauuugg

SEQ ID NO: 1261924 - RNA, 19 nt, Artificial Sequence
  Description of Artificial Sequence: Synthetic oligonucleotide
  Sense strand starting at position 2738 of SEQ ID NO: 1241301
agaauaccauaccucgaua

SEQ ID NO: 1261925 - RNA, 19 nt, Artificial Sequence
  Description of Artificial Sequence: Synthetic oligonucleotide
  Antisense strand to SEQ ID NO: 1261924
uaucgagguaugguauucu

SEQ ID NO: 1261926 - RNA, 19 nt, Artificial Sequence
  Description of Artificial Sequence: Synthetic oligonucleotide
  Sense strand starting at position 2741 of SEQ ID NO: 1241301
auaccauaccucgauagua

SEQ ID NO: 1261927 - RNA, 19 nt, Artificial Sequence
  Description of Artificial Sequence: Synthetic oligonucleotide
  Antisense strand to SEQ ID NO: 1261926
uacuaucgagguaugguau

SEQ ID NO: 1261928 - RNA, 19 nt, Artificial Sequence
  Description of Artificial Sequence: Synthetic oligonucleotide
  Sense strand starting at position 2764 of SEQ ID NO: 1241301
guagcuaagaggcauugaa

SEQ ID NO: 1261929 - RNA, 19 nt, Artificial Sequence
  Description of Artificial Sequence: Synthetic oligonucleotide
  Antisense strand to SEQ ID NO: 1261928
uucaaugccucuuagcuac

SEQ ID NO: 1261930 - RNA, 19 nt, Artificial Sequence
  Description of Artificial Sequence: Synthetic oligonucleotide
  Sense strand starting at position 2783 of SEQ ID NO: 1241301
caauuagcuguugacugaa

SEQ ID NO: 1261931 - RNA, 19 nt, Artificial Sequence
  Description of Artificial Sequence: Synthetic oligonucleotide
  Antisense strand to SEQ ID NO: 1261930
uucagucaacagcuaauug

SEQ ID NO: 1261932 - RNA, 19 nt, Artificial Sequence
  Description of Artificial Sequence: Synthetic oligonucleotide
  Sense strand starting at position 2786 of SEQ ID NO: 1241301
uuagcuguugacugaauga

SEQ ID NO: 1261933 - RNA, 19 nt, Artificial Sequence
  Description of Artificial Sequence: Synthetic oligonucleotide
  Antisense strand to SEQ ID NO: 1261932
ucauucagucaacagcuaa

SEQ ID NO: 1261934 - RNA, 19 nt, Artificial Sequence
  Description of Artificial Sequence: Synthetic oligonucleotide
  Sense strand starting at position 3253 of SEQ ID NO: 1241301
gagcauacauaguugauua

SEQ ID NO: 1261935 - RNA, 19 nt, Artificial Sequence
  Description of Artificial Sequence: Synthetic oligonucleotide
  Antisense strand to SEQ ID NO: 1261934
uaaucaacuauguaugcuc

SEQ ID NO: 1261936 - RNA, 19 nt, Artificial Sequence
  Description of Artificial Sequence: Synthetic oligonucleotide
  Sense strand starting at position 3255 of SEQ ID NO: 1241301
gcauacauaguugauuaca

SEQ ID NO: 1261937 - RNA, 19 nt, Artificial Sequence
  Description of Artificial Sequence: Synthetic oligonucleotide
  Antisense strand to SEQ ID NO: 1261936
uguaaucaacuauguaugc

SEQ ID NO: 1261938 - RNA, 19 nt, Artificial Sequence
  Description of Artificial Sequence: Synthetic oligonucleotide
  Sense strand starting at position 3301 of SEQ ID NO: 1241301
gggucucaucacugguaga

SEQ ID NO: 1261939 - RNA, 19 nt, Artificial Sequence
  Description of Artificial Sequence: Synthetic oligonucleotide
  Antisense strand to SEQ ID NO: 1261938
ucuaccagugaugagaccc

SEQ ID NO: 1261940 - RNA, 19 nt, Artificial Sequence
  Description of Artificial Sequence: Synthetic oligonucleotide
  Sense strand starting at position 3302 of SEQ ID NO: 1241301
ggucucaucacugguagaa

SEQ ID NO: 1261941 - RNA, 19 nt, Artificial Sequence
  Description of Artificial Sequence: Synthetic oligonucleotide
  Antisense strand to SEQ ID NO: 1261940
uucuaccagugaugagacc

SEQ ID NO: 1261942 - RNA, 19 nt, Artificial Sequence
  Description of Artificial Sequence: Synthetic oligonucleotide
  Sense strand starting at position 3328 of SEQ ID NO: 1241301
uucucuuuggcugaugaua

SEQ ID NO: 1261943 - RNA, 19 nt, Artificial Sequence
  Description of Artificial Sequence: Synthetic oligonucleotide
  Antisense strand to SEQ ID NO: 1261942
uaucaucagccaaagagaa

SEQ ID NO: 1261944 - RNA, 19 nt, Artificial Sequence
  Description of Artificial Sequence: Synthetic oligonucleotide
  Sense strand starting at position 3528 of SEQ ID NO: 1241301
uguuguuaagugcaaacaa

SEQ ID NO: 1261945 - RNA, 19 nt, Artificial Sequence
  Description of Artificial Sequence: Synthetic oligonucleotide
  Antisense strand to SEQ ID NO: 1261944
uuguuugcacuuaacaaca

SEQ ID NO: 1261946 - RNA, 19 nt, Artificial Sequence
  Description of Artificial Sequence: Synthetic oligonucleotide
  Sense strand starting at position 45 of SEQ ID NO: 1241302
uggaaacuguuucuugauu

SEQ ID NO: 1261947 - RNA, 19 nt, Artificial Sequence
  Description of Artificial Sequence: Synthetic oligonucleotide
  Antisense strand to SEQ ID NO: 1261946
aaucaagaaacaguuucca

SEQ ID NO: 1261948 - RNA, 19 nt, Artificial Sequence
  Description of Artificial Sequence: Synthetic oligonucleotide
  Sense strand starting at position 46 of SEQ ID NO: 1241302
ggaaacuguuucuugauug

SEQ ID NO: 1261949 - RNA, 19 nt, Artificial Sequence
  Description of Artificial Sequence: Synthetic oligonucleotide
  Antisense strand to SEQ ID NO: 1261948
caaucaagaaacaguuucc

SEQ ID NO: 1261950 - RNA, 19 nt, Artificial Sequence
  Description of Artificial Sequence: Synthetic oligonucleotide
  Sense strand starting at position 75 of SEQ ID NO: 1241302
agagcuagagcugguaaga

SEQ ID NO: 1261951 - RNA, 19 nt, Artificial Sequence
  Description of Artificial Sequence: Synthetic oligonucleotide
  Antisense strand to SEQ ID NO: 1261950
ucuuaccagcucuagcucu

SEQ ID NO: 1261952 - RNA, 19 nt, Artificial Sequence
  Description of Artificial Sequence: Synthetic oligonucleotide
  Sense strand starting at position 156 of SEQ ID NO: 1241302
gucagucagcaugaggaaa

SEQ ID NO: 1261953 - RNA, 19 nt, Artificial Sequence
  Description of Artificial Sequence: Synthetic oligonucleotide
  Antisense strand to SEQ ID NO: 1261952
uuuccucaugcugacugac

SEQ ID NO: 1261954 - RNA, 19 nt, Artificial Sequence
  Description of Artificial Sequence: Synthetic oligonucleotide
  Sense strand starting at position 418 of SEQ ID NO: 1241302
gcuagauuaguguaaucuu

SEQ ID NO: 1261955 - RNA, 19 nt, Artificial Sequence
  Description of Artificial Sequence: Synthetic oligonucleotide
  Antisense strand to SEQ ID NO: 1261954
aagauuacacuaaucuagc

SEQ ID NO: 1261956 - RNA, 19 nt, Artificial Sequence
  Description of Artificial Sequence: Synthetic oligonucleotide
  Sense strand starting at position 562 of SEQ ID NO: 1241302
ucuuaucuacuguagauca

SEQ ID NO: 1261957 - RNA, 19 nt, Artificial Sequence
  Description of Artificial Sequence: Synthetic oligonucleotide
  Antisense strand to SEQ ID NO: 1261956
ugaucuacaguagauaaga

SEQ ID NO: 1261958 - RNA, 19 nt, Artificial Sequence
  Description of Artificial Sequence: Synthetic oligonucleotide
  Sense strand starting at position 599 of SEQ ID NO: 1241302
gauggaaauuucuaggauu

SEQ ID NO: 1261959 - RNA, 19 nt, Artificial Sequence
  Description of Artificial Sequence: Synthetic oligonucleotide
  Antisense strand to SEQ ID NO: 1261958
aauccuagaaauuuccauc

SEQ ID NO: 1261960 - RNA, 19 nt, Artificial Sequence
  Description of Artificial Sequence: Synthetic oligonucleotide
  Sense strand starting at position 685 of SEQ ID NO: 1241302
uaguaauugacacgguaga

SEQ ID NO: 1261961 - RNA, 19 nt, Artificial Sequence
  Description of Artificial Sequence: Synthetic oligonucleotide
  Antisense strand to SEQ ID NO: 1261960
ucuaccgugucaauuacua

SEQ ID NO: 1261962 - RNA, 19 nt, Artificial Sequence
  Description of Artificial Sequence: Synthetic oligonucleotide
  Sense strand starting at position 686 of SEQ ID NO: 1241302
aguaauugacacgguagaa

SEQ ID NO: 1261963 - RNA, 19 nt, Artificial Sequence
  Description of Artificial Sequence: Synthetic oligonucleotide
  Antisense strand to SEQ ID NO: 1261962
uucuaccgugucaauuacu

SEQ ID NO: 1261964 - RNA, 19 nt, Artificial Sequence
  Description of Artificial Sequence: Synthetic oligonucleotide
  Sense strand starting at position 759 of SEQ ID NO: 1241302
uugauaugccuuugaaaug

SEQ ID NO: 1261965 - RNA, 19 nt, Artificial Sequence
  Description of Artificial Sequence: Synthetic oligonucleotide
  Antisense strand to SEQ ID NO: 1261964
cauuucaaaggcauaucaa

SEQ ID NO: 1261966 - RNA, 19 nt, Artificial Sequence
  Description of Artificial Sequence: Synthetic oligonucleotide
  Sense strand starting at position 804 of SEQ ID NO: 1241302
acucacgaguccucuaaag

SEQ ID NO: 1261967 - RNA, 19 nt, Artificial Sequence
  Description of Artificial Sequence: Synthetic oligonucleotide
  Antisense strand to SEQ ID NO: 1261966
cuuuagaggacucgugagu

SEQ ID NO: 1261968 - RNA, 19 nt, Artificial Sequence
  Description of Artificial Sequence: Synthetic oligonucleotide
  Sense strand starting at position 806 of SEQ ID NO: 1241302
ucacgaguccucuaaaguu

SEQ ID NO: 1261969 - RNA, 19 nt, Artificial Sequence
  Description of Artificial Sequence: Synthetic oligonucleotide
  Antisense strand to SEQ ID NO: 1261968
aacuuuagaggacucguga

SEQ ID NO: 1261970 - RNA, 19 nt, Artificial Sequence
  Description of Artificial Sequence: Synthetic oligonucleotide
  Sense strand starting at position 842 of SEQ ID NO: 1241302
augacaggaucagaaauaa

SEQ ID NO: 1261971 - RNA, 19 nt, Artificial Sequence
  Description of Artificial Sequence: Synthetic oligonucleotide
  Antisense strand to SEQ ID NO: 1261970
uuauuucugauccugucau

SEQ ID NO: 1261972 - RNA, 19 nt, Artificial Sequence
  Description of Artificial Sequence: Synthetic oligonucleotide
  Sense strand starting at position 1179 of SEQ ID NO: 1241302
gagggauuguuacuuuaug

SEQ ID NO: 1261973 - RNA, 19 nt, Artificial Sequence
  Description of Artificial Sequence: Synthetic oligonucleotide
  Antisense strand to SEQ ID NO: 1261972
cauaaaguaacaaucccuc

SEQ ID NO: 1261974 - RNA, 19 nt, Artificial Sequence
  Description of Artificial Sequence: Synthetic oligonucleotide
  Sense strand starting at position 1206 of SEQ ID NO: 1241302
caaagcugucaugagucaa

SEQ ID NO: 1261975 - RNA, 19 nt, Artificial Sequence
  Description of Artificial Sequence: Synthetic oligonucleotide
  Antisense strand to SEQ ID NO: 1261974
uugacucaugacagcuuug

SEQ ID NO: 1261976 - RNA, 19 nt, Artificial Sequence
  Description of Artificial Sequence: Synthetic oligonucleotide
  Sense strand starting at position 1389 of SEQ ID NO: 1241302
acaugugcucaacagcaau

SEQ ID NO: 1261977 - RNA, 19 nt, Artificial Sequence
  Description of Artificial Sequence: Synthetic oligonucleotide
  Antisense strand to SEQ ID NO: 1261976
auugcuguugagcacaugu

SEQ ID NO: 1261978 - RNA, 19 nt, Artificial Sequence
  Description of Artificial Sequence: Synthetic oligonucleotide
  Sense strand starting at position 1440 of SEQ ID NO: 1241302
ucaggacucuugcuauuaa

SEQ ID NO: 1261979 - RNA, 19 nt, Artificial Sequence
  Description of Artificial Sequence: Synthetic oligonucleotide
  Antisense strand to SEQ ID NO: 1261978
uuaauagcaagaguccuga

SEQ ID NO: 1261980 - RNA, 19 nt, Artificial Sequence
  Description of Artificial Sequence: Synthetic oligonucleotide
  Sense strand starting at position 1641 of SEQ ID NO: 1241302
guaaguccuugacucagaa

SEQ ID NO: 1261981 - RNA, 19 nt, Artificial Sequence
  Description of Artificial Sequence: Synthetic oligonucleotide
  Antisense strand to SEQ ID NO: 1261980
uucugagucaaggacuuac

SEQ ID NO: 1261982 - RNA, 19 nt, Artificial Sequence
  Description of Artificial Sequence: Synthetic oligonucleotide
  Sense strand starting at position 1653 of SEQ ID NO: 1241302
cucagaagccauuaaaggu

SEQ ID NO: 1261983 - RNA, 19 nt, Artificial Sequence
  Description of Artificial Sequence: Synthetic oligonucleotide
  Antisense strand to SEQ ID NO: 1261982
accuuuaauggcuucugag

SEQ ID NO: 1261984 - RNA, 19 nt, Artificial Sequence
  Description of Artificial Sequence: Synthetic oligonucleotide
  Sense strand starting at position 1783 of SEQ ID NO: 1241302
cauggacuucucgaucagu

SEQ ID NO: 1261985 - RNA, 19 nt, Artificial Sequence
  Description of Artificial Sequence: Synthetic oligonucleotide
  Antisense strand to SEQ ID NO: 1261984
acugaucgagaaguccaug

SEQ ID NO: 1261986 - RNA, 19 nt, Artificial Sequence
  Description of Artificial Sequence: Synthetic oligonucleotide
  Sense strand starting at position 1786 of SEQ ID NO: 1241302
ggacuucucgaucaguaua

SEQ ID NO: 1261987 - RNA, 19 nt, Artificial Sequence
  Description of Artificial Sequence: Synthetic oligonucleotide
  Antisense strand to SEQ ID NO: 1261986
uauacugaucgagaagucc

SEQ ID NO: 1261988 - RNA, 19 nt, Artificial Sequence
  Description of Artificial Sequence: Synthetic oligonucleotide
  Sense strand starting at position 1789 of SEQ ID NO: 1241302
cuucucgaucaguauacua

SEQ ID NO: 1261989 - RNA, 19 nt, Artificial Sequence
  Description of Artificial Sequence: Synthetic oligonucleotide
  Antisense strand to SEQ ID NO: 1261988
uaguauacugaucgagaag

SEQ ID NO: 1261990 - RNA, 19 nt, Artificial Sequence
  Description of Artificial Sequence: Synthetic oligonucleotide
  Sense strand starting at position 1844 of SEQ ID NO: 1241302
uuaagauucuagguuuccu

SEQ ID NO: 1261991 - RNA, 19 nt, Artificial Sequence
  Description of Artificial Sequence: Synthetic oligonucleotide
  Antisense strand to SEQ ID NO: 1261990
aggaaaccuagaaucuuaa

SEQ ID NO: 1261992 - RNA, 19 nt, Artificial Sequence
  Description of Artificial Sequence: Synthetic oligonucleotide
  Sense strand starting at position 2298 of SEQ ID NO: 1241302
agcucuauagucuaaguca

SEQ ID NO: 1261993 - RNA, 19 nt, Artificial Sequence
  Description of Artificial Sequence: Synthetic oligonucleotide
  Antisense strand to SEQ ID NO: 1261992
ugacuuagacuauagagcu

SEQ ID NO: 1261994 - RNA, 19 nt, Artificial Sequence
  Description of Artificial Sequence: Synthetic oligonucleotide
  Sense strand starting at position 2301 of SEQ ID NO: 1241302
ucuauagucuaagucaaug

SEQ ID NO: 1261995 - RNA, 19 nt, Artificial Sequence
  Description of Artificial Sequence: Synthetic oligonucleotide
  Antisense strand to SEQ ID NO: 1261994
cauugacuuagacuauaga

SEQ ID NO: 1261996 - RNA, 19 nt, Artificial Sequence
  Description of Artificial Sequence: Synthetic oligonucleotide
  Sense strand starting at position 2468 of SEQ ID NO: 1241302
aggcuauaagcugaucaag

SEQ ID NO: 1261997 - RNA, 19 nt, Artificial Sequence
  Description of Artificial Sequence: Synthetic oligonucleotide
  Antisense strand to SEQ ID NO: 1261996
cuugaucagcuuauagccu

SEQ ID NO: 1261998 - RNA, 19 nt, Artificial Sequence
  Description of Artificial Sequence: Synthetic oligonucleotide
  Sense strand starting at position 2825 of SEQ ID NO: 1241302
uguacuucuaccgaggaga

SEQ ID NO: 1261999 - RNA, 19 nt, Artificial Sequence
  Description of Artificial Sequence: Synthetic oligonucleotide
  Antisense strand to SEQ ID NO: 1261998
ucuccucgguagaaguaca

SEQ ID NO: 1262000 - RNA, 19 nt, Artificial Sequence
  Description of Artificial Sequence: Synthetic oligonucleotide
  Sense strand starting at position 2827 of SEQ ID NO: 1241302
uacuucuaccgaggagaca

SEQ ID NO: 1262001 - RNA, 19 nt, Artificial Sequence
  Description of Artificial Sequence: Synthetic oligonucleotide
  Antisense strand to SEQ ID NO: 1262000
ugucuccucgguagaagua

SEQ ID NO: 1262002 - RNA, 19 nt, Artificial Sequence
  Description of Artificial Sequence: Synthetic oligonucleotide
  Sense strand starting at position 2925 of SEQ ID NO: 1241302
uugucacuuguuuauuaag

SEQ ID NO: 1262003 - RNA, 19 nt, Artificial Sequence
  Description of Artificial Sequence: Synthetic oligonucleotide
  Antisense strand to SEQ ID NO: 1262002
cuuaauaaacaagugacaa

SEQ ID NO: 1262004 - RNA, 19 nt, Artificial Sequence
  Description of Artificial Sequence: Synthetic oligonucleotide
  Sense strand starting at position 2990 of SEQ ID NO: 1241302
uccacaggguucucaugaa

SEQ ID NO: 1262005 - RNA, 19 nt, Artificial Sequence
  Description of Artificial Sequence: Synthetic oligonucleotide
  Antisense strand to SEQ ID NO: 1262004
uucaugagaacccugugga

SEQ ID NO: 1262006 - RNA, 19 nt, Artificial Sequence
  Description of Artificial Sequence: Synthetic oligonucleotide
  Sense strand starting at position 2994 of SEQ ID NO: 1241302
caggguucucaugaaggua

SEQ ID NO: 1262007 - RNA, 19 nt, Artificial Sequence
  Description of Artificial Sequence: Synthetic oligonucleotide
  Antisense strand to SEQ ID NO: 1262006
uaccuucaugagaacccug

SEQ ID NO: 1262008 - RNA, 19 nt, Artificial Sequence
  Description of Artificial Sequence: Synthetic oligonucleotide
  Sense strand starting at position 2997 of SEQ ID NO: 1241302
gguucucaugaagguaaga

SEQ ID NO: 1262009 - RNA, 19 nt, Artificial Sequence
  Description of Artificial Sequence: Synthetic oligonucleotide
  Antisense strand to SEQ ID NO: 1262008
ucuuaccuucaugagaacc

SEQ ID NO: 1262010 - RNA, 19 nt, Artificial Sequence
  Description of Artificial Sequence: Synthetic oligonucleotide
  Sense strand starting at position 3106 of SEQ ID NO: 1241302
uguacuuguccuuaaagga

SEQ ID NO: 1262011 - RNA, 19 nt, Artificial Sequence
  Description of Artificial Sequence: Synthetic oligonucleotide
  Antisense strand to SEQ ID NO: 1262010
uccuuuaaggacaaguaca

SEQ ID NO: 1262012 - RNA, 19 nt, Artificial Sequence
  Description of Artificial Sequence: Synthetic oligonucleotide
  Sense strand starting at position 3239 of SEQ ID NO: 1241302
aucaguucuaauuggagag

SEQ ID NO: 1262013 - RNA, 19 nt, Artificial Sequence
  Description of Artificial Sequence: Synthetic oligonucleotide
  Antisense strand to SEQ ID NO: 1262012
cucuccaauuagaacugau

SEQ ID NO: 1262014 - RNA, 19 nt, Artificial Sequence
  Description of Artificial Sequence: Synthetic oligonucleotide
  Sense strand starting at position 3240 of SEQ ID NO: 1241302
ucaguucuaauuggagaga

SEQ ID NO: 1262015 - RNA, 19 nt, Artificial Sequence
  Description of Artificial Sequence: Synthetic oligonucleotide
  Antisense strand to SEQ ID NO: 1262014
ucucuccaauuagaacuga

SEQ ID NO: 1262016 - RNA, 19 nt, Artificial Sequence
  Description of Artificial Sequence: Synthetic oligonucleotide
  Sense strand starting at position 3251 of SEQ ID NO: 1241302
uggagagaugaaugcacuu

SEQ ID NO: 1262017 - RNA, 19 nt, Artificial Sequence
  Description of Artificial Sequence: Synthetic oligonucleotide
  Antisense strand to SEQ ID NO: 1262016
aagugcauucaucucucca

SEQ ID NO: 1262018 - RNA, 19 nt, Artificial Sequence
  Description of Artificial Sequence: Synthetic oligonucleotide
  Sense strand starting at position 3345 of SEQ ID NO: 1241302
acaguuuggauguauugca

SEQ ID NO: 1262019 - RNA, 19 nt, Artificial Sequence
  Description of Artificial Sequence: Synthetic oligonucleotide
  Antisense strand to SEQ ID NO: 1262018
ugcaauacauccaaacugu

SEQ ID NO: 1262020 - RNA, 19 nt, Artificial Sequence
  Description of Artificial Sequence: Synthetic oligonucleotide
  Sense strand starting at position 3595 of SEQ ID NO: 1241302
gugcguuauggcccagcau

SEQ ID NO: 1262021 - RNA, 19 nt, Artificial Sequence
  Description of Artificial Sequence: Synthetic oligonucleotide
  Antisense strand to SEQ ID NO: 1262020
augcugggccauaacgcac

SEQ ID NO: 1262022 - RNA, 19 nt, Artificial Sequence
  Description of Artificial Sequence: Synthetic oligonucleotide
  Sense strand starting at position 3633 of SEQ ID NO: 1241302
guagcauaugcacaaggaa

SEQ ID NO: 1262023 - RNA, 19 nt, Artificial Sequence
  Description of Artificial Sequence: Synthetic oligonucleotide
  Antisense strand to SEQ ID NO: 1262022
uuccuugugcauaugcuac

SEQ ID NO: 1262024 - RNA, 19 nt, Artificial Sequence
  Description of Artificial Sequence: Synthetic oligonucleotide
  Sense strand starting at position 3702 of SEQ ID NO: 1241302
aggucauggugguuaauag

SEQ ID NO: 1262025 - RNA, 19 nt, Artificial Sequence
  Description of Artificial Sequence: Synthetic oligonucleotide
  Antisense strand to SEQ ID NO: 1262024
cuauuaaccaccaugaccu

SEQ ID NO: 1262026 - RNA, 19 nt, Artificial Sequence
  Description of Artificial Sequence: Synthetic oligonucleotide
  Sense strand starting at position 174 of SEQ ID NO: 1241303
ggcggaucacucgaguuua

SEQ ID NO: 1262027 - RNA, 19 nt, Artificial Sequence
  Description of Artificial Sequence: Synthetic oligonucleotide
  Antisense strand to SEQ ID NO: 1262026
uaaacucgagugauccgcc

SEQ ID NO: 1262028 - RNA, 19 nt, Artificial Sequence
  Description of Artificial Sequence: Synthetic oligonucleotide
  Sense strand starting at position 433 of SEQ ID NO: 1241303
ggaaauuauuauccaccgu

SEQ ID NO: 1262029 - RNA, 19 nt, Artificial Sequence
  Description of Artificial Sequence: Synthetic oligonucleotide
  Antisense strand to SEQ ID NO: 1262028
acgguggauaauaauuucc

SEQ ID NO: 1262030 - RNA, 19 nt, Artificial Sequence
  Description of Artificial Sequence: Synthetic oligonucleotide
  Sense strand starting at position 510 of SEQ ID NO: 1241303
agguacccauccuugagaa

SEQ ID NO: 1262031 - RNA, 19 nt, Artificial Sequence
  Description of Artificial Sequence: Synthetic oligonucleotide
  Antisense strand to SEQ ID NO: 1262030
uucucaaggauggguaccu

SEQ ID NO: 1262032 - RNA, 19 nt, Artificial Sequence
  Description of Artificial Sequence: Synthetic oligonucleotide
  Sense strand starting at position 511 of SEQ ID NO: 1241303
gguacccauccuugagaaa

SEQ ID NO: 1262033 - RNA, 19 nt, Artificial Sequence
  Description of Artificial Sequence: Synthetic oligonucleotide
  Antisense strand to SEQ ID NO: 1262032
uuucucaaggauggguacc

SEQ ID NO: 1262034 - RNA, 19 nt, Artificial Sequence
  Description of Artificial Sequence: Synthetic oligonucleotide
  Sense strand starting at position 577 of SEQ ID NO: 1241303
gccauacugugucuaacaa

SEQ ID NO: 1262035 - RNA, 19 nt, Artificial Sequence
  Description of Artificial Sequence: Synthetic oligonucleotide
  Antisense strand to SEQ ID NO: 1262034
uuguuagacacaguauggc

SEQ ID NO: 1262036 - RNA, 19 nt, Artificial Sequence
  Description of Artificial Sequence: Synthetic oligonucleotide
  Sense strand starting at position 578 of SEQ ID NO: 1241303
ccauacugugucuaacaau

SEQ ID NO: 1262037 - RNA, 19 nt, Artificial Sequence
  Description of Artificial Sequence: Synthetic oligonucleotide
  Antisense strand to SEQ ID NO: 1262036
auuguuagacacaguaugg

SEQ ID NO: 1262038 - RNA, 19 nt, Artificial Sequence
  Description of Artificial Sequence: Synthetic oligonucleotide
  Sense strand starting at position 661 of SEQ ID NO: 1241303
auagguagaucucuaggua

SEQ ID NO: 1262039 - RNA, 19 nt, Artificial Sequence
  Description of Artificial Sequence: Synthetic oligonucleotide
  Antisense strand to SEQ ID NO: 1262038
uaccuagagaucuaccuau

SEQ ID NO: 1262040 - RNA, 19 nt, Artificial Sequence
  Description of Artificial Sequence: Synthetic oligonucleotide
  Sense strand starting at position 662 of SEQ ID NO: 1241303
uagguagaucucuagguac

SEQ ID NO: 1262041 - RNA, 19 nt, Artificial Sequence
  Description of Artificial Sequence: Synthetic oligonucleotide
  Antisense strand to SEQ ID NO: 1262040
guaccuagagaucuaccua

SEQ ID NO: 1262042 - RNA, 19 nt, Artificial Sequence
  Description of Artificial Sequence: Synthetic oligonucleotide
  Sense strand starting at position 664 of SEQ ID NO: 1241303
gguagaucucuagguacug

SEQ ID NO: 1262043 - RNA, 19 nt, Artificial Sequence
  Description of Artificial Sequence: Synthetic oligonucleotide
  Antisense strand to SEQ ID NO: 1262042
caguaccuagagaucuacc

SEQ ID NO: 1262044 - RNA, 19 nt, Artificial Sequence
  Description of Artificial Sequence: Synthetic oligonucleotide
  Sense strand starting at position 665 of SEQ ID NO: 1241303
guagaucucuagguacuga

SEQ ID NO: 1262045 - RNA, 19 nt, Artificial Sequence
  Description of Artificial Sequence: Synthetic oligonucleotide
  Antisense strand to SEQ ID NO: 1262044
ucaguaccuagagaucuac

SEQ ID NO: 1262046 - RNA, 19 nt, Artificial Sequence
  Description of Artificial Sequence: Synthetic oligonucleotide
  Sense strand starting at position 963 of SEQ ID NO: 1241303
uaagaaagaucuguguuua

SEQ ID NO: 1262047 - RNA, 19 nt, Artificial Sequence
  Description of Artificial Sequence: Synthetic oligonucleotide
  Antisense strand to SEQ ID NO: 1262046
uaaacacagaucuuucuua

SEQ ID NO: 1262048 - RNA, 19 nt, Artificial Sequence
  Description of Artificial Sequence: Synthetic oligonucleotide
  Sense strand starting at position 964 of SEQ ID NO: 1241303
aagaaagaucuguguuuaa

SEQ ID NO: 1262049 - RNA, 19 nt, Artificial Sequence
  Description of Artificial Sequence: Synthetic oligonucleotide
  Antisense strand to SEQ ID NO: 1262048
uuaaacacagaucuuucuu

SEQ ID NO: 1262050 - RNA, 19 nt, Artificial Sequence
  Description of Artificial Sequence: Synthetic oligonucleotide
  Sense strand starting at position 1008 of SEQ ID NO: 1241303
gcuuuaugcacggacuaua

SEQ ID NO: 1262051 - RNA, 19 nt, Artificial Sequence
  Description of Artificial Sequence: Synthetic oligonucleotide
  Antisense strand to SEQ ID NO: 1262050
uauaguccgugcauaaagc

SEQ ID NO: 1262052 - RNA, 19 nt, Artificial Sequence
  Description of Artificial Sequence: Synthetic oligonucleotide
  Sense strand starting at position 1212 of SEQ ID NO: 1241303
aggguauauaaaggaguuu

SEQ ID NO: 1262053 - RNA, 19 nt, Artificial Sequence
  Description of Artificial Sequence: Synthetic oligonucleotide
  Antisense strand to SEQ ID NO: 1262052
aaacuccuuuauauacccu

SEQ ID NO: 1262054 - RNA, 19 nt, Artificial Sequence
  Description of Artificial Sequence: Synthetic oligonucleotide
  Sense strand starting at position 1218 of SEQ ID NO: 1241303
uauaaaggaguuugaaugu

SEQ ID NO: 1262055 - RNA, 19 nt, Artificial Sequence
  Description of Artificial Sequence: Synthetic oligonucleotide
  Antisense strand to SEQ ID NO: 1262054
acauucaaacuccuuuaua

SEQ ID NO: 1262056 - RNA, 19 nt, Artificial Sequence
  Description of Artificial Sequence: Synthetic oligonucleotide
  Sense strand starting at position 1315 of SEQ ID NO: 1241303
ugauuaagguucuuaguuu

SEQ ID NO: 1262057 - RNA, 19 nt, Artificial Sequence
  Description of Artificial Sequence: Synthetic oligonucleotide
  Antisense strand to SEQ ID NO: 1262056
aaacuaagaaccuuaauca

SEQ ID NO: 1262058 - RNA, 19 nt, Artificial Sequence
  Description of Artificial Sequence: Synthetic oligonucleotide
  Sense strand starting at position 1338 of SEQ ID NO: 1241303
ccaucccagggaugugaaa

SEQ ID NO: 1262059 - RNA, 19 nt, Artificial Sequence
  Description of Artificial Sequence: Synthetic oligonucleotide
  Antisense strand to SEQ ID NO: 1262058
uuucacaucccugggaugg

SEQ ID NO: 1262060 - RNA, 19 nt, Artificial Sequence
  Description of Artificial Sequence: Synthetic oligonucleotide
  Sense strand starting at position 2167 of SEQ ID NO: 1241303
acgcauuuguuacugggau

SEQ ID NO: 1262061 - RNA, 19 nt, Artificial Sequence
  Description of Artificial Sequence: Synthetic oligonucleotide
  Antisense strand to SEQ ID NO: 1262060
aucccaguaacaaaugcgu

SEQ ID NO: 1262062 - RNA, 19 nt, Artificial Sequence
  Description of Artificial Sequence: Synthetic oligonucleotide
  Sense strand starting at position 2171 of SEQ ID NO: 1241303
auuuguuacugggauggua

SEQ ID NO: 1262063 - RNA, 19 nt, Artificial Sequence
  Description of Artificial Sequence: Synthetic oligonucleotide
  Antisense strand to SEQ ID NO: 1262062
uaccaucccaguaacaaau

SEQ ID NO: 1262064 - RNA, 19 nt, Artificial Sequence
  Description of Artificial Sequence: Synthetic oligonucleotide
  Sense strand starting at position 2206 of SEQ ID NO: 1241303
uuggcuuugaagggagaaa

SEQ ID NO: 1262065 - RNA, 19 nt, Artificial Sequence
  Description of Artificial Sequence: Synthetic oligonucleotide
  Antisense strand to SEQ ID NO: 1262064
uuucucccuucaaagccaa

SEQ ID NO: 1262066 - RNA, 19 nt, Artificial Sequence
  Description of Artificial Sequence: Synthetic oligonucleotide
  Sense strand starting at position 2295 of SEQ ID NO: 1241303
ucugcuaaacgauaacagu

SEQ ID NO: 1262067 - RNA, 19 nt, Artificial Sequence
  Description of Artificial Sequence: Synthetic oligonucleotide
  Antisense strand to SEQ ID NO: 1262066
acuguuaucguuuagcaga

SEQ ID NO: 1262068 - RNA, 19 nt, Artificial Sequence
  Description of Artificial Sequence: Synthetic oligonucleotide
  Sense strand starting at position 2430 of SEQ ID NO: 1241303
uguagauacugucucccua

SEQ ID NO: 1262069 - RNA, 19 nt, Artificial Sequence
  Description of Artificial Sequence: Synthetic oligonucleotide
  Antisense strand to SEQ ID NO: 1262068
uagggagacaguaucuaca

SEQ ID NO: 1262070 - RNA, 19 nt, Artificial Sequence
  Description of Artificial Sequence: Synthetic oligonucleotide
  Sense strand starting at position 2617 of SEQ ID NO: 1241303
agcaauuauaugugaggca

SEQ ID NO: 1262071 - RNA, 19 nt, Artificial Sequence
  Description of Artificial Sequence: Synthetic oligonucleotide
  Antisense strand to SEQ ID NO: 1262070
ugccucacauauaauugcu

SEQ ID NO: 1262072 - RNA, 19 nt, Artificial Sequence
  Description of Artificial Sequence: Synthetic oligonucleotide
  Sense strand starting at position 2622 of SEQ ID NO: 1241303
uuauaugugaggcaguuaa

SEQ ID NO: 1262073 - RNA, 19 nt, Artificial Sequence
  Description of Artificial Sequence: Synthetic oligonucleotide
  Antisense strand to SEQ ID NO: 1262072
uuaacugccucacauauaa

SEQ ID NO: 1262074 - RNA, 19 nt, Artificial Sequence
  Description of Artificial Sequence: Synthetic oligonucleotide
  Sense strand starting at position 2661 of SEQ ID NO: 1241303
uuccuuucucauggaaugu

SEQ ID NO: 1262075 - RNA, 19 nt, Artificial Sequence
  Description of Artificial Sequence: Synthetic oligonucleotide
  Antisense strand to SEQ ID NO: 1262074
acauuccaugagaaaggaa

SEQ ID NO: 1262076 - RNA, 19 nt, Artificial Sequence
  Description of Artificial Sequence: Synthetic oligonucleotide
  Sense strand starting at position 2665 of SEQ ID NO: 1241303
uuucucauggaauguguaa

SEQ ID NO: 1262077 - RNA, 19 nt, Artificial Sequence
  Description of Artificial Sequence: Synthetic oligonucleotide
  Antisense strand to SEQ ID NO: 1262076
uuacacauuccaugagaaa

SEQ ID NO: 1262078 - RNA, 19 nt, Artificial Sequence
  Description of Artificial Sequence: Synthetic oligonucleotide
  Sense strand starting at position 2691 of SEQ ID NO: 1241303
ggagaaaugagaugugcau

SEQ ID NO: 1262079 - RNA, 19 nt, Artificial Sequence
  Description of Artificial Sequence: Synthetic oligonucleotide
  Antisense strand to SEQ ID NO: 1262078
augcacaucucauuucucc

SEQ ID NO: 1262080 - RNA, 19 nt, Artificial Sequence
  Description of Artificial Sequence: Synthetic oligonucleotide
  Sense strand starting at position 2693 of SEQ ID NO: 1241303
agaaaugagaugugcauaa

SEQ ID NO: 1262081 - RNA, 19 nt, Artificial Sequence
  Description of Artificial Sequence: Synthetic oligonucleotide
  Antisense strand to SEQ ID NO: 1262080
uuaugcacaucucauuucu

SEQ ID NO: 1262082 - RNA, 19 nt, Artificial Sequence
  Description of Artificial Sequence: Synthetic oligonucleotide
  Sense strand starting at position 3170 of SEQ ID NO: 1241303
ugucaaguauuggcaagau

SEQ ID NO: 1262083 - RNA, 19 nt, Artificial Sequence
  Description of Artificial Sequence: Synthetic oligonucleotide
  Antisense strand to SEQ ID NO: 1262082
aucuugccaauacuugaca

SEQ ID NO: 1262084 - RNA, 19 nt, Artificial Sequence
  Description of Artificial Sequence: Synthetic oligonucleotide
  Sense strand starting at position 3255 of SEQ ID NO: 1241303
acuguuuggcgguaucaac

SEQ ID NO: 1262085 - RNA, 19 nt, Artificial Sequence
  Description of Artificial Sequence: Synthetic oligonucleotide
  Antisense strand to SEQ ID NO: 1262084
guugauaccgccaaacagu

SEQ ID NO: 1262086 - RNA, 19 nt, Artificial Sequence
  Description of Artificial Sequence: Synthetic oligonucleotide
  Sense strand starting at position 3262 of SEQ ID NO: 1241303
ggcgguaucaacugaaucu

SEQ ID NO: 1262087 - RNA, 19 nt, Artificial Sequence
  Description of Artificial Sequence: Synthetic oligonucleotide
  Antisense strand to SEQ ID NO: 1262086
agauucaguugauaccgcc

SEQ ID NO: 1262088 - RNA, 19 nt, Artificial Sequence
  Description of Artificial Sequence: Synthetic oligonucleotide
  Sense strand starting at position 3499 of SEQ ID NO: 1241303
ucuugaucccuggaguuug

SEQ ID NO: 1262089 - RNA, 19 nt, Artificial Sequence
  Description of Artificial Sequence: Synthetic oligonucleotide
  Antisense strand to SEQ ID NO: 1262088
caaacuccagggaucaaga

SEQ ID NO: 1262090 - RNA, 19 nt, Artificial Sequence
  Description of Artificial Sequence: Synthetic oligonucleotide
  Sense strand starting at position 3632 of SEQ ID NO: 1241303
aacugaaaugucugcaugu

SEQ ID NO: 1262091 - RNA, 19 nt, Artificial Sequence
  Description of Artificial Sequence: Synthetic oligonucleotide
  Antisense strand to SEQ ID NO: 1262090
acaugcagacauuucaguu

SEQ ID NO: 1262092 - RNA, 19 nt, Artificial Sequence
  Description of Artificial Sequence: Synthetic oligonucleotide
  Sense strand starting at position 3633 of SEQ ID NO: 1241303
acugaaaugucugcaugua

SEQ ID NO: 1262093 - RNA, 19 nt, Artificial Sequence
  Description of Artificial Sequence: Synthetic oligonucleotide
  Antisense strand to SEQ ID NO: 1262092
uacaugcagacauuucagu

SEQ ID NO: 1262094 - RNA, 19 nt, Artificial Sequence
  Description of Artificial Sequence: Synthetic oligonucleotide
  Sense strand starting at position 3634 of SEQ ID NO: 1241303
cugaaaugucugcauguau

SEQ ID NO: 1262095 - RNA, 19 nt, Artificial Sequence
  Description of Artificial Sequence: Synthetic oligonucleotide
  Antisense strand to SEQ ID NO: 1262094
auacaugcagacauuucag

SEQ ID NO: 1262096 - RNA, 19 nt, Artificial Sequence
  Description of Artificial Sequence: Synthetic oligonucleotide
  Sense strand starting at position 3736 of SEQ ID NO: 1241303
auuagaagucacuguauau

SEQ ID NO: 1262097 - RNA, 19 nt, Artificial Sequence
  Description of Artificial Sequence: Synthetic oligonucleotide
  Antisense strand to SEQ ID NO: 1262096
auauacagugacuucuaau

SEQ ID NO: 1262098 - RNA, 19 nt, Artificial Sequence
  Description of Artificial Sequence: Synthetic oligonucleotide
  Sense strand starting at position 3760 of SEQ ID NO: 1241303
uuaaucuuaggguaguaau

SEQ ID NO: 1262099 - RNA, 19 nt, Artificial Sequence
  Description of Artificial Sequence: Synthetic oligonucleotide
  Antisense strand to SEQ ID NO: 1262098
auuacuacccuaagauuaa

SEQ ID NO: 1262100 - RNA, 19 nt, Artificial Sequence
  Description of Artificial Sequence: Synthetic oligonucleotide
  Sense strand starting at position 3803 of SEQ ID NO: 1241303
ucacgaagugcugauaaug

SEQ ID NO: 1262101 - RNA, 19 nt, Artificial Sequence
  Description of Artificial Sequence: Synthetic oligonucleotide
  Antisense strand to SEQ ID NO: 1262100
cauuaucagcacuucguga

SEQ ID NO: 1262102 - RNA, 19 nt, Artificial Sequence
  Description of Artificial Sequence: Synthetic oligonucleotide
  Sense strand starting at position 3854 of SEQ ID NO: 1241303
guguguucagguuauauuu

SEQ ID NO: 1262103 - RNA, 19 nt, Artificial Sequence
  Description of Artificial Sequence: Synthetic oligonucleotide
  Antisense strand to SEQ ID NO: 1262102
aaauauaaccugaacacac

SEQ ID NO: 1262104 - RNA, 19 nt, Artificial Sequence
  Description of Artificial Sequence: Synthetic oligonucleotide
  Sense strand starting at position 3865 of SEQ ID NO: 1241303
uuauauuugugagcacuuu

SEQ ID NO: 1262105 - RNA, 19 nt, Artificial Sequence
  Description of Artificial Sequence: Synthetic oligonucleotide
  Antisense strand to SEQ ID NO: 1262104
aaagugcucacaaauauaa

SEQ ID NO: 1262106 - RNA, 19 nt, Artificial Sequence
  Description of Artificial Sequence: Synthetic oligonucleotide
  Sense strand starting at position 135 of SEQ ID NO: 1241304
gggaguaaauauuauaaac

SEQ ID NO: 1262107 - RNA, 19 nt, Artificial Sequence
  Description of Artificial Sequence: Synthetic oligonucleotide
  Antisense strand to SEQ ID NO: 1262106
guuuauaauauuuacuccc

SEQ ID NO: 1262108 - RNA, 19 nt, Artificial Sequence
  Description of Artificial Sequence: Synthetic oligonucleotide
  Sense strand starting at position 463 of SEQ ID NO: 1241304
ggcggaucacucgaguuua

SEQ ID NO: 1262109 - RNA, 19 nt, Artificial Sequence
  Description of Artificial Sequence: Synthetic oligonucleotide
  Antisense strand to SEQ ID NO: 1262108
uaaacucgagugauccgcc

SEQ ID NO: 1262110 - RNA, 19 nt, Artificial Sequence
  Description of Artificial Sequence: Synthetic oligonucleotide
  Sense strand starting at position 719 of SEQ ID NO: 1241304
ggaggaaauuauuauccac

SEQ ID NO: 1262111 - RNA, 19 nt, Artificial Sequence
  Description of Artificial Sequence: Synthetic oligonucleotide
  Antisense strand to SEQ ID NO: 1262110
guggauaauaauuuccucc

SEQ ID NO: 1262112 - RNA, 19 nt, Artificial Sequence
  Description of Artificial Sequence: Synthetic oligonucleotide
  Sense strand starting at position 722 of SEQ ID NO: 1241304
ggaaauuauuauccaccgu

SEQ ID NO: 1262113 - RNA, 19 nt, Artificial Sequence
  Description of Artificial Sequence: Synthetic oligonucleotide
  Antisense strand to SEQ ID NO: 1262112
acgguggauaauaauuucc

SEQ ID NO: 1262114 - RNA, 19 nt, Artificial Sequence
  Description of Artificial Sequence: Synthetic oligonucleotide
  Sense strand starting at position 799 of SEQ ID NO: 1241304
agguacccauccuugagaa

SEQ ID NO: 1262115 - RNA, 19 nt, Artificial Sequence
  Description of Artificial Sequence: Synthetic oligonucleotide
  Antisense strand to SEQ ID NO: 1262114
uucucaaggauggguaccu

SEQ ID NO: 1262116 - RNA, 19 nt, Artificial Sequence
  Description of Artificial Sequence: Synthetic oligonucleotide
  Sense strand starting at position 800 of SEQ ID NO: 1241304
gguacccauccuugagaaa

SEQ ID NO: 1262117 - RNA, 19 nt, Artificial Sequence
  Description of Artificial Sequence: Synthetic oligonucleotide
  Antisense strand to SEQ ID NO: 1262116
uuucucaaggauggguacc

SEQ ID NO: 1262118 - RNA, 19 nt, Artificial Sequence
  Description of Artificial Sequence: Synthetic oligonucleotide
  Sense strand starting at position 852 of SEQ ID NO: 1241304
gaaggauguucuccgccau

SEQ ID NO: 1262119 - RNA, 19 nt, Artificial Sequence
  Description of Artificial Sequence: Synthetic oligonucleotide
  Antisense strand to SEQ ID NO: 1262118
auggcggagaacauccuuc

SEQ ID NO: 1262120 - RNA, 19 nt, Artificial Sequence
  Description of Artificial Sequence: Synthetic oligonucleotide
  Sense strand starting at position 853 of SEQ ID NO: 1241304
aaggauguucuccgccaua

SEQ ID NO: 1262121 - RNA, 19 nt, Artificial Sequence
  Description of Artificial Sequence: Synthetic oligonucleotide
  Antisense strand to SEQ ID NO: 1262120
uauggcggagaacauccuu

SEQ ID NO: 1262122 - RNA, 19 nt, Artificial Sequence
  Description of Artificial Sequence: Synthetic oligonucleotide
  Sense strand starting at position 866 of SEQ ID NO: 1241304
gccauacugugucuaacaa

SEQ ID NO: 1262123 - RNA, 19 nt, Artificial Sequence
  Description of Artificial Sequence: Synthetic oligonucleotide
  Antisense strand to SEQ ID NO: 1262122
uuguuagacacaguauggc

SEQ ID NO: 1262124 - RNA, 19 nt, Artificial Sequence
  Description of Artificial Sequence: Synthetic oligonucleotide
  Sense strand starting at position 867 of SEQ ID NO: 1241304
ccauacugugucuaacaau

SEQ ID NO: 1262125 - RNA, 19 nt, Artificial Sequence
  Description of Artificial Sequence: Synthetic oligonucleotide
  Antisense strand to SEQ ID NO: 1262124
auuguuagacacaguaugg

SEQ ID NO: 1262126 - RNA, 19 nt, Artificial Sequence
  Description of Artificial Sequence: Synthetic oligonucleotide
  Sense strand starting at position 950 of SEQ ID NO: 1241304
auagguagaucucuaggua

SEQ ID NO: 1262127 - RNA, 19 nt, Artificial Sequence
  Description of Artificial Sequence: Synthetic oligonucleotide
  Antisense strand to SEQ ID NO: 1262126
uaccuagagaucuaccuau

SEQ ID NO: 1262128 - RNA, 19 nt, Artificial Sequence
  Description of Artificial Sequence: Synthetic oligonucleotide
  Sense strand starting at position 951 of SEQ ID NO: 1241304
uagguagaucucuagguac

SEQ ID NO: 1262129 - RNA, 19 nt, Artificial Sequence
  Description of Artificial Sequence: Synthetic oligonucleotide
  Antisense strand to SEQ ID NO: 1262128
guaccuagagaucuaccua

SEQ ID NO: 1262130 - RNA, 19 nt, Artificial Sequence
  Description of Artificial Sequence: Synthetic oligonucleotide
  Sense strand starting at position 953 of SEQ ID NO: 1241304
gguagaucucuagguacug

SEQ ID NO: 1262131 - RNA, 19 nt, Artificial Sequence
  Description of Artificial Sequence: Synthetic oligonucleotide
  Antisense strand to SEQ ID NO: 1262130
caguaccuagagaucuacc

SEQ ID NO: 1262132 - RNA, 19 nt, Artificial Sequence
  Description of Artificial Sequence: Synthetic oligonucleotide
  Sense strand starting at position 954 of SEQ ID NO: 1241304
guagaucucuagguacuga

SEQ ID NO: 1262133 - RNA, 19 nt, Artificial Sequence
  Description of Artificial Sequence: Synthetic oligonucleotide
  Antisense strand to SEQ ID NO: 1262132
ucaguaccuagagaucuac

SEQ ID NO: 1262134 - RNA, 19 nt, Artificial Sequence
  Description of Artificial Sequence: Synthetic oligonucleotide
  Sense strand starting at position 1252 of SEQ ID NO: 1241304
uaagaaagaucuguguuua

SEQ ID NO: 1262135 - RNA, 19 nt, Artificial Sequence
  Description of Artificial Sequence: Synthetic oligonucleotide
  Antisense strand to SEQ ID NO: 1262134
uaaacacagaucuuucuua

SEQ ID NO: 1262136 - RNA, 19 nt, Artificial Sequence
  Description of Artificial Sequence: Synthetic oligonucleotide
  Sense strand starting at position 1253 of SEQ ID NO: 1241304
aagaaagaucuguguuuaa

SEQ ID NO: 1262137 - RNA, 19 nt, Artificial Sequence
  Description of Artificial Sequence: Synthetic oligonucleotide
  Antisense strand to SEQ ID NO: 1262136
uuaaacacagaucuuucuu

SEQ ID NO: 1262138 - RNA, 19 nt, Artificial Sequence
  Description of Artificial Sequence: Synthetic oligonucleotide
  Sense strand starting at position 1295 of SEQ ID NO: 1241304
aggcuuuaugcacggacua

SEQ ID NO: 1262139 - RNA, 19 nt, Artificial Sequence
  Description of Artificial Sequence: Synthetic oligonucleotide
  Antisense strand to SEQ ID NO: 1262138
uaguccgugcauaaagccu

SEQ ID NO: 1262140 - RNA, 19 nt, Artificial Sequence
  Description of Artificial Sequence: Synthetic oligonucleotide
  Sense strand starting at position 1297 of SEQ ID NO: 1241304
gcuuuaugcacggacuaua

SEQ ID NO: 1262141 - RNA, 19 nt, Artificial Sequence
  Description of Artificial Sequence: Synthetic oligonucleotide
  Antisense strand to SEQ ID NO: 1262140
uauaguccgugcauaaagc

SEQ ID NO: 1262142 - RNA, 19 nt, Artificial Sequence
  Description of Artificial Sequence: Synthetic oligonucleotide
  Sense strand starting at position 1501 of SEQ ID NO: 1241304
aggguauauaaaggaguuu

SEQ ID NO: 1262143 - RNA, 19 nt, Artificial Sequence
  Description of Artificial Sequence: Synthetic oligonucleotide
  Antisense strand to SEQ ID NO: 1262142
aaacuccuuuauauacccu

SEQ ID NO: 1262144 - RNA, 19 nt, Artificial Sequence
  Description of Artificial Sequence: Synthetic oligonucleotide
  Sense strand starting at position 1507 of SEQ ID NO: 1241304
uauaaaggaguuugaaugu

SEQ ID NO: 1262145 - RNA, 19 nt, Artificial Sequence
  Description of Artificial Sequence: Synthetic oligonucleotide
  Antisense strand to SEQ ID NO: 1262144
acauucaaacuccuuuaua

SEQ ID NO: 1262146 - RNA, 19 nt, Artificial Sequence
  Description of Artificial Sequence: Synthetic oligonucleotide
  Sense strand starting at position 1604 of SEQ ID NO: 1241304
ugauuaagguucuuaguuu

SEQ ID NO: 1262147 - RNA, 19 nt, Artificial Sequence
  Description of Artificial Sequence: Synthetic oligonucleotide
  Antisense strand to SEQ ID NO: 1262146
aaacuaagaaccuuaauca

SEQ ID NO: 1262148 - RNA, 19 nt, Artificial Sequence
  Description of Artificial Sequence: Synthetic oligonucleotide
  Sense strand starting at position 1627 of SEQ ID NO: 1241304
ccaucccagggaugugaaa

SEQ ID NO: 1262149 - RNA, 19 nt, Artificial Sequence
  Description of Artificial Sequence: Synthetic oligonucleotide
  Antisense strand to SEQ ID NO: 1262148
uuucacaucccugggaugg

SEQ ID NO: 1262150 - RNA, 19 nt, Artificial Sequence
  Description of Artificial Sequence: Synthetic oligonucleotide
  Sense strand starting at position 2456 of SEQ ID NO: 1241304
acgcauuuguuacugggau

SEQ ID NO: 1262151 - RNA, 19 nt, Artificial Sequence
  Description of Artificial Sequence: Synthetic oligonucleotide
  Antisense strand to SEQ ID NO: 1262150
aucccaguaacaaaugcgu

SEQ ID NO: 1262152 - RNA, 19 nt, Artificial Sequence
  Description of Artificial Sequence: Synthetic oligonucleotide
  Sense strand starting at position 2460 of SEQ ID NO: 1241304
auuuguuacugggauggua

SEQ ID NO: 1262153 - RNA, 19 nt, Artificial Sequence
  Description of Artificial Sequence: Synthetic oligonucleotide
  Antisense strand to SEQ ID NO: 1262152
uaccaucccaguaacaaau

SEQ ID NO: 1262154 - RNA, 19 nt, Artificial Sequence
  Description of Artificial Sequence: Synthetic oligonucleotide
  Sense strand starting at position 2495 of SEQ ID NO: 1241304
uuggcuuugaagggagaaa

SEQ ID NO: 1262155 - RNA, 19 nt, Artificial Sequence
  Description of Artificial Sequence: Synthetic oligonucleotide
  Antisense strand to SEQ ID NO: 1262154
uuucucccuucaaagccaa

SEQ ID NO: 1262156 - RNA, 19 nt, Artificial Sequence
  Description of Artificial Sequence: Synthetic oligonucleotide
  Sense strand starting at position 2584 of SEQ ID NO: 1241304
ucugcuaaacgauaacagu

SEQ ID NO: 1262157 - RNA, 19 nt, Artificial Sequence
  Description of Artificial Sequence: Synthetic oligonucleotide
  Antisense strand to SEQ ID NO: 1262156
acuguuaucguuuagcaga

SEQ ID NO: 1262158 - RNA, 19 nt, Artificial Sequence
  Description of Artificial Sequence: Synthetic oligonucleotide
  Sense strand starting at position 2719 of SEQ ID NO: 1241304
uguagauacugucucccua

SEQ ID NO: 1262159 - RNA, 19 nt, Artificial Sequence
  Description of Artificial Sequence: Synthetic oligonucleotide
  Antisense strand to SEQ ID NO: 1262158
uagggagacaguaucuaca

SEQ ID NO: 1262160 - RNA, 19 nt, Artificial Sequence
  Description of Artificial Sequence: Synthetic oligonucleotide
  Sense strand starting at position 2906 of SEQ ID NO: 1241304
agcaauuauaugugaggca

SEQ ID NO: 1262161 - RNA, 19 nt, Artificial Sequence
  Description of Artificial Sequence: Synthetic oligonucleotide
  Antisense strand to SEQ ID NO: 1262160
ugccucacauauaauugcu

SEQ ID NO: 1262162 - RNA, 19 nt, Artificial Sequence
  Description of Artificial Sequence: Synthetic oligonucleotide
  Sense strand starting at position 2911 of SEQ ID NO: 1241304
uuauaugugaggcaguuaa

SEQ ID NO: 1262163 - RNA, 19 nt, Artificial Sequence
  Description of Artificial Sequence: Synthetic oligonucleotide
  Antisense strand to SEQ ID NO: 1262162
uuaacugccucacauauaa

SEQ ID NO: 1262164 - RNA, 19 nt, Artificial Sequence
  Description of Artificial Sequence: Synthetic oligonucleotide
  Sense strand starting at position 2950 of SEQ ID NO: 1241304
uuccuuucucauggaaugu

SEQ ID NO: 1262165 - RNA, 19 nt, Artificial Sequence
  Description of Artificial Sequence: Synthetic oligonucleotide
  Antisense strand to SEQ ID NO: 1262164
acauuccaugagaaaggaa

SEQ ID NO: 1262166 - RNA, 19 nt, Artificial Sequence
  Description of Artificial Sequence: Synthetic oligonucleotide
  Sense strand starting at position 2954 of SEQ ID NO: 1241304
uuucucauggaauguguaa

SEQ ID NO: 1262167 - RNA, 19 nt, Artificial Sequence
  Description of Artificial Sequence: Synthetic oligonucleotide
  Antisense strand to SEQ ID NO: 1262166
uuacacauuccaugagaaa

SEQ ID NO: 1262168 - RNA, 19 nt, Artificial Sequence
  Description of Artificial Sequence: Synthetic oligonucleotide
  Sense strand starting at position 2980 of SEQ ID NO: 1241304
ggagaaaugagaugugcau

SEQ ID NO: 1262169 - RNA, 19 nt, Artificial Sequence
  Description of Artificial Sequence: Synthetic oligonucleotide
  Antisense strand to SEQ ID NO: 1262168
augcacaucucauuucucc

SEQ ID NO: 1262170 - RNA, 19 nt, Artificial Sequence
  Description of Artificial Sequence: Synthetic oligonucleotide
  Sense strand starting at position 2982 of SEQ ID NO: 1241304
agaaaugagaugugcauaa

SEQ ID NO: 1262171 - RNA, 19 nt, Artificial Sequence
  Description of Artificial Sequence: Synthetic oligonucleotide
  Antisense strand to SEQ ID NO: 1262170
uuaugcacaucucauuucu

SEQ ID NO: 1262172 - RNA, 19 nt, Artificial Sequence
  Description of Artificial Sequence: Synthetic oligonucleotide
  Sense strand starting at position 3459 of SEQ ID NO: 1241304
ugucaaguauuggcaagau

SEQ ID NO: 1262173 - RNA, 19 nt, Artificial Sequence
  Description of Artificial Sequence: Synthetic oligonucleotide
  Antisense strand to SEQ ID NO: 1262172
aucuugccaauacuugaca

SEQ ID NO: 1262174 - RNA, 19 nt, Artificial Sequence
  Description of Artificial Sequence: Synthetic oligonucleotide
  Sense strand starting at position 3544 of SEQ ID NO: 1241304
acuguuuggcgguaucaac

SEQ ID NO: 1262175 - RNA, 19 nt, Artificial Sequence
  Description of Artificial Sequence: Synthetic oligonucleotide
  Antisense strand to SEQ ID NO: 1262174
guugauaccgccaaacagu

SEQ ID NO: 1262176 - RNA, 19 nt, Artificial Sequence
  Description of Artificial Sequence: Synthetic oligonucleotide
  Sense strand starting at position 3551 of SEQ ID NO: 1241304
ggcgguaucaacugaaucu

SEQ ID NO: 1262177 - RNA, 19 nt, Artificial Sequence
  Description of Artificial Sequence: Synthetic oligonucleotide
  Antisense strand to SEQ ID NO: 1262176
agauucaguugauaccgcc

SEQ ID NO: 1262178 - RNA, 19 nt, Artificial Sequence
  Description of Artificial Sequence: Synthetic oligonucleotide
  Sense strand starting at position 3788 of SEQ ID NO: 1241304
ucuugaucccuggaguuug

SEQ ID NO: 1262179 - RNA, 19 nt, Artificial Sequence
  Description of Artificial Sequence: Synthetic oligonucleotide
  Antisense strand to SEQ ID NO: 1262178
caaacuccagggaucaaga

SEQ ID NO: 1262180 - RNA, 19 nt, Artificial Sequence
  Description of Artificial Sequence: Synthetic oligonucleotide
  Sense strand starting at position 3921 of SEQ ID NO: 1241304
aacugaaaugucugcaugu

SEQ ID NO: 1262181 - RNA, 19 nt, Artificial Sequence
  Description of Artificial Sequence: Synthetic oligonucleotide
  Antisense strand to SEQ ID NO: 1262180
acaugcagacauuucaguu

SEQ ID NO: 1262182 - RNA, 19 nt, Artificial Sequence
  Description of Artificial Sequence: Synthetic oligonucleotide
  Sense strand starting at position 3922 of SEQ ID NO: 1241304
acugaaaugucugcaugua

SEQ ID NO: 1262183 - RNA, 19 nt, Artificial Sequence
  Description of Artificial Sequence: Synthetic oligonucleotide
  Antisense strand to SEQ ID NO: 1262182
uacaugcagacauuucagu

SEQ ID NO: 1262184 - RNA, 19 nt, Artificial Sequence
  Description of Artificial Sequence: Synthetic oligonucleotide
  Sense strand starting at position 3923 of SEQ ID NO: 1241304
cugaaaugucugcauguau

SEQ ID NO: 1262185 - RNA, 19 nt, Artificial Sequence
  Description of Artificial Sequence: Synthetic oligonucleotide
  Antisense strand to SEQ ID NO: 1262184
auacaugcagacauuucag

SEQ ID NO: 1262186 - RNA, 19 nt, Artificial Sequence
  Description of Artificial Sequence: Synthetic oligonucleotide
  Sense strand starting at position 125 of SEQ ID NO: 1241305
uugucuguccucugccaga

SEQ ID NO: 1262187 - RNA, 19 nt, Artificial Sequence
  Description of Artificial Sequence: Synthetic oligonucleotide
  Antisense strand to SEQ ID NO: 1262186
ucuggcagaggacagacaa

SEQ ID NO: 1262188 - RNA, 19 nt, Artificial Sequence
  Description of Artificial Sequence: Synthetic oligonucleotide
  Sense strand starting at position 161 of SEQ ID NO: 1241305
aggccugcuccaggaacaa

SEQ ID NO: 1262189 - RNA, 19 nt, Artificial Sequence
  Description of Artificial Sequence: Synthetic oligonucleotide
  Antisense strand to SEQ ID NO: 1262188
uuguuccuggagcaggccu

SEQ ID NO: 1262190 - RNA, 19 nt, Artificial Sequence
  Description of Artificial Sequence: Synthetic oligonucleotide
  Sense strand starting at position 204 of SEQ ID NO: 1241305
cccuuagagucaccuuuga

SEQ ID NO: 1262191 - RNA, 19 nt, Artificial Sequence
  Description of Artificial Sequence: Synthetic oligonucleotide
  Antisense strand to SEQ ID NO: 1262190
ucaaaggugacucuaaggg

SEQ ID NO: 1262192 - RNA, 19 nt, Artificial Sequence
  Description of Artificial Sequence: Synthetic oligonucleotide
  Sense strand starting at position 208 of SEQ ID NO: 1241305
uagagucaccuuugaagag

SEQ ID NO: 1262193 - RNA, 19 nt, Artificial Sequence
  Description of Artificial Sequence: Synthetic oligonucleotide
  Antisense strand to SEQ ID NO: 1262192
cucuucaaaggugacucua

SEQ ID NO: 1262194 - RNA, 19 nt, Artificial Sequence
  Description of Artificial Sequence: Synthetic oligonucleotide
  Sense strand starting at position 397 of SEQ ID NO: 1241305
gcccguguccagcuuuaca

SEQ ID NO: 1262195 - RNA, 19 nt, Artificial Sequence
  Description of Artificial Sequence: Synthetic oligonucleotide
  Antisense strand to SEQ ID NO: 1262194
uguaaagcuggacacgggc

SEQ ID NO: 1262196 - RNA, 19 nt, Artificial Sequence
  Description of Artificial Sequence: Synthetic oligonucleotide
  Sense strand starting at position 567 of SEQ ID NO: 1241305
cugugaucagcugugugca

SEQ ID NO: 1262197 - RNA, 19 nt, Artificial Sequence
  Description of Artificial Sequence: Synthetic oligonucleotide
  Antisense strand to SEQ ID NO: 1262196
ugcacacagcugaucacag

SEQ ID NO: 1262198 - RNA, 19 nt, Artificial Sequence
  Description of Artificial Sequence: Synthetic oligonucleotide
  Sense strand starting at position 568 of SEQ ID NO: 1241305
ugugaucagcugugugcau

SEQ ID NO: 1262199 - RNA, 19 nt, Artificial Sequence
  Description of Artificial Sequence: Synthetic oligonucleotide
  Antisense strand to SEQ ID NO: 1262198
augcacacagcugaucaca

SEQ ID NO: 1262200 - RNA, 19 nt, Artificial Sequence
  Description of Artificial Sequence: Synthetic oligonucleotide
  Sense strand starting at position 637 of SEQ ID NO: 1241305
gaucuagggccaugcauau

SEQ ID NO: 1262201 - RNA, 19 nt, Artificial Sequence
  Description of Artificial Sequence: Synthetic oligonucleotide
  Antisense strand to SEQ ID NO: 1262200
auaugcauggcccuagauc

SEQ ID NO: 1262202 - RNA, 19 nt, Artificial Sequence
  Description of Artificial Sequence: Synthetic oligonucleotide
  Sense strand starting at position 679 of SEQ ID NO: 1241305
cgcugugagacuugaggca

SEQ ID NO: 1262203 - RNA, 19 nt, Artificial Sequence
  Description of Artificial Sequence: Synthetic oligonucleotide
  Antisense strand to SEQ ID NO: 1262202
ugccucaagucucacagcg

SEQ ID NO: 1262204 - RNA, 19 nt, Artificial Sequence
  Description of Artificial Sequence: Synthetic oligonucleotide
  Sense strand starting at position 1208 of SEQ ID NO: 1241305
gagugagagucagugucaa

SEQ ID NO: 1262205 - RNA, 19 nt, Artificial Sequence
  Description of Artificial Sequence: Synthetic oligonucleotide
  Antisense strand to SEQ ID NO: 1262204
uugacacugacucucacuc

SEQ ID NO: 1262206 - RNA, 19 nt, Artificial Sequence
  Description of Artificial Sequence: Synthetic oligonucleotide
  Sense strand starting at position 1444 of SEQ ID NO: 1241305
aggacagccuuuccggaaa

SEQ ID NO: 1262207 - RNA, 19 nt, Artificial Sequence
  Description of Artificial Sequence: Synthetic oligonucleotide
  Antisense strand to SEQ ID NO: 1262206
uuuccggaaaggcuguccu

SEQ ID NO: 1262208 - RNA, 19 nt, Artificial Sequence
  Description of Artificial Sequence: Synthetic oligonucleotide
  Sense strand starting at position 1499 of SEQ ID NO: 1241305
uuucaugcuucguguuguu

SEQ ID NO: 1262209 - RNA, 19 nt, Artificial Sequence
  Description of Artificial Sequence: Synthetic oligonucleotide
  Antisense strand to SEQ ID NO: 1262208
aacaacacgaagcaugaaa

SEQ ID NO: 1262210 - RNA, 19 nt, Artificial Sequence
  Description of Artificial Sequence: Synthetic oligonucleotide
  Sense strand starting at position 2159 of SEQ ID NO: 1241305
ggagccuuuccugagacca

SEQ ID NO: 1262211 - RNA, 19 nt, Artificial Sequence
  Description of Artificial Sequence: Synthetic oligonucleotide
  Antisense strand to SEQ ID NO: 1262210
uggucucaggaaaggcucc

SEQ ID NO: 1262212 - RNA, 19 nt, Artificial Sequence
  Description of Artificial Sequence: Synthetic oligonucleotide
  Sense strand starting at position 2229 of SEQ ID NO: 1241305
gccagacccucccauuaga

SEQ ID NO: 1262213 - RNA, 19 nt, Artificial Sequence
  Description of Artificial Sequence: Synthetic oligonucleotide
  Antisense strand to SEQ ID NO: 1262212
ucuaaugggagggucuggc

SEQ ID NO: 1262214 - RNA, 19 nt, Artificial Sequence
  Description of Artificial Sequence: Synthetic oligonucleotide
  Sense strand starting at position 2334 of SEQ ID NO: 1241305
uaggccuucccagauguua

SEQ ID NO: 1262215 - RNA, 19 nt, Artificial Sequence
  Description of Artificial Sequence: Synthetic oligonucleotide
  Antisense strand to SEQ ID NO: 1262214
uaacaucugggaaggccua

SEQ ID NO: 1262216 - RNA, 19 nt, Artificial Sequence
  Description of Artificial Sequence: Synthetic oligonucleotide
  Sense strand starting at position 2567 of SEQ ID NO: 1241305
ggcuuaucauggccaugca

SEQ ID NO: 1262217 - RNA, 19 nt, Artificial Sequence
  Description of Artificial Sequence: Synthetic oligonucleotide
  Antisense strand to SEQ ID NO: 1262216
ugcauggccaugauaagcc

SEQ ID NO: 1262218 - RNA, 19 nt, Artificial Sequence
  Description of Artificial Sequence: Synthetic oligonucleotide
  Sense strand starting at position 2604 of SEQ ID NO: 1241305
ggaggagccucgggucuau

SEQ ID NO: 1262219 - RNA, 19 nt, Artificial Sequence
  Description of Artificial Sequence: Synthetic oligonucleotide
  Antisense strand to SEQ ID NO: 1262218
auagacccgaggcuccucc

SEQ ID NO: 1262220 - RNA, 19 nt, Artificial Sequence
  Description of Artificial Sequence: Synthetic oligonucleotide
  Sense strand starting at position 2847 of SEQ ID NO: 1241305
agcguuaggagcuguguuu

SEQ ID NO: 1262221 - RNA, 19 nt, Artificial Sequence
  Description of Artificial Sequence: Synthetic oligonucleotide
  Antisense strand to SEQ ID NO: 1262220
aaacacagcuccuaacgcu

SEQ ID NO: 1262222 - RNA, 19 nt, Artificial Sequence
  Description of Artificial Sequence: Synthetic oligonucleotide
  Sense strand starting at position 2862 of SEQ ID NO: 1241305
guuugcuuuccuggcuuua

SEQ ID NO: 1262223 - RNA, 19 nt, Artificial Sequence
  Description of Artificial Sequence: Synthetic oligonucleotide
  Antisense strand to SEQ ID NO: 1262222
uaaagccaggaaagcaaac

SEQ ID NO: 1262224 - RNA, 19 nt, Artificial Sequence
  Description of Artificial Sequence: Synthetic oligonucleotide
  Sense strand starting at position 2965 of SEQ ID NO: 1241305
ucacuuuccucugggagaa

SEQ ID NO: 1262225 - RNA, 19 nt, Artificial Sequence
  Description of Artificial Sequence: Synthetic oligonucleotide
  Antisense strand to SEQ ID NO: 1262224
uucucccagaggaaaguga

SEQ ID NO: 1262226 - RNA, 19 nt, Artificial Sequence
  Description of Artificial Sequence: Synthetic oligonucleotide
  Sense strand starting at position 3122 of SEQ ID NO: 1241305
ccaguuugcugcgguggaa

SEQ ID NO: 1262227 - RNA, 19 nt, Artificial Sequence
  Description of Artificial Sequence: Synthetic oligonucleotide
  Antisense strand to SEQ ID NO: 1262226
uuccaccgcagcaaacugg

SEQ ID NO: 1262228 - RNA, 19 nt, Artificial Sequence
  Description of Artificial Sequence: Synthetic oligonucleotide
  Sense strand starting at position 3282 of SEQ ID NO: 1241305
gagacagucaagugauuga

SEQ ID NO: 1262229 - RNA, 19 nt, Artificial Sequence
  Description of Artificial Sequence: Synthetic oligonucleotide
  Antisense strand to SEQ ID NO: 1262228
ucaaucacuugacugucuc

SEQ ID NO: 1262230 - RNA, 19 nt, Artificial Sequence
  Description of Artificial Sequence: Synthetic oligonucleotide
  Sense strand starting at position 3286 of SEQ ID NO: 1241305
cagucaagugauugaugga

SEQ ID NO: 1262231 - RNA, 19 nt, Artificial Sequence
  Description of Artificial Sequence: Synthetic oligonucleotide
  Antisense strand to SEQ ID NO: 1262230
uccaucaaucacuugacug

SEQ ID NO: 1262232 - RNA, 19 nt, Artificial Sequence
  Description of Artificial Sequence: Synthetic oligonucleotide
  Sense strand starting at position 3368 of SEQ ID NO: 1241305
cugccugauucggacuuga

SEQ ID NO: 1262233 - RNA, 19 nt, Artificial Sequence
  Description of Artificial Sequence: Synthetic oligonucleotide
  Antisense strand to SEQ ID NO: 1262232
ucaaguccgaaucaggcag

SEQ ID NO: 1262234 - RNA, 19 nt, Artificial Sequence
  Description of Artificial Sequence: Synthetic oligonucleotide
  Sense strand starting at position 3576 of SEQ ID NO: 1241305
cgccuucuuguuugggaga

SEQ ID NO: 1262235 - RNA, 19 nt, Artificial Sequence
  Description of Artificial Sequence: Synthetic oligonucleotide
  Antisense strand to SEQ ID NO: 1262234
ucucccaaacaagaaggcg

SEQ ID NO: 1262236 - RNA, 19 nt, Artificial Sequence
  Description of Artificial Sequence: Synthetic oligonucleotide
  Sense strand starting at position 3577 of SEQ ID NO: 1241305
gccuucuuguuugggagaa

SEQ ID NO: 1262237 - RNA, 19 nt, Artificial Sequence
  Description of Artificial Sequence: Synthetic oligonucleotide
  Antisense strand to SEQ ID NO: 1262236
uucucccaaacaagaaggc

SEQ ID NO: 1262238 - RNA, 19 nt, Artificial Sequence
  Description of Artificial Sequence: Synthetic oligonucleotide
  Sense strand starting at position 3578 of SEQ ID NO: 1241305
ccuucuuguuugggagaac

SEQ ID NO: 1262239 - RNA, 19 nt, Artificial Sequence
  Description of Artificial Sequence: Synthetic oligonucleotide
  Antisense strand to SEQ ID NO: 1262238
guucucccaaacaagaagg

SEQ ID NO: 1262240 - RNA, 19 nt, Artificial Sequence
  Description of Artificial Sequence: Synthetic oligonucleotide
  Sense strand starting at position 3579 of SEQ ID NO: 1241305
cuucuuguuugggagaacu

SEQ ID NO: 1262241 - RNA, 19 nt, Artificial Sequence
  Description of Artificial Sequence: Synthetic oligonucleotide
  Antisense strand to SEQ ID NO: 1262240
aguucucccaaacaagaag

SEQ ID NO: 1262242 - RNA, 19 nt, Artificial Sequence
  Description of Artificial Sequence: Synthetic oligonucleotide
  Sense strand starting at position 3629 of SEQ ID NO: 1241305
cucgaugccugacacagau

SEQ ID NO: 1262243 - RNA, 19 nt, Artificial Sequence
  Description of Artificial Sequence: Synthetic oligonucleotide
  Antisense strand to SEQ ID NO: 1262242
aucugugucaggcaucgag

SEQ ID NO: 1262244 - RNA, 19 nt, Artificial Sequence
  Description of Artificial Sequence: Synthetic oligonucleotide
  Sense strand starting at position 3940 of SEQ ID NO: 1241305
gcagcugugcggugaaucu

SEQ ID NO: 1262245 - RNA, 19 nt, Artificial Sequence
  Description of Artificial Sequence: Synthetic oligonucleotide
  Antisense strand to SEQ ID NO: 1262244
agauucaccgcacagcugc

SEQ ID NO: 1262246 - RNA, 19 nt, Artificial Sequence
  Description of Artificial Sequence: Synthetic oligonucleotide
  Sense strand starting at position 3947 of SEQ ID NO: 1241305
ugcggugaaucucuuagga

SEQ ID NO: 1262247 - RNA, 19 nt, Artificial Sequence
  Description of Artificial Sequence: Synthetic oligonucleotide
  Antisense strand to SEQ ID NO: 1262246
uccuaagagauucaccgca

SEQ ID NO: 1262248 - RNA, 19 nt, Artificial Sequence
  Description of Artificial Sequence: Synthetic oligonucleotide
  Sense strand starting at position 3949 of SEQ ID NO: 1241305
cggugaaucucuuaggagg

SEQ ID NO: 1262249 - RNA, 19 nt, Artificial Sequence
  Description of Artificial Sequence: Synthetic oligonucleotide
  Antisense strand to SEQ ID NO: 1262248
ccuccuaagagauucaccg

SEQ ID NO: 1262250 - RNA, 19 nt, Artificial Sequence
  Description of Artificial Sequence: Synthetic oligonucleotide
  Sense strand starting at position 3951 of SEQ ID NO: 1241305
gugaaucucuuaggagguu

SEQ ID NO: 1262251 - RNA, 19 nt, Artificial Sequence
  Description of Artificial Sequence: Synthetic oligonucleotide
  Antisense strand to SEQ ID NO: 1262250
aaccuccuaagagauucac

SEQ ID NO: 1262252 - RNA, 19 nt, Artificial Sequence
  Description of Artificial Sequence: Synthetic oligonucleotide
  Sense strand starting at position 3952 of SEQ ID NO: 1241305
ugaaucucuuaggagguua

SEQ ID NO: 1262253 - RNA, 19 nt, Artificial Sequence
  Description of Artificial Sequence: Synthetic oligonucleotide
  Antisense strand to SEQ ID NO: 1262252
uaaccuccuaagagauuca

SEQ ID NO: 1262254 - RNA, 19 nt, Artificial Sequence
  Description of Artificial Sequence: Synthetic oligonucleotide
  Sense strand starting at position 83 of SEQ ID NO: 1241306
uuaugaacuguaugacaac

SEQ ID NO: 1262255 - RNA, 19 nt, Artificial Sequence
  Description of Artificial Sequence: Synthetic oligonucleotide
  Antisense strand to SEQ ID NO: 1262254
guugucauacaguucauaa

SEQ ID NO: 1262256 - RNA, 19 nt, Artificial Sequence
  Description of Artificial Sequence: Synthetic oligonucleotide
  Sense strand starting at position 126 of SEQ ID NO: 1241306
gcuggcuugccggcaaaua

SEQ ID NO: 1262257 - RNA, 19 nt, Artificial Sequence
  Description of Artificial Sequence: Synthetic oligonucleotide
  Antisense strand to SEQ ID NO: 1262256
uauuugccggcaagccagc

SEQ ID NO: 1262258 - RNA, 19 nt, Artificial Sequence
  Description of Artificial Sequence: Synthetic oligonucleotide
  Sense strand starting at position 136 of SEQ ID NO: 1241306
cggcaaauaccuuaauuaa

SEQ ID NO: 1262259 - RNA, 19 nt, Artificial Sequence
  Description of Artificial Sequence: Synthetic oligonucleotide
  Antisense strand to SEQ ID NO: 1262258
uuaauuaagguauuugccg

SEQ ID NO: 1262260 - RNA, 19 nt, Artificial Sequence
  Description of Artificial Sequence: Synthetic oligonucleotide
  Sense strand starting at position 576 of SEQ ID NO: 1241306
gcugaaucuuacgcagaaa

SEQ ID NO: 1262261 - RNA, 19 nt, Artificial Sequence
  Description of Artificial Sequence: Synthetic oligonucleotide
  Antisense strand to SEQ ID NO: 1262260
uuucugcguaagauucagc

SEQ ID NO: 1262262 - RNA, 19 nt, Artificial Sequence
  Description of Artificial Sequence: Synthetic oligonucleotide
  Sense strand starting at position 615 of SEQ ID NO: 1241306
uggagaaguucccuauugu

SEQ ID NO: 1262263 - RNA, 19 nt, Artificial Sequence
  Description of Artificial Sequence: Synthetic oligonucleotide
  Antisense strand to SEQ ID NO: 1262262
acaauagggaacuucucca

SEQ ID NO: 1262264 - RNA, 19 nt, Artificial Sequence
  Description of Artificial Sequence: Synthetic oligonucleotide
  Sense strand starting at position 616 of SEQ ID NO: 1241306
ggagaaguucccuauugug

SEQ ID NO: 1262265 - RNA, 19 nt, Artificial Sequence
  Description of Artificial Sequence: Synthetic oligonucleotide
  Antisense strand to SEQ ID NO: 1262264
cacaauagggaacuucucc

SEQ ID NO: 1262266 - RNA, 19 nt, Artificial Sequence
  Description of Artificial Sequence: Synthetic oligonucleotide
  Sense strand starting at position 623 of SEQ ID NO: 1241306
uucccuauuguggauuaca

SEQ ID NO: 1262267 - RNA, 19 nt, Artificial Sequence
  Description of Artificial Sequence: Synthetic oligonucleotide
  Antisense strand to SEQ ID NO: 1262266
uguaauccacaauagggaa

SEQ ID NO: 1262268 - RNA, 19 nt, Artificial Sequence
  Description of Artificial Sequence: Synthetic oligonucleotide
  Sense strand starting at position 634 of SEQ ID NO: 1241306
ggauuacagucuucucaau

SEQ ID NO: 1262269 - RNA, 19 nt, Artificial Sequence
  Description of Artificial Sequence: Synthetic oligonucleotide
  Antisense strand to SEQ ID NO: 1262268
auugagaagacuguaaucc

SEQ ID NO: 1262270 - RNA, 19 nt, Artificial Sequence
  Description of Artificial Sequence: Synthetic oligonucleotide
  Sense strand starting at position 662 of SEQ ID NO: 1241306
uuuguuacucaaugugaaa

SEQ ID NO: 1262271 - RNA, 19 nt, Artificial Sequence
  Description of Artificial Sequence: Synthetic oligonucleotide
  Antisense strand to SEQ ID NO: 1262270
uuucacauugaguaacaaa

SEQ ID NO: 1262272 - RNA, 19 nt, Artificial Sequence
  Description of Artificial Sequence: Synthetic oligonucleotide
  Sense strand starting at position 756 of SEQ ID NO: 1241306
gcuuuauacgugucauugu

SEQ ID NO: 1262273 - RNA, 19 nt, Artificial Sequence
  Description of Artificial Sequence: Synthetic oligonucleotide
  Antisense strand to SEQ ID NO: 1262272
acaaugacacguauaaagc

SEQ ID NO: 1262274 - RNA, 19 nt, Artificial Sequence
  Description of Artificial Sequence: Synthetic oligonucleotide
  Sense strand starting at position 873 of SEQ ID NO: 1241306
cuguaaacgcucgaggaaa

SEQ ID NO: 1262275 - RNA, 19 nt, Artificial Sequence
  Description of Artificial Sequence: Synthetic oligonucleotide
  Antisense strand to SEQ ID NO: 1262274
uuuccucgagcguuuacag

SEQ ID NO: 1262276 - RNA, 19 nt, Artificial Sequence
  Description of Artificial Sequence: Synthetic oligonucleotide
  Sense strand starting at position 891 of SEQ ID NO: 1241306
agacauuaguauucucacu

SEQ ID NO: 1262277 - RNA, 19 nt, Artificial Sequence
  Description of Artificial Sequence: Synthetic oligonucleotide
  Antisense strand to SEQ ID NO: 1262276
agugagaauacuaaugucu

SEQ ID NO: 1262278 - RNA, 19 nt, Artificial Sequence
  Description of Artificial Sequence: Synthetic oligonucleotide
  Sense strand starting at position 976 of SEQ ID NO: 1241306
acacuuaaggugcauuaua

SEQ ID NO: 1262279 - RNA, 19 nt, Artificial Sequence
  Description of Artificial Sequence: Synthetic oligonucleotide
  Antisense strand to SEQ ID NO: 1262278
uauaaugcaccuuaagugu

SEQ ID NO: 1262280 - RNA, 19 nt, Artificial Sequence
  Description of Artificial Sequence: Synthetic oligonucleotide
  Sense strand starting at position 1393 of SEQ ID NO: 1241306
acuacucauccggaguaga

SEQ ID NO: 1262281 - RNA, 19 nt, Artificial Sequence
  Description of Artificial Sequence: Synthetic oligonucleotide
  Antisense strand to SEQ ID NO: 1262280
ucuacuccggaugaguagu

SEQ ID NO: 1262282 - RNA, 19 nt, Artificial Sequence
  Description of Artificial Sequence: Synthetic oligonucleotide
  Sense strand starting at position 1396 of SEQ ID NO: 1241306
acucauccggaguagacau

SEQ ID NO: 1262283 - RNA, 19 nt, Artificial Sequence
  Description of Artificial Sequence: Synthetic oligonucleotide
  Antisense strand to SEQ ID NO: 1262282
augucuacuccggaugagu

SEQ ID NO: 1262284 - RNA, 19 nt, Artificial Sequence
  Description of Artificial Sequence: Synthetic oligonucleotide
  Sense strand starting at position 2477 of SEQ ID NO: 1241306
ugagauucuccagguaaau

SEQ ID NO: 1262285 - RNA, 19 nt, Artificial Sequence
  Description of Artificial Sequence: Synthetic oligonucleotide
  Antisense strand to SEQ ID NO: 1262284
auuuaccuggagaaucuca

SEQ ID NO: 1262286 - RNA, 19 nt, Artificial Sequence
  Description of Artificial Sequence: Synthetic oligonucleotide
  Sense strand starting at position 2515 of SEQ ID NO: 1241306
gaugauggaucagaagauc

SEQ ID NO: 1262287 - RNA, 19 nt, Artificial Sequence
  Description of Artificial Sequence: Synthetic oligonucleotide
  Antisense strand to SEQ ID NO: 1262286
gaucuucugauccaucauc

SEQ ID NO: 1262288 - RNA, 19 nt, Artificial Sequence
  Description of Artificial Sequence: Synthetic oligonucleotide
  Sense strand starting at position 2524 of SEQ ID NO: 1241306
ucagaagaucgaugaagua

SEQ ID NO: 1262289 - RNA, 19 nt, Artificial Sequence
  Description of Artificial Sequence: Synthetic oligonucleotide
  Antisense strand to SEQ ID NO: 1262288
uacuucaucgaucuucuga

SEQ ID NO: 1262290 - RNA, 19 nt, Artificial Sequence
  Description of Artificial Sequence: Synthetic oligonucleotide
  Sense strand starting at position 2599 of SEQ ID NO: 1241306
gggcuagccaguuaacaga

SEQ ID NO: 1262291 - RNA, 19 nt, Artificial Sequence
  Description of Artificial Sequence: Synthetic oligonucleotide
  Antisense strand to SEQ ID NO: 1262290
ucuguuaacuggcuagccc

SEQ ID NO: 1262292 - RNA, 19 nt, Artificial Sequence
  Description of Artificial Sequence: Synthetic oligonucleotide
  Sense strand starting at position 2626 of SEQ ID NO: 1241306
ucgucuguuaaauggagau

SEQ ID NO: 1262293 - RNA, 19 nt, Artificial Sequence
  Description of Artificial Sequence: Synthetic oligonucleotide
  Antisense strand to SEQ ID NO: 1262292
aucuccauuuaacagacga

SEQ ID NO: 1262294 - RNA, 19 nt, Artificial Sequence
  Description of Artificial Sequence: Synthetic oligonucleotide
  Sense strand starting at position 2666 of SEQ ID NO: 1241306
uguugugagaauugaguug

SEQ ID NO: 1262295 - RNA, 19 nt, Artificial Sequence
  Description of Artificial Sequence: Synthetic oligonucleotide
  Antisense strand to SEQ ID NO: 1262294
caacucaauucucacaaca

SEQ ID NO: 1262296 - RNA, 19 nt, Artificial Sequence
  Description of Artificial Sequence: Synthetic oligonucleotide
  Sense strand starting at position 2678 of SEQ ID NO: 1241306
ugaguugaugacugguaca

SEQ ID NO: 1262297 - RNA, 19 nt, Artificial Sequence
  Description of Artificial Sequence: Synthetic oligonucleotide
  Antisense strand to SEQ ID NO: 1262296
uguaccagucaucaacuca

SEQ ID NO: 1262298 - RNA, 19 nt, Artificial Sequence
  Description of Artificial Sequence: Synthetic oligonucleotide
  Sense strand starting at position 3154 of SEQ ID NO: 1241306
ccgccuuggcucucaaagu

SEQ ID NO: 1262299 - RNA, 19 nt, Artificial Sequence
  Description of Artificial Sequence: Synthetic oligonucleotide
  Antisense strand to SEQ ID NO: 1262298
acuuugagagccaaggcgg

SEQ ID NO: 1262300 - RNA, 19 nt, Artificial Sequence
  Description of Artificial Sequence: Synthetic oligonucleotide
  Sense strand starting at position 3226 of SEQ ID NO: 1241306
uuguuaauaugugucaaug

SEQ ID NO: 1262301 - RNA, 19 nt, Artificial Sequence
  Description of Artificial Sequence: Synthetic oligonucleotide
  Antisense strand to SEQ ID NO: 1262300
cauugacacauauuaacaa

SEQ ID NO: 1262302 - RNA, 19 nt, Artificial Sequence
  Description of Artificial Sequence: Synthetic oligonucleotide
  Sense strand starting at position 3232 of SEQ ID NO: 1241306
auaugugucaaugguagaa

SEQ ID NO: 1262303 - RNA, 19 nt, Artificial Sequence
  Description of Artificial Sequence: Synthetic oligonucleotide
  Antisense strand to SEQ ID NO: 1262302
uucuaccauugacacauau

SEQ ID NO: 1262304 - RNA, 19 nt, Artificial Sequence
  Description of Artificial Sequence: Synthetic oligonucleotide
  Sense strand starting at position 3236 of SEQ ID NO: 1241306
gugucaaugguagaaauca

SEQ ID NO: 1262305 - RNA, 19 nt, Artificial Sequence
  Description of Artificial Sequence: Synthetic oligonucleotide
  Antisense strand to SEQ ID NO: 1262304
ugauuucuaccauugacac

SEQ ID NO: 1262306 - RNA, 19 nt, Artificial Sequence
  Description of Artificial Sequence: Synthetic oligonucleotide
  Sense strand starting at position 3264 of SEQ ID NO: 1241306
aguuccuaauuguugaaga

SEQ ID NO: 1262307 - RNA, 19 nt, Artificial Sequence
  Description of Artificial Sequence: Synthetic oligonucleotide
  Antisense strand to SEQ ID NO: 1262306
ucuucaacaauuaggaacu

SEQ ID NO: 1262308 - RNA, 19 nt, Artificial Sequence
  Description of Artificial Sequence: Synthetic oligonucleotide
  Sense strand starting at position 3350 of SEQ ID NO: 1241306
uagaauuugcccuguguaa

SEQ ID NO: 1262309 - RNA, 19 nt, Artificial Sequence
  Description of Artificial Sequence: Synthetic oligonucleotide
  Antisense strand to SEQ ID NO: 1262308
uuacacagggcaaauucua

SEQ ID NO: 1262310 - RNA, 19 nt, Artificial Sequence
  Description of Artificial Sequence: Synthetic oligonucleotide
  Sense strand starting at position 3352 of SEQ ID NO: 1241306
gaauuugcccuguguaauc

SEQ ID NO: 1262311 - RNA, 19 nt, Artificial Sequence
  Description of Artificial Sequence: Synthetic oligonucleotide
  Antisense strand to SEQ ID NO: 1262310
gauuacacagggcaaauuc

SEQ ID NO: 1262312 - RNA, 19 nt, Artificial Sequence
  Description of Artificial Sequence: Synthetic oligonucleotide
  Sense strand starting at position 3448 of SEQ ID NO: 1241306
uuuauucucuggccauuga

SEQ ID NO: 1262313 - RNA, 19 nt, Artificial Sequence
  Description of Artificial Sequence: Synthetic oligonucleotide
  Antisense strand to SEQ ID NO: 1262312
ucaauggccagagaauaaa

SEQ ID NO: 1262314 - RNA, 19 nt, Artificial Sequence
  Description of Artificial Sequence: Synthetic oligonucleotide
  Sense strand starting at position 3449 of SEQ ID NO: 1241306
uuauucucuggccauugau

SEQ ID NO: 1262315 - RNA, 19 nt, Artificial Sequence
  Description of Artificial Sequence: Synthetic oligonucleotide
  Antisense strand to SEQ ID NO: 1262314
aucaauggccagagaauaa

SEQ ID NO: 1262316 - RNA, 19 nt, Artificial Sequence
  Description of Artificial Sequence: Synthetic oligonucleotide
  Sense strand starting at position 3485 of SEQ ID NO: 1241306
auucguucuucccugaaga

SEQ ID NO: 1262317 - RNA, 19 nt, Artificial Sequence
  Description of Artificial Sequence: Synthetic oligonucleotide
  Antisense strand to SEQ ID NO: 1262316
ucuucagggaagaacgaau

SEQ ID NO: 1262318 - RNA, 19 nt, Artificial Sequence
  Description of Artificial Sequence: Synthetic oligonucleotide
  Sense strand starting at position 3486 of SEQ ID NO: 1241306
uucguucuucccugaagaa

SEQ ID NO: 1262319 - RNA, 19 nt, Artificial Sequence
  Description of Artificial Sequence: Synthetic oligonucleotide
  Antisense strand to SEQ ID NO: 1262318
uucuucagggaagaacgaa

SEQ ID NO: 1262320 - RNA, 19 nt, Artificial Sequence
  Description of Artificial Sequence: Synthetic oligonucleotide
  Sense strand starting at position 3487 of SEQ ID NO: 1241306
ucguucuucccugaagaaa

SEQ ID NO: 1262321 - RNA, 19 nt, Artificial Sequence
  Description of Artificial Sequence: Synthetic oligonucleotide
  Antisense strand to SEQ ID NO: 1262320
uuucuucagggaagaacga

SEQ ID NO: 1262322 - RNA, 19 nt, Artificial Sequence
  Description of Artificial Sequence: Synthetic oligonucleotide
  Sense strand starting at position 3641 of SEQ ID NO: 1241306
gggcaucagaguuggaguu

SEQ ID NO: 1262323 - RNA, 19 nt, Artificial Sequence
  Description of Artificial Sequence: Synthetic oligonucleotide
  Antisense strand to SEQ ID NO: 1262322
aacuccaacucugaugccc

SEQ ID NO: 1262324 - RNA, 19 nt, Artificial Sequence
  Description of Artificial Sequence: Synthetic oligonucleotide
  Sense strand starting at position 3642 of SEQ ID NO: 1241306
ggcaucagaguuggaguuu

SEQ ID NO: 1262325 - RNA, 19 nt, Artificial Sequence
  Description of Artificial Sequence: Synthetic oligonucleotide
  Antisense strand to SEQ ID NO: 1262324
aaacuccaacucugaugcc

SEQ ID NO: 1262326 - RNA, 19 nt, Artificial Sequence
  Description of Artificial Sequence: Synthetic oligonucleotide
  Sense strand starting at position 3648 of SEQ ID NO: 1241306
agaguuggaguuuaccauu

SEQ ID NO: 1262327 - RNA, 19 nt, Artificial Sequence
  Description of Artificial Sequence: Synthetic oligonucleotide
  Antisense strand to SEQ ID NO: 1262326
aaugguaaacuccaacucu

SEQ ID NO: 1262328 - RNA, 19 nt, Artificial Sequence
  Description of Artificial Sequence: Synthetic oligonucleotide
  Sense strand starting at position 3911 of SEQ ID NO: 1241306
aauuaagugugcuuuagac

SEQ ID NO: 1262329 - RNA, 19 nt, Artificial Sequence
  Description of Artificial Sequence: Synthetic oligonucleotide
  Antisense strand to SEQ ID NO: 1262328
gucuaaagcacacuuaauu

SEQ ID NO: 1262330 - RNA, 19 nt, Artificial Sequence
  Description of Artificial Sequence: Synthetic oligonucleotide
  Sense strand starting at position 3913 of SEQ ID NO: 1241306
uuaagugugcuuuagacuu

SEQ ID NO: 1262331 - RNA, 19 nt, Artificial Sequence
  Description of Artificial Sequence: Synthetic oligonucleotide
  Antisense strand to SEQ ID NO: 1262330
aagucuaaagcacacuuaa

SEQ ID NO: 1262332 - RNA, 19 nt, Artificial Sequence
  Description of Artificial Sequence: Synthetic oligonucleotide
  Sense strand starting at position 3942 of SEQ ID NO: 1241306
uguuacauuugucacauuu

SEQ ID NO: 1262333 - RNA, 19 nt, Artificial Sequence
  Description of Artificial Sequence: Synthetic oligonucleotide
  Antisense strand to SEQ ID NO: 1262332
aaaugugacaaauguaaca

SEQ ID NO: 1262334 - RNA, 19 nt, Artificial Sequence
  Description of Artificial Sequence: Synthetic oligonucleotide
  Sense strand starting at position 61 of SEQ ID NO: 1241307
aggagccaggcuuacuaaa

SEQ ID NO: 1262335 - RNA, 19 nt, Artificial Sequence
  Description of Artificial Sequence: Synthetic oligonucleotide
  Antisense strand to SEQ ID NO: 1262334
uuuaguaagccuggcuccu

SEQ ID NO: 1262336 - RNA, 19 nt, Artificial Sequence
  Description of Artificial Sequence: Synthetic oligonucleotide
  Sense strand starting at position 85 of SEQ ID NO: 1241307
ggguaagagucagagauau

SEQ ID NO: 1262337 - RNA, 19 nt, Artificial Sequence
  Description of Artificial Sequence: Synthetic oligonucleotide
  Antisense strand to SEQ ID NO: 1262336
auaucucugacucuuaccc

SEQ ID NO: 1262338 - RNA, 19 nt, Artificial Sequence
  Description of Artificial Sequence: Synthetic oligonucleotide
  Sense strand starting at position 87 of SEQ ID NO: 1241307
guaagagucagagauaugu

SEQ ID NO: 1262339 - RNA, 19 nt, Artificial Sequence
  Description of Artificial Sequence: Synthetic oligonucleotide
  Antisense strand to SEQ ID NO: 1262338
acauaucucugacucuuac

SEQ ID NO: 1262340 - RNA, 19 nt, Artificial Sequence
  Description of Artificial Sequence: Synthetic oligonucleotide
  Sense strand starting at position 93 of SEQ ID NO: 1241307
gucagagauauguaugcac

SEQ ID NO: 1262341 - RNA, 19 nt, Artificial Sequence
  Description of Artificial Sequence: Synthetic oligonucleotide
  Antisense strand to SEQ ID NO: 1262340
gugcauacauaucucugac

SEQ ID NO: 1262342 - RNA, 19 nt, Artificial Sequence
  Description of Artificial Sequence: Synthetic oligonucleotide
  Sense strand starting at position 936 of SEQ ID NO: 1241307
ugcugcauuacaggaguaa

SEQ ID NO: 1262343 - RNA, 19 nt, Artificial Sequence
  Description of Artificial Sequence: Synthetic oligonucleotide
  Antisense strand to SEQ ID NO: 1262342
uuacuccuguaaugcagca

SEQ ID NO: 1262344 - RNA, 19 nt, Artificial Sequence
  Description of Artificial Sequence: Synthetic oligonucleotide
  Sense strand starting at position 1303 of SEQ ID NO: 1241307
ugagacgacaauuguacua

SEQ ID NO: 1262345 - RNA, 19 nt, Artificial Sequence
  Description of Artificial Sequence: Synthetic oligonucleotide
  Antisense strand to SEQ ID NO: 1262344
uaguacaauugucgucuca

SEQ ID NO: 1262346 - RNA, 19 nt, Artificial Sequence
  Description of Artificial Sequence: Synthetic oligonucleotide
  Sense strand starting at position 1314 of SEQ ID NO: 1241307
uuguacuacuggucauaga

SEQ ID NO: 1262347 - RNA, 19 nt, Artificial Sequence
  Description of Artificial Sequence: Synthetic oligonucleotide
  Antisense strand to SEQ ID NO: 1262346
ucuaugaccaguaguacaa

SEQ ID NO: 1262348 - RNA, 19 nt, Artificial Sequence
  Description of Artificial Sequence: Synthetic oligonucleotide
  Sense strand starting at position 1317 of SEQ ID NO: 1241307
uacuacuggucauagagua

SEQ ID NO: 1262349 - RNA, 19 nt, Artificial Sequence
  Description of Artificial Sequence: Synthetic oligonucleotide
  Antisense strand to SEQ ID NO: 1262348
uacucuaugaccaguagua

SEQ ID NO: 1262350 - RNA, 19 nt, Artificial Sequence
  Description of Artificial Sequence: Synthetic oligonucleotide
  Sense strand starting at position 1357 of SEQ ID NO: 1241307
gagugacauugccuaucaa

SEQ ID NO: 1262351 - RNA, 19 nt, Artificial Sequence
  Description of Artificial Sequence: Synthetic oligonucleotide
  Antisense strand to SEQ ID NO: 1262350
uugauaggcaaugucacuc

SEQ ID NO: 1262352 - RNA, 19 nt, Artificial Sequence
  Description of Artificial Sequence: Synthetic oligonucleotide
  Sense strand starting at position 1358 of SEQ ID NO: 1241307
agugacauugccuaucaag

SEQ ID NO: 1262353 - RNA, 19 nt, Artificial Sequence
  Description of Artificial Sequence: Synthetic oligonucleotide
  Antisense strand to SEQ ID NO: 1262352
cuugauaggcaaugucacu

SEQ ID NO: 1262354 - RNA, 19 nt, Artificial Sequence
  Description of Artificial Sequence: Synthetic oligonucleotide
  Sense strand starting at position 1370 of SEQ ID NO: 1241307
uaucaagagccucguauaa

SEQ ID NO: 1262355 - RNA, 19 nt, Artificial Sequence
  Description of Artificial Sequence: Synthetic oligonucleotide
  Antisense strand to SEQ ID NO: 1262354
uuauacgaggcucuugaua

SEQ ID NO: 1262356 - RNA, 19 nt, Artificial Sequence
  Description of Artificial Sequence: Synthetic oligonucleotide
  Sense strand starting at position 1372 of SEQ ID NO: 1241307
ucaagagccucguauaaag

SEQ ID NO: 1262357 - RNA, 19 nt, Artificial Sequence
  Description of Artificial Sequence: Synthetic oligonucleotide
  Antisense strand to SEQ ID NO: 1262356
cuuuauacgaggcucuuga

SEQ ID NO: 1262358 - RNA, 19 nt, Artificial Sequence
  Description of Artificial Sequence: Synthetic oligonucleotide
  Sense strand starting at position 1384 of SEQ ID NO: 1241307
uauaaaguccgagagguuc

SEQ ID NO: 1262359 - RNA, 19 nt, Artificial Sequence
  Description of Artificial Sequence: Synthetic oligonucleotide
  Antisense strand to SEQ ID NO: 1262358
gaaccucucggacuuuaua

SEQ ID NO: 1262360 - RNA, 19 nt, Artificial Sequence
  Description of Artificial Sequence: Synthetic oligonucleotide
  Sense strand starting at position 1396 of SEQ ID NO: 1241307
gagguucaggucuguaagu

SEQ ID NO: 1262361 - RNA, 19 nt, Artificial Sequence
  Description of Artificial Sequence: Synthetic oligonucleotide
  Antisense strand to SEQ ID NO: 1262360
acuuacagaccugaaccuc

SEQ ID NO: 1262362 - RNA, 19 nt, Artificial Sequence
  Description of Artificial Sequence: Synthetic oligonucleotide
  Sense strand starting at position 1398 of SEQ ID NO: 1241307
gguucaggucuguaaguca

SEQ ID NO: 1262363 - RNA, 19 nt, Artificial Sequence
  Description of Artificial Sequence: Synthetic oligonucleotide
  Antisense strand to SEQ ID NO: 1262362
ugacuuacagaccugaacc

SEQ ID NO: 1262364 - RNA, 19 nt, Artificial Sequence
  Description of Artificial Sequence: Synthetic oligonucleotide
  Sense strand starting at position 1505 of SEQ ID NO: 1241307
acaguuuccucuccgggau

SEQ ID NO: 1262365 - RNA, 19 nt, Artificial Sequence
  Description of Artificial Sequence: Synthetic oligonucleotide
  Antisense strand to SEQ ID NO: 1262364
aucccggagaggaaacugu

SEQ ID NO: 1262366 - RNA, 19 nt, Artificial Sequence
  Description of Artificial Sequence: Synthetic oligonucleotide
  Sense strand starting at position 1506 of SEQ ID NO: 1241307
caguuuccucuccgggauu

SEQ ID NO: 1262367 - RNA, 19 nt, Artificial Sequence
  Description of Artificial Sequence: Synthetic oligonucleotide
  Antisense strand to SEQ ID NO: 1262366
aaucccggagaggaaacug

SEQ ID NO: 1262368 - RNA, 19 nt, Artificial Sequence
  Description of Artificial Sequence: Synthetic oligonucleotide
  Sense strand starting at position 2067 of SEQ ID NO: 1241307
uggccugugccuuggguaa

SEQ ID NO: 1262369 - RNA, 19 nt, Artificial Sequence
  Description of Artificial Sequence: Synthetic oligonucleotide
  Antisense strand to SEQ ID NO: 1262368
uuacccaaggcacaggcca

SEQ ID NO: 1262370 - RNA, 19 nt, Artificial Sequence
  Description of Artificial Sequence: Synthetic oligonucleotide
  Sense strand starting at position 2239 of SEQ ID NO: 1241307
gcgugugguccuucagggu

SEQ ID NO: 1262371 - RNA, 19 nt, Artificial Sequence
  Description of Artificial Sequence: Synthetic oligonucleotide
  Antisense strand to SEQ ID NO: 1262370
acccugaaggaccacacgc

SEQ ID NO: 1262372 - RNA, 19 nt, Artificial Sequence
  Description of Artificial Sequence: Synthetic oligonucleotide
  Sense strand starting at position 2282 of SEQ ID NO: 1241307
gcguucagagucuguucua

SEQ ID NO: 1262373 - RNA, 19 nt, Artificial Sequence
  Description of Artificial Sequence: Synthetic oligonucleotide
  Antisense strand to SEQ ID NO: 1262372
uagaacagacucugaacgc

SEQ ID NO: 1262374 - RNA, 19 nt, Artificial Sequence
  Description of Artificial Sequence: Synthetic oligonucleotide
  Sense strand starting at position 2291 of SEQ ID NO: 1241307
gucuguucuacucauggga

SEQ ID NO: 1262375 - RNA, 19 nt, Artificial Sequence
  Description of Artificial Sequence: Synthetic oligonucleotide
  Antisense strand to SEQ ID NO: 1262374
ucccaugaguagaacagac

SEQ ID NO: 1262376 - RNA, 19 nt, Artificial Sequence
  Description of Artificial Sequence: Synthetic oligonucleotide
  Sense strand starting at position 2293 of SEQ ID NO: 1241307
cuguucuacucaugggaaa

SEQ ID NO: 1262377 - RNA, 19 nt, Artificial Sequence
  Description of Artificial Sequence: Synthetic oligonucleotide
  Antisense strand to SEQ ID NO: 1262376
uuucccaugaguagaacag

SEQ ID NO: 1262378 - RNA, 19 nt, Artificial Sequence
  Description of Artificial Sequence: Synthetic oligonucleotide
  Sense strand starting at position 2368 of SEQ ID NO: 1241307
caguacuugucauugucuu

SEQ ID NO: 1262379 - RNA, 19 nt, Artificial Sequence
  Description of Artificial Sequence: Synthetic oligonucleotide
  Antisense strand to SEQ ID NO: 1262378
aagacaaugacaaguacug

SEQ ID NO: 1262380 - RNA, 19 nt, Artificial Sequence
  Description of Artificial Sequence: Synthetic oligonucleotide
  Sense strand starting at position 2369 of SEQ ID NO: 1241307
aguacuugucauugucuuu

SEQ ID NO: 1262381 - RNA, 19 nt, Artificial Sequence
  Description of Artificial Sequence: Synthetic oligonucleotide
  Antisense strand to SEQ ID NO: 1262380
aaagacaaugacaaguacu

SEQ ID NO: 1262382 - RNA, 19 nt, Artificial Sequence
  Description of Artificial Sequence: Synthetic oligonucleotide
  Sense strand starting at position 2396 of SEQ ID NO: 1241307
agacauucuagugggugua

SEQ ID NO: 1262383 - RNA, 19 nt, Artificial Sequence
  Description of Artificial Sequence: Synthetic oligonucleotide
  Antisense strand to SEQ ID NO: 1262382
uacacccacuagaaugucu

SEQ ID NO: 1262384 - RNA, 19 nt, Artificial Sequence
  Description of Artificial Sequence: Synthetic oligonucleotide
  Sense strand starting at position 2397 of SEQ ID NO: 1241307
gacauucuaguggguguaa

SEQ ID NO: 1262385 - RNA, 19 nt, Artificial Sequence
  Description of Artificial Sequence: Synthetic oligonucleotide
  Antisense strand to SEQ ID NO: 1262384
uuacacccacuagaauguc

SEQ ID NO: 1262386 - RNA, 19 nt, Artificial Sequence
  Description of Artificial Sequence: Synthetic oligonucleotide
  Sense strand starting at position 2399 of SEQ ID NO: 1241307
cauucuaguggguguaagu

SEQ ID NO: 1262387 - RNA, 19 nt, Artificial Sequence
  Description of Artificial Sequence: Synthetic oligonucleotide
  Antisense strand to SEQ ID NO: 1262386
acuuacacccacuagaaug

SEQ ID NO: 1262388 - RNA, 19 nt, Artificial Sequence
  Description of Artificial Sequence: Synthetic oligonucleotide
  Sense strand starting at position 2553 of SEQ ID NO: 1241307
ugagcaguuugucucuuga

SEQ ID NO: 1262389 - RNA, 19 nt, Artificial Sequence
  Description of Artificial Sequence: Synthetic oligonucleotide
  Antisense strand to SEQ ID NO: 1262388
ucaagagacaaacugcuca

SEQ ID NO: 1262390 - RNA, 19 nt, Artificial Sequence
  Description of Artificial Sequence: Synthetic oligonucleotide
  Sense strand starting at position 2555 of SEQ ID NO: 1241307
agcaguuugucucuugaau

SEQ ID NO: 1262391 - RNA, 19 nt, Artificial Sequence
  Description of Artificial Sequence: Synthetic oligonucleotide
  Antisense strand to SEQ ID NO: 1262390
auucaagagacaaacugcu

SEQ ID NO: 1262392 - RNA, 19 nt, Artificial Sequence
  Description of Artificial Sequence: Synthetic oligonucleotide
  Sense strand starting at position 2566 of SEQ ID NO: 1241307
ucuugaauacugugguaag

SEQ ID NO: 1262393 - RNA, 19 nt, Artificial Sequence
  Description of Artificial Sequence: Synthetic oligonucleotide
  Antisense strand to SEQ ID NO: 1262392
cuuaccacaguauucaaga

SEQ ID NO: 1262394 - RNA, 19 nt, Artificial Sequence
  Description of Artificial Sequence: Synthetic oligonucleotide
  Sense strand starting at position 2567 of SEQ ID NO: 1241307
cuugaauacugugguaaga

SEQ ID NO: 1262395 - RNA, 19 nt, Artificial Sequence
  Description of Artificial Sequence: Synthetic oligonucleotide
  Antisense strand to SEQ ID NO: 1262394
ucuuaccacaguauucaag

SEQ ID NO: 1262396 - RNA, 19 nt, Artificial Sequence
  Description of Artificial Sequence: Synthetic oligonucleotide
  Sense strand starting at position 2569 of SEQ ID NO: 1241307
ugaauacugugguaagagu

SEQ ID NO: 1262397 - RNA, 19 nt, Artificial Sequence
  Description of Artificial Sequence: Synthetic oligonucleotide
  Antisense strand to SEQ ID NO: 1262396
acucuuaccacaguauuca

SEQ ID NO: 1262398 - RNA, 19 nt, Artificial Sequence
  Description of Artificial Sequence: Synthetic oligonucleotide
  Sense strand starting at position 2851 of SEQ ID NO: 1241307
ggauuaccggcauaagcaa

SEQ ID NO: 1262399 - RNA, 19 nt, Artificial Sequence
  Description of Artificial Sequence: Synthetic oligonucleotide
  Antisense strand to SEQ ID NO: 1262398
uugcuuaugccgguaaucc

SEQ ID NO: 1262400 - RNA, 19 nt, Artificial Sequence
  Description of Artificial Sequence: Synthetic oligonucleotide
  Sense strand starting at position 2897 of SEQ ID NO: 1241307
cuguauaagucccuuaucu

SEQ ID NO: 1262401 - RNA, 19 nt, Artificial Sequence
  Description of Artificial Sequence: Synthetic oligonucleotide
  Antisense strand to SEQ ID NO: 1262400
agauaagggacuuauacag

SEQ ID NO: 1262402 - RNA, 19 nt, Artificial Sequence
  Description of Artificial Sequence: Synthetic oligonucleotide
  Sense strand starting at position 2899 of SEQ ID NO: 1241307
guauaagucccuuaucuga

SEQ ID NO: 1262403 - RNA, 19 nt, Artificial Sequence
  Description of Artificial Sequence: Synthetic oligonucleotide
  Antisense strand to SEQ ID NO: 1262402
ucagauaagggacuuauac

SEQ ID NO: 1262404 - RNA, 19 nt, Artificial Sequence
  Description of Artificial Sequence: Synthetic oligonucleotide
  Sense strand starting at position 2913 of SEQ ID NO: 1241307
ucugauaaaugacuugcaa

SEQ ID NO: 1262405 - RNA, 19 nt, Artificial Sequence
  Description of Artificial Sequence: Synthetic oligonucleotide
  Antisense strand to SEQ ID NO: 1262404
uugcaagucauuuaucaga

SEQ ID NO: 1262406 - RNA, 19 nt, Artificial Sequence
  Description of Artificial Sequence: Synthetic oligonucleotide
  Sense strand starting at position 3549 of SEQ ID NO: 1241307
agcgaaacucgauaucuca

SEQ ID NO: 1262407 - RNA, 19 nt, Artificial Sequence
  Description of Artificial Sequence: Synthetic oligonucleotide
  Antisense strand to SEQ ID NO: 1262406
ugagauaucgaguuucgcu

SEQ ID NO: 1262408 - RNA, 19 nt, Artificial Sequence
  Description of Artificial Sequence: Synthetic oligonucleotide
  Sense strand starting at position 3592 of SEQ ID NO: 1241307
gauagugcccuuuacagag

SEQ ID NO: 1262409 - RNA, 19 nt, Artificial Sequence
  Description of Artificial Sequence: Synthetic oligonucleotide
  Antisense strand to SEQ ID NO: 1262408
cucuguaaagggcacuauc

SEQ ID NO: 1262410 - RNA, 19 nt, Artificial Sequence
  Description of Artificial Sequence: Synthetic oligonucleotide
  Sense strand starting at position 3680 of SEQ ID NO: 1241307
gucuguauggcuggagcua

SEQ ID NO: 1262411 - RNA, 19 nt, Artificial Sequence
  Description of Artificial Sequence: Synthetic oligonucleotide
  Antisense strand to SEQ ID NO: 1262410
uagcuccagccauacagac

SEQ ID NO: 1262412 - RNA, 19 nt, Artificial Sequence
  Description of Artificial Sequence: Synthetic oligonucleotide
  Sense strand starting at position 3681 of SEQ ID NO: 1241307
ucuguauggcuggagcuaa

SEQ ID NO: 1262413 - RNA, 19 nt, Artificial Sequence
  Description of Artificial Sequence: Synthetic oligonucleotide
  Antisense strand to SEQ ID NO: 1262412
uuagcuccagccauacaga

SEQ ID NO: 1262414 - RNA, 19 nt, Artificial Sequence
  Description of Artificial Sequence: Synthetic oligonucleotide
  Sense strand starting at position 121 of SEQ ID NO: 1241308
gcuggucucagugagcaga

SEQ ID NO: 1262415 - RNA, 19 nt, Artificial Sequence
  Description of Artificial Sequence: Synthetic oligonucleotide
  Antisense strand to SEQ ID NO: 1262414
ucugcucacugagaccagc

SEQ ID NO: 1262416 - RNA, 19 nt, Artificial Sequence
  Description of Artificial Sequence: Synthetic oligonucleotide
  Sense strand starting at position 123 of SEQ ID NO: 1241308
uggucucagugagcagaaa

SEQ ID NO: 1262417 - RNA, 19 nt, Artificial Sequence
  Description of Artificial Sequence: Synthetic oligonucleotide
  Antisense strand to SEQ ID NO: 1262416
uuucugcucacugagacca

SEQ ID NO: 1262418 - RNA, 19 nt, Artificial Sequence
  Description of Artificial Sequence: Synthetic oligonucleotide
  Sense strand starting at position 1014 of SEQ ID NO: 1241308
gcgugauauuugcuuacuc

SEQ ID NO: 1262419 - RNA, 19 nt, Artificial Sequence
  Description of Artificial Sequence: Synthetic oligonucleotide
  Antisense strand to SEQ ID NO: 1262418
gaguaagcaaauaucacgc

SEQ ID NO: 1262420 - RNA, 19 nt, Artificial Sequence
  Description of Artificial Sequence: Synthetic oligonucleotide
  Sense strand starting at position 1015 of SEQ ID NO: 1241308
cgugauauuugcuuacucu

SEQ ID NO: 1262421 - RNA, 19 nt, Artificial Sequence
  Description of Artificial Sequence: Synthetic oligonucleotide
  Antisense strand to SEQ ID NO: 1262420
agaguaagcaaauaucacg

SEQ ID NO: 1262422 - RNA, 19 nt, Artificial Sequence
  Description of Artificial Sequence: Synthetic oligonucleotide
  Sense strand starting at position 1044 of SEQ ID NO: 1241308
acuuaaguauaacuguaga

SEQ ID NO: 1262423 - RNA, 19 nt, Artificial Sequence
  Description of Artificial Sequence: Synthetic oligonucleotide
  Antisense strand to SEQ ID NO: 1262422
ucuacaguuauacuuaagu

SEQ ID NO: 1262424 - RNA, 19 nt, Artificial Sequence
  Description of Artificial Sequence: Synthetic oligonucleotide
  Sense strand starting at position 1148 of SEQ ID NO: 1241308
ucuuaaagucgugugcgua

SEQ ID NO: 1262425 - RNA, 19 nt, Artificial Sequence
  Description of Artificial Sequence: Synthetic oligonucleotide
  Antisense strand to SEQ ID NO: 1262424
uacgcacacgacuuuaaga

SEQ ID NO: 1262426 - RNA, 19 nt, Artificial Sequence
  Description of Artificial Sequence: Synthetic oligonucleotide
  Sense strand starting at position 1229 of SEQ ID NO: 1241308
augcaauuacugcaugacu

SEQ ID NO: 1262427 - RNA, 19 nt, Artificial Sequence
  Description of Artificial Sequence: Synthetic oligonucleotide
  Antisense strand to SEQ ID NO: 1262426
agucaugcaguaauugcau

SEQ ID NO: 1262428 - RNA, 19 nt, Artificial Sequence
  Description of Artificial Sequence: Synthetic oligonucleotide
  Sense strand starting at position 1265 of SEQ ID NO: 1241308
ugagguucugcagguaaau

SEQ ID NO: 1262429 - RNA, 19 nt, Artificial Sequence
  Description of Artificial Sequence: Synthetic oligonucleotide
  Antisense strand to SEQ ID NO: 1262428
auuuaccugcagaaccuca

SEQ ID NO: 1262430 - RNA, 19 nt, Artificial Sequence
  Description of Artificial Sequence: Synthetic oligonucleotide
  Sense strand starting at position 1276 of SEQ ID NO: 1241308
agguaaaugguauauuguu

SEQ ID NO: 1262431 - RNA, 19 nt, Artificial Sequence
  Description of Artificial Sequence: Synthetic oligonucleotide
  Antisense strand to SEQ ID NO: 1262430
aacaauauaccauuuaccu

SEQ ID NO: 1262432 - RNA, 19 nt, Artificial Sequence
  Description of Artificial Sequence: Synthetic oligonucleotide
  Sense strand starting at position 1412 of SEQ ID NO: 1241308
agaaaugcucccuaaaguu

SEQ ID NO: 1262433 - RNA, 19 nt, Artificial Sequence
  Description of Artificial Sequence: Synthetic oligonucleotide
  Antisense strand to SEQ ID NO: 1262432
aacuuuagggagcauuucu

SEQ ID NO: 1262434 - RNA, 19 nt, Artificial Sequence
  Description of Artificial Sequence: Synthetic oligonucleotide
  Sense strand starting at position 1422 of SEQ ID NO: 1241308
ccuaaaguuguaugaccuu

SEQ ID NO: 1262435 - RNA, 19 nt, Artificial Sequence
  Description of Artificial Sequence: Synthetic oligonucleotide
  Antisense strand to SEQ ID NO: 1262434
aaggucauacaacuuuagg

SEQ ID NO: 1262436 - RNA, 19 nt, Artificial Sequence
  Description of Artificial Sequence: Synthetic oligonucleotide
  Sense strand starting at position 1425 of SEQ ID NO: 1241308
aaaguuguaugaccuugua

SEQ ID NO: 1262437 - RNA, 19 nt, Artificial Sequence
  Description of Artificial Sequence: Synthetic oligonucleotide
  Antisense strand to SEQ ID NO: 1262436
uacaaggucauacaacuuu

SEQ ID NO: 1262438 - RNA, 19 nt, Artificial Sequence
  Description of Artificial Sequence: Synthetic oligonucleotide
  Sense strand starting at position 1428 of SEQ ID NO: 1241308
guuguaugaccuuguaaau

SEQ ID NO: 1262439 - RNA, 19 nt, Artificial Sequence
  Description of Artificial Sequence: Synthetic oligonucleotide
  Antisense strand to SEQ ID NO: 1262438
auuuacaaggucauacaac

SEQ ID NO: 1262440 - RNA, 19 nt, Artificial Sequence
  Description of Artificial Sequence: Synthetic oligonucleotide
  Sense strand starting at position 1639 of SEQ ID NO: 1241308
guuggaaauccauauugcu

SEQ ID NO: 1262441 - RNA, 19 nt, Artificial Sequence
  Description of Artificial Sequence: Synthetic oligonucleotide
  Antisense strand to SEQ ID NO: 1262440
agcaauauggauuuccaac

SEQ ID NO: 1262442 - RNA, 19 nt, Artificial Sequence
  Description of Artificial Sequence: Synthetic oligonucleotide
  Sense strand starting at position 1683 of SEQ ID NO: 1241308
uagguugcugcugaaguaa

SEQ ID NO: 1262443 - RNA, 19 nt, Artificial Sequence
  Description of Artificial Sequence: Synthetic oligonucleotide
  Antisense strand to SEQ ID NO: 1262442
uuacuucagcagcaaccua

SEQ ID NO: 1262444 - RNA, 19 nt, Artificial Sequence
  Description of Artificial Sequence: Synthetic oligonucleotide
  Sense strand starting at position 1704 of SEQ ID NO: 1241308
aaguuaguaccugaucuga

SEQ ID NO: 1262445 - RNA, 19 nt, Artificial Sequence
  Description of Artificial Sequence: Synthetic oligonucleotide
  Antisense strand to SEQ ID NO: 1262444
ucagaucagguacuaacuu

SEQ ID NO: 1262446 - RNA, 19 nt, Artificial Sequence
  Description of Artificial Sequence: Synthetic oligonucleotide
  Sense strand starting at position 1706 of SEQ ID NO: 1241308
guuaguaccugaucugacu

SEQ ID NO: 1262447 - RNA, 19 nt, Artificial Sequence
  Description of Artificial Sequence: Synthetic oligonucleotide
  Antisense strand to SEQ ID NO: 1262446
agucagaucagguacuaac

SEQ ID NO: 1262448 - RNA, 19 nt, Artificial Sequence
  Description of Artificial Sequence: Synthetic oligonucleotide
  Sense strand starting at position 2351 of SEQ ID NO: 1241308
acauguguauuucuuaguu

SEQ ID NO: 1262449 - RNA, 19 nt, Artificial Sequence
  Description of Artificial Sequence: Synthetic oligonucleotide
  Antisense strand to SEQ ID NO: 1262448
aacuaagaaauacacaugu

SEQ ID NO: 1262450 - RNA, 19 nt, Artificial Sequence
  Description of Artificial Sequence: Synthetic oligonucleotide
  Sense strand starting at position 2355 of SEQ ID NO: 1241308
guguauuucuuaguuuacu

SEQ ID NO: 1262451 - RNA, 19 nt, Artificial Sequence
  Description of Artificial Sequence: Synthetic oligonucleotide
  Antisense strand to SEQ ID NO: 1262450
aguaaacuaagaaauacac

SEQ ID NO: 1262452 - RNA, 19 nt, Artificial Sequence
  Description of Artificial Sequence: Synthetic oligonucleotide
  Sense strand starting at position 2400 of SEQ ID NO: 1241308
uaacgugaacuggaaguau

SEQ ID NO: 1262453 - RNA, 19 nt, Artificial Sequence
  Description of Artificial Sequence: Synthetic oligonucleotide
  Antisense strand to SEQ ID NO: 1262452
auacuuccaguucacguua

SEQ ID NO: 1262454 - RNA, 19 nt, Artificial Sequence
  Description of Artificial Sequence: Synthetic oligonucleotide
  Sense strand starting at position 2449 of SEQ ID NO: 1241308
ccaauugaagagcaguuua

SEQ ID NO: 1262455 - RNA, 19 nt, Artificial Sequence
  Description of Artificial Sequence: Synthetic oligonucleotide
  Antisense strand to SEQ ID NO: 1262454
uaaacugcucuucaauugg

SEQ ID NO: 1262456 - RNA, 19 nt, Artificial Sequence
  Description of Artificial Sequence: Synthetic oligonucleotide
  Sense strand starting at position 2454 of SEQ ID NO: 1241308
ugaagagcaguuuauuaca

SEQ ID NO: 1262457 - RNA, 19 nt, Artificial Sequence
  Description of Artificial Sequence: Synthetic oligonucleotide
  Antisense strand to SEQ ID NO: 1262456
uguaauaaacugcucuuca

SEQ ID NO: 1262458 - RNA, 19 nt, Artificial Sequence
  Description of Artificial Sequence: Synthetic oligonucleotide
  Sense strand starting at position 2950 of SEQ ID NO: 1241308
aucguagcacuaugacaaa

SEQ ID NO: 1262459 - RNA, 19 nt, Artificial Sequence
  Description of Artificial Sequence: Synthetic oligonucleotide
  Antisense strand to SEQ ID NO: 1262458
uuugucauagugcuacgau

SEQ ID NO: 1262460 - RNA, 19 nt, Artificial Sequence
  Description of Artificial Sequence: Synthetic oligonucleotide
  Sense strand starting at position 3054 of SEQ ID NO: 1241308
aaagguaaauuuggauuga

SEQ ID NO: 1262461 - RNA, 19 nt, Artificial Sequence
  Description of Artificial Sequence: Synthetic oligonucleotide
  Antisense strand to SEQ ID NO: 1262460
ucaauccaaauuuaccuuu

SEQ ID NO: 1262462 - RNA, 19 nt, Artificial Sequence
  Description of Artificial Sequence: Synthetic oligonucleotide
  Sense strand starting at position 3055 of SEQ ID NO: 1241308
aagguaaauuuggauugaa

SEQ ID NO: 1262463 - RNA, 19 nt, Artificial Sequence
  Description of Artificial Sequence: Synthetic oligonucleotide
  Antisense strand to SEQ ID NO: 1262462
uucaauccaaauuuaccuu

SEQ ID NO: 1262464 - RNA, 19 nt, Artificial Sequence
  Description of Artificial Sequence: Synthetic oligonucleotide
  Sense strand starting at position 3073 of SEQ ID NO: 1241308
accauuucugcguaaggcu

SEQ ID NO: 1262465 - RNA, 19 nt, Artificial Sequence
  Description of Artificial Sequence: Synthetic oligonucleotide
  Antisense strand to SEQ ID NO: 1262464
agccuuacgcagaaauggu

SEQ ID NO: 1262466 - RNA, 19 nt, Artificial Sequence
  Description of Artificial Sequence: Synthetic oligonucleotide
  Sense strand starting at position 3326 of SEQ ID NO: 1241308
gagacagggccuuacugua

SEQ ID NO: 1262467 - RNA, 19 nt, Artificial Sequence
  Description of Artificial Sequence: Synthetic oligonucleotide
  Antisense strand to SEQ ID NO: 1262466
uacaguaaggcccugucuc

SEQ ID NO: 1262468 - RNA, 19 nt, Artificial Sequence
  Description of Artificial Sequence: Synthetic oligonucleotide
  Sense strand starting at position 3493 of SEQ ID NO: 1241308
caggcugaauaaguuauua

SEQ ID NO: 1262469 - RNA, 19 nt, Artificial Sequence
  Description of Artificial Sequence: Synthetic oligonucleotide
  Antisense strand to SEQ ID NO: 1262468
uaauaacuuauucagccug

SEQ ID NO: 1262470 - RNA, 19 nt, Artificial Sequence
  Description of Artificial Sequence: Synthetic oligonucleotide
  Sense strand starting at position 3603 of SEQ ID NO: 1241308
guauuacuguaacuaccaa

SEQ ID NO: 1262471 - RNA, 19 nt, Artificial Sequence
  Description of Artificial Sequence: Synthetic oligonucleotide
  Antisense strand to SEQ ID NO: 1262470
uugguaguuacaguaauac

SEQ ID NO: 1262472 - RNA, 19 nt, Artificial Sequence
  Description of Artificial Sequence: Synthetic oligonucleotide
  Sense strand starting at position 3610 of SEQ ID NO: 1241308
uguaacuaccaacauguua

SEQ ID NO: 1262473 - RNA, 19 nt, Artificial Sequence
  Description of Artificial Sequence: Synthetic oligonucleotide
  Antisense strand to SEQ ID NO: 1262472
uaacauguugguaguuaca

SEQ ID NO: 1262474 - RNA, 19 nt, Artificial Sequence
  Description of Artificial Sequence: Synthetic oligonucleotide
  Sense strand starting at position 3788 of SEQ ID NO: 1241308
aaguguuagcaaggcaaga

SEQ ID NO: 1262475 - RNA, 19 nt, Artificial Sequence
  Description of Artificial Sequence: Synthetic oligonucleotide
  Antisense strand to SEQ ID NO: 1262474
ucuugccuugcuaacacuu

SEQ ID NO: 1262476 - RNA, 19 nt, Artificial Sequence
  Description of Artificial Sequence: Synthetic oligonucleotide
  Sense strand starting at position 3790 of SEQ ID NO: 1241308
guguuagcaaggcaagaaa

SEQ ID NO: 1262477 - RNA, 19 nt, Artificial Sequence
  Description of Artificial Sequence: Synthetic oligonucleotide
  Antisense strand to SEQ ID NO: 1262476
uuucuugccuugcuaacac

SEQ ID NO: 1262478 - RNA, 19 nt, Artificial Sequence
  Description of Artificial Sequence: Synthetic oligonucleotide
  Sense strand starting at position 3824 of SEQ ID NO: 1241308
ugaguauguuguuuggaaa

SEQ ID NO: 1262479 - RNA, 19 nt, Artificial Sequence
  Description of Artificial Sequence: Synthetic oligonucleotide
  Antisense strand to SEQ ID NO: 1262478
uuuccaaacaacauacuca

SEQ ID NO: 1262480 - RNA, 19 nt, Artificial Sequence
  Description of Artificial Sequence: Synthetic oligonucleotide
  Sense strand starting at position 3825 of SEQ ID NO: 1241308
gaguauguuguuuggaaag

SEQ ID NO: 1262481 - RNA, 19 nt, Artificial Sequence
  Description of Artificial Sequence: Synthetic oligonucleotide
  Antisense strand to SEQ ID NO: 1262480
cuuuccaaacaacauacuc

SEQ ID NO: 1262482 - RNA, 19 nt, Artificial Sequence
  Description of Artificial Sequence: Synthetic oligonucleotide
  Sense strand starting at position 3837 of SEQ ID NO: 1241308
uggaaagauugggauggaa

SEQ ID NO: 1262483 - RNA, 19 nt, Artificial Sequence
  Description of Artificial Sequence: Synthetic oligonucleotide
  Antisense strand to SEQ ID NO: 1262482
uuccaucccaaucuuucca

SEQ ID NO: 1262484 - RNA, 19 nt, Artificial Sequence
  Description of Artificial Sequence: Synthetic oligonucleotide
  Sense strand starting at position 3856 of SEQ ID NO: 1241308
augaguaaaguauguuucu

SEQ ID NO: 1262485 - RNA, 19 nt, Artificial Sequence
  Description of Artificial Sequence: Synthetic oligonucleotide
  Antisense strand to SEQ ID NO: 1262484
agaaacauacuuuacucau

SEQ ID NO: 1262486 - RNA, 19 nt, Artificial Sequence
  Description of Artificial Sequence: Synthetic oligonucleotide
  Sense strand starting at position 3857 of SEQ ID NO: 1241308
ugaguaaaguauguuucuu

SEQ ID NO: 1262487 - RNA, 19 nt, Artificial Sequence
  Description of Artificial Sequence: Synthetic oligonucleotide
  Antisense strand to SEQ ID NO: 1262486
aagaaacauacuuuacuca

SEQ ID NO: 1262488 - RNA, 19 nt, Artificial Sequence
  Description of Artificial Sequence: Synthetic oligonucleotide
  Sense strand starting at position 3887 of SEQ ID NO: 1241308
uuuaguaagcuuuaaagcu

SEQ ID NO: 1262489 - RNA, 19 nt, Artificial Sequence
  Description of Artificial Sequence: Synthetic oligonucleotide
  Antisense strand to SEQ ID NO: 1262488
agcuuuaaagcuuacuaaa

SEQ ID NO: 1262490 - RNA, 19 nt, Artificial Sequence
  Description of Artificial Sequence: Synthetic oligonucleotide
  Sense strand starting at position 3895 of SEQ ID NO: 1241308
gcuuuaaagcucuauaugu

SEQ ID NO: 1262491 - RNA, 19 nt, Artificial Sequence
  Description of Artificial Sequence: Synthetic oligonucleotide
  Antisense strand to SEQ ID NO: 1262490
acauauagagcuuuaaagc

SEQ ID NO: 1262492 - RNA, 19 nt, Artificial Sequence
  Description of Artificial Sequence: Synthetic oligonucleotide
  Sense strand starting at position 3949 of SEQ ID NO: 1241308
uuugauguuauguaagguu

SEQ ID NO: 1262493 - RNA, 19 nt, Artificial Sequence
  Description of Artificial Sequence: Synthetic oligonucleotide
  Antisense strand to SEQ ID NO: 1262492
aaccuuacauaacaucaaa

SEQ ID NO: 1262494 - RNA, 19 nt, Artificial Sequence
  Description of Artificial Sequence: Synthetic oligonucleotide
  Sense strand starting at position 183 of SEQ ID NO: 1241309
ccauauagaguuugguaug

SEQ ID NO: 1262495 - RNA, 19 nt, Artificial Sequence
  Description of Artificial Sequence: Synthetic oligonucleotide
  Antisense strand to SEQ ID NO: 1262494
cauaccaaacucuauaugg

SEQ ID NO: 1262496 - RNA, 19 nt, Artificial Sequence
  Description of Artificial Sequence: Synthetic oligonucleotide
  Sense strand starting at position 188 of SEQ ID NO: 1241309
uagaguuugguauguggga

SEQ ID NO: 1262497 - RNA, 19 nt, Artificial Sequence
  Description of Artificial Sequence: Synthetic oligonucleotide
  Antisense strand to SEQ ID NO: 1262496
ucccacauaccaaacucua

SEQ ID NO: 1262498 - RNA, 19 nt, Artificial Sequence
  Description of Artificial Sequence: Synthetic oligonucleotide
  Sense strand starting at position 189 of SEQ ID NO: 1241309
agaguuugguaugugggaa

SEQ ID NO: 1262499 - RNA, 19 nt, Artificial Sequence
  Description of Artificial Sequence: Synthetic oligonucleotide
  Antisense strand to SEQ ID NO: 1262498
uucccacauaccaaacucu

SEQ ID NO: 1262500 - RNA, 19 nt, Artificial Sequence
  Description of Artificial Sequence: Synthetic oligonucleotide
  Sense strand starting at position 190 of SEQ ID NO: 1241309
gaguuugguaugugggaaa

SEQ ID NO: 1262501 - RNA, 19 nt, Artificial Sequence
  Description of Artificial Sequence: Synthetic oligonucleotide
  Antisense strand to SEQ ID NO: 1262500
uuucccacauaccaaacuc

SEQ ID NO: 1262502 - RNA, 19 nt, Artificial Sequence
  Description of Artificial Sequence: Synthetic oligonucleotide
  Sense strand starting at position 373 of SEQ ID NO: 1241309
ucagguacuuagucucaaa

SEQ ID NO: 1262503 - RNA, 19 nt, Artificial Sequence
  Description of Artificial Sequence: Synthetic oligonucleotide
  Antisense strand to SEQ ID NO: 1262502
uuugagacuaaguaccuga

SEQ ID NO: 1262504 - RNA, 19 nt, Artificial Sequence
  Description of Artificial Sequence: Synthetic oligonucleotide
  Sense strand starting at position 851 of SEQ ID NO: 1241309
cuugaaauguggucagcca

SEQ ID NO: 1262505 - RNA, 19 nt, Artificial Sequence
  Description of Artificial Sequence: Synthetic oligonucleotide
  Antisense strand to SEQ ID NO: 1262504
uggcugaccacauuucaag

SEQ ID NO: 1262506 - RNA, 19 nt, Artificial Sequence
  Description of Artificial Sequence: Synthetic oligonucleotide
  Sense strand starting at position 867 of SEQ ID NO: 1241309
ccagaacugcgauaugcua

SEQ ID NO: 1262507 - RNA, 19 nt, Artificial Sequence
  Description of Artificial Sequence: Synthetic oligonucleotide
  Antisense strand to SEQ ID NO: 1262506
uagcauaucgcaguucugg

SEQ ID NO: 1262508 - RNA, 19 nt, Artificial Sequence
  Description of Artificial Sequence: Synthetic oligonucleotide
  Sense strand starting at position 1094 of SEQ ID NO: 1241309
cuugcauucuauuuauguu

SEQ ID NO: 1262509 - RNA, 19 nt, Artificial Sequence
  Description of Artificial Sequence: Synthetic oligonucleotide
  Antisense strand to SEQ ID NO: 1262508
aacauaaauagaaugcaag

SEQ ID NO: 1262510 - RNA, 19 nt, Artificial Sequence
  Description of Artificial Sequence: Synthetic oligonucleotide
  Sense strand starting at position 1136 of SEQ ID NO: 1241309
guugccucggcggugaaau

SEQ ID NO: 1262511 - RNA, 19 nt, Artificial Sequence
  Description of Artificial Sequence: Synthetic oligonucleotide
  Antisense strand to SEQ ID NO: 1262510
auuucaccgccgaggcaac

SEQ ID NO: 1262512 - RNA, 19 nt, Artificial Sequence
  Description of Artificial Sequence: Synthetic oligonucleotide
  Sense strand starting at position 1195 of SEQ ID NO: 1241309
gugaauuaaagcugguaaa

SEQ ID NO: 1262513 - RNA, 19 nt, Artificial Sequence
  Description of Artificial Sequence: Synthetic oligonucleotide
  Antisense strand to SEQ ID NO: 1262512
uuuaccagcuuuaauucac

SEQ ID NO: 1262514 - RNA, 19 nt, Artificial Sequence
  Description of Artificial Sequence: Synthetic oligonucleotide
  Sense strand starting at position 1196 of SEQ ID NO: 1241309
ugaauuaaagcugguaaac

SEQ ID NO: 1262515 - RNA, 19 nt, Artificial Sequence
  Description of Artificial Sequence: Synthetic oligonucleotide
  Antisense strand to SEQ ID NO: 1262514
guuuaccagcuuuaauuca

SEQ ID NO: 1262516 - RNA, 19 nt, Artificial Sequence
  Description of Artificial Sequence: Synthetic oligonucleotide
  Sense strand starting at position 1208 of SEQ ID NO: 1241309
gguaaacguuuggcauaug

SEQ ID NO: 1262517 - RNA, 19 nt, Artificial Sequence
  Description of Artificial Sequence: Synthetic oligonucleotide
  Antisense strand to SEQ ID NO: 1262516
cauaugccaaacguuuacc

SEQ ID NO: 1262518 - RNA, 19 nt, Artificial Sequence
  Description of Artificial Sequence: Synthetic oligonucleotide
  Sense strand starting at position 1211 of SEQ ID NO: 1241309
aaacguuuggcauaugcca

SEQ ID NO: 1262519 - RNA, 19 nt, Artificial Sequence
  Description of Artificial Sequence: Synthetic oligonucleotide
  Antisense strand to SEQ ID NO: 1262518
uggcauaugccaaacguuu

SEQ ID NO: 1262520 - RNA, 19 nt, Artificial Sequence
  Description of Artificial Sequence: Synthetic oligonucleotide
  Sense strand starting at position 1269 of SEQ ID NO: 1241309
gagacugagaagugguuga

SEQ ID NO: 1262521 - RNA, 19 nt, Artificial Sequence
  Description of Artificial Sequence: Synthetic oligonucleotide
  Antisense strand to SEQ ID NO: 1262520
ucaaccacuucucagucuc

SEQ ID NO: 1262522 - RNA, 19 nt, Artificial Sequence
  Description of Artificial Sequence: Synthetic oligonucleotide
  Sense strand starting at position 1344 of SEQ ID NO: 1241309
uucuucuuccucugguaga

SEQ ID NO: 1262523 - RNA, 19 nt, Artificial Sequence
  Description of Artificial Sequence: Synthetic oligonucleotide
  Antisense strand to SEQ ID NO: 1262522
ucuaccagaggaagaagaa

SEQ ID NO: 1262524 - RNA, 19 nt, Artificial Sequence
  Description of Artificial Sequence: Synthetic oligonucleotide
  Sense strand starting at position 1467 of SEQ ID NO: 1241309
gcuggucucagugagcaga

SEQ ID NO: 1262525 - RNA, 19 nt, Artificial Sequence
  Description of Artificial Sequence: Synthetic oligonucleotide
  Antisense strand to SEQ ID NO: 1262524
ucugcucacugagaccagc

SEQ ID NO: 1262526 - RNA, 19 nt, Artificial Sequence
  Description of Artificial Sequence: Synthetic oligonucleotide
  Sense strand starting at position 1469 of SEQ ID NO: 1241309
uggucucagugagcagaaa

SEQ ID NO: 1262527 - RNA, 19 nt, Artificial Sequence
  Description of Artificial Sequence: Synthetic oligonucleotide
  Antisense strand to SEQ ID NO: 1262526
uuucugcucacugagacca

SEQ ID NO: 1262528 - RNA, 19 nt, Artificial Sequence
  Description of Artificial Sequence: Synthetic oligonucleotide
  Sense strand starting at position 2360 of SEQ ID NO: 1241309
gcgugauauuugcuuacuc

SEQ ID NO: 1262529 - RNA, 19 nt, Artificial Sequence
  Description of Artificial Sequence: Synthetic oligonucleotide
  Antisense strand to SEQ ID NO: 1262528
gaguaagcaaauaucacgc

SEQ ID NO: 1262530 - RNA, 19 nt, Artificial Sequence
  Description of Artificial Sequence: Synthetic oligonucleotide
  Sense strand starting at position 2361 of SEQ ID NO: 1241309
cgugauauuugcuuacucu

SEQ ID NO: 1262531 - RNA, 19 nt, Artificial Sequence
  Description of Artificial Sequence: Synthetic oligonucleotide
  Antisense strand to SEQ ID NO: 1262530
agaguaagcaaauaucacg

SEQ ID NO: 1262532 - RNA, 19 nt, Artificial Sequence
  Description of Artificial Sequence: Synthetic oligonucleotide
  Sense strand starting at position 2370 of SEQ ID NO: 1241309
ugcuuacucuugucugaaa

SEQ ID NO: 1262533 - RNA, 19 nt, Artificial Sequence
  Description of Artificial Sequence: Synthetic oligonucleotide
  Antisense strand to SEQ ID NO: 1262532
uuucagacaagaguaagca

SEQ ID NO: 1262534 - RNA, 19 nt, Artificial Sequence
  Description of Artificial Sequence: Synthetic oligonucleotide
  Sense strand starting at position 2371 of SEQ ID NO: 1241309
gcuuacucuugucugaaau

SEQ ID NO: 1262535 - RNA, 19 nt, Artificial Sequence
  Description of Artificial Sequence: Synthetic oligonucleotide
  Antisense strand to SEQ ID NO: 1262534
auuucagacaagaguaagc

SEQ ID NO: 1262536 - RNA, 19 nt, Artificial Sequence
  Description of Artificial Sequence: Synthetic oligonucleotide
  Sense strand starting at position 2390 of SEQ ID NO: 1241309
acuuaaguauaacuguaga

SEQ ID NO: 1262537 - RNA, 19 nt, Artificial Sequence
  Description of Artificial Sequence: Synthetic oligonucleotide
  Antisense strand to SEQ ID NO: 1262536
ucuacaguuauacuuaagu

SEQ ID NO: 1262538 - RNA, 19 nt, Artificial Sequence
  Description of Artificial Sequence: Synthetic oligonucleotide
  Sense strand starting at position 2494 of SEQ ID NO: 1241309
ucuuaaagucgugugcgua

SEQ ID NO: 1262539 - RNA, 19 nt, Artificial Sequence
  Description of Artificial Sequence: Synthetic oligonucleotide
  Antisense strand to SEQ ID NO: 1262538
uacgcacacgacuuuaaga

SEQ ID NO: 1262540 - RNA, 19 nt, Artificial Sequence
  Description of Artificial Sequence: Synthetic oligonucleotide
  Sense strand starting at position 2575 of SEQ ID NO: 1241309
augcaauuacugcaugacu

SEQ ID NO: 1262541 - RNA, 19 nt, Artificial Sequence
  Description of Artificial Sequence: Synthetic oligonucleotide
  Antisense strand to SEQ ID NO: 1262540
agucaugcaguaauugcau

SEQ ID NO: 1262542 - RNA, 19 nt, Artificial Sequence
  Description of Artificial Sequence: Synthetic oligonucleotide
  Sense strand starting at position 2611 of SEQ ID NO: 1241309
ugagguucugcagguaaau

SEQ ID NO: 1262543 - RNA, 19 nt, Artificial Sequence
  Description of Artificial Sequence: Synthetic oligonucleotide
  Antisense strand to SEQ ID NO: 1262542
auuuaccugcagaaccuca

SEQ ID NO: 1262544 - RNA, 19 nt, Artificial Sequence
  Description of Artificial Sequence: Synthetic oligonucleotide
  Sense strand starting at position 2622 of SEQ ID NO: 1241309
agguaaaugguauauuguu

SEQ ID NO: 1262545 - RNA, 19 nt, Artificial Sequence
  Description of Artificial Sequence: Synthetic oligonucleotide
  Antisense strand to SEQ ID NO: 1262544
aacaauauaccauuuaccu

SEQ ID NO: 1262546 - RNA, 19 nt, Artificial Sequence
  Description of Artificial Sequence: Synthetic oligonucleotide
  Sense strand starting at position 2758 of SEQ ID NO: 1241309
agaaaugcucccuaaaguu

SEQ ID NO: 1262547 - RNA, 19 nt, Artificial Sequence
  Description of Artificial Sequence: Synthetic oligonucleotide
  Antisense strand to SEQ ID NO: 1262546
aacuuuagggagcauuucu

SEQ ID NO: 1262548 - RNA, 19 nt, Artificial Sequence
  Description of Artificial Sequence: Synthetic oligonucleotide
  Sense strand starting at position 2768 of SEQ ID NO: 1241309
ccuaaaguuguaugaccuu

SEQ ID NO: 1262549 - RNA, 19 nt, Artificial Sequence
  Description of Artificial Sequence: Synthetic oligonucleotide
  Antisense strand to SEQ ID NO: 1262548
aaggucauacaacuuuagg

SEQ ID NO: 1262550 - RNA, 19 nt, Artificial Sequence
  Description of Artificial Sequence: Synthetic oligonucleotide
  Sense strand starting at position 2771 of SEQ ID NO: 1241309
aaaguuguaugaccuugua

SEQ ID NO: 1262551 - RNA, 19 nt, Artificial Sequence
  Description of Artificial Sequence: Synthetic oligonucleotide
  Antisense strand to SEQ ID NO: 1262550
uacaaggucauacaacuuu

SEQ ID NO: 1262552 - RNA, 19 nt, Artificial Sequence
  Description of Artificial Sequence: Synthetic oligonucleotide
  Sense strand starting at position 2774 of SEQ ID NO: 1241309
guuguaugaccuuguaaau

SEQ ID NO: 1262553 - RNA, 19 nt, Artificial Sequence
  Description of Artificial Sequence: Synthetic oligonucleotide
  Antisense strand to SEQ ID NO: 1262552
auuuacaaggucauacaac

SEQ ID NO: 1262554 - RNA, 19 nt, Artificial Sequence
  Description of Artificial Sequence: Synthetic oligonucleotide
  Sense strand starting at position 2985 of SEQ ID NO: 1241309
guuggaaauccauauugcu

SEQ ID NO: 1262555 - RNA, 19 nt, Artificial Sequence
  Description of Artificial Sequence: Synthetic oligonucleotide
  Antisense strand to SEQ ID NO: 1262554
agcaauauggauuuccaac

SEQ ID NO: 1262556 - RNA, 19 nt, Artificial Sequence
  Description of Artificial Sequence: Synthetic oligonucleotide
  Sense strand starting at position 3001 of SEQ ID NO: 1241309
gcucucuauccugguaaua

SEQ ID NO: 1262557 - RNA, 19 nt, Artificial Sequence
  Description of Artificial Sequence: Synthetic oligonucleotide
  Antisense strand to SEQ ID NO: 1262556
uauuaccaggauagagagc

SEQ ID NO: 1262558 - RNA, 19 nt, Artificial Sequence
  Description of Artificial Sequence: Synthetic oligonucleotide
  Sense strand starting at position 3029 of SEQ ID NO: 1241309
uagguugcugcugaaguaa

SEQ ID NO: 1262559 - RNA, 19 nt, Artificial Sequence
  Description of Artificial Sequence: Synthetic oligonucleotide
  Antisense strand to SEQ ID NO: 1262558
uuacuucagcagcaaccua

SEQ ID NO: 1262560 - RNA, 19 nt, Artificial Sequence
  Description of Artificial Sequence: Synthetic oligonucleotide
  Sense strand starting at position 3050 of SEQ ID NO: 1241309
aaguuaguaccugaucuga

SEQ ID NO: 1262561 - RNA, 19 nt, Artificial Sequence
  Description of Artificial Sequence: Synthetic oligonucleotide
  Antisense strand to SEQ ID NO: 1262560
ucagaucagguacuaacuu

SEQ ID NO: 1262562 - RNA, 19 nt, Artificial Sequence
  Description of Artificial Sequence: Synthetic oligonucleotide
  Sense strand starting at position 3052 of SEQ ID NO: 1241309
guuaguaccugaucugacu

SEQ ID NO: 1262563 - RNA, 19 nt, Artificial Sequence
  Description of Artificial Sequence: Synthetic oligonucleotide
  Antisense strand to SEQ ID NO: 1262562
agucagaucagguacuaac

SEQ ID NO: 1262564 - RNA, 19 nt, Artificial Sequence
  Description of Artificial Sequence: Synthetic oligonucleotide
  Sense strand starting at position 3697 of SEQ ID NO: 1241309
acauguguauuucuuaguu

SEQ ID NO: 1262565 - RNA, 19 nt, Artificial Sequence
  Description of Artificial Sequence: Synthetic oligonucleotide
  Antisense strand to SEQ ID NO: 1262564
aacuaagaaauacacaugu

SEQ ID NO: 1262566 - RNA, 19 nt, Artificial Sequence
  Description of Artificial Sequence: Synthetic oligonucleotide
  Sense strand starting at position 3701 of SEQ ID NO: 1241309
guguauuucuuaguuuacu

SEQ ID NO: 1262567 - RNA, 19 nt, Artificial Sequence
  Description of Artificial Sequence: Synthetic oligonucleotide
  Antisense strand to SEQ ID NO: 1262566
aguaaacuaagaaauacac

SEQ ID NO: 1262568 - RNA, 19 nt, Artificial Sequence
  Description of Artificial Sequence: Synthetic oligonucleotide
  Sense strand starting at position 3746 of SEQ ID NO: 1241309
uaacgugaacuggaaguau

SEQ ID NO: 1262569 - RNA, 19 nt, Artificial Sequence
  Description of Artificial Sequence: Synthetic oligonucleotide
  Antisense strand to SEQ ID NO: 1262568
auacuuccaguucacguua

SEQ ID NO: 1262570 - RNA, 19 nt, Artificial Sequence
  Description of Artificial Sequence: Synthetic oligonucleotide
  Sense strand starting at position 3795 of SEQ ID NO: 1241309
ccaauugaagagcaguuua

SEQ ID NO: 1262571 - RNA, 19 nt, Artificial Sequence
  Description of Artificial Sequence: Synthetic oligonucleotide
  Antisense strand to SEQ ID NO: 1262570
uaaacugcucuucaauugg

SEQ ID NO: 1262572 - RNA, 19 nt, Artificial Sequence
  Description of Artificial Sequence: Synthetic oligonucleotide
  Sense strand starting at position 3800 of SEQ ID NO: 1241309
ugaagagcaguuuauuaca

SEQ ID NO: 1262573 - RNA, 19 nt, Artificial Sequence
  Description of Artificial Sequence: Synthetic oligonucleotide
  Antisense strand to SEQ ID NO: 1262572
uguaauaaacugcucuuca

SEQ ID NO: 1262574 - RNA, 19 nt, Artificial Sequence
  Description of Artificial Sequence: Synthetic oligonucleotide
  Sense strand starting at position 8 of SEQ ID NO: 1241310
guuaaccaagaaugugaaa

SEQ ID NO: 1262575 - RNA, 19 nt, Artificial Sequence
  Description of Artificial Sequence: Synthetic oligonucleotide
  Antisense strand to SEQ ID NO: 1262574
uuucacauucuugguuaac

SEQ ID NO: 1262576 - RNA, 19 nt, Artificial Sequence
  Description of Artificial Sequence: Synthetic oligonucleotide
  Sense strand starting at position 75 of SEQ ID NO: 1241310
acauuuagcugguauauaa

SEQ ID NO: 1262577 - RNA, 19 nt, Artificial Sequence
  Description of Artificial Sequence: Synthetic oligonucleotide
  Antisense strand to SEQ ID NO: 1262576
uuauauaccagcuaaaugu

SEQ ID NO: 1262578 - RNA, 19 nt, Artificial Sequence
  Description of Artificial Sequence: Synthetic oligonucleotide
  Sense strand starting at position 334 of SEQ ID NO: 1241310
ccauauagaguuugguaug

SEQ ID NO: 1262579 - RNA, 19 nt, Artificial Sequence
  Description of Artificial Sequence: Synthetic oligonucleotide
  Antisense strand to SEQ ID NO: 1262578
cauaccaaacucuauaugg

SEQ ID NO: 1262580 - RNA, 19 nt, Artificial Sequence
  Description of Artificial Sequence: Synthetic oligonucleotide
  Sense strand starting at position 339 of SEQ ID NO: 1241310
uagaguuugguauguggga

SEQ ID NO: 1262581 - RNA, 19 nt, Artificial Sequence
  Description of Artificial Sequence: Synthetic oligonucleotide
  Antisense strand to SEQ ID NO: 1262580
ucccacauaccaaacucua

SEQ ID NO: 1262582 - RNA, 19 nt, Artificial Sequence
  Description of Artificial Sequence: Synthetic oligonucleotide
  Sense strand starting at position 340 of SEQ ID NO: 1241310
agaguuugguaugugggaa

SEQ ID NO: 1262583 - RNA, 19 nt, Artificial Sequence
  Description of Artificial Sequence: Synthetic oligonucleotide
  Antisense strand to SEQ ID NO: 1262582
uucccacauaccaaacucu

SEQ ID NO: 1262584 - RNA, 19 nt, Artificial Sequence
  Description of Artificial Sequence: Synthetic oligonucleotide
  Sense strand starting at position 341 of SEQ ID NO: 1241310
gaguuugguaugugggaaa

SEQ ID NO: 1262585 - RNA, 19 nt, Artificial Sequence
  Description of Artificial Sequence: Synthetic oligonucleotide
  Antisense strand to SEQ ID NO: 1262584
uuucccacauaccaaacuc

SEQ ID NO: 1262586 - RNA, 19 nt, Artificial Sequence
  Description of Artificial Sequence: Synthetic oligonucleotide
  Sense strand starting at position 524 of SEQ ID NO: 1241310
ucagguacuuagucucaaa

SEQ ID NO: 1262587 - RNA, 19 nt, Artificial Sequence
  Description of Artificial Sequence: Synthetic oligonucleotide
  Antisense strand to SEQ ID NO: 1262586
uuugagacuaaguaccuga

SEQ ID NO: 1262588 - RNA, 19 nt, Artificial Sequence
  Description of Artificial Sequence: Synthetic oligonucleotide
  Sense strand starting at position 1002 of SEQ ID NO: 1241310
cuugaaauguggucagcca

SEQ ID NO: 1262589 - RNA, 19 nt, Artificial Sequence
  Description of Artificial Sequence: Synthetic oligonucleotide
  Antisense strand to SEQ ID NO: 1262588
uggcugaccacauuucaag

SEQ ID NO: 1262590 - RNA, 19 nt, Artificial Sequence
  Description of Artificial Sequence: Synthetic oligonucleotide
  Sense strand starting at position 1018 of SEQ ID NO: 1241310
ccagaacugcgauaugcua

SEQ ID NO: 1262591 - RNA, 19 nt, Artificial Sequence
  Description of Artificial Sequence: Synthetic oligonucleotide
  Antisense strand to SEQ ID NO: 1262590
uagcauaucgcaguucugg

SEQ ID NO: 1262592 - RNA, 19 nt, Artificial Sequence
  Description of Artificial Sequence: Synthetic oligonucleotide
  Sense strand starting at position 1245 of SEQ ID NO: 1241310
cuugcauucuauuuauguu

SEQ ID NO: 1262593 - RNA, 19 nt, Artificial Sequence
  Description of Artificial Sequence: Synthetic oligonucleotide
  Antisense strand to SEQ ID NO: 1262592
aacauaaauagaaugcaag

SEQ ID NO: 1262594 - RNA, 19 nt, Artificial Sequence
  Description of Artificial Sequence: Synthetic oligonucleotide
  Sense strand starting at position 1287 of SEQ ID NO: 1241310
guugccucggcggugaaau

SEQ ID NO: 1262595 - RNA, 19 nt, Artificial Sequence
  Description of Artificial Sequence: Synthetic oligonucleotide
  Antisense strand to SEQ ID NO: 1262594
auuucaccgccgaggcaac

SEQ ID NO: 1262596 - RNA, 19 nt, Artificial Sequence
  Description of Artificial Sequence: Synthetic oligonucleotide
  Sense strand starting at position 1346 of SEQ ID NO: 1241310
gugaauuaaagcugguaaa

SEQ ID NO: 1262597 - RNA, 19 nt, Artificial Sequence
  Description of Artificial Sequence: Synthetic oligonucleotide
  Antisense strand to SEQ ID NO: 1262596
uuuaccagcuuuaauucac

SEQ ID NO: 1262598 - RNA, 19 nt, Artificial Sequence
  Description of Artificial Sequence: Synthetic oligonucleotide
  Sense strand starting at position 1347 of SEQ ID NO: 1241310
ugaauuaaagcugguaaac

SEQ ID NO: 1262599 - RNA, 19 nt, Artificial Sequence
  Description of Artificial Sequence: Synthetic oligonucleotide
  Antisense strand to SEQ ID NO: 1262598
guuuaccagcuuuaauuca

SEQ ID NO: 1262600 - RNA, 19 nt, Artificial Sequence
  Description of Artificial Sequence: Synthetic oligonucleotide
  Sense strand starting at position 1362 of SEQ ID NO: 1241310
aaacguuuggcauaugcca

SEQ ID NO: 1262601 - RNA, 19 nt, Artificial Sequence
  Description of Artificial Sequence: Synthetic oligonucleotide
  Antisense strand to SEQ ID NO: 1262600
uggcauaugccaaacguuu

SEQ ID NO: 1262602 - RNA, 19 nt, Artificial Sequence
  Description of Artificial Sequence: Synthetic oligonucleotide
  Sense strand starting at position 1420 of SEQ ID NO: 1241310
gagacugagaagugguuga

SEQ ID NO: 1262603 - RNA, 19 nt, Artificial Sequence
  Description of Artificial Sequence: Synthetic oligonucleotide
  Antisense strand to SEQ ID NO: 1262602
ucaaccacuucucagucuc

SEQ ID NO: 1262604 - RNA, 19 nt, Artificial Sequence
  Description of Artificial Sequence: Synthetic oligonucleotide
  Sense strand starting at position 1495 of SEQ ID NO: 1241310
uucuucuuccucugguaga

SEQ ID NO: 1262605 - RNA, 19 nt, Artificial Sequence
  Description of Artificial Sequence: Synthetic oligonucleotide
  Antisense strand to SEQ ID NO: 1262604
ucuaccagaggaagaagaa

SEQ ID NO: 1262606 - RNA, 19 nt, Artificial Sequence
  Description of Artificial Sequence: Synthetic oligonucleotide
  Sense strand starting at position 1618 of SEQ ID NO: 1241310
gcuggucucagugagcaga

SEQ ID NO: 1262607 - RNA, 19 nt, Artificial Sequence
  Description of Artificial Sequence: Synthetic oligonucleotide
  Antisense strand to SEQ ID NO: 1262606
ucugcucacugagaccagc

SEQ ID NO: 1262608 - RNA, 19 nt, Artificial Sequence
  Description of Artificial Sequence: Synthetic oligonucleotide
  Sense strand starting at position 1620 of SEQ ID NO: 1241310
uggucucagugagcagaaa

SEQ ID NO: 1262609 - RNA, 19 nt, Artificial Sequence
  Description of Artificial Sequence: Synthetic oligonucleotide
  Antisense strand to SEQ ID NO: 1262608
uuucugcucacugagacca

SEQ ID NO: 1262610 - RNA, 19 nt, Artificial Sequence
  Description of Artificial Sequence: Synthetic oligonucleotide
  Sense strand starting at position 2511 of SEQ ID NO: 1241310
gcgugauauuugcuuacuc

SEQ ID NO: 1262611 - RNA, 19 nt, Artificial Sequence
  Description of Artificial Sequence: Synthetic oligonucleotide
  Antisense strand to SEQ ID NO: 1262610
gaguaagcaaauaucacgc

SEQ ID NO: 1262612 - RNA, 19 nt, Artificial Sequence
  Description of Artificial Sequence: Synthetic oligonucleotide
  Sense strand starting at position 2512 of SEQ ID NO: 1241310
cgugauauuugcuuacucu

SEQ ID NO: 1262613 - RNA, 19 nt, Artificial Sequence
  Description of Artificial Sequence: Synthetic oligonucleotide
  Antisense strand to SEQ ID NO: 1262612
agaguaagcaaauaucacg

SEQ ID NO: 1262614 - RNA, 19 nt, Artificial Sequence
  Description of Artificial Sequence: Synthetic oligonucleotide
  Sense strand starting at position 2521 of SEQ ID NO: 1241310
ugcuuacucuugucugaaa

SEQ ID NO: 1262615 - RNA, 19 nt, Artificial Sequence
  Description of Artificial Sequence: Synthetic oligonucleotide
  Antisense strand to SEQ ID NO: 1262614
uuucagacaagaguaagca

SEQ ID NO: 1262616 - RNA, 19 nt, Artificial Sequence
  Description of Artificial Sequence: Synthetic oligonucleotide
  Sense strand starting at position 2522 of SEQ ID NO: 1241310
gcuuacucuugucugaaau

SEQ ID NO: 1262617 - RNA, 19 nt, Artificial Sequence
  Description of Artificial Sequence: Synthetic oligonucleotide
  Antisense strand to SEQ ID NO: 1262616
auuucagacaagaguaagc

SEQ ID NO: 1262618 - RNA, 19 nt, Artificial Sequence
  Description of Artificial Sequence: Synthetic oligonucleotide
  Sense strand starting at position 2541 of SEQ ID NO: 1241310
acuuaaguauaacuguaga

SEQ ID NO: 1262619 - RNA, 19 nt, Artificial Sequence
  Description of Artificial Sequence: Synthetic oligonucleotide
  Antisense strand to SEQ ID NO: 1262618
ucuacaguuauacuuaagu

SEQ ID NO: 1262620 - RNA, 19 nt, Artificial Sequence
  Description of Artificial Sequence: Synthetic oligonucleotide
  Sense strand starting at position 2645 of SEQ ID NO: 1241310
ucuuaaagucgugugcgua

SEQ ID NO: 1262621 - RNA, 19 nt, Artificial Sequence
  Description of Artificial Sequence: Synthetic oligonucleotide
  Antisense strand to SEQ ID NO: 1262620
uacgcacacgacuuuaaga

SEQ ID NO: 1262622 - RNA, 19 nt, Artificial Sequence
  Description of Artificial Sequence: Synthetic oligonucleotide
  Sense strand starting at position 2726 of SEQ ID NO: 1241310
augcaauuacugcaugacu

SEQ ID NO: 1262623 - RNA, 19 nt, Artificial Sequence
  Description of Artificial Sequence: Synthetic oligonucleotide
  Antisense strand to SEQ ID NO: 1262622
agucaugcaguaauugcau

SEQ ID NO: 1262624 - RNA, 19 nt, Artificial Sequence
  Description of Artificial Sequence: Synthetic oligonucleotide
  Sense strand starting at position 2762 of SEQ ID NO: 1241310
ugagguucugcagguaaau

SEQ ID NO: 1262625 - RNA, 19 nt, Artificial Sequence
  Description of Artificial Sequence: Synthetic oligonucleotide
  Antisense strand to SEQ ID NO: 1262624
auuuaccugcagaaccuca

SEQ ID NO: 1262626 - RNA, 19 nt, Artificial Sequence
  Description of Artificial Sequence: Synthetic oligonucleotide
  Sense strand starting at position 2773 of SEQ ID NO: 1241310
agguaaaugguauauuguu

SEQ ID NO: 1262627 - RNA, 19 nt, Artificial Sequence
  Description of Artificial Sequence: Synthetic oligonucleotide
  Antisense strand to SEQ ID NO: 1262626
aacaauauaccauuuaccu

SEQ ID NO: 1262628 - RNA, 19 nt, Artificial Sequence
  Description of Artificial Sequence: Synthetic oligonucleotide
  Sense strand starting at position 2909 of SEQ ID NO: 1241310
agaaaugcucccuaaaguu

SEQ ID NO: 1262629 - RNA, 19 nt, Artificial Sequence
  Description of Artificial Sequence: Synthetic oligonucleotide
  Antisense strand to SEQ ID NO: 1262628
aacuuuagggagcauuucu

SEQ ID NO: 1262630 - RNA, 19 nt, Artificial Sequence
  Description of Artificial Sequence: Synthetic oligonucleotide
  Sense strand starting at position 2919 of SEQ ID NO: 1241310
ccuaaaguuguaugaccuu

SEQ ID NO: 1262631 - RNA, 19 nt, Artificial Sequence
  Description of Artificial Sequence: Synthetic oligonucleotide
  Antisense strand to SEQ ID NO: 1262630
aaggucauacaacuuuagg

SEQ ID NO: 1262632 - RNA, 19 nt, Artificial Sequence
  Description of Artificial Sequence: Synthetic oligonucleotide
  Sense strand starting at position 2922 of SEQ ID NO: 1241310
aaaguuguaugaccuugua

SEQ ID NO: 1262633 - RNA, 19 nt, Artificial Sequence
  Description of Artificial Sequence: Synthetic oligonucleotide
  Antisense strand to SEQ ID NO: 1262632
uacaaggucauacaacuuu

SEQ ID NO: 1262634 - RNA, 19 nt, Artificial Sequence
  Description of Artificial Sequence: Synthetic oligonucleotide
  Sense strand starting at position 2925 of SEQ ID NO: 1241310
guuguaugaccuuguaaau

SEQ ID NO: 1262635 - RNA, 19 nt, Artificial Sequence
  Description of Artificial Sequence: Synthetic oligonucleotide
  Antisense strand to SEQ ID NO: 1262634
auuuacaaggucauacaac

SEQ ID NO: 1262636 - RNA, 19 nt, Artificial Sequence
  Description of Artificial Sequence: Synthetic oligonucleotide
  Sense strand starting at position 3136 of SEQ ID NO: 1241310
guuggaaauccauauugcu

SEQ ID NO: 1262637 - RNA, 19 nt, Artificial Sequence
  Description of Artificial Sequence: Synthetic oligonucleotide
  Antisense strand to SEQ ID NO: 1262636
agcaauauggauuuccaac

SEQ ID NO: 1262638 - RNA, 19 nt, Artificial Sequence
  Description of Artificial Sequence: Synthetic oligonucleotide
  Sense strand starting at position 3180 of SEQ ID NO: 1241310
uagguugcugcugaaguaa

SEQ ID NO: 1262639 - RNA, 19 nt, Artificial Sequence
  Description of Artificial Sequence: Synthetic oligonucleotide
  Antisense strand to SEQ ID NO: 1262638
uuacuucagcagcaaccua

SEQ ID NO: 1262640 - RNA, 19 nt, Artificial Sequence
  Description of Artificial Sequence: Synthetic oligonucleotide
  Sense strand starting at position 3201 of SEQ ID NO: 1241310
aaguuaguaccugaucuga

SEQ ID NO: 1262641 - RNA, 19 nt, Artificial Sequence
  Description of Artificial Sequence: Synthetic oligonucleotide
  Antisense strand to SEQ ID NO: 1262640
ucagaucagguacuaacuu

SEQ ID NO: 1262642 - RNA, 19 nt, Artificial Sequence
  Description of Artificial Sequence: Synthetic oligonucleotide
  Sense strand starting at position 3203 of SEQ ID NO: 1241310
guuaguaccugaucugacu

SEQ ID NO: 1262643 - RNA, 19 nt, Artificial Sequence
  Description of Artificial Sequence: Synthetic oligonucleotide
  Antisense strand to SEQ ID NO: 1262642
agucagaucagguacuaac

SEQ ID NO: 1262644 - RNA, 19 nt, Artificial Sequence
  Description of Artificial Sequence: Synthetic oligonucleotide
  Sense strand starting at position 3848 of SEQ ID NO: 1241310
acauguguauuucuuaguu

SEQ ID NO: 1262645 - RNA, 19 nt, Artificial Sequence
  Description of Artificial Sequence: Synthetic oligonucleotide
  Antisense strand to SEQ ID NO: 1262644
aacuaagaaauacacaugu

SEQ ID NO: 1262646 - RNA, 19 nt, Artificial Sequence
  Description of Artificial Sequence: Synthetic oligonucleotide
  Sense strand starting at position 3852 of SEQ ID NO: 1241310
guguauuucuuaguuuacu

SEQ ID NO: 1262647 - RNA, 19 nt, Artificial Sequence
  Description of Artificial Sequence: Synthetic oligonucleotide
  Antisense strand to SEQ ID NO: 1262646
aguaaacuaagaaauacac

SEQ ID NO: 1262648 - RNA, 19 nt, Artificial Sequence
  Description of Artificial Sequence: Synthetic oligonucleotide
  Sense strand starting at position 3897 of SEQ ID NO: 1241310
uaacgugaacuggaaguau

SEQ ID NO: 1262649 - RNA, 19 nt, Artificial Sequence
  Description of Artificial Sequence: Synthetic oligonucleotide
  Antisense strand to SEQ ID NO: 1262648
auacuuccaguucacguua

SEQ ID NO: 1262650 - RNA, 19 nt, Artificial Sequence
  Description of Artificial Sequence: Synthetic oligonucleotide
  Sense strand starting at position 3946 of SEQ ID NO: 1241310
ccaauugaagagcaguuua

SEQ ID NO: 1262651 - RNA, 19 nt, Artificial Sequence
  Description of Artificial Sequence: Synthetic oligonucleotide
  Antisense strand to SEQ ID NO: 1262650
uaaacugcucuucaauugg

SEQ ID NO: 1262652 - RNA, 19 nt, Artificial Sequence
  Description of Artificial Sequence: Synthetic oligonucleotide
  Sense strand starting at position 3951 of SEQ ID NO: 1241310
ugaagagcaguuuauuaca

SEQ ID NO: 1262653 - RNA, 19 nt, Artificial Sequence
  Description of Artificial Sequence: Synthetic oligonucleotide
  Antisense strand to SEQ ID NO: 1262652
uguaauaaacugcucuuca

SEQ ID NO: 1262654 - RNA, 19 nt, Artificial Sequence
  Description of Artificial Sequence: Synthetic oligonucleotide
  Sense strand starting at position 2034 of SEQ ID NO: 1241311
gauugcuuccauggugaug

SEQ ID NO: 1262655 - RNA, 19 nt, Artificial Sequence
  Description of Artificial Sequence: Synthetic oligonucleotide
  Antisense strand to SEQ ID NO: 1262654
caucaccauggaagcaauc

SEQ ID NO: 1262656 - RNA, 19 nt, Artificial Sequence
  Description of Artificial Sequence: Synthetic oligonucleotide
  Sense strand starting at position 2065 of SEQ ID NO: 1241311
accucuugacccggaaauc

SEQ ID NO: 1262657 - RNA, 19 nt, Artificial Sequence
  Description of Artificial Sequence: Synthetic oligonucleotide
  Antisense strand to SEQ ID NO: 1262656
gauuuccgggucaagaggu

SEQ ID NO: 1262658 - RNA, 19 nt, Artificial Sequence
  Description of Artificial Sequence: Synthetic oligonucleotide
  Sense strand starting at position 2081 of SEQ ID NO: 1241311
auccacuugccgugaugaa

SEQ ID NO: 1262659 - RNA, 19 nt, Artificial Sequence
  Description of Artificial Sequence: Synthetic oligonucleotide
  Antisense strand to SEQ ID NO: 1262658
uucaucacggcaaguggau

SEQ ID NO: 1262660 - RNA, 19 nt, Artificial Sequence
  Description of Artificial Sequence: Synthetic oligonucleotide
  Sense strand starting at position 2082 of SEQ ID NO: 1241311
uccacuugccgugaugaau

SEQ ID NO: 1262661 - RNA, 19 nt, Artificial Sequence
  Description of Artificial Sequence: Synthetic oligonucleotide
  Antisense strand to SEQ ID NO: 1262660
auucaucacggcaagugga

SEQ ID NO: 1262662 - RNA, 19 nt, Artificial Sequence
  Description of Artificial Sequence: Synthetic oligonucleotide
  Sense strand starting at position 2093 of SEQ ID NO: 1241311
ugaugaaugcuggguuaug

SEQ ID NO: 1262663 - RNA, 19 nt, Artificial Sequence
  Description of Artificial Sequence: Synthetic oligonucleotide
  Antisense strand to SEQ ID NO: 1262662
cauaacccagcauucauca

SEQ ID NO: 1262664 - RNA, 19 nt, Artificial Sequence
  Description of Artificial Sequence: Synthetic oligonucleotide
  Sense strand starting at position 2094 of SEQ ID NO: 1241311
gaugaaugcuggguuaugu

SEQ ID NO: 1262665 - RNA, 19 nt, Artificial Sequence
  Description of Artificial Sequence: Synthetic oligonucleotide
  Antisense strand to SEQ ID NO: 1262664
acauaacccagcauucauc

SEQ ID NO: 1262666 - RNA, 19 nt, Artificial Sequence
  Description of Artificial Sequence: Synthetic oligonucleotide
  Sense strand starting at position 2118 of SEQ ID NO: 1241311
acgucagguguugagacua

SEQ ID NO: 1262667 - RNA, 19 nt, Artificial Sequence
  Description of Artificial Sequence: Synthetic oligonucleotide
  Antisense strand to SEQ ID NO: 1262666
uagucucaacaccugacgu

SEQ ID NO: 1262668 - RNA, 19 nt, Artificial Sequence
  Description of Artificial Sequence: Synthetic oligonucleotide
  Sense strand starting at position 2136 of SEQ ID NO: 1241311
aggccaaagucuccuggaa

SEQ ID NO: 1262669 - RNA, 19 nt, Artificial Sequence
  Description of Artificial Sequence: Synthetic oligonucleotide
  Antisense strand to SEQ ID NO: 1262668
uuccaggagacuuuggccu

SEQ ID NO: 1262670 - RNA, 19 nt, Artificial Sequence
  Description of Artificial Sequence: Synthetic oligonucleotide
  Sense strand starting at position 2263 of SEQ ID NO: 1241311
acccguaagaguuaggguu

SEQ ID NO: 1262671 - RNA, 19 nt, Artificial Sequence
  Description of Artificial Sequence: Synthetic oligonucleotide
  Antisense strand to SEQ ID NO: 1262670
aacccuaacucuuacgggu

SEQ ID NO: 1262672 - RNA, 19 nt, Artificial Sequence
  Description of Artificial Sequence: Synthetic oligonucleotide
  Sense strand starting at position 2275 of SEQ ID NO: 1241311
uaggguuugaccggagcua

SEQ ID NO: 1262673 - RNA, 19 nt, Artificial Sequence
  Description of Artificial Sequence: Synthetic oligonucleotide
  Antisense strand to SEQ ID NO: 1262672
uagcuccggucaaacccua

SEQ ID NO: 1262674 - RNA, 19 nt, Artificial Sequence
  Description of Artificial Sequence: Synthetic oligonucleotide
  Sense strand starting at position 2277 of SEQ ID NO: 1241311
ggguuugaccggagcuagu

SEQ ID NO: 1262675 - RNA, 19 nt, Artificial Sequence
  Description of Artificial Sequence: Synthetic oligonucleotide
  Antisense strand to SEQ ID NO: 1262674
acuagcuccggucaaaccc

SEQ ID NO: 1262676 - RNA, 19 nt, Artificial Sequence
  Description of Artificial Sequence: Synthetic oligonucleotide
  Sense strand starting at position 2339 of SEQ ID NO: 1241311
gucgcugcccgugugauua

SEQ ID NO: 1262677 - RNA, 19 nt, Artificial Sequence
  Description of Artificial Sequence: Synthetic oligonucleotide
  Antisense strand to SEQ ID NO: 1262676
uaaucacacgggcagcgac

SEQ ID NO: 1262678 - RNA, 19 nt, Artificial Sequence
  Description of Artificial Sequence: Synthetic oligonucleotide
  Sense strand starting at position 2356 of SEQ ID NO: 1241311
uacugagacucagguauuu

SEQ ID NO: 1262679 - RNA, 19 nt, Artificial Sequence
  Description of Artificial Sequence: Synthetic oligonucleotide
  Antisense strand to SEQ ID NO: 1262678
aaauaccugagucucagua

SEQ ID NO: 1262680 - RNA, 19 nt, Artificial Sequence
  Description of Artificial Sequence: Synthetic oligonucleotide
  Sense strand starting at position 2511 of SEQ ID NO: 1241311
cuuguaaacgcguuacucu

SEQ ID NO: 1262681 - RNA, 19 nt, Artificial Sequence
  Description of Artificial Sequence: Synthetic oligonucleotide
  Antisense strand to SEQ ID NO: 1262680
agaguaacgcguuuacaag

SEQ ID NO: 1262682 - RNA, 19 nt, Artificial Sequence
  Description of Artificial Sequence: Synthetic oligonucleotide
  Sense strand starting at position 2838 of SEQ ID NO: 1241311
ucccuuagacguuaucaaa

SEQ ID NO: 1262683 - RNA, 19 nt, Artificial Sequence
  Description of Artificial Sequence: Synthetic oligonucleotide
  Antisense strand to SEQ ID NO: 1262682
uuugauaacgucuaaggga

SEQ ID NO: 1262684 - RNA, 19 nt, Artificial Sequence
  Description of Artificial Sequence: Synthetic oligonucleotide
  Sense strand starting at position 3008 of SEQ ID NO: 1241311
guggaaguucuuggcauca

SEQ ID NO: 1262685 - RNA, 19 nt, Artificial Sequence
  Description of Artificial Sequence: Synthetic oligonucleotide
  Antisense strand to SEQ ID NO: 1262684
ugaugccaagaacuuccac

SEQ ID NO: 1262686 - RNA, 19 nt, Artificial Sequence
  Description of Artificial Sequence: Synthetic oligonucleotide
  Sense strand starting at position 3037 of SEQ ID NO: 1241311
agaauucugccuuguggau

SEQ ID NO: 1262687 - RNA, 19 nt, Artificial Sequence
  Description of Artificial Sequence: Synthetic oligonucleotide
  Antisense strand to SEQ ID NO: 1262686
auccacaaggcagaauucu

SEQ ID NO: 1262688 - RNA, 19 nt, Artificial Sequence
  Description of Artificial Sequence: Synthetic oligonucleotide
  Sense strand starting at position 3057 of SEQ ID NO: 1241311
uaggaaugauaguagacau

SEQ ID NO: 1262689 - RNA, 19 nt, Artificial Sequence
  Description of Artificial Sequence: Synthetic oligonucleotide
  Antisense strand to SEQ ID NO: 1262688
augucuacuaucauuccua

SEQ ID NO: 1262690 - RNA, 19 nt, Artificial Sequence
  Description of Artificial Sequence: Synthetic oligonucleotide
  Sense strand starting at position 3178 of SEQ ID NO: 1241311
aaugcuuuggaguguggaa

SEQ ID NO: 1262691 - RNA, 19 nt, Artificial Sequence
  Description of Artificial Sequence: Synthetic oligonucleotide
  Antisense strand to SEQ ID NO: 1262690
uuccacacuccaaagcauu

SEQ ID NO: 1262692 - RNA, 19 nt, Artificial Sequence
  Description of Artificial Sequence: Synthetic oligonucleotide
  Sense strand starting at position 3180 of SEQ ID NO: 1241311
ugcuuuggaguguggaaga

SEQ ID NO: 1262693 - RNA, 19 nt, Artificial Sequence
  Description of Artificial Sequence: Synthetic oligonucleotide
  Antisense strand to SEQ ID NO: 1262692
ucuuccacacuccaaagca

SEQ ID NO: 1262694 - RNA, 19 nt, Artificial Sequence
  Description of Artificial Sequence: Synthetic oligonucleotide
  Sense strand starting at position 3183 of SEQ ID NO: 1241311
uuuggaguguggaagagau

SEQ ID NO: 1262695 - RNA, 19 nt, Artificial Sequence
  Description of Artificial Sequence: Synthetic oligonucleotide
  Antisense strand to SEQ ID NO: 1262694
aucucuuccacacuccaaa

SEQ ID NO: 1262696 - RNA, 19 nt, Artificial Sequence
  Description of Artificial Sequence: Synthetic oligonucleotide
  Sense strand starting at position 3255 of SEQ ID NO: 1241311
agucuaaguuaucauuuga

SEQ ID NO: 1262697 - RNA, 19 nt, Artificial Sequence
  Description of Artificial Sequence: Synthetic oligonucleotide
  Antisense strand to SEQ ID NO: 1262696
ucaaaugauaacuuagacu

SEQ ID NO: 1262698 - RNA, 19 nt, Artificial Sequence
  Description of Artificial Sequence: Synthetic oligonucleotide
  Sense strand starting at position 3317 of SEQ ID NO: 1241311
cucuguaccaggugggauu

SEQ ID NO: 1262699 - RNA, 19 nt, Artificial Sequence
  Description of Artificial Sequence: Synthetic oligonucleotide
  Antisense strand to SEQ ID NO: 1262698
aaucccaccugguacagag

SEQ ID NO: 1262700 - RNA, 19 nt, Artificial Sequence
  Description of Artificial Sequence: Synthetic oligonucleotide
  Sense strand starting at position 3329 of SEQ ID NO: 1241311
ugggauuucucuuaaauac

SEQ ID NO: 1262701 - RNA, 19 nt, Artificial Sequence
  Description of Artificial Sequence: Synthetic oligonucleotide
  Antisense strand to SEQ ID NO: 1262700
guauuuaagagaaauccca

SEQ ID NO: 1262702 - RNA, 19 nt, Artificial Sequence
  Description of Artificial Sequence: Synthetic oligonucleotide
  Sense strand starting at position 3521 of SEQ ID NO: 1241311
uguaaaugaggcuguguaa

SEQ ID NO: 1262703 - RNA, 19 nt, Artificial Sequence
  Description of Artificial Sequence: Synthetic oligonucleotide
  Antisense strand to SEQ ID NO: 1262702
uuacacagccucauuuaca

SEQ ID NO: 1262704 - RNA, 19 nt, Artificial Sequence
  Description of Artificial Sequence: Synthetic oligonucleotide
  Sense strand starting at position 3524 of SEQ ID NO: 1241311
aaaugaggcuguguaaaua

SEQ ID NO: 1262705 - RNA, 19 nt, Artificial Sequence
  Description of Artificial Sequence: Synthetic oligonucleotide
  Antisense strand to SEQ ID NO: 1262704
uauuuacacagccucauuu

SEQ ID NO: 1262706 - RNA, 19 nt, Artificial Sequence
  Description of Artificial Sequence: Synthetic oligonucleotide
  Sense strand starting at position 3560 of SEQ ID NO: 1241311
uuuaaauucuaggcuguua

SEQ ID NO: 1262707 - RNA, 19 nt, Artificial Sequence
  Description of Artificial Sequence: Synthetic oligonucleotide
  Antisense strand to SEQ ID NO: 1262706
uaacagccuagaauuuaaa

SEQ ID NO: 1262708 - RNA, 19 nt, Artificial Sequence
  Description of Artificial Sequence: Synthetic oligonucleotide
  Sense strand starting at position 3683 of SEQ ID NO: 1241311
acaagaaaugauuguagca

SEQ ID NO: 1262709 - RNA, 19 nt, Artificial Sequence
  Description of Artificial Sequence: Synthetic oligonucleotide
  Antisense strand to SEQ ID NO: 1262708
ugcuacaaucauuucuugu

SEQ ID NO: 1262710 - RNA, 19 nt, Artificial Sequence
  Description of Artificial Sequence: Synthetic oligonucleotide
  Sense strand starting at position 3698 of SEQ ID NO: 1241311
agcaguugucaaugagaaa

SEQ ID NO: 1262711 - RNA, 19 nt, Artificial Sequence
  Description of Artificial Sequence: Synthetic oligonucleotide
  Antisense strand to SEQ ID NO: 1262710
uuucucauugacaacugcu

SEQ ID NO: 1262712 - RNA, 19 nt, Artificial Sequence
  Description of Artificial Sequence: Synthetic oligonucleotide
  Sense strand starting at position 3699 of SEQ ID NO: 1241311
gcaguugucaaugagaaag

SEQ ID NO: 1262713 - RNA, 19 nt, Artificial Sequence
  Description of Artificial Sequence: Synthetic oligonucleotide
  Antisense strand to SEQ ID NO: 1262712
cuuucucauugacaacugc

SEQ ID NO: 1262714 - RNA, 19 nt, Artificial Sequence
  Description of Artificial Sequence: Synthetic oligonucleotide
  Sense strand starting at position 3713 of SEQ ID NO: 1241311
gaaagugucugguucucac

SEQ ID NO: 1262715 - RNA, 19 nt, Artificial Sequence
  Description of Artificial Sequence: Synthetic oligonucleotide
  Antisense strand to SEQ ID NO: 1262714
gugagaaccagacacuuuc

SEQ ID NO: 1262716 - RNA, 19 nt, Artificial Sequence
  Description of Artificial Sequence: Synthetic oligonucleotide
  Sense strand starting at position 3747 of SEQ ID NO: 1241311
agcucaaauguguagacuu

SEQ ID NO: 1262717 - RNA, 19 nt, Artificial Sequence
  Description of Artificial Sequence: Synthetic oligonucleotide
  Antisense strand to SEQ ID NO: 1262716
aagucuacacauuugagcu

SEQ ID NO: 1262718 - RNA, 19 nt, Artificial Sequence
  Description of Artificial Sequence: Synthetic oligonucleotide
  Sense strand starting at position 3758 of SEQ ID NO: 1241311
guagacuucuagucaugua

SEQ ID NO: 1262719 - RNA, 19 nt, Artificial Sequence
  Description of Artificial Sequence: Synthetic oligonucleotide
  Antisense strand to SEQ ID NO: 1262718
uacaugacuagaagucuac

SEQ ID NO: 1262720 - RNA, 19 nt, Artificial Sequence
  Description of Artificial Sequence: Synthetic oligonucleotide
  Sense strand starting at position 3770 of SEQ ID NO: 1241311
ucauguauugcccagacuu

SEQ ID NO: 1262721 - RNA, 19 nt, Artificial Sequence
  Description of Artificial Sequence: Synthetic oligonucleotide
  Antisense strand to SEQ ID NO: 1262720
aagucugggcaauacauga

SEQ ID NO: 1262722 - RNA, 19 nt, Artificial Sequence
  Description of Artificial Sequence: Synthetic oligonucleotide
  Sense strand starting at position 3772 of SEQ ID NO: 1241311
auguauugcccagacuuga

SEQ ID NO: 1262723 - RNA, 19 nt, Artificial Sequence
  Description of Artificial Sequence: Synthetic oligonucleotide
  Antisense strand to SEQ ID NO: 1262722
ucaagucugggcaauacau

SEQ ID NO: 1262724 - RNA, 19 nt, Artificial Sequence
  Description of Artificial Sequence: Synthetic oligonucleotide
  Sense strand starting at position 3888 of SEQ ID NO: 1241311
ucuuguauccaagaacuug

SEQ ID NO: 1262725 - RNA, 19 nt, Artificial Sequence
  Description of Artificial Sequence: Synthetic oligonucleotide
  Antisense strand to SEQ ID NO: 1262724
caaguucuuggauacaaga

SEQ ID NO: 1262726 - RNA, 19 nt, Artificial Sequence
  Description of Artificial Sequence: Synthetic oligonucleotide
  Sense strand starting at position 3923 of SEQ ID NO: 1241311
acuagagguugugugguaa

SEQ ID NO: 1262727 - RNA, 19 nt, Artificial Sequence
  Description of Artificial Sequence: Synthetic oligonucleotide
  Antisense strand to SEQ ID NO: 1262726
uuaccacacaaccucuagu

SEQ ID NO: 1262728 - RNA, 19 nt, Artificial Sequence
  Description of Artificial Sequence: Synthetic oligonucleotide
  Sense strand starting at position 3931 of SEQ ID NO: 1241311
uugugugguaaucauggaa

SEQ ID NO: 1262729 - RNA, 19 nt, Artificial Sequence
  Description of Artificial Sequence: Synthetic oligonucleotide
  Antisense strand to SEQ ID NO: 1262728
uuccaugauuaccacacaa

SEQ ID NO: 1262730 - RNA, 19 nt, Artificial Sequence
  Description of Artificial Sequence: Synthetic oligonucleotide
  Sense strand starting at position 3934 of SEQ ID NO: 1241311
ugugguaaucauggaauca

SEQ ID NO: 1262731 - RNA, 19 nt, Artificial Sequence
  Description of Artificial Sequence: Synthetic oligonucleotide
  Antisense strand to SEQ ID NO: 1262730
ugauuccaugauuaccaca

SEQ ID NO: 1262732 - RNA, 19 nt, Artificial Sequence
  Description of Artificial Sequence: Synthetic oligonucleotide
  Sense strand starting at position 3975 of SEQ ID NO: 1241311
uuaaaugagagacguggau

SEQ ID NO: 1262733 - RNA, 19 nt, Artificial Sequence
  Description of Artificial Sequence: Synthetic oligonucleotide
  Antisense strand to SEQ ID NO: 1262732
auccacgucucucauuuaa

SEQ ID NO: 1262734 - RNA, 19 nt, Artificial Sequence
  Description of Artificial Sequence: Synthetic oligonucleotide
  Sense strand starting at position 73 of SEQ ID NO: 1241312
caaagaguucuauguugaa

SEQ ID NO: 1262735 - RNA, 19 nt, Artificial Sequence
  Description of Artificial Sequence: Synthetic oligonucleotide
  Antisense strand to SEQ ID NO: 1262734
uucaacauagaacucuuug

SEQ ID NO: 1262736 - RNA, 19 nt, Artificial Sequence
  Description of Artificial Sequence: Synthetic oligonucleotide
  Sense strand starting at position 115 of SEQ ID NO: 1241312
ugugucuuguuccugauuu

SEQ ID NO: 1262737 - RNA, 19 nt, Artificial Sequence
  Description of Artificial Sequence: Synthetic oligonucleotide
  Antisense strand to SEQ ID NO: 1262736
aaaucaggaacaagacaca

SEQ ID NO: 1262738 - RNA, 19 nt, Artificial Sequence
  Description of Artificial Sequence: Synthetic oligonucleotide
  Sense strand starting at position 166 of SEQ ID NO: 1241312
auaugauguagcuguggga

SEQ ID NO: 1262739 - RNA, 19 nt, Artificial Sequence
  Description of Artificial Sequence: Synthetic oligonucleotide
  Antisense strand to SEQ ID NO: 1262738
ucccacagcuacaucauau

SEQ ID NO: 1262740 - RNA, 19 nt, Artificial Sequence
  Description of Artificial Sequence: Synthetic oligonucleotide
  Sense strand starting at position 210 of SEQ ID NO: 1241312
ugaggauacuuucuucuau

SEQ ID NO: 1262741 - RNA, 19 nt, Artificial Sequence
  Description of Artificial Sequence: Synthetic oligonucleotide
  Antisense strand to SEQ ID NO: 1262740
auagaagaaaguauccuca

SEQ ID NO: 1262742 - RNA, 19 nt, Artificial Sequence
  Description of Artificial Sequence: Synthetic oligonucleotide
  Sense strand starting at position 244 of SEQ ID NO: 1241312
aguucuugucgugaaugga

SEQ ID NO: 1262743 - RNA, 19 nt, Artificial Sequence
  Description of Artificial Sequence: Synthetic oligonucleotide
  Antisense strand to SEQ ID NO: 1262742
uccauucacgacaagaacu

SEQ ID NO: 1262744 - RNA, 19 nt, Artificial Sequence
  Description of Artificial Sequence: Synthetic oligonucleotide
  Sense strand starting at position 816 of SEQ ID NO: 1241312
gcuagaagcuuguuaauuu

SEQ ID NO: 1262745 - RNA, 19 nt, Artificial Sequence
  Description of Artificial Sequence: Synthetic oligonucleotide
  Antisense strand to SEQ ID NO: 1262744
aaauuaacaagcuucuagc

SEQ ID NO: 1262746 - RNA, 19 nt, Artificial Sequence
  Description of Artificial Sequence: Synthetic oligonucleotide
  Sense strand starting at position 990 of SEQ ID NO: 1241312
cauggcuuugaucauugau

SEQ ID NO: 1262747 - RNA, 19 nt, Artificial Sequence
  Description of Artificial Sequence: Synthetic oligonucleotide
  Antisense strand to SEQ ID NO: 1262746
aucaaugaucaaagccaug

SEQ ID NO: 1262748 - RNA, 19 nt, Artificial Sequence
  Description of Artificial Sequence: Synthetic oligonucleotide
  Sense strand starting at position 992 of SEQ ID NO: 1241312
uggcuuugaucauugauug

SEQ ID NO: 1262749 - RNA, 19 nt, Artificial Sequence
  Description of Artificial Sequence: Synthetic oligonucleotide
  Antisense strand to SEQ ID NO: 1262748
caaucaaugaucaaagcca

SEQ ID NO: 1262750 - RNA, 19 nt, Artificial Sequence
  Description of Artificial Sequence: Synthetic oligonucleotide
  Sense strand starting at position 993 of SEQ ID NO: 1241312
ggcuuugaucauugauuga

SEQ ID NO: 1262751 - RNA, 19 nt, Artificial Sequence
  Description of Artificial Sequence: Synthetic oligonucleotide
  Antisense strand to SEQ ID NO: 1262750
ucaaucaaugaucaaagcc

SEQ ID NO: 1262752 - RNA, 19 nt, Artificial Sequence
  Description of Artificial Sequence: Synthetic oligonucleotide
  Sense strand starting at position 996 of SEQ ID NO: 1241312
uuugaucauugauugagau

SEQ ID NO: 1262753 - RNA, 19 nt, Artificial Sequence
  Description of Artificial Sequence: Synthetic oligonucleotide
  Antisense strand to SEQ ID NO: 1262752
aucucaaucaaugaucaaa

SEQ ID NO: 1262754 - RNA, 19 nt, Artificial Sequence
  Description of Artificial Sequence: Synthetic oligonucleotide
  Sense strand starting at position 997 of SEQ ID NO: 1241312
uugaucauugauugagauc

SEQ ID NO: 1262755 - RNA, 19 nt, Artificial Sequence
  Description of Artificial Sequence: Synthetic oligonucleotide
  Antisense strand to SEQ ID NO: 1262754
gaucucaaucaaugaucaa

SEQ ID NO: 1262756 - RNA, 19 nt, Artificial Sequence
  Description of Artificial Sequence: Synthetic oligonucleotide
  Sense strand starting at position 1156 of SEQ ID NO: 1241312
ccucuuuggcaacgagaaa

SEQ ID NO: 1262757 - RNA, 19 nt, Artificial Sequence
  Description of Artificial Sequence: Synthetic oligonucleotide
  Antisense strand to SEQ ID NO: 1262756
uuucucguugccaaagagg

SEQ ID NO: 1262758 - RNA, 19 nt, Artificial Sequence
  Description of Artificial Sequence: Synthetic oligonucleotide
  Sense strand starting at position 1184 of SEQ ID NO: 1241312
gggacuuucucggcaacaa

SEQ ID NO: 1262759 - RNA, 19 nt, Artificial Sequence
  Description of Artificial Sequence: Synthetic oligonucleotide
  Antisense strand to SEQ ID NO: 1262758
uuguugccgagaaaguccc

SEQ ID NO: 1262760 - RNA, 19 nt, Artificial Sequence
  Description of Artificial Sequence: Synthetic oligonucleotide
  Sense strand starting at position 1185 of SEQ ID NO: 1241312
ggacuuucucggcaacaag

SEQ ID NO: 1262761 - RNA, 19 nt, Artificial Sequence
  Description of Artificial Sequence: Synthetic oligonucleotide
  Antisense strand to SEQ ID NO: 1262760
cuuguugccgagaaagucc

SEQ ID NO: 1262762 - RNA, 19 nt, Artificial Sequence
  Description of Artificial Sequence: Synthetic oligonucleotide
  Sense strand starting at position 1241 of SEQ ID NO: 1241312
cucaccaagugguucuaaa

SEQ ID NO: 1262763 - RNA, 19 nt, Artificial Sequence
  Description of Artificial Sequence: Synthetic oligonucleotide
  Antisense strand to SEQ ID NO: 1262762
uuuagaaccacuuggugag

SEQ ID NO: 1262764 - RNA, 19 nt, Artificial Sequence
  Description of Artificial Sequence: Synthetic oligonucleotide
  Sense strand starting at position 1284 of SEQ ID NO: 1241312
acaggacauucucugaagu

SEQ ID NO: 1262765 - RNA, 19 nt, Artificial Sequence
  Description of Artificial Sequence: Synthetic oligonucleotide
  Antisense strand to SEQ ID NO: 1262764
acuucagagaauguccugu

SEQ ID NO: 1262766 - RNA, 19 nt, Artificial Sequence
  Description of Artificial Sequence: Synthetic oligonucleotide
  Sense strand starting at position 1322 of SEQ ID NO: 1241312
auacgaaauccaugccaac

SEQ ID NO: 1262767 - RNA, 19 nt, Artificial Sequence
  Description of Artificial Sequence: Synthetic oligonucleotide
  Antisense strand to SEQ ID NO: 1262766
guuggcauggauuucguau

SEQ ID NO: 1262768 - RNA, 19 nt, Artificial Sequence
  Description of Artificial Sequence: Synthetic oligonucleotide
  Sense strand starting at position 1415 of SEQ ID NO: 1241312
ucauaaugagguggauauu

SEQ ID NO: 1262769 - RNA, 19 nt, Artificial Sequence
  Description of Artificial Sequence: Synthetic oligonucleotide
  Antisense strand to SEQ ID NO: 1262768
aauauccaccucauuauga

SEQ ID NO: 1262770 - RNA, 19 nt, Artificial Sequence
  Description of Artificial Sequence: Synthetic oligonucleotide
  Sense strand starting at position 1564 of SEQ ID NO: 1241312
ucaucaugaucaguaagcu

SEQ ID NO: 1262771 - RNA, 19 nt, Artificial Sequence
  Description of Artificial Sequence: Synthetic oligonucleotide
  Antisense strand to SEQ ID NO: 1262770
agcuuacugaucaugauga

SEQ ID NO: 1262772 - RNA, 19 nt, Artificial Sequence
  Description of Artificial Sequence: Synthetic oligonucleotide
  Sense strand starting at position 2027 of SEQ ID NO: 1241312
gagagauuccaagggcuca

SEQ ID NO: 1262773 - RNA, 19 nt, Artificial Sequence
  Description of Artificial Sequence: Synthetic oligonucleotide
  Antisense strand to SEQ ID NO: 1262772
ugagcccuuggaaucucuc

SEQ ID NO: 1262774 - RNA, 19 nt, Artificial Sequence
  Description of Artificial Sequence: Synthetic oligonucleotide
  Sense strand starting at position 2072 of SEQ ID NO: 1241312
ugaugucuucccugaggga

SEQ ID NO: 1262775 - RNA, 19 nt, Artificial Sequence
  Description of Artificial Sequence: Synthetic oligonucleotide
  Antisense strand to SEQ ID NO: 1262774
ucccucagggaagacauca

SEQ ID NO: 1262776 - RNA, 19 nt, Artificial Sequence
  Description of Artificial Sequence: Synthetic oligonucleotide
  Sense strand starting at position 2116 of SEQ ID NO: 1241312
ccaagugucccuggaucca

SEQ ID NO: 1262777 - RNA, 19 nt, Artificial Sequence
  Description of Artificial Sequence: Synthetic oligonucleotide
  Antisense strand to SEQ ID NO: 1262776
uggauccagggacacuugg

SEQ ID NO: 1262778 - RNA, 19 nt, Artificial Sequence
  Description of Artificial Sequence: Synthetic oligonucleotide
  Sense strand starting at position 2153 of SEQ ID NO: 1241312
ggaagccagggaugucaau

SEQ ID NO: 1262779 - RNA, 19 nt, Artificial Sequence
  Description of Artificial Sequence: Synthetic oligonucleotide
  Antisense strand to SEQ ID NO: 1262778
auugacaucccuggcuucc

SEQ ID NO: 1262780 - RNA, 19 nt, Artificial Sequence
  Description of Artificial Sequence: Synthetic oligonucleotide
  Sense strand starting at position 2162 of SEQ ID NO: 1241312
ggaugucaauacuuggcau

SEQ ID NO: 1262781 - RNA, 19 nt, Artificial Sequence
  Description of Artificial Sequence: Synthetic oligonucleotide
  Antisense strand to SEQ ID NO: 1262780
augccaaguauugacaucc

SEQ ID NO: 1262782 - RNA, 19 nt, Artificial Sequence
  Description of Artificial Sequence: Synthetic oligonucleotide
  Sense strand starting at position 2255 of SEQ ID NO: 1241312
auauuccugugaccaagau

SEQ ID NO: 1262783 - RNA, 19 nt, Artificial Sequence
  Description of Artificial Sequence: Synthetic oligonucleotide
  Antisense strand to SEQ ID NO: 1262782
aucuuggucacaggaauau

SEQ ID NO: 1262784 - RNA, 19 nt, Artificial Sequence
  Description of Artificial Sequence: Synthetic oligonucleotide
  Sense strand starting at position 2318 of SEQ ID NO: 1241312
acagacauuuguuacuaag

SEQ ID NO: 1262785 - RNA, 19 nt, Artificial Sequence
  Description of Artificial Sequence: Synthetic oligonucleotide
  Antisense strand to SEQ ID NO: 1262784
cuuaguaacaaaugucugu

SEQ ID NO: 1262786 - RNA, 19 nt, Artificial Sequence
  Description of Artificial Sequence: Synthetic oligonucleotide
  Sense strand starting at position 2353 of SEQ ID NO: 1241312
ggcacugacuuagccauaa

SEQ ID NO: 1262787 - RNA, 19 nt, Artificial Sequence
  Description of Artificial Sequence: Synthetic oligonucleotide
  Antisense strand to SEQ ID NO: 1262786
uuauggcuaagucagugcc

SEQ ID NO: 1262788 - RNA, 19 nt, Artificial Sequence
  Description of Artificial Sequence: Synthetic oligonucleotide
  Sense strand starting at position 2599 of SEQ ID NO: 1241312
acagccauaccuugaguca

SEQ ID NO: 1262789 - RNA, 19 nt, Artificial Sequence
  Description of Artificial Sequence: Synthetic oligonucleotide
  Antisense strand to SEQ ID NO: 1262788
ugacucaagguauggcugu

SEQ ID NO: 1262790 - RNA, 19 nt, Artificial Sequence
  Description of Artificial Sequence: Synthetic oligonucleotide
  Sense strand starting at position 2778 of SEQ ID NO: 1241312
augcuuaaugacugacuga

SEQ ID NO: 1262791 - RNA, 19 nt, Artificial Sequence
  Description of Artificial Sequence: Synthetic oligonucleotide
  Antisense strand to SEQ ID NO: 1262790
ucagucagucauuaagcau

SEQ ID NO: 1262792 - RNA, 19 nt, Artificial Sequence
  Description of Artificial Sequence: Synthetic oligonucleotide
  Sense strand starting at position 3155 of SEQ ID NO: 1241312
acccgagauggguauuguu

SEQ ID NO: 1262793 - RNA, 19 nt, Artificial Sequence
  Description of Artificial Sequence: Synthetic oligonucleotide
  Antisense strand to SEQ ID NO: 1262792
aacaauacccaucucgggu

SEQ ID NO: 1262794 - RNA, 19 nt, Artificial Sequence
  Description of Artificial Sequence: Synthetic oligonucleotide
  Sense strand starting at position 3357 of SEQ ID NO: 1241312
ccuguccuacuugaguaau

SEQ ID NO: 1262795 - RNA, 19 nt, Artificial Sequence
  Description of Artificial Sequence: Synthetic oligonucleotide
  Antisense strand to SEQ ID NO: 1262794
auuacucaaguaggacagg

SEQ ID NO: 1262796 - RNA, 19 nt, Artificial Sequence
  Description of Artificial Sequence: Synthetic oligonucleotide
  Sense strand starting at position 3359 of SEQ ID NO: 1241312
uguccuacuugaguaauag

SEQ ID NO: 1262797 - RNA, 19 nt, Artificial Sequence
  Description of Artificial Sequence: Synthetic oligonucleotide
  Antisense strand to SEQ ID NO: 1262796
cuauuacucaaguaggaca

SEQ ID NO: 1262798 - RNA, 19 nt, Artificial Sequence
  Description of Artificial Sequence: Synthetic oligonucleotide
  Sense strand starting at position 3360 of SEQ ID NO: 1241312
guccuacuugaguaauaga

SEQ ID NO: 1262799 - RNA, 19 nt, Artificial Sequence
  Description of Artificial Sequence: Synthetic oligonucleotide
  Antisense strand to SEQ ID NO: 1262798
ucuauuacucaaguaggac

SEQ ID NO: 1262800 - RNA, 19 nt, Artificial Sequence
  Description of Artificial Sequence: Synthetic oligonucleotide
  Sense strand starting at position 3390 of SEQ ID NO: 1241312
cggcaucuaucauuuaguu

SEQ ID NO: 1262801 - RNA, 19 nt, Artificial Sequence
  Description of Artificial Sequence: Synthetic oligonucleotide
  Antisense strand to SEQ ID NO: 1262800
aacuaaaugauagaugccg

SEQ ID NO: 1262802 - RNA, 19 nt, Artificial Sequence
  Description of Artificial Sequence: Synthetic oligonucleotide
  Sense strand starting at position 3506 of SEQ ID NO: 1241312
gcauuugcaucaucagcaa

SEQ ID NO: 1262803 - RNA, 19 nt, Artificial Sequence
  Description of Artificial Sequence: Synthetic oligonucleotide
  Antisense strand to SEQ ID NO: 1262802
uugcugaugaugcaaaugc

SEQ ID NO: 1262804 - RNA, 19 nt, Artificial Sequence
  Description of Artificial Sequence: Synthetic oligonucleotide
  Sense strand starting at position 3722 of SEQ ID NO: 1241312
ccuugaagcguguuuguca

SEQ ID NO: 1262805 - RNA, 19 nt, Artificial Sequence
  Description of Artificial Sequence: Synthetic oligonucleotide
  Antisense strand to SEQ ID NO: 1262804
ugacaaacacgcuucaagg

SEQ ID NO: 1262806 - RNA, 19 nt, Artificial Sequence
  Description of Artificial Sequence: Synthetic oligonucleotide
  Sense strand starting at position 3731 of SEQ ID NO: 1241312
guguuugucacccacagag

SEQ ID NO: 1262807 - RNA, 19 nt, Artificial Sequence
  Description of Artificial Sequence: Synthetic oligonucleotide
  Antisense strand to SEQ ID NO: 1262806
cucugugggugacaaacac

SEQ ID NO: 1262808 - RNA, 19 nt, Artificial Sequence
  Description of Artificial Sequence: Synthetic oligonucleotide
  Sense strand starting at position 3844 of SEQ ID NO: 1241312
aucugauaagcuuggugga

SEQ ID NO: 1262809 - RNA, 19 nt, Artificial Sequence
  Description of Artificial Sequence: Synthetic oligonucleotide
  Antisense strand to SEQ ID NO: 1262808
uccaccaagcuuaucagau

SEQ ID NO: 1262810 - RNA, 19 nt, Artificial Sequence
  Description of Artificial Sequence: Synthetic oligonucleotide
  Sense strand starting at position 3845 of SEQ ID NO: 1241312
ucugauaagcuugguggaa

SEQ ID NO: 1262811 - RNA, 19 nt, Artificial Sequence
  Description of Artificial Sequence: Synthetic oligonucleotide
  Antisense strand to SEQ ID NO: 1262810
uuccaccaagcuuaucaga

SEQ ID NO: 1262812 - RNA, 19 nt, Artificial Sequence
  Description of Artificial Sequence: Synthetic oligonucleotide
  Sense strand starting at position 3846 of SEQ ID NO: 1241312
cugauaagcuugguggaaa

SEQ ID NO: 1262813 - RNA, 19 nt, Artificial Sequence
  Description of Artificial Sequence: Synthetic oligonucleotide
  Antisense strand to SEQ ID NO: 1262812
uuuccaccaagcuuaucag

SEQ ID NO: 1262814 - RNA, 19 nt, Artificial Sequence
  Description of Artificial Sequence: Synthetic oligonucleotide
  Sense strand starting at position 1318 of SEQ ID NO: 1241313
gagggaugugggugcaagu

SEQ ID NO: 1262815 - RNA, 19 nt, Artificial Sequence
  Description of Artificial Sequence: Synthetic oligonucleotide
  Antisense strand to SEQ ID NO: 1262814
acuugcacccacaucccuc

SEQ ID NO: 1262816 - RNA, 19 nt, Artificial Sequence
  Description of Artificial Sequence: Synthetic oligonucleotide
  Sense strand starting at position 1547 of SEQ ID NO: 1241313
uugccagcgagguguuuau

SEQ ID NO: 1262817 - RNA, 19 nt, Artificial Sequence
  Description of Artificial Sequence: Synthetic oligonucleotide
  Antisense strand to SEQ ID NO: 1262816
auaaacaccucgcuggcaa

SEQ ID NO: 1262818 - RNA, 19 nt, Artificial Sequence
  Description of Artificial Sequence: Synthetic oligonucleotide
  Sense strand starting at position 1554 of SEQ ID NO: 1241313
cgagguguuuauucucuga

SEQ ID NO: 1262819 - RNA, 19 nt, Artificial Sequence
  Description of Artificial Sequence: Synthetic oligonucleotide
  Antisense strand to SEQ ID NO: 1262818
ucagagaauaaacaccucg

SEQ ID NO: 1262820 - RNA, 19 nt, Artificial Sequence
  Description of Artificial Sequence: Synthetic oligonucleotide
  Sense strand starting at position 1557 of SEQ ID NO: 1241313
gguguuuauucucugagcu

SEQ ID NO: 1262821 - RNA, 19 nt, Artificial Sequence
  Description of Artificial Sequence: Synthetic oligonucleotide
  Antisense strand to SEQ ID NO: 1262820
agcucagagaauaaacacc

SEQ ID NO: 1262822 - RNA, 19 nt, Artificial Sequence
  Description of Artificial Sequence: Synthetic oligonucleotide
  Sense strand starting at position 1558 of SEQ ID NO: 1241313
guguuuauucucugagcug

SEQ ID NO: 1262823 - RNA, 19 nt, Artificial Sequence
  Description of Artificial Sequence: Synthetic oligonucleotide
  Antisense strand to SEQ ID NO: 1262822
cagcucagagaauaaacac

SEQ ID NO: 1262824 - RNA, 19 nt, Artificial Sequence
  Description of Artificial Sequence: Synthetic oligonucleotide
  Sense strand starting at position 1559 of SEQ ID NO: 1241313
uguuuauucucugagcuga

SEQ ID NO: 1262825 - RNA, 19 nt, Artificial Sequence
  Description of Artificial Sequence: Synthetic oligonucleotide
  Antisense strand to SEQ ID NO: 1262824
ucagcucagagaauaaaca

SEQ ID NO: 1262826 - RNA, 19 nt, Artificial Sequence
  Description of Artificial Sequence: Synthetic oligonucleotide
  Sense strand starting at position 1577 of SEQ ID NO: 1241313
aggcaacuguuccucuuua

SEQ ID NO: 1262827 - RNA, 19 nt, Artificial Sequence
  Description of Artificial Sequence: Synthetic oligonucleotide
  Antisense strand to SEQ ID NO: 1262826
uaaagaggaacaguugccu

SEQ ID NO: 1262828 - RNA, 19 nt, Artificial Sequence
  Description of Artificial Sequence: Synthetic oligonucleotide
  Sense strand starting at position 1578 of SEQ ID NO: 1241313
ggcaacuguuccucuuuaa

SEQ ID NO: 1262829 - RNA, 19 nt, Artificial Sequence
  Description of Artificial Sequence: Synthetic oligonucleotide
  Antisense strand to SEQ ID NO: 1262828
uuaaagaggaacaguugcc

SEQ ID NO: 1262830 - RNA, 19 nt, Artificial Sequence
  Description of Artificial Sequence: Synthetic oligonucleotide
  Sense strand starting at position 2044 of SEQ ID NO: 1241313
acccuugagugggcugaau

SEQ ID NO: 1262831 - RNA, 19 nt, Artificial Sequence
  Description of Artificial Sequence: Synthetic oligonucleotide
  Antisense strand to SEQ ID NO: 1262830
auucagcccacucaagggu

SEQ ID NO: 1262832 - RNA, 19 nt, Artificial Sequence
  Description of Artificial Sequence: Synthetic oligonucleotide
  Sense strand starting at position 2162 of SEQ ID NO: 1241313
auucuuugccgucacaaau

SEQ ID NO: 1262833 - RNA, 19 nt, Artificial Sequence
  Description of Artificial Sequence: Synthetic oligonucleotide
  Antisense strand to SEQ ID NO: 1262832
auuugugacggcaaagaau

SEQ ID NO: 1262834 - RNA, 19 nt, Artificial Sequence
  Description of Artificial Sequence: Synthetic oligonucleotide
  Sense strand starting at position 2221 of SEQ ID NO: 1241313
ugcaaucauuucccgguaa

SEQ ID NO: 1262835 - RNA, 19 nt, Artificial Sequence
  Description of Artificial Sequence: Synthetic oligonucleotide
  Antisense strand to SEQ ID NO: 1262834
uuaccgggaaaugauugca

SEQ ID NO: 1262836 - RNA, 19 nt, Artificial Sequence
  Description of Artificial Sequence: Synthetic oligonucleotide
  Sense strand starting at position 2222 of SEQ ID NO: 1241313
gcaaucauuucccgguaaa

SEQ ID NO: 1262837 - RNA, 19 nt, Artificial Sequence
  Description of Artificial Sequence: Synthetic oligonucleotide
  Antisense strand to SEQ ID NO: 1262836
uuuaccgggaaaugauugc

SEQ ID NO: 1262838 - RNA, 19 nt, Artificial Sequence
  Description of Artificial Sequence: Synthetic oligonucleotide
  Sense strand starting at position 2233 of SEQ ID NO: 1241313
ccgguaaauuucuacccuu

SEQ ID NO: 1262839 - RNA, 19 nt, Artificial Sequence
  Description of Artificial Sequence: Synthetic oligonucleotide
  Antisense strand to SEQ ID NO: 1262838
aaggguagaaauuuaccgg

SEQ ID NO: 1262840 - RNA, 19 nt, Artificial Sequence
  Description of Artificial Sequence: Synthetic oligonucleotide
  Sense strand starting at position 2495 of SEQ ID NO: 1241313
cccgcuguccuugaguguu

SEQ ID NO: 1262841 - RNA, 19 nt, Artificial Sequence
  Description of Artificial Sequence: Synthetic oligonucleotide
  Antisense strand to SEQ ID NO: 1262840
aacacucaaggacagcggg

SEQ ID NO: 1262842 - RNA, 19 nt, Artificial Sequence
  Description of Artificial Sequence: Synthetic oligonucleotide
  Sense strand starting at position 2497 of SEQ ID NO: 1241313
cgcuguccuugaguguuga

SEQ ID NO: 1262843 - RNA, 19 nt, Artificial Sequence
  Description of Artificial Sequence: Synthetic oligonucleotide
  Antisense strand to SEQ ID NO: 1262842
ucaacacucaaggacagcg

SEQ ID NO: 1262844 - RNA, 19 nt, Artificial Sequence
  Description of Artificial Sequence: Synthetic oligonucleotide
  Sense strand starting at position 2691 of SEQ ID NO: 1241313
uaacgaggugcugggauau

SEQ ID NO: 1262845 - RNA, 19 nt, Artificial Sequence
  Description of Artificial Sequence: Synthetic oligonucleotide
  Antisense strand to SEQ ID NO: 1262844
auaucccagcaccucguua

SEQ ID NO: 1262846 - RNA, 19 nt, Artificial Sequence
  Description of Artificial Sequence: Synthetic oligonucleotide
  Sense strand starting at position 2725 of SEQ ID NO: 1241313
uggagcucucaggaaucuu

SEQ ID NO: 1262847 - RNA, 19 nt, Artificial Sequence
  Description of Artificial Sequence: Synthetic oligonucleotide
  Antisense strand to SEQ ID NO: 1262846
aagauuccugagagcucca

SEQ ID NO: 1262848 - RNA, 19 nt, Artificial Sequence
  Description of Artificial Sequence: Synthetic oligonucleotide
  Sense strand starting at position 2733 of SEQ ID NO: 1241313
ucaggaaucuugucuuuau

SEQ ID NO: 1262849 - RNA, 19 nt, Artificial Sequence
  Description of Artificial Sequence: Synthetic oligonucleotide
  Antisense strand to SEQ ID NO: 1262848
auaaagacaagauuccuga

SEQ ID NO: 1262850 - RNA, 19 nt, Artificial Sequence
  Description of Artificial Sequence: Synthetic oligonucleotide
  Sense strand starting at position 2734 of SEQ ID NO: 1241313
caggaaucuugucuuuaug

SEQ ID NO: 1262851 - RNA, 19 nt, Artificial Sequence
  Description of Artificial Sequence: Synthetic oligonucleotide
  Antisense strand to SEQ ID NO: 1262850
cauaaagacaagauuccug

SEQ ID NO: 1262852 - RNA, 19 nt, Artificial Sequence
  Description of Artificial Sequence: Synthetic oligonucleotide
  Sense strand starting at position 2736 of SEQ ID NO: 1241313
ggaaucuugucuuuauguu

SEQ ID NO: 1262853 - RNA, 19 nt, Artificial Sequence
  Description of Artificial Sequence: Synthetic oligonucleotide
  Antisense strand to SEQ ID NO: 1262852
aacauaaagacaagauucc

SEQ ID NO: 1262854 - RNA, 19 nt, Artificial Sequence
  Description of Artificial Sequence: Synthetic oligonucleotide
  Sense strand starting at position 2862 of SEQ ID NO: 1241313
cuuaaaucgagucgucaug

SEQ ID NO: 1262855 - RNA, 19 nt, Artificial Sequence
  Description of Artificial Sequence: Synthetic oligonucleotide
  Antisense strand to SEQ ID NO: 1262854
caugacgacucgauuuaag

SEQ ID NO: 1262856 - RNA, 19 nt, Artificial Sequence
  Description of Artificial Sequence: Synthetic oligonucleotide
  Sense strand starting at position 2864 of SEQ ID NO: 1241313
uaaaucgagucgucaugau

SEQ ID NO: 1262857 - RNA, 19 nt, Artificial Sequence
  Description of Artificial Sequence: Synthetic oligonucleotide
  Antisense strand to SEQ ID NO: 1262856
aucaugacgacucgauuua

SEQ ID NO: 1262858 - RNA, 19 nt, Artificial Sequence
  Description of Artificial Sequence: Synthetic oligonucleotide
  Sense strand starting at position 2871 of SEQ ID NO: 1241313
agucgucaugauggagaaa

SEQ ID NO: 1262859 - RNA, 19 nt, Artificial Sequence
  Description of Artificial Sequence: Synthetic oligonucleotide
  Antisense strand to SEQ ID NO: 1262858
uuucuccaucaugacgacu

SEQ ID NO: 1262860 - RNA, 19 nt, Artificial Sequence
  Description of Artificial Sequence: Synthetic oligonucleotide
  Sense strand starting at position 2935 of SEQ ID NO: 1241313
gugucauauuagccaguuu

SEQ ID NO: 1262861 - RNA, 19 nt, Artificial Sequence
  Description of Artificial Sequence: Synthetic oligonucleotide
  Antisense strand to SEQ ID NO: 1262860
aaacuggcuaauaugacac

SEQ ID NO: 1262862 - RNA, 19 nt, Artificial Sequence
  Description of Artificial Sequence: Synthetic oligonucleotide
  Sense strand starting at position 2982 of SEQ ID NO: 1241313
gggacaaguuugcacacuu

SEQ ID NO: 1262863 - RNA, 19 nt, Artificial Sequence
  Description of Artificial Sequence: Synthetic oligonucleotide
  Antisense strand to SEQ ID NO: 1262862
aagugugcaaacuuguccc

SEQ ID NO: 1262864 - RNA, 19 nt, Artificial Sequence
  Description of Artificial Sequence: Synthetic oligonucleotide
  Sense strand starting at position 3139 of SEQ ID NO: 1241313
gggaaaugcuaauggucgu

SEQ ID NO: 1262865 - RNA, 19 nt, Artificial Sequence
  Description of Artificial Sequence: Synthetic oligonucleotide
  Antisense strand to SEQ ID NO: 1262864
acgaccauuagcauuuccc

SEQ ID NO: 1262866 - RNA, 19 nt, Artificial Sequence
  Description of Artificial Sequence: Synthetic oligonucleotide
  Sense strand starting at position 3432 of SEQ ID NO: 1241313
ggccuccauccagaaguga

SEQ ID NO: 1262867 - RNA, 19 nt, Artificial Sequence
  Description of Artificial Sequence: Synthetic oligonucleotide
  Antisense strand to SEQ ID NO: 1262866
ucacuucuggauggaggcc

SEQ ID NO: 1262868 - RNA, 19 nt, Artificial Sequence
  Description of Artificial Sequence: Synthetic oligonucleotide
  Sense strand starting at position 3575 of SEQ ID NO: 1241313
cugacaagcugugacucaa

SEQ ID NO: 1262869 - RNA, 19 nt, Artificial Sequence
  Description of Artificial Sequence: Synthetic oligonucleotide
  Antisense strand to SEQ ID NO: 1262868
uugagucacagcuugucag

SEQ ID NO: 1262870 - RNA, 19 nt, Artificial Sequence
  Description of Artificial Sequence: Synthetic oligonucleotide
  Sense strand starting at position 3686 of SEQ ID NO: 1241313
ugacgcauccuagauuguu

SEQ ID NO: 1262871 - RNA, 19 nt, Artificial Sequence
  Description of Artificial Sequence: Synthetic oligonucleotide
  Antisense strand to SEQ ID NO: 1262870
aacaaucuaggaugcguca

SEQ ID NO: 1262872 - RNA, 19 nt, Artificial Sequence
  Description of Artificial Sequence: Synthetic oligonucleotide
  Sense strand starting at position 3694 of SEQ ID NO: 1241313
ccuagauuguuggccacua

SEQ ID NO: 1262873 - RNA, 19 nt, Artificial Sequence
  Description of Artificial Sequence: Synthetic oligonucleotide
  Antisense strand to SEQ ID NO: 1262872
uaguggccaacaaucuagg

SEQ ID NO: 1262874 - RNA, 19 nt, Artificial Sequence
  Description of Artificial Sequence: Synthetic oligonucleotide
  Sense strand starting at position 3742 of SEQ ID NO: 1241313
gcaaccuuugcauggguga

SEQ ID NO: 1262875 - RNA, 19 nt, Artificial Sequence
  Description of Artificial Sequence: Synthetic oligonucleotide
  Antisense strand to SEQ ID NO: 1262874
ucacccaugcaaagguugc

SEQ ID NO: 1262876 - RNA, 19 nt, Artificial Sequence
  Description of Artificial Sequence: Synthetic oligonucleotide
  Sense strand starting at position 3793 of SEQ ID NO: 1241313
auuugagggcuauguguuu

SEQ ID NO: 1262877 - RNA, 19 nt, Artificial Sequence
  Description of Artificial Sequence: Synthetic oligonucleotide
  Antisense strand to SEQ ID NO: 1262876
aaacacauagcccucaaau

SEQ ID NO: 1262878 - RNA, 19 nt, Artificial Sequence
  Description of Artificial Sequence: Synthetic oligonucleotide
  Sense strand starting at position 3798 of SEQ ID NO: 1241313
agggcuauguguuucugca

SEQ ID NO: 1262879 - RNA, 19 nt, Artificial Sequence
  Description of Artificial Sequence: Synthetic oligonucleotide
  Antisense strand to SEQ ID NO: 1262878
ugcagaaacacauagcccu

SEQ ID NO: 1262880 - RNA, 19 nt, Artificial Sequence
  Description of Artificial Sequence: Synthetic oligonucleotide
  Sense strand starting at position 1276 of SEQ ID NO: 1241314
gagggaugugggugcaagu

SEQ ID NO: 1262881 - RNA, 19 nt, Artificial Sequence
  Description of Artificial Sequence: Synthetic oligonucleotide
  Antisense strand to SEQ ID NO: 1262880
acuugcacccacaucccuc

SEQ ID NO: 1262882 - RNA, 19 nt, Artificial Sequence
  Description of Artificial Sequence: Synthetic oligonucleotide
  Sense strand starting at position 1505 of SEQ ID NO: 1241314
uugccagcgagguguuuau

SEQ ID NO: 1262883 - RNA, 19 nt, Artificial Sequence
  Description of Artificial Sequence: Synthetic oligonucleotide
  Antisense strand to SEQ ID NO: 1262882
auaaacaccucgcuggcaa

SEQ ID NO: 1262884 - RNA, 19 nt, Artificial Sequence
  Description of Artificial Sequence: Synthetic oligonucleotide
  Sense strand starting at position 1512 of SEQ ID NO: 1241314
cgagguguuuauucucuga

SEQ ID NO: 1262885 - RNA, 19 nt, Artificial Sequence
  Description of Artificial Sequence: Synthetic oligonucleotide
  Antisense strand to SEQ ID NO: 1262884
ucagagaauaaacaccucg

SEQ ID NO: 1262886 - RNA, 19 nt, Artificial Sequence
  Description of Artificial Sequence: Synthetic oligonucleotide
  Sense strand starting at position 1515 of SEQ ID NO: 1241314
gguguuuauucucugagcu

SEQ ID NO: 1262887 - RNA, 19 nt, Artificial Sequence
  Description of Artificial Sequence: Synthetic oligonucleotide
  Antisense strand to SEQ ID NO: 1262886
agcucagagaauaaacacc

SEQ ID NO: 1262888 - RNA, 19 nt, Artificial Sequence
  Description of Artificial Sequence: Synthetic oligonucleotide
  Sense strand starting at position 1516 of SEQ ID NO: 1241314
guguuuauucucugagcug

SEQ ID NO: 1262889 - RNA, 19 nt, Artificial Sequence
  Description of Artificial Sequence: Synthetic oligonucleotide
  Antisense strand to SEQ ID NO: 1262888
cagcucagagaauaaacac

SEQ ID NO: 1262890 - RNA, 19 nt, Artificial Sequence
  Description of Artificial Sequence: Synthetic oligonucleotide
  Sense strand starting at position 1517 of SEQ ID NO: 1241314
uguuuauucucugagcuga

SEQ ID NO: 1262891 - RNA, 19 nt, Artificial Sequence
  Description of Artificial Sequence: Synthetic oligonucleotide
  Antisense strand to SEQ ID NO: 1262890
ucagcucagagaauaaaca

SEQ ID NO: 1262892 - RNA, 19 nt, Artificial Sequence
  Description of Artificial Sequence: Synthetic oligonucleotide
  Sense strand starting at position 1535 of SEQ ID NO: 1241314
aggcaacuguuccucuuua

SEQ ID NO: 1262893 - RNA, 19 nt, Artificial Sequence
  Description of Artificial Sequence: Synthetic oligonucleotide
  Antisense strand to SEQ ID NO: 1262892
uaaagaggaacaguugccu

SEQ ID NO: 1262894 - RNA, 19 nt, Artificial Sequence
  Description of Artificial Sequence: Synthetic oligonucleotide
  Sense strand starting at position 1536 of SEQ ID NO: 1241314
ggcaacuguuccucuuuaa

SEQ ID NO: 1262895 - RNA, 19 nt, Artificial Sequence
  Description of Artificial Sequence: Synthetic oligonucleotide
  Antisense strand to SEQ ID NO: 1262894
uuaaagaggaacaguugcc

SEQ ID NO: 1262896 - RNA, 19 nt, Artificial Sequence
  Description of Artificial Sequence: Synthetic oligonucleotide
  Sense strand starting at position 2002 of SEQ ID NO: 1241314
acccuugagugggcugaau

SEQ ID NO: 1262897 - RNA, 19 nt, Artificial Sequence
  Description of Artificial Sequence: Synthetic oligonucleotide
  Antisense strand to SEQ ID NO: 1262896
auucagcccacucaagggu

SEQ ID NO: 1262898 - RNA, 19 nt, Artificial Sequence
  Description of Artificial Sequence: Synthetic oligonucleotide
  Sense strand starting at position 2120 of SEQ ID NO: 1241314
auucuuugccgucacaaau

SEQ ID NO: 1262899 - RNA, 19 nt, Artificial Sequence
  Description of Artificial Sequence: Synthetic oligonucleotide
  Antisense strand to SEQ ID NO: 1262898
auuugugacggcaaagaau

SEQ ID NO: 1262900 - RNA, 19 nt, Artificial Sequence
  Description of Artificial Sequence: Synthetic oligonucleotide
  Sense strand starting at position 2179 of SEQ ID NO: 1241314
ugcaaucauuucccgguaa

SEQ ID NO: 1262901 - RNA, 19 nt, Artificial Sequence
  Description of Artificial Sequence: Synthetic oligonucleotide
  Antisense strand to SEQ ID NO: 1262900
uuaccgggaaaugauugca

SEQ ID NO: 1262902 - RNA, 19 nt, Artificial Sequence
  Description of Artificial Sequence: Synthetic oligonucleotide
  Sense strand starting at position 2180 of SEQ ID NO: 1241314
gcaaucauuucccgguaaa

SEQ ID NO: 1262903 - RNA, 19 nt, Artificial Sequence
  Description of Artificial Sequence: Synthetic oligonucleotide
  Antisense strand to SEQ ID NO: 1262902
uuuaccgggaaaugauugc

SEQ ID NO: 1262904 - RNA, 19 nt, Artificial Sequence
  Description of Artificial Sequence: Synthetic oligonucleotide
  Sense strand starting at position 2191 of SEQ ID NO: 1241314
ccgguaaauuucuacccuu

SEQ ID NO: 1262905 - RNA, 19 nt, Artificial Sequence
  Description of Artificial Sequence: Synthetic oligonucleotide
  Antisense strand to SEQ ID NO: 1262904
aaggguagaaauuuaccgg

SEQ ID NO: 1262906 - RNA, 19 nt, Artificial Sequence
  Description of Artificial Sequence: Synthetic oligonucleotide
  Sense strand starting at position 2453 of SEQ ID NO: 1241314
cccgcuguccuugaguguu

SEQ ID NO: 1262907 - RNA, 19 nt, Artificial Sequence
  Description of Artificial Sequence: Synthetic oligonucleotide
  Antisense strand to SEQ ID NO: 1262906
aacacucaaggacagcggg

SEQ ID NO: 1262908 - RNA, 19 nt, Artificial Sequence
  Description of Artificial Sequence: Synthetic oligonucleotide
  Sense strand starting at position 2455 of SEQ ID NO: 1241314
cgcuguccuugaguguuga

SEQ ID NO: 1262909 - RNA, 19 nt, Artificial Sequence
  Description of Artificial Sequence: Synthetic oligonucleotide
  Antisense strand to SEQ ID NO: 1262908
ucaacacucaaggacagcg

SEQ ID NO: 1262910 - RNA, 19 nt, Artificial Sequence
  Description of Artificial Sequence: Synthetic oligonucleotide
  Sense strand starting at position 2649 of SEQ ID NO: 1241314
uaacgaggugcugggauau

SEQ ID NO: 1262911 - RNA, 19 nt, Artificial Sequence
  Description of Artificial Sequence: Synthetic oligonucleotide
  Antisense strand to SEQ ID NO: 1262910
auaucccagcaccucguua

SEQ ID NO: 1262912 - RNA, 19 nt, Artificial Sequence
  Description of Artificial Sequence: Synthetic oligonucleotide
  Sense strand starting at position 2683 of SEQ ID NO: 1241314
uggagcucucaggaaucuu

SEQ ID NO: 1262913 - RNA, 19 nt, Artificial Sequence
  Description of Artificial Sequence: Synthetic oligonucleotide
  Antisense strand to SEQ ID NO: 1262912
aagauuccugagagcucca

SEQ ID NO: 1262914 - RNA, 19 nt, Artificial Sequence
  Description of Artificial Sequence: Synthetic oligonucleotide
  Sense strand starting at position 2691 of SEQ ID NO: 1241314
ucaggaaucuugucuuuau

SEQ ID NO: 1262915 - RNA, 19 nt, Artificial Sequence
  Description of Artificial Sequence: Synthetic oligonucleotide
  Antisense strand to SEQ ID NO: 1262914
auaaagacaagauuccuga

SEQ ID NO: 1262916 - RNA, 19 nt, Artificial Sequence
  Description of Artificial Sequence: Synthetic oligonucleotide
  Sense strand starting at position 2692 of SEQ ID NO: 1241314
caggaaucuugucuuuaug

SEQ ID NO: 1262917 - RNA, 19 nt, Artificial Sequence
  Description of Artificial Sequence: Synthetic oligonucleotide
  Antisense strand to SEQ ID NO: 1262916
cauaaagacaagauuccug

SEQ ID NO: 1262918 - RNA, 19 nt, Artificial Sequence
  Description of Artificial Sequence: Synthetic oligonucleotide
  Sense strand starting at position 2694 of SEQ ID NO: 1241314
ggaaucuugucuuuauguu

SEQ ID NO: 1262919 - RNA, 19 nt, Artificial Sequence
  Description of Artificial Sequence: Synthetic oligonucleotide
  Antisense strand to SEQ ID NO: 1262918
aacauaaagacaagauucc

SEQ ID NO: 1262920 - RNA, 19 nt, Artificial Sequence
  Description of Artificial Sequence: Synthetic oligonucleotide
  Sense strand starting at position 2820 of SEQ ID NO: 1241314
cuuaaaucgagucgucaug

SEQ ID NO: 1262921 - RNA, 19 nt, Artificial Sequence
  Description of Artificial Sequence: Synthetic oligonucleotide
  Antisense strand to SEQ ID NO: 1262920
caugacgacucgauuuaag

SEQ ID NO: 1262922 - RNA, 19 nt, Artificial Sequence
  Description of Artificial Sequence: Synthetic oligonucleotide
  Sense strand starting at position 2822 of SEQ ID NO: 1241314
uaaaucgagucgucaugau

SEQ ID NO: 1262923 - RNA, 19 nt, Artificial Sequence
  Description of Artificial Sequence: Synthetic oligonucleotide
  Antisense strand to SEQ ID NO: 1262922
aucaugacgacucgauuua

SEQ ID NO: 1262924 - RNA, 19 nt, Artificial Sequence
  Description of Artificial Sequence: Synthetic oligonucleotide
  Sense strand starting at position 2829 of SEQ ID NO: 1241314
agucgucaugauggagaaa

SEQ ID NO: 1262925 - RNA, 19 nt, Artificial Sequence
  Description of Artificial Sequence: Synthetic oligonucleotide
  Antisense strand to SEQ ID NO: 1262924
uuucuccaucaugacgacu

SEQ ID NO: 1262926 - RNA, 19 nt, Artificial Sequence
  Description of Artificial Sequence: Synthetic oligonucleotide
  Sense strand starting at position 2893 of SEQ ID NO: 1241314
gugucauauuagccaguuu

SEQ ID NO: 1262927 - RNA, 19 nt, Artificial Sequence
  Description of Artificial Sequence: Synthetic oligonucleotide
  Antisense strand to SEQ ID NO: 1262926
aaacuggcuaauaugacac

SEQ ID NO: 1262928 - RNA, 19 nt, Artificial Sequence
  Description of Artificial Sequence: Synthetic oligonucleotide
  Sense strand starting at position 2940 of SEQ ID NO: 1241314
gggacaaguuugcacacuu

SEQ ID NO: 1262929 - RNA, 19 nt, Artificial Sequence
  Description of Artificial Sequence: Synthetic oligonucleotide
  Antisense strand to SEQ ID NO: 1262928
aagugugcaaacuuguccc

SEQ ID NO: 1262930 - RNA, 19 nt, Artificial Sequence
  Description of Artificial Sequence: Synthetic oligonucleotide
  Sense strand starting at position 3097 of SEQ ID NO: 1241314
gggaaaugcuaauggucgu

SEQ ID NO: 1262931 - RNA, 19 nt, Artificial Sequence
  Description of Artificial Sequence: Synthetic oligonucleotide
  Antisense strand to SEQ ID NO: 1262930
acgaccauuagcauuuccc

SEQ ID NO: 1262932 - RNA, 19 nt, Artificial Sequence
  Description of Artificial Sequence: Synthetic oligonucleotide
  Sense strand starting at position 3390 of SEQ ID NO: 1241314
ggccuccauccagaaguga

SEQ ID NO: 1262933 - RNA, 19 nt, Artificial Sequence
  Description of Artificial Sequence: Synthetic oligonucleotide
  Antisense strand to SEQ ID NO: 1262932
ucacuucuggauggaggcc

SEQ ID NO: 1262934 - RNA, 19 nt, Artificial Sequence
  Description of Artificial Sequence: Synthetic oligonucleotide
  Sense strand starting at position 3533 of SEQ ID NO: 1241314
cugacaagcugugacucaa

SEQ ID NO: 1262935 - RNA, 19 nt, Artificial Sequence
  Description of Artificial Sequence: Synthetic oligonucleotide
  Antisense strand to SEQ ID NO: 1262934
uugagucacagcuugucag

SEQ ID NO: 1262936 - RNA, 19 nt, Artificial Sequence
  Description of Artificial Sequence: Synthetic oligonucleotide
  Sense strand starting at position 3644 of SEQ ID NO: 1241314
ugacgcauccuagauuguu

SEQ ID NO: 1262937 - RNA, 19 nt, Artificial Sequence
  Description of Artificial Sequence: Synthetic oligonucleotide
  Antisense strand to SEQ ID NO: 1262936
aacaaucuaggaugcguca

SEQ ID NO: 1262938 - RNA, 19 nt, Artificial Sequence
  Description of Artificial Sequence: Synthetic oligonucleotide
  Sense strand starting at position 3652 of SEQ ID NO: 1241314
ccuagauuguuggccacua

SEQ ID NO: 1262939 - RNA, 19 nt, Artificial Sequence
  Description of Artificial Sequence: Synthetic oligonucleotide
  Antisense strand to SEQ ID NO: 1262938
uaguggccaacaaucuagg

SEQ ID NO: 1262940 - RNA, 19 nt, Artificial Sequence
  Description of Artificial Sequence: Synthetic oligonucleotide
  Sense strand starting at position 3700 of SEQ ID NO: 1241314
gcaaccuuugcauggguga

SEQ ID NO: 1262941 - RNA, 19 nt, Artificial Sequence
  Description of Artificial Sequence: Synthetic oligonucleotide
  Antisense strand to SEQ ID NO: 1262940
ucacccaugcaaagguugc

SEQ ID NO: 1262942 - RNA, 19 nt, Artificial Sequence
  Description of Artificial Sequence: Synthetic oligonucleotide
  Sense strand starting at position 3751 of SEQ ID NO: 1241314
auuugagggcuauguguuu

SEQ ID NO: 1262943 - RNA, 19 nt, Artificial Sequence
  Description of Artificial Sequence: Synthetic oligonucleotide
  Antisense strand to SEQ ID NO: 1262942
aaacacauagcccucaaau

SEQ ID NO: 1262944 - RNA, 19 nt, Artificial Sequence
  Description of Artificial Sequence: Synthetic oligonucleotide
  Sense strand starting at position 3756 of SEQ ID NO: 1241314
agggcuauguguuucugca

SEQ ID NO: 1262945 - RNA, 19 nt, Artificial Sequence
  Description of Artificial Sequence: Synthetic oligonucleotide
  Antisense strand to SEQ ID NO: 1262944
ugcagaaacacauagcccu

SEQ ID NO: 1262946 - RNA, 19 nt, Artificial Sequence
  Description of Artificial Sequence: Synthetic oligonucleotide
  Sense strand starting at position 3950 of SEQ ID NO: 1241314
gcuggcaucugacuacgua

SEQ ID NO: 1262947 - RNA, 19 nt, Artificial Sequence
  Description of Artificial Sequence: Synthetic oligonucleotide
  Antisense strand to SEQ ID NO: 1262946
uacguagucagaugccagc

SEQ ID NO: 1262948 - RNA, 19 nt, Artificial Sequence
  Description of Artificial Sequence: Synthetic oligonucleotide
  Sense strand starting at position 3951 of SEQ ID NO: 1241314
cuggcaucugacuacguaa

SEQ ID NO: 1262949 - RNA, 19 nt, Artificial Sequence
  Description of Artificial Sequence: Synthetic oligonucleotide
  Antisense strand to SEQ ID NO: 1262948
uuacguagucagaugccag

SEQ ID NO: 1262950 - RNA, 19 nt, Artificial Sequence
  Description of Artificial Sequence: Synthetic oligonucleotide
  Sense strand starting at position 1275 of SEQ ID NO: 1241315
gagggaugugggugcaagu

SEQ ID NO: 1262951 - RNA, 19 nt, Artificial Sequence
  Description of Artificial Sequence: Synthetic oligonucleotide
  Antisense strand to SEQ ID NO: 1262950
acuugcacccacaucccuc

SEQ ID NO: 1262952 - RNA, 19 nt, Artificial Sequence
  Description of Artificial Sequence: Synthetic oligonucleotide
  Sense strand starting at position 1504 of SEQ ID NO: 1241315
uugccagcgagguguuuau

SEQ ID NO: 1262953 - RNA, 19 nt, Artificial Sequence
  Description of Artificial Sequence: Synthetic oligonucleotide
  Antisense strand to SEQ ID NO: 1262952
auaaacaccucgcuggcaa

SEQ ID NO: 1262954 - RNA, 19 nt, Artificial Sequence
  Description of Artificial Sequence: Synthetic oligonucleotide
  Sense strand starting at position 1511 of SEQ ID NO: 1241315
cgagguguuuauucucuga

SEQ ID NO: 1262955 - RNA, 19 nt, Artificial Sequence
  Description of Artificial Sequence: Synthetic oligonucleotide
  Antisense strand to SEQ ID NO: 1262954
ucagagaauaaacaccucg

SEQ ID NO: 1262956 - RNA, 19 nt, Artificial Sequence
  Description of Artificial Sequence: Synthetic oligonucleotide
  Sense strand starting at position 1514 of SEQ ID NO: 1241315
gguguuuauucucugagcu

SEQ ID NO: 1262957 - RNA, 19 nt, Artificial Sequence
  Description of Artificial Sequence: Synthetic oligonucleotide
  Antisense strand to SEQ ID NO: 1262956
agcucagagaauaaacacc

SEQ ID NO: 1262958 - RNA, 19 nt, Artificial Sequence
  Description of Artificial Sequence: Synthetic oligonucleotide
  Sense strand starting at position 1515 of SEQ ID NO: 1241315
guguuuauucucugagcug

SEQ ID NO: 1262959 - RNA, 19 nt, Artificial Sequence
  Description of Artificial Sequence: Synthetic oligonucleotide
  Antisense strand to SEQ ID NO: 1262958
cagcucagagaauaaacac

SEQ ID NO: 1262960 - RNA, 19 nt, Artificial Sequence
  Description of Artificial Sequence: Synthetic oligonucleotide
  Sense strand starting at position 1516 of SEQ ID NO: 1241315
uguuuauucucugagcuga

SEQ ID NO: 1262961 - RNA, 19 nt, Artificial Sequence
  Description of Artificial Sequence: Synthetic oligonucleotide
  Antisense strand to SEQ ID NO: 1262960
ucagcucagagaauaaaca

SEQ ID NO: 1262962 - RNA, 19 nt, Artificial Sequence
  Description of Artificial Sequence: Synthetic oligonucleotide
  Sense strand starting at position 1534 of SEQ ID NO: 1241315
aggcaacuguuccucuuua

SEQ ID NO: 1262963 - RNA, 19 nt, Artificial Sequence
  Description of Artificial Sequence: Synthetic oligonucleotide
  Antisense strand to SEQ ID NO: 1262962
uaaagaggaacaguugccu

SEQ ID NO: 1262964 - RNA, 19 nt, Artificial Sequence
  Description of Artificial Sequence: Synthetic oligonucleotide
  Sense strand starting at position 1535 of SEQ ID NO: 1241315
ggcaacuguuccucuuuaa

SEQ ID NO: 1262965 - RNA, 19 nt, Artificial Sequence
  Description of Artificial Sequence: Synthetic oligonucleotide
  Antisense strand to SEQ ID NO: 1262964
uuaaagaggaacaguugcc

SEQ ID NO: 1262966 - RNA, 19 nt, Artificial Sequence
  Description of Artificial Sequence: Synthetic oligonucleotide
  Sense strand starting at position 2001 of SEQ ID NO: 1241315
acccuugagugggcugaau

SEQ ID NO: 1262967 - RNA, 19 nt, Artificial Sequence
  Description of Artificial Sequence: Synthetic oligonucleotide
  Antisense strand to SEQ ID NO: 1262966
auucagcccacucaagggu

SEQ ID NO: 1262968 - RNA, 19 nt, Artificial Sequence
  Description of Artificial Sequence: Synthetic oligonucleotide
  Sense strand starting at position 2119 of SEQ ID NO: 1241315
auucuuugccgucacaaau

SEQ ID NO: 1262969 - RNA, 19 nt, Artificial Sequence
  Description of Artificial Sequence: Synthetic oligonucleotide
  Antisense strand to SEQ ID NO: 1262968
auuugugacggcaaagaau

SEQ ID NO: 1262970 - RNA, 19 nt, Artificial Sequence
  Description of Artificial Sequence: Synthetic oligonucleotide
  Sense strand starting at position 2178 of SEQ ID NO: 1241315
ugcaaucauuucccgguaa

SEQ ID NO: 1262971 - RNA, 19 nt, Artificial Sequence
  Description of Artificial Sequence: Synthetic oligonucleotide
  Antisense strand to SEQ ID NO: 1262970
uuaccgggaaaugauugca

SEQ ID NO: 1262972 - RNA, 19 nt, Artificial Sequence
  Description of Artificial Sequence: Synthetic oligonucleotide
  Sense strand starting at position 2179 of SEQ ID NO: 1241315
gcaaucauuucccgguaaa

SEQ ID NO: 1262973 - RNA, 19 nt, Artificial Sequence
  Description of Artificial Sequence: Synthetic oligonucleotide
  Antisense strand to SEQ ID NO: 1262972
uuuaccgggaaaugauugc

SEQ ID NO: 1262974 - RNA, 19 nt, Artificial Sequence
  Description of Artificial Sequence: Synthetic oligonucleotide
  Sense strand starting at position 2190 of SEQ ID NO: 1241315
ccgguaaauuucuacccuu

SEQ ID NO: 1262975 - RNA, 19 nt, Artificial Sequence
  Description of Artificial Sequence: Synthetic oligonucleotide
  Antisense strand to SEQ ID NO: 1262974
aaggguagaaauuuaccgg

SEQ ID NO: 1262976 - RNA, 19 nt, Artificial Sequence
  Description of Artificial Sequence: Synthetic oligonucleotide
  Sense strand starting at position 2452 of SEQ ID NO: 1241315
cccgcuguccuugaguguu

SEQ ID NO: 1262977 - RNA, 19 nt, Artificial Sequence
  Description of Artificial Sequence: Synthetic oligonucleotide
  Antisense strand to SEQ ID NO: 1262976
aacacucaaggacagcggg

SEQ ID NO: 1262978 - RNA, 19 nt, Artificial Sequence
  Description of Artificial Sequence: Synthetic oligonucleotide
  Sense strand starting at position 2454 of SEQ ID NO: 1241315
cgcuguccuugaguguuga

SEQ ID NO: 1262979 - RNA, 19 nt, Artificial Sequence
  Description of Artificial Sequence: Synthetic oligonucleotide
  Antisense strand to SEQ ID NO: 1262978
ucaacacucaaggacagcg

SEQ ID NO: 1262980 - RNA, 19 nt, Artificial Sequence
  Description of Artificial Sequence: Synthetic oligonucleotide
  Sense strand starting at position 2648 of SEQ ID NO: 1241315
uaacgaggugcugggauau

SEQ ID NO: 1262981 - RNA, 19 nt, Artificial Sequence
  Description of Artificial Sequence: Synthetic oligonucleotide
  Antisense strand to SEQ ID NO: 1262980
auaucccagcaccucguua

SEQ ID NO: 1262982 - RNA, 19 nt, Artificial Sequence
  Description of Artificial Sequence: Synthetic oligonucleotide
  Sense strand starting at position 2682 of SEQ ID NO: 1241315
uggagcucucaggaaucuu

SEQ ID NO: 1262983 - RNA, 19 nt, Artificial Sequence
  Description of Artificial Sequence: Synthetic oligonucleotide
  Antisense strand to SEQ ID NO: 1262982
aagauuccugagagcucca

SEQ ID NO: 1262984 - RNA, 19 nt, Artificial Sequence
  Description of Artificial Sequence: Synthetic oligonucleotide
  Sense strand starting at position 2690 of SEQ ID NO: 1241315
ucaggaaucuugucuuuau

SEQ ID NO: 1262985 - RNA, 19 nt, Artificial Sequence
  Description of Artificial Sequence: Synthetic oligonucleotide
  Antisense strand to SEQ ID NO: 1262984
auaaagacaagauuccuga

SEQ ID NO: 1262986 - RNA, 19 nt, Artificial Sequence
  Description of Artificial Sequence: Synthetic oligonucleotide
  Sense strand starting at position 2691 of SEQ ID NO: 1241315
caggaaucuugucuuuaug

SEQ ID NO: 1262987 - RNA, 19 nt, Artificial Sequence
  Description of Artificial Sequence: Synthetic oligonucleotide
  Antisense strand to SEQ ID NO: 1262986
cauaaagacaagauuccug

SEQ ID NO: 1262988 - RNA, 19 nt, Artificial Sequence
  Description of Artificial Sequence: Synthetic oligonucleotide
  Sense strand starting at position 2693 of SEQ ID NO: 1241315
ggaaucuugucuuuauguu

SEQ ID NO: 1262989 - RNA, 19 nt, Artificial Sequence
  Description of Artificial Sequence: Synthetic oligonucleotide
  Antisense strand to SEQ ID NO: 1262988
aacauaaagacaagauucc

SEQ ID NO: 1262990 - RNA, 19 nt, Artificial Sequence
  Description of Artificial Sequence: Synthetic oligonucleotide
  Sense strand starting at position 2819 of SEQ ID NO: 1241315
cuuaaaucgagucgucaug

SEQ ID NO: 1262991 - RNA, 19 nt, Artificial Sequence
  Description of Artificial Sequence: Synthetic oligonucleotide
  Antisense strand to SEQ ID NO: 1262990
caugacgacucgauuuaag

SEQ ID NO: 1262992 - RNA, 19 nt, Artificial Sequence
  Description of Artificial Sequence: Synthetic oligonucleotide
  Sense strand starting at position 2821 of SEQ ID NO: 1241315
uaaaucgagucgucaugau

SEQ ID NO: 1262993 - RNA, 19 nt, Artificial Sequence
  Description of Artificial Sequence: Synthetic oligonucleotide
  Antisense strand to SEQ ID NO: 1262992
aucaugacgacucgauuua

SEQ ID NO: 1262994 - RNA, 19 nt, Artificial Sequence
  Description of Artificial Sequence: Synthetic oligonucleotide
  Sense strand starting at position 2828 of SEQ ID NO: 1241315
agucgucaugauggagaaa

SEQ ID NO: 1262995 - RNA, 19 nt, Artificial Sequence
  Description of Artificial Sequence: Synthetic oligonucleotide
  Antisense strand to SEQ ID NO: 1262994
uuucuccaucaugacgacu

SEQ ID NO: 1262996 - RNA, 19 nt, Artificial Sequence
  Description of Artificial Sequence: Synthetic oligonucleotide
  Sense strand starting at position 2892 of SEQ ID NO: 1241315
gugucauauuagccaguuu

SEQ ID NO: 1262997 - RNA, 19 nt, Artificial Sequence
  Description of Artificial Sequence: Synthetic oligonucleotide
  Antisense strand to SEQ ID NO: 1262996
aaacuggcuaauaugacac

SEQ ID NO: 1262998 - RNA, 19 nt, Artificial Sequence
  Description of Artificial Sequence: Synthetic oligonucleotide
  Sense strand starting at position 2939 of SEQ ID NO: 1241315
gggacaaguuugcacacuu

SEQ ID NO: 1262999 - RNA, 19 nt, Artificial Sequence
  Description of Artificial Sequence: Synthetic oligonucleotide
  Antisense strand to SEQ ID NO: 1262998
aagugugcaaacuuguccc

SEQ ID NO: 1263000 - RNA, 19 nt, Artificial Sequence
  Description of Artificial Sequence: Synthetic oligonucleotide
  Sense strand starting at position 3096 of SEQ ID NO: 1241315
gggaaaugcuaauggucgu

SEQ ID NO: 1263001 - RNA, 19 nt, Artificial Sequence
  Description of Artificial Sequence: Synthetic oligonucleotide
  Antisense strand to SEQ ID NO: 1263000
acgaccauuagcauuuccc

SEQ ID NO: 1263002 - RNA, 19 nt, Artificial Sequence
  Description of Artificial Sequence: Synthetic oligonucleotide
  Sense strand starting at position 3389 of SEQ ID NO: 1241315
ggccuccauccagaaguga

SEQ ID NO: 1263003 - RNA, 19 nt, Artificial Sequence
  Description of Artificial Sequence: Synthetic oligonucleotide
  Antisense strand to SEQ ID NO: 1263002
ucacuucuggauggaggcc

SEQ ID NO: 1263004 - RNA, 19 nt, Artificial Sequence
  Description of Artificial Sequence: Synthetic oligonucleotide
  Sense strand starting at position 3532 of SEQ ID NO: 1241315
cugacaagcugugacucaa

SEQ ID NO: 1263005 - RNA, 19 nt, Artificial Sequence
  Description of Artificial Sequence: Synthetic oligonucleotide
  Antisense strand to SEQ ID NO: 1263004
uugagucacagcuugucag

SEQ ID NO: 1263006 - RNA, 19 nt, Artificial Sequence
  Description of Artificial Sequence: Synthetic oligonucleotide
  Sense strand starting at position 3643 of SEQ ID NO: 1241315
ugacgcauccuagauuguu

SEQ ID NO: 1263007 - RNA, 19 nt, Artificial Sequence
  Description of Artificial Sequence: Synthetic oligonucleotide
  Antisense strand to SEQ ID NO: 1263006
aacaaucuaggaugcguca

SEQ ID NO: 1263008 - RNA, 19 nt, Artificial Sequence
  Description of Artificial Sequence: Synthetic oligonucleotide
  Sense strand starting at position 3651 of SEQ ID NO: 1241315
ccuagauuguuggccacua

SEQ ID NO: 1263009 - RNA, 19 nt, Artificial Sequence
  Description of Artificial Sequence: Synthetic oligonucleotide
  Antisense strand to SEQ ID NO: 1263008
uaguggccaacaaucuagg

SEQ ID NO: 1263010 - RNA, 19 nt, Artificial Sequence
  Description of Artificial Sequence: Synthetic oligonucleotide
  Sense strand starting at position 3699 of SEQ ID NO: 1241315
gcaaccuuugcauggguga

SEQ ID NO: 1263011 - RNA, 19 nt, Artificial Sequence
  Description of Artificial Sequence: Synthetic oligonucleotide
  Antisense strand to SEQ ID NO: 1263010
ucacccaugcaaagguugc

SEQ ID NO: 1263012 - RNA, 19 nt, Artificial Sequence
  Description of Artificial Sequence: Synthetic oligonucleotide
  Sense strand starting at position 3750 of SEQ ID NO: 1241315
auuugagggcuauguguuu

SEQ ID NO: 1263013 - RNA, 19 nt, Artificial Sequence
  Description of Artificial Sequence: Synthetic oligonucleotide
  Antisense strand to SEQ ID NO: 1263012
aaacacauagcccucaaau

SEQ ID NO: 1263014 - RNA, 19 nt, Artificial Sequence
  Description of Artificial Sequence: Synthetic oligonucleotide
  Sense strand starting at position 3755 of SEQ ID NO: 1241315
agggcuauguguuucugca

SEQ ID NO: 1263015 - RNA, 19 nt, Artificial Sequence
  Description of Artificial Sequence: Synthetic oligonucleotide
  Antisense strand to SEQ ID NO: 1263014
ugcagaaacacauagcccu

SEQ ID NO: 1263016 - RNA, 19 nt, Artificial Sequence
  Description of Artificial Sequence: Synthetic oligonucleotide
  Sense strand starting at position 3949 of SEQ ID NO: 1241315
gcuggcaucugacuacgua

SEQ ID NO: 1263017 - RNA, 19 nt, Artificial Sequence
  Description of Artificial Sequence: Synthetic oligonucleotide
  Antisense strand to SEQ ID NO: 1263016
uacguagucagaugccagc

SEQ ID NO: 1263018 - RNA, 19 nt, Artificial Sequence
  Description of Artificial Sequence: Synthetic oligonucleotide
  Sense strand starting at position 3950 of SEQ ID NO: 1241315
cuggcaucugacuacguaa

SEQ ID NO: 1263019 - RNA, 19 nt, Artificial Sequence
  Description of Artificial Sequence: Synthetic oligonucleotide
  Antisense strand to SEQ ID NO: 1263018
uuacguagucagaugccag

SEQ ID NO: 1263020 - RNA, 19 nt, Artificial Sequence
  Description of Artificial Sequence: Synthetic oligonucleotide
  Sense strand starting at position 69 of SEQ ID NO: 1241316
uugaaagauuucuauagug

SEQ ID NO: 1263021 - RNA, 19 nt, Artificial Sequence
  Description of Artificial Sequence: Synthetic oligonucleotide
  Antisense strand to SEQ ID NO: 1263020
cacuauagaaaucuuucaa

SEQ ID NO: 1263022 - RNA, 19 nt, Artificial Sequence
  Description of Artificial Sequence: Synthetic oligonucleotide
  Sense strand starting at position 121 of SEQ ID NO: 1241316
guguuauuugucuguaauu

SEQ ID NO: 1263023 - RNA, 19 nt, Artificial Sequence
  Description of Artificial Sequence: Synthetic oligonucleotide
  Antisense strand to SEQ ID NO: 1263022
aauuacagacaaauaacac

SEQ ID NO: 1263024 - RNA, 19 nt, Artificial Sequence
  Description of Artificial Sequence: Synthetic oligonucleotide
  Sense strand starting at position 440 of SEQ ID NO: 1241316
gcuacaugauagcucuuaa

SEQ ID NO: 1263025 - RNA, 19 nt, Artificial Sequence
  Description of Artificial Sequence: Synthetic oligonucleotide
  Antisense strand to SEQ ID NO: 1263024
uuaagagcuaucauguagc

SEQ ID NO: 1263026 - RNA, 19 nt, Artificial Sequence
  Description of Artificial Sequence: Synthetic oligonucleotide
  Sense strand starting at position 508 of SEQ ID NO: 1241316
gagcuuugagguuaauuau

SEQ ID NO: 1263027 - RNA, 19 nt, Artificial Sequence
  Description of Artificial Sequence: Synthetic oligonucleotide
  Antisense strand to SEQ ID NO: 1263026
auaauuaaccucaaagcuc

SEQ ID NO: 1263028 - RNA, 19 nt, Artificial Sequence
  Description of Artificial Sequence: Synthetic oligonucleotide
  Sense strand starting at position 517 of SEQ ID NO: 1241316
gguuaauuauucccagcac

SEQ ID NO: 1263029 - RNA, 19 nt, Artificial Sequence
  Description of Artificial Sequence: Synthetic oligonucleotide
  Antisense strand to SEQ ID NO: 1263028
gugcugggaauaauuaacc

SEQ ID NO: 1263030 - RNA, 19 nt, Artificial Sequence
  Description of Artificial Sequence: Synthetic oligonucleotide
  Sense strand starting at position 544 of SEQ ID NO: 1241316
guggcauuuaccuggguga

SEQ ID NO: 1263031 - RNA, 19 nt, Artificial Sequence
  Description of Artificial Sequence: Synthetic oligonucleotide
  Antisense strand to SEQ ID NO: 1263030
ucacccagguaaaugccac

SEQ ID NO: 1263032 - RNA, 19 nt, Artificial Sequence
  Description of Artificial Sequence: Synthetic oligonucleotide
  Sense strand starting at position 642 of SEQ ID NO: 1241316
gcaccuuugcaggagucua

SEQ ID NO: 1263033 - RNA, 19 nt, Artificial Sequence
  Description of Artificial Sequence: Synthetic oligonucleotide
  Antisense strand to SEQ ID NO: 1263032
uagacuccugcaaaggugc

SEQ ID NO: 1263034 - RNA, 19 nt, Artificial Sequence
  Description of Artificial Sequence: Synthetic oligonucleotide
  Sense strand starting at position 668 of SEQ ID NO: 1241316
uggcuucuaucucuugaaa

SEQ ID NO: 1263035 - RNA, 19 nt, Artificial Sequence
  Description of Artificial Sequence: Synthetic oligonucleotide
  Antisense strand to SEQ ID NO: 1263034
uuucaagagauagaagcca

SEQ ID NO: 1263036 - RNA, 19 nt, Artificial Sequence
  Description of Artificial Sequence: Synthetic oligonucleotide
  Sense strand starting at position 719 of SEQ ID NO: 1241316
aagagaaagccuuguguuc

SEQ ID NO: 1263037 - RNA, 19 nt, Artificial Sequence
  Description of Artificial Sequence: Synthetic oligonucleotide
  Antisense strand to SEQ ID NO: 1263036
gaacacaaggcuuucucuu

SEQ ID NO: 1263038 - RNA, 19 nt, Artificial Sequence
  Description of Artificial Sequence: Synthetic oligonucleotide
  Sense strand starting at position 733 of SEQ ID NO: 1241316
uguucugaaucuuugaaau

SEQ ID NO: 1263039 - RNA, 19 nt, Artificial Sequence
  Description of Artificial Sequence: Synthetic oligonucleotide
  Antisense strand to SEQ ID NO: 1263038
auuucaaagauucagaaca

SEQ ID NO: 1263040 - RNA, 19 nt, Artificial Sequence
  Description of Artificial Sequence: Synthetic oligonucleotide
  Sense strand starting at position 795 of SEQ ID NO: 1241316
auucucagucuuugagaau

SEQ ID NO: 1263041 - RNA, 19 nt, Artificial Sequence
  Description of Artificial Sequence: Synthetic oligonucleotide
  Antisense strand to SEQ ID NO: 1263040
auucucaaagacugagaau

SEQ ID NO: 1263042 - RNA, 19 nt, Artificial Sequence
  Description of Artificial Sequence: Synthetic oligonucleotide
  Sense strand starting at position 1341 of SEQ ID NO: 1241316
gggcgaugccuauaacccu

SEQ ID NO: 1263043 - RNA, 19 nt, Artificial Sequence
  Description of Artificial Sequence: Synthetic oligonucleotide
  Antisense strand to SEQ ID NO: 1263042
aggguuauaggcaucgccc

SEQ ID NO: 1263044 - RNA, 19 nt, Artificial Sequence
  Description of Artificial Sequence: Synthetic oligonucleotide
  Sense strand starting at position 1643 of SEQ ID NO: 1241316
guguuaagucucucggcuu

SEQ ID NO: 1263045 - RNA, 19 nt, Artificial Sequence
  Description of Artificial Sequence: Synthetic oligonucleotide
  Antisense strand to SEQ ID NO: 1263044
aagccgagagacuuaacac

SEQ ID NO: 1263046 - RNA, 19 nt, Artificial Sequence
  Description of Artificial Sequence: Synthetic oligonucleotide
  Sense strand starting at position 1802 of SEQ ID NO: 1241316
gcaguaaugagacagucac

SEQ ID NO: 1263047 - RNA, 19 nt, Artificial Sequence
  Description of Artificial Sequence: Synthetic oligonucleotide
  Antisense strand to SEQ ID NO: 1263046
gugacugucucauuacugc

SEQ ID NO: 1263048 - RNA, 19 nt, Artificial Sequence
  Description of Artificial Sequence: Synthetic oligonucleotide
  Sense strand starting at position 2038 of SEQ ID NO: 1241316
uagucucugcaguaagaga

SEQ ID NO: 1263049 - RNA, 19 nt, Artificial Sequence
  Description of Artificial Sequence: Synthetic oligonucleotide
  Antisense strand to SEQ ID NO: 1263048
ucucuuacugcagagacua

SEQ ID NO: 1263050 - RNA, 19 nt, Artificial Sequence
  Description of Artificial Sequence: Synthetic oligonucleotide
  Sense strand starting at position 2215 of SEQ ID NO: 1241316
auaguauaaccacgggaaa

SEQ ID NO: 1263051 - RNA, 19 nt, Artificial Sequence
  Description of Artificial Sequence: Synthetic oligonucleotide
  Antisense strand to SEQ ID NO: 1263050
uuucccgugguuauacuau

SEQ ID NO: 1263052 - RNA, 19 nt, Artificial Sequence
  Description of Artificial Sequence: Synthetic oligonucleotide
  Sense strand starting at position 2329 of SEQ ID NO: 1241316
cuuugagccucugugaaga

SEQ ID NO: 1263053 - RNA, 19 nt, Artificial Sequence
  Description of Artificial Sequence: Synthetic oligonucleotide
  Antisense strand to SEQ ID NO: 1263052
ucuucacagaggcucaaag

SEQ ID NO: 1263054 - RNA, 19 nt, Artificial Sequence
  Description of Artificial Sequence: Synthetic oligonucleotide
  Sense strand starting at position 2637 of SEQ ID NO: 1241316
gcuguauagcaugaauauu

SEQ ID NO: 1263055 - RNA, 19 nt, Artificial Sequence
  Description of Artificial Sequence: Synthetic oligonucleotide
  Antisense strand to SEQ ID NO: 1263054
aauauucaugcuauacagc

SEQ ID NO: 1263056 - RNA, 19 nt, Artificial Sequence
  Description of Artificial Sequence: Synthetic oligonucleotide
  Sense strand starting at position 2713 of SEQ ID NO: 1241316
gcacuuguccgagugguuc

SEQ ID NO: 1263057 - RNA, 19 nt, Artificial Sequence
  Description of Artificial Sequence: Synthetic oligonucleotide
  Antisense strand to SEQ ID NO: 1263056
gaaccacucggacaagugc

SEQ ID NO: 1263058 - RNA, 19 nt, Artificial Sequence
  Description of Artificial Sequence: Synthetic oligonucleotide
  Sense strand starting at position 2822 of SEQ ID NO: 1241316
agucccacugaguaagauu

SEQ ID NO: 1263059 - RNA, 19 nt, Artificial Sequence
  Description of Artificial Sequence: Synthetic oligonucleotide
  Antisense strand to SEQ ID NO: 1263058
aaucuuacucagugggacu

SEQ ID NO: 1263060 - RNA, 19 nt, Artificial Sequence
  Description of Artificial Sequence: Synthetic oligonucleotide
  Sense strand starting at position 2939 of SEQ ID NO: 1241316
cucuuaacuguugaugaua

SEQ ID NO: 1263061 - RNA, 19 nt, Artificial Sequence
  Description of Artificial Sequence: Synthetic oligonucleotide
  Antisense strand to SEQ ID NO: 1263060
uaucaucaacaguuaagag

SEQ ID NO: 1263062 - RNA, 19 nt, Artificial Sequence
  Description of Artificial Sequence: Synthetic oligonucleotide
  Sense strand starting at position 2972 of SEQ ID NO: 1241316
cgguaccuugauuaaacuu

SEQ ID NO: 1263063 - RNA, 19 nt, Artificial Sequence
  Description of Artificial Sequence: Synthetic oligonucleotide
  Antisense strand to SEQ ID NO: 1263062
aaguuuaaucaagguaccg

SEQ ID NO: 1263064 - RNA, 19 nt, Artificial Sequence
  Description of Artificial Sequence: Synthetic oligonucleotide
  Sense strand starting at position 3160 of SEQ ID NO: 1241316
uggagauuguaagucugaa

SEQ ID NO: 1263065 - RNA, 19 nt, Artificial Sequence
  Description of Artificial Sequence: Synthetic oligonucleotide
  Antisense strand to SEQ ID NO: 1263064
uucagacuuacaaucucca

SEQ ID NO: 1263066 - RNA, 19 nt, Artificial Sequence
  Description of Artificial Sequence: Synthetic oligonucleotide
  Sense strand starting at position 3221 of SEQ ID NO: 1241316
cucuuugucccucaugaga

SEQ ID NO: 1263067 - RNA, 19 nt, Artificial Sequence
  Description of Artificial Sequence: Synthetic oligonucleotide
  Antisense strand to SEQ ID NO: 1263066
ucucaugagggacaaagag

SEQ ID NO: 1263068 - RNA, 19 nt, Artificial Sequence
  Description of Artificial Sequence: Synthetic oligonucleotide
  Sense strand starting at position 3282 of SEQ ID NO: 1241316
auguccuaagcuugggaua

SEQ ID NO: 1263069 - RNA, 19 nt, Artificial Sequence
  Description of Artificial Sequence: Synthetic oligonucleotide
  Antisense strand to SEQ ID NO: 1263068
uaucccaagcuuaggacau

SEQ ID NO: 1263070 - RNA, 19 nt, Artificial Sequence
  Description of Artificial Sequence: Synthetic oligonucleotide
  Sense strand starting at position 3283 of SEQ ID NO: 1241316
uguccuaagcuugggauau

SEQ ID NO: 1263071 - RNA, 19 nt, Artificial Sequence
  Description of Artificial Sequence: Synthetic oligonucleotide
  Antisense strand to SEQ ID NO: 1263070
auaucccaagcuuaggaca

SEQ ID NO: 1263072 - RNA, 19 nt, Artificial Sequence
  Description of Artificial Sequence: Synthetic oligonucleotide
  Sense strand starting at position 3357 of SEQ ID NO: 1241316
uggucagcucaguaaugag

SEQ ID NO: 1263073 - RNA, 19 nt, Artificial Sequence
  Description of Artificial Sequence: Synthetic oligonucleotide
  Antisense strand to SEQ ID NO: 1263072
cucauuacugagcugacca

SEQ ID NO: 1263074 - RNA, 19 nt, Artificial Sequence
  Description of Artificial Sequence: Synthetic oligonucleotide
  Sense strand starting at position 3367 of SEQ ID NO: 1241316
aguaaugaguacuuacuau

SEQ ID NO: 1263075 - RNA, 19 nt, Artificial Sequence
  Description of Artificial Sequence: Synthetic oligonucleotide
  Antisense strand to SEQ ID NO: 1263074
auaguaaguacucauuacu

SEQ ID NO: 1263076 - RNA, 19 nt, Artificial Sequence
  Description of Artificial Sequence: Synthetic oligonucleotide
  Sense strand starting at position 3428 of SEQ ID NO: 1241316
cucugcacucaagaaguuu

SEQ ID NO: 1263077 - RNA, 19 nt, Artificial Sequence
  Description of Artificial Sequence: Synthetic oligonucleotide
  Antisense strand to SEQ ID NO: 1263076
aaacuucuugagugcagag

SEQ ID NO: 1263078 - RNA, 19 nt, Artificial Sequence
  Description of Artificial Sequence: Synthetic oligonucleotide
  Sense strand starting at position 3488 of SEQ ID NO: 1241316
guguuauguagugauaaga

SEQ ID NO: 1263079 - RNA, 19 nt, Artificial Sequence
  Description of Artificial Sequence: Synthetic oligonucleotide
  Antisense strand to SEQ ID NO: 1263078
ucuuaucacuacauaacac

SEQ ID NO: 1263080 - RNA, 19 nt, Artificial Sequence
  Description of Artificial Sequence: Synthetic oligonucleotide
  Sense strand starting at position 3542 of SEQ ID NO: 1241316
aaggguacuuaguccaauu

SEQ ID NO: 1263081 - RNA, 19 nt, Artificial Sequence
  Description of Artificial Sequence: Synthetic oligonucleotide
  Antisense strand to SEQ ID NO: 1263080
aauuggacuaaguacccuu

SEQ ID NO: 1263082 - RNA, 19 nt, Artificial Sequence
  Description of Artificial Sequence: Synthetic oligonucleotide
  Sense strand starting at position 3576 of SEQ ID NO: 1241316
gguuucauggaggagcuaa

SEQ ID NO: 1263083 - RNA, 19 nt, Artificial Sequence
  Description of Artificial Sequence: Synthetic oligonucleotide
  Antisense strand to SEQ ID NO: 1263082
uuagcuccuccaugaaacc

SEQ ID NO: 1263084 - RNA, 19 nt, Artificial Sequence
  Description of Artificial Sequence: Synthetic oligonucleotide
  Sense strand starting at position 3610 of SEQ ID NO: 1241316
cugaaagauuagucagucu

SEQ ID NO: 1263085 - RNA, 19 nt, Artificial Sequence
  Description of Artificial Sequence: Synthetic oligonucleotide
  Antisense strand to SEQ ID NO: 1263084
agacugacuaaucuuucag

SEQ ID NO: 1263086 - RNA, 19 nt, Artificial Sequence
  Description of Artificial Sequence: Synthetic oligonucleotide
  Sense strand starting at position 3613 of SEQ ID NO: 1241316
aaagauuagucagucugag

SEQ ID NO: 1263087 - RNA, 19 nt, Artificial Sequence
  Description of Artificial Sequence: Synthetic oligonucleotide
  Antisense strand to SEQ ID NO: 1263086
cucagacugacuaaucuuu

SEQ ID NO: 1263088 - RNA, 19 nt, Artificial Sequence
  Description of Artificial Sequence: Synthetic oligonucleotide
  Sense strand starting at position 3683 of SEQ ID NO: 1241316
ucugguguuacauaaaguu

SEQ ID NO: 1263089 - RNA, 19 nt, Artificial Sequence
  Description of Artificial Sequence: Synthetic oligonucleotide
  Antisense strand to SEQ ID NO: 1263088
aacuuuauguaacaccaga

SEQ ID NO: 1263090 - RNA, 19 nt, Artificial Sequence
  Description of Artificial Sequence: Synthetic oligonucleotide
  Sense strand starting at position 3802 of SEQ ID NO: 1241316
ucuaauaaagaguguuaca

SEQ ID NO: 1263091 - RNA, 19 nt, Artificial Sequence
  Description of Artificial Sequence: Synthetic oligonucleotide
  Antisense strand to SEQ ID NO: 1263090
uguaacacucuuuauuaga

SEQ ID NO: 1263092 - RNA, 19 nt, Artificial Sequence
  Description of Artificial Sequence: Synthetic oligonucleotide
  Sense strand starting at position 3809 of SEQ ID NO: 1241316
aagaguguuacauggagag

SEQ ID NO: 1263093 - RNA, 19 nt, Artificial Sequence
  Description of Artificial Sequence: Synthetic oligonucleotide
  Antisense strand to SEQ ID NO: 1263092
cucuccauguaacacucuu

SEQ ID NO: 1263094 - RNA, 19 nt, Artificial Sequence
  Description of Artificial Sequence: Synthetic oligonucleotide
  Sense strand starting at position 3837 of SEQ ID NO: 1241316
cugaauugaucauucugag

SEQ ID NO: 1263095 - RNA, 19 nt, Artificial Sequence
  Description of Artificial Sequence: Synthetic oligonucleotide
  Antisense strand to SEQ ID NO: 1263094
cucagaaugaucaauucag

SEQ ID NO: 1263096 - RNA, 19 nt, Artificial Sequence
  Description of Artificial Sequence: Synthetic oligonucleotide
  Sense strand starting at position 3941 of SEQ ID NO: 1241316
gggaguuaacuugggaacu

SEQ ID NO: 1263097 - RNA, 19 nt, Artificial Sequence
  Description of Artificial Sequence: Synthetic oligonucleotide
  Antisense strand to SEQ ID NO: 1263096
aguucccaaguuaacuccc

SEQ ID NO: 1263098 - RNA, 19 nt, Artificial Sequence
  Description of Artificial Sequence: Synthetic oligonucleotide
  Sense strand starting at position 3952 of SEQ ID NO: 1241316
ugggaacuaucaguagagu

SEQ ID NO: 1263099 - RNA, 19 nt, Artificial Sequence
  Description of Artificial Sequence: Synthetic oligonucleotide
  Antisense strand to SEQ ID NO: 1263098
acucuacugauaguuccca

SEQ ID NO: 1263100 - RNA, 19 nt, Artificial Sequence
  Description of Artificial Sequence: Synthetic oligonucleotide
  Sense strand starting at position 191 of SEQ ID NO: 1241317
agugcaaagauaugaauga

SEQ ID NO: 1263101 - RNA, 19 nt, Artificial Sequence
  Description of Artificial Sequence: Synthetic oligonucleotide
  Antisense strand to SEQ ID NO: 1263100
ucauucauaucuuugcacu

SEQ ID NO: 1263102 - RNA, 19 nt, Artificial Sequence
  Description of Artificial Sequence: Synthetic oligonucleotide
  Sense strand starting at position 201 of SEQ ID NO: 1241317
uaugaaugauguuugcaac

SEQ ID NO: 1263103 - RNA, 19 nt, Artificial Sequence
  Description of Artificial Sequence: Synthetic oligonucleotide
  Antisense strand to SEQ ID NO: 1263102
guugcaaacaucauucaua

SEQ ID NO: 1263104 - RNA, 19 nt, Artificial Sequence
  Description of Artificial Sequence: Synthetic oligonucleotide
  Sense strand starting at position 243 of SEQ ID NO: 1241317
uuuauauuccuggaguacu

SEQ ID NO: 1263105 - RNA, 19 nt, Artificial Sequence
  Description of Artificial Sequence: Synthetic oligonucleotide
  Antisense strand to SEQ ID NO: 1263104
aguacuccaggaauauaaa

SEQ ID NO: 1263106 - RNA, 19 nt, Artificial Sequence
  Description of Artificial Sequence: Synthetic oligonucleotide
  Sense strand starting at position 282 of SEQ ID NO: 1241317
agguauguggcauacauua

SEQ ID NO: 1263107 - RNA, 19 nt, Artificial Sequence
  Description of Artificial Sequence: Synthetic oligonucleotide
  Antisense strand to SEQ ID NO: 1263106
uaauguaugccacauaccu

SEQ ID NO: 1263108 - RNA, 19 nt, Artificial Sequence
  Description of Artificial Sequence: Synthetic oligonucleotide
  Sense strand starting at position 290 of SEQ ID NO: 1241317
ggcauacauuaugucauua

SEQ ID NO: 1263109 - RNA, 19 nt, Artificial Sequence
  Description of Artificial Sequence: Synthetic oligonucleotide
  Antisense strand to SEQ ID NO: 1263108
uaaugacauaauguaugcc

SEQ ID NO: 1263110 - RNA, 19 nt, Artificial Sequence
  Description of Artificial Sequence: Synthetic oligonucleotide
  Sense strand starting at position 414 of SEQ ID NO: 1241317
aggcucucaugaucuacau

SEQ ID NO: 1263111 - RNA, 19 nt, Artificial Sequence
  Description of Artificial Sequence: Synthetic oligonucleotide
  Antisense strand to SEQ ID NO: 1263110
auguagaucaugagagccu

SEQ ID NO: 1263112 - RNA, 19 nt, Artificial Sequence
  Description of Artificial Sequence: Synthetic oligonucleotide
  Sense strand starting at position 442 of SEQ ID NO: 1241317
auuaucugguuagucuuaa

SEQ ID NO: 1263113 - RNA, 19 nt, Artificial Sequence
  Description of Artificial Sequence: Synthetic oligonucleotide
  Antisense strand to SEQ ID NO: 1263112
uuaagacuaaccagauaau

SEQ ID NO: 1263114 - RNA, 19 nt, Artificial Sequence
  Description of Artificial Sequence: Synthetic oligonucleotide
  Sense strand starting at position 552 of SEQ ID NO: 1241317
aucaccaucuguucugaga

SEQ ID NO: 1263115 - RNA, 19 nt, Artificial Sequence
  Description of Artificial Sequence: Synthetic oligonucleotide
  Antisense strand to SEQ ID NO: 1263114
ucucagaacagauggugau

SEQ ID NO: 1263116 - RNA, 19 nt, Artificial Sequence
  Description of Artificial Sequence: Synthetic oligonucleotide
  Sense strand starting at position 1015 of SEQ ID NO: 1241317
ucuggugugguccaaauau

SEQ ID NO: 1263117 - RNA, 19 nt, Artificial Sequence
  Description of Artificial Sequence: Synthetic oligonucleotide
  Antisense strand to SEQ ID NO: 1263116
auauuuggaccacaccaga

SEQ ID NO: 1263118 - RNA, 19 nt, Artificial Sequence
  Description of Artificial Sequence: Synthetic oligonucleotide
  Sense strand starting at position 1090 of SEQ ID NO: 1241317
aauggcauauuugaagaga

SEQ ID NO: 1263119 - RNA, 19 nt, Artificial Sequence
  Description of Artificial Sequence: Synthetic oligonucleotide
  Antisense strand to SEQ ID NO: 1263118
ucucuucaaauaugccauu

SEQ ID NO: 1263120 - RNA, 19 nt, Artificial Sequence
  Description of Artificial Sequence: Synthetic oligonucleotide
  Sense strand starting at position 1218 of SEQ ID NO: 1241317
ugcagauauucucugaaga

SEQ ID NO: 1263121 - RNA, 19 nt, Artificial Sequence
  Description of Artificial Sequence: Synthetic oligonucleotide
  Antisense strand to SEQ ID NO: 1263120
ucuucagagaauaucugca

SEQ ID NO: 1263122 - RNA, 19 nt, Artificial Sequence
  Description of Artificial Sequence: Synthetic oligonucleotide
  Sense strand starting at position 1219 of SEQ ID NO: 1241317
gcagauauucucugaagau

SEQ ID NO: 1263123 - RNA, 19 nt, Artificial Sequence
  Description of Artificial Sequence: Synthetic oligonucleotide
  Antisense strand to SEQ ID NO: 1263122
aucuucagagaauaucugc

SEQ ID NO: 1263124 - RNA, 19 nt, Artificial Sequence
  Description of Artificial Sequence: Synthetic oligonucleotide
  Sense strand starting at position 1375 of SEQ ID NO: 1241317
auuaguccagucuaagaua

SEQ ID NO: 1263125 - RNA, 19 nt, Artificial Sequence
  Description of Artificial Sequence: Synthetic oligonucleotide
  Antisense strand to SEQ ID NO: 1263124
uaucuuagacuggacuaau

SEQ ID NO: 1263126 - RNA, 19 nt, Artificial Sequence
  Description of Artificial Sequence: Synthetic oligonucleotide
  Sense strand starting at position 1383 of SEQ ID NO: 1241317
agucuaagauaccugucau

SEQ ID NO: 1263127 - RNA, 19 nt, Artificial Sequence
  Description of Artificial Sequence: Synthetic oligonucleotide
  Antisense strand to SEQ ID NO: 1263126
augacagguaucuuagacu

SEQ ID NO: 1263128 - RNA, 19 nt, Artificial Sequence
  Description of Artificial Sequence: Synthetic oligonucleotide
  Sense strand starting at position 2225 of SEQ ID NO: 1241317
ggcgucauugcuaacguga

SEQ ID NO: 1263129 - RNA, 19 nt, Artificial Sequence
  Description of Artificial Sequence: Synthetic oligonucleotide
  Antisense strand to SEQ ID NO: 1263128
ucacguuagcaaugacgcc

SEQ ID NO: 1263130 - RNA, 19 nt, Artificial Sequence
  Description of Artificial Sequence: Synthetic oligonucleotide
  Sense strand starting at position 2230 of SEQ ID NO: 1241317
cauugcuaacgugauaaau

SEQ ID NO: 1263131 - RNA, 19 nt, Artificial Sequence
  Description of Artificial Sequence: Synthetic oligonucleotide
  Antisense strand to SEQ ID NO: 1263130
auuuaucacguuagcaaug

SEQ ID NO: 1263132 - RNA, 19 nt, Artificial Sequence
  Description of Artificial Sequence: Synthetic oligonucleotide
  Sense strand starting at position 2333 of SEQ ID NO: 1241317
guuauugagcgucuaacgu

SEQ ID NO: 1263133 - RNA, 19 nt, Artificial Sequence
  Description of Artificial Sequence: Synthetic oligonucleotide
  Antisense strand to SEQ ID NO: 1263132
acguuagacgcucaauaac

SEQ ID NO: 1263134 - RNA, 19 nt, Artificial Sequence
  Description of Artificial Sequence: Synthetic oligonucleotide
  Sense strand starting at position 2341 of SEQ ID NO: 1241317
gcgucuaacgugccucauu

SEQ ID NO: 1263135 - RNA, 19 nt, Artificial Sequence
  Description of Artificial Sequence: Synthetic oligonucleotide
  Antisense strand to SEQ ID NO: 1263134
aaugaggcacguuagacgc

SEQ ID NO: 1263136 - RNA, 19 nt, Artificial Sequence
  Description of Artificial Sequence: Synthetic oligonucleotide
  Sense strand starting at position 2427 of SEQ ID NO: 1241317
aucucuaucugggcugaga

SEQ ID NO: 1263137 - RNA, 19 nt, Artificial Sequence
  Description of Artificial Sequence: Synthetic oligonucleotide
  Antisense strand to SEQ ID NO: 1263136
ucucagcccagauagagau

SEQ ID NO: 1263138 - RNA, 19 nt, Artificial Sequence
  Description of Artificial Sequence: Synthetic oligonucleotide
  Sense strand starting at position 2429 of SEQ ID NO: 1241317
cucuaucugggcugagaaa

SEQ ID NO: 1263139 - RNA, 19 nt, Artificial Sequence
  Description of Artificial Sequence: Synthetic oligonucleotide
  Antisense strand to SEQ ID NO: 1263138
uuucucagcccagauagag

SEQ ID NO: 1263140 - RNA, 19 nt, Artificial Sequence
  Description of Artificial Sequence: Synthetic oligonucleotide
  Sense strand starting at position 2664 of SEQ ID NO: 1241317
ucuuuauuauagguaagag

SEQ ID NO: 1263141 - RNA, 19 nt, Artificial Sequence
  Description of Artificial Sequence: Synthetic oligonucleotide
  Antisense strand to SEQ ID NO: 1263140
cucuuaccuauaauaaaga

SEQ ID NO: 1263142 - RNA, 19 nt, Artificial Sequence
  Description of Artificial Sequence: Synthetic oligonucleotide
  Sense strand starting at position 2770 of SEQ ID NO: 1241317
uugaguaaccucuguaaau

SEQ ID NO: 1263143 - RNA, 19 nt, Artificial Sequence
  Description of Artificial Sequence: Synthetic oligonucleotide
  Antisense strand to SEQ ID NO: 1263142
auuuacagagguuacucaa

SEQ ID NO: 1263144 - RNA, 19 nt, Artificial Sequence
  Description of Artificial Sequence: Synthetic oligonucleotide
  Sense strand starting at position 2771 of SEQ ID NO: 1241317
ugaguaaccucuguaaauu

SEQ ID NO: 1263145 - RNA, 19 nt, Artificial Sequence
  Description of Artificial Sequence: Synthetic oligonucleotide
  Antisense strand to SEQ ID NO: 1263144
aauuuacagagguuacuca

SEQ ID NO: 1263146 - RNA, 19 nt, Artificial Sequence
  Description of Artificial Sequence: Synthetic oligonucleotide
  Sense strand starting at position 2785 of SEQ ID NO: 1241317
aaauuuguuuccucgugua

SEQ ID NO: 1263147 - RNA, 19 nt, Artificial Sequence
  Description of Artificial Sequence: Synthetic oligonucleotide
  Antisense strand to SEQ ID NO: 1263146
uacacgaggaaacaaauuu

SEQ ID NO: 1263148 - RNA, 19 nt, Artificial Sequence
  Description of Artificial Sequence: Synthetic oligonucleotide
  Sense strand starting at position 2825 of SEQ ID NO: 1241317
cagaguuacgagcauuaau

SEQ ID NO: 1263149 - RNA, 19 nt, Artificial Sequence
  Description of Artificial Sequence: Synthetic oligonucleotide
  Antisense strand to SEQ ID NO: 1263148
auuaaugcucguaacucug

SEQ ID NO: 1263150 - RNA, 19 nt, Artificial Sequence
  Description of Artificial Sequence: Synthetic oligonucleotide
  Sense strand starting at position 2828 of SEQ ID NO: 1241317
aguuacgagcauuaauaau

SEQ ID NO: 1263151 - RNA, 19 nt, Artificial Sequence
  Description of Artificial Sequence: Synthetic oligonucleotide
  Antisense strand to SEQ ID NO: 1263150
auuauuaaugcucguaacu

SEQ ID NO: 1263152 - RNA, 19 nt, Artificial Sequence
  Description of Artificial Sequence: Synthetic oligonucleotide
  Sense strand starting at position 2872 of SEQ ID NO: 1241317
cugagugcggcuucuuuau

SEQ ID NO: 1263153 - RNA, 19 nt, Artificial Sequence
  Description of Artificial Sequence: Synthetic oligonucleotide
  Antisense strand to SEQ ID NO: 1263152
auaaagaagccgcacucag

SEQ ID NO: 1263154 - RNA, 19 nt, Artificial Sequence
  Description of Artificial Sequence: Synthetic oligonucleotide
  Sense strand starting at position 2968 of SEQ ID NO: 1241317
ggcaguuuguauuuaaguu

SEQ ID NO: 1263155 - RNA, 19 nt, Artificial Sequence
  Description of Artificial Sequence: Synthetic oligonucleotide
  Antisense strand to SEQ ID NO: 1263154
aacuuaaauacaaacugcc

SEQ ID NO: 1263156 - RNA, 19 nt, Artificial Sequence
  Description of Artificial Sequence: Synthetic oligonucleotide
  Sense strand starting at position 2969 of SEQ ID NO: 1241317
gcaguuuguauuuaaguuu

SEQ ID NO: 1263157 - RNA, 19 nt, Artificial Sequence
  Description of Artificial Sequence: Synthetic oligonucleotide
  Antisense strand to SEQ ID NO: 1263156
aaacuuaaauacaaacugc

SEQ ID NO: 1263158 - RNA, 19 nt, Artificial Sequence
  Description of Artificial Sequence: Synthetic oligonucleotide
  Sense strand starting at position 3125 of SEQ ID NO: 1241317
cagguuauagacuggacuu

SEQ ID NO: 1263159 - RNA, 19 nt, Artificial Sequence
  Description of Artificial Sequence: Synthetic oligonucleotide
  Antisense strand to SEQ ID NO: 1263158
aaguccagucuauaaccug

SEQ ID NO: 1263160 - RNA, 19 nt, Artificial Sequence
  Description of Artificial Sequence: Synthetic oligonucleotide
  Sense strand starting at position 3126 of SEQ ID NO: 1241317
agguuauagacuggacuuu

SEQ ID NO: 1263161 - RNA, 19 nt, Artificial Sequence
  Description of Artificial Sequence: Synthetic oligonucleotide
  Antisense strand to SEQ ID NO: 1263160
aaaguccagucuauaaccu

SEQ ID NO: 1263162 - RNA, 19 nt, Artificial Sequence
  Description of Artificial Sequence: Synthetic oligonucleotide
  Sense strand starting at position 3159 of SEQ ID NO: 1241317
cuuaaauguggguaauggu

SEQ ID NO: 1263163 - RNA, 19 nt, Artificial Sequence
  Description of Artificial Sequence: Synthetic oligonucleotide
  Antisense strand to SEQ ID NO: 1263162
accauuacccacauuuaag

SEQ ID NO: 1263164 - RNA, 19 nt, Artificial Sequence
  Description of Artificial Sequence: Synthetic oligonucleotide
  Sense strand starting at position 3166 of SEQ ID NO: 1241317
guggguaaugguugauaaa

SEQ ID NO: 1263165 - RNA, 19 nt, Artificial Sequence
  Description of Artificial Sequence: Synthetic oligonucleotide
  Antisense strand to SEQ ID NO: 1263164
uuuaucaaccauuacccac

SEQ ID NO: 1263166 - RNA, 19 nt, Artificial Sequence
  Description of Artificial Sequence: Synthetic oligonucleotide
  Sense strand starting at position 3179 of SEQ ID NO: 1241317
gauaaaugucgcuaccauc

SEQ ID NO: 1263167 - RNA, 19 nt, Artificial Sequence
  Description of Artificial Sequence: Synthetic oligonucleotide
  Antisense strand to SEQ ID NO: 1263166
gaugguagcgacauuuauc

SEQ ID NO: 1263168 - RNA, 19 nt, Artificial Sequence
  Description of Artificial Sequence: Synthetic oligonucleotide
  Sense strand starting at position 3552 of SEQ ID NO: 1241317
uaucaaguuucugcaggaa

SEQ ID NO: 1263169 - RNA, 19 nt, Artificial Sequence
  Description of Artificial Sequence: Synthetic oligonucleotide
  Antisense strand to SEQ ID NO: 1263168
uuccugcagaaacuugaua

SEQ ID NO: 1263170 - RNA, 19 nt, Artificial Sequence
  Description of Artificial Sequence: Synthetic oligonucleotide
  Sense strand starting at position 3640 of SEQ ID NO: 1241317
ccuggagaugcccauacau

SEQ ID NO: 1263171 - RNA, 19 nt, Artificial Sequence
  Description of Artificial Sequence: Synthetic oligonucleotide
  Antisense strand to SEQ ID NO: 1263170
auguaugggcaucuccagg

SEQ ID NO: 1263172 - RNA, 19 nt, Artificial Sequence
  Description of Artificial Sequence: Synthetic oligonucleotide
  Sense strand starting at position 3642 of SEQ ID NO: 1241317
uggagaugcccauacauuc

SEQ ID NO: 1263173 - RNA, 19 nt, Artificial Sequence
  Description of Artificial Sequence: Synthetic oligonucleotide
  Antisense strand to SEQ ID NO: 1263172
gaauguaugggcaucucca

SEQ ID NO: 1263174 - RNA, 19 nt, Artificial Sequence
  Description of Artificial Sequence: Synthetic oligonucleotide
  Sense strand starting at position 3651 of SEQ ID NO: 1241317
ccauacauuccguauuccu

SEQ ID NO: 1263175 - RNA, 19 nt, Artificial Sequence
  Description of Artificial Sequence: Synthetic oligonucleotide
  Antisense strand to SEQ ID NO: 1263174
aggaauacggaauguaugg

SEQ ID NO: 1263176 - RNA, 19 nt, Artificial Sequence
  Description of Artificial Sequence: Synthetic oligonucleotide
  Sense strand starting at position 3824 of SEQ ID NO: 1241317
guuagaaccucauugggau

SEQ ID NO: 1263177 - RNA, 19 nt, Artificial Sequence
  Description of Artificial Sequence: Synthetic oligonucleotide
  Antisense strand to SEQ ID NO: 1263176
aucccaaugagguucuaac

SEQ ID NO: 1263178 - RNA, 19 nt, Artificial Sequence
  Description of Artificial Sequence: Synthetic oligonucleotide
  Sense strand starting at position 3912 of SEQ ID NO: 1241317
ggaauagugguguggauga

SEQ ID NO: 1263179 - RNA, 19 nt, Artificial Sequence
  Description of Artificial Sequence: Synthetic oligonucleotide
  Antisense strand to SEQ ID NO: 1263178
ucauccacaccacuauucc

SEQ ID NO: 1263180 - RNA, 19 nt, Artificial Sequence
  Description of Artificial Sequence: Synthetic oligonucleotide
  Sense strand starting at position 105 of SEQ ID NO: 1241318
uggagacagcucugaccuu

SEQ ID NO: 1263181 - RNA, 19 nt, Artificial Sequence
  Description of Artificial Sequence: Synthetic oligonucleotide
  Antisense strand to SEQ ID NO: 1263180
aaggucagagcugucucca

SEQ ID NO: 1263182 - RNA, 19 nt, Artificial Sequence
  Description of Artificial Sequence: Synthetic oligonucleotide
  Sense strand starting at position 172 of SEQ ID NO: 1241318
agauuuauaucuggaagga

SEQ ID NO: 1263183 - RNA, 19 nt, Artificial Sequence
  Description of Artificial Sequence: Synthetic oligonucleotide
  Antisense strand to SEQ ID NO: 1263182
uccuuccagauauaaaucu

SEQ ID NO: 1263184 - RNA, 19 nt, Artificial Sequence
  Description of Artificial Sequence: Synthetic oligonucleotide
  Sense strand starting at position 297 of SEQ ID NO: 1241318
cucguuuauguuggagaaa

SEQ ID NO: 1263185 - RNA, 19 nt, Artificial Sequence
  Description of Artificial Sequence: Synthetic oligonucleotide
  Antisense strand to SEQ ID NO: 1263184
uuucuccaacauaaacgag

SEQ ID NO: 1263186 - RNA, 19 nt, Artificial Sequence
  Description of Artificial Sequence: Synthetic oligonucleotide
  Sense strand starting at position 779 of SEQ ID NO: 1241318
cccaauccaggaugacauu

SEQ ID NO: 1263187 - RNA, 19 nt, Artificial Sequence
  Description of Artificial Sequence: Synthetic oligonucleotide
  Antisense strand to SEQ ID NO: 1263186
aaugucauccuggauuggg

SEQ ID NO: 1263188 - RNA, 19 nt, Artificial Sequence
  Description of Artificial Sequence: Synthetic oligonucleotide
  Sense strand starting at position 785 of SEQ ID NO: 1241318
ccaggaugacauuguuaca

SEQ ID NO: 1263189 - RNA, 19 nt, Artificial Sequence
  Description of Artificial Sequence: Synthetic oligonucleotide
  Antisense strand to SEQ ID NO: 1263188
uguaacaaugucauccugg

SEQ ID NO: 1263190 - RNA, 19 nt, Artificial Sequence
  Description of Artificial Sequence: Synthetic oligonucleotide
  Sense strand starting at position 910 of SEQ ID NO: 1241318
uaaagacugugggugucau

SEQ ID NO: 1263191 - RNA, 19 nt, Artificial Sequence
  Description of Artificial Sequence: Synthetic oligonucleotide
  Antisense strand to SEQ ID NO: 1263190
augacacccacagucuuua

SEQ ID NO: 1263192 - RNA, 19 nt, Artificial Sequence
  Description of Artificial Sequence: Synthetic oligonucleotide
  Sense strand starting at position 911 of SEQ ID NO: 1241318
aaagacugugggugucauu

SEQ ID NO: 1263193 - RNA, 19 nt, Artificial Sequence
  Description of Artificial Sequence: Synthetic oligonucleotide
  Antisense strand to SEQ ID NO: 1263192
aaugacacccacagucuuu

SEQ ID NO: 1263194 - RNA, 19 nt, Artificial Sequence
  Description of Artificial Sequence: Synthetic oligonucleotide
  Sense strand starting at position 921 of SEQ ID NO: 1241318
ggugucauuuagguaaagu

SEQ ID NO: 1263195 - RNA, 19 nt, Artificial Sequence
  Description of Artificial Sequence: Synthetic oligonucleotide
  Antisense strand to SEQ ID NO: 1263194
acuuuaccuaaaugacacc

SEQ ID NO: 1263196 - RNA, 19 nt, Artificial Sequence
  Description of Artificial Sequence: Synthetic oligonucleotide
  Sense strand starting at position 930 of SEQ ID NO: 1241318
uagguaaaguucuccaaga

SEQ ID NO: 1263197 - RNA, 19 nt, Artificial Sequence
  Description of Artificial Sequence: Synthetic oligonucleotide
  Antisense strand to SEQ ID NO: 1263196
ucuuggagaacuuuaccua

SEQ ID NO: 1263198 - RNA, 19 nt, Artificial Sequence
  Description of Artificial Sequence: Synthetic oligonucleotide
  Sense strand starting at position 931 of SEQ ID NO: 1241318
agguaaaguucuccaagac

SEQ ID NO: 1263199 - RNA, 19 nt, Artificial Sequence
  Description of Artificial Sequence: Synthetic oligonucleotide
  Antisense strand to SEQ ID NO: 1263198
gucuuggagaacuuuaccu

SEQ ID NO: 1263200 - RNA, 19 nt, Artificial Sequence
  Description of Artificial Sequence: Synthetic oligonucleotide
  Sense strand starting at position 932 of SEQ ID NO: 1241318
gguaaaguucuccaagacu

SEQ ID NO: 1263201 - RNA, 19 nt, Artificial Sequence
  Description of Artificial Sequence: Synthetic oligonucleotide
  Antisense strand to SEQ ID NO: 1263200
agucuuggagaacuuuacc

SEQ ID NO: 1263202 - RNA, 19 nt, Artificial Sequence
  Description of Artificial Sequence: Synthetic oligonucleotide
  Sense strand starting at position 953 of SEQ ID NO: 1241318
aggauuacuuaacuguaau

SEQ ID NO: 1263203 - RNA, 19 nt, Artificial Sequence
  Description of Artificial Sequence: Synthetic oligonucleotide
  Antisense strand to SEQ ID NO: 1263202
auuacaguuaaguaauccu

SEQ ID NO: 1263204 - RNA, 19 nt, Artificial Sequence
  Description of Artificial Sequence: Synthetic oligonucleotide
  Sense strand starting at position 1034 of SEQ ID NO: 1241318
uucucauuggcuugaaacu

SEQ ID NO: 1263205 - RNA, 19 nt, Artificial Sequence
  Description of Artificial Sequence: Synthetic oligonucleotide
  Antisense strand to SEQ ID NO: 1263204
aguuucaagccaaugagaa

SEQ ID NO: 1263206 - RNA, 19 nt, Artificial Sequence
  Description of Artificial Sequence: Synthetic oligonucleotide
  Sense strand starting at position 1035 of SEQ ID NO: 1241318
ucucauuggcuugaaacuu

SEQ ID NO: 1263207 - RNA, 19 nt, Artificial Sequence
  Description of Artificial Sequence: Synthetic oligonucleotide
  Antisense strand to SEQ ID NO: 1263206
aaguuucaagccaaugaga

SEQ ID NO: 1263208 - RNA, 19 nt, Artificial Sequence
  Description of Artificial Sequence: Synthetic oligonucleotide
  Sense strand starting at position 1044 of SEQ ID NO: 1241318
cuugaaacuucugugagaa

SEQ ID NO: 1263209 - RNA, 19 nt, Artificial Sequence
  Description of Artificial Sequence: Synthetic oligonucleotide
  Antisense strand to SEQ ID NO: 1263208
uucucacagaaguuucaag

SEQ ID NO: 1263210 - RNA, 19 nt, Artificial Sequence
  Description of Artificial Sequence: Synthetic oligonucleotide
  Sense strand starting at position 1045 of SEQ ID NO: 1241318
uugaaacuucugugagaau

SEQ ID NO: 1263211 - RNA, 19 nt, Artificial Sequence
  Description of Artificial Sequence: Synthetic oligonucleotide
  Antisense strand to SEQ ID NO: 1263210
auucucacagaaguuucaa

SEQ ID NO: 1263212 - RNA, 19 nt, Artificial Sequence
  Description of Artificial Sequence: Synthetic oligonucleotide
  Sense strand starting at position 1244 of SEQ ID NO: 1241318
gaaugaagcgcugagaauu

SEQ ID NO: 1263213 - RNA, 19 nt, Artificial Sequence
  Description of Artificial Sequence: Synthetic oligonucleotide
  Antisense strand to SEQ ID NO: 1263212
aauucucagcgcuucauuc

SEQ ID NO: 1263214 - RNA, 19 nt, Artificial Sequence
  Description of Artificial Sequence: Synthetic oligonucleotide
  Sense strand starting at position 1847 of SEQ ID NO: 1241318
ggacacagcugguucagau

SEQ ID NO: 1263215 - RNA, 19 nt, Artificial Sequence
  Description of Artificial Sequence: Synthetic oligonucleotide
  Antisense strand to SEQ ID NO: 1263214
aucugaaccagcugugucc

SEQ ID NO: 1263216 - RNA, 19 nt, Artificial Sequence
  Description of Artificial Sequence: Synthetic oligonucleotide
  Sense strand starting at position 1882 of SEQ ID NO: 1241318
uggcuagacuccucacaac

SEQ ID NO: 1263217 - RNA, 19 nt, Artificial Sequence
  Description of Artificial Sequence: Synthetic oligonucleotide
  Antisense strand to SEQ ID NO: 1263216
guugugaggagucuagcca

SEQ ID NO: 1263218 - RNA, 19 nt, Artificial Sequence
  Description of Artificial Sequence: Synthetic oligonucleotide
  Sense strand starting at position 2137 of SEQ ID NO: 1241318
aacguugucgccuccggaa

SEQ ID NO: 1263219 - RNA, 19 nt, Artificial Sequence
  Description of Artificial Sequence: Synthetic oligonucleotide
  Antisense strand to SEQ ID NO: 1263218
uuccggaggcgacaacguu

SEQ ID NO: 1263220 - RNA, 19 nt, Artificial Sequence
  Description of Artificial Sequence: Synthetic oligonucleotide
  Sense strand starting at position 2196 of SEQ ID NO: 1241318
cuagaaacucacgaucgau

SEQ ID NO: 1263221 - RNA, 19 nt, Artificial Sequence
  Description of Artificial Sequence: Synthetic oligonucleotide
  Antisense strand to SEQ ID NO: 1263220
aucgaucgugaguuucuag

SEQ ID NO: 1263222 - RNA, 19 nt, Artificial Sequence
  Description of Artificial Sequence: Synthetic oligonucleotide
  Sense strand starting at position 2204 of SEQ ID NO: 1241318
ucacgaucgauugggaaac

SEQ ID NO: 1263223 - RNA, 19 nt, Artificial Sequence
  Description of Artificial Sequence: Synthetic oligonucleotide
  Antisense strand to SEQ ID NO: 1263222
guuucccaaucgaucguga

SEQ ID NO: 1263224 - RNA, 19 nt, Artificial Sequence
  Description of Artificial Sequence: Synthetic oligonucleotide
  Sense strand starting at position 2405 of SEQ ID NO: 1241318
ccgauucucccuggcauuu

SEQ ID NO: 1263225 - RNA, 19 nt, Artificial Sequence
  Description of Artificial Sequence: Synthetic oligonucleotide
  Antisense strand to SEQ ID NO: 1263224
aaaugccagggagaaucgg

SEQ ID NO: 1263226 - RNA, 19 nt, Artificial Sequence
  Description of Artificial Sequence: Synthetic oligonucleotide
  Sense strand starting at position 2777 of SEQ ID NO: 1241318
cacucuaagcaguaggaau

SEQ ID NO: 1263227 - RNA, 19 nt, Artificial Sequence
  Description of Artificial Sequence: Synthetic oligonucleotide
  Antisense strand to SEQ ID NO: 1263226
auuccuacugcuuagagug

SEQ ID NO: 1263228 - RNA, 19 nt, Artificial Sequence
  Description of Artificial Sequence: Synthetic oligonucleotide
  Sense strand starting at position 2795 of SEQ ID NO: 1241318
ugaucaucuccauguuauu

SEQ ID NO: 1263229 - RNA, 19 nt, Artificial Sequence
  Description of Artificial Sequence: Synthetic oligonucleotide
  Antisense strand to SEQ ID NO: 1263228
aauaacauggagaugauca

SEQ ID NO: 1263230 - RNA, 19 nt, Artificial Sequence
  Description of Artificial Sequence: Synthetic oligonucleotide
  Sense strand starting at position 2805 of SEQ ID NO: 1241318
cauguuauuagaggugaag

SEQ ID NO: 1263231 - RNA, 19 nt, Artificial Sequence
  Description of Artificial Sequence: Synthetic oligonucleotide
  Antisense strand to SEQ ID NO: 1263230
cuucaccucuaauaacaug

SEQ ID NO: 1263232 - RNA, 19 nt, Artificial Sequence
  Description of Artificial Sequence: Synthetic oligonucleotide
  Sense strand starting at position 2807 of SEQ ID NO: 1241318
uguuauuagaggugaagau

SEQ ID NO: 1263233 - RNA, 19 nt, Artificial Sequence
  Description of Artificial Sequence: Synthetic oligonucleotide
  Antisense strand to SEQ ID NO: 1263232
aucuucaccucuaauaaca

SEQ ID NO: 1263234 - RNA, 19 nt, Artificial Sequence
  Description of Artificial Sequence: Synthetic oligonucleotide
  Sense strand starting at position 2881 of SEQ ID NO: 1241318
gccucuggagucuacauau

SEQ ID NO: 1263235 - RNA, 19 nt, Artificial Sequence
  Description of Artificial Sequence: Synthetic oligonucleotide
  Antisense strand to SEQ ID NO: 1263234
auauguagacuccagaggc

SEQ ID NO: 1263236 - RNA, 19 nt, Artificial Sequence
  Description of Artificial Sequence: Synthetic oligonucleotide
  Sense strand starting at position 2963 of SEQ ID NO: 1241318
gaauguggauaguuguuga

SEQ ID NO: 1263237 - RNA, 19 nt, Artificial Sequence
  Description of Artificial Sequence: Synthetic oligonucleotide
  Antisense strand to SEQ ID NO: 1263236
ucaacaacuauccacauuc

SEQ ID NO: 1263238 - RNA, 19 nt, Artificial Sequence
  Description of Artificial Sequence: Synthetic oligonucleotide
  Sense strand starting at position 2982 of SEQ ID NO: 1241318
agcuguguccauuauacua

SEQ ID NO: 1263239 - RNA, 19 nt, Artificial Sequence
  Description of Artificial Sequence: Synthetic oligonucleotide
  Antisense strand to SEQ ID NO: 1263238
uaguauaauggacacagcu

SEQ ID NO: 1263240 - RNA, 19 nt, Artificial Sequence
  Description of Artificial Sequence: Synthetic oligonucleotide
  Sense strand starting at position 3176 of SEQ ID NO: 1241318
gggacuauugugcaaccaa

SEQ ID NO: 1263241 - RNA, 19 nt, Artificial Sequence
  Description of Artificial Sequence: Synthetic oligonucleotide
  Antisense strand to SEQ ID NO: 1263240
uugguugcacaauaguccc

SEQ ID NO: 1263242 - RNA, 19 nt, Artificial Sequence
  Description of Artificial Sequence: Synthetic oligonucleotide
  Sense strand starting at position 3304 of SEQ ID NO: 1241318
ucuaaugauugaucuggau

SEQ ID NO: 1263243 - RNA, 19 nt, Artificial Sequence
  Description of Artificial Sequence: Synthetic oligonucleotide
  Antisense strand to SEQ ID NO: 1263242
auccagaucaaucauuaga

SEQ ID NO: 1263244 - RNA, 19 nt, Artificial Sequence
  Description of Artificial Sequence: Synthetic oligonucleotide
  Sense strand starting at position 3310 of SEQ ID NO: 1241318
gauugaucuggaugcuggu

SEQ ID NO: 1263245 - RNA, 19 nt, Artificial Sequence
  Description of Artificial Sequence: Synthetic oligonucleotide
  Antisense strand to SEQ ID NO: 1263244
accagcauccagaucaauc

SEQ ID NO: 1263246 - RNA, 19 nt, Artificial Sequence
  Description of Artificial Sequence: Synthetic oligonucleotide
  Sense strand starting at position 3358 of SEQ ID NO: 1241318
ugaagucuuauguauguua

SEQ ID NO: 1263247 - RNA, 19 nt, Artificial Sequence
  Description of Artificial Sequence: Synthetic oligonucleotide
  Antisense strand to SEQ ID NO: 1263246
uaacauacauaagacuuca

SEQ ID NO: 1263248 - RNA, 19 nt, Artificial Sequence
  Description of Artificial Sequence: Synthetic oligonucleotide
  Sense strand starting at position 3423 of SEQ ID NO: 1241318
auugaaggguuuccaauau

SEQ ID NO: 1263249 - RNA, 19 nt, Artificial Sequence
  Description of Artificial Sequence: Synthetic oligonucleotide
  Antisense strand to SEQ ID NO: 1263248
auauuggaaacccuucaau

SEQ ID NO: 1263250 - RNA, 19 nt, Artificial Sequence
  Description of Artificial Sequence: Synthetic oligonucleotide
  Sense strand starting at position 3460 of SEQ ID NO: 1241318
guagaauauugguaauuuc

SEQ ID NO: 1263251 - RNA, 19 nt, Artificial Sequence
  Description of Artificial Sequence: Synthetic oligonucleotide
  Antisense strand to SEQ ID NO: 1263250
gaaauuaccaauauucuac

SEQ ID NO: 1263252 - RNA, 19 nt, Artificial Sequence
  Description of Artificial Sequence: Synthetic oligonucleotide
  Sense strand starting at position 3523 of SEQ ID NO: 1241318
cagaacuguguguaaagca

SEQ ID NO: 1263253 - RNA, 19 nt, Artificial Sequence
  Description of Artificial Sequence: Synthetic oligonucleotide
  Antisense strand to SEQ ID NO: 1263252
ugcuuuacacacaguucug

SEQ ID NO: 1263254 - RNA, 19 nt, Artificial Sequence
  Description of Artificial Sequence: Synthetic oligonucleotide
  Sense strand starting at position 3630 of SEQ ID NO: 1241318
ccaugaguauuauuggucu

SEQ ID NO: 1263255 - RNA, 19 nt, Artificial Sequence
  Description of Artificial Sequence: Synthetic oligonucleotide
  Antisense strand to SEQ ID NO: 1263254
agaccaauaauacucaugg

SEQ ID NO: 1263256 - RNA, 19 nt, Artificial Sequence
  Description of Artificial Sequence: Synthetic oligonucleotide
  Sense strand starting at position 3633 of SEQ ID NO: 1241318
ugaguauuauuggucuuag

SEQ ID NO: 1263257 - RNA, 19 nt, Artificial Sequence
  Description of Artificial Sequence: Synthetic oligonucleotide
  Antisense strand to SEQ ID NO: 1263256
cuaagaccaauaauacuca

SEQ ID NO: 1263258 - RNA, 19 nt, Artificial Sequence
  Description of Artificial Sequence: Synthetic oligonucleotide
  Sense strand starting at position 3686 of SEQ ID NO: 1241318
ugguuuaugcaauaacauu

SEQ ID NO: 1263259 - RNA, 19 nt, Artificial Sequence
  Description of Artificial Sequence: Synthetic oligonucleotide
  Antisense strand to SEQ ID NO: 1263258
aauguuauugcauaaacca

SEQ ID NO: 1263260 - RNA, 19 nt, Artificial Sequence
  Description of Artificial Sequence: Synthetic oligonucleotide
  Sense strand starting at position 110 of SEQ ID NO: 1241319
caacacagugaaugugaaa

SEQ ID NO: 1263261 - RNA, 19 nt, Artificial Sequence
  Description of Artificial Sequence: Synthetic oligonucleotide
  Antisense strand to SEQ ID NO: 1263260
uuucacauucacuguguug

SEQ ID NO: 1263262 - RNA, 19 nt, Artificial Sequence
  Description of Artificial Sequence: Synthetic oligonucleotide
  Sense strand starting at position 189 of SEQ ID NO: 1241319
auaagagcuuuacuguaag

SEQ ID NO: 1263263 - RNA, 19 nt, Artificial Sequence
  Description of Artificial Sequence: Synthetic oligonucleotide
  Antisense strand to SEQ ID NO: 1263262
cuuacaguaaagcucuuau

SEQ ID NO: 1263264 - RNA, 19 nt, Artificial Sequence
  Description of Artificial Sequence: Synthetic oligonucleotide
  Sense strand starting at position 200 of SEQ ID NO: 1241319
acuguaagguucuuuagaa

SEQ ID NO: 1263265 - RNA, 19 nt, Artificial Sequence
  Description of Artificial Sequence: Synthetic oligonucleotide
  Antisense strand to SEQ ID NO: 1263264
uucuaaagaaccuuacagu

SEQ ID NO: 1263266 - RNA, 19 nt, Artificial Sequence
  Description of Artificial Sequence: Synthetic oligonucleotide
  Sense strand starting at position 201 of SEQ ID NO: 1241319
cuguaagguucuuuagaau

SEQ ID NO: 1263267 - RNA, 19 nt, Artificial Sequence
  Description of Artificial Sequence: Synthetic oligonucleotide
  Antisense strand to SEQ ID NO: 1263266
auucuaaagaaccuuacag

SEQ ID NO: 1263268 - RNA, 19 nt, Artificial Sequence
  Description of Artificial Sequence: Synthetic oligonucleotide
  Sense strand starting at position 207 of SEQ ID NO: 1241319
gguucuuuagaauauccau

SEQ ID NO: 1263269 - RNA, 19 nt, Artificial Sequence
  Description of Artificial Sequence: Synthetic oligonucleotide
  Antisense strand to SEQ ID NO: 1263268
auggauauucuaaagaacc

SEQ ID NO: 1263270 - RNA, 19 nt, Artificial Sequence
  Description of Artificial Sequence: Synthetic oligonucleotide
  Sense strand starting at position 274 of SEQ ID NO: 1241319
aaugaugauugggagggau

SEQ ID NO: 1263271 - RNA, 19 nt, Artificial Sequence
  Description of Artificial Sequence: Synthetic oligonucleotide
  Antisense strand to SEQ ID NO: 1263270
aucccucccaaucaucauu

SEQ ID NO: 1263272 - RNA, 19 nt, Artificial Sequence
  Description of Artificial Sequence: Synthetic oligonucleotide
  Sense strand starting at position 303 of SEQ ID NO: 1241319
aauauaaggcguuaguucu

SEQ ID NO: 1263273 - RNA, 19 nt, Artificial Sequence
  Description of Artificial Sequence: Synthetic oligonucleotide
  Antisense strand to SEQ ID NO: 1263272
agaacuaacgccuuauauu

SEQ ID NO: 1263274 - RNA, 19 nt, Artificial Sequence
  Description of Artificial Sequence: Synthetic oligonucleotide
  Sense strand starting at position 320 of SEQ ID NO: 1241319
cuggaauuacagugaaguc

SEQ ID NO: 1263275 - RNA, 19 nt, Artificial Sequence
  Description of Artificial Sequence: Synthetic oligonucleotide
  Antisense strand to SEQ ID NO: 1263274
gacuucacuguaauuccag

SEQ ID NO: 1263276 - RNA, 19 nt, Artificial Sequence
  Description of Artificial Sequence: Synthetic oligonucleotide
  Sense strand starting at position 329 of SEQ ID NO: 1241319
cagugaaguccugaugcaa

SEQ ID NO: 1263277 - RNA, 19 nt, Artificial Sequence
  Description of Artificial Sequence: Synthetic oligonucleotide
  Antisense strand to SEQ ID NO: 1263276
uugcaucaggacuucacug

SEQ ID NO: 1263278 - RNA, 19 nt, Artificial Sequence
  Description of Artificial Sequence: Synthetic oligonucleotide
  Sense strand starting at position 351 of SEQ ID NO: 1241319
cagaacaguuaugugcuua

SEQ ID NO: 1263279 - RNA, 19 nt, Artificial Sequence
  Description of Artificial Sequence: Synthetic oligonucleotide
  Antisense strand to SEQ ID NO: 1263278
uaagcacauaacuguucug

SEQ ID NO: 1263280 - RNA, 19 nt, Artificial Sequence
  Description of Artificial Sequence: Synthetic oligonucleotide
  Sense strand starting at position 564 of SEQ ID NO: 1241319
gaaacuauuucugguaaga

SEQ ID NO: 1263281 - RNA, 19 nt, Artificial Sequence
  Description of Artificial Sequence: Synthetic oligonucleotide
  Antisense strand to SEQ ID NO: 1263280
ucuuaccagaaauaguuuc

SEQ ID NO: 1263282 - RNA, 19 nt, Artificial Sequence
  Description of Artificial Sequence: Synthetic oligonucleotide
  Sense strand starting at position 832 of SEQ ID NO: 1241319
agaaguggugucuguuaaa

SEQ ID NO: 1263283 - RNA, 19 nt, Artificial Sequence
  Description of Artificial Sequence: Synthetic oligonucleotide
  Antisense strand to SEQ ID NO: 1263282
uuuaacagacaccacuucu

SEQ ID NO: 1263284 - RNA, 19 nt, Artificial Sequence
  Description of Artificial Sequence: Synthetic oligonucleotide
  Sense strand starting at position 857 of SEQ ID NO: 1241319
guccaccacuguuuauaaa

SEQ ID NO: 1263285 - RNA, 19 nt, Artificial Sequence
  Description of Artificial Sequence: Synthetic oligonucleotide
  Antisense strand to SEQ ID NO: 1263284
uuuauaaacagugguggac

SEQ ID NO: 1263286 - RNA, 19 nt, Artificial Sequence
  Description of Artificial Sequence: Synthetic oligonucleotide
  Sense strand starting at position 897 of SEQ ID NO: 1241319
ugccuuuccgcucaaggaa

SEQ ID NO: 1263287 - RNA, 19 nt, Artificial Sequence
  Description of Artificial Sequence: Synthetic oligonucleotide
  Antisense strand to SEQ ID NO: 1263286
uuccuugagcggaaaggca

SEQ ID NO: 1263288 - RNA, 19 nt, Artificial Sequence
  Description of Artificial Sequence: Synthetic oligonucleotide
  Sense strand starting at position 976 of SEQ ID NO: 1241319
gcacguauuaugcacagaa

SEQ ID NO: 1263289 - RNA, 19 nt, Artificial Sequence
  Description of Artificial Sequence: Synthetic oligonucleotide
  Antisense strand to SEQ ID NO: 1263288
uucugugcauaauacgugc

SEQ ID NO: 1263290 - RNA, 19 nt, Artificial Sequence
  Description of Artificial Sequence: Synthetic oligonucleotide
  Sense strand starting at position 978 of SEQ ID NO: 1241319
acguauuaugcacagaauc

SEQ ID NO: 1263291 - RNA, 19 nt, Artificial Sequence
  Description of Artificial Sequence: Synthetic oligonucleotide
  Antisense strand to SEQ ID NO: 1263290
gauucugugcauaauacgu

SEQ ID NO: 1263292 - RNA, 19 nt, Artificial Sequence
  Description of Artificial Sequence: Synthetic oligonucleotide
  Sense strand starting at position 1220 of SEQ ID NO: 1241319
uaguucucggcggcgaauu

SEQ ID NO: 1263293 - RNA, 19 nt, Artificial Sequence
  Description of Artificial Sequence: Synthetic oligonucleotide
  Antisense strand to SEQ ID NO: 1263292
aauucgccgccgagaacua

SEQ ID NO: 1263294 - RNA, 19 nt, Artificial Sequence
  Description of Artificial Sequence: Synthetic oligonucleotide
  Sense strand starting at position 2213 of SEQ ID NO: 1241319
ggcgguacucugguuuagu

SEQ ID NO: 1263295 - RNA, 19 nt, Artificial Sequence
  Description of Artificial Sequence: Synthetic oligonucleotide
  Antisense strand to SEQ ID NO: 1263294
acuaaaccagaguaccgcc

SEQ ID NO: 1263296 - RNA, 19 nt, Artificial Sequence
  Description of Artificial Sequence: Synthetic oligonucleotide
  Sense strand starting at position 2567 of SEQ ID NO: 1241319
ggcaaagggaucugagauc

SEQ ID NO: 1263297 - RNA, 19 nt, Artificial Sequence
  Description of Artificial Sequence: Synthetic oligonucleotide
  Antisense strand to SEQ ID NO: 1263296
gaucucagaucccuuugcc

SEQ ID NO: 1263298 - RNA, 19 nt, Artificial Sequence
  Description of Artificial Sequence: Synthetic oligonucleotide
  Sense strand starting at position 2726 of SEQ ID NO: 1241319
ugguaucccuaacuuagau

SEQ ID NO: 1263299 - RNA, 19 nt, Artificial Sequence
  Description of Artificial Sequence: Synthetic oligonucleotide
  Antisense strand to SEQ ID NO: 1263298
aucuaaguuagggauacca

SEQ ID NO: 1263300 - RNA, 19 nt, Artificial Sequence
  Description of Artificial Sequence: Synthetic oligonucleotide
  Sense strand starting at position 2786 of SEQ ID NO: 1241319
aguaaacucugguugcaaa

SEQ ID NO: 1263301 - RNA, 19 nt, Artificial Sequence
  Description of Artificial Sequence: Synthetic oligonucleotide
  Antisense strand to SEQ ID NO: 1263300
uuugcaaccagaguuuacu

SEQ ID NO: 1263302 - RNA, 19 nt, Artificial Sequence
  Description of Artificial Sequence: Synthetic oligonucleotide
  Sense strand starting at position 2787 of SEQ ID NO: 1241319
guaaacucugguugcaaag

SEQ ID NO: 1263303 - RNA, 19 nt, Artificial Sequence
  Description of Artificial Sequence: Synthetic oligonucleotide
  Antisense strand to SEQ ID NO: 1263302
cuuugcaaccagaguuuac

SEQ ID NO: 1263304 - RNA, 19 nt, Artificial Sequence
  Description of Artificial Sequence: Synthetic oligonucleotide
  Sense strand starting at position 2822 of SEQ ID NO: 1241319
aagauuaagugacuuuaug

SEQ ID NO: 1263305 - RNA, 19 nt, Artificial Sequence
  Description of Artificial Sequence: Synthetic oligonucleotide
  Antisense strand to SEQ ID NO: 1263304
cauaaagucacuuaaucuu

SEQ ID NO: 1263306 - RNA, 19 nt, Artificial Sequence
  Description of Artificial Sequence: Synthetic oligonucleotide
  Sense strand starting at position 2836 of SEQ ID NO: 1241319
uuauguaauaaucgagggu

SEQ ID NO: 1263307 - RNA, 19 nt, Artificial Sequence
  Description of Artificial Sequence: Synthetic oligonucleotide
  Antisense strand to SEQ ID NO: 1263306
acccucgauuauuacauaa

SEQ ID NO: 1263308 - RNA, 19 nt, Artificial Sequence
  Description of Artificial Sequence: Synthetic oligonucleotide
  Sense strand starting at position 3167 of SEQ ID NO: 1241319
cauggugugguuuaucaau

SEQ ID NO: 1263309 - RNA, 19 nt, Artificial Sequence
  Description of Artificial Sequence: Synthetic oligonucleotide
  Antisense strand to SEQ ID NO: 1263308
auugauaaaccacaccaug

SEQ ID NO: 1263310 - RNA, 19 nt, Artificial Sequence
  Description of Artificial Sequence: Synthetic oligonucleotide
  Sense strand starting at position 3281 of SEQ ID NO: 1241319
uggguucggcaggaugaaa

SEQ ID NO: 1263311 - RNA, 19 nt, Artificial Sequence
  Description of Artificial Sequence: Synthetic oligonucleotide
  Antisense strand to SEQ ID NO: 1263310
uuucauccugccgaaccca

SEQ ID NO: 1263312 - RNA, 19 nt, Artificial Sequence
  Description of Artificial Sequence: Synthetic oligonucleotide
  Sense strand starting at position 3338 of SEQ ID NO: 1241319
ucgaguuaugaauaaugcu

SEQ ID NO: 1263313 - RNA, 19 nt, Artificial Sequence
  Description of Artificial Sequence: Synthetic oligonucleotide
  Antisense strand to SEQ ID NO: 1263312
agcauuauucauaacucga

SEQ ID NO: 1263314 - RNA, 19 nt, Artificial Sequence
  Description of Artificial Sequence: Synthetic oligonucleotide
  Sense strand starting at position 3374 of SEQ ID NO: 1241319
agucuuuauguggacguau

SEQ ID NO: 1263315 - RNA, 19 nt, Artificial Sequence
  Description of Artificial Sequence: Synthetic oligonucleotide
  Antisense strand to SEQ ID NO: 1263314
auacguccacauaaagacu

SEQ ID NO: 1263316 - RNA, 19 nt, Artificial Sequence
  Description of Artificial Sequence: Synthetic oligonucleotide
  Sense strand starting at position 3424 of SEQ ID NO: 1241319
augaaagugaugggucgua

SEQ ID NO: 1263317 - RNA, 19 nt, Artificial Sequence
  Description of Artificial Sequence: Synthetic oligonucleotide
  Antisense strand to SEQ ID NO: 1263316
uacgacccaucacuuucau

SEQ ID NO: 1263318 - RNA, 19 nt, Artificial Sequence
  Description of Artificial Sequence: Synthetic oligonucleotide
  Sense strand starting at position 3442 of SEQ ID NO: 1241319
aggguaguucuauguauaa

SEQ ID NO: 1263319 - RNA, 19 nt, Artificial Sequence
  Description of Artificial Sequence: Synthetic oligonucleotide
  Antisense strand to SEQ ID NO: 1263318
uuauacauagaacuacccu

SEQ ID NO: 1263320 - RNA, 19 nt, Artificial Sequence
  Description of Artificial Sequence: Synthetic oligonucleotide
  Sense strand starting at position 3444 of SEQ ID NO: 1241319
gguaguucuauguauaacu

SEQ ID NO: 1263321 - RNA, 19 nt, Artificial Sequence
  Description of Artificial Sequence: Synthetic oligonucleotide
  Antisense strand to SEQ ID NO: 1263320
aguuauacauagaacuacc

SEQ ID NO: 1263322 - RNA, 19 nt, Artificial Sequence
  Description of Artificial Sequence: Synthetic oligonucleotide
  Sense strand starting at position 3566 of SEQ ID NO: 1241319
cuagaaaugcacuguaauu

SEQ ID NO: 1263323 - RNA, 19 nt, Artificial Sequence
  Description of Artificial Sequence: Synthetic oligonucleotide
  Antisense strand to SEQ ID NO: 1263322
aauuacagugcauuucuag

SEQ ID NO: 1263324 - RNA, 19 nt, Artificial Sequence
  Description of Artificial Sequence: Synthetic oligonucleotide
  Sense strand starting at position 3576 of SEQ ID NO: 1241319
acuguaauuugagauugau

SEQ ID NO: 1263325 - RNA, 19 nt, Artificial Sequence
  Description of Artificial Sequence: Synthetic oligonucleotide
  Antisense strand to SEQ ID NO: 1263324
aucaaucucaaauuacagu

SEQ ID NO: 1263326 - RNA, 19 nt, Artificial Sequence
  Description of Artificial Sequence: Synthetic oligonucleotide
  Sense strand starting at position 3636 of SEQ ID NO: 1241319
ggagaucauuaauaauuag

SEQ ID NO: 1263327 - RNA, 19 nt, Artificial Sequence
  Description of Artificial Sequence: Synthetic oligonucleotide
  Antisense strand to SEQ ID NO: 1263326
cuaauuauuaaugaucucc

SEQ ID NO: 1263328 - RNA, 19 nt, Artificial Sequence
  Description of Artificial Sequence: Synthetic oligonucleotide
  Sense strand starting at position 3666 of SEQ ID NO: 1241319
uaggaaugguuccugagua

SEQ ID NO: 1263329 - RNA, 19 nt, Artificial Sequence
  Description of Artificial Sequence: Synthetic oligonucleotide
  Antisense strand to SEQ ID NO: 1263328
uacucaggaaccauuccua

SEQ ID NO: 1263330 - RNA, 19 nt, Artificial Sequence
  Description of Artificial Sequence: Synthetic oligonucleotide
  Sense strand starting at position 3697 of SEQ ID NO: 1241319
gucagucugccauaaauga

SEQ ID NO: 1263331 - RNA, 19 nt, Artificial Sequence
  Description of Artificial Sequence: Synthetic oligonucleotide
  Antisense strand to SEQ ID NO: 1263330
ucauuuauggcagacugac

SEQ ID NO: 1263332 - RNA, 19 nt, Artificial Sequence
  Description of Artificial Sequence: Synthetic oligonucleotide
  Sense strand starting at position 3746 of SEQ ID NO: 1241319
ucuuaaaugaaguguggua

SEQ ID NO: 1263333 - RNA, 19 nt, Artificial Sequence
  Description of Artificial Sequence: Synthetic oligonucleotide
  Antisense strand to SEQ ID NO: 1263332
uaccacacuucauuuaaga

SEQ ID NO: 1263334 - RNA, 19 nt, Artificial Sequence
  Description of Artificial Sequence: Synthetic oligonucleotide
  Sense strand starting at position 3921 of SEQ ID NO: 1241319
cauguuaagugaguuagau

SEQ ID NO: 1263335 - RNA, 19 nt, Artificial Sequence
  Description of Artificial Sequence: Synthetic oligonucleotide
  Antisense strand to SEQ ID NO: 1263334
aucuaacucacuuaacaug

SEQ ID NO: 1263336 - RNA, 19 nt, Artificial Sequence
  Description of Artificial Sequence: Synthetic oligonucleotide
  Sense strand starting at position 3923 of SEQ ID NO: 1241319
uguuaagugaguuagauuc

SEQ ID NO: 1263337 - RNA, 19 nt, Artificial Sequence
  Description of Artificial Sequence: Synthetic oligonucleotide
  Antisense strand to SEQ ID NO: 1263336
gaaucuaacucacuuaaca

SEQ ID NO: 1263338 - RNA, 19 nt, Artificial Sequence
  Description of Artificial Sequence: Synthetic oligonucleotide
  Sense strand starting at position 3976 of SEQ ID NO: 1241319
ugacucauauaggacagaa

SEQ ID NO: 1263339 - RNA, 19 nt, Artificial Sequence
  Description of Artificial Sequence: Synthetic oligonucleotide
  Antisense strand to SEQ ID NO: 1263338
uucuguccuauaugaguca

SEQ ID NO: 1263340 - RNA, 19 nt, Artificial Sequence
  Description of Artificial Sequence: Synthetic oligonucleotide
  Sense strand starting at position 23 of SEQ ID NO: 1241320
cuuccaucugcauguugau

SEQ ID NO: 1263341 - RNA, 19 nt, Artificial Sequence
  Description of Artificial Sequence: Synthetic oligonucleotide
  Antisense strand to SEQ ID NO: 1263340
aucaacaugcagauggaag

SEQ ID NO: 1263342 - RNA, 19 nt, Artificial Sequence
  Description of Artificial Sequence: Synthetic oligonucleotide
  Sense strand starting at position 52 of SEQ ID NO: 1241320
gagagacaguaucuuauca

SEQ ID NO: 1263343 - RNA, 19 nt, Artificial Sequence
  Description of Artificial Sequence: Synthetic oligonucleotide
  Antisense strand to SEQ ID NO: 1263342
ugauaagauacugucucuc

SEQ ID NO: 1263344 - RNA, 19 nt, Artificial Sequence
  Description of Artificial Sequence: Synthetic oligonucleotide
  Sense strand starting at position 143 of SEQ ID NO: 1241320
agucaaggucagugaggaa

SEQ ID NO: 1263345 - RNA, 19 nt, Artificial Sequence
  Description of Artificial Sequence: Synthetic oligonucleotide
  Antisense strand to SEQ ID NO: 1263344
uuccucacugaccuugacu

SEQ ID NO: 1263346 - RNA, 19 nt, Artificial Sequence
  Description of Artificial Sequence: Synthetic oligonucleotide
  Sense strand starting at position 150 of SEQ ID NO: 1241320
gucagugaggaaggauuaa

SEQ ID NO: 1263347 - RNA, 19 nt, Artificial Sequence
  Description of Artificial Sequence: Synthetic oligonucleotide
  Antisense strand to SEQ ID NO: 1263346
uuaauccuuccucacugac

SEQ ID NO: 1263348 - RNA, 19 nt, Artificial Sequence
  Description of Artificial Sequence: Synthetic oligonucleotide
  Sense strand starting at position 321 of SEQ ID NO: 1241320
gugacuagcuucucuucca

SEQ ID NO: 1263349 - RNA, 19 nt, Artificial Sequence
  Description of Artificial Sequence: Synthetic oligonucleotide
  Antisense strand to SEQ ID NO: 1263348
uggaagagaagcuagucac

SEQ ID NO: 1263350 - RNA, 19 nt, Artificial Sequence
  Description of Artificial Sequence: Synthetic oligonucleotide
  Sense strand starting at position 337 of SEQ ID NO: 1241320
ccaguuagaucucuucuga

SEQ ID NO: 1263351 - RNA, 19 nt, Artificial Sequence
  Description of Artificial Sequence: Synthetic oligonucleotide
  Antisense strand to SEQ ID NO: 1263350
ucagaagagaucuaacugg

SEQ ID NO: 1263352 - RNA, 19 nt, Artificial Sequence
  Description of Artificial Sequence: Synthetic oligonucleotide
  Sense strand starting at position 352 of SEQ ID NO: 1241320
cugaaagcuuuggaagaaa

SEQ ID NO: 1263353 - RNA, 19 nt, Artificial Sequence
  Description of Artificial Sequence: Synthetic oligonucleotide
  Antisense strand to SEQ ID NO: 1263352
uuucuuccaaagcuuucag

SEQ ID NO: 1263354 - RNA, 19 nt, Artificial Sequence
  Description of Artificial Sequence: Synthetic oligonucleotide
  Sense strand starting at position 440 of SEQ ID NO: 1241320
uuaguuaccuauccagaca

SEQ ID NO: 1263355 - RNA, 19 nt, Artificial Sequence
  Description of Artificial Sequence: Synthetic oligonucleotide
  Antisense strand to SEQ ID NO: 1263354
ugucuggauagguaacuaa

SEQ ID NO: 1263356 - RNA, 19 nt, Artificial Sequence
  Description of Artificial Sequence: Synthetic oligonucleotide
  Sense strand starting at position 456 of SEQ ID NO: 1241320
acaagcgguccuggaauau

SEQ ID NO: 1263357 - RNA, 19 nt, Artificial Sequence
  Description of Artificial Sequence: Synthetic oligonucleotide
  Antisense strand to SEQ ID NO: 1263356
auauuccaggaccgcuugu

SEQ ID NO: 1263358 - RNA, 19 nt, Artificial Sequence
  Description of Artificial Sequence: Synthetic oligonucleotide
  Sense strand starting at position 631 of SEQ ID NO: 1241320
agacaaauguuggauuaau

SEQ ID NO: 1263359 - RNA, 19 nt, Artificial Sequence
  Description of Artificial Sequence: Synthetic oligonucleotide
  Antisense strand to SEQ ID NO: 1263358
auuaauccaacauuugucu

SEQ ID NO: 1263360 - RNA, 19 nt, Artificial Sequence
  Description of Artificial Sequence: Synthetic oligonucleotide
  Sense strand starting at position 744 of SEQ ID NO: 1241320
gcagauagauguccaguua

SEQ ID NO: 1263361 - RNA, 19 nt, Artificial Sequence
  Description of Artificial Sequence: Synthetic oligonucleotide
  Antisense strand to SEQ ID NO: 1263360
uaacuggacaucuaucugc

SEQ ID NO: 1263362 - RNA, 19 nt, Artificial Sequence
  Description of Artificial Sequence: Synthetic oligonucleotide
  Sense strand starting at position 822 of SEQ ID NO: 1241320
aguaauucugauugcaaac

SEQ ID NO: 1263363 - RNA, 19 nt, Artificial Sequence
  Description of Artificial Sequence: Synthetic oligonucleotide
  Antisense strand to SEQ ID NO: 1263362
guuugcaaucagaauuacu

SEQ ID NO: 1263364 - RNA, 19 nt, Artificial Sequence
  Description of Artificial Sequence: Synthetic oligonucleotide
  Sense strand starting at position 933 of SEQ ID NO: 1241320
gucuuauacugagcuguac

SEQ ID NO: 1263365 - RNA, 19 nt, Artificial Sequence
  Description of Artificial Sequence: Synthetic oligonucleotide
  Antisense strand to SEQ ID NO: 1263364
guacagcucaguauaagac

SEQ ID NO: 1263366 - RNA, 19 nt, Artificial Sequence
  Description of Artificial Sequence: Synthetic oligonucleotide
  Sense strand starting at position 955 of SEQ ID NO: 1241320
caacgcuugcuggacaaga

SEQ ID NO: 1263367 - RNA, 19 nt, Artificial Sequence
  Description of Artificial Sequence: Synthetic oligonucleotide
  Antisense strand to SEQ ID NO: 1263366
ucuuguccagcaagcguug

SEQ ID NO: 1263368 - RNA, 19 nt, Artificial Sequence
  Description of Artificial Sequence: Synthetic oligonucleotide
  Sense strand starting at position 1198 of SEQ ID NO: 1241320
ugacuucaucguggacuga

SEQ ID NO: 1263369 - RNA, 19 nt, Artificial Sequence
  Description of Artificial Sequence: Synthetic oligonucleotide
  Antisense strand to SEQ ID NO: 1263368
ucaguccacgaugaaguca

SEQ ID NO: 1263370 - RNA, 19 nt, Artificial Sequence
  Description of Artificial Sequence: Synthetic oligonucleotide
  Sense strand starting at position 2089 of SEQ ID NO: 1241320
agugguagagaaugaaagu

SEQ ID NO: 1263371 - RNA, 19 nt, Artificial Sequence
  Description of Artificial Sequence: Synthetic oligonucleotide
  Antisense strand to SEQ ID NO: 1263370
acuuucauucucuaccacu

SEQ ID NO: 1263372 - RNA, 19 nt, Artificial Sequence
  Description of Artificial Sequence: Synthetic oligonucleotide
  Sense strand starting at position 2104 of SEQ ID NO: 1241320
aaguuugagcacgacugua

SEQ ID NO: 1263373 - RNA, 19 nt, Artificial Sequence
  Description of Artificial Sequence: Synthetic oligonucleotide
  Antisense strand to SEQ ID NO: 1263372
uacagucgugcucaaacuu

SEQ ID NO: 1263374 - RNA, 19 nt, Artificial Sequence
  Description of Artificial Sequence: Synthetic oligonucleotide
  Sense strand starting at position 2187 of SEQ ID NO: 1241320
acaugucaaguuuaugaau

SEQ ID NO: 1263375 - RNA, 19 nt, Artificial Sequence
  Description of Artificial Sequence: Synthetic oligonucleotide
  Antisense strand to SEQ ID NO: 1263374
auucauaaacuugacaugu

SEQ ID NO: 1263376 - RNA, 19 nt, Artificial Sequence
  Description of Artificial Sequence: Synthetic oligonucleotide
  Sense strand starting at position 2200 of SEQ ID NO: 1241320
augaauauucgugggugga

SEQ ID NO: 1263377 - RNA, 19 nt, Artificial Sequence
  Description of Artificial Sequence: Synthetic oligonucleotide
  Antisense strand to SEQ ID NO: 1263376
uccacccacgaauauucau

SEQ ID NO: 1263378 - RNA, 19 nt, Artificial Sequence
  Description of Artificial Sequence: Synthetic oligonucleotide
  Sense strand starting at position 2201 of SEQ ID NO: 1241320
ugaauauucguggguggac

SEQ ID NO: 1263379 - RNA, 19 nt, Artificial Sequence
  Description of Artificial Sequence: Synthetic oligonucleotide
  Antisense strand to SEQ ID NO: 1263378
guccacccacgaauauuca

SEQ ID NO: 1263380 - RNA, 19 nt, Artificial Sequence
  Description of Artificial Sequence: Synthetic oligonucleotide
  Sense strand starting at position 2215 of SEQ ID NO: 1241320
uggaccugaagcuguaaau

SEQ ID NO: 1263381 - RNA, 19 nt, Artificial Sequence
  Description of Artificial Sequence: Synthetic oligonucleotide
  Antisense strand to SEQ ID NO: 1263380
auuuacagcuucaggucca

SEQ ID NO: 1263382 - RNA, 19 nt, Artificial Sequence
  Description of Artificial Sequence: Synthetic oligonucleotide
  Sense strand starting at position 2224 of SEQ ID NO: 1241320
agcuguaaauggucucaga

SEQ ID NO: 1263383 - RNA, 19 nt, Artificial Sequence
  Description of Artificial Sequence: Synthetic oligonucleotide
  Antisense strand to SEQ ID NO: 1263382
ucugagaccauuuacagcu

SEQ ID NO: 1263384 - RNA, 19 nt, Artificial Sequence
  Description of Artificial Sequence: Synthetic oligonucleotide
  Sense strand starting at position 2340 of SEQ ID NO: 1241320
uuggaaaggucccuucuga

SEQ ID NO: 1263385 - RNA, 19 nt, Artificial Sequence
  Description of Artificial Sequence: Synthetic oligonucleotide
  Antisense strand to SEQ ID NO: 1263384
ucagaagggaccuuuccaa

SEQ ID NO: 1263386 - RNA, 19 nt, Artificial Sequence
  Description of Artificial Sequence: Synthetic oligonucleotide
  Sense strand starting at position 2429 of SEQ ID NO: 1241320
acuguuaaagucuguagaa

SEQ ID NO: 1263387 - RNA, 19 nt, Artificial Sequence
  Description of Artificial Sequence: Synthetic oligonucleotide
  Antisense strand to SEQ ID NO: 1263386
uucuacagacuuuaacagu

SEQ ID NO: 1263388 - RNA, 19 nt, Artificial Sequence
  Description of Artificial Sequence: Synthetic oligonucleotide
  Sense strand starting at position 2430 of SEQ ID NO: 1241320
cuguuaaagucuguagaag

SEQ ID NO: 1263389 - RNA, 19 nt, Artificial Sequence
  Description of Artificial Sequence: Synthetic oligonucleotide
  Antisense strand to SEQ ID NO: 1263388
cuucuacagacuuuaacag

SEQ ID NO: 1263390 - RNA, 19 nt, Artificial Sequence
  Description of Artificial Sequence: Synthetic oligonucleotide
  Sense strand starting at position 2446 of SEQ ID NO: 1241320
aagcuuaagggcugguuaa

SEQ ID NO: 1263391 - RNA, 19 nt, Artificial Sequence
  Description of Artificial Sequence: Synthetic oligonucleotide
  Antisense strand to SEQ ID NO: 1263390
uuaaccagcccuuaagcuu

SEQ ID NO: 1263392 - RNA, 19 nt, Artificial Sequence
  Description of Artificial Sequence: Synthetic oligonucleotide
  Sense strand starting at position 2447 of SEQ ID NO: 1241320
agcuuaagggcugguuaau

SEQ ID NO: 1263393 - RNA, 19 nt, Artificial Sequence
  Description of Artificial Sequence: Synthetic oligonucleotide
  Antisense strand to SEQ ID NO: 1263392
auuaaccagcccuuaagcu

SEQ ID NO: 1263394 - RNA, 19 nt, Artificial Sequence
  Description of Artificial Sequence: Synthetic oligonucleotide
  Sense strand starting at position 2457 of SEQ ID NO: 1241320
cugguuaaugauggauaua

SEQ ID NO: 1263395 - RNA, 19 nt, Artificial Sequence
  Description of Artificial Sequence: Synthetic oligonucleotide
  Antisense strand to SEQ ID NO: 1263394
uauauccaucauuaaccag

SEQ ID NO: 1263396 - RNA, 19 nt, Artificial Sequence
  Description of Artificial Sequence: Synthetic oligonucleotide
  Sense strand starting at position 2637 of SEQ ID NO: 1241320
uuuacuacacuguaauagu

SEQ ID NO: 1263397 - RNA, 19 nt, Artificial Sequence
  Description of Artificial Sequence: Synthetic oligonucleotide
  Antisense strand to SEQ ID NO: 1263396
acuauuacaguguaguaaa

SEQ ID NO: 1263398 - RNA, 19 nt, Artificial Sequence
  Description of Artificial Sequence: Synthetic oligonucleotide
  Sense strand starting at position 2795 of SEQ ID NO: 1241320
ggacauaacuuguuuccuu

SEQ ID NO: 1263399 - RNA, 19 nt, Artificial Sequence
  Description of Artificial Sequence: Synthetic oligonucleotide
  Antisense strand to SEQ ID NO: 1263398
aaggaaacaaguuaugucc

SEQ ID NO: 1263400 - RNA, 19 nt, Artificial Sequence
  Description of Artificial Sequence: Synthetic oligonucleotide
  Sense strand starting at position 3246 of SEQ ID NO: 1241320
aaggguguuauaugguaca

SEQ ID NO: 1263401 - RNA, 19 nt, Artificial Sequence
  Description of Artificial Sequence: Synthetic oligonucleotide
  Antisense strand to SEQ ID NO: 1263400
uguaccauauaacacccuu

SEQ ID NO: 1263402 - RNA, 19 nt, Artificial Sequence
  Description of Artificial Sequence: Synthetic oligonucleotide
  Sense strand starting at position 3288 of SEQ ID NO: 1241320
gauuuaauaugugagcaau

SEQ ID NO: 1263403 - RNA, 19 nt, Artificial Sequence
  Description of Artificial Sequence: Synthetic oligonucleotide
  Antisense strand to SEQ ID NO: 1263402
auugcucacauauuaaauc

SEQ ID NO: 1263404 - RNA, 19 nt, Artificial Sequence
  Description of Artificial Sequence: Synthetic oligonucleotide
  Sense strand starting at position 3299 of SEQ ID NO: 1241320
ugagcaauauuagcucaau

SEQ ID NO: 1263405 - RNA, 19 nt, Artificial Sequence
  Description of Artificial Sequence: Synthetic oligonucleotide
  Antisense strand to SEQ ID NO: 1263404
auugagcuaauauugcuca

SEQ ID NO: 1263406 - RNA, 19 nt, Artificial Sequence
  Description of Artificial Sequence: Synthetic oligonucleotide
  Sense strand starting at position 3321 of SEQ ID NO: 1241320
ucaugaucauuugaagcuu

SEQ ID NO: 1263407 - RNA, 19 nt, Artificial Sequence
  Description of Artificial Sequence: Synthetic oligonucleotide
  Antisense strand to SEQ ID NO: 1263406
aagcuucaaaugaucauga

SEQ ID NO: 1263408 - RNA, 19 nt, Artificial Sequence
  Description of Artificial Sequence: Synthetic oligonucleotide
  Sense strand starting at position 3329 of SEQ ID NO: 1241320
auuugaagcuucuuuaugu

SEQ ID NO: 1263409 - RNA, 19 nt, Artificial Sequence
  Description of Artificial Sequence: Synthetic oligonucleotide
  Antisense strand to SEQ ID NO: 1263408
acauaaagaagcuucaaau

SEQ ID NO: 1263410 - RNA, 19 nt, Artificial Sequence
  Description of Artificial Sequence: Synthetic oligonucleotide
  Sense strand starting at position 3344 of SEQ ID NO: 1241320
augucauaguuagcucaaa

SEQ ID NO: 1263411 - RNA, 19 nt, Artificial Sequence
  Description of Artificial Sequence: Synthetic oligonucleotide
  Antisense strand to SEQ ID NO: 1263410
uuugagcuaacuaugacau

SEQ ID NO: 1263412 - RNA, 19 nt, Artificial Sequence
  Description of Artificial Sequence: Synthetic oligonucleotide
  Sense strand starting at position 3740 of SEQ ID NO: 1241320
uugauuccuguugauuaga

SEQ ID NO: 1263413 - RNA, 19 nt, Artificial Sequence
  Description of Artificial Sequence: Synthetic oligonucleotide
  Antisense strand to SEQ ID NO: 1263412
ucuaaucaacaggaaucaa

SEQ ID NO: 1263414 - RNA, 19 nt, Artificial Sequence
  Description of Artificial Sequence: Synthetic oligonucleotide
  Sense strand starting at position 3956 of SEQ ID NO: 1241320
ccaugccuagccuaugaau

SEQ ID NO: 1263415 - RNA, 19 nt, Artificial Sequence
  Description of Artificial Sequence: Synthetic oligonucleotide
  Antisense strand to SEQ ID NO: 1263414
auucauaggcuaggcaugg

SEQ ID NO: 1263416 - RNA, 19 nt, Artificial Sequence
  Description of Artificial Sequence: Synthetic oligonucleotide
  Sense strand starting at position 3958 of SEQ ID NO: 1241320
augccuagccuaugaauua

SEQ ID NO: 1263417 - RNA, 19 nt, Artificial Sequence
  Description of Artificial Sequence: Synthetic oligonucleotide
  Antisense strand to SEQ ID NO: 1263416
uaauucauaggcuaggcau

SEQ ID NO: 1263418 - RNA, 19 nt, Artificial Sequence
  Description of Artificial Sequence: Synthetic oligonucleotide
  Sense strand starting at position 3965 of SEQ ID NO: 1241320
gccuaugaauuauugauua

SEQ ID NO: 1263419 - RNA, 19 nt, Artificial Sequence
  Description of Artificial Sequence: Synthetic oligonucleotide
  Antisense strand to SEQ ID NO: 1263418
uaaucaauaauucauaggc

SEQ ID NO: 1263420 - RNA, 19 nt, Artificial Sequence
  Description of Artificial Sequence: Synthetic oligonucleotide
  Sense strand starting at position 460 of SEQ ID NO: 1241321
guaucuugccaagauucuu

SEQ ID NO: 1263421 - RNA, 19 nt, Artificial Sequence
  Description of Artificial Sequence: Synthetic oligonucleotide
  Antisense strand to SEQ ID NO: 1263420
aagaaucuuggcaagauac

SEQ ID NO: 1263422 - RNA, 19 nt, Artificial Sequence
  Description of Artificial Sequence: Synthetic oligonucleotide
  Sense strand starting at position 510 of SEQ ID NO: 1241321
ucagcaguugcauaauaau

SEQ ID NO: 1263423 - RNA, 19 nt, Artificial Sequence
  Description of Artificial Sequence: Synthetic oligonucleotide
  Antisense strand to SEQ ID NO: 1263422
auuauuaugcaacugcuga

SEQ ID NO: 1263424 - RNA, 19 nt, Artificial Sequence
  Description of Artificial Sequence: Synthetic oligonucleotide
  Sense strand starting at position 540 of SEQ ID NO: 1241321
ucagucucuggugauccaa

SEQ ID NO: 1263425 - RNA, 19 nt, Artificial Sequence
  Description of Artificial Sequence: Synthetic oligonucleotide
  Antisense strand to SEQ ID NO: 1263424
uuggaucaccagagacuga

SEQ ID NO: 1263426 - RNA, 19 nt, Artificial Sequence
  Description of Artificial Sequence: Synthetic oligonucleotide
  Sense strand starting at position 548 of SEQ ID NO: 1241321
uggugauccaaaggcucaa

SEQ ID NO: 1263427 - RNA, 19 nt, Artificial Sequence
  Description of Artificial Sequence: Synthetic oligonucleotide
  Antisense strand to SEQ ID NO: 1263426
uugagccuuuggaucacca

SEQ ID NO: 1263428 - RNA, 19 nt, Artificial Sequence
  Description of Artificial Sequence: Synthetic oligonucleotide
  Sense strand starting at position 552 of SEQ ID NO: 1241321
gauccaaaggcucaaaugu

SEQ ID NO: 1263429 - RNA, 19 nt, Artificial Sequence
  Description of Artificial Sequence: Synthetic oligonucleotide
  Antisense strand to SEQ ID NO: 1263428
acauuugagccuuuggauc

SEQ ID NO: 1263430 - RNA, 19 nt, Artificial Sequence
  Description of Artificial Sequence: Synthetic oligonucleotide
  Sense strand starting at position 560 of SEQ ID NO: 1241321
ggcucaaauguguaucuuu

SEQ ID NO: 1263431 - RNA, 19 nt, Artificial Sequence
  Description of Artificial Sequence: Synthetic oligonucleotide
  Antisense strand to SEQ ID NO: 1263430
aaagauacacauuugagcc

SEQ ID NO: 1263432 - RNA, 19 nt, Artificial Sequence
  Description of Artificial Sequence: Synthetic oligonucleotide
  Sense strand starting at position 874 of SEQ ID NO: 1241321
cuuccaucugcauguugau

SEQ ID NO: 1263433 - RNA, 19 nt, Artificial Sequence
  Description of Artificial Sequence: Synthetic oligonucleotide
  Antisense strand to SEQ ID NO: 1263432
aucaacaugcagauggaag

SEQ ID NO: 1263434 - RNA, 19 nt, Artificial Sequence
  Description of Artificial Sequence: Synthetic oligonucleotide
  Sense strand starting at position 903 of SEQ ID NO: 1241321
gagagacaguaucuuauca

SEQ ID NO: 1263435 - RNA, 19 nt, Artificial Sequence
  Description of Artificial Sequence: Synthetic oligonucleotide
  Antisense strand to SEQ ID NO: 1263434
ugauaagauacugucucuc

SEQ ID NO: 1263436 - RNA, 19 nt, Artificial Sequence
  Description of Artificial Sequence: Synthetic oligonucleotide
  Sense strand starting at position 994 of SEQ ID NO: 1241321
agucaaggucagugaggaa

SEQ ID NO: 1263437 - RNA, 19 nt, Artificial Sequence
  Description of Artificial Sequence: Synthetic oligonucleotide
  Antisense strand to SEQ ID NO: 1263436
uuccucacugaccuugacu

SEQ ID NO: 1263438 - RNA, 19 nt, Artificial Sequence
  Description of Artificial Sequence: Synthetic oligonucleotide
  Sense strand starting at position 1001 of SEQ ID NO: 1241321
gucagugaggaaggauuaa

SEQ ID NO: 1263439 - RNA, 19 nt, Artificial Sequence
  Description of Artificial Sequence: Synthetic oligonucleotide
  Antisense strand to SEQ ID NO: 1263438
uuaauccuuccucacugac

SEQ ID NO: 1263440 - RNA, 19 nt, Artificial Sequence
  Description of Artificial Sequence: Synthetic oligonucleotide
  Sense strand starting at position 1172 of SEQ ID NO: 1241321
gugacuagcuucucuucca

SEQ ID NO: 1263441 - RNA, 19 nt, Artificial Sequence
  Description of Artificial Sequence: Synthetic oligonucleotide
  Antisense strand to SEQ ID NO: 1263440
uggaagagaagcuagucac

SEQ ID NO: 1263442 - RNA, 19 nt, Artificial Sequence
  Description of Artificial Sequence: Synthetic oligonucleotide
  Sense strand starting at position 1188 of SEQ ID NO: 1241321
ccaguuagaucucuucuga

SEQ ID NO: 1263443 - RNA, 19 nt, Artificial Sequence
  Description of Artificial Sequence: Synthetic oligonucleotide
  Antisense strand to SEQ ID NO: 1263442
ucagaagagaucuaacugg

SEQ ID NO: 1263444 - RNA, 19 nt, Artificial Sequence
  Description of Artificial Sequence: Synthetic oligonucleotide
  Sense strand starting at position 1203 of SEQ ID NO: 1241321
cugaaagcuuuggaagaaa

SEQ ID NO: 1263445 - RNA, 19 nt, Artificial Sequence
  Description of Artificial Sequence: Synthetic oligonucleotide
  Antisense strand to SEQ ID NO: 1263444
uuucuuccaaagcuuucag

SEQ ID NO: 1263446 - RNA, 19 nt, Artificial Sequence
  Description of Artificial Sequence: Synthetic oligonucleotide
  Sense strand starting at position 1291 of SEQ ID NO: 1241321
uuaguuaccuauccagaca

SEQ ID NO: 1263447 - RNA, 19 nt, Artificial Sequence
  Description of Artificial Sequence: Synthetic oligonucleotide
  Antisense strand to SEQ ID NO: 1263446
ugucuggauagguaacuaa

SEQ ID NO: 1263448 - RNA, 19 nt, Artificial Sequence
  Description of Artificial Sequence: Synthetic oligonucleotide
  Sense strand starting at position 1307 of SEQ ID NO: 1241321
acaagcgguccuggaauau

SEQ ID NO: 1263449 - RNA, 19 nt, Artificial Sequence
  Description of Artificial Sequence: Synthetic oligonucleotide
  Antisense strand to SEQ ID NO: 1263448
auauuccaggaccgcuugu

SEQ ID NO: 1263450 - RNA, 19 nt, Artificial Sequence
  Description of Artificial Sequence: Synthetic oligonucleotide
  Sense strand starting at position 1337 of SEQ ID NO: 1241321
aaguuauagccgggucuca

SEQ ID NO: 1263451 - RNA, 19 nt, Artificial Sequence
  Description of Artificial Sequence: Synthetic oligonucleotide
  Antisense strand to SEQ ID NO: 1263450
ugagacccggcuauaacuu

SEQ ID NO: 1263452 - RNA, 19 nt, Artificial Sequence
  Description of Artificial Sequence: Synthetic oligonucleotide
  Sense strand starting at position 1375 of SEQ ID NO: 1241321
gcuuguugcugacuucuaa

SEQ ID NO: 1263453 - RNA, 19 nt, Artificial Sequence
  Description of Artificial Sequence: Synthetic oligonucleotide
  Antisense strand to SEQ ID NO: 1263452
uuagaagucagcaacaagc

SEQ ID NO: 1263454 - RNA, 19 nt, Artificial Sequence
  Description of Artificial Sequence: Synthetic oligonucleotide
  Sense strand starting at position 1482 of SEQ ID NO: 1241321
agacaaauguuggauuaau

SEQ ID NO: 1263455 - RNA, 19 nt, Artificial Sequence
  Description of Artificial Sequence: Synthetic oligonucleotide
  Antisense strand to SEQ ID NO: 1263454
auuaauccaacauuugucu

SEQ ID NO: 1263456 - RNA, 19 nt, Artificial Sequence
  Description of Artificial Sequence: Synthetic oligonucleotide
  Sense strand starting at position 1595 of SEQ ID NO: 1241321
gcagauagauguccaguua

SEQ ID NO: 1263457 - RNA, 19 nt, Artificial Sequence
  Description of Artificial Sequence: Synthetic oligonucleotide
  Antisense strand to SEQ ID NO: 1263456
uaacuggacaucuaucugc

SEQ ID NO: 1263458 - RNA, 19 nt, Artificial Sequence
  Description of Artificial Sequence: Synthetic oligonucleotide
  Sense strand starting at position 1673 of SEQ ID NO: 1241321
aguaauucugauugcaaac

SEQ ID NO: 1263459 - RNA, 19 nt, Artificial Sequence
  Description of Artificial Sequence: Synthetic oligonucleotide
  Antisense strand to SEQ ID NO: 1263458
guuugcaaucagaauuacu

SEQ ID NO: 1263460 - RNA, 19 nt, Artificial Sequence
  Description of Artificial Sequence: Synthetic oligonucleotide
  Sense strand starting at position 1784 of SEQ ID NO: 1241321
gucuuauacugagcuguac

SEQ ID NO: 1263461 - RNA, 19 nt, Artificial Sequence
  Description of Artificial Sequence: Synthetic oligonucleotide
  Antisense strand to SEQ ID NO: 1263460
guacagcucaguauaagac

SEQ ID NO: 1263462 - RNA, 19 nt, Artificial Sequence
  Description of Artificial Sequence: Synthetic oligonucleotide
  Sense strand starting at position 1806 of SEQ ID NO: 1241321
caacgcuugcuggacaaga

SEQ ID NO: 1263463 - RNA, 19 nt, Artificial Sequence
  Description of Artificial Sequence: Synthetic oligonucleotide
  Antisense strand to SEQ ID NO: 1263462
ucuuguccagcaagcguug

SEQ ID NO: 1263464 - RNA, 19 nt, Artificial Sequence
  Description of Artificial Sequence: Synthetic oligonucleotide
  Sense strand starting at position 2049 of SEQ ID NO: 1241321
ugacuucaucguggacuga

SEQ ID NO: 1263465 - RNA, 19 nt, Artificial Sequence
  Description of Artificial Sequence: Synthetic oligonucleotide
  Antisense strand to SEQ ID NO: 1263464
ucaguccacgaugaaguca

SEQ ID NO: 1263466 - RNA, 19 nt, Artificial Sequence
  Description of Artificial Sequence: Synthetic oligonucleotide
  Sense strand starting at position 2305 of SEQ ID NO: 1241321
acggccuauccgugaaucu

SEQ ID NO: 1263467 - RNA, 19 nt, Artificial Sequence
  Description of Artificial Sequence: Synthetic oligonucleotide
  Antisense strand to SEQ ID NO: 1263466
agauucacggauaggccgu

SEQ ID NO: 1263468 - RNA, 19 nt, Artificial Sequence
  Description of Artificial Sequence: Synthetic oligonucleotide
  Sense strand starting at position 2940 of SEQ ID NO: 1241321
agugguagagaaugaaagu

SEQ ID NO: 1263469 - RNA, 19 nt, Artificial Sequence
  Description of Artificial Sequence: Synthetic oligonucleotide
  Antisense strand to SEQ ID NO: 1263468
acuuucauucucuaccacu

SEQ ID NO: 1263470 - RNA, 19 nt, Artificial Sequence
  Description of Artificial Sequence: Synthetic oligonucleotide
  Sense strand starting at position 2955 of SEQ ID NO: 1241321
aaguuugagcacgacugua

SEQ ID NO: 1263471 - RNA, 19 nt, Artificial Sequence
  Description of Artificial Sequence: Synthetic oligonucleotide
  Antisense strand to SEQ ID NO: 1263470
uacagucgugcucaaacuu

SEQ ID NO: 1263472 - RNA, 19 nt, Artificial Sequence
  Description of Artificial Sequence: Synthetic oligonucleotide
  Sense strand starting at position 3038 of SEQ ID NO: 1241321
acaugucaaguuuaugaau

SEQ ID NO: 1263473 - RNA, 19 nt, Artificial Sequence
  Description of Artificial Sequence: Synthetic oligonucleotide
  Antisense strand to SEQ ID NO: 1263472
auucauaaacuugacaugu

SEQ ID NO: 1263474 - RNA, 19 nt, Artificial Sequence
  Description of Artificial Sequence: Synthetic oligonucleotide
  Sense strand starting at position 3051 of SEQ ID NO: 1241321
augaauauucgugggugga

SEQ ID NO: 1263475 - RNA, 19 nt, Artificial Sequence
  Description of Artificial Sequence: Synthetic oligonucleotide
  Antisense strand to SEQ ID NO: 1263474
uccacccacgaauauucau

SEQ ID NO: 1263476 - RNA, 19 nt, Artificial Sequence
  Description of Artificial Sequence: Synthetic oligonucleotide
  Sense strand starting at position 3052 of SEQ ID NO: 1241321
ugaauauucguggguggac

SEQ ID NO: 1263477 - RNA, 19 nt, Artificial Sequence
  Description of Artificial Sequence: Synthetic oligonucleotide
  Antisense strand to SEQ ID NO: 1263476
guccacccacgaauauuca

SEQ ID NO: 1263478 - RNA, 19 nt, Artificial Sequence
  Description of Artificial Sequence: Synthetic oligonucleotide
  Sense strand starting at position 3066 of SEQ ID NO: 1241321
uggaccugaagcuguaaau

SEQ ID NO: 1263479 - RNA, 19 nt, Artificial Sequence
  Description of Artificial Sequence: Synthetic oligonucleotide
  Antisense strand to SEQ ID NO: 1263478
auuuacagcuucaggucca

SEQ ID NO: 1263480 - RNA, 19 nt, Artificial Sequence
  Description of Artificial Sequence: Synthetic oligonucleotide
  Sense strand starting at position 3075 of SEQ ID NO: 1241321
agcuguaaauggucucaga

SEQ ID NO: 1263481 - RNA, 19 nt, Artificial Sequence
  Description of Artificial Sequence: Synthetic oligonucleotide
  Antisense strand to SEQ ID NO: 1263480
ucugagaccauuuacagcu

SEQ ID NO: 1263482 - RNA, 19 nt, Artificial Sequence
  Description of Artificial Sequence: Synthetic oligonucleotide
  Sense strand starting at position 3085 of SEQ ID NO: 1241321
ggucucagauacuauuaga

SEQ ID NO: 1263483 - RNA, 19 nt, Artificial Sequence
  Description of Artificial Sequence: Synthetic oligonucleotide
  Antisense strand to SEQ ID NO: 1263482
ucuaauaguaucugagacc

SEQ ID NO: 1263484 - RNA, 19 nt, Artificial Sequence
  Description of Artificial Sequence: Synthetic oligonucleotide
  Sense strand starting at position 3191 of SEQ ID NO: 1241321
uuggaaaggucccuucuga

SEQ ID NO: 1263485 - RNA, 19 nt, Artificial Sequence
  Description of Artificial Sequence: Synthetic oligonucleotide
  Antisense strand to SEQ ID NO: 1263484
ucagaagggaccuuuccaa

SEQ ID NO: 1263486 - RNA, 19 nt, Artificial Sequence
  Description of Artificial Sequence: Synthetic oligonucleotide
  Sense strand starting at position 3280 of SEQ ID NO: 1241321
acuguuaaagucuguagaa

SEQ ID NO: 1263487 - RNA, 19 nt, Artificial Sequence
  Description of Artificial Sequence: Synthetic oligonucleotide
  Antisense strand to SEQ ID NO: 1263486
uucuacagacuuuaacagu

SEQ ID NO: 1263488 - RNA, 19 nt, Artificial Sequence
  Description of Artificial Sequence: Synthetic oligonucleotide
  Sense strand starting at position 3281 of SEQ ID NO: 1241321
cuguuaaagucuguagaag

SEQ ID NO: 1263489 - RNA, 19 nt, Artificial Sequence
  Description of Artificial Sequence: Synthetic oligonucleotide
  Antisense strand to SEQ ID NO: 1263488
cuucuacagacuuuaacag

SEQ ID NO: 1263490 - RNA, 19 nt, Artificial Sequence
  Description of Artificial Sequence: Synthetic oligonucleotide
  Sense strand starting at position 3297 of SEQ ID NO: 1241321
aagcuuaagggcugguuaa

SEQ ID NO: 1263491 - RNA, 19 nt, Artificial Sequence
  Description of Artificial Sequence: Synthetic oligonucleotide
  Antisense strand to SEQ ID NO: 1263490
uuaaccagcccuuaagcuu

SEQ ID NO: 1263492 - RNA, 19 nt, Artificial Sequence
  Description of Artificial Sequence: Synthetic oligonucleotide
  Sense strand starting at position 3298 of SEQ ID NO: 1241321
agcuuaagggcugguuaau

SEQ ID NO: 1263493 - RNA, 19 nt, Artificial Sequence
  Description of Artificial Sequence: Synthetic oligonucleotide
  Antisense strand to SEQ ID NO: 1263492
auuaaccagcccuuaagcu

SEQ ID NO: 1263494 - RNA, 19 nt, Artificial Sequence
  Description of Artificial Sequence: Synthetic oligonucleotide
  Sense strand starting at position 3308 of SEQ ID NO: 1241321
cugguuaaugauggauaua

SEQ ID NO: 1263495 - RNA, 19 nt, Artificial Sequence
  Description of Artificial Sequence: Synthetic oligonucleotide
  Antisense strand to SEQ ID NO: 1263494
uauauccaucauuaaccag

SEQ ID NO: 1263496 - RNA, 19 nt, Artificial Sequence
  Description of Artificial Sequence: Synthetic oligonucleotide
  Sense strand starting at position 3488 of SEQ ID NO: 1241321
uuuacuacacuguaauagu

SEQ ID NO: 1263497 - RNA, 19 nt, Artificial Sequence
  Description of Artificial Sequence: Synthetic oligonucleotide
  Antisense strand to SEQ ID NO: 1263496
acuauuacaguguaguaaa

SEQ ID NO: 1263498 - RNA, 19 nt, Artificial Sequence
  Description of Artificial Sequence: Synthetic oligonucleotide
  Sense strand starting at position 3646 of SEQ ID NO: 1241321
ggacauaacuuguuuccuu

SEQ ID NO: 1263499 - RNA, 19 nt, Artificial Sequence
  Description of Artificial Sequence: Synthetic oligonucleotide
  Antisense strand to SEQ ID NO: 1263498
aaggaaacaaguuaugucc

SEQ ID NO: 1263500 - RNA, 19 nt, Artificial Sequence
  Description of Artificial Sequence: Synthetic oligonucleotide
  Sense strand starting at position 59 of SEQ ID NO: 1241322
uugauauaugcucaucgau

SEQ ID NO: 1263501 - RNA, 19 nt, Artificial Sequence
  Description of Artificial Sequence: Synthetic oligonucleotide
  Antisense strand to SEQ ID NO: 1263500
aucgaugagcauauaucaa

SEQ ID NO: 1263502 - RNA, 19 nt, Artificial Sequence
  Description of Artificial Sequence: Synthetic oligonucleotide
  Sense strand starting at position 65 of SEQ ID NO: 1241322
uaugcucaucgauaugacu

SEQ ID NO: 1263503 - RNA, 19 nt, Artificial Sequence
  Description of Artificial Sequence: Synthetic oligonucleotide
  Antisense strand to SEQ ID NO: 1263502
agucauaucgaugagcaua

SEQ ID NO: 1263504 - RNA, 19 nt, Artificial Sequence
  Description of Artificial Sequence: Synthetic oligonucleotide
  Sense strand starting at position 99 of SEQ ID NO: 1241322
gugcuagacuuacuaacaa

SEQ ID NO: 1263505 - RNA, 19 nt, Artificial Sequence
  Description of Artificial Sequence: Synthetic oligonucleotide
  Antisense strand to SEQ ID NO: 1263504
uuguuaguaagucuagcac

SEQ ID NO: 1263506 - RNA, 19 nt, Artificial Sequence
  Description of Artificial Sequence: Synthetic oligonucleotide
  Sense strand starting at position 153 of SEQ ID NO: 1241322
uucuaagaggucuaugguu

SEQ ID NO: 1263507 - RNA, 19 nt, Artificial Sequence
  Description of Artificial Sequence: Synthetic oligonucleotide
  Antisense strand to SEQ ID NO: 1263506
aaccauagaccucuuagaa

SEQ ID NO: 1263508 - RNA, 19 nt, Artificial Sequence
  Description of Artificial Sequence: Synthetic oligonucleotide
  Sense strand starting at position 392 of SEQ ID NO: 1241322
uugugauauccucauguua

SEQ ID NO: 1263509 - RNA, 19 nt, Artificial Sequence
  Description of Artificial Sequence: Synthetic oligonucleotide
  Antisense strand to SEQ ID NO: 1263508
uaacaugaggauaucacaa

SEQ ID NO: 1263510 - RNA, 19 nt, Artificial Sequence
  Description of Artificial Sequence: Synthetic oligonucleotide
  Sense strand starting at position 497 of SEQ ID NO: 1241322
gcauaagaauuguuaauga

SEQ ID NO: 1263511 - RNA, 19 nt, Artificial Sequence
  Description of Artificial Sequence: Synthetic oligonucleotide
  Antisense strand to SEQ ID NO: 1263510
ucauuaacaauucuuaugc

SEQ ID NO: 1263512 - RNA, 19 nt, Artificial Sequence
  Description of Artificial Sequence: Synthetic oligonucleotide
  Sense strand starting at position 743 of SEQ ID NO: 1241322
aauggagugucauuccuaa

SEQ ID NO: 1263513 - RNA, 19 nt, Artificial Sequence
  Description of Artificial Sequence: Synthetic oligonucleotide
  Antisense strand to SEQ ID NO: 1263512
uuaggaaugacacuccauu

SEQ ID NO: 1263514 - RNA, 19 nt, Artificial Sequence
  Description of Artificial Sequence: Synthetic oligonucleotide
  Sense strand starting at position 985 of SEQ ID NO: 1241322
cucuuaaacucagugaaga

SEQ ID NO: 1263515 - RNA, 19 nt, Artificial Sequence
  Description of Artificial Sequence: Synthetic oligonucleotide
  Antisense strand to SEQ ID NO: 1263514
ucuucacugaguuuaagag

SEQ ID NO: 1263516 - RNA, 19 nt, Artificial Sequence
  Description of Artificial Sequence: Synthetic oligonucleotide
  Sense strand starting at position 986 of SEQ ID NO: 1241322
ucuuaaacucagugaagau

SEQ ID NO: 1263517 - RNA, 19 nt, Artificial Sequence
  Description of Artificial Sequence: Synthetic oligonucleotide
  Antisense strand to SEQ ID NO: 1263516
aucuucacugaguuuaaga

SEQ ID NO: 1263518 - RNA, 19 nt, Artificial Sequence
  Description of Artificial Sequence: Synthetic oligonucleotide
  Sense strand starting at position 995 of SEQ ID NO: 1241322
cagugaagaucagucuuua

SEQ ID NO: 1263519 - RNA, 19 nt, Artificial Sequence
  Description of Artificial Sequence: Synthetic oligonucleotide
  Antisense strand to SEQ ID NO: 1263518
uaaagacugaucuucacug

SEQ ID NO: 1263520 - RNA, 19 nt, Artificial Sequence
  Description of Artificial Sequence: Synthetic oligonucleotide
  Sense strand starting at position 1091 of SEQ ID NO: 1241322
uuucuucuuccacagugau

SEQ ID NO: 1263521 - RNA, 19 nt, Artificial Sequence
  Description of Artificial Sequence: Synthetic oligonucleotide
  Antisense strand to SEQ ID NO: 1263520
aucacuguggaagaagaaa

SEQ ID NO: 1263522 - RNA, 19 nt, Artificial Sequence
  Description of Artificial Sequence: Synthetic oligonucleotide
  Sense strand starting at position 1141 of SEQ ID NO: 1241322
uggagauaucuuggaguuu

SEQ ID NO: 1263523 - RNA, 19 nt, Artificial Sequence
  Description of Artificial Sequence: Synthetic oligonucleotide
  Antisense strand to SEQ ID NO: 1263522
aaacuccaagauaucucca

SEQ ID NO: 1263524 - RNA, 19 nt, Artificial Sequence
  Description of Artificial Sequence: Synthetic oligonucleotide
  Sense strand starting at position 1324 of SEQ ID NO: 1241322
accgaacugacaugagguu

SEQ ID NO: 1263525 - RNA, 19 nt, Artificial Sequence
  Description of Artificial Sequence: Synthetic oligonucleotide
  Antisense strand to SEQ ID NO: 1263524
aaccucaugucaguucggu

SEQ ID NO: 1263526 - RNA, 19 nt, Artificial Sequence
  Description of Artificial Sequence: Synthetic oligonucleotide
  Sense strand starting at position 1413 of SEQ ID NO: 1241322
ucgccuuucccagugugau

SEQ ID NO: 1263527 - RNA, 19 nt, Artificial Sequence
  Description of Artificial Sequence: Synthetic oligonucleotide
  Antisense strand to SEQ ID NO: 1263526
aucacacugggaaaggcga

SEQ ID NO: 1263528 - RNA, 19 nt, Artificial Sequence
  Description of Artificial Sequence: Synthetic oligonucleotide
  Sense strand starting at position 1558 of SEQ ID NO: 1241322
auuagaauaucccugggca

SEQ ID NO: 1263529 - RNA, 19 nt, Artificial Sequence
  Description of Artificial Sequence: Synthetic oligonucleotide
  Antisense strand to SEQ ID NO: 1263528
ugcccagggauauucuaau

SEQ ID NO: 1263530 - RNA, 19 nt, Artificial Sequence
  Description of Artificial Sequence: Synthetic oligonucleotide
  Sense strand starting at position 1785 of SEQ ID NO: 1241322
cucuguaaagcauaacagu

SEQ ID NO: 1263531 - RNA, 19 nt, Artificial Sequence
  Description of Artificial Sequence: Synthetic oligonucleotide
  Antisense strand to SEQ ID NO: 1263530
acuguuaugcuuuacagag

SEQ ID NO: 1263532 - RNA, 19 nt, Artificial Sequence
  Description of Artificial Sequence: Synthetic oligonucleotide
  Sense strand starting at position 2424 of SEQ ID NO: 1241322
cgauauggugcuuugugca

SEQ ID NO: 1263533 - RNA, 19 nt, Artificial Sequence
  Description of Artificial Sequence: Synthetic oligonucleotide
  Antisense strand to SEQ ID NO: 1263532
ugcacaaagcaccauaucg

SEQ ID NO: 1263534 - RNA, 19 nt, Artificial Sequence
  Description of Artificial Sequence: Synthetic oligonucleotide
  Sense strand starting at position 2452 of SEQ ID NO: 1241322
augauuguucucgaguaua

SEQ ID NO: 1263535 - RNA, 19 nt, Artificial Sequence
  Description of Artificial Sequence: Synthetic oligonucleotide
  Antisense strand to SEQ ID NO: 1263534
uauacucgagaacaaucau

SEQ ID NO: 1263536 - RNA, 19 nt, Artificial Sequence
  Description of Artificial Sequence: Synthetic oligonucleotide
  Sense strand starting at position 2474 of SEQ ID NO: 1241322
cguguacuccucucgguga

SEQ ID NO: 1263537 - RNA, 19 nt, Artificial Sequence
  Description of Artificial Sequence: Synthetic oligonucleotide
  Antisense strand to SEQ ID NO: 1263536
ucaccgagaggaguacacg

SEQ ID NO: 1263538 - RNA, 19 nt, Artificial Sequence
  Description of Artificial Sequence: Synthetic oligonucleotide
  Sense strand starting at position 2479 of SEQ ID NO: 1241322
acuccucucggugaagaga

SEQ ID NO: 1263539 - RNA, 19 nt, Artificial Sequence
  Description of Artificial Sequence: Synthetic oligonucleotide
  Antisense strand to SEQ ID NO: 1263538
ucucuucaccgagaggagu

SEQ ID NO: 1263540 - RNA, 19 nt, Artificial Sequence
  Description of Artificial Sequence: Synthetic oligonucleotide
  Sense strand starting at position 2521 of SEQ ID NO: 1241322
cuagacuaucgcuagagaa

SEQ ID NO: 1263541 - RNA, 19 nt, Artificial Sequence
  Description of Artificial Sequence: Synthetic oligonucleotide
  Antisense strand to SEQ ID NO: 1263540
uucucuagcgauagucuag

SEQ ID NO: 1263542 - RNA, 19 nt, Artificial Sequence
  Description of Artificial Sequence: Synthetic oligonucleotide
  Sense strand starting at position 2523 of SEQ ID NO: 1241322
agacuaucgcuagagaauu

SEQ ID NO: 1263543 - RNA, 19 nt, Artificial Sequence
  Description of Artificial Sequence: Synthetic oligonucleotide
  Antisense strand to SEQ ID NO: 1263542
aauucucuagcgauagucu

SEQ ID NO: 1263544 - RNA, 19 nt, Artificial Sequence
  Description of Artificial Sequence: Synthetic oligonucleotide
  Sense strand starting at position 2647 of SEQ ID NO: 1241322
gagaauuugugagaacaag

SEQ ID NO: 1263545 - RNA, 19 nt, Artificial Sequence
  Description of Artificial Sequence: Synthetic oligonucleotide
  Antisense strand to SEQ ID NO: 1263544
cuuguucucacaaauucuc

SEQ ID NO: 1263546 - RNA, 19 nt, Artificial Sequence
  Description of Artificial Sequence: Synthetic oligonucleotide
  Sense strand starting at position 2742 of SEQ ID NO: 1241322
ucuugaaaguuuguggaaa

SEQ ID NO: 1263547 - RNA, 19 nt, Artificial Sequence
  Description of Artificial Sequence: Synthetic oligonucleotide
  Antisense strand to SEQ ID NO: 1263546
uuuccacaaacuuucaaga

SEQ ID NO: 1263548 - RNA, 19 nt, Artificial Sequence
  Description of Artificial Sequence: Synthetic oligonucleotide
  Sense strand starting at position 2789 of SEQ ID NO: 1241322
acacauacaguuuguaaua

SEQ ID NO: 1263549 - RNA, 19 nt, Artificial Sequence
  Description of Artificial Sequence: Synthetic oligonucleotide
  Antisense strand to SEQ ID NO: 1263548
uauuacaaacuguaugugu

SEQ ID NO: 1263550 - RNA, 19 nt, Artificial Sequence
  Description of Artificial Sequence: Synthetic oligonucleotide
  Sense strand starting at position 2858 of SEQ ID NO: 1241322
gucuguaaacuuuaaauga

SEQ ID NO: 1263551 - RNA, 19 nt, Artificial Sequence
  Description of Artificial Sequence: Synthetic oligonucleotide
  Antisense strand to SEQ ID NO: 1263550
ucauuuaaaguuuacagac

SEQ ID NO: 1263552 - RNA, 19 nt, Artificial Sequence
  Description of Artificial Sequence: Synthetic oligonucleotide
  Sense strand starting at position 2998 of SEQ ID NO: 1241322
gucuguuugagucucguga

SEQ ID NO: 1263553 - RNA, 19 nt, Artificial Sequence
  Description of Artificial Sequence: Synthetic oligonucleotide
  Antisense strand to SEQ ID NO: 1263552
ucacgagacucaaacagac

SEQ ID NO: 1263554 - RNA, 19 nt, Artificial Sequence
  Description of Artificial Sequence: Synthetic oligonucleotide
  Sense strand starting at position 3193 of SEQ ID NO: 1241322
cuauccuagaguuggaagu

SEQ ID NO: 1263555 - RNA, 19 nt, Artificial Sequence
  Description of Artificial Sequence: Synthetic oligonucleotide
  Antisense strand to SEQ ID NO: 1263554
acuuccaacucuaggauag

SEQ ID NO: 1263556 - RNA, 19 nt, Artificial Sequence
  Description of Artificial Sequence: Synthetic oligonucleotide
  Sense strand starting at position 3194 of SEQ ID NO: 1241322
uauccuagaguuggaagua

SEQ ID NO: 1263557 - RNA, 19 nt, Artificial Sequence
  Description of Artificial Sequence: Synthetic oligonucleotide
  Antisense strand to SEQ ID NO: 1263556
uacuuccaacucuaggaua

SEQ ID NO: 1263558 - RNA, 19 nt, Artificial Sequence
  Description of Artificial Sequence: Synthetic oligonucleotide
  Sense strand starting at position 3237 of SEQ ID NO: 1241322
gaaggugaccauuguauaa

SEQ ID NO: 1263559 - RNA, 19 nt, Artificial Sequence
  Description of Artificial Sequence: Synthetic oligonucleotide
  Antisense strand to SEQ ID NO: 1263558
uuauacaauggucaccuuc

SEQ ID NO: 1263560 - RNA, 19 nt, Artificial Sequence
  Description of Artificial Sequence: Synthetic oligonucleotide
  Sense strand starting at position 3248 of SEQ ID NO: 1241322
uuguauaacccuuaugaug

SEQ ID NO: 1263561 - RNA, 19 nt, Artificial Sequence
  Description of Artificial Sequence: Synthetic oligonucleotide
  Antisense strand to SEQ ID NO: 1263560
caucauaaggguuauacaa

SEQ ID NO: 1263562 - RNA, 19 nt, Artificial Sequence
  Description of Artificial Sequence: Synthetic oligonucleotide
  Sense strand starting at position 3278 of SEQ ID NO: 1241322
auuguuuaacacgaacuuu

SEQ ID NO: 1263563 - RNA, 19 nt, Artificial Sequence
  Description of Artificial Sequence: Synthetic oligonucleotide
  Antisense strand to SEQ ID NO: 1263562
aaaguucguguuaaacaau

SEQ ID NO: 1263564 - RNA, 19 nt, Artificial Sequence
  Description of Artificial Sequence: Synthetic oligonucleotide
  Sense strand starting at position 3291 of SEQ ID NO: 1241322
aacuuuggagucugacuga

SEQ ID NO: 1263565 - RNA, 19 nt, Artificial Sequence
  Description of Artificial Sequence: Synthetic oligonucleotide
  Antisense strand to SEQ ID NO: 1263564
ucagucagacuccaaaguu

SEQ ID NO: 1263566 - RNA, 19 nt, Artificial Sequence
  Description of Artificial Sequence: Synthetic oligonucleotide
  Sense strand starting at position 3333 of SEQ ID NO: 1241322
cuuauaacucgccaugaca

SEQ ID NO: 1263567 - RNA, 19 nt, Artificial Sequence
  Description of Artificial Sequence: Synthetic oligonucleotide
  Antisense strand to SEQ ID NO: 1263566
ugucauggcgaguuauaag

SEQ ID NO: 1263568 - RNA, 19 nt, Artificial Sequence
  Description of Artificial Sequence: Synthetic oligonucleotide
  Sense strand starting at position 3344 of SEQ ID NO: 1241322
ccaugacauugggugaguu

SEQ ID NO: 1263569 - RNA, 19 nt, Artificial Sequence
  Description of Artificial Sequence: Synthetic oligonucleotide
  Antisense strand to SEQ ID NO: 1263568
aacucacccaaugucaugg

SEQ ID NO: 1263570 - RNA, 19 nt, Artificial Sequence
  Description of Artificial Sequence: Synthetic oligonucleotide
  Sense strand starting at position 3345 of SEQ ID NO: 1241322
caugacauugggugaguua

SEQ ID NO: 1263571 - RNA, 19 nt, Artificial Sequence
  Description of Artificial Sequence: Synthetic oligonucleotide
  Antisense strand to SEQ ID NO: 1263570
uaacucacccaaugucaug

SEQ ID NO: 1263572 - RNA, 19 nt, Artificial Sequence
  Description of Artificial Sequence: Synthetic oligonucleotide
  Sense strand starting at position 3348 of SEQ ID NO: 1241322
gacauugggugaguuaauc

SEQ ID NO: 1263573 - RNA, 19 nt, Artificial Sequence
  Description of Artificial Sequence: Synthetic oligonucleotide
  Antisense strand to SEQ ID NO: 1263572
gauuaacucacccaauguc

SEQ ID NO: 1263574 - RNA, 19 nt, Artificial Sequence
  Description of Artificial Sequence: Synthetic oligonucleotide
  Sense strand starting at position 3465 of SEQ ID NO: 1241322
augcgaggucccuagaaga

SEQ ID NO: 1263575 - RNA, 19 nt, Artificial Sequence
  Description of Artificial Sequence: Synthetic oligonucleotide
  Antisense strand to SEQ ID NO: 1263574
ucuucuagggaccucgcau

SEQ ID NO: 1263576 - RNA, 19 nt, Artificial Sequence
  Description of Artificial Sequence: Synthetic oligonucleotide
  Sense strand starting at position 3473 of SEQ ID NO: 1241322
ucccuagaagaguguaaac

SEQ ID NO: 1263577 - RNA, 19 nt, Artificial Sequence
  Description of Artificial Sequence: Synthetic oligonucleotide
  Antisense strand to SEQ ID NO: 1263576
guuuacacucuucuaggga

SEQ ID NO: 1263578 - RNA, 19 nt, Artificial Sequence
  Description of Artificial Sequence: Synthetic oligonucleotide
  Sense strand starting at position 3921 of SEQ ID NO: 1241322
guuaguuucgcucuuguua

SEQ ID NO: 1263579 - RNA, 19 nt, Artificial Sequence
  Description of Artificial Sequence: Synthetic oligonucleotide
  Antisense strand to SEQ ID NO: 1263578
uaacaagagcgaaacuaac

SEQ ID NO: 1263580 - RNA, 19 nt, Artificial Sequence
  Description of Artificial Sequence: Synthetic oligonucleotide
  Sense strand starting at position 11 of SEQ ID NO: 1241323
uuuccugagcuguaucuca

SEQ ID NO: 1263581 - RNA, 19 nt, Artificial Sequence
  Description of Artificial Sequence: Synthetic oligonucleotide
  Antisense strand to SEQ ID NO: 1263580
ugagauacagcucaggaaa

SEQ ID NO: 1263582 - RNA, 19 nt, Artificial Sequence
  Description of Artificial Sequence: Synthetic oligonucleotide
  Sense strand starting at position 54 of SEQ ID NO: 1241323
ggaagaggcuaccuuguaa

SEQ ID NO: 1263583 - RNA, 19 nt, Artificial Sequence
  Description of Artificial Sequence: Synthetic oligonucleotide
  Antisense strand to SEQ ID NO: 1263582
uuacaagguagccucuucc

SEQ ID NO: 1263584 - RNA, 19 nt, Artificial Sequence
  Description of Artificial Sequence: Synthetic oligonucleotide
  Sense strand starting at position 194 of SEQ ID NO: 1241323
acaauaauccuuugguaag

SEQ ID NO: 1263585 - RNA, 19 nt, Artificial Sequence
  Description of Artificial Sequence: Synthetic oligonucleotide
  Antisense strand to SEQ ID NO: 1263584
cuuaccaaaggauuauugu

SEQ ID NO: 1263586 - RNA, 19 nt, Artificial Sequence
  Description of Artificial Sequence: Synthetic oligonucleotide
  Sense strand starting at position 248 of SEQ ID NO: 1241323
uucccaguguagcuugaaa

SEQ ID NO: 1263587 - RNA, 19 nt, Artificial Sequence
  Description of Artificial Sequence: Synthetic oligonucleotide
  Antisense strand to SEQ ID NO: 1263586
uuucaagcuacacugggaa

SEQ ID NO: 1263588 - RNA, 19 nt, Artificial Sequence
  Description of Artificial Sequence: Synthetic oligonucleotide
  Sense strand starting at position 440 of SEQ ID NO: 1241323
ggaagauaguucucugagc

SEQ ID NO: 1263589 - RNA, 19 nt, Artificial Sequence
  Description of Artificial Sequence: Synthetic oligonucleotide
  Antisense strand to SEQ ID NO: 1263588
gcucagagaacuaucuucc

SEQ ID NO: 1263590 - RNA, 19 nt, Artificial Sequence
  Description of Artificial Sequence: Synthetic oligonucleotide
  Sense strand starting at position 441 of SEQ ID NO: 1241323
gaagauaguucucugagca

SEQ ID NO: 1263591 - RNA, 19 nt, Artificial Sequence
  Description of Artificial Sequence: Synthetic oligonucleotide
  Antisense strand to SEQ ID NO: 1263590
ugcucagagaacuaucuuc

SEQ ID NO: 1263592 - RNA, 19 nt, Artificial Sequence
  Description of Artificial Sequence: Synthetic oligonucleotide
  Sense strand starting at position 442 of SEQ ID NO: 1241323
aagauaguucucugagcau

SEQ ID NO: 1263593 - RNA, 19 nt, Artificial Sequence
  Description of Artificial Sequence: Synthetic oligonucleotide
  Antisense strand to SEQ ID NO: 1263592
augcucagagaacuaucuu

SEQ ID NO: 1263594 - RNA, 19 nt, Artificial Sequence
  Description of Artificial Sequence: Synthetic oligonucleotide
  Sense strand starting at position 445 of SEQ ID NO: 1241323
auaguucucugagcauuuc

SEQ ID NO: 1263595 - RNA, 19 nt, Artificial Sequence
  Description of Artificial Sequence: Synthetic oligonucleotide
  Antisense strand to SEQ ID NO: 1263594
gaaaugcucagagaacuau

SEQ ID NO: 1263596 - RNA, 19 nt, Artificial Sequence
  Description of Artificial Sequence: Synthetic oligonucleotide
  Sense strand starting at position 485 of SEQ ID NO: 1241323
uuagcugacucuuccagau

SEQ ID NO: 1263597 - RNA, 19 nt, Artificial Sequence
  Description of Artificial Sequence: Synthetic oligonucleotide
  Antisense strand to SEQ ID NO: 1263596
aucuggaagagucagcuaa

SEQ ID NO: 1263598 - RNA, 19 nt, Artificial Sequence
  Description of Artificial Sequence: Synthetic oligonucleotide
  Sense strand starting at position 680 of SEQ ID NO: 1241323
cuuggcuuguuauuaauau

SEQ ID NO: 1263599 - RNA, 19 nt, Artificial Sequence
  Description of Artificial Sequence: Synthetic oligonucleotide
  Antisense strand to SEQ ID NO: 1263598
auauuaauaacaagccaag

SEQ ID NO: 1263600 - RNA, 19 nt, Artificial Sequence
  Description of Artificial Sequence: Synthetic oligonucleotide
  Sense strand starting at position 743 of SEQ ID NO: 1241323
auaccaaguuugucaagca

SEQ ID NO: 1263601 - RNA, 19 nt, Artificial Sequence
  Description of Artificial Sequence: Synthetic oligonucleotide
  Antisense strand to SEQ ID NO: 1263600
ugcuugacaaacuugguau

SEQ ID NO: 1263602 - RNA, 19 nt, Artificial Sequence
  Description of Artificial Sequence: Synthetic oligonucleotide
  Sense strand starting at position 1069 of SEQ ID NO: 1241323
cgcaauuaagguuauaauu

SEQ ID NO: 1263603 - RNA, 19 nt, Artificial Sequence
  Description of Artificial Sequence: Synthetic oligonucleotide
  Antisense strand to SEQ ID NO: 1263602
aauuauaaccuuaauugcg

SEQ ID NO: 1263604 - RNA, 19 nt, Artificial Sequence
  Description of Artificial Sequence: Synthetic oligonucleotide
  Sense strand starting at position 1089 of SEQ ID NO: 1241323
ggaggcucgaaucauuaca

SEQ ID NO: 1263605 - RNA, 19 nt, Artificial Sequence
  Description of Artificial Sequence: Synthetic oligonucleotide
  Antisense strand to SEQ ID NO: 1263604
uguaaugauucgagccucc

SEQ ID NO: 1263606 - RNA, 19 nt, Artificial Sequence
  Description of Artificial Sequence: Synthetic oligonucleotide
  Sense strand starting at position 1091 of SEQ ID NO: 1241323
aggcucgaaucauuacaua

SEQ ID NO: 1263607 - RNA, 19 nt, Artificial Sequence
  Description of Artificial Sequence: Synthetic oligonucleotide
  Antisense strand to SEQ ID NO: 1263606
uauguaaugauucgagccu

SEQ ID NO: 1263608 - RNA, 19 nt, Artificial Sequence
  Description of Artificial Sequence: Synthetic oligonucleotide
  Sense strand starting at position 1154 of SEQ ID NO: 1241323
acaggucuaucugcuuaaa

SEQ ID NO: 1263609 - RNA, 19 nt, Artificial Sequence
  Description of Artificial Sequence: Synthetic oligonucleotide
  Antisense strand to SEQ ID NO: 1263608
uuuaagcagauagaccugu

SEQ ID NO: 1263610 - RNA, 19 nt, Artificial Sequence
  Description of Artificial Sequence: Synthetic oligonucleotide
  Sense strand starting at position 1156 of SEQ ID NO: 1241323
aggucuaucugcuuaaaua

SEQ ID NO: 1263611 - RNA, 19 nt, Artificial Sequence
  Description of Artificial Sequence: Synthetic oligonucleotide
  Antisense strand to SEQ ID NO: 1263610
uauuuaagcagauagaccu

SEQ ID NO: 1263612 - RNA, 19 nt, Artificial Sequence
  Description of Artificial Sequence: Synthetic oligonucleotide
  Sense strand starting at position 1157 of SEQ ID NO: 1241323
ggucuaucugcuuaaauac

SEQ ID NO: 1263613 - RNA, 19 nt, Artificial Sequence
  Description of Artificial Sequence: Synthetic oligonucleotide
  Antisense strand to SEQ ID NO: 1263612
guauuuaagcagauagacc

SEQ ID NO: 1263614 - RNA, 19 nt, Artificial Sequence
  Description of Artificial Sequence: Synthetic oligonucleotide
  Sense strand starting at position 1265 of SEQ ID NO: 1241323
cuaccaauucugggaaguc

SEQ ID NO: 1263615 - RNA, 19 nt, Artificial Sequence
  Description of Artificial Sequence: Synthetic oligonucleotide
  Antisense strand to SEQ ID NO: 1263614
gacuucccagaauugguag

SEQ ID NO: 1263616 - RNA, 19 nt, Artificial Sequence
  Description of Artificial Sequence: Synthetic oligonucleotide
  Sense strand starting at position 1377 of SEQ ID NO: 1241323
gugacaucgcgguucaggu

SEQ ID NO: 1263617 - RNA, 19 nt, Artificial Sequence
  Description of Artificial Sequence: Synthetic oligonucleotide
  Antisense strand to SEQ ID NO: 1263616
accugaaccgcgaugucac

SEQ ID NO: 1263618 - RNA, 19 nt, Artificial Sequence
  Description of Artificial Sequence: Synthetic oligonucleotide
  Sense strand starting at position 1589 of SEQ ID NO: 1241323
gggcuuucggcagaaacuc

SEQ ID NO: 1263619 - RNA, 19 nt, Artificial Sequence
  Description of Artificial Sequence: Synthetic oligonucleotide
  Antisense strand to SEQ ID NO: 1263618
gaguuucugccgaaagccc

SEQ ID NO: 1263620 - RNA, 19 nt, Artificial Sequence
  Description of Artificial Sequence: Synthetic oligonucleotide
  Sense strand starting at position 2431 of SEQ ID NO: 1241323
gggcuuguccgugagaaac

SEQ ID NO: 1263621 - RNA, 19 nt, Artificial Sequence
  Description of Artificial Sequence: Synthetic oligonucleotide
  Antisense strand to SEQ ID NO: 1263620
guuucucacggacaagccc

SEQ ID NO: 1263622 - RNA, 19 nt, Artificial Sequence
  Description of Artificial Sequence: Synthetic oligonucleotide
  Sense strand starting at position 2719 of SEQ ID NO: 1241323
acuggacucccaggaguuu

SEQ ID NO: 1263623 - RNA, 19 nt, Artificial Sequence
  Description of Artificial Sequence: Synthetic oligonucleotide
  Antisense strand to SEQ ID NO: 1263622
aaacuccugggaguccagu

SEQ ID NO: 1263624 - RNA, 19 nt, Artificial Sequence
  Description of Artificial Sequence: Synthetic oligonucleotide
  Sense strand starting at position 2732 of SEQ ID NO: 1241323
gaguuugcaagcguucuua

SEQ ID NO: 1263625 - RNA, 19 nt, Artificial Sequence
  Description of Artificial Sequence: Synthetic oligonucleotide
  Antisense strand to SEQ ID NO: 1263624
uaagaacgcuugcaaacuc

SEQ ID NO: 1263626 - RNA, 19 nt, Artificial Sequence
  Description of Artificial Sequence: Synthetic oligonucleotide
  Sense strand starting at position 2734 of SEQ ID NO: 1241323
guuugcaagcguucuuaac

SEQ ID NO: 1263627 - RNA, 19 nt, Artificial Sequence
  Description of Artificial Sequence: Synthetic oligonucleotide
  Antisense strand to SEQ ID NO: 1263626
guuaagaacgcuugcaaac

SEQ ID NO: 1263628 - RNA, 19 nt, Artificial Sequence
  Description of Artificial Sequence: Synthetic oligonucleotide
  Sense strand starting at position 2982 of SEQ ID NO: 1241323
uuaauacuucuggaacggu

SEQ ID NO: 1263629 - RNA, 19 nt, Artificial Sequence
  Description of Artificial Sequence: Synthetic oligonucleotide
  Antisense strand to SEQ ID NO: 1263628
accguuccagaaguauuaa

SEQ ID NO: 1263630 - RNA, 19 nt, Artificial Sequence
  Description of Artificial Sequence: Synthetic oligonucleotide
  Sense strand starting at position 3150 of SEQ ID NO: 1241323
cagagaaacugccucgcua

SEQ ID NO: 1263631 - RNA, 19 nt, Artificial Sequence
  Description of Artificial Sequence: Synthetic oligonucleotide
  Antisense strand to SEQ ID NO: 1263630
uagcgaggcaguuucucug

SEQ ID NO: 1263632 - RNA, 19 nt, Artificial Sequence
  Description of Artificial Sequence: Synthetic oligonucleotide
  Sense strand starting at position 3252 of SEQ ID NO: 1241323
cucauaaucuugucgaauu

SEQ ID NO: 1263633 - RNA, 19 nt, Artificial Sequence
  Description of Artificial Sequence: Synthetic oligonucleotide
  Antisense strand to SEQ ID NO: 1263632
aauucgacaagauuaugag

SEQ ID NO: 1263634 - RNA, 19 nt, Artificial Sequence
  Description of Artificial Sequence: Synthetic oligonucleotide
  Sense strand starting at position 3254 of SEQ ID NO: 1241323
cauaaucuugucgaauugu

SEQ ID NO: 1263635 - RNA, 19 nt, Artificial Sequence
  Description of Artificial Sequence: Synthetic oligonucleotide
  Antisense strand to SEQ ID NO: 1263634
acaauucgacaagauuaug

SEQ ID NO: 1263636 - RNA, 19 nt, Artificial Sequence
  Description of Artificial Sequence: Synthetic oligonucleotide
  Sense strand starting at position 3260 of SEQ ID NO: 1241323
cuugucgaauugucucaaa

SEQ ID NO: 1263637 - RNA, 19 nt, Artificial Sequence
  Description of Artificial Sequence: Synthetic oligonucleotide
  Antisense strand to SEQ ID NO: 1263636
uuugagacaauucgacaag

SEQ ID NO: 1263638 - RNA, 19 nt, Artificial Sequence
  Description of Artificial Sequence: Synthetic oligonucleotide
  Sense strand starting at position 3290 of SEQ ID NO: 1241323
ggaacucgcuaggcagaua

SEQ ID NO: 1263639 - RNA, 19 nt, Artificial Sequence
  Description of Artificial Sequence: Synthetic oligonucleotide
  Antisense strand to SEQ ID NO: 1263638
uaucugccuagcgaguucc

SEQ ID NO: 1263640 - RNA, 19 nt, Artificial Sequence
  Description of Artificial Sequence: Synthetic oligonucleotide
  Sense strand starting at position 3406 of SEQ ID NO: 1241323
gccaaaggcuuggcagaaa

SEQ ID NO: 1263641 - RNA, 19 nt, Artificial Sequence
  Description of Artificial Sequence: Synthetic oligonucleotide
  Antisense strand to SEQ ID NO: 1263640
uuucugccaagccuuuggc

SEQ ID NO: 1263642 - RNA, 19 nt, Artificial Sequence
  Description of Artificial Sequence: Synthetic oligonucleotide
  Sense strand starting at position 3453 of SEQ ID NO: 1241323
uuuagcuaguuaucaugga

SEQ ID NO: 1263643 - RNA, 19 nt, Artificial Sequence
  Description of Artificial Sequence: Synthetic oligonucleotide
  Antisense strand to SEQ ID NO: 1263642
uccaugauaacuagcuaaa

SEQ ID NO: 1263644 - RNA, 19 nt, Artificial Sequence
  Description of Artificial Sequence: Synthetic oligonucleotide
  Sense strand starting at position 3457 of SEQ ID NO: 1241323
gcuaguuaucauggagaaa

SEQ ID NO: 1263645 - RNA, 19 nt, Artificial Sequence
  Description of Artificial Sequence: Synthetic oligonucleotide
  Antisense strand to SEQ ID NO: 1263644
uuucuccaugauaacuagc

SEQ ID NO: 1263646 - RNA, 19 nt, Artificial Sequence
  Description of Artificial Sequence: Synthetic oligonucleotide
  Sense strand starting at position 3552 of SEQ ID NO: 1241323
caauaugaauguccggaga

SEQ ID NO: 1263647 - RNA, 19 nt, Artificial Sequence
  Description of Artificial Sequence: Synthetic oligonucleotide
  Antisense strand to SEQ ID NO: 1263646
ucuccggacauucauauug

SEQ ID NO: 1263648 - RNA, 19 nt, Artificial Sequence
  Description of Artificial Sequence: Synthetic oligonucleotide
  Sense strand starting at position 3572 of SEQ ID NO: 1241323
gagggaguuuauguaaauu

SEQ ID NO: 1263649 - RNA, 19 nt, Artificial Sequence
  Description of Artificial Sequence: Synthetic oligonucleotide
  Antisense strand to SEQ ID NO: 1263648
aauuuacauaaacucccuc

SEQ ID NO: 1263650 - RNA, 19 nt, Artificial Sequence
  Description of Artificial Sequence: Synthetic oligonucleotide
  Sense strand starting at position 3685 of SEQ ID NO: 1241323
uuaagagcuuauuuacguu

SEQ ID NO: 1263651 - RNA, 19 nt, Artificial Sequence
  Description of Artificial Sequence: Synthetic oligonucleotide
  Antisense strand to SEQ ID NO: 1263650
aacguaaauaagcucuuaa

SEQ ID NO: 1263652 - RNA, 19 nt, Artificial Sequence
  Description of Artificial Sequence: Synthetic oligonucleotide
  Sense strand starting at position 3691 of SEQ ID NO: 1241323
gcuuauuuacguuaaaugu

SEQ ID NO: 1263653 - RNA, 19 nt, Artificial Sequence
  Description of Artificial Sequence: Synthetic oligonucleotide
  Antisense strand to SEQ ID NO: 1263652
acauuuaacguaaauaagc

SEQ ID NO: 1263654 - RNA, 19 nt, Artificial Sequence
  Description of Artificial Sequence: Synthetic oligonucleotide
  Sense strand starting at position 3763 of SEQ ID NO: 1241323
ucuugagaucacggaaguu

SEQ ID NO: 1263655 - RNA, 19 nt, Artificial Sequence
  Description of Artificial Sequence: Synthetic oligonucleotide
  Antisense strand to SEQ ID NO: 1263654
aacuuccgugaucucaaga

SEQ ID NO: 1263656 - RNA, 19 nt, Artificial Sequence
  Description of Artificial Sequence: Synthetic oligonucleotide
  Sense strand starting at position 3865 of SEQ ID NO: 1241323
cuguacaugccaugacauu

SEQ ID NO: 1263657 - RNA, 19 nt, Artificial Sequence
  Description of Artificial Sequence: Synthetic oligonucleotide
  Antisense strand to SEQ ID NO: 1263656
aaugucauggcauguacag

SEQ ID NO: 1263658 - RNA, 19 nt, Artificial Sequence
  Description of Artificial Sequence: Synthetic oligonucleotide
  Sense strand starting at position 3980 of SEQ ID NO: 1241323
acuugaguucuuuaagagc

SEQ ID NO: 1263659 - RNA, 19 nt, Artificial Sequence
  Description of Artificial Sequence: Synthetic oligonucleotide
  Antisense strand to SEQ ID NO: 1263658
gcucuuaaagaacucaagu

SEQ ID NO: 1263660 - RNA, 19 nt, Artificial Sequence
  Description of Artificial Sequence: Synthetic oligonucleotide
  Sense strand starting at position 10 of SEQ ID NO: 1241324
cggccauaugcguuaacuu

SEQ ID NO: 1263661 - RNA, 19 nt, Artificial Sequence
  Description of Artificial Sequence: Synthetic oligonucleotide
  Antisense strand to SEQ ID NO: 1263660
aaguuaacgcauauggccg

SEQ ID NO: 1263662 - RNA, 19 nt, Artificial Sequence
  Description of Artificial Sequence: Synthetic oligonucleotide
  Sense strand starting at position 11 of SEQ ID NO: 1241324
ggccauaugcguuaacuuu

SEQ ID NO: 1263663 - RNA, 19 nt, Artificial Sequence
  Description of Artificial Sequence: Synthetic oligonucleotide
  Antisense strand to SEQ ID NO: 1263662
aaaguuaacgcauauggcc

SEQ ID NO: 1263664 - RNA, 19 nt, Artificial Sequence
  Description of Artificial Sequence: Synthetic oligonucleotide
  Sense strand starting at position 70 of SEQ ID NO: 1241324
gaguaaacgcagugcaagu

SEQ ID NO: 1263665 - RNA, 19 nt, Artificial Sequence
  Description of Artificial Sequence: Synthetic oligonucleotide
  Antisense strand to SEQ ID NO: 1263664
acuugcacugcguuuacuc

SEQ ID NO: 1263666 - RNA, 19 nt, Artificial Sequence
  Description of Artificial Sequence: Synthetic oligonucleotide
  Sense strand starting at position 92 of SEQ ID NO: 1241324
uugcuauuauuugugugau

SEQ ID NO: 1263667 - RNA, 19 nt, Artificial Sequence
  Description of Artificial Sequence: Synthetic oligonucleotide
  Antisense strand to SEQ ID NO: 1263666
aucacacaaauaauagcaa

SEQ ID NO: 1263668 - RNA, 19 nt, Artificial Sequence
  Description of Artificial Sequence: Synthetic oligonucleotide
  Sense strand starting at position 153 of SEQ ID NO: 1241324
gcagaaaucuugucuuauu

SEQ ID NO: 1263669 - RNA, 19 nt, Artificial Sequence
  Description of Artificial Sequence: Synthetic oligonucleotide
  Antisense strand to SEQ ID NO: 1263668
aauaagacaagauuucugc

SEQ ID NO: 1263670 - RNA, 19 nt, Artificial Sequence
  Description of Artificial Sequence: Synthetic oligonucleotide
  Sense strand starting at position 167 of SEQ ID NO: 1241324
uuauuuacauggcauagaa

SEQ ID NO: 1263671 - RNA, 19 nt, Artificial Sequence
  Description of Artificial Sequence: Synthetic oligonucleotide
  Antisense strand to SEQ ID NO: 1263670
uucuaugccauguaaauaa

SEQ ID NO: 1263672 - RNA, 19 nt, Artificial Sequence
  Description of Artificial Sequence: Synthetic oligonucleotide
  Sense strand starting at position 308 of SEQ ID NO: 1241324
aguggagauucaguggaga

SEQ ID NO: 1263673 - RNA, 19 nt, Artificial Sequence
  Description of Artificial Sequence: Synthetic oligonucleotide
  Antisense strand to SEQ ID NO: 1263672
ucuccacugaaucuccacu

SEQ ID NO: 1263674 - RNA, 19 nt, Artificial Sequence
  Description of Artificial Sequence: Synthetic oligonucleotide
  Sense strand starting at position 361 of SEQ ID NO: 1241324
agcaacugcucagcaagaa

SEQ ID NO: 1263675 - RNA, 19 nt, Artificial Sequence
  Description of Artificial Sequence: Synthetic oligonucleotide
  Antisense strand to SEQ ID NO: 1263674
uucuugcugagcaguugcu

SEQ ID NO: 1263676 - RNA, 19 nt, Artificial Sequence
  Description of Artificial Sequence: Synthetic oligonucleotide
  Sense strand starting at position 362 of SEQ ID NO: 1241324
gcaacugcucagcaagaau

SEQ ID NO: 1263677 - RNA, 19 nt, Artificial Sequence
  Description of Artificial Sequence: Synthetic oligonucleotide
  Antisense strand to SEQ ID NO: 1263676
auucuugcugagcaguugc

SEQ ID NO: 1263678 - RNA, 19 nt, Artificial Sequence
  Description of Artificial Sequence: Synthetic oligonucleotide
  Sense strand starting at position 365 of SEQ ID NO: 1241324
acugcucagcaagaaugau

SEQ ID NO: 1263679 - RNA, 19 nt, Artificial Sequence
  Description of Artificial Sequence: Synthetic oligonucleotide
  Antisense strand to SEQ ID NO: 1263678
aucauucuugcugagcagu

SEQ ID NO: 1263680 - RNA, 19 nt, Artificial Sequence
  Description of Artificial Sequence: Synthetic oligonucleotide
  Sense strand starting at position 412 of SEQ ID NO: 1241324
gcaccauuccuggaugucu

SEQ ID NO: 1263681 - RNA, 19 nt, Artificial Sequence
  Description of Artificial Sequence: Synthetic oligonucleotide
  Antisense strand to SEQ ID NO: 1263680
agacauccaggaauggugc

SEQ ID NO: 1263682 - RNA, 19 nt, Artificial Sequence
  Description of Artificial Sequence: Synthetic oligonucleotide
  Sense strand starting at position 436 of SEQ ID NO: 1241324
cccagauagccugaagucu

SEQ ID NO: 1263683 - RNA, 19 nt, Artificial Sequence
  Description of Artificial Sequence: Synthetic oligonucleotide
  Antisense strand to SEQ ID NO: 1263682
agacuucaggcuaucuggg

SEQ ID NO: 1263684 - RNA, 19 nt, Artificial Sequence
  Description of Artificial Sequence: Synthetic oligonucleotide
  Sense strand starting at position 1403 of SEQ ID NO: 1241324
uuugcuaucuccuuggaag

SEQ ID NO: 1263685 - RNA, 19 nt, Artificial Sequence
  Description of Artificial Sequence: Synthetic oligonucleotide
  Antisense strand to SEQ ID NO: 1263684
cuuccaaggagauagcaaa

SEQ ID NO: 1263686 - RNA, 19 nt, Artificial Sequence
  Description of Artificial Sequence: Synthetic oligonucleotide
  Sense strand starting at position 1404 of SEQ ID NO: 1241324
uugcuaucuccuuggaaga

SEQ ID NO: 1263687 - RNA, 19 nt, Artificial Sequence
  Description of Artificial Sequence: Synthetic oligonucleotide
  Antisense strand to SEQ ID NO: 1263686
ucuuccaaggagauagcaa

SEQ ID NO: 1263688 - RNA, 19 nt, Artificial Sequence
  Description of Artificial Sequence: Synthetic oligonucleotide
  Sense strand starting at position 1427 of SEQ ID NO: 1241324
ucagcauuccaggguccau

SEQ ID NO: 1263689 - RNA, 19 nt, Artificial Sequence
  Description of Artificial Sequence: Synthetic oligonucleotide
  Antisense strand to SEQ ID NO: 1263688
auggacccuggaaugcuga

SEQ ID NO: 1263690 - RNA, 19 nt, Artificial Sequence
  Description of Artificial Sequence: Synthetic oligonucleotide
  Sense strand starting at position 1627 of SEQ ID NO: 1241324
aguggacucacauguugaa

SEQ ID NO: 1263691 - RNA, 19 nt, Artificial Sequence
  Description of Artificial Sequence: Synthetic oligonucleotide
  Antisense strand to SEQ ID NO: 1263690
uucaacaugugaguccacu

SEQ ID NO: 1263692 - RNA, 19 nt, Artificial Sequence
  Description of Artificial Sequence: Synthetic oligonucleotide
  Sense strand starting at position 1630 of SEQ ID NO: 1241324
ggacucacauguugaagaa

SEQ ID NO: 1263693 - RNA, 19 nt, Artificial Sequence
  Description of Artificial Sequence: Synthetic oligonucleotide
  Antisense strand to SEQ ID NO: 1263692
uucuucaacaugugagucc

SEQ ID NO: 1263694 - RNA, 19 nt, Artificial Sequence
  Description of Artificial Sequence: Synthetic oligonucleotide
  Sense strand starting at position 2115 of SEQ ID NO: 1241324
gguaguauguguccugaca

SEQ ID NO: 1263695 - RNA, 19 nt, Artificial Sequence
  Description of Artificial Sequence: Synthetic oligonucleotide
  Antisense strand to SEQ ID NO: 1263694
ugucaggacacauacuacc

SEQ ID NO: 1263696 - RNA, 19 nt, Artificial Sequence
  Description of Artificial Sequence: Synthetic oligonucleotide
  Sense strand starting at position 2223 of SEQ ID NO: 1241324
uuguccauagucugccaaa

SEQ ID NO: 1263697 - RNA, 19 nt, Artificial Sequence
  Description of Artificial Sequence: Synthetic oligonucleotide
  Antisense strand to SEQ ID NO: 1263696
uuuggcagacuauggacaa

SEQ ID NO: 1263698 - RNA, 19 nt, Artificial Sequence
  Description of Artificial Sequence: Synthetic oligonucleotide
  Sense strand starting at position 2344 of SEQ ID NO: 1241324
cugccagucuuaucagugu

SEQ ID NO: 1263699 - RNA, 19 nt, Artificial Sequence
  Description of Artificial Sequence: Synthetic oligonucleotide
  Antisense strand to SEQ ID NO: 1263698
acacugauaagacuggcag

SEQ ID NO: 1263700 - RNA, 19 nt, Artificial Sequence
  Description of Artificial Sequence: Synthetic oligonucleotide
  Sense strand starting at position 2347 of SEQ ID NO: 1241324
ccagucuuaucagugugau

SEQ ID NO: 1263701 - RNA, 19 nt, Artificial Sequence
  Description of Artificial Sequence: Synthetic oligonucleotide
  Antisense strand to SEQ ID NO: 1263700
aucacacugauaagacugg

SEQ ID NO: 1263702 - RNA, 19 nt, Artificial Sequence
  Description of Artificial Sequence: Synthetic oligonucleotide
  Sense strand starting at position 2348 of SEQ ID NO: 1241324
cagucuuaucagugugauc

SEQ ID NO: 1263703 - RNA, 19 nt, Artificial Sequence
  Description of Artificial Sequence: Synthetic oligonucleotide
  Antisense strand to SEQ ID NO: 1263702
gaucacacugauaagacug

SEQ ID NO: 1263704 - RNA, 19 nt, Artificial Sequence
  Description of Artificial Sequence: Synthetic oligonucleotide
  Sense strand starting at position 2350 of SEQ ID NO: 1241324
gucuuaucagugugaucua

SEQ ID NO: 1263705 - RNA, 19 nt, Artificial Sequence
  Description of Artificial Sequence: Synthetic oligonucleotide
  Antisense strand to SEQ ID NO: 1263704
uagaucacacugauaagac

SEQ ID NO: 1263706 - RNA, 19 nt, Artificial Sequence
  Description of Artificial Sequence: Synthetic oligonucleotide
  Sense strand starting at position 2435 of SEQ ID NO: 1241324
cagcacuguggccaucaua

SEQ ID NO: 1263707 - RNA, 19 nt, Artificial Sequence
  Description of Artificial Sequence: Synthetic oligonucleotide
  Antisense strand to SEQ ID NO: 1263706
uaugauggccacagugcug

SEQ ID NO: 1263708 - RNA, 19 nt, Artificial Sequence
  Description of Artificial Sequence: Synthetic oligonucleotide
  Sense strand starting at position 2464 of SEQ ID NO: 1241324
ggcagaucagcauggguau

SEQ ID NO: 1263709 - RNA, 19 nt, Artificial Sequence
  Description of Artificial Sequence: Synthetic oligonucleotide
  Antisense strand to SEQ ID NO: 1263708
auacccaugcugaucugcc

SEQ ID NO: 1263710 - RNA, 19 nt, Artificial Sequence
  Description of Artificial Sequence: Synthetic oligonucleotide
  Sense strand starting at position 2522 of SEQ ID NO: 1241324
ccuaguuccugucuggauu

SEQ ID NO: 1263711 - RNA, 19 nt, Artificial Sequence
  Description of Artificial Sequence: Synthetic oligonucleotide
  Antisense strand to SEQ ID NO: 1263710
aauccagacaggaacuagg

SEQ ID NO: 1263712 - RNA, 19 nt, Artificial Sequence
  Description of Artificial Sequence: Synthetic oligonucleotide
  Sense strand starting at position 2588 of SEQ ID NO: 1241324
gcgguuucaucuguugauc

SEQ ID NO: 1263713 - RNA, 19 nt, Artificial Sequence
  Description of Artificial Sequence: Synthetic oligonucleotide
  Antisense strand to SEQ ID NO: 1263712
gaucaacagaugaaaccgc

SEQ ID NO: 1263714 - RNA, 19 nt, Artificial Sequence
  Description of Artificial Sequence: Synthetic oligonucleotide
  Sense strand starting at position 2624 of SEQ ID NO: 1241324
ccuaaagauuagguuuacu

SEQ ID NO: 1263715 - RNA, 19 nt, Artificial Sequence
  Description of Artificial Sequence: Synthetic oligonucleotide
  Antisense strand to SEQ ID NO: 1263714
aguaaaccuaaucuuuagg

SEQ ID NO: 1263716 - RNA, 19 nt, Artificial Sequence
  Description of Artificial Sequence: Synthetic oligonucleotide
  Sense strand starting at position 2635 of SEQ ID NO: 1241324
gguuuacucccaggugaca

SEQ ID NO: 1263717 - RNA, 19 nt, Artificial Sequence
  Description of Artificial Sequence: Synthetic oligonucleotide
  Antisense strand to SEQ ID NO: 1263716
ugucaccugggaguaaacc

SEQ ID NO: 1263718 - RNA, 19 nt, Artificial Sequence
  Description of Artificial Sequence: Synthetic oligonucleotide
  Sense strand starting at position 2675 of SEQ ID NO: 1241324
gggcaauugccagacagga

SEQ ID NO: 1263719 - RNA, 19 nt, Artificial Sequence
  Description of Artificial Sequence: Synthetic oligonucleotide
  Antisense strand to SEQ ID NO: 1263718
uccugucuggcaauugccc

SEQ ID NO: 1263720 - RNA, 19 nt, Artificial Sequence
  Description of Artificial Sequence: Synthetic oligonucleotide
  Sense strand starting at position 2677 of SEQ ID NO: 1241324
gcaauugccagacaggagu

SEQ ID NO: 1263721 - RNA, 19 nt, Artificial Sequence
  Description of Artificial Sequence: Synthetic oligonucleotide
  Antisense strand to SEQ ID NO: 1263720
acuccugucuggcaauugc

SEQ ID NO: 1263722 - RNA, 19 nt, Artificial Sequence
  Description of Artificial Sequence: Synthetic oligonucleotide
  Sense strand starting at position 2797 of SEQ ID NO: 1241324
agggcagucagcuaccuau

SEQ ID NO: 1263723 - RNA, 19 nt, Artificial Sequence
  Description of Artificial Sequence: Synthetic oligonucleotide
  Antisense strand to SEQ ID NO: 1263722
auagguagcugacugcccu

SEQ ID NO: 1263724 - RNA, 19 nt, Artificial Sequence
  Description of Artificial Sequence: Synthetic oligonucleotide
  Sense strand starting at position 2808 of SEQ ID NO: 1241324
cuaccuauccacggagagu

SEQ ID NO: 1263725 - RNA, 19 nt, Artificial Sequence
  Description of Artificial Sequence: Synthetic oligonucleotide
  Antisense strand to SEQ ID NO: 1263724
acucuccguggauagguag

SEQ ID NO: 1263726 - RNA, 19 nt, Artificial Sequence
  Description of Artificial Sequence: Synthetic oligonucleotide
  Sense strand starting at position 2824 of SEQ ID NO: 1241324
agugccuguuagucaguaa

SEQ ID NO: 1263727 - RNA, 19 nt, Artificial Sequence
  Description of Artificial Sequence: Synthetic oligonucleotide
  Antisense strand to SEQ ID NO: 1263726
uuacugacuaacaggcacu

SEQ ID NO: 1263728 - RNA, 19 nt, Artificial Sequence
  Description of Artificial Sequence: Synthetic oligonucleotide
  Sense strand starting at position 2828 of SEQ ID NO: 1241324
ccuguuagucaguaacugu

SEQ ID NO: 1263729 - RNA, 19 nt, Artificial Sequence
  Description of Artificial Sequence: Synthetic oligonucleotide
  Antisense strand to SEQ ID NO: 1263728
acaguuacugacuaacagg

SEQ ID NO: 1263730 - RNA, 19 nt, Artificial Sequence
  Description of Artificial Sequence: Synthetic oligonucleotide
  Sense strand starting at position 2835 of SEQ ID NO: 1241324
gucaguaacuguuucgaga

SEQ ID NO: 1263731 - RNA, 19 nt, Artificial Sequence
  Description of Artificial Sequence: Synthetic oligonucleotide
  Antisense strand to SEQ ID NO: 1263730
ucucgaaacaguuacugac

SEQ ID NO: 1263732 - RNA, 19 nt, Artificial Sequence
  Description of Artificial Sequence: Synthetic oligonucleotide
  Sense strand starting at position 2943 of SEQ ID NO: 1241324
accugaguucugggcccaa

SEQ ID NO: 1263733 - RNA, 19 nt, Artificial Sequence
  Description of Artificial Sequence: Synthetic oligonucleotide
  Antisense strand to SEQ ID NO: 1263732
uugggcccagaacucaggu

SEQ ID NO: 1263734 - RNA, 19 nt, Artificial Sequence
  Description of Artificial Sequence: Synthetic oligonucleotide
  Sense strand starting at position 3496 of SEQ ID NO: 1241324
ugugcuaucacggcucacu

SEQ ID NO: 1263735 - RNA, 19 nt, Artificial Sequence
  Description of Artificial Sequence: Synthetic oligonucleotide
  Antisense strand to SEQ ID NO: 1263734
agugagccgugauagcaca

SEQ ID NO: 1263736 - RNA, 19 nt, Artificial Sequence
  Description of Artificial Sequence: Synthetic oligonucleotide
  Sense strand starting at position 3840 of SEQ ID NO: 1241324
ccgugauggcacuauugca

SEQ ID NO: 1263737 - RNA, 19 nt, Artificial Sequence
  Description of Artificial Sequence: Synthetic oligonucleotide
  Antisense strand to SEQ ID NO: 1263736
ugcaauagugccaucacgg

SEQ ID NO: 1263738 - RNA, 19 nt, Artificial Sequence
  Description of Artificial Sequence: Synthetic oligonucleotide
  Sense strand starting at position 3909 of SEQ ID NO: 1241324
gagacaaagucucacuaag

SEQ ID NO: 1263739 - RNA, 19 nt, Artificial Sequence
  Description of Artificial Sequence: Synthetic oligonucleotide
  Antisense strand to SEQ ID NO: 1263738
cuuagugagacuuugucuc

SEQ ID NO: 1263740 - RNA, 19 nt, Artificial Sequence
  Description of Artificial Sequence: Synthetic oligonucleotide
  Sense strand starting at position 103 of SEQ ID NO: 1241325
cucaacuguuagucaggau

SEQ ID NO: 1263741 - RNA, 19 nt, Artificial Sequence
  Description of Artificial Sequence: Synthetic oligonucleotide
  Antisense strand to SEQ ID NO: 1263740
auccugacuaacaguugag

SEQ ID NO: 1263742 - RNA, 19 nt, Artificial Sequence
  Description of Artificial Sequence: Synthetic oligonucleotide
  Sense strand starting at position 248 of SEQ ID NO: 1241325
auaauccaagucuguugaa

SEQ ID NO: 1263743 - RNA, 19 nt, Artificial Sequence
  Description of Artificial Sequence: Synthetic oligonucleotide
  Antisense strand to SEQ ID NO: 1263742
uucaacagacuuggauuau

SEQ ID NO: 1263744 - RNA, 19 nt, Artificial Sequence
  Description of Artificial Sequence: Synthetic oligonucleotide
  Sense strand starting at position 338 of SEQ ID NO: 1241325
gaaguacaugacugaggua

SEQ ID NO: 1263745 - RNA, 19 nt, Artificial Sequence
  Description of Artificial Sequence: Synthetic oligonucleotide
  Antisense strand to SEQ ID NO: 1263744
uaccucagucauguacuuc

SEQ ID NO: 1263746 - RNA, 19 nt, Artificial Sequence
  Description of Artificial Sequence: Synthetic oligonucleotide
  Sense strand starting at position 366 of SEQ ID NO: 1241325
guuaaugaugucuauucua

SEQ ID NO: 1263747 - RNA, 19 nt, Artificial Sequence
  Description of Artificial Sequence: Synthetic oligonucleotide
  Antisense strand to SEQ ID NO: 1263746
uagaauagacaucauuaac

SEQ ID NO: 1263748 - RNA, 19 nt, Artificial Sequence
  Description of Artificial Sequence: Synthetic oligonucleotide
  Sense strand starting at position 485 of SEQ ID NO: 1241325
cacugagaauaguucuugu

SEQ ID NO: 1263749 - RNA, 19 nt, Artificial Sequence
  Description of Artificial Sequence: Synthetic oligonucleotide
  Antisense strand to SEQ ID NO: 1263748
acaagaacuauucucagug

SEQ ID NO: 1263750 - RNA, 19 nt, Artificial Sequence
  Description of Artificial Sequence: Synthetic oligonucleotide
  Sense strand starting at position 488 of SEQ ID NO: 1241325
ugagaauaguucuuguuac

SEQ ID NO: 1263751 - RNA, 19 nt, Artificial Sequence
  Description of Artificial Sequence: Synthetic oligonucleotide
  Antisense strand to SEQ ID NO: 1263750
guaacaagaacuauucuca

SEQ ID NO: 1263752 - RNA, 19 nt, Artificial Sequence
  Description of Artificial Sequence: Synthetic oligonucleotide
  Sense strand starting at position 543 of SEQ ID NO: 1241325
ugcggaugccaggauaaua

SEQ ID NO: 1263753 - RNA, 19 nt, Artificial Sequence
  Description of Artificial Sequence: Synthetic oligonucleotide
  Antisense strand to SEQ ID NO: 1263752
uauuauccuggcauccgca

SEQ ID NO: 1263754 - RNA, 19 nt, Artificial Sequence
  Description of Artificial Sequence: Synthetic oligonucleotide
  Sense strand starting at position 1128 of SEQ ID NO: 1241325
ugacuauagacggaugguu

SEQ ID NO: 1263755 - RNA, 19 nt, Artificial Sequence
  Description of Artificial Sequence: Synthetic oligonucleotide
  Antisense strand to SEQ ID NO: 1263754
aaccauccgucuauaguca

SEQ ID NO: 1263756 - RNA, 19 nt, Artificial Sequence
  Description of Artificial Sequence: Synthetic oligonucleotide
  Sense strand starting at position 1130 of SEQ ID NO: 1241325
acuauagacggaugguuaa

SEQ ID NO: 1263757 - RNA, 19 nt, Artificial Sequence
  Description of Artificial Sequence: Synthetic oligonucleotide
  Antisense strand to SEQ ID NO: 1263756
uuaaccauccgucuauagu

SEQ ID NO: 1263758 - RNA, 19 nt, Artificial Sequence
  Description of Artificial Sequence: Synthetic oligonucleotide
  Sense strand starting at position 1133 of SEQ ID NO: 1241325
auagacggaugguuaagau

SEQ ID NO: 1263759 - RNA, 19 nt, Artificial Sequence
  Description of Artificial Sequence: Synthetic oligonucleotide
  Antisense strand to SEQ ID NO: 1263758
aucuuaaccauccgucuau

SEQ ID NO: 1263760 - RNA, 19 nt, Artificial Sequence
  Description of Artificial Sequence: Synthetic oligonucleotide
  Sense strand starting at position 1238 of SEQ ID NO: 1241325
gcacaagagaaaugugcau

SEQ ID NO: 1263761 - RNA, 19 nt, Artificial Sequence
  Description of Artificial Sequence: Synthetic oligonucleotide
  Antisense strand to SEQ ID NO: 1263760
augcacauuucucuugugc

SEQ ID NO: 1263762 - RNA, 19 nt, Artificial Sequence
  Description of Artificial Sequence: Synthetic oligonucleotide
  Sense strand starting at position 1295 of SEQ ID NO: 1241325
aagggucgauauguuaaau

SEQ ID NO: 1263763 - RNA, 19 nt, Artificial Sequence
  Description of Artificial Sequence: Synthetic oligonucleotide
  Antisense strand to SEQ ID NO: 1263762
auuuaacauaucgacccuu

SEQ ID NO: 1263764 - RNA, 19 nt, Artificial Sequence
  Description of Artificial Sequence: Synthetic oligonucleotide
  Sense strand starting at position 1466 of SEQ ID NO: 1241325
ccaggagucucauccacac

SEQ ID NO: 1263765 - RNA, 19 nt, Artificial Sequence
  Description of Artificial Sequence: Synthetic oligonucleotide
  Antisense strand to SEQ ID NO: 1263764
guguggaugagacuccugg

SEQ ID NO: 1263766 - RNA, 19 nt, Artificial Sequence
  Description of Artificial Sequence: Synthetic oligonucleotide
  Sense strand starting at position 1558 of SEQ ID NO: 1241325
caaggaucccaaugagguu

SEQ ID NO: 1263767 - RNA, 19 nt, Artificial Sequence
  Description of Artificial Sequence: Synthetic oligonucleotide
  Antisense strand to SEQ ID NO: 1263766
aaccucauugggauccuug

SEQ ID NO: 1263768 - RNA, 19 nt, Artificial Sequence
  Description of Artificial Sequence: Synthetic oligonucleotide
  Sense strand starting at position 2151 of SEQ ID NO: 1241325
guagaagaccgcuagagau

SEQ ID NO: 1263769 - RNA, 19 nt, Artificial Sequence
  Description of Artificial Sequence: Synthetic oligonucleotide
  Antisense strand to SEQ ID NO: 1263768
aucucuagcggucuucuac

SEQ ID NO: 1263770 - RNA, 19 nt, Artificial Sequence
  Description of Artificial Sequence: Synthetic oligonucleotide
  Sense strand starting at position 2255 of SEQ ID NO: 1241325
gccuuuaaaguccagucua

SEQ ID NO: 1263771 - RNA, 19 nt, Artificial Sequence
  Description of Artificial Sequence: Synthetic oligonucleotide
  Antisense strand to SEQ ID NO: 1263770
uagacuggacuuuaaaggc

SEQ ID NO: 1263772 - RNA, 19 nt, Artificial Sequence
  Description of Artificial Sequence: Synthetic oligonucleotide
  Sense strand starting at position 2461 of SEQ ID NO: 1241325
acgagaaaguuuguccaaa

SEQ ID NO: 1263773 - RNA, 19 nt, Artificial Sequence
  Description of Artificial Sequence: Synthetic oligonucleotide
  Antisense strand to SEQ ID NO: 1263772
uuuggacaaacuuucucgu

SEQ ID NO: 1263774 - RNA, 19 nt, Artificial Sequence
  Description of Artificial Sequence: Synthetic oligonucleotide
  Sense strand starting at position 2535 of SEQ ID NO: 1241325
augccacuugcugaugaga

SEQ ID NO: 1263775 - RNA, 19 nt, Artificial Sequence
  Description of Artificial Sequence: Synthetic oligonucleotide
  Antisense strand to SEQ ID NO: 1263774
ucucaucagcaaguggcau

SEQ ID NO: 1263776 - RNA, 19 nt, Artificial Sequence
  Description of Artificial Sequence: Synthetic oligonucleotide
  Sense strand starting at position 2543 of SEQ ID NO: 1241325
ugcugaugagaaugacauu

SEQ ID NO: 1263777 - RNA, 19 nt, Artificial Sequence
  Description of Artificial Sequence: Synthetic oligonucleotide
  Antisense strand to SEQ ID NO: 1263776
aaugucauucucaucagca

SEQ ID NO: 1263778 - RNA, 19 nt, Artificial Sequence
  Description of Artificial Sequence: Synthetic oligonucleotide
  Sense strand starting at position 2670 of SEQ ID NO: 1241325
gacagaaaucuucguuaga

SEQ ID NO: 1263779 - RNA, 19 nt, Artificial Sequence
  Description of Artificial Sequence: Synthetic oligonucleotide
  Antisense strand to SEQ ID NO: 1263778
ucuaacgaagauuucuguc

SEQ ID NO: 1263780 - RNA, 19 nt, Artificial Sequence
  Description of Artificial Sequence: Synthetic oligonucleotide
  Sense strand starting at position 2671 of SEQ ID NO: 1241325
acagaaaucuucguuagag

SEQ ID NO: 1263781 - RNA, 19 nt, Artificial Sequence
  Description of Artificial Sequence: Synthetic oligonucleotide
  Antisense strand to SEQ ID NO: 1263780
cucuaacgaagauuucugu

SEQ ID NO: 1263782 - RNA, 19 nt, Artificial Sequence
  Description of Artificial Sequence: Synthetic oligonucleotide
  Sense strand starting at position 2672 of SEQ ID NO: 1241325
cagaaaucuucguuagagu

SEQ ID NO: 1263783 - RNA, 19 nt, Artificial Sequence
  Description of Artificial Sequence: Synthetic oligonucleotide
  Antisense strand to SEQ ID NO: 1263782
acucuaacgaagauuucug

SEQ ID NO: 1263784 - RNA, 19 nt, Artificial Sequence
  Description of Artificial Sequence: Synthetic oligonucleotide
  Sense strand starting at position 2673 of SEQ ID NO: 1241325
agaaaucuucguuagagug

SEQ ID NO: 1263785 - RNA, 19 nt, Artificial Sequence
  Description of Artificial Sequence: Synthetic oligonucleotide
  Antisense strand to SEQ ID NO: 1263784
cacucuaacgaagauuucu

SEQ ID NO: 1263786 - RNA, 19 nt, Artificial Sequence
  Description of Artificial Sequence: Synthetic oligonucleotide
  Sense strand starting at position 2679 of SEQ ID NO: 1241325
cuucguuagaguggaauaa

SEQ ID NO: 1263787 - RNA, 19 nt, Artificial Sequence
  Description of Artificial Sequence: Synthetic oligonucleotide
  Antisense strand to SEQ ID NO: 1263786
uuauuccacucuaacgaag

SEQ ID NO: 1263788 - RNA, 19 nt, Artificial Sequence
  Description of Artificial Sequence: Synthetic oligonucleotide
  Sense strand starting at position 2680 of SEQ ID NO: 1241325
uucguuagaguggaauaau

SEQ ID NO: 1263789 - RNA, 19 nt, Artificial Sequence
  Description of Artificial Sequence: Synthetic oligonucleotide
  Antisense strand to SEQ ID NO: 1263788
auuauuccacucuaacgaa

SEQ ID NO: 1263790 - RNA, 19 nt, Artificial Sequence
  Description of Artificial Sequence: Synthetic oligonucleotide
  Sense strand starting at position 2701 of SEQ ID NO: 1241325
cacaccgacguuuauuaua

SEQ ID NO: 1263791 - RNA, 19 nt, Artificial Sequence
  Description of Artificial Sequence: Synthetic oligonucleotide
  Antisense strand to SEQ ID NO: 1263790
uauaauaaacgucggugug

SEQ ID NO: 1263792 - RNA, 19 nt, Artificial Sequence
  Description of Artificial Sequence: Synthetic oligonucleotide
  Sense strand starting at position 2809 of SEQ ID NO: 1241325
gaguuagcucugcuuugca

SEQ ID NO: 1263793 - RNA, 19 nt, Artificial Sequence
  Description of Artificial Sequence: Synthetic oligonucleotide
  Antisense strand to SEQ ID NO: 1263792
ugcaaagcagagcuaacuc

SEQ ID NO: 1263794 - RNA, 19 nt, Artificial Sequence
  Description of Artificial Sequence: Synthetic oligonucleotide
  Sense strand starting at position 2821 of SEQ ID NO: 1241325
cuuugcaaggagcauuaaa

SEQ ID NO: 1263795 - RNA, 19 nt, Artificial Sequence
  Description of Artificial Sequence: Synthetic oligonucleotide
  Antisense strand to SEQ ID NO: 1263794
uuuaaugcuccuugcaaag

SEQ ID NO: 1263796 - RNA, 19 nt, Artificial Sequence
  Description of Artificial Sequence: Synthetic oligonucleotide
  Sense strand starting at position 3041 of SEQ ID NO: 1241325
caaggaaugaggcacguua

SEQ ID NO: 1263797 - RNA, 19 nt, Artificial Sequence
  Description of Artificial Sequence: Synthetic oligonucleotide
  Antisense strand to SEQ ID NO: 1263796
uaacgugccucauuccuug

SEQ ID NO: 1263798 - RNA, 19 nt, Artificial Sequence
  Description of Artificial Sequence: Synthetic oligonucleotide
  Sense strand starting at position 3043 of SEQ ID NO: 1241325
aggaaugaggcacguuaga

SEQ ID NO: 1263799 - RNA, 19 nt, Artificial Sequence
  Description of Artificial Sequence: Synthetic oligonucleotide
  Antisense strand to SEQ ID NO: 1263798
ucuaacgugccucauuccu

SEQ ID NO: 1263800 - RNA, 19 nt, Artificial Sequence
  Description of Artificial Sequence: Synthetic oligonucleotide
  Sense strand starting at position 3054 of SEQ ID NO: 1241325
acguuagacgcucaauaac

SEQ ID NO: 1263801 - RNA, 19 nt, Artificial Sequence
  Description of Artificial Sequence: Synthetic oligonucleotide
  Antisense strand to SEQ ID NO: 1263800
guuauugagcgucuaacgu

SEQ ID NO: 1263802 - RNA, 19 nt, Artificial Sequence
  Description of Artificial Sequence: Synthetic oligonucleotide
  Sense strand starting at position 3057 of SEQ ID NO: 1241325
uuagacgcucaauaacauu

SEQ ID NO: 1263803 - RNA, 19 nt, Artificial Sequence
  Description of Artificial Sequence: Synthetic oligonucleotide
  Antisense strand to SEQ ID NO: 1263802
aauguuauugagcgucuaa

SEQ ID NO: 1263804 - RNA, 19 nt, Artificial Sequence
  Description of Artificial Sequence: Synthetic oligonucleotide
  Sense strand starting at position 3150 of SEQ ID NO: 1241325
uuaagugauuuaucacguu

SEQ ID NO: 1263805 - RNA, 19 nt, Artificial Sequence
  Description of Artificial Sequence: Synthetic oligonucleotide
  Antisense strand to SEQ ID NO: 1263804
aacgugauaaaucacuuaa

SEQ ID NO: 1263806 - RNA, 19 nt, Artificial Sequence
  Description of Artificial Sequence: Synthetic oligonucleotide
  Sense strand starting at position 3183 of SEQ ID NO: 1241325
gccaucuaaucauuggaaa

SEQ ID NO: 1263807 - RNA, 19 nt, Artificial Sequence
  Description of Artificial Sequence: Synthetic oligonucleotide
  Antisense strand to SEQ ID NO: 1263806
uuuccaaugauuagauggc

SEQ ID NO: 1263808 - RNA, 19 nt, Artificial Sequence
  Description of Artificial Sequence: Synthetic oligonucleotide
  Sense strand starting at position 3252 of SEQ ID NO: 1241325
ggaccauauuuagaguaac

SEQ ID NO: 1263809 - RNA, 19 nt, Artificial Sequence
  Description of Artificial Sequence: Synthetic oligonucleotide
  Antisense strand to SEQ ID NO: 1263808
guuacucuaaauauggucc

SEQ ID NO: 1263810 - RNA, 19 nt, Artificial Sequence
  Description of Artificial Sequence: Synthetic oligonucleotide
  Sense strand starting at position 3263 of SEQ ID NO: 1241325
agaguaacgccuuaauaau

SEQ ID NO: 1263811 - RNA, 19 nt, Artificial Sequence
  Description of Artificial Sequence: Synthetic oligonucleotide
  Antisense strand to SEQ ID NO: 1263810
auuauuaaggcguuacucu

SEQ ID NO: 1263812 - RNA, 19 nt, Artificial Sequence
  Description of Artificial Sequence: Synthetic oligonucleotide
  Sense strand starting at position 3303 of SEQ ID NO: 1241325
cugugaagguuuccgggaa

SEQ ID NO: 1263813 - RNA, 19 nt, Artificial Sequence
  Description of Artificial Sequence: Synthetic oligonucleotide
  Antisense strand to SEQ ID NO: 1263812
uucccggaaaccuucacag

SEQ ID NO: 1263814 - RNA, 19 nt, Artificial Sequence
  Description of Artificial Sequence: Synthetic oligonucleotide
  Sense strand starting at position 3307 of SEQ ID NO: 1241325
gaagguuuccgggaagcca

SEQ ID NO: 1263815 - RNA, 19 nt, Artificial Sequence
  Description of Artificial Sequence: Synthetic oligonucleotide
  Antisense strand to SEQ ID NO: 1263814
uggcuucccggaaaccuuc

SEQ ID NO: 1263816 - RNA, 19 nt, Artificial Sequence
  Description of Artificial Sequence: Synthetic oligonucleotide
  Sense strand starting at position 3368 of SEQ ID NO: 1241325
uggauaaacuggccuuagu

SEQ ID NO: 1263817 - RNA, 19 nt, Artificial Sequence
  Description of Artificial Sequence: Synthetic oligonucleotide
  Antisense strand to SEQ ID NO: 1263816
acuaaggccaguuuaucca

SEQ ID NO: 1263818 - RNA, 19 nt, Artificial Sequence
  Description of Artificial Sequence: Synthetic oligonucleotide
  Sense strand starting at position 3389 of SEQ ID NO: 1241325
cgccuucucguuccagagu

SEQ ID NO: 1263819 - RNA, 19 nt, Artificial Sequence
  Description of Artificial Sequence: Synthetic oligonucleotide
  Antisense strand to SEQ ID NO: 1263818
acucuggaacgagaaggcg

SEQ ID NO: 1263820 - RNA, 19 nt, Artificial Sequence
  Description of Artificial Sequence: Synthetic oligonucleotide
  Sense strand starting at position 311 of SEQ ID NO: 1241326
gcuguuccuguugcauuau

SEQ ID NO: 1263821 - RNA, 19 nt, Artificial Sequence
  Description of Artificial Sequence: Synthetic oligonucleotide
  Antisense strand to SEQ ID NO: 1263820
auaaugcaacaggaacagc

SEQ ID NO: 1263822 - RNA, 19 nt, Artificial Sequence
  Description of Artificial Sequence: Synthetic oligonucleotide
  Sense strand starting at position 314 of SEQ ID NO: 1241326
guuccuguugcauuaugca

SEQ ID NO: 1263823 - RNA, 19 nt, Artificial Sequence
  Description of Artificial Sequence: Synthetic oligonucleotide
  Antisense strand to SEQ ID NO: 1263822
ugcauaaugcaacaggaac

SEQ ID NO: 1263824 - RNA, 19 nt, Artificial Sequence
  Description of Artificial Sequence: Synthetic oligonucleotide
  Sense strand starting at position 569 of SEQ ID NO: 1241326
gaguuucccggguaucaag

SEQ ID NO: 1263825 - RNA, 19 nt, Artificial Sequence
  Description of Artificial Sequence: Synthetic oligonucleotide
  Antisense strand to SEQ ID NO: 1263824
cuugauacccgggaaacuc

SEQ ID NO: 1263826 - RNA, 19 nt, Artificial Sequence
  Description of Artificial Sequence: Synthetic oligonucleotide
  Sense strand starting at position 576 of SEQ ID NO: 1241326
ccggguaucaaguaugggu

SEQ ID NO: 1263827 - RNA, 19 nt, Artificial Sequence
  Description of Artificial Sequence: Synthetic oligonucleotide
  Antisense strand to SEQ ID NO: 1263826
acccauacuugauacccgg

SEQ ID NO: 1263828 - RNA, 19 nt, Artificial Sequence
  Description of Artificial Sequence: Synthetic oligonucleotide
  Sense strand starting at position 667 of SEQ ID NO: 1241326
ccuugaucuugggcuugau

SEQ ID NO: 1263829 - RNA, 19 nt, Artificial Sequence
  Description of Artificial Sequence: Synthetic oligonucleotide
  Antisense strand to SEQ ID NO: 1263828
aucaagcccaagaucaagg

SEQ ID NO: 1263830 - RNA, 19 nt, Artificial Sequence
  Description of Artificial Sequence: Synthetic oligonucleotide
  Sense strand starting at position 670 of SEQ ID NO: 1241326
ugaucuugggcuugauuau

SEQ ID NO: 1263831 - RNA, 19 nt, Artificial Sequence
  Description of Artificial Sequence: Synthetic oligonucleotide
  Antisense strand to SEQ ID NO: 1263830
auaaucaagcccaagauca

SEQ ID NO: 1263832 - RNA, 19 nt, Artificial Sequence
  Description of Artificial Sequence: Synthetic oligonucleotide
  Sense strand starting at position 671 of SEQ ID NO: 1241326
gaucuugggcuugauuaua

SEQ ID NO: 1263833 - RNA, 19 nt, Artificial Sequence
  Description of Artificial Sequence: Synthetic oligonucleotide
  Antisense strand to SEQ ID NO: 1263832
uauaaucaagcccaagauc

SEQ ID NO: 1263834 - RNA, 19 nt, Artificial Sequence
  Description of Artificial Sequence: Synthetic oligonucleotide
  Sense strand starting at position 790 of SEQ ID NO: 1241326
uguggagagacuugguaac

SEQ ID NO: 1263835 - RNA, 19 nt, Artificial Sequence
  Description of Artificial Sequence: Synthetic oligonucleotide
  Antisense strand to SEQ ID NO: 1263834
guuaccaagucucuccaca

SEQ ID NO: 1263836 - RNA, 19 nt, Artificial Sequence
  Description of Artificial Sequence: Synthetic oligonucleotide
  Sense strand starting at position 927 of SEQ ID NO: 1241326
uccggauuccgccucguau

SEQ ID NO: 1263837 - RNA, 19 nt, Artificial Sequence
  Description of Artificial Sequence: Synthetic oligonucleotide
  Antisense strand to SEQ ID NO: 1263836
auacgaggcggaauccgga

SEQ ID NO: 1263838 - RNA, 19 nt, Artificial Sequence
  Description of Artificial Sequence: Synthetic oligonucleotide
  Sense strand starting at position 1095 of SEQ ID NO: 1241326
ggaauuaguauccaccgca

SEQ ID NO: 1263839 - RNA, 19 nt, Artificial Sequence
  Description of Artificial Sequence: Synthetic oligonucleotide
  Antisense strand to SEQ ID NO: 1263838
ugcgguggauacuaauucc

SEQ ID NO: 1263840 - RNA, 19 nt, Artificial Sequence
  Description of Artificial Sequence: Synthetic oligonucleotide
  Sense strand starting at position 1184 of SEQ ID NO: 1241326
gauaauaacgcuggugaca

SEQ ID NO: 1263841 - RNA, 19 nt, Artificial Sequence
  Description of Artificial Sequence: Synthetic oligonucleotide
  Antisense strand to SEQ ID NO: 1263840
ugucaccagcguuauuauc

SEQ ID NO: 1263842 - RNA, 19 nt, Artificial Sequence
  Description of Artificial Sequence: Synthetic oligonucleotide
  Sense strand starting at position 1227 of SEQ ID NO: 1241326
aggguuguuacuggugaaa

SEQ ID NO: 1263843 - RNA, 19 nt, Artificial Sequence
  Description of Artificial Sequence: Synthetic oligonucleotide
  Antisense strand to SEQ ID NO: 1263842
uuucaccaguaacaacccu

SEQ ID NO: 1263844 - RNA, 19 nt, Artificial Sequence
  Description of Artificial Sequence: Synthetic oligonucleotide
  Sense strand starting at position 1230 of SEQ ID NO: 1241326
guuguuacuggugaaaguu

SEQ ID NO: 1263845 - RNA, 19 nt, Artificial Sequence
  Description of Artificial Sequence: Synthetic oligonucleotide
  Antisense strand to SEQ ID NO: 1263844
aacuuucaccaguaacaac

SEQ ID NO: 1263846 - RNA, 19 nt, Artificial Sequence
  Description of Artificial Sequence: Synthetic oligonucleotide
  Sense strand starting at position 1311 of SEQ ID NO: 1241326
ccaauuuagcaucgaugca

SEQ ID NO: 1263847 - RNA, 19 nt, Artificial Sequence
  Description of Artificial Sequence: Synthetic oligonucleotide
  Antisense strand to SEQ ID NO: 1263846
ugcaucgaugcuaaauugg

SEQ ID NO: 1263848 - RNA, 19 nt, Artificial Sequence
  Description of Artificial Sequence: Synthetic oligonucleotide
  Sense strand starting at position 1372 of SEQ ID NO: 1241326
caugaugcuccguagagga

SEQ ID NO: 1263849 - RNA, 19 nt, Artificial Sequence
  Description of Artificial Sequence: Synthetic oligonucleotide
  Antisense strand to SEQ ID NO: 1263848
uccucuacggagcaucaug

SEQ ID NO: 1263850 - RNA, 19 nt, Artificial Sequence
  Description of Artificial Sequence: Synthetic oligonucleotide
  Sense strand starting at position 1391 of SEQ ID NO: 1241326
gguggauucgaccagcaga

SEQ ID NO: 1263851 - RNA, 19 nt, Artificial Sequence
  Description of Artificial Sequence: Synthetic oligonucleotide
  Antisense strand to SEQ ID NO: 1263850
ucugcuggucgaauccacc

SEQ ID NO: 1263852 - RNA, 19 nt, Artificial Sequence
  Description of Artificial Sequence: Synthetic oligonucleotide
  Sense strand starting at position 2096 of SEQ ID NO: 1241326
gccugacacucccuagaga

SEQ ID NO: 1263853 - RNA, 19 nt, Artificial Sequence
  Description of Artificial Sequence: Synthetic oligonucleotide
  Antisense strand to SEQ ID NO: 1263852
ucucuagggagugucaggc

SEQ ID NO: 1263854 - RNA, 19 nt, Artificial Sequence
  Description of Artificial Sequence: Synthetic oligonucleotide
  Sense strand starting at position 2425 of SEQ ID NO: 1241326
guccuagcugcgcuuuaaa

SEQ ID NO: 1263855 - RNA, 19 nt, Artificial Sequence
  Description of Artificial Sequence: Synthetic oligonucleotide
  Antisense strand to SEQ ID NO: 1263854
uuuaaagcgcagcuaggac

SEQ ID NO: 1263856 - RNA, 19 nt, Artificial Sequence
  Description of Artificial Sequence: Synthetic oligonucleotide
  Sense strand starting at position 2653 of SEQ ID NO: 1241326
ggaguuugaugugugaaug

SEQ ID NO: 1263857 - RNA, 19 nt, Artificial Sequence
  Description of Artificial Sequence: Synthetic oligonucleotide
  Antisense strand to SEQ ID NO: 1263856
cauucacacaucaaacucc

SEQ ID NO: 1263858 - RNA, 19 nt, Artificial Sequence
  Description of Artificial Sequence: Synthetic oligonucleotide
  Sense strand starting at position 2659 of SEQ ID NO: 1241326
ugaugugugaaugggaaau

SEQ ID NO: 1263859 - RNA, 19 nt, Artificial Sequence
  Description of Artificial Sequence: Synthetic oligonucleotide
  Antisense strand to SEQ ID NO: 1263858
auuucccauucacacauca

SEQ ID NO: 1263860 - RNA, 19 nt, Artificial Sequence
  Description of Artificial Sequence: Synthetic oligonucleotide
  Sense strand starting at position 2719 of SEQ ID NO: 1241326
ugagccuuagaauggaaua

SEQ ID NO: 1263861 - RNA, 19 nt, Artificial Sequence
  Description of Artificial Sequence: Synthetic oligonucleotide
  Antisense strand to SEQ ID NO: 1263860
uauuccauucuaaggcuca

SEQ ID NO: 1263862 - RNA, 19 nt, Artificial Sequence
  Description of Artificial Sequence: Synthetic oligonucleotide
  Sense strand starting at position 2797 of SEQ ID NO: 1241326
agcagagggucagcuuuaa

SEQ ID NO: 1263863 - RNA, 19 nt, Artificial Sequence
  Description of Artificial Sequence: Synthetic oligonucleotide
  Antisense strand to SEQ ID NO: 1263862
uuaaagcugacccucugcu

SEQ ID NO: 1263864 - RNA, 19 nt, Artificial Sequence
  Description of Artificial Sequence: Synthetic oligonucleotide
  Sense strand starting at position 2809 of SEQ ID NO: 1241326
gcuuuaagcgccuacauuu

SEQ ID NO: 1263865 - RNA, 19 nt, Artificial Sequence
  Description of Artificial Sequence: Synthetic oligonucleotide
  Antisense strand to SEQ ID NO: 1263864
aaauguaggcgcuuaaagc

SEQ ID NO: 1263866 - RNA, 19 nt, Artificial Sequence
  Description of Artificial Sequence: Synthetic oligonucleotide
  Sense strand starting at position 2832 of SEQ ID NO: 1241326
ccgcgaaauuucccagcuu

SEQ ID NO: 1263867 - RNA, 19 nt, Artificial Sequence
  Description of Artificial Sequence: Synthetic oligonucleotide
  Antisense strand to SEQ ID NO: 1263866
aagcugggaaauuucgcgg

SEQ ID NO: 1263868 - RNA, 19 nt, Artificial Sequence
  Description of Artificial Sequence: Synthetic oligonucleotide
  Sense strand starting at position 2858 of SEQ ID NO: 1241326
ggcgguuacauagagaaca

SEQ ID NO: 1263869 - RNA, 19 nt, Artificial Sequence
  Description of Artificial Sequence: Synthetic oligonucleotide
  Antisense strand to SEQ ID NO: 1263868
uguucucuauguaaccgcc

SEQ ID NO: 1263870 - RNA, 19 nt, Artificial Sequence
  Description of Artificial Sequence: Synthetic oligonucleotide
  Sense strand starting at position 2896 of SEQ ID NO: 1241326
cgcccagaugcuuugcauu

SEQ ID NO: 1263871 - RNA, 19 nt, Artificial Sequence
  Description of Artificial Sequence: Synthetic oligonucleotide
  Antisense strand to SEQ ID NO: 1263870
aaugcaaagcaucugggcg

SEQ ID NO: 1263872 - RNA, 19 nt, Artificial Sequence
  Description of Artificial Sequence: Synthetic oligonucleotide
  Sense strand starting at position 2916 of SEQ ID NO: 1241326
uguaaacagcuuugacuaa

SEQ ID NO: 1263873 - RNA, 19 nt, Artificial Sequence
  Description of Artificial Sequence: Synthetic oligonucleotide
  Antisense strand to SEQ ID NO: 1263872
uuagucaaagcuguuuaca

SEQ ID NO: 1263874 - RNA, 19 nt, Artificial Sequence
  Description of Artificial Sequence: Synthetic oligonucleotide
  Sense strand starting at position 2948 of SEQ ID NO: 1241326
ccaagaaguuaacuggagu

SEQ ID NO: 1263875 - RNA, 19 nt, Artificial Sequence
  Description of Artificial Sequence: Synthetic oligonucleotide
  Antisense strand to SEQ ID NO: 1263874
acuccaguuaacuucuugg

SEQ ID NO: 1263876 - RNA, 19 nt, Artificial Sequence
  Description of Artificial Sequence: Synthetic oligonucleotide
  Sense strand starting at position 3166 of SEQ ID NO: 1241326
ggagccuuuauagaguauu

SEQ ID NO: 1263877 - RNA, 19 nt, Artificial Sequence
  Description of Artificial Sequence: Synthetic oligonucleotide
  Antisense strand to SEQ ID NO: 1263876
aauacucuauaaaggcucc

SEQ ID NO: 1263878 - RNA, 19 nt, Artificial Sequence
  Description of Artificial Sequence: Synthetic oligonucleotide
  Sense strand starting at position 3205 of SEQ ID NO: 1241326
cuugcugaaacggaguuau

SEQ ID NO: 1263879 - RNA, 19 nt, Artificial Sequence
  Description of Artificial Sequence: Synthetic oligonucleotide
  Antisense strand to SEQ ID NO: 1263878
auaacuccguuucagcaag

SEQ ID NO: 1263880 - RNA, 19 nt, Artificial Sequence
  Description of Artificial Sequence: Synthetic oligonucleotide
  Sense strand starting at position 3437 of SEQ ID NO: 1241326
agggauagcuccucaagcu

SEQ ID NO: 1263881 - RNA, 19 nt, Artificial Sequence
  Description of Artificial Sequence: Synthetic oligonucleotide
  Antisense strand to SEQ ID NO: 1263880
agcuugaggagcuaucccu

SEQ ID NO: 1263882 - RNA, 19 nt, Artificial Sequence
  Description of Artificial Sequence: Synthetic oligonucleotide
  Sense strand starting at position 3438 of SEQ ID NO: 1241326
gggauagcuccucaagcuc

SEQ ID NO: 1263883 - RNA, 19 nt, Artificial Sequence
  Description of Artificial Sequence: Synthetic oligonucleotide
  Antisense strand to SEQ ID NO: 1263882
gagcuugaggagcuauccc

SEQ ID NO: 1263884 - RNA, 19 nt, Artificial Sequence
  Description of Artificial Sequence: Synthetic oligonucleotide
  Sense strand starting at position 3526 of SEQ ID NO: 1241326
uauguaaguguacauaagu

SEQ ID NO: 1263885 - RNA, 19 nt, Artificial Sequence
  Description of Artificial Sequence: Synthetic oligonucleotide
  Antisense strand to SEQ ID NO: 1263884
acuuauguacacuuacaua

SEQ ID NO: 1263886 - RNA, 19 nt, Artificial Sequence
  Description of Artificial Sequence: Synthetic oligonucleotide
  Sense strand starting at position 3552 of SEQ ID NO: 1241326
ggagguucuuccuuugaaa

SEQ ID NO: 1263887 - RNA, 19 nt, Artificial Sequence
  Description of Artificial Sequence: Synthetic oligonucleotide
  Antisense strand to SEQ ID NO: 1263886
uuucaaaggaagaaccucc

SEQ ID NO: 1263888 - RNA, 19 nt, Artificial Sequence
  Description of Artificial Sequence: Synthetic oligonucleotide
  Sense strand starting at position 3554 of SEQ ID NO: 1241326
agguucuuccuuugaaauc

SEQ ID NO: 1263889 - RNA, 19 nt, Artificial Sequence
  Description of Artificial Sequence: Synthetic oligonucleotide
  Antisense strand to SEQ ID NO: 1263888
gauuucaaaggaagaaccu

SEQ ID NO: 1263890 - RNA, 19 nt, Artificial Sequence
  Description of Artificial Sequence: Synthetic oligonucleotide
  Sense strand starting at position 3578 of SEQ ID NO: 1241326
ccaggaaagcagcauaauu

SEQ ID NO: 1263891 - RNA, 19 nt, Artificial Sequence
  Description of Artificial Sequence: Synthetic oligonucleotide
  Antisense strand to SEQ ID NO: 1263890
aauuaugcugcuuuccugg

SEQ ID NO: 1263892 - RNA, 19 nt, Artificial Sequence
  Description of Artificial Sequence: Synthetic oligonucleotide
  Sense strand starting at position 3754 of SEQ ID NO: 1241326
guuucuaaaccaugagcaa

SEQ ID NO: 1263893 - RNA, 19 nt, Artificial Sequence
  Description of Artificial Sequence: Synthetic oligonucleotide
  Antisense strand to SEQ ID NO: 1263892
uugcucaugguuuagaaac

SEQ ID NO: 1263894 - RNA, 19 nt, Artificial Sequence
  Description of Artificial Sequence: Synthetic oligonucleotide
  Sense strand starting at position 3903 of SEQ ID NO: 1241326
gcacaugaccuaugaguca

SEQ ID NO: 1263895 - RNA, 19 nt, Artificial Sequence
  Description of Artificial Sequence: Synthetic oligonucleotide
  Antisense strand to SEQ ID NO: 1263894
ugacucauaggucaugugc

SEQ ID NO: 1263896 - RNA, 19 nt, Artificial Sequence
  Description of Artificial Sequence: Synthetic oligonucleotide
  Sense strand starting at position 3914 of SEQ ID NO: 1241326
augagucagcuuuagaaau

SEQ ID NO: 1263897 - RNA, 19 nt, Artificial Sequence
  Description of Artificial Sequence: Synthetic oligonucleotide
  Antisense strand to SEQ ID NO: 1263896
auuucuaaagcugacucau

SEQ ID NO: 1263898 - RNA, 19 nt, Artificial Sequence
  Description of Artificial Sequence: Synthetic oligonucleotide
  Sense strand starting at position 3924 of SEQ ID NO: 1241326
uuuagaaaugugugaugau

SEQ ID NO: 1263899 - RNA, 19 nt, Artificial Sequence
  Description of Artificial Sequence: Synthetic oligonucleotide
  Antisense strand to SEQ ID NO: 1263898
aucaucacacauuucuaaa

SEQ ID NO: 1263900 - RNA, 19 nt, Artificial Sequence
  Description of Artificial Sequence: Synthetic oligonucleotide
  Sense strand starting at position 141 of SEQ ID NO: 1241327
uguuguagaacaugaguuu

SEQ ID NO: 1263901 - RNA, 19 nt, Artificial Sequence
  Description of Artificial Sequence: Synthetic oligonucleotide
  Antisense strand to SEQ ID NO: 1263900
aaacucauguucuacaaca

SEQ ID NO: 1263902 - RNA, 19 nt, Artificial Sequence
  Description of Artificial Sequence: Synthetic oligonucleotide
  Sense strand starting at position 147 of SEQ ID NO: 1241327
agaacaugaguuugguaga

SEQ ID NO: 1263903 - RNA, 19 nt, Artificial Sequence
  Description of Artificial Sequence: Synthetic oligonucleotide
  Antisense strand to SEQ ID NO: 1263902
ucuaccaaacucauguucu

SEQ ID NO: 1263904 - RNA, 19 nt, Artificial Sequence
  Description of Artificial Sequence: Synthetic oligonucleotide
  Sense strand starting at position 153 of SEQ ID NO: 1241327
ugaguuugguagagaggga

SEQ ID NO: 1263905 - RNA, 19 nt, Artificial Sequence
  Description of Artificial Sequence: Synthetic oligonucleotide
  Antisense strand to SEQ ID NO: 1263904
ucccucucuaccaaacuca

SEQ ID NO: 1263906 - RNA, 19 nt, Artificial Sequence
  Description of Artificial Sequence: Synthetic oligonucleotide
  Sense strand starting at position 406 of SEQ ID NO: 1241327
gcaucagaaucccuagaag

SEQ ID NO: 1263907 - RNA, 19 nt, Artificial Sequence
  Description of Artificial Sequence: Synthetic oligonucleotide
  Antisense strand to SEQ ID NO: 1263906
cuucuagggauucugaugc

SEQ ID NO: 1263908 - RNA, 19 nt, Artificial Sequence
  Description of Artificial Sequence: Synthetic oligonucleotide
  Sense strand starting at position 438 of SEQ ID NO: 1241327
acauauuccugggucccaa

SEQ ID NO: 1263909 - RNA, 19 nt, Artificial Sequence
  Description of Artificial Sequence: Synthetic oligonucleotide
  Antisense strand to SEQ ID NO: 1263908
uugggacccaggaauaugu

SEQ ID NO: 1263910 - RNA, 19 nt, Artificial Sequence
  Description of Artificial Sequence: Synthetic oligonucleotide
  Sense strand starting at position 885 of SEQ ID NO: 1241327
agagaauucucagcugcug

SEQ ID NO: 1263911 - RNA, 19 nt, Artificial Sequence
  Description of Artificial Sequence: Synthetic oligonucleotide
  Antisense strand to SEQ ID NO: 1263910
cagcagcugagaauucucu

SEQ ID NO: 1263912 - RNA, 19 nt, Artificial Sequence
  Description of Artificial Sequence: Synthetic oligonucleotide
  Sense strand starting at position 956 of SEQ ID NO: 1241327
cuagcuucucagcagagaa

SEQ ID NO: 1263913 - RNA, 19 nt, Artificial Sequence
  Description of Artificial Sequence: Synthetic oligonucleotide
  Antisense strand to SEQ ID NO: 1263912
uucucugcugagaagcuag

SEQ ID NO: 1263914 - RNA, 19 nt, Artificial Sequence
  Description of Artificial Sequence: Synthetic oligonucleotide
  Sense strand starting at position 1031 of SEQ ID NO: 1241327
acaggaagcccgggauaaa

SEQ ID NO: 1263915 - RNA, 19 nt, Artificial Sequence
  Description of Artificial Sequence: Synthetic oligonucleotide
  Antisense strand to SEQ ID NO: 1263914
uuuaucccgggcuuccugu

SEQ ID NO: 1263916 - RNA, 19 nt, Artificial Sequence
  Description of Artificial Sequence: Synthetic oligonucleotide
  Sense strand starting at position 1562 of SEQ ID NO: 1241327
cagucauuguaugcagaaa

SEQ ID NO: 1263917 - RNA, 19 nt, Artificial Sequence
  Description of Artificial Sequence: Synthetic oligonucleotide
  Antisense strand to SEQ ID NO: 1263916
uuucugcauacaaugacug

SEQ ID NO: 1263918 - RNA, 19 nt, Artificial Sequence
  Description of Artificial Sequence: Synthetic oligonucleotide
  Sense strand starting at position 1573 of SEQ ID NO: 1241327
ugcagaaaucaggaguuuc

SEQ ID NO: 1263919 - RNA, 19 nt, Artificial Sequence
  Description of Artificial Sequence: Synthetic oligonucleotide
  Antisense strand to SEQ ID NO: 1263918
gaaacuccugauuucugca

SEQ ID NO: 1263920 - RNA, 19 nt, Artificial Sequence
  Description of Artificial Sequence: Synthetic oligonucleotide
  Sense strand starting at position 1720 of SEQ ID NO: 1241327
ucaacuccucucuggagaa

SEQ ID NO: 1263921 - RNA, 19 nt, Artificial Sequence
  Description of Artificial Sequence: Synthetic oligonucleotide
  Antisense strand to SEQ ID NO: 1263920
uucuccagagaggaguuga

SEQ ID NO: 1263922 - RNA, 19 nt, Artificial Sequence
  Description of Artificial Sequence: Synthetic oligonucleotide
  Sense strand starting at position 2069 of SEQ ID NO: 1241327
cccuuagcucuguagaauc

SEQ ID NO: 1263923 - RNA, 19 nt, Artificial Sequence
  Description of Artificial Sequence: Synthetic oligonucleotide
  Antisense strand to SEQ ID NO: 1263922
gauucuacagagcuaaggg

SEQ ID NO: 1263924 - RNA, 19 nt, Artificial Sequence
  Description of Artificial Sequence: Synthetic oligonucleotide
  Sense strand starting at position 2071 of SEQ ID NO: 1241327
cuuagcucuguagaaucaa

SEQ ID NO: 1263925 - RNA, 19 nt, Artificial Sequence
  Description of Artificial Sequence: Synthetic oligonucleotide
  Antisense strand to SEQ ID NO: 1263924
uugauucuacagagcuaag

SEQ ID NO: 1263926 - RNA, 19 nt, Artificial Sequence
  Description of Artificial Sequence: Synthetic oligonucleotide
  Sense strand starting at position 2097 of SEQ ID NO: 1241327
gagauauuccacuggguua

SEQ ID NO: 1263927 - RNA, 19 nt, Artificial Sequence
  Description of Artificial Sequence: Synthetic oligonucleotide
  Antisense strand to SEQ ID NO: 1263926
uaacccaguggaauaucuc

SEQ ID NO: 1263928 - RNA, 19 nt, Artificial Sequence
  Description of Artificial Sequence: Synthetic oligonucleotide
  Sense strand starting at position 2099 of SEQ ID NO: 1241327
gauauuccacuggguuaac

SEQ ID NO: 1263929 - RNA, 19 nt, Artificial Sequence
  Description of Artificial Sequence: Synthetic oligonucleotide
  Antisense strand to SEQ ID NO: 1263928
guuaacccaguggaauauc

SEQ ID NO: 1263930 - RNA, 19 nt, Artificial Sequence
  Description of Artificial Sequence: Synthetic oligonucleotide
  Sense strand starting at position 2108 of SEQ ID NO: 1241327
cuggguuaacuugggaaug

SEQ ID NO: 1263931 - RNA, 19 nt, Artificial Sequence
  Description of Artificial Sequence: Synthetic oligonucleotide
  Antisense strand to SEQ ID NO: 1263930
cauucccaaguuaacccag

SEQ ID NO: 1263932 - RNA, 19 nt, Artificial Sequence
  Description of Artificial Sequence: Synthetic oligonucleotide
  Sense strand starting at position 2186 of SEQ ID NO: 1241327
accuuaacccuauggugau

SEQ ID NO: 1263933 - RNA, 19 nt, Artificial Sequence
  Description of Artificial Sequence: Synthetic oligonucleotide
  Antisense strand to SEQ ID NO: 1263932
aucaccauaggguuaaggu

SEQ ID NO: 1263934 - RNA, 19 nt, Artificial Sequence
  Description of Artificial Sequence: Synthetic oligonucleotide
  Sense strand starting at position 2230 of SEQ ID NO: 1241327
uuaaucauccuugauggca

SEQ ID NO: 1263935 - RNA, 19 nt, Artificial Sequence
  Description of Artificial Sequence: Synthetic oligonucleotide
  Antisense strand to SEQ ID NO: 1263934
ugccaucaaggaugauuaa

SEQ ID NO: 1263936 - RNA, 19 nt, Artificial Sequence
  Description of Artificial Sequence: Synthetic oligonucleotide
  Sense strand starting at position 2332 of SEQ ID NO: 1241327
uuaacagcauuguuggaaa

SEQ ID NO: 1263937 - RNA, 19 nt, Artificial Sequence
  Description of Artificial Sequence: Synthetic oligonucleotide
  Antisense strand to SEQ ID NO: 1263936
uuuccaacaaugcuguuaa

SEQ ID NO: 1263938 - RNA, 19 nt, Artificial Sequence
  Description of Artificial Sequence: Synthetic oligonucleotide
  Sense strand starting at position 2537 of SEQ ID NO: 1241327
caccgcacucugggaauau

SEQ ID NO: 1263939 - RNA, 19 nt, Artificial Sequence
  Description of Artificial Sequence: Synthetic oligonucleotide
  Antisense strand to SEQ ID NO: 1263938
auauucccagagugcggug

SEQ ID NO: 1263940 - RNA, 19 nt, Artificial Sequence
  Description of Artificial Sequence: Synthetic oligonucleotide
  Sense strand starting at position 2632 of SEQ ID NO: 1241327
cugggauacuuccuggaau

SEQ ID NO: 1263941 - RNA, 19 nt, Artificial Sequence
  Description of Artificial Sequence: Synthetic oligonucleotide
  Antisense strand to SEQ ID NO: 1263940
auuccaggaaguaucccag

SEQ ID NO: 1263942 - RNA, 19 nt, Artificial Sequence
  Description of Artificial Sequence: Synthetic oligonucleotide
  Sense strand starting at position 2832 of SEQ ID NO: 1241327
agaggcgauuaccuuuauu

SEQ ID NO: 1263943 - RNA, 19 nt, Artificial Sequence
  Description of Artificial Sequence: Synthetic oligonucleotide
  Antisense strand to SEQ ID NO: 1263942
aauaaagguaaucgccucu

SEQ ID NO: 1263944 - RNA, 19 nt, Artificial Sequence
  Description of Artificial Sequence: Synthetic oligonucleotide
  Sense strand starting at position 2835 of SEQ ID NO: 1241327
ggcgauuaccuuuauugau

SEQ ID NO: 1263945 - RNA, 19 nt, Artificial Sequence
  Description of Artificial Sequence: Synthetic oligonucleotide
  Antisense strand to SEQ ID NO: 1263944
aucaauaaagguaaucgcc

SEQ ID NO: 1263946 - RNA, 19 nt, Artificial Sequence
  Description of Artificial Sequence: Synthetic oligonucleotide
  Sense strand starting at position 2837 of SEQ ID NO: 1241327
cgauuaccuuuauugauga

SEQ ID NO: 1263947 - RNA, 19 nt, Artificial Sequence
  Description of Artificial Sequence: Synthetic oligonucleotide
  Antisense strand to SEQ ID NO: 1263946
ucaucaauaaagguaaucg

SEQ ID NO: 1263948 - RNA, 19 nt, Artificial Sequence
  Description of Artificial Sequence: Synthetic oligonucleotide
  Sense strand starting at position 3028 of SEQ ID NO: 1241327
agcacuucuuaucugagaa

SEQ ID NO: 1263949 - RNA, 19 nt, Artificial Sequence
  Description of Artificial Sequence: Synthetic oligonucleotide
  Antisense strand to SEQ ID NO: 1263948
uucucagauaagaagugcu

SEQ ID NO: 1263950 - RNA, 19 nt, Artificial Sequence
  Description of Artificial Sequence: Synthetic oligonucleotide
  Sense strand starting at position 3138 of SEQ ID NO: 1241327
agcccaaaccuaugaaagu

SEQ ID NO: 1263951 - RNA, 19 nt, Artificial Sequence
  Description of Artificial Sequence: Synthetic oligonucleotide
  Antisense strand to SEQ ID NO: 1263950
acuuucauagguuugggcu

SEQ ID NO: 1263952 - RNA, 19 nt, Artificial Sequence
  Description of Artificial Sequence: Synthetic oligonucleotide
  Sense strand starting at position 3156 of SEQ ID NO: 1241327
uuaugagacuugucaaagg

SEQ ID NO: 1263953 - RNA, 19 nt, Artificial Sequence
  Description of Artificial Sequence: Synthetic oligonucleotide
  Antisense strand to SEQ ID NO: 1263952
ccuuugacaagucucauaa

SEQ ID NO: 1263954 - RNA, 19 nt, Artificial Sequence
  Description of Artificial Sequence: Synthetic oligonucleotide
  Sense strand starting at position 3161 of SEQ ID NO: 1241327
agacuugucaaaggguaca

SEQ ID NO: 1263955 - RNA, 19 nt, Artificial Sequence
  Description of Artificial Sequence: Synthetic oligonucleotide
  Antisense strand to SEQ ID NO: 1263954
uguacccuuugacaagucu

SEQ ID NO: 1263956 - RNA, 19 nt, Artificial Sequence
  Description of Artificial Sequence: Synthetic oligonucleotide
  Sense strand starting at position 3181 of SEQ ID NO: 1241327
agcagaucuagcgacagua

SEQ ID NO: 1263957 - RNA, 19 nt, Artificial Sequence
  Description of Artificial Sequence: Synthetic oligonucleotide
  Antisense strand to SEQ ID NO: 1263956
uacugucgcuagaucugcu

SEQ ID NO: 1263958 - RNA, 19 nt, Artificial Sequence
  Description of Artificial Sequence: Synthetic oligonucleotide
  Sense strand starting at position 3183 of SEQ ID NO: 1241327
cagaucuagcgacaguauu

SEQ ID NO: 1263959 - RNA, 19 nt, Artificial Sequence
  Description of Artificial Sequence: Synthetic oligonucleotide
  Antisense strand to SEQ ID NO: 1263958
aauacugucgcuagaucug

SEQ ID NO: 1263960 - RNA, 19 nt, Artificial Sequence
  Description of Artificial Sequence: Synthetic oligonucleotide
  Sense strand starting at position 3402 of SEQ ID NO: 1241327
gcaugagaaucuucuccuc

SEQ ID NO: 1263961 - RNA, 19 nt, Artificial Sequence
  Description of Artificial Sequence: Synthetic oligonucleotide
  Antisense strand to SEQ ID NO: 1263960
gaggagaagauucucaugc

SEQ ID NO: 1263962 - RNA, 19 nt, Artificial Sequence
  Description of Artificial Sequence: Synthetic oligonucleotide
  Sense strand starting at position 3436 of SEQ ID NO: 1241327
ucaguuaacugacugguca

SEQ ID NO: 1263963 - RNA, 19 nt, Artificial Sequence
  Description of Artificial Sequence: Synthetic oligonucleotide
  Antisense strand to SEQ ID NO: 1263962
ugaccagucaguuaacuga

SEQ ID NO: 1263964 - RNA, 19 nt, Artificial Sequence
  Description of Artificial Sequence: Synthetic oligonucleotide
  Sense strand starting at position 3437 of SEQ ID NO: 1241327
caguuaacugacuggucau

SEQ ID NO: 1263965 - RNA, 19 nt, Artificial Sequence
  Description of Artificial Sequence: Synthetic oligonucleotide
  Antisense strand to SEQ ID NO: 1263964
augaccagucaguuaacug

SEQ ID NO: 1263966 - RNA, 19 nt, Artificial Sequence
  Description of Artificial Sequence: Synthetic oligonucleotide
  Sense strand starting at position 3440 of SEQ ID NO: 1241327
uuaacugacuggucaucuu

SEQ ID NO: 1263967 - RNA, 19 nt, Artificial Sequence
  Description of Artificial Sequence: Synthetic oligonucleotide
  Antisense strand to SEQ ID NO: 1263966
aagaugaccagucaguuaa

SEQ ID NO: 1263968 - RNA, 19 nt, Artificial Sequence
  Description of Artificial Sequence: Synthetic oligonucleotide
  Sense strand starting at position 3443 of SEQ ID NO: 1241327
acugacuggucaucuuaau

SEQ ID NO: 1263969 - RNA, 19 nt, Artificial Sequence
  Description of Artificial Sequence: Synthetic oligonucleotide
  Antisense strand to SEQ ID NO: 1263968
auuaagaugaccagucagu

SEQ ID NO: 1263970 - RNA, 19 nt, Artificial Sequence
  Description of Artificial Sequence: Synthetic oligonucleotide
  Sense strand starting at position 3541 of SEQ ID NO: 1241327
acaggacagaugugucagu

SEQ ID NO: 1263971 - RNA, 19 nt, Artificial Sequence
  Description of Artificial Sequence: Synthetic oligonucleotide
  Antisense strand to SEQ ID NO: 1263970
acugacacaucuguccugu

SEQ ID NO: 1263972 - RNA, 19 nt, Artificial Sequence
  Description of Artificial Sequence: Synthetic oligonucleotide
  Sense strand starting at position 3546 of SEQ ID NO: 1241327
acagaugugucagugaaac

SEQ ID NO: 1263973 - RNA, 19 nt, Artificial Sequence
  Description of Artificial Sequence: Synthetic oligonucleotide
  Antisense strand to SEQ ID NO: 1263972
guuucacugacacaucugu

SEQ ID NO: 1263974 - RNA, 19 nt, Artificial Sequence
  Description of Artificial Sequence: Synthetic oligonucleotide
  Sense strand starting at position 3548 of SEQ ID NO: 1241327
agaugugucagugaaacag

SEQ ID NO: 1263975 - RNA, 19 nt, Artificial Sequence
  Description of Artificial Sequence: Synthetic oligonucleotide
  Antisense strand to SEQ ID NO: 1263974
cuguuucacugacacaucu

SEQ ID NO: 1263976 - RNA, 19 nt, Artificial Sequence
  Description of Artificial Sequence: Synthetic oligonucleotide
  Sense strand starting at position 3554 of SEQ ID NO: 1241327
gucagugaaacaggaaauu

SEQ ID NO: 1263977 - RNA, 19 nt, Artificial Sequence
  Description of Artificial Sequence: Synthetic oligonucleotide
  Antisense strand to SEQ ID NO: 1263976
aauuuccuguuucacugac

SEQ ID NO: 1263978 - RNA, 19 nt, Artificial Sequence
  Description of Artificial Sequence: Synthetic oligonucleotide
  Sense strand starting at position 3809 of SEQ ID NO: 1241327
uguuuaacagcucaauaga

SEQ ID NO: 1263979 - RNA, 19 nt, Artificial Sequence
  Description of Artificial Sequence: Synthetic oligonucleotide
  Antisense strand to SEQ ID NO: 1263978
ucuauugagcuguuaaaca

SEQ ID NO: 1263980 - RNA, 19 nt, Artificial Sequence
  Description of Artificial Sequence: Synthetic oligonucleotide
  Sense strand starting at position 19 of SEQ ID NO: 1241328
ugcuuacacccaggugaaa

SEQ ID NO: 1263981 - RNA, 19 nt, Artificial Sequence
  Description of Artificial Sequence: Synthetic oligonucleotide
  Antisense strand to SEQ ID NO: 1263980
uuucaccuggguguaagca

SEQ ID NO: 1263982 - RNA, 19 nt, Artificial Sequence
  Description of Artificial Sequence: Synthetic oligonucleotide
  Sense strand starting at position 87 of SEQ ID NO: 1241328
ggacgugugagacaggauu

SEQ ID NO: 1263983 - RNA, 19 nt, Artificial Sequence
  Description of Artificial Sequence: Synthetic oligonucleotide
  Antisense strand to SEQ ID NO: 1263982
aauccugucucacacgucc

SEQ ID NO: 1263984 - RNA, 19 nt, Artificial Sequence
  Description of Artificial Sequence: Synthetic oligonucleotide
  Sense strand starting at position 134 of SEQ ID NO: 1241328
gacuguacgugcuuggaaa

SEQ ID NO: 1263985 - RNA, 19 nt, Artificial Sequence
  Description of Artificial Sequence: Synthetic oligonucleotide
  Antisense strand to SEQ ID NO: 1263984
uuuccaagcacguacaguc

SEQ ID NO: 1263986 - RNA, 19 nt, Artificial Sequence
  Description of Artificial Sequence: Synthetic oligonucleotide
  Sense strand starting at position 138 of SEQ ID NO: 1241328
guacgugcuuggaaagaug

SEQ ID NO: 1263987 - RNA, 19 nt, Artificial Sequence
  Description of Artificial Sequence: Synthetic oligonucleotide
  Antisense strand to SEQ ID NO: 1263986
caucuuuccaagcacguac

SEQ ID NO: 1263988 - RNA, 19 nt, Artificial Sequence
  Description of Artificial Sequence: Synthetic oligonucleotide
  Sense strand starting at position 145 of SEQ ID NO: 1241328
cuuggaaagaugcgagacu

SEQ ID NO: 1263989 - RNA, 19 nt, Artificial Sequence
  Description of Artificial Sequence: Synthetic oligonucleotide
  Antisense strand to SEQ ID NO: 1263988
agucucgcaucuuuccaag

SEQ ID NO: 1263990 - RNA, 19 nt, Artificial Sequence
  Description of Artificial Sequence: Synthetic oligonucleotide
  Sense strand starting at position 166 of SEQ ID NO: 1241328
gaggcaguggucuggcuaa

SEQ ID NO: 1263991 - RNA, 19 nt, Artificial Sequence
  Description of Artificial Sequence: Synthetic oligonucleotide
  Antisense strand to SEQ ID NO: 1263990
uuagccagaccacugccuc

SEQ ID NO: 1263992 - RNA, 19 nt, Artificial Sequence
  Description of Artificial Sequence: Synthetic oligonucleotide
  Sense strand starting at position 183 of SEQ ID NO: 1241328
aaaggacguuugcuuuaaa

SEQ ID NO: 1263993 - RNA, 19 nt, Artificial Sequence
  Description of Artificial Sequence: Synthetic oligonucleotide
  Antisense strand to SEQ ID NO: 1263992
uuuaaagcaaacguccuuu

SEQ ID NO: 1263994 - RNA, 19 nt, Artificial Sequence
  Description of Artificial Sequence: Synthetic oligonucleotide
  Sense strand starting at position 184 of SEQ ID NO: 1241328
aaggacguuugcuuuaaau

SEQ ID NO: 1263995 - RNA, 19 nt, Artificial Sequence
  Description of Artificial Sequence: Synthetic oligonucleotide
  Antisense strand to SEQ ID NO: 1263994
auuuaaagcaaacguccuu

SEQ ID NO: 1263996 - RNA, 19 nt, Artificial Sequence
  Description of Artificial Sequence: Synthetic oligonucleotide
  Sense strand starting at position 186 of SEQ ID NO: 1241328
ggacguuugcuuuaaauau

SEQ ID NO: 1263997 - RNA, 19 nt, Artificial Sequence
  Description of Artificial Sequence: Synthetic oligonucleotide
  Antisense strand to SEQ ID NO: 1263996
auauuuaaagcaaacgucc

SEQ ID NO: 1263998 - RNA, 19 nt, Artificial Sequence
  Description of Artificial Sequence: Synthetic oligonucleotide
  Sense strand starting at position 211 of SEQ ID NO: 1241328
aaauauuugcuucgaguau

SEQ ID NO: 1263999 - RNA, 19 nt, Artificial Sequence
  Description of Artificial Sequence: Synthetic oligonucleotide
  Antisense strand to SEQ ID NO: 1263998
auacucgaagcaaauauuu

SEQ ID NO: 1264000 - RNA, 19 nt, Artificial Sequence
  Description of Artificial Sequence: Synthetic oligonucleotide
  Sense strand starting at position 259 of SEQ ID NO: 1241328
cccagcuuucuggaucaua

SEQ ID NO: 1264001 - RNA, 19 nt, Artificial Sequence
  Description of Artificial Sequence: Synthetic oligonucleotide
  Antisense strand to SEQ ID NO: 1264000
uaugauccagaaagcuggg

SEQ ID NO: 1264002 - RNA, 19 nt, Artificial Sequence
  Description of Artificial Sequence: Synthetic oligonucleotide
  Sense strand starting at position 378 of SEQ ID NO: 1241328
gagugagauuucuacucca

SEQ ID NO: 1264003 - RNA, 19 nt, Artificial Sequence
  Description of Artificial Sequence: Synthetic oligonucleotide
  Antisense strand to SEQ ID NO: 1264002
uggaguagaaaucucacuc

SEQ ID NO: 1264004 - RNA, 19 nt, Artificial Sequence
  Description of Artificial Sequence: Synthetic oligonucleotide
  Sense strand starting at position 428 of SEQ ID NO: 1241328
aggaguuuggcacaaagca

SEQ ID NO: 1264005 - RNA, 19 nt, Artificial Sequence
  Description of Artificial Sequence: Synthetic oligonucleotide
  Antisense strand to SEQ ID NO: 1264004
ugcuuugugccaaacuccu

SEQ ID NO: 1264006 - RNA, 19 nt, Artificial Sequence
  Description of Artificial Sequence: Synthetic oligonucleotide
  Sense strand starting at position 510 of SEQ ID NO: 1241328
caggcauggcuuugcaauu

SEQ ID NO: 1264007 - RNA, 19 nt, Artificial Sequence
  Description of Artificial Sequence: Synthetic oligonucleotide
  Antisense strand to SEQ ID NO: 1264006
aauugcaaagccaugccug

SEQ ID NO: 1264008 - RNA, 19 nt, Artificial Sequence
  Description of Artificial Sequence: Synthetic oligonucleotide
  Sense strand starting at position 520 of SEQ ID NO: 1241328
uuugcaauucuaugcagua

SEQ ID NO: 1264009 - RNA, 19 nt, Artificial Sequence
  Description of Artificial Sequence: Synthetic oligonucleotide
  Antisense strand to SEQ ID NO: 1264008
uacugcauagaauugcaaa

SEQ ID NO: 1264010 - RNA, 19 nt, Artificial Sequence
  Description of Artificial Sequence: Synthetic oligonucleotide
  Sense strand starting at position 707 of SEQ ID NO: 1241328
gaagguauaguauguucua

SEQ ID NO: 1264011 - RNA, 19 nt, Artificial Sequence
  Description of Artificial Sequence: Synthetic oligonucleotide
  Antisense strand to SEQ ID NO: 1264010
uagaacauacuauaccuuc

SEQ ID NO: 1264012 - RNA, 19 nt, Artificial Sequence
  Description of Artificial Sequence: Synthetic oligonucleotide
  Sense strand starting at position 710 of SEQ ID NO: 1241328
gguauaguauguucuagaa

SEQ ID NO: 1264013 - RNA, 19 nt, Artificial Sequence
  Description of Artificial Sequence: Synthetic oligonucleotide
  Antisense strand to SEQ ID NO: 1264012
uucuagaacauacuauacc

SEQ ID NO: 1264014 - RNA, 19 nt, Artificial Sequence
  Description of Artificial Sequence: Synthetic oligonucleotide
  Sense strand starting at position 714 of SEQ ID NO: 1241328
uaguauguucuagaagcau

SEQ ID NO: 1264015 - RNA, 19 nt, Artificial Sequence
  Description of Artificial Sequence: Synthetic oligonucleotide
  Antisense strand to SEQ ID NO: 1264014
augcuucuagaacauacua

SEQ ID NO: 1264016 - RNA, 19 nt, Artificial Sequence
  Description of Artificial Sequence: Synthetic oligonucleotide
  Sense strand starting at position 751 of SEQ ID NO: 1241328
agcaacuguggaugaaaga

SEQ ID NO: 1264017 - RNA, 19 nt, Artificial Sequence
  Description of Artificial Sequence: Synthetic oligonucleotide
  Antisense strand to SEQ ID NO: 1264016
ucuuucauccacaguugcu

SEQ ID NO: 1264018 - RNA, 19 nt, Artificial Sequence
  Description of Artificial Sequence: Synthetic oligonucleotide
  Sense strand starting at position 863 of SEQ ID NO: 1241328
guuggacaaucagcaaauu

SEQ ID NO: 1264019 - RNA, 19 nt, Artificial Sequence
  Description of Artificial Sequence: Synthetic oligonucleotide
  Antisense strand to SEQ ID NO: 1264018
aauuugcugauuguccaac

SEQ ID NO: 1264020 - RNA, 19 nt, Artificial Sequence
  Description of Artificial Sequence: Synthetic oligonucleotide
  Sense strand starting at position 895 of SEQ ID NO: 1241328
cccaauaguuaggugcaau

SEQ ID NO: 1264021 - RNA, 19 nt, Artificial Sequence
  Description of Artificial Sequence: Synthetic oligonucleotide
  Antisense strand to SEQ ID NO: 1264020
auugcaccuaacuauuggg

SEQ ID NO: 1264022 - RNA, 19 nt, Artificial Sequence
  Description of Artificial Sequence: Synthetic oligonucleotide
  Sense strand starting at position 898 of SEQ ID NO: 1241328
aauaguuaggugcaaucua

SEQ ID NO: 1264023 - RNA, 19 nt, Artificial Sequence
  Description of Artificial Sequence: Synthetic oligonucleotide
  Antisense strand to SEQ ID NO: 1264022
uagauugcaccuaacuauu

SEQ ID NO: 1264024 - RNA, 19 nt, Artificial Sequence
  Description of Artificial Sequence: Synthetic oligonucleotide
  Sense strand starting at position 2445 of SEQ ID NO: 1241328
guagauuucccgggcuggu

SEQ ID NO: 1264025 - RNA, 19 nt, Artificial Sequence
  Description of Artificial Sequence: Synthetic oligonucleotide
  Antisense strand to SEQ ID NO: 1264024
accagcccgggaaaucuac

SEQ ID NO: 1264026 - RNA, 19 nt, Artificial Sequence
  Description of Artificial Sequence: Synthetic oligonucleotide
  Sense strand starting at position 2583 of SEQ ID NO: 1241328
gauggauucugggcgaaga

SEQ ID NO: 1264027 - RNA, 19 nt, Artificial Sequence
  Description of Artificial Sequence: Synthetic oligonucleotide
  Antisense strand to SEQ ID NO: 1264026
ucuucgcccagaauccauc

SEQ ID NO: 1264028 - RNA, 19 nt, Artificial Sequence
  Description of Artificial Sequence: Synthetic oligonucleotide
  Sense strand starting at position 2811 of SEQ ID NO: 1241328
gagggauccugguaaggag

SEQ ID NO: 1264029 - RNA, 19 nt, Artificial Sequence
  Description of Artificial Sequence: Synthetic oligonucleotide
  Antisense strand to SEQ ID NO: 1264028
cuccuuaccaggaucccuc

SEQ ID NO: 1264030 - RNA, 19 nt, Artificial Sequence
  Description of Artificial Sequence: Synthetic oligonucleotide
  Sense strand starting at position 2970 of SEQ ID NO: 1241328
uguucugagacuugaauga

SEQ ID NO: 1264031 - RNA, 19 nt, Artificial Sequence
  Description of Artificial Sequence: Synthetic oligonucleotide
  Antisense strand to SEQ ID NO: 1264030
ucauucaagucucagaaca

SEQ ID NO: 1264032 - RNA, 19 nt, Artificial Sequence
  Description of Artificial Sequence: Synthetic oligonucleotide
  Sense strand starting at position 3029 of SEQ ID NO: 1241328
uaagcauuccgcgaaugcu

SEQ ID NO: 1264033 - RNA, 19 nt, Artificial Sequence
  Description of Artificial Sequence: Synthetic oligonucleotide
  Antisense strand to SEQ ID NO: 1264032
agcauucgcggaaugcuua

SEQ ID NO: 1264034 - RNA, 19 nt, Artificial Sequence
  Description of Artificial Sequence: Synthetic oligonucleotide
  Sense strand starting at position 3039 of SEQ ID NO: 1241328
gcgaaugcuggcuauccua

SEQ ID NO: 1264035 - RNA, 19 nt, Artificial Sequence
  Description of Artificial Sequence: Synthetic oligonucleotide
  Antisense strand to SEQ ID NO: 1264034
uaggauagccagcauucgc

SEQ ID NO: 1264036 - RNA, 19 nt, Artificial Sequence
  Description of Artificial Sequence: Synthetic oligonucleotide
  Sense strand starting at position 3072 of SEQ ID NO: 1241328
uuuguuguacagugcuaaa

SEQ ID NO: 1264037 - RNA, 19 nt, Artificial Sequence
  Description of Artificial Sequence: Synthetic oligonucleotide
  Antisense strand to SEQ ID NO: 1264036
uuuagcacuguacaacaaa

SEQ ID NO: 1264038 - RNA, 19 nt, Artificial Sequence
  Description of Artificial Sequence: Synthetic oligonucleotide
  Sense strand starting at position 3141 of SEQ ID NO: 1241328
guuacuauugcuggccuaa

SEQ ID NO: 1264039 - RNA, 19 nt, Artificial Sequence
  Description of Artificial Sequence: Synthetic oligonucleotide
  Antisense strand to SEQ ID NO: 1264038
uuaggccagcaauaguaac

SEQ ID NO: 1264040 - RNA, 19 nt, Artificial Sequence
  Description of Artificial Sequence: Synthetic oligonucleotide
  Sense strand starting at position 3194 of SEQ ID NO: 1241328
ugaaguaacuucuuucuga

SEQ ID NO: 1264041 - RNA, 19 nt, Artificial Sequence
  Description of Artificial Sequence: Synthetic oligonucleotide
  Antisense strand to SEQ ID NO: 1264040
ucagaaagaaguuacuuca

SEQ ID NO: 1264042 - RNA, 19 nt, Artificial Sequence
  Description of Artificial Sequence: Synthetic oligonucleotide
  Sense strand starting at position 3448 of SEQ ID NO: 1241328
acaagaugcccaggagauu

SEQ ID NO: 1264043 - RNA, 19 nt, Artificial Sequence
  Description of Artificial Sequence: Synthetic oligonucleotide
  Antisense strand to SEQ ID NO: 1264042
aaucuccugggcaucuugu

SEQ ID NO: 1264044 - RNA, 19 nt, Artificial Sequence
  Description of Artificial Sequence: Synthetic oligonucleotide
  Sense strand starting at position 3500 of SEQ ID NO: 1241328
gggcaucacugcuucuuua

SEQ ID NO: 1264045 - RNA, 19 nt, Artificial Sequence
  Description of Artificial Sequence: Synthetic oligonucleotide
  Antisense strand to SEQ ID NO: 1264044
uaaagaagcagugaugccc

SEQ ID NO: 1264046 - RNA, 19 nt, Artificial Sequence
  Description of Artificial Sequence: Synthetic oligonucleotide
  Sense strand starting at position 3598 of SEQ ID NO: 1241328
acauuagaaucauaugaag

SEQ ID NO: 1264047 - RNA, 19 nt, Artificial Sequence
  Description of Artificial Sequence: Synthetic oligonucleotide
  Antisense strand to SEQ ID NO: 1264046
cuucauaugauucuaaugu

SEQ ID NO: 1264048 - RNA, 19 nt, Artificial Sequence
  Description of Artificial Sequence: Synthetic oligonucleotide
  Sense strand starting at position 3678 of SEQ ID NO: 1241328
ugaacaucugcaugucaca

SEQ ID NO: 1264049 - RNA, 19 nt, Artificial Sequence
  Description of Artificial Sequence: Synthetic oligonucleotide
  Antisense strand to SEQ ID NO: 1264048
ugugacaugcagauguuca

SEQ ID NO: 1264050 - RNA, 19 nt, Artificial Sequence
  Description of Artificial Sequence: Synthetic oligonucleotide
  Sense strand starting at position 3734 of SEQ ID NO: 1241328
accacugauucccaggaga

SEQ ID NO: 1264051 - RNA, 19 nt, Artificial Sequence
  Description of Artificial Sequence: Synthetic oligonucleotide
  Antisense strand to SEQ ID NO: 1264050
ucuccugggaaucaguggu

SEQ ID NO: 1264052 - RNA, 19 nt, Artificial Sequence
  Description of Artificial Sequence: Synthetic oligonucleotide
  Sense strand starting at position 3817 of SEQ ID NO: 1241328
cuuggauuauaauggaaua

SEQ ID NO: 1264053 - RNA, 19 nt, Artificial Sequence
  Description of Artificial Sequence: Synthetic oligonucleotide
  Antisense strand to SEQ ID NO: 1264052
uauuccauuauaauccaag

SEQ ID NO: 1264054 - RNA, 19 nt, Artificial Sequence
  Description of Artificial Sequence: Synthetic oligonucleotide
  Sense strand starting at position 3890 of SEQ ID NO: 1241328
ucguauugucacuauuccu

SEQ ID NO: 1264055 - RNA, 19 nt, Artificial Sequence
  Description of Artificial Sequence: Synthetic oligonucleotide
  Antisense strand to SEQ ID NO: 1264054
aggaauagugacaauacga

SEQ ID NO: 1264056 - RNA, 19 nt, Artificial Sequence
  Description of Artificial Sequence: Synthetic oligonucleotide
  Sense strand starting at position 3920 of SEQ ID NO: 1241328
caucauucuccagggagca

SEQ ID NO: 1264057 - RNA, 19 nt, Artificial Sequence
  Description of Artificial Sequence: Synthetic oligonucleotide
  Antisense strand to SEQ ID NO: 1264056
ugcucccuggagaaugaug

SEQ ID NO: 1264058 - RNA, 19 nt, Artificial Sequence
  Description of Artificial Sequence: Synthetic oligonucleotide
  Sense strand starting at position 3935 of SEQ ID NO: 1241328
agcacagaacucuguucuu

SEQ ID NO: 1264059 - RNA, 19 nt, Artificial Sequence
  Description of Artificial Sequence: Synthetic oligonucleotide
  Antisense strand to SEQ ID NO: 1264058
aagaacagaguucugugcu

SEQ ID NO: 1264060 - RNA, 19 nt, Artificial Sequence
  Description of Artificial Sequence: Synthetic oligonucleotide
  Sense strand starting at position 35 of SEQ ID NO: 1241329
gggucuagauuugaaagau

SEQ ID NO: 1264061 - RNA, 19 nt, Artificial Sequence
  Description of Artificial Sequence: Synthetic oligonucleotide
  Antisense strand to SEQ ID NO: 1264060
aucuuucaaaucuagaccc

SEQ ID NO: 1264062 - RNA, 19 nt, Artificial Sequence
  Description of Artificial Sequence: Synthetic oligonucleotide
  Sense strand starting at position 484 of SEQ ID NO: 1241329
cagccuucccugggacaca

SEQ ID NO: 1264063 - RNA, 19 nt, Artificial Sequence
  Description of Artificial Sequence: Synthetic oligonucleotide
  Antisense strand to SEQ ID NO: 1264062
ugugucccagggaaggcug

SEQ ID NO: 1264064 - RNA, 19 nt, Artificial Sequence
  Description of Artificial Sequence: Synthetic oligonucleotide
  Sense strand starting at position 519 of SEQ ID NO: 1241329
ccuggagaauuagcuagau

SEQ ID NO: 1264065 - RNA, 19 nt, Artificial Sequence
  Description of Artificial Sequence: Synthetic oligonucleotide
  Antisense strand to SEQ ID NO: 1264064
aucuagcuaauucuccagg

SEQ ID NO: 1264066 - RNA, 19 nt, Artificial Sequence
  Description of Artificial Sequence: Synthetic oligonucleotide
  Sense strand starting at position 534 of SEQ ID NO: 1241329
agauucgagaggugaggau

SEQ ID NO: 1264067 - RNA, 19 nt, Artificial Sequence
  Description of Artificial Sequence: Synthetic oligonucleotide
  Antisense strand to SEQ ID NO: 1264066
auccucaccucucgaaucu

SEQ ID NO: 1264068 - RNA, 19 nt, Artificial Sequence
  Description of Artificial Sequence: Synthetic oligonucleotide
  Sense strand starting at position 579 of SEQ ID NO: 1241329
aguuuaaaucuccaguuaa

SEQ ID NO: 1264069 - RNA, 19 nt, Artificial Sequence
  Description of Artificial Sequence: Synthetic oligonucleotide
  Antisense strand to SEQ ID NO: 1264068
uuaacuggagauuuaaacu

SEQ ID NO: 1264070 - RNA, 19 nt, Artificial Sequence
  Description of Artificial Sequence: Synthetic oligonucleotide
  Sense strand starting at position 617 of SEQ ID NO: 1241329
ugugaauaaccacguauca

SEQ ID NO: 1264071 - RNA, 19 nt, Artificial Sequence
  Description of Artificial Sequence: Synthetic oligonucleotide
  Antisense strand to SEQ ID NO: 1264070
ugauacgugguuauucaca

SEQ ID NO: 1264072 - RNA, 19 nt, Artificial Sequence
  Description of Artificial Sequence: Synthetic oligonucleotide
  Sense strand starting at position 755 of SEQ ID NO: 1241329
aggucucuccaagguaaag

SEQ ID NO: 1264073 - RNA, 19 nt, Artificial Sequence
  Description of Artificial Sequence: Synthetic oligonucleotide
  Antisense strand to SEQ ID NO: 1264072
cuuuaccuuggagagaccu

SEQ ID NO: 1264074 - RNA, 19 nt, Artificial Sequence
  Description of Artificial Sequence: Synthetic oligonucleotide
  Sense strand starting at position 765 of SEQ ID NO: 1241329
aagguaaagccuggagacu

SEQ ID NO: 1264075 - RNA, 19 nt, Artificial Sequence
  Description of Artificial Sequence: Synthetic oligonucleotide
  Antisense strand to SEQ ID NO: 1264074
agucuccaggcuuuaccuu

SEQ ID NO: 1264076 - RNA, 19 nt, Artificial Sequence
  Description of Artificial Sequence: Synthetic oligonucleotide
  Sense strand starting at position 774 of SEQ ID NO: 1241329
ccuggagacugaucucacu

SEQ ID NO: 1264077 - RNA, 19 nt, Artificial Sequence
  Description of Artificial Sequence: Synthetic oligonucleotide
  Antisense strand to SEQ ID NO: 1264076
agugagaucagucuccagg

SEQ ID NO: 1264078 - RNA, 19 nt, Artificial Sequence
  Description of Artificial Sequence: Synthetic oligonucleotide
  Sense strand starting at position 990 of SEQ ID NO: 1241329
aaaugauagguucgauccu

SEQ ID NO: 1264079 - RNA, 19 nt, Artificial Sequence
  Description of Artificial Sequence: Synthetic oligonucleotide
  Antisense strand to SEQ ID NO: 1264078
aggaucgaaccuaucauuu

SEQ ID NO: 1264080 - RNA, 19 nt, Artificial Sequence
  Description of Artificial Sequence: Synthetic oligonucleotide
  Sense strand starting at position 1016 of SEQ ID NO: 1241329
ggccuuagggaaugauuag

SEQ ID NO: 1264081 - RNA, 19 nt, Artificial Sequence
  Description of Artificial Sequence: Synthetic oligonucleotide
  Antisense strand to SEQ ID NO: 1264080
cuaaucauucccuaaggcc

SEQ ID NO: 1264082 - RNA, 19 nt, Artificial Sequence
  Description of Artificial Sequence: Synthetic oligonucleotide
  Sense strand starting at position 1017 of SEQ ID NO: 1241329
gccuuagggaaugauuagu

SEQ ID NO: 1264083 - RNA, 19 nt, Artificial Sequence
  Description of Artificial Sequence: Synthetic oligonucleotide
  Antisense strand to SEQ ID NO: 1264082
acuaaucauucccuaaggc

SEQ ID NO: 1264084 - RNA, 19 nt, Artificial Sequence
  Description of Artificial Sequence: Synthetic oligonucleotide
  Sense strand starting at position 1172 of SEQ ID NO: 1241329
ugcucaaauggcugaauga

SEQ ID NO: 1264085 - RNA, 19 nt, Artificial Sequence
  Description of Artificial Sequence: Synthetic oligonucleotide
  Antisense strand to SEQ ID NO: 1264084
ucauucagccauuugagca

SEQ ID NO: 1264086 - RNA, 19 nt, Artificial Sequence
  Description of Artificial Sequence: Synthetic oligonucleotide
  Sense strand starting at position 1348 of SEQ ID NO: 1241329
ucccgaaguacuggcagaa

SEQ ID NO: 1264087 - RNA, 19 nt, Artificial Sequence
  Description of Artificial Sequence: Synthetic oligonucleotide
  Antisense strand to SEQ ID NO: 1264086
uucugccaguacuucggga

SEQ ID NO: 1264088 - RNA, 19 nt, Artificial Sequence
  Description of Artificial Sequence: Synthetic oligonucleotide
  Sense strand starting at position 1410 of SEQ ID NO: 1241329
ggcauagaacacgauucuu

SEQ ID NO: 1264089 - RNA, 19 nt, Artificial Sequence
  Description of Artificial Sequence: Synthetic oligonucleotide
  Antisense strand to SEQ ID NO: 1264088
aagaaucguguucuaugcc

SEQ ID NO: 1264090 - RNA, 19 nt, Artificial Sequence
  Description of Artificial Sequence: Synthetic oligonucleotide
  Sense strand starting at position 2062 of SEQ ID NO: 1241329
ggugucuacauccgaauuu

SEQ ID NO: 1264091 - RNA, 19 nt, Artificial Sequence
  Description of Artificial Sequence: Synthetic oligonucleotide
  Antisense strand to SEQ ID NO: 1264090
aaauucggauguagacacc

SEQ ID NO: 1264092 - RNA, 19 nt, Artificial Sequence
  Description of Artificial Sequence: Synthetic oligonucleotide
  Sense strand starting at position 2116 of SEQ ID NO: 1241329
uuacgcaaauuguuaaaga

SEQ ID NO: 1264093 - RNA, 19 nt, Artificial Sequence
  Description of Artificial Sequence: Synthetic oligonucleotide
  Antisense strand to SEQ ID NO: 1264092
ucuuuaacaauuugcguaa

SEQ ID NO: 1264094 - RNA, 19 nt, Artificial Sequence
  Description of Artificial Sequence: Synthetic oligonucleotide
  Sense strand starting at position 2169 of SEQ ID NO: 1241329
augcaauuguuugcaauuu

SEQ ID NO: 1264095 - RNA, 19 nt, Artificial Sequence
  Description of Artificial Sequence: Synthetic oligonucleotide
  Antisense strand to SEQ ID NO: 1264094
aaauugcaaacaauugcau

SEQ ID NO: 1264096 - RNA, 19 nt, Artificial Sequence
  Description of Artificial Sequence: Synthetic oligonucleotide
  Sense strand starting at position 2208 of SEQ ID NO: 1241329
gaauguuaaguuugaaagc

SEQ ID NO: 1264097 - RNA, 19 nt, Artificial Sequence
  Description of Artificial Sequence: Synthetic oligonucleotide
  Antisense strand to SEQ ID NO: 1264096
gcuuucaaacuuaacauuc

SEQ ID NO: 1264098 - RNA, 19 nt, Artificial Sequence
  Description of Artificial Sequence: Synthetic oligonucleotide
  Sense strand starting at position 2229 of SEQ ID NO: 1241329
uucugacagcucuacugau

SEQ ID NO: 1264099 - RNA, 19 nt, Artificial Sequence
  Description of Artificial Sequence: Synthetic oligonucleotide
  Antisense strand to SEQ ID NO: 1264098
aucaguagagcugucagaa

SEQ ID NO: 1264100 - RNA, 19 nt, Artificial Sequence
  Description of Artificial Sequence: Synthetic oligonucleotide
  Sense strand starting at position 2354 of SEQ ID NO: 1241329
aguaucacucagugaugga

SEQ ID NO: 1264101 - RNA, 19 nt, Artificial Sequence
  Description of Artificial Sequence: Synthetic oligonucleotide
  Antisense strand to SEQ ID NO: 1264100
uccaucacugagugauacu

SEQ ID NO: 1264102 - RNA, 19 nt, Artificial Sequence
  Description of Artificial Sequence: Synthetic oligonucleotide
  Sense strand starting at position 2398 of SEQ ID NO: 1241329
cugucucuuggagguuaca

SEQ ID NO: 1264103 - RNA, 19 nt, Artificial Sequence
  Description of Artificial Sequence: Synthetic oligonucleotide
  Antisense strand to SEQ ID NO: 1264102
uguaaccuccaagagacag

SEQ ID NO: 1264104 - RNA, 19 nt, Artificial Sequence
  Description of Artificial Sequence: Synthetic oligonucleotide
  Sense strand starting at position 2426 of SEQ ID NO: 1241329
cgagaacugaaaugcagua

SEQ ID NO: 1264105 - RNA, 19 nt, Artificial Sequence
  Description of Artificial Sequence: Synthetic oligonucleotide
  Antisense strand to SEQ ID NO: 1264104
uacugcauuucaguucucg

SEQ ID NO: 1264106 - RNA, 19 nt, Artificial Sequence
  Description of Artificial Sequence: Synthetic oligonucleotide
  Sense strand starting at position 2470 of SEQ ID NO: 1241329
acagucaguccgcagauau

SEQ ID NO: 1264107 - RNA, 19 nt, Artificial Sequence
  Description of Artificial Sequence: Synthetic oligonucleotide
  Antisense strand to SEQ ID NO: 1264106
auaucugcggacugacugu

SEQ ID NO: 1264108 - RNA, 19 nt, Artificial Sequence
  Description of Artificial Sequence: Synthetic oligonucleotide
  Sense strand starting at position 2717 of SEQ ID NO: 1241329
ggccaagccucucuaaaug

SEQ ID NO: 1264109 - RNA, 19 nt, Artificial Sequence
  Description of Artificial Sequence: Synthetic oligonucleotide
  Antisense strand to SEQ ID NO: 1264108
cauuuagagaggcuuggcc

SEQ ID NO: 1264110 - RNA, 19 nt, Artificial Sequence
  Description of Artificial Sequence: Synthetic oligonucleotide
  Sense strand starting at position 2779 of SEQ ID NO: 1241329
agaacaguaugggaaagaa

SEQ ID NO: 1264111 - RNA, 19 nt, Artificial Sequence
  Description of Artificial Sequence: Synthetic oligonucleotide
  Antisense strand to SEQ ID NO: 1264110
uucuuucccauacuguucu

SEQ ID NO: 1264112 - RNA, 19 nt, Artificial Sequence
  Description of Artificial Sequence: Synthetic oligonucleotide
  Sense strand starting at position 3243 of SEQ ID NO: 1241329
ucuuauugauucuuaugga

SEQ ID NO: 1264113 - RNA, 19 nt, Artificial Sequence
  Description of Artificial Sequence: Synthetic oligonucleotide
  Antisense strand to SEQ ID NO: 1264112
uccauaagaaucaauaaga

SEQ ID NO: 1264114 - RNA, 19 nt, Artificial Sequence
  Description of Artificial Sequence: Synthetic oligonucleotide
  Sense strand starting at position 3251 of SEQ ID NO: 1241329
auucuuauggaguggacuu

SEQ ID NO: 1264115 - RNA, 19 nt, Artificial Sequence
  Description of Artificial Sequence: Synthetic oligonucleotide
  Antisense strand to SEQ ID NO: 1264114
aaguccacuccauaagaau

SEQ ID NO: 1264116 - RNA, 19 nt, Artificial Sequence
  Description of Artificial Sequence: Synthetic oligonucleotide
  Sense strand starting at position 3252 of SEQ ID NO: 1241329
uucuuauggaguggacuua

SEQ ID NO: 1264117 - RNA, 19 nt, Artificial Sequence
  Description of Artificial Sequence: Synthetic oligonucleotide
  Antisense strand to SEQ ID NO: 1264116
uaaguccacuccauaagaa

SEQ ID NO: 1264118 - RNA, 19 nt, Artificial Sequence
  Description of Artificial Sequence: Synthetic oligonucleotide
  Sense strand starting at position 3423 of SEQ ID NO: 1241329
gggaguuguauguaggaga

SEQ ID NO: 1264119 - RNA, 19 nt, Artificial Sequence
  Description of Artificial Sequence: Synthetic oligonucleotide
  Antisense strand to SEQ ID NO: 1264118
ucuccuacauacaacuccc

SEQ ID NO: 1264120 - RNA, 19 nt, Artificial Sequence
  Description of Artificial Sequence: Synthetic oligonucleotide
  Sense strand starting at position 3461 of SEQ ID NO: 1241329
agacauuccggguacacuu

SEQ ID NO: 1264121 - RNA, 19 nt, Artificial Sequence
  Description of Artificial Sequence: Synthetic oligonucleotide
  Antisense strand to SEQ ID NO: 1264120
aaguguacccggaaugucu

SEQ ID NO: 1264122 - RNA, 19 nt, Artificial Sequence
  Description of Artificial Sequence: Synthetic oligonucleotide
  Sense strand starting at position 3534 of SEQ ID NO: 1241329
caugucacaugucuaggau

SEQ ID NO: 1264123 - RNA, 19 nt, Artificial Sequence
  Description of Artificial Sequence: Synthetic oligonucleotide
  Antisense strand to SEQ ID NO: 1264122
auccuagacaugugacaug

SEQ ID NO: 1264124 - RNA, 19 nt, Artificial Sequence
  Description of Artificial Sequence: Synthetic oligonucleotide
  Sense strand starting at position 3537 of SEQ ID NO: 1241329
gucacaugucuaggaucca

SEQ ID NO: 1264125 - RNA, 19 nt, Artificial Sequence
  Description of Artificial Sequence: Synthetic oligonucleotide
  Antisense strand to SEQ ID NO: 1264124
uggauccuagacaugugac

SEQ ID NO: 1264126 - RNA, 19 nt, Artificial Sequence
  Description of Artificial Sequence: Synthetic oligonucleotide
  Sense strand starting at position 3561 of SEQ ID NO: 1241329
uauagaccagagugacauu

SEQ ID NO: 1264127 - RNA, 19 nt, Artificial Sequence
  Description of Artificial Sequence: Synthetic oligonucleotide
  Antisense strand to SEQ ID NO: 1264126
aaugucacucuggucuaua

SEQ ID NO: 1264128 - RNA, 19 nt, Artificial Sequence
  Description of Artificial Sequence: Synthetic oligonucleotide
  Sense strand starting at position 3710 of SEQ ID NO: 1241329
gguacuguugcugaacuaa

SEQ ID NO: 1264129 - RNA, 19 nt, Artificial Sequence
  Description of Artificial Sequence: Synthetic oligonucleotide
  Antisense strand to SEQ ID NO: 1264128
uuaguucagcaacaguacc

SEQ ID NO: 1264130 - RNA, 19 nt, Artificial Sequence
  Description of Artificial Sequence: Synthetic oligonucleotide
  Sense strand starting at position 3797 of SEQ ID NO: 1241329
aaggcugcacaaugugaaa

SEQ ID NO: 1264131 - RNA, 19 nt, Artificial Sequence
  Description of Artificial Sequence: Synthetic oligonucleotide
  Antisense strand to SEQ ID NO: 1264130
uuucacauugugcagccuu

SEQ ID NO: 1264132 - RNA, 19 nt, Artificial Sequence
  Description of Artificial Sequence: Synthetic oligonucleotide
  Sense strand starting at position 3888 of SEQ ID NO: 1241329
gucugauaaggucaggguu

SEQ ID NO: 1264133 - RNA, 19 nt, Artificial Sequence
  Description of Artificial Sequence: Synthetic oligonucleotide
  Antisense strand to SEQ ID NO: 1264132
aacccugaccuuaucagac

SEQ ID NO: 1264134 - RNA, 19 nt, Artificial Sequence
  Description of Artificial Sequence: Synthetic oligonucleotide
  Sense strand starting at position 3891 of SEQ ID NO: 1241329
ugauaaggucaggguuaua

SEQ ID NO: 1264135 - RNA, 19 nt, Artificial Sequence
  Description of Artificial Sequence: Synthetic oligonucleotide
  Antisense strand to SEQ ID NO: 1264134
uauaacccugaccuuauca

SEQ ID NO: 1264136 - RNA, 19 nt, Artificial Sequence
  Description of Artificial Sequence: Synthetic oligonucleotide
  Sense strand starting at position 3934 of SEQ ID NO: 1241329
aagaguuucuuugcaggag

SEQ ID NO: 1264137 - RNA, 19 nt, Artificial Sequence
  Description of Artificial Sequence: Synthetic oligonucleotide
  Antisense strand to SEQ ID NO: 1264136
cuccugcaaagaaacucuu

SEQ ID NO: 1264138 - RNA, 19 nt, Artificial Sequence
  Description of Artificial Sequence: Synthetic oligonucleotide
  Sense strand starting at position 3946 of SEQ ID NO: 1241329
gcaggagagcuggaaacuu

SEQ ID NO: 1264139 - RNA, 19 nt, Artificial Sequence
  Description of Artificial Sequence: Synthetic oligonucleotide
  Antisense strand to SEQ ID NO: 1264138
aaguuuccagcucuccugc

SEQ ID NO: 1264140 - RNA, 19 nt, Artificial Sequence
  Description of Artificial Sequence: Synthetic oligonucleotide
  Sense strand starting at position 364 of SEQ ID NO: 1241330
cuaggugugacuugcauuu

SEQ ID NO: 1264141 - RNA, 19 nt, Artificial Sequence
  Description of Artificial Sequence: Synthetic oligonucleotide
  Antisense strand to SEQ ID NO: 1264140
aaaugcaagucacaccuag

SEQ ID NO: 1264142 - RNA, 19 nt, Artificial Sequence
  Description of Artificial Sequence: Synthetic oligonucleotide
  Sense strand starting at position 366 of SEQ ID NO: 1241330
aggugugacuugcauuuaa

SEQ ID NO: 1264143 - RNA, 19 nt, Artificial Sequence
  Description of Artificial Sequence: Synthetic oligonucleotide
  Antisense strand to SEQ ID NO: 1264142
uuaaaugcaagucacaccu

SEQ ID NO: 1264144 - RNA, 19 nt, Artificial Sequence
  Description of Artificial Sequence: Synthetic oligonucleotide
  Sense strand starting at position 425 of SEQ ID NO: 1241330
gaaagcaugcgguaagaaa

SEQ ID NO: 1264145 - RNA, 19 nt, Artificial Sequence
  Description of Artificial Sequence: Synthetic oligonucleotide
  Antisense strand to SEQ ID NO: 1264144
uuucuuaccgcaugcuuuc

SEQ ID NO: 1264146 - RNA, 19 nt, Artificial Sequence
  Description of Artificial Sequence: Synthetic oligonucleotide
  Sense strand starting at position 436 of SEQ ID NO: 1241330
guaagaaacuuagggaaga

SEQ ID NO: 1264147 - RNA, 19 nt, Artificial Sequence
  Description of Artificial Sequence: Synthetic oligonucleotide
  Antisense strand to SEQ ID NO: 1264146
ucuucccuaaguuucuuac

SEQ ID NO: 1264148 - RNA, 19 nt, Artificial Sequence
  Description of Artificial Sequence: Synthetic oligonucleotide
  Sense strand starting at position 437 of SEQ ID NO: 1241330
uaagaaacuuagggaagaa

SEQ ID NO: 1264149 - RNA, 19 nt, Artificial Sequence
  Description of Artificial Sequence: Synthetic oligonucleotide
  Antisense strand to SEQ ID NO: 1264148
uucuucccuaaguuucuua

SEQ ID NO: 1264150 - RNA, 19 nt, Artificial Sequence
  Description of Artificial Sequence: Synthetic oligonucleotide
  Sense strand starting at position 449 of SEQ ID NO: 1241330
ggaagaaacuaugagagua

SEQ ID NO: 1264151 - RNA, 19 nt, Artificial Sequence
  Description of Artificial Sequence: Synthetic oligonucleotide
  Antisense strand to SEQ ID NO: 1264150
uacucucauaguuucuucc

SEQ ID NO: 1264152 - RNA, 19 nt, Artificial Sequence
  Description of Artificial Sequence: Synthetic oligonucleotide
  Sense strand starting at position 457 of SEQ ID NO: 1241330
cuaugagaguacuucuuag

SEQ ID NO: 1264153 - RNA, 19 nt, Artificial Sequence
  Description of Artificial Sequence: Synthetic oligonucleotide
  Antisense strand to SEQ ID NO: 1264152
cuaagaaguacucucauag

SEQ ID NO: 1264154 - RNA, 19 nt, Artificial Sequence
  Description of Artificial Sequence: Synthetic oligonucleotide
  Sense strand starting at position 461 of SEQ ID NO: 1241330
gagaguacuucuuagggug

SEQ ID NO: 1264155 - RNA, 19 nt, Artificial Sequence
  Description of Artificial Sequence: Synthetic oligonucleotide
  Antisense strand to SEQ ID NO: 1264154
cacccuaagaaguacucuc

SEQ ID NO: 1264156 - RNA, 19 nt, Artificial Sequence
  Description of Artificial Sequence: Synthetic oligonucleotide
  Sense strand starting at position 466 of SEQ ID NO: 1241330
uacuucuuagggugagacu

SEQ ID NO: 1264157 - RNA, 19 nt, Artificial Sequence
  Description of Artificial Sequence: Synthetic oligonucleotide
  Antisense strand to SEQ ID NO: 1264156
agucucacccuaagaagua

SEQ ID NO: 1264158 - RNA, 19 nt, Artificial Sequence
  Description of Artificial Sequence: Synthetic oligonucleotide
  Sense strand starting at position 626 of SEQ ID NO: 1241330
ggaagaguacgcuagaguu

SEQ ID NO: 1264159 - RNA, 19 nt, Artificial Sequence
  Description of Artificial Sequence: Synthetic oligonucleotide
  Antisense strand to SEQ ID NO: 1264158
aacucuagcguacucuucc

SEQ ID NO: 1264160 - RNA, 19 nt, Artificial Sequence
  Description of Artificial Sequence: Synthetic oligonucleotide
  Sense strand starting at position 636 of SEQ ID NO: 1241330
gcuagaguuccucaccugu

SEQ ID NO: 1264161 - RNA, 19 nt, Artificial Sequence
  Description of Artificial Sequence: Synthetic oligonucleotide
  Antisense strand to SEQ ID NO: 1264160
acaggugaggaacucuagc

SEQ ID NO: 1264162 - RNA, 19 nt, Artificial Sequence
  Description of Artificial Sequence: Synthetic oligonucleotide
  Sense strand starting at position 1158 of SEQ ID NO: 1241330
uuauaaauaucccugacgu

SEQ ID NO: 1264163 - RNA, 19 nt, Artificial Sequence
  Description of Artificial Sequence: Synthetic oligonucleotide
  Antisense strand to SEQ ID NO: 1264162
acgucagggauauuuauaa

SEQ ID NO: 1264164 - RNA, 19 nt, Artificial Sequence
  Description of Artificial Sequence: Synthetic oligonucleotide
  Sense strand starting at position 1160 of SEQ ID NO: 1241330
auaaauaucccugacgucu

SEQ ID NO: 1264165 - RNA, 19 nt, Artificial Sequence
  Description of Artificial Sequence: Synthetic oligonucleotide
  Antisense strand to SEQ ID NO: 1264164
agacgucagggauauuuau

SEQ ID NO: 1264166 - RNA, 19 nt, Artificial Sequence
  Description of Artificial Sequence: Synthetic oligonucleotide
  Sense strand starting at position 1359 of SEQ ID NO: 1241330
cgaguuugugcuugggaca

SEQ ID NO: 1264167 - RNA, 19 nt, Artificial Sequence
  Description of Artificial Sequence: Synthetic oligonucleotide
  Antisense strand to SEQ ID NO: 1264166
ugucccaagcacaaacucg

SEQ ID NO: 1264168 - RNA, 19 nt, Artificial Sequence
  Description of Artificial Sequence: Synthetic oligonucleotide
  Sense strand starting at position 1375 of SEQ ID NO: 1241330
acacgucugcuccagcuaa

SEQ ID NO: 1264169 - RNA, 19 nt, Artificial Sequence
  Description of Artificial Sequence: Synthetic oligonucleotide
  Antisense strand to SEQ ID NO: 1264168
uuagcuggagcagacgugu

SEQ ID NO: 1264170 - RNA, 19 nt, Artificial Sequence
  Description of Artificial Sequence: Synthetic oligonucleotide
  Sense strand starting at position 1385 of SEQ ID NO: 1241330
uccagcuaaugucagagau

SEQ ID NO: 1264171 - RNA, 19 nt, Artificial Sequence
  Description of Artificial Sequence: Synthetic oligonucleotide
  Antisense strand to SEQ ID NO: 1264170
aucucugacauuagcugga

SEQ ID NO: 1264172 - RNA, 19 nt, Artificial Sequence
  Description of Artificial Sequence: Synthetic oligonucleotide
  Sense strand starting at position 1389 of SEQ ID NO: 1241330
gcuaaugucagagauccgu

SEQ ID NO: 1264173 - RNA, 19 nt, Artificial Sequence
  Description of Artificial Sequence: Synthetic oligonucleotide
  Antisense strand to SEQ ID NO: 1264172
acggaucucugacauuagc

SEQ ID NO: 1264174 - RNA, 19 nt, Artificial Sequence
  Description of Artificial Sequence: Synthetic oligonucleotide
  Sense strand starting at position 1995 of SEQ ID NO: 1241330
uaugaaugaguguaaacgu

SEQ ID NO: 1264175 - RNA, 19 nt, Artificial Sequence
  Description of Artificial Sequence: Synthetic oligonucleotide
  Antisense strand to SEQ ID NO: 1264174
acguuuacacucauucaua

SEQ ID NO: 1264176 - RNA, 19 nt, Artificial Sequence
  Description of Artificial Sequence: Synthetic oligonucleotide
  Sense strand starting at position 2127 of SEQ ID NO: 1241330
uccuaaucucgugagcauu

SEQ ID NO: 1264177 - RNA, 19 nt, Artificial Sequence
  Description of Artificial Sequence: Synthetic oligonucleotide
  Antisense strand to SEQ ID NO: 1264176
aaugcucacgagauuagga

SEQ ID NO: 1264178 - RNA, 19 nt, Artificial Sequence
  Description of Artificial Sequence: Synthetic oligonucleotide
  Sense strand starting at position 2244 of SEQ ID NO: 1241330
ugacgcagauguccuaaua

SEQ ID NO: 1264179 - RNA, 19 nt, Artificial Sequence
  Description of Artificial Sequence: Synthetic oligonucleotide
  Antisense strand to SEQ ID NO: 1264178
uauuaggacaucugcguca

SEQ ID NO: 1264180 - RNA, 19 nt, Artificial Sequence
  Description of Artificial Sequence: Synthetic oligonucleotide
  Sense strand starting at position 2673 of SEQ ID NO: 1241330
cacuguuccugcguuugga

SEQ ID NO: 1264181 - RNA, 19 nt, Artificial Sequence
  Description of Artificial Sequence: Synthetic oligonucleotide
  Antisense strand to SEQ ID NO: 1264180
uccaaacgcaggaacagug

SEQ ID NO: 1264182 - RNA, 19 nt, Artificial Sequence
  Description of Artificial Sequence: Synthetic oligonucleotide
  Sense strand starting at position 2724 of SEQ ID NO: 1241330
acgauaaccuacuuuacga

SEQ ID NO: 1264183 - RNA, 19 nt, Artificial Sequence
  Description of Artificial Sequence: Synthetic oligonucleotide
  Antisense strand to SEQ ID NO: 1264182
ucguaaaguagguuaucgu

SEQ ID NO: 1264184 - RNA, 19 nt, Artificial Sequence
  Description of Artificial Sequence: Synthetic oligonucleotide
  Sense strand starting at position 2806 of SEQ ID NO: 1241330
cggccaugugugggaauau

SEQ ID NO: 1264185 - RNA, 19 nt, Artificial Sequence
  Description of Artificial Sequence: Synthetic oligonucleotide
  Antisense strand to SEQ ID NO: 1264184
auauucccacacauggccg

SEQ ID NO: 1264186 - RNA, 19 nt, Artificial Sequence
  Description of Artificial Sequence: Synthetic oligonucleotide
  Sense strand starting at position 2816 of SEQ ID NO: 1241330
ugggaauauuaaggaaacu

SEQ ID NO: 1264187 - RNA, 19 nt, Artificial Sequence
  Description of Artificial Sequence: Synthetic oligonucleotide
  Antisense strand to SEQ ID NO: 1264186
aguuuccuuaauauuccca

SEQ ID NO: 1264188 - RNA, 19 nt, Artificial Sequence
  Description of Artificial Sequence: Synthetic oligonucleotide
  Sense strand starting at position 2833 of SEQ ID NO: 1241330
cugucaaaucccugagaca

SEQ ID NO: 1264189 - RNA, 19 nt, Artificial Sequence
  Description of Artificial Sequence: Synthetic oligonucleotide
  Antisense strand to SEQ ID NO: 1264188
ugucucagggauuugacag

SEQ ID NO: 1264190 - RNA, 19 nt, Artificial Sequence
  Description of Artificial Sequence: Synthetic oligonucleotide
  Sense strand starting at position 2855 of SEQ ID NO: 1241330
gcagauaaacacugugcaa

SEQ ID NO: 1264191 - RNA, 19 nt, Artificial Sequence
  Description of Artificial Sequence: Synthetic oligonucleotide
  Antisense strand to SEQ ID NO: 1264190
uugcacaguguuuaucugc

SEQ ID NO: 1264192 - RNA, 19 nt, Artificial Sequence
  Description of Artificial Sequence: Synthetic oligonucleotide
  Sense strand starting at position 2968 of SEQ ID NO: 1241330
uggucaguucgggaugaca

SEQ ID NO: 1264193 - RNA, 19 nt, Artificial Sequence
  Description of Artificial Sequence: Synthetic oligonucleotide
  Antisense strand to SEQ ID NO: 1264192
ugucaucccgaacugacca

SEQ ID NO: 1264194 - RNA, 19 nt, Artificial Sequence
  Description of Artificial Sequence: Synthetic oligonucleotide
  Sense strand starting at position 2970 of SEQ ID NO: 1241330
gucaguucgggaugacaag

SEQ ID NO: 1264195 - RNA, 19 nt, Artificial Sequence
  Description of Artificial Sequence: Synthetic oligonucleotide
  Antisense strand to SEQ ID NO: 1264194
cuugucaucccgaacugac

SEQ ID NO: 1264196 - RNA, 19 nt, Artificial Sequence
  Description of Artificial Sequence: Synthetic oligonucleotide
  Sense strand starting at position 3148 of SEQ ID NO: 1241330
gcggaauaccucgacugcu

SEQ ID NO: 1264197 - RNA, 19 nt, Artificial Sequence
  Description of Artificial Sequence: Synthetic oligonucleotide
  Antisense strand to SEQ ID NO: 1264196
agcagucgagguauuccgc

SEQ ID NO: 1264198 - RNA, 19 nt, Artificial Sequence
  Description of Artificial Sequence: Synthetic oligonucleotide
  Sense strand starting at position 3506 of SEQ ID NO: 1241330
aggagauccugcuauagau

SEQ ID NO: 1264199 - RNA, 19 nt, Artificial Sequence
  Description of Artificial Sequence: Synthetic oligonucleotide
  Antisense strand to SEQ ID NO: 1264198
aucuauagcaggaucuccu

SEQ ID NO: 1264200 - RNA, 19 nt, Artificial Sequence
  Description of Artificial Sequence: Synthetic oligonucleotide
  Sense strand starting at position 3539 of SEQ ID NO: 1241330
ggcuguuuacagcaacaca

SEQ ID NO: 1264201 - RNA, 19 nt, Artificial Sequence
  Description of Artificial Sequence: Synthetic oligonucleotide
  Antisense strand to SEQ ID NO: 1264200
uguguugcuguaaacagcc

SEQ ID NO: 1264202 - RNA, 19 nt, Artificial Sequence
  Description of Artificial Sequence: Synthetic oligonucleotide
  Sense strand starting at position 3864 of SEQ ID NO: 1241330
cauuguaugucauugguuu

SEQ ID NO: 1264203 - RNA, 19 nt, Artificial Sequence
  Description of Artificial Sequence: Synthetic oligonucleotide
  Antisense strand to SEQ ID NO: 1264202
aaaccaaugacauacaaug

SEQ ID NO: 1264204 - RNA, 19 nt, Artificial Sequence
  Description of Artificial Sequence: Synthetic oligonucleotide
  Sense strand starting at position 3865 of SEQ ID NO: 1241330
auuguaugucauugguuua

SEQ ID NO: 1264205 - RNA, 19 nt, Artificial Sequence
  Description of Artificial Sequence: Synthetic oligonucleotide
  Antisense strand to SEQ ID NO: 1264204
uaaaccaaugacauacaau

SEQ ID NO: 1264206 - RNA, 19 nt, Artificial Sequence
  Description of Artificial Sequence: Synthetic oligonucleotide
  Sense strand starting at position 3866 of SEQ ID NO: 1241330
uuguaugucauugguuuau

SEQ ID NO: 1264207 - RNA, 19 nt, Artificial Sequence
  Description of Artificial Sequence: Synthetic oligonucleotide
  Antisense strand to SEQ ID NO: 1264206
auaaaccaaugacauacaa

SEQ ID NO: 1264208 - RNA, 19 nt, Artificial Sequence
  Description of Artificial Sequence: Synthetic oligonucleotide
  Sense strand starting at position 3868 of SEQ ID NO: 1241330
guaugucauugguuuaugu

SEQ ID NO: 1264209 - RNA, 19 nt, Artificial Sequence
  Description of Artificial Sequence: Synthetic oligonucleotide
  Antisense strand to SEQ ID NO: 1264208
acauaaaccaaugacauac

SEQ ID NO: 1264210 - RNA, 19 nt, Artificial Sequence
  Description of Artificial Sequence: Synthetic oligonucleotide
  Sense strand starting at position 3876 of SEQ ID NO: 1241330
uugguuuauguugguggga

SEQ ID NO: 1264211 - RNA, 19 nt, Artificial Sequence
  Description of Artificial Sequence: Synthetic oligonucleotide
  Antisense strand to SEQ ID NO: 1264210
ucccaccaacauaaaccaa

SEQ ID NO: 1264212 - RNA, 19 nt, Artificial Sequence
  Description of Artificial Sequence: Synthetic oligonucleotide
  Sense strand starting at position 3877 of SEQ ID NO: 1241330
ugguuuauguuggugggaa

SEQ ID NO: 1264213 - RNA, 19 nt, Artificial Sequence
  Description of Artificial Sequence: Synthetic oligonucleotide
  Antisense strand to SEQ ID NO: 1264212
uucccaccaacauaaacca

SEQ ID NO: 1264214 - RNA, 19 nt, Artificial Sequence
  Description of Artificial Sequence: Synthetic oligonucleotide
  Sense strand starting at position 3879 of SEQ ID NO: 1241330
guuuauguuggugggaauu

SEQ ID NO: 1264215 - RNA, 19 nt, Artificial Sequence
  Description of Artificial Sequence: Synthetic oligonucleotide
  Antisense strand to SEQ ID NO: 1264214
aauucccaccaacauaaac

SEQ ID NO: 1264216 - RNA, 19 nt, Artificial Sequence
  Description of Artificial Sequence: Synthetic oligonucleotide
  Sense strand starting at position 3881 of SEQ ID NO: 1241330
uuauguuggugggaauuua

SEQ ID NO: 1264217 - RNA, 19 nt, Artificial Sequence
  Description of Artificial Sequence: Synthetic oligonucleotide
  Antisense strand to SEQ ID NO: 1264216
uaaauucccaccaacauaa

SEQ ID NO: 1264218 - RNA, 19 nt, Artificial Sequence
  Description of Artificial Sequence: Synthetic oligonucleotide
  Sense strand starting at position 3962 of SEQ ID NO: 1241330
cacagauuccuuggagcug

SEQ ID NO: 1264219 - RNA, 19 nt, Artificial Sequence
  Description of Artificial Sequence: Synthetic oligonucleotide
  Antisense strand to SEQ ID NO: 1264218
cagcuccaaggaaucugug

SEQ ID NO: 1264220 - RNA, 19 nt, Artificial Sequence
  Description of Artificial Sequence: Synthetic oligonucleotide
  Sense strand starting at position 231 of SEQ ID NO: 1241331
cucaaagugcuauaugcau

SEQ ID NO: 1264221 - RNA, 19 nt, Artificial Sequence
  Description of Artificial Sequence: Synthetic oligonucleotide
  Antisense strand to SEQ ID NO: 1264220
augcauauagcacuuugag

SEQ ID NO: 1264222 - RNA, 19 nt, Artificial Sequence
  Description of Artificial Sequence: Synthetic oligonucleotide
  Sense strand starting at position 347 of SEQ ID NO: 1241331
ggugacacaguuugucaaa

SEQ ID NO: 1264223 - RNA, 19 nt, Artificial Sequence
  Description of Artificial Sequence: Synthetic oligonucleotide
  Antisense strand to SEQ ID NO: 1264222
uuugacaaacugugucacc

SEQ ID NO: 1264224 - RNA, 19 nt, Artificial Sequence
  Description of Artificial Sequence: Synthetic oligonucleotide
  Sense strand starting at position 423 of SEQ ID NO: 1241331
cuuugagauuccgugagua

SEQ ID NO: 1264225 - RNA, 19 nt, Artificial Sequence
  Description of Artificial Sequence: Synthetic oligonucleotide
  Antisense strand to SEQ ID NO: 1264224
uacucacggaaucucaaag

SEQ ID NO: 1264226 - RNA, 19 nt, Artificial Sequence
  Description of Artificial Sequence: Synthetic oligonucleotide
  Sense strand starting at position 425 of SEQ ID NO: 1241331
uugagauuccgugaguagu

SEQ ID NO: 1264227 - RNA, 19 nt, Artificial Sequence
  Description of Artificial Sequence: Synthetic oligonucleotide
  Antisense strand to SEQ ID NO: 1264226
acuacucacggaaucucaa

SEQ ID NO: 1264228 - RNA, 19 nt, Artificial Sequence
  Description of Artificial Sequence: Synthetic oligonucleotide
  Sense strand starting at position 428 of SEQ ID NO: 1241331
agauuccgugaguagucuu

SEQ ID NO: 1264229 - RNA, 19 nt, Artificial Sequence
  Description of Artificial Sequence: Synthetic oligonucleotide
  Antisense strand to SEQ ID NO: 1264228
aagacuacucacggaaucu

SEQ ID NO: 1264230 - RNA, 19 nt, Artificial Sequence
  Description of Artificial Sequence: Synthetic oligonucleotide
  Sense strand starting at position 435 of SEQ ID NO: 1241331
gugaguagucuugaauaau

SEQ ID NO: 1264231 - RNA, 19 nt, Artificial Sequence
  Description of Artificial Sequence: Synthetic oligonucleotide
  Antisense strand to SEQ ID NO: 1264230
auuauucaagacuacucac

SEQ ID NO: 1264232 - RNA, 19 nt, Artificial Sequence
  Description of Artificial Sequence: Synthetic oligonucleotide
  Sense strand starting at position 573 of SEQ ID NO: 1241331
agaugacugcgucagaauu

SEQ ID NO: 1264233 - RNA, 19 nt, Artificial Sequence
  Description of Artificial Sequence: Synthetic oligonucleotide
  Antisense strand to SEQ ID NO: 1264232
aauucugacgcagucaucu

SEQ ID NO: 1264234 - RNA, 19 nt, Artificial Sequence
  Description of Artificial Sequence: Synthetic oligonucleotide
  Sense strand starting at position 647 of SEQ ID NO: 1241331
uaucaauagcgauguggga

SEQ ID NO: 1264235 - RNA, 19 nt, Artificial Sequence
  Description of Artificial Sequence: Synthetic oligonucleotide
  Antisense strand to SEQ ID NO: 1264234
ucccacaucgcuauugaua

SEQ ID NO: 1264236 - RNA, 19 nt, Artificial Sequence
  Description of Artificial Sequence: Synthetic oligonucleotide
  Sense strand starting at position 649 of SEQ ID NO: 1241331
ucaauagcgaugugggaau

SEQ ID NO: 1264237 - RNA, 19 nt, Artificial Sequence
  Description of Artificial Sequence: Synthetic oligonucleotide
  Antisense strand to SEQ ID NO: 1264236
auucccacaucgcuauuga

SEQ ID NO: 1264238 - RNA, 19 nt, Artificial Sequence
  Description of Artificial Sequence: Synthetic oligonucleotide
  Sense strand starting at position 724 of SEQ ID NO: 1241331
cugguaauuuaauaaggaa

SEQ ID NO: 1264239 - RNA, 19 nt, Artificial Sequence
  Description of Artificial Sequence: Synthetic oligonucleotide
  Antisense strand to SEQ ID NO: 1264238
uuccuuauuaaauuaccag

SEQ ID NO: 1264240 - RNA, 19 nt, Artificial Sequence
  Description of Artificial Sequence: Synthetic oligonucleotide
  Sense strand starting at position 746 of SEQ ID NO: 1241331
ugauguccuuaaguuuauu

SEQ ID NO: 1264241 - RNA, 19 nt, Artificial Sequence
  Description of Artificial Sequence: Synthetic oligonucleotide
  Antisense strand to SEQ ID NO: 1264240
aauaaacuuaaggacauca

SEQ ID NO: 1264242 - RNA, 19 nt, Artificial Sequence
  Description of Artificial Sequence: Synthetic oligonucleotide
  Sense strand starting at position 881 of SEQ ID NO: 1241331
cuaaauaagucaguuacca

SEQ ID NO: 1264243 - RNA, 19 nt, Artificial Sequence
  Description of Artificial Sequence: Synthetic oligonucleotide
  Antisense strand to SEQ ID NO: 1264242
ugguaacugacuuauuuag

SEQ ID NO: 1264244 - RNA, 19 nt, Artificial Sequence
  Description of Artificial Sequence: Synthetic oligonucleotide
  Sense strand starting at position 885 of SEQ ID NO: 1241331
auaagucaguuaccaucaa

SEQ ID NO: 1264245 - RNA, 19 nt, Artificial Sequence
  Description of Artificial Sequence: Synthetic oligonucleotide
  Antisense strand to SEQ ID NO: 1264244
uugaugguaacugacuuau

SEQ ID NO: 1264246 - RNA, 19 nt, Artificial Sequence
  Description of Artificial Sequence: Synthetic oligonucleotide
  Sense strand starting at position 986 of SEQ ID NO: 1241331
aagauuauccaaggcaguu

SEQ ID NO: 1264247 - RNA, 19 nt, Artificial Sequence
  Description of Artificial Sequence: Synthetic oligonucleotide
  Antisense strand to SEQ ID NO: 1264246
aacugccuuggauaaucuu

SEQ ID NO: 1264248 - RNA, 19 nt, Artificial Sequence
  Description of Artificial Sequence: Synthetic oligonucleotide
  Sense strand starting at position 1044 of SEQ ID NO: 1241331
ggguaaucgccagcuguuu

SEQ ID NO: 1264249 - RNA, 19 nt, Artificial Sequence
  Description of Artificial Sequence: Synthetic oligonucleotide
  Antisense strand to SEQ ID NO: 1264248
aaacagcuggcgauuaccc

SEQ ID NO: 1264250 - RNA, 19 nt, Artificial Sequence
  Description of Artificial Sequence: Synthetic oligonucleotide
  Sense strand starting at position 1337 of SEQ ID NO: 1241331
ggcggcagagcgcuuuaau

SEQ ID NO: 1264251 - RNA, 19 nt, Artificial Sequence
  Description of Artificial Sequence: Synthetic oligonucleotide
  Antisense strand to SEQ ID NO: 1264250
auuaaagcgcucugccgcc

SEQ ID NO: 1264252 - RNA, 19 nt, Artificial Sequence
  Description of Artificial Sequence: Synthetic oligonucleotide
  Sense strand starting at position 1338 of SEQ ID NO: 1241331
gcggcagagcgcuuuaauc

SEQ ID NO: 1264253 - RNA, 19 nt, Artificial Sequence
  Description of Artificial Sequence: Synthetic oligonucleotide
  Antisense strand to SEQ ID NO: 1264252
gauuaaagcgcucugccgc

SEQ ID NO: 1264254 - RNA, 19 nt, Artificial Sequence
  Description of Artificial Sequence: Synthetic oligonucleotide
  Sense strand starting at position 1357 of SEQ ID NO: 1241331
agaagacgucugcgaauua

SEQ ID NO: 1264255 - RNA, 19 nt, Artificial Sequence
  Description of Artificial Sequence: Synthetic oligonucleotide
  Antisense strand to SEQ ID NO: 1264254
uaauucgcagacgucuucu

SEQ ID NO: 1264256 - RNA, 19 nt, Artificial Sequence
  Description of Artificial Sequence: Synthetic oligonucleotide
  Sense strand starting at position 1405 of SEQ ID NO: 1241331
guaugcuccggcuuucuca

SEQ ID NO: 1264257 - RNA, 19 nt, Artificial Sequence
  Description of Artificial Sequence: Synthetic oligonucleotide
  Antisense strand to SEQ ID NO: 1264256
ugagaaagccggagcauac

SEQ ID NO: 1264258 - RNA, 19 nt, Artificial Sequence
  Description of Artificial Sequence: Synthetic oligonucleotide
  Sense strand starting at position 2146 of SEQ ID NO: 1241331
ugagcugauguggaucuua

SEQ ID NO: 1264259 - RNA, 19 nt, Artificial Sequence
  Description of Artificial Sequence: Synthetic oligonucleotide
  Antisense strand to SEQ ID NO: 1264258
uaagauccacaucagcuca

SEQ ID NO: 1264260 - RNA, 19 nt, Artificial Sequence
  Description of Artificial Sequence: Synthetic oligonucleotide
  Sense strand starting at position 2659 of SEQ ID NO: 1241331
ccugauuccugacccaaag

SEQ ID NO: 1264261 - RNA, 19 nt, Artificial Sequence
  Description of Artificial Sequence: Synthetic oligonucleotide
  Antisense strand to SEQ ID NO: 1264260
cuuugggucaggaaucagg

SEQ ID NO: 1264262 - RNA, 19 nt, Artificial Sequence
  Description of Artificial Sequence: Synthetic oligonucleotide
  Sense strand starting at position 2765 of SEQ ID NO: 1241331
uugcuucgucacuagaaac

SEQ ID NO: 1264263 - RNA, 19 nt, Artificial Sequence
  Description of Artificial Sequence: Synthetic oligonucleotide
  Antisense strand to SEQ ID NO: 1264262
guuucuagugacgaagcaa

SEQ ID NO: 1264264 - RNA, 19 nt, Artificial Sequence
  Description of Artificial Sequence: Synthetic oligonucleotide
  Sense strand starting at position 2903 of SEQ ID NO: 1241331
cgguuuauaucuuuaugac

SEQ ID NO: 1264265 - RNA, 19 nt, Artificial Sequence
  Description of Artificial Sequence: Synthetic oligonucleotide
  Antisense strand to SEQ ID NO: 1264264
gucauaaagauauaaaccg

SEQ ID NO: 1264266 - RNA, 19 nt, Artificial Sequence
  Description of Artificial Sequence: Synthetic oligonucleotide
  Sense strand starting at position 2904 of SEQ ID NO: 1241331
gguuuauaucuuuaugaca

SEQ ID NO: 1264267 - RNA, 19 nt, Artificial Sequence
  Description of Artificial Sequence: Synthetic oligonucleotide
  Antisense strand to SEQ ID NO: 1264266
ugucauaaagauauaaacc

SEQ ID NO: 1264268 - RNA, 19 nt, Artificial Sequence
  Description of Artificial Sequence: Synthetic oligonucleotide
  Sense strand starting at position 3341 of SEQ ID NO: 1241331
gugggagagucuucccaac

SEQ ID NO: 1264269 - RNA, 19 nt, Artificial Sequence
  Description of Artificial Sequence: Synthetic oligonucleotide
  Antisense strand to SEQ ID NO: 1264268
guugggaagacucucccac

SEQ ID NO: 1264270 - RNA, 19 nt, Artificial Sequence
  Description of Artificial Sequence: Synthetic oligonucleotide
  Sense strand starting at position 3347 of SEQ ID NO: 1241331
gagucuucccaacgcaaag

SEQ ID NO: 1264271 - RNA, 19 nt, Artificial Sequence
  Description of Artificial Sequence: Synthetic oligonucleotide
  Antisense strand to SEQ ID NO: 1264270
cuuugcguugggaagacuc

SEQ ID NO: 1264272 - RNA, 19 nt, Artificial Sequence
  Description of Artificial Sequence: Synthetic oligonucleotide
  Sense strand starting at position 3402 of SEQ ID NO: 1241331
ccacuuguccugggagaga

SEQ ID NO: 1264273 - RNA, 19 nt, Artificial Sequence
  Description of Artificial Sequence: Synthetic oligonucleotide
  Antisense strand to SEQ ID NO: 1264272
ucucucccaggacaagugg

SEQ ID NO: 1264274 - RNA, 19 nt, Artificial Sequence
  Description of Artificial Sequence: Synthetic oligonucleotide
  Sense strand starting at position 3426 of SEQ ID NO: 1241331
acugaagugaccgggugau

SEQ ID NO: 1264275 - RNA, 19 nt, Artificial Sequence
  Description of Artificial Sequence: Synthetic oligonucleotide
  Antisense strand to SEQ ID NO: 1264274
aucacccggucacuucagu

SEQ ID NO: 1264276 - RNA, 19 nt, Artificial Sequence
  Description of Artificial Sequence: Synthetic oligonucleotide
  Sense strand starting at position 3444 of SEQ ID NO: 1241331
uaggcaauuaguuggugau

SEQ ID NO: 1264277 - RNA, 19 nt, Artificial Sequence
  Description of Artificial Sequence: Synthetic oligonucleotide
  Antisense strand to SEQ ID NO: 1264276
aucaccaacuaauugccua

SEQ ID NO: 1264278 - RNA, 19 nt, Artificial Sequence
  Description of Artificial Sequence: Synthetic oligonucleotide
  Sense strand starting at position 3445 of SEQ ID NO: 1241331
aggcaauuaguuggugaua

SEQ ID NO: 1264279 - RNA, 19 nt, Artificial Sequence
  Description of Artificial Sequence: Synthetic oligonucleotide
  Antisense strand to SEQ ID NO: 1264278
uaucaccaacuaauugccu

SEQ ID NO: 1264280 - RNA, 19 nt, Artificial Sequence
  Description of Artificial Sequence: Synthetic oligonucleotide
  Sense strand starting at position 3446 of SEQ ID NO: 1241331
ggcaauuaguuggugauag

SEQ ID NO: 1264281 - RNA, 19 nt, Artificial Sequence
  Description of Artificial Sequence: Synthetic oligonucleotide
  Antisense strand to SEQ ID NO: 1264280
cuaucaccaacuaauugcc

SEQ ID NO: 1264282 - RNA, 19 nt, Artificial Sequence
  Description of Artificial Sequence: Synthetic oligonucleotide
  Sense strand starting at position 3489 of SEQ ID NO: 1241331
gagugugugaccguuugua

SEQ ID NO: 1264283 - RNA, 19 nt, Artificial Sequence
  Description of Artificial Sequence: Synthetic oligonucleotide
  Antisense strand to SEQ ID NO: 1264282
uacaaacggucacacacuc

SEQ ID NO: 1264284 - RNA, 19 nt, Artificial Sequence
  Description of Artificial Sequence: Synthetic oligonucleotide
  Sense strand starting at position 3491 of SEQ ID NO: 1241331
gugugugaccguuuguaua

SEQ ID NO: 1264285 - RNA, 19 nt, Artificial Sequence
  Description of Artificial Sequence: Synthetic oligonucleotide
  Antisense strand to SEQ ID NO: 1264284
uauacaaacggucacacac

SEQ ID NO: 1264286 - RNA, 19 nt, Artificial Sequence
  Description of Artificial Sequence: Synthetic oligonucleotide
  Sense strand starting at position 3505 of SEQ ID NO: 1241331
guauauuucugagcaugug

SEQ ID NO: 1264287 - RNA, 19 nt, Artificial Sequence
  Description of Artificial Sequence: Synthetic oligonucleotide
  Antisense strand to SEQ ID NO: 1264286
cacaugcucagaaauauac

SEQ ID NO: 1264288 - RNA, 19 nt, Artificial Sequence
  Description of Artificial Sequence: Synthetic oligonucleotide
  Sense strand starting at position 3508 of SEQ ID NO: 1241331
uauuucugagcauguguga

SEQ ID NO: 1264289 - RNA, 19 nt, Artificial Sequence
  Description of Artificial Sequence: Synthetic oligonucleotide
  Antisense strand to SEQ ID NO: 1264288
ucacacaugcucagaaaua

SEQ ID NO: 1264290 - RNA, 19 nt, Artificial Sequence
  Description of Artificial Sequence: Synthetic oligonucleotide
  Sense strand starting at position 3559 of SEQ ID NO: 1241331
guuuguuguacugccugua

SEQ ID NO: 1264291 - RNA, 19 nt, Artificial Sequence
  Description of Artificial Sequence: Synthetic oligonucleotide
  Antisense strand to SEQ ID NO: 1264290
uacaggcaguacaacaaac

SEQ ID NO: 1264292 - RNA, 19 nt, Artificial Sequence
  Description of Artificial Sequence: Synthetic oligonucleotide
  Sense strand starting at position 3581 of SEQ ID NO: 1241331
ccacuagguuuccuuaagu

SEQ ID NO: 1264293 - RNA, 19 nt, Artificial Sequence
  Description of Artificial Sequence: Synthetic oligonucleotide
  Antisense strand to SEQ ID NO: 1264292
acuuaaggaaaccuagugg

SEQ ID NO: 1264294 - RNA, 19 nt, Artificial Sequence
  Description of Artificial Sequence: Synthetic oligonucleotide
  Sense strand starting at position 3586 of SEQ ID NO: 1241331
agguuuccuuaaguaacaa

SEQ ID NO: 1264295 - RNA, 19 nt, Artificial Sequence
  Description of Artificial Sequence: Synthetic oligonucleotide
  Antisense strand to SEQ ID NO: 1264294
uuguuacuuaaggaaaccu

SEQ ID NO: 1264296 - RNA, 19 nt, Artificial Sequence
  Description of Artificial Sequence: Synthetic oligonucleotide
  Sense strand starting at position 3834 of SEQ ID NO: 1241331
ggugaagaugugcaguuaa

SEQ ID NO: 1264297 - RNA, 19 nt, Artificial Sequence
  Description of Artificial Sequence: Synthetic oligonucleotide
  Antisense strand to SEQ ID NO: 1264296
uuaacugcacaucuucacc

SEQ ID NO: 1264298 - RNA, 19 nt, Artificial Sequence
  Description of Artificial Sequence: Synthetic oligonucleotide
  Sense strand starting at position 3842 of SEQ ID NO: 1241331
ugugcaguuaaggaaauaa

SEQ ID NO: 1264299 - RNA, 19 nt, Artificial Sequence
  Description of Artificial Sequence: Synthetic oligonucleotide
  Antisense strand to SEQ ID NO: 1264298
uuauuuccuuaacugcaca

SEQ ID NO: 1264300 - RNA, 19 nt, Artificial Sequence
  Description of Artificial Sequence: Synthetic oligonucleotide
  Sense strand starting at position 2270 of SEQ ID NO: 1241332
cggcuauagccacaauuaa

SEQ ID NO: 1264301 - RNA, 19 nt, Artificial Sequence
  Description of Artificial Sequence: Synthetic oligonucleotide
  Antisense strand to SEQ ID NO: 1264300
uuaauuguggcuauagccg

SEQ ID NO: 1264302 - RNA, 19 nt, Artificial Sequence
  Description of Artificial Sequence: Synthetic oligonucleotide
  Sense strand starting at position 2638 of SEQ ID NO: 1241332
cggcuuccuccucauugua

SEQ ID NO: 1264303 - RNA, 19 nt, Artificial Sequence
  Description of Artificial Sequence: Synthetic oligonucleotide
  Antisense strand to SEQ ID NO: 1264302
uacaaugaggaggaagccg

SEQ ID NO: 1264304 - RNA, 19 nt, Artificial Sequence
  Description of Artificial Sequence: Synthetic oligonucleotide
  Sense strand starting at position 2648 of SEQ ID NO: 1241332
cucauuguacugggucauu

SEQ ID NO: 1264305 - RNA, 19 nt, Artificial Sequence
  Description of Artificial Sequence: Synthetic oligonucleotide
  Antisense strand to SEQ ID NO: 1264304
aaugacccaguacaaugag

SEQ ID NO: 1264306 - RNA, 19 nt, Artificial Sequence
  Description of Artificial Sequence: Synthetic oligonucleotide
  Sense strand starting at position 2668 of SEQ ID NO: 1241332
ucguuuaagcgucaauauu

SEQ ID NO: 1264307 - RNA, 19 nt, Artificial Sequence
  Description of Artificial Sequence: Synthetic oligonucleotide
  Antisense strand to SEQ ID NO: 1264306
aauauugacgcuuaaacga

SEQ ID NO: 1264308 - RNA, 19 nt, Artificial Sequence
  Description of Artificial Sequence: Synthetic oligonucleotide
  Sense strand starting at position 2676 of SEQ ID NO: 1241332
gcgucaauauuuguccuua

SEQ ID NO: 1264309 - RNA, 19 nt, Artificial Sequence
  Description of Artificial Sequence: Synthetic oligonucleotide
  Antisense strand to SEQ ID NO: 1264308
uaaggacaaauauugacgc

SEQ ID NO: 1264310 - RNA, 19 nt, Artificial Sequence
  Description of Artificial Sequence: Synthetic oligonucleotide
  Sense strand starting at position 2677 of SEQ ID NO: 1241332
cgucaauauuuguccuuag

SEQ ID NO: 1264311 - RNA, 19 nt, Artificial Sequence
  Description of Artificial Sequence: Synthetic oligonucleotide
  Antisense strand to SEQ ID NO: 1264310
cuaaggacaaauauugacg

SEQ ID NO: 1264312 - RNA, 19 nt, Artificial Sequence
  Description of Artificial Sequence: Synthetic oligonucleotide
  Sense strand starting at position 2678 of SEQ ID NO: 1241332
gucaauauuuguccuuagu

SEQ ID NO: 1264313 - RNA, 19 nt, Artificial Sequence
  Description of Artificial Sequence: Synthetic oligonucleotide
  Antisense strand to SEQ ID NO: 1264312
acuaaggacaaauauugac

SEQ ID NO: 1264314 - RNA, 19 nt, Artificial Sequence
  Description of Artificial Sequence: Synthetic oligonucleotide
  Sense strand starting at position 2684 of SEQ ID NO: 1241332
auuuguccuuagugauuaa

SEQ ID NO: 1264315 - RNA, 19 nt, Artificial Sequence
  Description of Artificial Sequence: Synthetic oligonucleotide
  Antisense strand to SEQ ID NO: 1264314
uuaaucacuaaggacaaau

SEQ ID NO: 1264316 - RNA, 19 nt, Artificial Sequence
  Description of Artificial Sequence: Synthetic oligonucleotide
  Sense strand starting at position 2687 of SEQ ID NO: 1241332
uguccuuagugauuaaagu

SEQ ID NO: 1264317 - RNA, 19 nt, Artificial Sequence
  Description of Artificial Sequence: Synthetic oligonucleotide
  Antisense strand to SEQ ID NO: 1264316
acuuuaaucacuaaggaca

SEQ ID NO: 1264318 - RNA, 19 nt, Artificial Sequence
  Description of Artificial Sequence: Synthetic oligonucleotide
  Sense strand starting at position 2688 of SEQ ID NO: 1241332
guccuuagugauuaaaguu

SEQ ID NO: 1264319 - RNA, 19 nt, Artificial Sequence
  Description of Artificial Sequence: Synthetic oligonucleotide
  Antisense strand to SEQ ID NO: 1264318
aacuuuaaucacuaaggac

SEQ ID NO: 1264320 - RNA, 19 nt, Artificial Sequence
  Description of Artificial Sequence: Synthetic oligonucleotide
  Sense strand starting at position 2696 of SEQ ID NO: 1241332
ugauuaaaguuuguaucca

SEQ ID NO: 1264321 - RNA, 19 nt, Artificial Sequence
  Description of Artificial Sequence: Synthetic oligonucleotide
  Antisense strand to SEQ ID NO: 1264320
uggauacaaacuuuaauca

SEQ ID NO: 1264322 - RNA, 19 nt, Artificial Sequence
  Description of Artificial Sequence: Synthetic oligonucleotide
  Sense strand starting at position 2850 of SEQ ID NO: 1241332
uggcauuucugagccagca

SEQ ID NO: 1264323 - RNA, 19 nt, Artificial Sequence
  Description of Artificial Sequence: Synthetic oligonucleotide
  Antisense strand to SEQ ID NO: 1264322
ugcuggcucagaaaugcca

SEQ ID NO: 1264324 - RNA, 19 nt, Artificial Sequence
  Description of Artificial Sequence: Synthetic oligonucleotide
  Sense strand starting at position 2877 of SEQ ID NO: 1241332
gugcccuuuguagguaaua

SEQ ID NO: 1264325 - RNA, 19 nt, Artificial Sequence
  Description of Artificial Sequence: Synthetic oligonucleotide
  Antisense strand to SEQ ID NO: 1264324
uauuaccuacaaagggcac

SEQ ID NO: 1264326 - RNA, 19 nt, Artificial Sequence
  Description of Artificial Sequence: Synthetic oligonucleotide
  Sense strand starting at position 2879 of SEQ ID NO: 1241332
gcccuuuguagguaauagu

SEQ ID NO: 1264327 - RNA, 19 nt, Artificial Sequence
  Description of Artificial Sequence: Synthetic oligonucleotide
  Antisense strand to SEQ ID NO: 1264326
acuauuaccuacaaagggc

SEQ ID NO: 1264328 - RNA, 19 nt, Artificial Sequence
  Description of Artificial Sequence: Synthetic oligonucleotide
  Sense strand starting at position 2882 of SEQ ID NO: 1241332
cuuuguagguaauagucua

SEQ ID NO: 1264329 - RNA, 19 nt, Artificial Sequence
  Description of Artificial Sequence: Synthetic oligonucleotide
  Antisense strand to SEQ ID NO: 1264328
uagacuauuaccuacaaag

SEQ ID NO: 1264330 - RNA, 19 nt, Artificial Sequence
  Description of Artificial Sequence: Synthetic oligonucleotide
  Sense strand starting at position 2989 of SEQ ID NO: 1241332
agcuuugggagcgaugaga

SEQ ID NO: 1264331 - RNA, 19 nt, Artificial Sequence
  Description of Artificial Sequence: Synthetic oligonucleotide
  Antisense strand to SEQ ID NO: 1264330
ucucaucgcucccaaagcu

SEQ ID NO: 1264332 - RNA, 19 nt, Artificial Sequence
  Description of Artificial Sequence: Synthetic oligonucleotide
  Sense strand starting at position 3229 of SEQ ID NO: 1241332
cgaaauaaaucagguaaca

SEQ ID NO: 1264333 - RNA, 19 nt, Artificial Sequence
  Description of Artificial Sequence: Synthetic oligonucleotide
  Antisense strand to SEQ ID NO: 1264332
uguuaccugauuuauuucg

SEQ ID NO: 1264334 - RNA, 19 nt, Artificial Sequence
  Description of Artificial Sequence: Synthetic oligonucleotide
  Sense strand starting at position 3249 of SEQ ID NO: 1241332
augcuauauacgugugucu

SEQ ID NO: 1264335 - RNA, 19 nt, Artificial Sequence
  Description of Artificial Sequence: Synthetic oligonucleotide
  Antisense strand to SEQ ID NO: 1264334
agacacacguauauagcau

SEQ ID NO: 1264336 - RNA, 19 nt, Artificial Sequence
  Description of Artificial Sequence: Synthetic oligonucleotide
  Sense strand starting at position 3251 of SEQ ID NO: 1241332
gcuauauacgugugucucu

SEQ ID NO: 1264337 - RNA, 19 nt, Artificial Sequence
  Description of Artificial Sequence: Synthetic oligonucleotide
  Antisense strand to SEQ ID NO: 1264336
agagacacacguauauagc

SEQ ID NO: 1264338 - RNA, 19 nt, Artificial Sequence
  Description of Artificial Sequence: Synthetic oligonucleotide
  Sense strand starting at position 3349 of SEQ ID NO: 1241332
cucagcuucuaauccgaau

SEQ ID NO: 1264339 - RNA, 19 nt, Artificial Sequence
  Description of Artificial Sequence: Synthetic oligonucleotide
  Antisense strand to SEQ ID NO: 1264338
auucggauuagaagcugag

SEQ ID NO: 1264340 - RNA, 19 nt, Artificial Sequence
  Description of Artificial Sequence: Synthetic oligonucleotide
  Sense strand starting at position 3385 of SEQ ID NO: 1241332
gagcgaucacccuggaaau

SEQ ID NO: 1264341 - RNA, 19 nt, Artificial Sequence
  Description of Artificial Sequence: Synthetic oligonucleotide
  Antisense strand to SEQ ID NO: 1264340
auuuccagggugaucgcuc

SEQ ID NO: 1264342 - RNA, 19 nt, Artificial Sequence
  Description of Artificial Sequence: Synthetic oligonucleotide
  Sense strand starting at position 3386 of SEQ ID NO: 1241332
agcgaucacccuggaaaua

SEQ ID NO: 1264343 - RNA, 19 nt, Artificial Sequence
  Description of Artificial Sequence: Synthetic oligonucleotide
  Antisense strand to SEQ ID NO: 1264342
uauuuccagggugaucgcu

SEQ ID NO: 1264344 - RNA, 19 nt, Artificial Sequence
  Description of Artificial Sequence: Synthetic oligonucleotide
  Sense strand starting at position 3387 of SEQ ID NO: 1241332
gcgaucacccuggaaauau

SEQ ID NO: 1264345 - RNA, 19 nt, Artificial Sequence
  Description of Artificial Sequence: Synthetic oligonucleotide
  Antisense strand to SEQ ID NO: 1264344
auauuuccagggugaucgc

SEQ ID NO: 1264346 - RNA, 19 nt, Artificial Sequence
  Description of Artificial Sequence: Synthetic oligonucleotide
  Sense strand starting at position 3449 of SEQ ID NO: 1241332
gucuauuucuuuccgguuu

SEQ ID NO: 1264347 - RNA, 19 nt, Artificial Sequence
  Description of Artificial Sequence: Synthetic oligonucleotide
  Antisense strand to SEQ ID NO: 1264346
aaaccggaaagaaauagac

SEQ ID NO: 1264348 - RNA, 19 nt, Artificial Sequence
  Description of Artificial Sequence: Synthetic oligonucleotide
  Sense strand starting at position 3536 of SEQ ID NO: 1241332
cgggccucauuccugaaau

SEQ ID NO: 1264349 - RNA, 19 nt, Artificial Sequence
  Description of Artificial Sequence: Synthetic oligonucleotide
  Antisense strand to SEQ ID NO: 1264348
auuucaggaaugaggcccg

SEQ ID NO: 1264350 - RNA, 19 nt, Artificial Sequence
  Description of Artificial Sequence: Synthetic oligonucleotide
  Sense strand starting at position 3537 of SEQ ID NO: 1241332
gggccucauuccugaaaua

SEQ ID NO: 1264351 - RNA, 19 nt, Artificial Sequence
  Description of Artificial Sequence: Synthetic oligonucleotide
  Antisense strand to SEQ ID NO: 1264350
uauuucaggaaugaggccc

SEQ ID NO: 1264352 - RNA, 19 nt, Artificial Sequence
  Description of Artificial Sequence: Synthetic oligonucleotide
  Sense strand starting at position 3538 of SEQ ID NO: 1241332
ggccucauuccugaaauaa

SEQ ID NO: 1264353 - RNA, 19 nt, Artificial Sequence
  Description of Artificial Sequence: Synthetic oligonucleotide
  Antisense strand to SEQ ID NO: 1264352
uuauuucaggaaugaggcc

SEQ ID NO: 1264354 - RNA, 19 nt, Artificial Sequence
  Description of Artificial Sequence: Synthetic oligonucleotide
  Sense strand starting at position 3673 of SEQ ID NO: 1241332
guuggagguugaagugaau

SEQ ID NO: 1264355 - RNA, 19 nt, Artificial Sequence
  Description of Artificial Sequence: Synthetic oligonucleotide
  Antisense strand to SEQ ID NO: 1264354
auucacuucaaccuccaac

SEQ ID NO: 1264356 - RNA, 19 nt, Artificial Sequence
  Description of Artificial Sequence: Synthetic oligonucleotide
  Sense strand starting at position 3750 of SEQ ID NO: 1241332
cccagcauuucccagggau

SEQ ID NO: 1264357 - RNA, 19 nt, Artificial Sequence
  Description of Artificial Sequence: Synthetic oligonucleotide
  Antisense strand to SEQ ID NO: 1264356
aucccugggaaaugcuggg

SEQ ID NO: 1264358 - RNA, 19 nt, Artificial Sequence
  Description of Artificial Sequence: Synthetic oligonucleotide
  Sense strand starting at position 3898 of SEQ ID NO: 1241332
uuccuuccucuagaaggua

SEQ ID NO: 1264359 - RNA, 19 nt, Artificial Sequence
  Description of Artificial Sequence: Synthetic oligonucleotide
  Antisense strand to SEQ ID NO: 1264358
uaccuucuagaggaaggaa

SEQ ID NO: 1264360 - RNA, 19 nt, Artificial Sequence
  Description of Artificial Sequence: Synthetic oligonucleotide
  Sense strand starting at position 3901 of SEQ ID NO: 1241332
cuuccucuagaagguaaau

SEQ ID NO: 1264361 - RNA, 19 nt, Artificial Sequence
  Description of Artificial Sequence: Synthetic oligonucleotide
  Antisense strand to SEQ ID NO: 1264360
auuuaccuucuagaggaag

SEQ ID NO: 1264362 - RNA, 19 nt, Artificial Sequence
  Description of Artificial Sequence: Synthetic oligonucleotide
  Sense strand starting at position 51 of SEQ ID NO: 1241333
uaacaacuucugggacagu

SEQ ID NO: 1264363 - RNA, 19 nt, Artificial Sequence
  Description of Artificial Sequence: Synthetic oligonucleotide
  Antisense strand to SEQ ID NO: 1264362
acugucccagaaguuguua

SEQ ID NO: 1264364 - RNA, 19 nt, Artificial Sequence
  Description of Artificial Sequence: Synthetic oligonucleotide
  Sense strand starting at position 87 of SEQ ID NO: 1241333
gcuuuaaaggcucaaauga

SEQ ID NO: 1264365 - RNA, 19 nt, Artificial Sequence
  Description of Artificial Sequence: Synthetic oligonucleotide
  Antisense strand to SEQ ID NO: 1264364
ucauuugagccuuuaaagc

SEQ ID NO: 1264366 - RNA, 19 nt, Artificial Sequence
  Description of Artificial Sequence: Synthetic oligonucleotide
  Sense strand starting at position 193 of SEQ ID NO: 1241333
cuuccucuuggaugugaaa

SEQ ID NO: 1264367 - RNA, 19 nt, Artificial Sequence
  Description of Artificial Sequence: Synthetic oligonucleotide
  Antisense strand to SEQ ID NO: 1264366
uuucacauccaagaggaag

SEQ ID NO: 1264368 - RNA, 19 nt, Artificial Sequence
  Description of Artificial Sequence: Synthetic oligonucleotide
  Sense strand starting at position 195 of SEQ ID NO: 1241333
uccucuuggaugugaaaug

SEQ ID NO: 1264369 - RNA, 19 nt, Artificial Sequence
  Description of Artificial Sequence: Synthetic oligonucleotide
  Antisense strand to SEQ ID NO: 1264368
cauuucacauccaagagga

SEQ ID NO: 1264370 - RNA, 19 nt, Artificial Sequence
  Description of Artificial Sequence: Synthetic oligonucleotide
  Sense strand starting at position 312 of SEQ ID NO: 1241333
uuagacuuagugcaugaaa

SEQ ID NO: 1264371 - RNA, 19 nt, Artificial Sequence
  Description of Artificial Sequence: Synthetic oligonucleotide
  Antisense strand to SEQ ID NO: 1264370
uuucaugcacuaagucuaa

SEQ ID NO: 1264372 - RNA, 19 nt, Artificial Sequence
  Description of Artificial Sequence: Synthetic oligonucleotide
  Sense strand starting at position 427 of SEQ ID NO: 1241333
ccgguuaggaaucauuauu

SEQ ID NO: 1264373 - RNA, 19 nt, Artificial Sequence
  Description of Artificial Sequence: Synthetic oligonucleotide
  Antisense strand to SEQ ID NO: 1264372
aauaaugauuccuaaccgg

SEQ ID NO: 1264374 - RNA, 19 nt, Artificial Sequence
  Description of Artificial Sequence: Synthetic oligonucleotide
  Sense strand starting at position 433 of SEQ ID NO: 1241333
aggaaucauuauucuaagu

SEQ ID NO: 1264375 - RNA, 19 nt, Artificial Sequence
  Description of Artificial Sequence: Synthetic oligonucleotide
  Antisense strand to SEQ ID NO: 1264374
acuuagaauaaugauuccu

SEQ ID NO: 1264376 - RNA, 19 nt, Artificial Sequence
  Description of Artificial Sequence: Synthetic oligonucleotide
  Sense strand starting at position 486 of SEQ ID NO: 1241333
aaucauugagaauguauug

SEQ ID NO: 1264377 - RNA, 19 nt, Artificial Sequence
  Description of Artificial Sequence: Synthetic oligonucleotide
  Antisense strand to SEQ ID NO: 1264376
caauacauucucaaugauu

SEQ ID NO: 1264378 - RNA, 19 nt, Artificial Sequence
  Description of Artificial Sequence: Synthetic oligonucleotide
  Sense strand starting at position 512 of SEQ ID NO: 1241333
cuguguauacguguaagcu

SEQ ID NO: 1264379 - RNA, 19 nt, Artificial Sequence
  Description of Artificial Sequence: Synthetic oligonucleotide
  Antisense strand to SEQ ID NO: 1264378
agcuuacacguauacacag

SEQ ID NO: 1264380 - RNA, 19 nt, Artificial Sequence
  Description of Artificial Sequence: Synthetic oligonucleotide
  Sense strand starting at position 668 of SEQ ID NO: 1241333
gcacaagagggcuaucuga

SEQ ID NO: 1264381 - RNA, 19 nt, Artificial Sequence
  Description of Artificial Sequence: Synthetic oligonucleotide
  Antisense strand to SEQ ID NO: 1264380
ucagauagcccucuugugc

SEQ ID NO: 1264382 - RNA, 19 nt, Artificial Sequence
  Description of Artificial Sequence: Synthetic oligonucleotide
  Sense strand starting at position 749 of SEQ ID NO: 1241333
gaccaaucagugugagagu

SEQ ID NO: 1264383 - RNA, 19 nt, Artificial Sequence
  Description of Artificial Sequence: Synthetic oligonucleotide
  Antisense strand to SEQ ID NO: 1264382
acucucacacugauugguc

SEQ ID NO: 1264384 - RNA, 19 nt, Artificial Sequence
  Description of Artificial Sequence: Synthetic oligonucleotide
  Sense strand starting at position 756 of SEQ ID NO: 1241333
cagugugagaguuaaagug

SEQ ID NO: 1264385 - RNA, 19 nt, Artificial Sequence
  Description of Artificial Sequence: Synthetic oligonucleotide
  Antisense strand to SEQ ID NO: 1264384
cacuuuaacucucacacug

SEQ ID NO: 1264386 - RNA, 19 nt, Artificial Sequence
  Description of Artificial Sequence: Synthetic oligonucleotide
  Sense strand starting at position 768 of SEQ ID NO: 1241333
uaaagugggcuccagucau

SEQ ID NO: 1264387 - RNA, 19 nt, Artificial Sequence
  Description of Artificial Sequence: Synthetic oligonucleotide
  Antisense strand to SEQ ID NO: 1264386
augacuggagcccacuuua

SEQ ID NO: 1264388 - RNA, 19 nt, Artificial Sequence
  Description of Artificial Sequence: Synthetic oligonucleotide
  Sense strand starting at position 839 of SEQ ID NO: 1241333
agagucggcgaucaaugaa

SEQ ID NO: 1264389 - RNA, 19 nt, Artificial Sequence
  Description of Artificial Sequence: Synthetic oligonucleotide
  Antisense strand to SEQ ID NO: 1264388
uucauugaucgccgacucu

SEQ ID NO: 1264390 - RNA, 19 nt, Artificial Sequence
  Description of Artificial Sequence: Synthetic oligonucleotide
  Sense strand starting at position 884 of SEQ ID NO: 1241333
ggaugucuuccuuagcuaa

SEQ ID NO: 1264391 - RNA, 19 nt, Artificial Sequence
  Description of Artificial Sequence: Synthetic oligonucleotide
  Antisense strand to SEQ ID NO: 1264390
uuagcuaaggaagacaucc

SEQ ID NO: 1264392 - RNA, 19 nt, Artificial Sequence
  Description of Artificial Sequence: Synthetic oligonucleotide
  Sense strand starting at position 1169 of SEQ ID NO: 1241333
augucaucccgggaguaua

SEQ ID NO: 1264393 - RNA, 19 nt, Artificial Sequence
  Description of Artificial Sequence: Synthetic oligonucleotide
  Antisense strand to SEQ ID NO: 1264392
uauacucccgggaugacau

SEQ ID NO: 1264394 - RNA, 19 nt, Artificial Sequence
  Description of Artificial Sequence: Synthetic oligonucleotide
  Sense strand starting at position 1278 of SEQ ID NO: 1241333
ucuuauuacccucagugga

SEQ ID NO: 1264395 - RNA, 19 nt, Artificial Sequence
  Description of Artificial Sequence: Synthetic oligonucleotide
  Antisense strand to SEQ ID NO: 1264394
uccacugaggguaauaaga

SEQ ID NO: 1264396 - RNA, 19 nt, Artificial Sequence
  Description of Artificial Sequence: Synthetic oligonucleotide
  Sense strand starting at position 1280 of SEQ ID NO: 1241333
uuauuacccucaguggaaa

SEQ ID NO: 1264397 - RNA, 19 nt, Artificial Sequence
  Description of Artificial Sequence: Synthetic oligonucleotide
  Antisense strand to SEQ ID NO: 1264396
uuuccacugaggguaauaa

SEQ ID NO: 1264398 - RNA, 19 nt, Artificial Sequence
  Description of Artificial Sequence: Synthetic oligonucleotide
  Sense strand starting at position 1291 of SEQ ID NO: 1241333
aguggaaacucaucuguag

SEQ ID NO: 1264399 - RNA, 19 nt, Artificial Sequence
  Description of Artificial Sequence: Synthetic oligonucleotide
  Antisense strand to SEQ ID NO: 1264398
cuacagaugaguuuccacu

SEQ ID NO: 1264400 - RNA, 19 nt, Artificial Sequence
  Description of Artificial Sequence: Synthetic oligonucleotide
  Sense strand starting at position 1294 of SEQ ID NO: 1241333
ggaaacucaucuguagaug

SEQ ID NO: 1264401 - RNA, 19 nt, Artificial Sequence
  Description of Artificial Sequence: Synthetic oligonucleotide
  Antisense strand to SEQ ID NO: 1264400
caucuacagaugaguuucc

SEQ ID NO: 1264402 - RNA, 19 nt, Artificial Sequence
  Description of Artificial Sequence: Synthetic oligonucleotide
  Sense strand starting at position 1295 of SEQ ID NO: 1241333
gaaacucaucuguagaugu

SEQ ID NO: 1264403 - RNA, 19 nt, Artificial Sequence
  Description of Artificial Sequence: Synthetic oligonucleotide
  Antisense strand to SEQ ID NO: 1264402
acaucuacagaugaguuuc

SEQ ID NO: 1264404 - RNA, 19 nt, Artificial Sequence
  Description of Artificial Sequence: Synthetic oligonucleotide
  Sense strand starting at position 1320 of SEQ ID NO: 1241333
aggauaacccguuacagua

SEQ ID NO: 1264405 - RNA, 19 nt, Artificial Sequence
  Description of Artificial Sequence: Synthetic oligonucleotide
  Antisense strand to SEQ ID NO: 1264404
uacuguaacggguuauccu

SEQ ID NO: 1264406 - RNA, 19 nt, Artificial Sequence
  Description of Artificial Sequence: Synthetic oligonucleotide
  Sense strand starting at position 1350 of SEQ ID NO: 1241333
gcugaaacugcccauagau

SEQ ID NO: 1264407 - RNA, 19 nt, Artificial Sequence
  Description of Artificial Sequence: Synthetic oligonucleotide
  Antisense strand to SEQ ID NO: 1264406
aucuaugggcaguuucagc

SEQ ID NO: 1264408 - RNA, 19 nt, Artificial Sequence
  Description of Artificial Sequence: Synthetic oligonucleotide
  Sense strand starting at position 1708 of SEQ ID NO: 1241333
ggcugcaagcuauaaauca

SEQ ID NO: 1264409 - RNA, 19 nt, Artificial Sequence
  Description of Artificial Sequence: Synthetic oligonucleotide
  Antisense strand to SEQ ID NO: 1264408
ugauuuauagcuugcagcc

SEQ ID NO: 1264410 - RNA, 19 nt, Artificial Sequence
  Description of Artificial Sequence: Synthetic oligonucleotide
  Sense strand starting at position 1828 of SEQ ID NO: 1241333
gcuaaacccgagcagauua

SEQ ID NO: 1264411 - RNA, 19 nt, Artificial Sequence
  Description of Artificial Sequence: Synthetic oligonucleotide
  Antisense strand to SEQ ID NO: 1264410
uaaucugcucggguuuagc

SEQ ID NO: 1264412 - RNA, 19 nt, Artificial Sequence
  Description of Artificial Sequence: Synthetic oligonucleotide
  Sense strand starting at position 2234 of SEQ ID NO: 1241333
augucaaauccuggcacaa

SEQ ID NO: 1264413 - RNA, 19 nt, Artificial Sequence
  Description of Artificial Sequence: Synthetic oligonucleotide
  Antisense strand to SEQ ID NO: 1264412
uugugccaggauuugacau

SEQ ID NO: 1264414 - RNA, 19 nt, Artificial Sequence
  Description of Artificial Sequence: Synthetic oligonucleotide
  Sense strand starting at position 2284 of SEQ ID NO: 1241333
gaacucuuagaaggcagau

SEQ ID NO: 1264415 - RNA, 19 nt, Artificial Sequence
  Description of Artificial Sequence: Synthetic oligonucleotide
  Antisense strand to SEQ ID NO: 1264414
aucugccuucuaagaguuc

SEQ ID NO: 1264416 - RNA, 19 nt, Artificial Sequence
  Description of Artificial Sequence: Synthetic oligonucleotide
  Sense strand starting at position 2696 of SEQ ID NO: 1241333
gcauauggcgugccucaua

SEQ ID NO: 1264417 - RNA, 19 nt, Artificial Sequence
  Description of Artificial Sequence: Synthetic oligonucleotide
  Antisense strand to SEQ ID NO: 1264416
uaugaggcacgccauaugc

SEQ ID NO: 1264418 - RNA, 19 nt, Artificial Sequence
  Description of Artificial Sequence: Synthetic oligonucleotide
  Sense strand starting at position 2705 of SEQ ID NO: 1241333
gugccucauagagagaacu

SEQ ID NO: 1264419 - RNA, 19 nt, Artificial Sequence
  Description of Artificial Sequence: Synthetic oligonucleotide
  Antisense strand to SEQ ID NO: 1264418
aguucucucuaugaggcac

SEQ ID NO: 1264420 - RNA, 19 nt, Artificial Sequence
  Description of Artificial Sequence: Synthetic oligonucleotide
  Sense strand starting at position 2978 of SEQ ID NO: 1241333
ucuugcaagugcucauuua

SEQ ID NO: 1264421 - RNA, 19 nt, Artificial Sequence
  Description of Artificial Sequence: Synthetic oligonucleotide
  Antisense strand to SEQ ID NO: 1264420
uaaaugagcacuugcaaga

SEQ ID NO: 1264422 - RNA, 19 nt, Artificial Sequence
  Description of Artificial Sequence: Synthetic oligonucleotide
  Sense strand starting at position 3181 of SEQ ID NO: 1241333
ugugcuuucugauuucuau

SEQ ID NO: 1264423 - RNA, 19 nt, Artificial Sequence
  Description of Artificial Sequence: Synthetic oligonucleotide
  Antisense strand to SEQ ID NO: 1264422
auagaaaucagaaagcaca

SEQ ID NO: 1264424 - RNA, 19 nt, Artificial Sequence
  Description of Artificial Sequence: Synthetic oligonucleotide
  Sense strand starting at position 3338 of SEQ ID NO: 1241333
aagaacuaguugucauaug

SEQ ID NO: 1264425 - RNA, 19 nt, Artificial Sequence
  Description of Artificial Sequence: Synthetic oligonucleotide
  Antisense strand to SEQ ID NO: 1264424
cauaugacaacuaguucuu

SEQ ID NO: 1264426 - RNA, 19 nt, Artificial Sequence
  Description of Artificial Sequence: Synthetic oligonucleotide
  Sense strand starting at position 3394 of SEQ ID NO: 1241333
ucaugcgaucuuuaccaca

SEQ ID NO: 1264427 - RNA, 19 nt, Artificial Sequence
  Description of Artificial Sequence: Synthetic oligonucleotide
  Antisense strand to SEQ ID NO: 1264426
ugugguaaagaucgcauga

SEQ ID NO: 1264428 - RNA, 19 nt, Artificial Sequence
  Description of Artificial Sequence: Synthetic oligonucleotide
  Sense strand starting at position 3405 of SEQ ID NO: 1241333
uuaccacaccucugugaga

SEQ ID NO: 1264429 - RNA, 19 nt, Artificial Sequence
  Description of Artificial Sequence: Synthetic oligonucleotide
  Antisense strand to SEQ ID NO: 1264428
ucucacagaggugugguaa

SEQ ID NO: 1264430 - RNA, 19 nt, Artificial Sequence
  Description of Artificial Sequence: Synthetic oligonucleotide
  Sense strand starting at position 3407 of SEQ ID NO: 1241333
accacaccucugugagaaa

SEQ ID NO: 1264431 - RNA, 19 nt, Artificial Sequence
  Description of Artificial Sequence: Synthetic oligonucleotide
  Antisense strand to SEQ ID NO: 1264430
uuucucacagagguguggu

SEQ ID NO: 1264432 - RNA, 19 nt, Artificial Sequence
  Description of Artificial Sequence: Synthetic oligonucleotide
  Sense strand starting at position 3699 of SEQ ID NO: 1241333
aaauaugaggcuuguugga

SEQ ID NO: 1264433 - RNA, 19 nt, Artificial Sequence
  Description of Artificial Sequence: Synthetic oligonucleotide
  Antisense strand to SEQ ID NO: 1264432
uccaacaagccucauauuu

SEQ ID NO: 1264434 - RNA, 19 nt, Artificial Sequence
  Description of Artificial Sequence: Synthetic oligonucleotide
  Sense strand starting at position 3701 of SEQ ID NO: 1241333
auaugaggcuuguuggaaa

SEQ ID NO: 1264435 - RNA, 19 nt, Artificial Sequence
  Description of Artificial Sequence: Synthetic oligonucleotide
  Antisense strand to SEQ ID NO: 1264434
uuuccaacaagccucauau

SEQ ID NO: 1264436 - RNA, 19 nt, Artificial Sequence
  Description of Artificial Sequence: Synthetic oligonucleotide
  Sense strand starting at position 3708 of SEQ ID NO: 1241333
gcuuguuggaaauauguua

SEQ ID NO: 1264437 - RNA, 19 nt, Artificial Sequence
  Description of Artificial Sequence: Synthetic oligonucleotide
  Antisense strand to SEQ ID NO: 1264436
uaacauauuuccaacaagc

SEQ ID NO: 1264438 - RNA, 19 nt, Artificial Sequence
  Description of Artificial Sequence: Synthetic oligonucleotide
  Sense strand starting at position 3828 of SEQ ID NO: 1241333
aacucugaggcugagcaau

SEQ ID NO: 1264439 - RNA, 19 nt, Artificial Sequence
  Description of Artificial Sequence: Synthetic oligonucleotide
  Antisense strand to SEQ ID NO: 1264438
auugcucagccucagaguu

SEQ ID NO: 1264440 - RNA, 19 nt, Artificial Sequence
  Description of Artificial Sequence: Synthetic oligonucleotide
  Sense strand starting at position 3932 of SEQ ID NO: 1241333
aauugaaccuggguuucua

SEQ ID NO: 1264441 - RNA, 19 nt, Artificial Sequence
  Description of Artificial Sequence: Synthetic oligonucleotide
  Antisense strand to SEQ ID NO: 1264440
uagaaacccagguucaauu

SEQ ID NO: 1264442 - RNA, 19 nt, Artificial Sequence
  Description of Artificial Sequence: Synthetic oligonucleotide
  Sense strand starting at position 129 of SEQ ID NO: 1241334
uuauaucauggcugacagu

SEQ ID NO: 1264443 - RNA, 19 nt, Artificial Sequence
  Description of Artificial Sequence: Synthetic oligonucleotide
  Antisense strand to SEQ ID NO: 1264442
acugucagccaugauauaa

SEQ ID NO: 1264444 - RNA, 19 nt, Artificial Sequence
  Description of Artificial Sequence: Synthetic oligonucleotide
  Sense strand starting at position 130 of SEQ ID NO: 1241334
uauaucauggcugacagua

SEQ ID NO: 1264445 - RNA, 19 nt, Artificial Sequence
  Description of Artificial Sequence: Synthetic oligonucleotide
  Antisense strand to SEQ ID NO: 1264444
uacugucagccaugauaua

SEQ ID NO: 1264446 - RNA, 19 nt, Artificial Sequence
  Description of Artificial Sequence: Synthetic oligonucleotide
  Sense strand starting at position 135 of SEQ ID NO: 1241334
cauggcugacaguaaagua

SEQ ID NO: 1264447 - RNA, 19 nt, Artificial Sequence
  Description of Artificial Sequence: Synthetic oligonucleotide
  Antisense strand to SEQ ID NO: 1264446
uacuuuacugucagccaug

SEQ ID NO: 1264448 - RNA, 19 nt, Artificial Sequence
  Description of Artificial Sequence: Synthetic oligonucleotide
  Sense strand starting at position 206 of SEQ ID NO: 1241334
gcuuauuugucaguagcuu

SEQ ID NO: 1264449 - RNA, 19 nt, Artificial Sequence
  Description of Artificial Sequence: Synthetic oligonucleotide
  Antisense strand to SEQ ID NO: 1264448
aagcuacugacaaauaagc

SEQ ID NO: 1264450 - RNA, 19 nt, Artificial Sequence
  Description of Artificial Sequence: Synthetic oligonucleotide
  Sense strand starting at position 308 of SEQ ID NO: 1241334
uggcauugucacgaagaga

SEQ ID NO: 1264451 - RNA, 19 nt, Artificial Sequence
  Description of Artificial Sequence: Synthetic oligonucleotide
  Antisense strand to SEQ ID NO: 1264450
ucucuucgugacaaugcca

SEQ ID NO: 1264452 - RNA, 19 nt, Artificial Sequence
  Description of Artificial Sequence: Synthetic oligonucleotide
  Sense strand starting at position 444 of SEQ ID NO: 1241334
gcugcugaucacuacaguu

SEQ ID NO: 1264453 - RNA, 19 nt, Artificial Sequence
  Description of Artificial Sequence: Synthetic oligonucleotide
  Antisense strand to SEQ ID NO: 1264452
aacuguagugaucagcagc

SEQ ID NO: 1264454 - RNA, 19 nt, Artificial Sequence
  Description of Artificial Sequence: Synthetic oligonucleotide
  Sense strand starting at position 629 of SEQ ID NO: 1241334
gaucaugugaguugcaguu

SEQ ID NO: 1264455 - RNA, 19 nt, Artificial Sequence
  Description of Artificial Sequence: Synthetic oligonucleotide
  Antisense strand to SEQ ID NO: 1264454
aacugcaacucacaugauc

SEQ ID NO: 1264456 - RNA, 19 nt, Artificial Sequence
  Description of Artificial Sequence: Synthetic oligonucleotide
  Sense strand starting at position 712 of SEQ ID NO: 1241334
uggugaccuccuuacaacu

SEQ ID NO: 1264457 - RNA, 19 nt, Artificial Sequence
  Description of Artificial Sequence: Synthetic oligonucleotide
  Antisense strand to SEQ ID NO: 1264456
aguuguaaggaggucacca

SEQ ID NO: 1264458 - RNA, 19 nt, Artificial Sequence
  Description of Artificial Sequence: Synthetic oligonucleotide
  Sense strand starting at position 853 of SEQ ID NO: 1241334
uaguuucucgccuaguaaa

SEQ ID NO: 1264459 - RNA, 19 nt, Artificial Sequence
  Description of Artificial Sequence: Synthetic oligonucleotide
  Antisense strand to SEQ ID NO: 1264458
uuuacuaggcgagaaacua

SEQ ID NO: 1264460 - RNA, 19 nt, Artificial Sequence
  Description of Artificial Sequence: Synthetic oligonucleotide
  Sense strand starting at position 920 of SEQ ID NO: 1241334
acagauguucgaugcgaac

SEQ ID NO: 1264461 - RNA, 19 nt, Artificial Sequence
  Description of Artificial Sequence: Synthetic oligonucleotide
  Antisense strand to SEQ ID NO: 1264460
guucgcaucgaacaucugu

SEQ ID NO: 1264462 - RNA, 19 nt, Artificial Sequence
  Description of Artificial Sequence: Synthetic oligonucleotide
  Sense strand starting at position 922 of SEQ ID NO: 1241334
agauguucgaugcgaacuu

SEQ ID NO: 1264463 - RNA, 19 nt, Artificial Sequence
  Description of Artificial Sequence: Synthetic oligonucleotide
  Antisense strand to SEQ ID NO: 1264462
aaguucgcaucgaacaucu

SEQ ID NO: 1264464 - RNA, 19 nt, Artificial Sequence
  Description of Artificial Sequence: Synthetic oligonucleotide
  Sense strand starting at position 952 of SEQ ID NO: 1241334
gaaaucuucccagagccga

SEQ ID NO: 1264465 - RNA, 19 nt, Artificial Sequence
  Description of Artificial Sequence: Synthetic oligonucleotide
  Antisense strand to SEQ ID NO: 1264464
ucggcucugggaagauuuc

SEQ ID NO: 1264466 - RNA, 19 nt, Artificial Sequence
  Description of Artificial Sequence: Synthetic oligonucleotide
  Sense strand starting at position 1047 of SEQ ID NO: 1241334
cgucuacuguacuugucaa

SEQ ID NO: 1264467 - RNA, 19 nt, Artificial Sequence
  Description of Artificial Sequence: Synthetic oligonucleotide
  Antisense strand to SEQ ID NO: 1264466
uugacaaguacaguagacg

SEQ ID NO: 1264468 - RNA, 19 nt, Artificial Sequence
  Description of Artificial Sequence: Synthetic oligonucleotide
  Sense strand starting at position 1392 of SEQ ID NO: 1241334
gggugaucuuuguuaggag

SEQ ID NO: 1264469 - RNA, 19 nt, Artificial Sequence
  Description of Artificial Sequence: Synthetic oligonucleotide
  Antisense strand to SEQ ID NO: 1264468
cuccuaacaaagaucaccc

SEQ ID NO: 1264470 - RNA, 19 nt, Artificial Sequence
  Description of Artificial Sequence: Synthetic oligonucleotide
  Sense strand starting at position 1404 of SEQ ID NO: 1241334
uuaggagccuguuucucau

SEQ ID NO: 1264471 - RNA, 19 nt, Artificial Sequence
  Description of Artificial Sequence: Synthetic oligonucleotide
  Antisense strand to SEQ ID NO: 1264470
augagaaacaggcuccuaa

SEQ ID NO: 1264472 - RNA, 19 nt, Artificial Sequence
  Description of Artificial Sequence: Synthetic oligonucleotide
  Sense strand starting at position 1477 of SEQ ID NO: 1241334
ccguccuccgcagacaaua

SEQ ID NO: 1264473 - RNA, 19 nt, Artificial Sequence
  Description of Artificial Sequence: Synthetic oligonucleotide
  Antisense strand to SEQ ID NO: 1264472
uauugucugcggaggacgg

SEQ ID NO: 1264474 - RNA, 19 nt, Artificial Sequence
  Description of Artificial Sequence: Synthetic oligonucleotide
  Sense strand starting at position 2073 of SEQ ID NO: 1241334
cgccgagcggcgagaaauu

SEQ ID NO: 1264475 - RNA, 19 nt, Artificial Sequence
  Description of Artificial Sequence: Synthetic oligonucleotide
  Antisense strand to SEQ ID NO: 1264474
aauuucucgccgcucggcg

SEQ ID NO: 1264476 - RNA, 19 nt, Artificial Sequence
  Description of Artificial Sequence: Synthetic oligonucleotide
  Sense strand starting at position 2082 of SEQ ID NO: 1241334
gcgagaaauuguuuccacu

SEQ ID NO: 1264477 - RNA, 19 nt, Artificial Sequence
  Description of Artificial Sequence: Synthetic oligonucleotide
  Antisense strand to SEQ ID NO: 1264476
aguggaaacaauuucucgc

SEQ ID NO: 1264478 - RNA, 19 nt, Artificial Sequence
  Description of Artificial Sequence: Synthetic oligonucleotide
  Sense strand starting at position 2672 of SEQ ID NO: 1241334
ccucgugucccggagguaa

SEQ ID NO: 1264479 - RNA, 19 nt, Artificial Sequence
  Description of Artificial Sequence: Synthetic oligonucleotide
  Antisense strand to SEQ ID NO: 1264478
uuaccuccgggacacgagg

SEQ ID NO: 1264480 - RNA, 19 nt, Artificial Sequence
  Description of Artificial Sequence: Synthetic oligonucleotide
  Sense strand starting at position 2737 of SEQ ID NO: 1241334
gccgguggccauuacaaga

SEQ ID NO: 1264481 - RNA, 19 nt, Artificial Sequence
  Description of Artificial Sequence: Synthetic oligonucleotide
  Antisense strand to SEQ ID NO: 1264480
ucuuguaauggccaccggc

SEQ ID NO: 1264482 - RNA, 19 nt, Artificial Sequence
  Description of Artificial Sequence: Synthetic oligonucleotide
  Sense strand starting at position 3186 of SEQ ID NO: 1241334
gcgaguagaccuggagaaa

SEQ ID NO: 1264483 - RNA, 19 nt, Artificial Sequence
  Description of Artificial Sequence: Synthetic oligonucleotide
  Antisense strand to SEQ ID NO: 1264482
uuucuccaggucuacucgc

SEQ ID NO: 1264484 - RNA, 19 nt, Artificial Sequence
  Description of Artificial Sequence: Synthetic oligonucleotide
  Sense strand starting at position 3198 of SEQ ID NO: 1241334
ggagaaagcuuucuagcau

SEQ ID NO: 1264485 - RNA, 19 nt, Artificial Sequence
  Description of Artificial Sequence: Synthetic oligonucleotide
  Antisense strand to SEQ ID NO: 1264484
augcuagaaagcuuucucc

SEQ ID NO: 1264486 - RNA, 19 nt, Artificial Sequence
  Description of Artificial Sequence: Synthetic oligonucleotide
  Sense strand starting at position 3497 of SEQ ID NO: 1241334
uugauuacugagcacuuga

SEQ ID NO: 1264487 - RNA, 19 nt, Artificial Sequence
  Description of Artificial Sequence: Synthetic oligonucleotide
  Antisense strand to SEQ ID NO: 1264486
ucaagugcucaguaaucaa

SEQ ID NO: 1264488 - RNA, 19 nt, Artificial Sequence
  Description of Artificial Sequence: Synthetic oligonucleotide
  Sense strand starting at position 3563 of SEQ ID NO: 1241334
caagucagaugaucuuuga

SEQ ID NO: 1264489 - RNA, 19 nt, Artificial Sequence
  Description of Artificial Sequence: Synthetic oligonucleotide
  Antisense strand to SEQ ID NO: 1264488
ucaaagaucaucugacuug

SEQ ID NO: 1264490 - RNA, 19 nt, Artificial Sequence
  Description of Artificial Sequence: Synthetic oligonucleotide
  Sense strand starting at position 3566 of SEQ ID NO: 1241334
gucagaugaucuuugaagu

SEQ ID NO: 1264491 - RNA, 19 nt, Artificial Sequence
  Description of Artificial Sequence: Synthetic oligonucleotide
  Antisense strand to SEQ ID NO: 1264490
acuucaaagaucaucugac

SEQ ID NO: 1264492 - RNA, 19 nt, Artificial Sequence
  Description of Artificial Sequence: Synthetic oligonucleotide
  Sense strand starting at position 3567 of SEQ ID NO: 1241334
ucagaugaucuuugaaguc

SEQ ID NO: 1264493 - RNA, 19 nt, Artificial Sequence
  Description of Artificial Sequence: Synthetic oligonucleotide
  Antisense strand to SEQ ID NO: 1264492
gacuucaaagaucaucuga

SEQ ID NO: 1264494 - RNA, 19 nt, Artificial Sequence
  Description of Artificial Sequence: Synthetic oligonucleotide
  Sense strand starting at position 3580 of SEQ ID NO: 1241334
gaagucucacgccagagau

SEQ ID NO: 1264495 - RNA, 19 nt, Artificial Sequence
  Description of Artificial Sequence: Synthetic oligonucleotide
  Antisense strand to SEQ ID NO: 1264494
aucucuggcgugagacuuc

SEQ ID NO: 1264496 - RNA, 19 nt, Artificial Sequence
  Description of Artificial Sequence: Synthetic oligonucleotide
  Sense strand starting at position 3596 of SEQ ID NO: 1241334
gauucucaggguuagaagu

SEQ ID NO: 1264497 - RNA, 19 nt, Artificial Sequence
  Description of Artificial Sequence: Synthetic oligonucleotide
  Antisense strand to SEQ ID NO: 1264496
acuucuaacccugagaauc

SEQ ID NO: 1264498 - RNA, 19 nt, Artificial Sequence
  Description of Artificial Sequence: Synthetic oligonucleotide
  Sense strand starting at position 3603 of SEQ ID NO: 1241334
aggguuagaagugguaaca

SEQ ID NO: 1264499 - RNA, 19 nt, Artificial Sequence
  Description of Artificial Sequence: Synthetic oligonucleotide
  Antisense strand to SEQ ID NO: 1264498
uguuaccacuucuaacccu

SEQ ID NO: 1264500 - RNA, 19 nt, Artificial Sequence
  Description of Artificial Sequence: Synthetic oligonucleotide
  Sense strand starting at position 3697 of SEQ ID NO: 1241334
gucaguugagggugcuuau

SEQ ID NO: 1264501 - RNA, 19 nt, Artificial Sequence
  Description of Artificial Sequence: Synthetic oligonucleotide
  Antisense strand to SEQ ID NO: 1264500
auaagcacccucaacugac

SEQ ID NO: 1264502 - RNA, 19 nt, Artificial Sequence
  Description of Artificial Sequence: Synthetic oligonucleotide
  Sense strand starting at position 3709 of SEQ ID NO: 1241334
ugcuuauucuccgccagag

SEQ ID NO: 1264503 - RNA, 19 nt, Artificial Sequence
  Description of Artificial Sequence: Synthetic oligonucleotide
  Antisense strand to SEQ ID NO: 1264502
cucuggcggagaauaagca

SEQ ID NO: 1264504 - RNA, 19 nt, Artificial Sequence
  Description of Artificial Sequence: Synthetic oligonucleotide
  Sense strand starting at position 3711 of SEQ ID NO: 1241334
cuuauucuccgccagagga

SEQ ID NO: 1264505 - RNA, 19 nt, Artificial Sequence
  Description of Artificial Sequence: Synthetic oligonucleotide
  Antisense strand to SEQ ID NO: 1264504
uccucuggcggagaauaag

SEQ ID NO: 1264506 - RNA, 19 nt, Artificial Sequence
  Description of Artificial Sequence: Synthetic oligonucleotide
  Sense strand starting at position 3736 of SEQ ID NO: 1241334
gccagagaccuuuguccaa

SEQ ID NO: 1264507 - RNA, 19 nt, Artificial Sequence
  Description of Artificial Sequence: Synthetic oligonucleotide
  Antisense strand to SEQ ID NO: 1264506
uuggacaaaggucucuggc

SEQ ID NO: 1264508 - RNA, 19 nt, Artificial Sequence
  Description of Artificial Sequence: Synthetic oligonucleotide
  Sense strand starting at position 3917 of SEQ ID NO: 1241334
ccuccugcuuucucagagu

SEQ ID NO: 1264509 - RNA, 19 nt, Artificial Sequence
  Description of Artificial Sequence: Synthetic oligonucleotide
  Antisense strand to SEQ ID NO: 1264508
acucugagaaagcaggagg

SEQ ID NO: 1264510 - RNA, 19 nt, Artificial Sequence
  Description of Artificial Sequence: Synthetic oligonucleotide
  Sense strand starting at position 3949 of SEQ ID NO: 1241334
augugagccaaaggugauu

SEQ ID NO: 1264511 - RNA, 19 nt, Artificial Sequence
  Description of Artificial Sequence: Synthetic oligonucleotide
  Antisense strand to SEQ ID NO: 1264510
aaucaccuuuggcucacau

SEQ ID NO: 1264512 - RNA, 19 nt, Artificial Sequence
  Description of Artificial Sequence: Synthetic oligonucleotide
  Sense strand starting at position 3954 of SEQ ID NO: 1241334
agccaaaggugauuguaca

SEQ ID NO: 1264513 - RNA, 19 nt, Artificial Sequence
  Description of Artificial Sequence: Synthetic oligonucleotide
  Antisense strand to SEQ ID NO: 1264512
uguacaaucaccuuuggcu

SEQ ID NO: 1264514 - RNA, 19 nt, Artificial Sequence
  Description of Artificial Sequence: Synthetic oligonucleotide
  Sense strand starting at position 3955 of SEQ ID NO: 1241334
gccaaaggugauuguacau

SEQ ID NO: 1264515 - RNA, 19 nt, Artificial Sequence
  Description of Artificial Sequence: Synthetic oligonucleotide
  Antisense strand to SEQ ID NO: 1264514
auguacaaucaccuuuggc

SEQ ID NO: 1264516 - RNA, 19 nt, Artificial Sequence
  Description of Artificial Sequence: Synthetic oligonucleotide
  Sense strand starting at position 3961 of SEQ ID NO: 1241334
ggugauuguacauggaaua

SEQ ID NO: 1264517 - RNA, 19 nt, Artificial Sequence
  Description of Artificial Sequence: Synthetic oligonucleotide
  Antisense strand to SEQ ID NO: 1264516
uauuccauguacaaucacc

SEQ ID NO: 1264518 - RNA, 19 nt, Artificial Sequence
  Description of Artificial Sequence: Synthetic oligonucleotide
  Sense strand starting at position 3962 of SEQ ID NO: 1241334
gugauuguacauggaauau

SEQ ID NO: 1264519 - RNA, 19 nt, Artificial Sequence
  Description of Artificial Sequence: Synthetic oligonucleotide
  Antisense strand to SEQ ID NO: 1264518
auauuccauguacaaucac

SEQ ID NO: 1264520 - RNA, 19 nt, Artificial Sequence
  Description of Artificial Sequence: Synthetic oligonucleotide
  Sense strand starting at position 3973 of SEQ ID NO: 1241334
uggaauaugucauuccaug

SEQ ID NO: 1264521 - RNA, 19 nt, Artificial Sequence
  Description of Artificial Sequence: Synthetic oligonucleotide
  Antisense strand to SEQ ID NO: 1264520
cauggaaugacauauucca

SEQ ID NO: 1264522 - RNA, 19 nt, Artificial Sequence
  Description of Artificial Sequence: Synthetic oligonucleotide
  Sense strand starting at position 111 of SEQ ID NO: 1241335
guauuuggucccugccuua

SEQ ID NO: 1264523 - RNA, 19 nt, Artificial Sequence
  Description of Artificial Sequence: Synthetic oligonucleotide
  Antisense strand to SEQ ID NO: 1264522
uaaggcagggaccaaauac

SEQ ID NO: 1264524 - RNA, 19 nt, Artificial Sequence
  Description of Artificial Sequence: Synthetic oligonucleotide
  Sense strand starting at position 218 of SEQ ID NO: 1241335
uauucuuggccuuggagaa

SEQ ID NO: 1264525 - RNA, 19 nt, Artificial Sequence
  Description of Artificial Sequence: Synthetic oligonucleotide
  Antisense strand to SEQ ID NO: 1264524
uucuccaaggccaagaaua

SEQ ID NO: 1264526 - RNA, 19 nt, Artificial Sequence
  Description of Artificial Sequence: Synthetic oligonucleotide
  Sense strand starting at position 335 of SEQ ID NO: 1241335
uauaguaggucaguacaca

SEQ ID NO: 1264527 - RNA, 19 nt, Artificial Sequence
  Description of Artificial Sequence: Synthetic oligonucleotide
  Antisense strand to SEQ ID NO: 1264526
uguguacugaccuacuaua

SEQ ID NO: 1264528 - RNA, 19 nt, Artificial Sequence
  Description of Artificial Sequence: Synthetic oligonucleotide
  Sense strand starting at position 336 of SEQ ID NO: 1241335
auaguaggucaguacacaa

SEQ ID NO: 1264529 - RNA, 19 nt, Artificial Sequence
  Description of Artificial Sequence: Synthetic oligonucleotide
  Antisense strand to SEQ ID NO: 1264528
uuguguacugaccuacuau

SEQ ID NO: 1264530 - RNA, 19 nt, Artificial Sequence
  Description of Artificial Sequence: Synthetic oligonucleotide
  Sense strand starting at position 512 of SEQ ID NO: 1241335
acacauauaucguccagga

SEQ ID NO: 1264531 - RNA, 19 nt, Artificial Sequence
  Description of Artificial Sequence: Synthetic oligonucleotide
  Antisense strand to SEQ ID NO: 1264530
uccuggacgauauaugugu

SEQ ID NO: 1264532 - RNA, 19 nt, Artificial Sequence
  Description of Artificial Sequence: Synthetic oligonucleotide
  Sense strand starting at position 516 of SEQ ID NO: 1241335
auauaucguccaggaccua

SEQ ID NO: 1264533 - RNA, 19 nt, Artificial Sequence
  Description of Artificial Sequence: Synthetic oligonucleotide
  Antisense strand to SEQ ID NO: 1264532
uagguccuggacgauauau

SEQ ID NO: 1264534 - RNA, 19 nt, Artificial Sequence
  Description of Artificial Sequence: Synthetic oligonucleotide
  Sense strand starting at position 599 of SEQ ID NO: 1241335
gaagguggugauuaauguu

SEQ ID NO: 1264535 - RNA, 19 nt, Artificial Sequence
  Description of Artificial Sequence: Synthetic oligonucleotide
  Antisense strand to SEQ ID NO: 1264534
aacauuaaucaccaccuuc

SEQ ID NO: 1264536 - RNA, 19 nt, Artificial Sequence
  Description of Artificial Sequence: Synthetic oligonucleotide
  Sense strand starting at position 605 of SEQ ID NO: 1241335
ggugauuaauguuuccaga

SEQ ID NO: 1264537 - RNA, 19 nt, Artificial Sequence
  Description of Artificial Sequence: Synthetic oligonucleotide
  Antisense strand to SEQ ID NO: 1264536
ucuggaaacauuaaucacc

SEQ ID NO: 1264538 - RNA, 19 nt, Artificial Sequence
  Description of Artificial Sequence: Synthetic oligonucleotide
  Sense strand starting at position 607 of SEQ ID NO: 1241335
ugauuaauguuuccagaac

SEQ ID NO: 1264539 - RNA, 19 nt, Artificial Sequence
  Description of Artificial Sequence: Synthetic oligonucleotide
  Antisense strand to SEQ ID NO: 1264538
guucuggaaacauuaauca

SEQ ID NO: 1264540 - RNA, 19 nt, Artificial Sequence
  Description of Artificial Sequence: Synthetic oligonucleotide
  Sense strand starting at position 620 of SEQ ID NO: 1241335
cagaacaagugguuacaga

SEQ ID NO: 1264541 - RNA, 19 nt, Artificial Sequence
  Description of Artificial Sequence: Synthetic oligonucleotide
  Antisense strand to SEQ ID NO: 1264540
ucuguaaccacuuguucug

SEQ ID NO: 1264542 - RNA, 19 nt, Artificial Sequence
  Description of Artificial Sequence: Synthetic oligonucleotide
  Sense strand starting at position 627 of SEQ ID NO: 1241335
agugguuacagagaugcau

SEQ ID NO: 1264543 - RNA, 19 nt, Artificial Sequence
  Description of Artificial Sequence: Synthetic oligonucleotide
  Antisense strand to SEQ ID NO: 1264542
augcaucucuguaaccacu

SEQ ID NO: 1264544 - RNA, 19 nt, Artificial Sequence
  Description of Artificial Sequence: Synthetic oligonucleotide
  Sense strand starting at position 659 of SEQ ID NO: 1241335
agcauuugucuguaagcca

SEQ ID NO: 1264545 - RNA, 19 nt, Artificial Sequence
  Description of Artificial Sequence: Synthetic oligonucleotide
  Antisense strand to SEQ ID NO: 1264544
uggcuuacagacaaaugcu

SEQ ID NO: 1264546 - RNA, 19 nt, Artificial Sequence
  Description of Artificial Sequence: Synthetic oligonucleotide
  Sense strand starting at position 667 of SEQ ID NO: 1241335
ucuguaagccaauauauga

SEQ ID NO: 1264547 - RNA, 19 nt, Artificial Sequence
  Description of Artificial Sequence: Synthetic oligonucleotide
  Antisense strand to SEQ ID NO: 1264546
ucauauauuggcuuacaga

SEQ ID NO: 1264548 - RNA, 19 nt, Artificial Sequence
  Description of Artificial Sequence: Synthetic oligonucleotide
  Sense strand starting at position 680 of SEQ ID NO: 1241335
auaugagaguuucuccucu

SEQ ID NO: 1264549 - RNA, 19 nt, Artificial Sequence
  Description of Artificial Sequence: Synthetic oligonucleotide
  Antisense strand to SEQ ID NO: 1264548
agaggagaaacucucauau

SEQ ID NO: 1264550 - RNA, 19 nt, Artificial Sequence
  Description of Artificial Sequence: Synthetic oligonucleotide
  Sense strand starting at position 833 of SEQ ID NO: 1241335
auaaguagcuucucugaga

SEQ ID NO: 1264551 - RNA, 19 nt, Artificial Sequence
  Description of Artificial Sequence: Synthetic oligonucleotide
  Antisense strand to SEQ ID NO: 1264550
ucucagagaagcuacuuau

SEQ ID NO: 1264552 - RNA, 19 nt, Artificial Sequence
  Description of Artificial Sequence: Synthetic oligonucleotide
  Sense strand starting at position 834 of SEQ ID NO: 1241335
uaaguagcuucucugagaa

SEQ ID NO: 1264553 - RNA, 19 nt, Artificial Sequence
  Description of Artificial Sequence: Synthetic oligonucleotide
  Antisense strand to SEQ ID NO: 1264552
uucucagagaagcuacuua

SEQ ID NO: 1264554 - RNA, 19 nt, Artificial Sequence
  Description of Artificial Sequence: Synthetic oligonucleotide
  Sense strand starting at position 848 of SEQ ID NO: 1241335
gagaacugauugccuaguu

SEQ ID NO: 1264555 - RNA, 19 nt, Artificial Sequence
  Description of Artificial Sequence: Synthetic oligonucleotide
  Antisense strand to SEQ ID NO: 1264554
aacuaggcaaucaguucuc

SEQ ID NO: 1264556 - RNA, 19 nt, Artificial Sequence
  Description of Artificial Sequence: Synthetic oligonucleotide
  Sense strand starting at position 849 of SEQ ID NO: 1241335
agaacugauugccuaguua

SEQ ID NO: 1264557 - RNA, 19 nt, Artificial Sequence
  Description of Artificial Sequence: Synthetic oligonucleotide
  Antisense strand to SEQ ID NO: 1264556
uaacuaggcaaucaguucu

SEQ ID NO: 1264558 - RNA, 19 nt, Artificial Sequence
  Description of Artificial Sequence: Synthetic oligonucleotide
  Sense strand starting at position 996 of SEQ ID NO: 1241335
acacuugggaucugguuau

SEQ ID NO: 1264559 - RNA, 19 nt, Artificial Sequence
  Description of Artificial Sequence: Synthetic oligonucleotide
  Antisense strand to SEQ ID NO: 1264558
auaaccagaucccaagugu

SEQ ID NO: 1264560 - RNA, 19 nt, Artificial Sequence
  Description of Artificial Sequence: Synthetic oligonucleotide
  Sense strand starting at position 1139 of SEQ ID NO: 1241335
aggguaagcauguaacuga

SEQ ID NO: 1264561 - RNA, 19 nt, Artificial Sequence
  Description of Artificial Sequence: Synthetic oligonucleotide
  Antisense strand to SEQ ID NO: 1264560
ucaguuacaugcuuacccu

SEQ ID NO: 1264562 - RNA, 19 nt, Artificial Sequence
  Description of Artificial Sequence: Synthetic oligonucleotide
  Sense strand starting at position 1221 of SEQ ID NO: 1241335
uuaugauggugucuuacaa

SEQ ID NO: 1264563 - RNA, 19 nt, Artificial Sequence
  Description of Artificial Sequence: Synthetic oligonucleotide
  Antisense strand to SEQ ID NO: 1264562
uuguaagacaccaucauaa

SEQ ID NO: 1264564 - RNA, 19 nt, Artificial Sequence
  Description of Artificial Sequence: Synthetic oligonucleotide
  Sense strand starting at position 1228 of SEQ ID NO: 1241335
ggugucuuacaagaaguca

SEQ ID NO: 1264565 - RNA, 19 nt, Artificial Sequence
  Description of Artificial Sequence: Synthetic oligonucleotide
  Antisense strand to SEQ ID NO: 1264564
ugacuucuuguaagacacc

SEQ ID NO: 1264566 - RNA, 19 nt, Artificial Sequence
  Description of Artificial Sequence: Synthetic oligonucleotide
  Sense strand starting at position 1326 of SEQ ID NO: 1241335
uugagaguguucuuaccaa

SEQ ID NO: 1264567 - RNA, 19 nt, Artificial Sequence
  Description of Artificial Sequence: Synthetic oligonucleotide
  Antisense strand to SEQ ID NO: 1264566
uugguaagaacacucucaa

SEQ ID NO: 1264568 - RNA, 19 nt, Artificial Sequence
  Description of Artificial Sequence: Synthetic oligonucleotide
  Sense strand starting at position 1426 of SEQ ID NO: 1241335
aagucaugaagaugugagu

SEQ ID NO: 1264569 - RNA, 19 nt, Artificial Sequence
  Description of Artificial Sequence: Synthetic oligonucleotide
  Antisense strand to SEQ ID NO: 1264568
acucacaucuucaugacuu

SEQ ID NO: 1264570 - RNA, 19 nt, Artificial Sequence
  Description of Artificial Sequence: Synthetic oligonucleotide
  Sense strand starting at position 2210 of SEQ ID NO: 1241335
aaucaagcucucgggauaa

SEQ ID NO: 1264571 - RNA, 19 nt, Artificial Sequence
  Description of Artificial Sequence: Synthetic oligonucleotide
  Antisense strand to SEQ ID NO: 1264570
uuaucccgagagcuugauu

SEQ ID NO: 1264572 - RNA, 19 nt, Artificial Sequence
  Description of Artificial Sequence: Synthetic oligonucleotide
  Sense strand starting at position 2303 of SEQ ID NO: 1241335
cugguuagggaucgaacuu

SEQ ID NO: 1264573 - RNA, 19 nt, Artificial Sequence
  Description of Artificial Sequence: Synthetic oligonucleotide
  Antisense strand to SEQ ID NO: 1264572
aaguucgaucccuaaccag

SEQ ID NO: 1264574 - RNA, 19 nt, Artificial Sequence
  Description of Artificial Sequence: Synthetic oligonucleotide
  Sense strand starting at position 2325 of SEQ ID NO: 1241335
ucaaauagaucagcagcua

SEQ ID NO: 1264575 - RNA, 19 nt, Artificial Sequence
  Description of Artificial Sequence: Synthetic oligonucleotide
  Antisense strand to SEQ ID NO: 1264574
uagcugcugaucuauuuga

SEQ ID NO: 1264576 - RNA, 19 nt, Artificial Sequence
  Description of Artificial Sequence: Synthetic oligonucleotide
  Sense strand starting at position 2407 of SEQ ID NO: 1241335
gaaagaauguggcuuucuu

SEQ ID NO: 1264577 - RNA, 19 nt, Artificial Sequence
  Description of Artificial Sequence: Synthetic oligonucleotide
  Antisense strand to SEQ ID NO: 1264576
aagaaagccacauucuuuc

SEQ ID NO: 1264578 - RNA, 19 nt, Artificial Sequence
  Description of Artificial Sequence: Synthetic oligonucleotide
  Sense strand starting at position 2455 of SEQ ID NO: 1241335
agaugagagaugugcaauu

SEQ ID NO: 1264579 - RNA, 19 nt, Artificial Sequence
  Description of Artificial Sequence: Synthetic oligonucleotide
  Antisense strand to SEQ ID NO: 1264578
aauugcacaucucucaucu

SEQ ID NO: 1264580 - RNA, 19 nt, Artificial Sequence
  Description of Artificial Sequence: Synthetic oligonucleotide
  Sense strand starting at position 2544 of SEQ ID NO: 1241335
auagaagcuccauguuuga

SEQ ID NO: 1264581 - RNA, 19 nt, Artificial Sequence
  Description of Artificial Sequence: Synthetic oligonucleotide
  Antisense strand to SEQ ID NO: 1264580
ucaaacauggagcuucuau

SEQ ID NO: 1264582 - RNA, 19 nt, Artificial Sequence
  Description of Artificial Sequence: Synthetic oligonucleotide
  Sense strand starting at position 2585 of SEQ ID NO: 1241335
gugguaguacuacaguaga

SEQ ID NO: 1264583 - RNA, 19 nt, Artificial Sequence
  Description of Artificial Sequence: Synthetic oligonucleotide
  Antisense strand to SEQ ID NO: 1264582
ucuacuguaguacuaccac

SEQ ID NO: 1264584 - RNA, 19 nt, Artificial Sequence
  Description of Artificial Sequence: Synthetic oligonucleotide
  Sense strand starting at position 2942 of SEQ ID NO: 1241335
ggagucgucccuggaauuu

SEQ ID NO: 1264585 - RNA, 19 nt, Artificial Sequence
  Description of Artificial Sequence: Synthetic oligonucleotide
  Antisense strand to SEQ ID NO: 1264584
aaauuccagggacgacucc

SEQ ID NO: 1264586 - RNA, 19 nt, Artificial Sequence
  Description of Artificial Sequence: Synthetic oligonucleotide
  Sense strand starting at position 2989 of SEQ ID NO: 1241335
ugugguuucuaaucauaga

SEQ ID NO: 1264587 - RNA, 19 nt, Artificial Sequence
  Description of Artificial Sequence: Synthetic oligonucleotide
  Antisense strand to SEQ ID NO: 1264586
ucuaugauuagaaaccaca

SEQ ID NO: 1264588 - RNA, 19 nt, Artificial Sequence
  Description of Artificial Sequence: Synthetic oligonucleotide
  Sense strand starting at position 3082 of SEQ ID NO: 1241335
agcagaucucguuacuaca

SEQ ID NO: 1264589 - RNA, 19 nt, Artificial Sequence
  Description of Artificial Sequence: Synthetic oligonucleotide
  Antisense strand to SEQ ID NO: 1264588
uguaguaacgagaucugcu

SEQ ID NO: 1264590 - RNA, 19 nt, Artificial Sequence
  Description of Artificial Sequence: Synthetic oligonucleotide
  Sense strand starting at position 3370 of SEQ ID NO: 1241335
gccugcauagcagagagau

SEQ ID NO: 1264591 - RNA, 19 nt, Artificial Sequence
  Description of Artificial Sequence: Synthetic oligonucleotide
  Antisense strand to SEQ ID NO: 1264590
aucucucugcuaugcaggc

SEQ ID NO: 1264592 - RNA, 19 nt, Artificial Sequence
  Description of Artificial Sequence: Synthetic oligonucleotide
  Sense strand starting at position 3601 of SEQ ID NO: 1241335
ccuggagcugguuggaaau

SEQ ID NO: 1264593 - RNA, 19 nt, Artificial Sequence
  Description of Artificial Sequence: Synthetic oligonucleotide
  Antisense strand to SEQ ID NO: 1264592
auuuccaaccagcuccagg

SEQ ID NO: 1264594 - RNA, 19 nt, Artificial Sequence
  Description of Artificial Sequence: Synthetic oligonucleotide
  Sense strand starting at position 3666 of SEQ ID NO: 1241335
ccaagugaucuguauguaa

SEQ ID NO: 1264595 - RNA, 19 nt, Artificial Sequence
  Description of Artificial Sequence: Synthetic oligonucleotide
  Antisense strand to SEQ ID NO: 1264594
uuacauacagaucacuugg

SEQ ID NO: 1264596 - RNA, 19 nt, Artificial Sequence
  Description of Artificial Sequence: Synthetic oligonucleotide
  Sense strand starting at position 3670 of SEQ ID NO: 1241335
gugaucuguauguaaauca

SEQ ID NO: 1264597 - RNA, 19 nt, Artificial Sequence
  Description of Artificial Sequence: Synthetic oligonucleotide
  Antisense strand to SEQ ID NO: 1264596
ugauuuacauacagaucac

SEQ ID NO: 1264598 - RNA, 19 nt, Artificial Sequence
  Description of Artificial Sequence: Synthetic oligonucleotide
  Sense strand starting at position 3697 of SEQ ID NO: 1241335
aaagcacuggcuuaaugua

SEQ ID NO: 1264599 - RNA, 19 nt, Artificial Sequence
  Description of Artificial Sequence: Synthetic oligonucleotide
  Antisense strand to SEQ ID NO: 1264598
uacauuaagccagugcuuu

SEQ ID NO: 1264600 - RNA, 19 nt, Artificial Sequence
  Description of Artificial Sequence: Synthetic oligonucleotide
  Sense strand starting at position 3899 of SEQ ID NO: 1241335
guuauaaagcugugacaaa

SEQ ID NO: 1264601 - RNA, 19 nt, Artificial Sequence
  Description of Artificial Sequence: Synthetic oligonucleotide
  Antisense strand to SEQ ID NO: 1264600
uuugucacagcuuuauaac

SEQ ID NO: 1264602 - RNA, 19 nt, Artificial Sequence
  Description of Artificial Sequence: Synthetic oligonucleotide
  Sense strand starting at position 36 of SEQ ID NO: 1241336
uuacaaacauacugggaaa

SEQ ID NO: 1264603 - RNA, 19 nt, Artificial Sequence
  Description of Artificial Sequence: Synthetic oligonucleotide
  Antisense strand to SEQ ID NO: 1264602
uuucccaguauguuuguaa

SEQ ID NO: 1264604 - RNA, 19 nt, Artificial Sequence
  Description of Artificial Sequence: Synthetic oligonucleotide
  Sense strand starting at position 70 of SEQ ID NO: 1241336
gcugucucauauugugaag

SEQ ID NO: 1264605 - RNA, 19 nt, Artificial Sequence
  Description of Artificial Sequence: Synthetic oligonucleotide
  Antisense strand to SEQ ID NO: 1264604
cuucacaauaugagacagc

SEQ ID NO: 1264606 - RNA, 19 nt, Artificial Sequence
  Description of Artificial Sequence: Synthetic oligonucleotide
  Sense strand starting at position 72 of SEQ ID NO: 1241336
ugucucauauugugaagua

SEQ ID NO: 1264607 - RNA, 19 nt, Artificial Sequence
  Description of Artificial Sequence: Synthetic oligonucleotide
  Antisense strand to SEQ ID NO: 1264606
uacuucacaauaugagaca

SEQ ID NO: 1264608 - RNA, 19 nt, Artificial Sequence
  Description of Artificial Sequence: Synthetic oligonucleotide
  Sense strand starting at position 73 of SEQ ID NO: 1241336
gucucauauugugaaguau

SEQ ID NO: 1264609 - RNA, 19 nt, Artificial Sequence
  Description of Artificial Sequence: Synthetic oligonucleotide
  Antisense strand to SEQ ID NO: 1264608
auacuucacaauaugagac

SEQ ID NO: 1264610 - RNA, 19 nt, Artificial Sequence
  Description of Artificial Sequence: Synthetic oligonucleotide
  Sense strand starting at position 469 of SEQ ID NO: 1241336
ggaaaugacuuacauucuu

SEQ ID NO: 1264611 - RNA, 19 nt, Artificial Sequence
  Description of Artificial Sequence: Synthetic oligonucleotide
  Antisense strand to SEQ ID NO: 1264610
aagaauguaagucauuucc

SEQ ID NO: 1264612 - RNA, 19 nt, Artificial Sequence
  Description of Artificial Sequence: Synthetic oligonucleotide
  Sense strand starting at position 556 of SEQ ID NO: 1241336
gagggaguauuucgugcaa

SEQ ID NO: 1264613 - RNA, 19 nt, Artificial Sequence
  Description of Artificial Sequence: Synthetic oligonucleotide
  Antisense strand to SEQ ID NO: 1264612
uugcacgaaauacucccuc

SEQ ID NO: 1264614 - RNA, 19 nt, Artificial Sequence
  Description of Artificial Sequence: Synthetic oligonucleotide
  Sense strand starting at position 733 of SEQ ID NO: 1241336
ugagaacgcuugcugaagu

SEQ ID NO: 1264615 - RNA, 19 nt, Artificial Sequence
  Description of Artificial Sequence: Synthetic oligonucleotide
  Antisense strand to SEQ ID NO: 1264614
acuucagcaagcguucuca

SEQ ID NO: 1264616 - RNA, 19 nt, Artificial Sequence
  Description of Artificial Sequence: Synthetic oligonucleotide
  Sense strand starting at position 734 of SEQ ID NO: 1241336
gagaacgcuugcugaaguu

SEQ ID NO: 1264617 - RNA, 19 nt, Artificial Sequence
  Description of Artificial Sequence: Synthetic oligonucleotide
  Antisense strand to SEQ ID NO: 1264616
aacuucagcaagcguucuc

SEQ ID NO: 1264618 - RNA, 19 nt, Artificial Sequence
  Description of Artificial Sequence: Synthetic oligonucleotide
  Sense strand starting at position 776 of SEQ ID NO: 1241336
cacagcuccugagggaaau

SEQ ID NO: 1264619 - RNA, 19 nt, Artificial Sequence
  Description of Artificial Sequence: Synthetic oligonucleotide
  Antisense strand to SEQ ID NO: 1264618
auuucccucaggagcugug

SEQ ID NO: 1264620 - RNA, 19 nt, Artificial Sequence
  Description of Artificial Sequence: Synthetic oligonucleotide
  Sense strand starting at position 777 of SEQ ID NO: 1241336
acagcuccugagggaaaua

SEQ ID NO: 1264621 - RNA, 19 nt, Artificial Sequence
  Description of Artificial Sequence: Synthetic oligonucleotide
  Antisense strand to SEQ ID NO: 1264620
uauuucccucaggagcugu

SEQ ID NO: 1264622 - RNA, 19 nt, Artificial Sequence
  Description of Artificial Sequence: Synthetic oligonucleotide
  Sense strand starting at position 949 of SEQ ID NO: 1241336
aucuauucgugccuuuaag

SEQ ID NO: 1264623 - RNA, 19 nt, Artificial Sequence
  Description of Artificial Sequence: Synthetic oligonucleotide
  Antisense strand to SEQ ID NO: 1264622
cuuaaaggcacgaauagau

SEQ ID NO: 1264624 - RNA, 19 nt, Artificial Sequence
  Description of Artificial Sequence: Synthetic oligonucleotide
  Sense strand starting at position 985 of SEQ ID NO: 1241336
agguuaugcugucccagga

SEQ ID NO: 1264625 - RNA, 19 nt, Artificial Sequence
  Description of Artificial Sequence: Synthetic oligonucleotide
  Antisense strand to SEQ ID NO: 1264624
uccugggacagcauaaccu

SEQ ID NO: 1264626 - RNA, 19 nt, Artificial Sequence
  Description of Artificial Sequence: Synthetic oligonucleotide
  Sense strand starting at position 1135 of SEQ ID NO: 1241336
gccguaagcuccuccagaa

SEQ ID NO: 1264627 - RNA, 19 nt, Artificial Sequence
  Description of Artificial Sequence: Synthetic oligonucleotide
  Antisense strand to SEQ ID NO: 1264626
uucuggaggagcuuacggc

SEQ ID NO: 1264628 - RNA, 19 nt, Artificial Sequence
  Description of Artificial Sequence: Synthetic oligonucleotide
  Sense strand starting at position 1855 of SEQ ID NO: 1241336
guucauaccucggagaaag

SEQ ID NO: 1264629 - RNA, 19 nt, Artificial Sequence
  Description of Artificial Sequence: Synthetic oligonucleotide
  Antisense strand to SEQ ID NO: 1264628
cuuucuccgagguaugaac

SEQ ID NO: 1264630 - RNA, 19 nt, Artificial Sequence
  Description of Artificial Sequence: Synthetic oligonucleotide
  Sense strand starting at position 2429 of SEQ ID NO: 1241336
ggcuguuuggccugagugu

SEQ ID NO: 1264631 - RNA, 19 nt, Artificial Sequence
  Description of Artificial Sequence: Synthetic oligonucleotide
  Antisense strand to SEQ ID NO: 1264630
acacucaggccaaacagcc

SEQ ID NO: 1264632 - RNA, 19 nt, Artificial Sequence
  Description of Artificial Sequence: Synthetic oligonucleotide
  Sense strand starting at position 2436 of SEQ ID NO: 1241336
uggccugagugucgucuua

SEQ ID NO: 1264633 - RNA, 19 nt, Artificial Sequence
  Description of Artificial Sequence: Synthetic oligonucleotide
  Antisense strand to SEQ ID NO: 1264632
uaagacgacacucaggcca

SEQ ID NO: 1264634 - RNA, 19 nt, Artificial Sequence
  Description of Artificial Sequence: Synthetic oligonucleotide
  Sense strand starting at position 2438 of SEQ ID NO: 1241336
gccugagugucgucuuacu

SEQ ID NO: 1264635 - RNA, 19 nt, Artificial Sequence
  Description of Artificial Sequence: Synthetic oligonucleotide
  Antisense strand to SEQ ID NO: 1264634
aguaagacgacacucaggc

SEQ ID NO: 1264636 - RNA, 19 nt, Artificial Sequence
  Description of Artificial Sequence: Synthetic oligonucleotide
  Sense strand starting at position 2505 of SEQ ID NO: 1241336
gcggagguggcuucgugaa

SEQ ID NO: 1264637 - RNA, 19 nt, Artificial Sequence
  Description of Artificial Sequence: Synthetic oligonucleotide
  Antisense strand to SEQ ID NO: 1264636
uucacgaagccaccuccgc

SEQ ID NO: 1264638 - RNA, 19 nt, Artificial Sequence
  Description of Artificial Sequence: Synthetic oligonucleotide
  Sense strand starting at position 2506 of SEQ ID NO: 1241336
cggagguggcuucgugaau

SEQ ID NO: 1264639 - RNA, 19 nt, Artificial Sequence
  Description of Artificial Sequence: Synthetic oligonucleotide
  Antisense strand to SEQ ID NO: 1264638
auucacgaagccaccuccg

SEQ ID NO: 1264640 - RNA, 19 nt, Artificial Sequence
  Description of Artificial Sequence: Synthetic oligonucleotide
  Sense strand starting at position 2507 of SEQ ID NO: 1241336
ggagguggcuucgugaauc

SEQ ID NO: 1264641 - RNA, 19 nt, Artificial Sequence
  Description of Artificial Sequence: Synthetic oligonucleotide
  Antisense strand to SEQ ID NO: 1264640
gauucacgaagccaccucc

SEQ ID NO: 1264642 - RNA, 19 nt, Artificial Sequence
  Description of Artificial Sequence: Synthetic oligonucleotide
  Sense strand starting at position 3057 of SEQ ID NO: 1241336
ggguuuaugugucuggcuu

SEQ ID NO: 1264643 - RNA, 19 nt, Artificial Sequence
  Description of Artificial Sequence: Synthetic oligonucleotide
  Antisense strand to SEQ ID NO: 1264642
aagccagacacauaaaccc

SEQ ID NO: 1264644 - RNA, 19 nt, Artificial Sequence
  Description of Artificial Sequence: Synthetic oligonucleotide
  Sense strand starting at position 3058 of SEQ ID NO: 1241336
gguuuaugugucuggcuuu

SEQ ID NO: 1264645 - RNA, 19 nt, Artificial Sequence
  Description of Artificial Sequence: Synthetic oligonucleotide
  Antisense strand to SEQ ID NO: 1264644
aaagccagacacauaaacc

SEQ ID NO: 1264646 - RNA, 19 nt, Artificial Sequence
  Description of Artificial Sequence: Synthetic oligonucleotide
  Sense strand starting at position 3131 of SEQ ID NO: 1241336
aucugaugcucucagaagu

SEQ ID NO: 1264647 - RNA, 19 nt, Artificial Sequence
  Description of Artificial Sequence: Synthetic oligonucleotide
  Antisense strand to SEQ ID NO: 1264646
acuucugagagcaucagau

SEQ ID NO: 1264648 - RNA, 19 nt, Artificial Sequence
  Description of Artificial Sequence: Synthetic oligonucleotide
  Sense strand starting at position 3506 of SEQ ID NO: 1241336
ccagcuguuacugguugaa

SEQ ID NO: 1264649 - RNA, 19 nt, Artificial Sequence
  Description of Artificial Sequence: Synthetic oligonucleotide
  Antisense strand to SEQ ID NO: 1264648
uucaaccaguaacagcugg

SEQ ID NO: 1264650 - RNA, 19 nt, Artificial Sequence
  Description of Artificial Sequence: Synthetic oligonucleotide
  Sense strand starting at position 3508 of SEQ ID NO: 1241336
agcuguuacugguugaaag

SEQ ID NO: 1264651 - RNA, 19 nt, Artificial Sequence
  Description of Artificial Sequence: Synthetic oligonucleotide
  Antisense strand to SEQ ID NO: 1264650
cuuucaaccaguaacagcu

SEQ ID NO: 1264652 - RNA, 19 nt, Artificial Sequence
  Description of Artificial Sequence: Synthetic oligonucleotide
  Sense strand starting at position 3509 of SEQ ID NO: 1241336
gcuguuacugguugaaagu

SEQ ID NO: 1264653 - RNA, 19 nt, Artificial Sequence
  Description of Artificial Sequence: Synthetic oligonucleotide
  Antisense strand to SEQ ID NO: 1264652
acuuucaaccaguaacagc

SEQ ID NO: 1264654 - RNA, 19 nt, Artificial Sequence
  Description of Artificial Sequence: Synthetic oligonucleotide
  Sense strand starting at position 3518 of SEQ ID NO: 1241336
gguugaaagugugccucuu

SEQ ID NO: 1264655 - RNA, 19 nt, Artificial Sequence
  Description of Artificial Sequence: Synthetic oligonucleotide
  Antisense strand to SEQ ID NO: 1264654
aagaggcacacuuucaacc

SEQ ID NO: 1264656 - RNA, 19 nt, Artificial Sequence
  Description of Artificial Sequence: Synthetic oligonucleotide
  Sense strand starting at position 3563 of SEQ ID NO: 1241336
uguguuuauuuacagcuga

SEQ ID NO: 1264657 - RNA, 19 nt, Artificial Sequence
  Description of Artificial Sequence: Synthetic oligonucleotide
  Antisense strand to SEQ ID NO: 1264656
ucagcuguaaauaaacaca

SEQ ID NO: 1264658 - RNA, 19 nt, Artificial Sequence
  Description of Artificial Sequence: Synthetic oligonucleotide
  Sense strand starting at position 3589 of SEQ ID NO: 1241336
uugaaauaauugucucagu

SEQ ID NO: 1264659 - RNA, 19 nt, Artificial Sequence
  Description of Artificial Sequence: Synthetic oligonucleotide
  Antisense strand to SEQ ID NO: 1264658
acugagacaauuauuucaa

SEQ ID NO: 1264660 - RNA, 19 nt, Artificial Sequence
  Description of Artificial Sequence: Synthetic oligonucleotide
  Sense strand starting at position 3590 of SEQ ID NO: 1241336
ugaaauaauugucucaguc

SEQ ID NO: 1264661 - RNA, 19 nt, Artificial Sequence
  Description of Artificial Sequence: Synthetic oligonucleotide
  Antisense strand to SEQ ID NO: 1264660
gacugagacaauuauuuca

SEQ ID NO: 1264662 - RNA, 19 nt, Artificial Sequence
  Description of Artificial Sequence: Synthetic oligonucleotide
  Sense strand starting at position 3594 of SEQ ID NO: 1241336
auaauugucucagucacag

SEQ ID NO: 1264663 - RNA, 19 nt, Artificial Sequence
  Description of Artificial Sequence: Synthetic oligonucleotide
  Antisense strand to SEQ ID NO: 1264662
cugugacugagacaauuau

SEQ ID NO: 1264664 - RNA, 19 nt, Artificial Sequence
  Description of Artificial Sequence: Synthetic oligonucleotide
  Sense strand starting at position 3717 of SEQ ID NO: 1241336
cugggcaguuucuaaggau

SEQ ID NO: 1264665 - RNA, 19 nt, Artificial Sequence
  Description of Artificial Sequence: Synthetic oligonucleotide
  Antisense strand to SEQ ID NO: 1264664
auccuuagaaacugcccag

SEQ ID NO: 1264666 - RNA, 19 nt, Artificial Sequence
  Description of Artificial Sequence: Synthetic oligonucleotide
  Sense strand starting at position 3720 of SEQ ID NO: 1241336
ggcaguuucuaaggauacu

SEQ ID NO: 1264667 - RNA, 19 nt, Artificial Sequence
  Description of Artificial Sequence: Synthetic oligonucleotide
  Antisense strand to SEQ ID NO: 1264666
aguauccuuagaaacugcc

SEQ ID NO: 1264668 - RNA, 19 nt, Artificial Sequence
  Description of Artificial Sequence: Synthetic oligonucleotide
  Sense strand starting at position 3731 of SEQ ID NO: 1241336
aggauacuguacuuaugau

SEQ ID NO: 1264669 - RNA, 19 nt, Artificial Sequence
  Description of Artificial Sequence: Synthetic oligonucleotide
  Antisense strand to SEQ ID NO: 1264668
aucauaaguacaguauccu

SEQ ID NO: 1264670 - RNA, 19 nt, Artificial Sequence
  Description of Artificial Sequence: Synthetic oligonucleotide
  Sense strand starting at position 3755 of SEQ ID NO: 1241336
gucauaacuccaugaugca

SEQ ID NO: 1264671 - RNA, 19 nt, Artificial Sequence
  Description of Artificial Sequence: Synthetic oligonucleotide
  Antisense strand to SEQ ID NO: 1264670
ugcaucauggaguuaugac

SEQ ID NO: 1264672 - RNA, 19 nt, Artificial Sequence
  Description of Artificial Sequence: Synthetic oligonucleotide
  Sense strand starting at position 3809 of SEQ ID NO: 1241336
uuaaauuagcgguacucca

SEQ ID NO: 1264673 - RNA, 19 nt, Artificial Sequence
  Description of Artificial Sequence: Synthetic oligonucleotide
  Antisense strand to SEQ ID NO: 1264672
uggaguaccgcuaauuuaa

SEQ ID NO: 1264674 - RNA, 19 nt, Artificial Sequence
  Description of Artificial Sequence: Synthetic oligonucleotide
  Sense strand starting at position 3895 of SEQ ID NO: 1241336
gccagaccuuguuucuacu

SEQ ID NO: 1264675 - RNA, 19 nt, Artificial Sequence
  Description of Artificial Sequence: Synthetic oligonucleotide
  Antisense strand to SEQ ID NO: 1264674
aguagaaacaaggucuggc

SEQ ID NO: 1264676 - RNA, 19 nt, Artificial Sequence
  Description of Artificial Sequence: Synthetic oligonucleotide
  Sense strand starting at position 68 of SEQ ID NO: 1241337
uccauuaaggcacaaaguu

SEQ ID NO: 1264677 - RNA, 19 nt, Artificial Sequence
  Description of Artificial Sequence: Synthetic oligonucleotide
  Antisense strand to SEQ ID NO: 1264676
aacuuugugccuuaaugga

SEQ ID NO: 1264678 - RNA, 19 nt, Artificial Sequence
  Description of Artificial Sequence: Synthetic oligonucleotide
  Sense strand starting at position 250 of SEQ ID NO: 1241337
augugaaguugaucugauu

SEQ ID NO: 1264679 - RNA, 19 nt, Artificial Sequence
  Description of Artificial Sequence: Synthetic oligonucleotide
  Antisense strand to SEQ ID NO: 1264678
aaucagaucaacuucacau

SEQ ID NO: 1264680 - RNA, 19 nt, Artificial Sequence
  Description of Artificial Sequence: Synthetic oligonucleotide
  Sense strand starting at position 276 of SEQ ID NO: 1241337
cuaguagacuaauuggguu

SEQ ID NO: 1264681 - RNA, 19 nt, Artificial Sequence
  Description of Artificial Sequence: Synthetic oligonucleotide
  Antisense strand to SEQ ID NO: 1264680
aacccaauuagucuacuag

SEQ ID NO: 1264682 - RNA, 19 nt, Artificial Sequence
  Description of Artificial Sequence: Synthetic oligonucleotide
  Sense strand starting at position 280 of SEQ ID NO: 1241337
uagacuaauuggguucuca

SEQ ID NO: 1264683 - RNA, 19 nt, Artificial Sequence
  Description of Artificial Sequence: Synthetic oligonucleotide
  Antisense strand to SEQ ID NO: 1264682
ugagaacccaauuagucua

SEQ ID NO: 1264684 - RNA, 19 nt, Artificial Sequence
  Description of Artificial Sequence: Synthetic oligonucleotide
  Sense strand starting at position 557 of SEQ ID NO: 1241337
uguguugcuacagagaaag

SEQ ID NO: 1264685 - RNA, 19 nt, Artificial Sequence
  Description of Artificial Sequence: Synthetic oligonucleotide
  Antisense strand to SEQ ID NO: 1264684
cuuucucuguagcaacaca

SEQ ID NO: 1264686 - RNA, 19 nt, Artificial Sequence
  Description of Artificial Sequence: Synthetic oligonucleotide
  Sense strand starting at position 683 of SEQ ID NO: 1241337
ugaaucagcaggugugaga

SEQ ID NO: 1264687 - RNA, 19 nt, Artificial Sequence
  Description of Artificial Sequence: Synthetic oligonucleotide
  Antisense strand to SEQ ID NO: 1264686
ucucacaccugcugauuca

SEQ ID NO: 1264688 - RNA, 19 nt, Artificial Sequence
  Description of Artificial Sequence: Synthetic oligonucleotide
  Sense strand starting at position 833 of SEQ ID NO: 1241337
ggaguuccauuguucuaaa

SEQ ID NO: 1264689 - RNA, 19 nt, Artificial Sequence
  Description of Artificial Sequence: Synthetic oligonucleotide
  Antisense strand to SEQ ID NO: 1264688
uuuagaacaauggaacucc

SEQ ID NO: 1264690 - RNA, 19 nt, Artificial Sequence
  Description of Artificial Sequence: Synthetic oligonucleotide
  Sense strand starting at position 918 of SEQ ID NO: 1241337
ucucaacuuccugauaggu

SEQ ID NO: 1264691 - RNA, 19 nt, Artificial Sequence
  Description of Artificial Sequence: Synthetic oligonucleotide
  Antisense strand to SEQ ID NO: 1264690
accuaucaggaaguugaga

SEQ ID NO: 1264692 - RNA, 19 nt, Artificial Sequence
  Description of Artificial Sequence: Synthetic oligonucleotide
  Sense strand starting at position 968 of SEQ ID NO: 1241337
uaguaugcucacgagaaga

SEQ ID NO: 1264693 - RNA, 19 nt, Artificial Sequence
  Description of Artificial Sequence: Synthetic oligonucleotide
  Antisense strand to SEQ ID NO: 1264692
ucuucucgugagcauacua

SEQ ID NO: 1264694 - RNA, 19 nt, Artificial Sequence
  Description of Artificial Sequence: Synthetic oligonucleotide
  Sense strand starting at position 970 of SEQ ID NO: 1241337
guaugcucacgagaagaca

SEQ ID NO: 1264695 - RNA, 19 nt, Artificial Sequence
  Description of Artificial Sequence: Synthetic oligonucleotide
  Antisense strand to SEQ ID NO: 1264694
ugucuucucgugagcauac

SEQ ID NO: 1264696 - RNA, 19 nt, Artificial Sequence
  Description of Artificial Sequence: Synthetic oligonucleotide
  Sense strand starting at position 1097 of SEQ ID NO: 1241337
ccagacauuuaggaagcuu

SEQ ID NO: 1264697 - RNA, 19 nt, Artificial Sequence
  Description of Artificial Sequence: Synthetic oligonucleotide
  Antisense strand to SEQ ID NO: 1264696
aagcuuccuaaaugucugg

SEQ ID NO: 1264698 - RNA, 19 nt, Artificial Sequence
  Description of Artificial Sequence: Synthetic oligonucleotide
  Sense strand starting at position 1327 of SEQ ID NO: 1241337
gugaauacuuauccuagga

SEQ ID NO: 1264699 - RNA, 19 nt, Artificial Sequence
  Description of Artificial Sequence: Synthetic oligonucleotide
  Antisense strand to SEQ ID NO: 1264698
uccuaggauaaguauucac

SEQ ID NO: 1264700 - RNA, 19 nt, Artificial Sequence
  Description of Artificial Sequence: Synthetic oligonucleotide
  Sense strand starting at position 1350 of SEQ ID NO: 1241337
gcuccagcuguugaauaaa

SEQ ID NO: 1264701 - RNA, 19 nt, Artificial Sequence
  Description of Artificial Sequence: Synthetic oligonucleotide
  Antisense strand to SEQ ID NO: 1264700
uuuauucaacagcuggagc

SEQ ID NO: 1264702 - RNA, 19 nt, Artificial Sequence
  Description of Artificial Sequence: Synthetic oligonucleotide
  Sense strand starting at position 1353 of SEQ ID NO: 1241337
ccagcuguugaauaaaguu

SEQ ID NO: 1264703 - RNA, 19 nt, Artificial Sequence
  Description of Artificial Sequence: Synthetic oligonucleotide
  Antisense strand to SEQ ID NO: 1264702
aacuuuauucaacagcugg

SEQ ID NO: 1264704 - RNA, 19 nt, Artificial Sequence
  Description of Artificial Sequence: Synthetic oligonucleotide
  Sense strand starting at position 1359 of SEQ ID NO: 1241337
guugaauaaaguuaggcuu

SEQ ID NO: 1264705 - RNA, 19 nt, Artificial Sequence
  Description of Artificial Sequence: Synthetic oligonucleotide
  Antisense strand to SEQ ID NO: 1264704
aagccuaacuuuauucaac

SEQ ID NO: 1264706 - RNA, 19 nt, Artificial Sequence
  Description of Artificial Sequence: Synthetic oligonucleotide
  Sense strand starting at position 1598 of SEQ ID NO: 1241337
gggugagaucuuggauuca

SEQ ID NO: 1264707 - RNA, 19 nt, Artificial Sequence
  Description of Artificial Sequence: Synthetic oligonucleotide
  Antisense strand to SEQ ID NO: 1264706
ugaauccaagaucucaccc

SEQ ID NO: 1264708 - RNA, 19 nt, Artificial Sequence
  Description of Artificial Sequence: Synthetic oligonucleotide
  Sense strand starting at position 1746 of SEQ ID NO: 1241337
cuaaacucagguugaaauc

SEQ ID NO: 1264709 - RNA, 19 nt, Artificial Sequence
  Description of Artificial Sequence: Synthetic oligonucleotide
  Antisense strand to SEQ ID NO: 1264708
gauuucaaccugaguuuag

SEQ ID NO: 1264710 - RNA, 19 nt, Artificial Sequence
  Description of Artificial Sequence: Synthetic oligonucleotide
  Sense strand starting at position 1756 of SEQ ID NO: 1241337
guugaaaucuaauugcuau

SEQ ID NO: 1264711 - RNA, 19 nt, Artificial Sequence
  Description of Artificial Sequence: Synthetic oligonucleotide
  Antisense strand to SEQ ID NO: 1264710
auagcaauuagauuucaac

SEQ ID NO: 1264712 - RNA, 19 nt, Artificial Sequence
  Description of Artificial Sequence: Synthetic oligonucleotide
  Sense strand starting at position 1802 of SEQ ID NO: 1241337
aguaguaagacaugggagu

SEQ ID NO: 1264713 - RNA, 19 nt, Artificial Sequence
  Description of Artificial Sequence: Synthetic oligonucleotide
  Antisense strand to SEQ ID NO: 1264712
acucccaugucuuacuacu

SEQ ID NO: 1264714 - RNA, 19 nt, Artificial Sequence
  Description of Artificial Sequence: Synthetic oligonucleotide
  Sense strand starting at position 1803 of SEQ ID NO: 1241337
guaguaagacaugggaguu

SEQ ID NO: 1264715 - RNA, 19 nt, Artificial Sequence
  Description of Artificial Sequence: Synthetic oligonucleotide
  Antisense strand to SEQ ID NO: 1264714
aacucccaugucuuacuac

SEQ ID NO: 1264716 - RNA, 19 nt, Artificial Sequence
  Description of Artificial Sequence: Synthetic oligonucleotide
  Sense strand starting at position 2048 of SEQ ID NO: 1241337
aguucuguucuuuagaacu

SEQ ID NO: 1264717 - RNA, 19 nt, Artificial Sequence
  Description of Artificial Sequence: Synthetic oligonucleotide
  Antisense strand to SEQ ID NO: 1264716
aguucuaaagaacagaacu

SEQ ID NO: 1264718 - RNA, 19 nt, Artificial Sequence
  Description of Artificial Sequence: Synthetic oligonucleotide
  Sense strand starting at position 2133 of SEQ ID NO: 1241337
ccgaauacacuugguacua

SEQ ID NO: 1264719 - RNA, 19 nt, Artificial Sequence
  Description of Artificial Sequence: Synthetic oligonucleotide
  Antisense strand to SEQ ID NO: 1264718
uaguaccaaguguauucgg

SEQ ID NO: 1264720 - RNA, 19 nt, Artificial Sequence
  Description of Artificial Sequence: Synthetic oligonucleotide
  Sense strand starting at position 2134 of SEQ ID NO: 1241337
cgaauacacuugguacuau

SEQ ID NO: 1264721 - RNA, 19 nt, Artificial Sequence
  Description of Artificial Sequence: Synthetic oligonucleotide
  Antisense strand to SEQ ID NO: 1264720
auaguaccaaguguauucg

SEQ ID NO: 1264722 - RNA, 19 nt, Artificial Sequence
  Description of Artificial Sequence: Synthetic oligonucleotide
  Sense strand starting at position 2150 of SEQ ID NO: 1241337
uaugguuggcaaugaacaa

SEQ ID NO: 1264723 - RNA, 19 nt, Artificial Sequence
  Description of Artificial Sequence: Synthetic oligonucleotide
  Antisense strand to SEQ ID NO: 1264722
uuguucauugccaaccaua

SEQ ID NO: 1264724 - RNA, 19 nt, Artificial Sequence
  Description of Artificial Sequence: Synthetic oligonucleotide
  Sense strand starting at position 2262 of SEQ ID NO: 1241337
cucuuaaggucaucugaac

SEQ ID NO: 1264725 - RNA, 19 nt, Artificial Sequence
  Description of Artificial Sequence: Synthetic oligonucleotide
  Antisense strand to SEQ ID NO: 1264724
guucagaugaccuuaagag

SEQ ID NO: 1264726 - RNA, 19 nt, Artificial Sequence
  Description of Artificial Sequence: Synthetic oligonucleotide
  Sense strand starting at position 2346 of SEQ ID NO: 1241337
auguuagacguuuaggaau

SEQ ID NO: 1264727 - RNA, 19 nt, Artificial Sequence
  Description of Artificial Sequence: Synthetic oligonucleotide
  Antisense strand to SEQ ID NO: 1264726
auuccuaaacgucuaacau

SEQ ID NO: 1264728 - RNA, 19 nt, Artificial Sequence
  Description of Artificial Sequence: Synthetic oligonucleotide
  Sense strand starting at position 2352 of SEQ ID NO: 1241337
gacguuuaggaaugaagcu

SEQ ID NO: 1264729 - RNA, 19 nt, Artificial Sequence
  Description of Artificial Sequence: Synthetic oligonucleotide
  Antisense strand to SEQ ID NO: 1264728
agcuucauuccuaaacguc

SEQ ID NO: 1264730 - RNA, 19 nt, Artificial Sequence
  Description of Artificial Sequence: Synthetic oligonucleotide
  Sense strand starting at position 2364 of SEQ ID NO: 1241337
ugaagcugacuuggcaaau

SEQ ID NO: 1264731 - RNA, 19 nt, Artificial Sequence
  Description of Artificial Sequence: Synthetic oligonucleotide
  Antisense strand to SEQ ID NO: 1264730
auuugccaagucagcuuca

SEQ ID NO: 1264732 - RNA, 19 nt, Artificial Sequence
  Description of Artificial Sequence: Synthetic oligonucleotide
  Sense strand starting at position 2365 of SEQ ID NO: 1241337
gaagcugacuuggcaaauu

SEQ ID NO: 1264733 - RNA, 19 nt, Artificial Sequence
  Description of Artificial Sequence: Synthetic oligonucleotide
  Antisense strand to SEQ ID NO: 1264732
aauuugccaagucagcuuc

SEQ ID NO: 1264734 - RNA, 19 nt, Artificial Sequence
  Description of Artificial Sequence: Synthetic oligonucleotide
  Sense strand starting at position 2492 of SEQ ID NO: 1241337
agauauauuuguuacacug

SEQ ID NO: 1264735 - RNA, 19 nt, Artificial Sequence
  Description of Artificial Sequence: Synthetic oligonucleotide
  Antisense strand to SEQ ID NO: 1264734
caguguaacaaauauaucu

SEQ ID NO: 1264736 - RNA, 19 nt, Artificial Sequence
  Description of Artificial Sequence: Synthetic oligonucleotide
  Sense strand starting at position 2555 of SEQ ID NO: 1241337
gccaauacaccugacaguu

SEQ ID NO: 1264737 - RNA, 19 nt, Artificial Sequence
  Description of Artificial Sequence: Synthetic oligonucleotide
  Antisense strand to SEQ ID NO: 1264736
aacugucagguguauuggc

SEQ ID NO: 1264738 - RNA, 19 nt, Artificial Sequence
  Description of Artificial Sequence: Synthetic oligonucleotide
  Sense strand starting at position 2761 of SEQ ID NO: 1241337
ggguauuugccugguuucu

SEQ ID NO: 1264739 - RNA, 19 nt, Artificial Sequence
  Description of Artificial Sequence: Synthetic oligonucleotide
  Antisense strand to SEQ ID NO: 1264738
agaaaccaggcaaauaccc

SEQ ID NO: 1264740 - RNA, 19 nt, Artificial Sequence
  Description of Artificial Sequence: Synthetic oligonucleotide
  Sense strand starting at position 2763 of SEQ ID NO: 1241337
guauuugccugguuucuaa

SEQ ID NO: 1264741 - RNA, 19 nt, Artificial Sequence
  Description of Artificial Sequence: Synthetic oligonucleotide
  Antisense strand to SEQ ID NO: 1264740
uuagaaaccaggcaaauac

SEQ ID NO: 1264742 - RNA, 19 nt, Artificial Sequence
  Description of Artificial Sequence: Synthetic oligonucleotide
  Sense strand starting at position 2790 of SEQ ID NO: 1241337
ugaggucugaggugucaaa

SEQ ID NO: 1264743 - RNA, 19 nt, Artificial Sequence
  Description of Artificial Sequence: Synthetic oligonucleotide
  Antisense strand to SEQ ID NO: 1264742
uuugacaccucagaccuca

SEQ ID NO: 1264744 - RNA, 19 nt, Artificial Sequence
  Description of Artificial Sequence: Synthetic oligonucleotide
  Sense strand starting at position 3031 of SEQ ID NO: 1241337
ggguguguuaaauggagga

SEQ ID NO: 1264745 - RNA, 19 nt, Artificial Sequence
  Description of Artificial Sequence: Synthetic oligonucleotide
  Antisense strand to SEQ ID NO: 1264744
uccuccauuuaacacaccc

SEQ ID NO: 1264746 - RNA, 19 nt, Artificial Sequence
  Description of Artificial Sequence: Synthetic oligonucleotide
  Sense strand starting at position 3078 of SEQ ID NO: 1241337
gggcuaucagauuaaugua

SEQ ID NO: 1264747 - RNA, 19 nt, Artificial Sequence
  Description of Artificial Sequence: Synthetic oligonucleotide
  Antisense strand to SEQ ID NO: 1264746
uacauuaaucugauagccc

SEQ ID NO: 1264748 - RNA, 19 nt, Artificial Sequence
  Description of Artificial Sequence: Synthetic oligonucleotide
  Sense strand starting at position 3263 of SEQ ID NO: 1241337
gcacucuugcuagaacaga

SEQ ID NO: 1264749 - RNA, 19 nt, Artificial Sequence
  Description of Artificial Sequence: Synthetic oligonucleotide
  Antisense strand to SEQ ID NO: 1264748
ucuguucuagcaagagugc

SEQ ID NO: 1264750 - RNA, 19 nt, Artificial Sequence
  Description of Artificial Sequence: Synthetic oligonucleotide
  Sense strand starting at position 3361 of SEQ ID NO: 1241337
auaaucacauuggaaagaa

SEQ ID NO: 1264751 - RNA, 19 nt, Artificial Sequence
  Description of Artificial Sequence: Synthetic oligonucleotide
  Antisense strand to SEQ ID NO: 1264750
uucuuuccaaugugauuau

SEQ ID NO: 1264752 - RNA, 19 nt, Artificial Sequence
  Description of Artificial Sequence: Synthetic oligonucleotide
  Sense strand starting at position 3451 of SEQ ID NO: 1241337
aucugaguugcagauaaac

SEQ ID NO: 1264753 - RNA, 19 nt, Artificial Sequence
  Description of Artificial Sequence: Synthetic oligonucleotide
  Antisense strand to SEQ ID NO: 1264752
guuuaucugcaacucagau

SEQ ID NO: 1264754 - RNA, 19 nt, Artificial Sequence
  Description of Artificial Sequence: Synthetic oligonucleotide
  Sense strand starting at position 3511 of SEQ ID NO: 1241337
ucaagucaggcaugggaaa

SEQ ID NO: 1264755 - RNA, 19 nt, Artificial Sequence
  Description of Artificial Sequence: Synthetic oligonucleotide
  Antisense strand to SEQ ID NO: 1264754
uuucccaugccugacuuga

SEQ ID NO: 1264756 - RNA, 19 nt, Artificial Sequence
  Description of Artificial Sequence: Synthetic oligonucleotide
  Sense strand starting at position 154 of SEQ ID NO: 1241338
gcuaauggagauugaacuu

SEQ ID NO: 1264757 - RNA, 19 nt, Artificial Sequence
  Description of Artificial Sequence: Synthetic oligonucleotide
  Antisense strand to SEQ ID NO: 1264756
aaguucaaucuccauuagc

SEQ ID NO: 1264758 - RNA, 19 nt, Artificial Sequence
  Description of Artificial Sequence: Synthetic oligonucleotide
  Sense strand starting at position 190 of SEQ ID NO: 1241338
gcagaagucuccucagaua

SEQ ID NO: 1264759 - RNA, 19 nt, Artificial Sequence
  Description of Artificial Sequence: Synthetic oligonucleotide
  Antisense strand to SEQ ID NO: 1264758
uaucugaggagacuucugc

SEQ ID NO: 1264760 - RNA, 19 nt, Artificial Sequence
  Description of Artificial Sequence: Synthetic oligonucleotide
  Sense strand starting at position 229 of SEQ ID NO: 1241338
ggaguuucaucugcaggag

SEQ ID NO: 1264761 - RNA, 19 nt, Artificial Sequence
  Description of Artificial Sequence: Synthetic oligonucleotide
  Antisense strand to SEQ ID NO: 1264760
cuccugcagaugaaacucc

SEQ ID NO: 1264762 - RNA, 19 nt, Artificial Sequence
  Description of Artificial Sequence: Synthetic oligonucleotide
  Sense strand starting at position 297 of SEQ ID NO: 1241338
ggucucuuuagguaaugga

SEQ ID NO: 1264763 - RNA, 19 nt, Artificial Sequence
  Description of Artificial Sequence: Synthetic oligonucleotide
  Antisense strand to SEQ ID NO: 1264762
uccauuaccuaaagagacc

SEQ ID NO: 1264764 - RNA, 19 nt, Artificial Sequence
  Description of Artificial Sequence: Synthetic oligonucleotide
  Sense strand starting at position 406 of SEQ ID NO: 1241338
gguaauagaggcugaacau

SEQ ID NO: 1264765 - RNA, 19 nt, Artificial Sequence
  Description of Artificial Sequence: Synthetic oligonucleotide
  Antisense strand to SEQ ID NO: 1264764
auguucagccucuauuacc

SEQ ID NO: 1264766 - RNA, 19 nt, Artificial Sequence
  Description of Artificial Sequence: Synthetic oligonucleotide
  Sense strand starting at position 627 of SEQ ID NO: 1241338
agcugauggaggcagaauu

SEQ ID NO: 1264767 - RNA, 19 nt, Artificial Sequence
  Description of Artificial Sequence: Synthetic oligonucleotide
  Antisense strand to SEQ ID NO: 1264766
aauucugccuccaucagcu

SEQ ID NO: 1264768 - RNA, 19 nt, Artificial Sequence
  Description of Artificial Sequence: Synthetic oligonucleotide
  Sense strand starting at position 748 of SEQ ID NO: 1241338
uuaacagaauucuccgcaa

SEQ ID NO: 1264769 - RNA, 19 nt, Artificial Sequence
  Description of Artificial Sequence: Synthetic oligonucleotide
  Antisense strand to SEQ ID NO: 1264768
uugcggagaauucuguuaa

SEQ ID NO: 1264770 - RNA, 19 nt, Artificial Sequence
  Description of Artificial Sequence: Synthetic oligonucleotide
  Sense strand starting at position 948 of SEQ ID NO: 1241338
agcagaaccuucuuguaca

SEQ ID NO: 1264771 - RNA, 19 nt, Artificial Sequence
  Description of Artificial Sequence: Synthetic oligonucleotide
  Antisense strand to SEQ ID NO: 1264770
uguacaagaagguucugcu

SEQ ID NO: 1264772 - RNA, 19 nt, Artificial Sequence
  Description of Artificial Sequence: Synthetic oligonucleotide
  Sense strand starting at position 1025 of SEQ ID NO: 1241338
uagucuccugaguaaauga

SEQ ID NO: 1264773 - RNA, 19 nt, Artificial Sequence
  Description of Artificial Sequence: Synthetic oligonucleotide
  Antisense strand to SEQ ID NO: 1264772
ucauuuacucaggagacua

SEQ ID NO: 1264774 - RNA, 19 nt, Artificial Sequence
  Description of Artificial Sequence: Synthetic oligonucleotide
  Sense strand starting at position 1038 of SEQ ID NO: 1241338
aaaugaaguucugcugaua

SEQ ID NO: 1264775 - RNA, 19 nt, Artificial Sequence
  Description of Artificial Sequence: Synthetic oligonucleotide
  Antisense strand to SEQ ID NO: 1264774
uaucagcagaacuucauuu

SEQ ID NO: 1264776 - RNA, 19 nt, Artificial Sequence
  Description of Artificial Sequence: Synthetic oligonucleotide
  Sense strand starting at position 1155 of SEQ ID NO: 1241338
uuccuuugacuuuguagaa

SEQ ID NO: 1264777 - RNA, 19 nt, Artificial Sequence
  Description of Artificial Sequence: Synthetic oligonucleotide
  Antisense strand to SEQ ID NO: 1264776
uucuacaaagucaaaggaa

SEQ ID NO: 1264778 - RNA, 19 nt, Artificial Sequence
  Description of Artificial Sequence: Synthetic oligonucleotide
  Sense strand starting at position 1156 of SEQ ID NO: 1241338
uccuuugacuuuguagaag

SEQ ID NO: 1264779 - RNA, 19 nt, Artificial Sequence
  Description of Artificial Sequence: Synthetic oligonucleotide
  Antisense strand to SEQ ID NO: 1264778
cuucuacaaagucaaagga

SEQ ID NO: 1264780 - RNA, 19 nt, Artificial Sequence
  Description of Artificial Sequence: Synthetic oligonucleotide
  Sense strand starting at position 1173 of SEQ ID NO: 1241338
agaacuaucuggccuggaa

SEQ ID NO: 1264781 - RNA, 19 nt, Artificial Sequence
  Description of Artificial Sequence: Synthetic oligonucleotide
  Antisense strand to SEQ ID NO: 1264780
uuccaggccagauaguucu

SEQ ID NO: 1264782 - RNA, 19 nt, Artificial Sequence
  Description of Artificial Sequence: Synthetic oligonucleotide
  Sense strand starting at position 1176 of SEQ ID NO: 1241338
acuaucuggccuggaaaua

SEQ ID NO: 1264783 - RNA, 19 nt, Artificial Sequence
  Description of Artificial Sequence: Synthetic oligonucleotide
  Antisense strand to SEQ ID NO: 1264782
uauuuccaggccagauagu

SEQ ID NO: 1264784 - RNA, 19 nt, Artificial Sequence
  Description of Artificial Sequence: Synthetic oligonucleotide
  Sense strand starting at position 1325 of SEQ ID NO: 1241338
aagguauguuugguggaau

SEQ ID NO: 1264785 - RNA, 19 nt, Artificial Sequence
  Description of Artificial Sequence: Synthetic oligonucleotide
  Antisense strand to SEQ ID NO: 1264784
auuccaccaaacauaccuu

SEQ ID NO: 1264786 - RNA, 19 nt, Artificial Sequence
  Description of Artificial Sequence: Synthetic oligonucleotide
  Sense strand starting at position 1353 of SEQ ID NO: 1241338
cugaacacucucuggcaau

SEQ ID NO: 1264787 - RNA, 19 nt, Artificial Sequence
  Description of Artificial Sequence: Synthetic oligonucleotide
  Antisense strand to SEQ ID NO: 1264786
auugccagagaguguucag

SEQ ID NO: 1264788 - RNA, 19 nt, Artificial Sequence
  Description of Artificial Sequence: Synthetic oligonucleotide
  Sense strand starting at position 1471 of SEQ ID NO: 1241338
uggagagacuuacuaguca

SEQ ID NO: 1264789 - RNA, 19 nt, Artificial Sequence
  Description of Artificial Sequence: Synthetic oligonucleotide
  Antisense strand to SEQ ID NO: 1264788
ugacuaguaagucucucca

SEQ ID NO: 1264790 - RNA, 19 nt, Artificial Sequence
  Description of Artificial Sequence: Synthetic oligonucleotide
  Sense strand starting at position 1738 of SEQ ID NO: 1241338
gagauaggcugauuagagu

SEQ ID NO: 1264791 - RNA, 19 nt, Artificial Sequence
  Description of Artificial Sequence: Synthetic oligonucleotide
  Antisense strand to SEQ ID NO: 1264790
acucuaaucagccuaucuc

SEQ ID NO: 1264792 - RNA, 19 nt, Artificial Sequence
  Description of Artificial Sequence: Synthetic oligonucleotide
  Sense strand starting at position 1747 of SEQ ID NO: 1241338
ugauuagagucaucacuuu

SEQ ID NO: 1264793 - RNA, 19 nt, Artificial Sequence
  Description of Artificial Sequence: Synthetic oligonucleotide
  Antisense strand to SEQ ID NO: 1264792
aaagugaugacucuaauca

SEQ ID NO: 1264794 - RNA, 19 nt, Artificial Sequence
  Description of Artificial Sequence: Synthetic oligonucleotide
  Sense strand starting at position 2046 of SEQ ID NO: 1241338
ucaggauuccaucaguggu

SEQ ID NO: 1264795 - RNA, 19 nt, Artificial Sequence
  Description of Artificial Sequence: Synthetic oligonucleotide
  Antisense strand to SEQ ID NO: 1264794
accacugauggaauccuga

SEQ ID NO: 1264796 - RNA, 19 nt, Artificial Sequence
  Description of Artificial Sequence: Synthetic oligonucleotide
  Sense strand starting at position 2048 of SEQ ID NO: 1241338
aggauuccaucagugguau

SEQ ID NO: 1264797 - RNA, 19 nt, Artificial Sequence
  Description of Artificial Sequence: Synthetic oligonucleotide
  Antisense strand to SEQ ID NO: 1264796
auaccacugauggaauccu

SEQ ID NO: 1264798 - RNA, 19 nt, Artificial Sequence
  Description of Artificial Sequence: Synthetic oligonucleotide
  Sense strand starting at position 2099 of SEQ ID NO: 1241338
agguaauggcugcaaguga

SEQ ID NO: 1264799 - RNA, 19 nt, Artificial Sequence
  Description of Artificial Sequence: Synthetic oligonucleotide
  Antisense strand to SEQ ID NO: 1264798
ucacuugcagccauuaccu

SEQ ID NO: 1264800 - RNA, 19 nt, Artificial Sequence
  Description of Artificial Sequence: Synthetic oligonucleotide
  Sense strand starting at position 2173 of SEQ ID NO: 1241338
gguaaauuccaguaaugcc

SEQ ID NO: 1264801 - RNA, 19 nt, Artificial Sequence
  Description of Artificial Sequence: Synthetic oligonucleotide
  Antisense strand to SEQ ID NO: 1264800
ggcauuacuggaauuuacc

SEQ ID NO: 1264802 - RNA, 19 nt, Artificial Sequence
  Description of Artificial Sequence: Synthetic oligonucleotide
  Sense strand starting at position 2194 of SEQ ID NO: 1241338
uuucuaauugcugaaauug

SEQ ID NO: 1264803 - RNA, 19 nt, Artificial Sequence
  Description of Artificial Sequence: Synthetic oligonucleotide
  Antisense strand to SEQ ID NO: 1264802
caauuucagcaauuagaaa

SEQ ID NO: 1264804 - RNA, 19 nt, Artificial Sequence
  Description of Artificial Sequence: Synthetic oligonucleotide
  Sense strand starting at position 2324 of SEQ ID NO: 1241338
gagugaggauguucuauca

SEQ ID NO: 1264805 - RNA, 19 nt, Artificial Sequence
  Description of Artificial Sequence: Synthetic oligonucleotide
  Antisense strand to SEQ ID NO: 1264804
ugauagaacauccucacuc

SEQ ID NO: 1264806 - RNA, 19 nt, Artificial Sequence
  Description of Artificial Sequence: Synthetic oligonucleotide
  Sense strand starting at position 2634 of SEQ ID NO: 1241338
ugaguaccuacaugggaau

SEQ ID NO: 1264807 - RNA, 19 nt, Artificial Sequence
  Description of Artificial Sequence: Synthetic oligonucleotide
  Antisense strand to SEQ ID NO: 1264806
auucccauguagguacuca

SEQ ID NO: 1264808 - RNA, 19 nt, Artificial Sequence
  Description of Artificial Sequence: Synthetic oligonucleotide
  Sense strand starting at position 2891 of SEQ ID NO: 1241338
uccagucaagcagauugua

SEQ ID NO: 1264809 - RNA, 19 nt, Artificial Sequence
  Description of Artificial Sequence: Synthetic oligonucleotide
  Antisense strand to SEQ ID NO: 1264808
uacaaucugcuugacugga

SEQ ID NO: 1264810 - RNA, 19 nt, Artificial Sequence
  Description of Artificial Sequence: Synthetic oligonucleotide
  Sense strand starting at position 2894 of SEQ ID NO: 1241338
agucaagcagauuguagau

SEQ ID NO: 1264811 - RNA, 19 nt, Artificial Sequence
  Description of Artificial Sequence: Synthetic oligonucleotide
  Antisense strand to SEQ ID NO: 1264810
aucuacaaucugcuugacu

SEQ ID NO: 1264812 - RNA, 19 nt, Artificial Sequence
  Description of Artificial Sequence: Synthetic oligonucleotide
  Sense strand starting at position 2900 of SEQ ID NO: 1241338
gcagauuguagaugacauu

SEQ ID NO: 1264813 - RNA, 19 nt, Artificial Sequence
  Description of Artificial Sequence: Synthetic oligonucleotide
  Antisense strand to SEQ ID NO: 1264812
aaugucaucuacaaucugc

SEQ ID NO: 1264814 - RNA, 19 nt, Artificial Sequence
  Description of Artificial Sequence: Synthetic oligonucleotide
  Sense strand starting at position 2906 of SEQ ID NO: 1241338
uguagaugacauuguauua

SEQ ID NO: 1264815 - RNA, 19 nt, Artificial Sequence
  Description of Artificial Sequence: Synthetic oligonucleotide
  Antisense strand to SEQ ID NO: 1264814
uaauacaaugucaucuaca

SEQ ID NO: 1264816 - RNA, 19 nt, Artificial Sequence
  Description of Artificial Sequence: Synthetic oligonucleotide
  Sense strand starting at position 2919 of SEQ ID NO: 1241338
guauuagauuuggaauaca

SEQ ID NO: 1264817 - RNA, 19 nt, Artificial Sequence
  Description of Artificial Sequence: Synthetic oligonucleotide
  Antisense strand to SEQ ID NO: 1264816
uguauuccaaaucuaauac

SEQ ID NO: 1264818 - RNA, 19 nt, Artificial Sequence
  Description of Artificial Sequence: Synthetic oligonucleotide
  Sense strand starting at position 2988 of SEQ ID NO: 1241338
uugaucaaacaguaugcaa

SEQ ID NO: 1264819 - RNA, 19 nt, Artificial Sequence
  Description of Artificial Sequence: Synthetic oligonucleotide
  Antisense strand to SEQ ID NO: 1264818
uugcauacuguuugaucaa

SEQ ID NO: 1264820 - RNA, 19 nt, Artificial Sequence
  Description of Artificial Sequence: Synthetic oligonucleotide
  Sense strand starting at position 3112 of SEQ ID NO: 1241338
ugcauuaaucugggaauau

SEQ ID NO: 1264821 - RNA, 19 nt, Artificial Sequence
  Description of Artificial Sequence: Synthetic oligonucleotide
  Antisense strand to SEQ ID NO: 1264820
auauucccagauuaaugca

SEQ ID NO: 1264822 - RNA, 19 nt, Artificial Sequence
  Description of Artificial Sequence: Synthetic oligonucleotide
  Sense strand starting at position 3283 of SEQ ID NO: 1241338
auuuaaagaugggaucuuu

SEQ ID NO: 1264823 - RNA, 19 nt, Artificial Sequence
  Description of Artificial Sequence: Synthetic oligonucleotide
  Antisense strand to SEQ ID NO: 1264822
aaagaucccaucuuuaaau

SEQ ID NO: 1264824 - RNA, 19 nt, Artificial Sequence
  Description of Artificial Sequence: Synthetic oligonucleotide
  Sense strand starting at position 3302 of SEQ ID NO: 1241338
gggaguuacaggcauaccu

SEQ ID NO: 1264825 - RNA, 19 nt, Artificial Sequence
  Description of Artificial Sequence: Synthetic oligonucleotide
  Antisense strand to SEQ ID NO: 1264824
agguaugccuguaacuccc

SEQ ID NO: 1264826 - RNA, 19 nt, Artificial Sequence
  Description of Artificial Sequence: Synthetic oligonucleotide
  Sense strand starting at position 3447 of SEQ ID NO: 1241338
ucauuucuuugugucacau

SEQ ID NO: 1264827 - RNA, 19 nt, Artificial Sequence
  Description of Artificial Sequence: Synthetic oligonucleotide
  Antisense strand to SEQ ID NO: 1264826
augugacacaaagaaauga

SEQ ID NO: 1264828 - RNA, 19 nt, Artificial Sequence
  Description of Artificial Sequence: Synthetic oligonucleotide
  Sense strand starting at position 3449 of SEQ ID NO: 1241338
auuucuuugugucacauuu

SEQ ID NO: 1264829 - RNA, 19 nt, Artificial Sequence
  Description of Artificial Sequence: Synthetic oligonucleotide
  Antisense strand to SEQ ID NO: 1264828
aaaugugacacaaagaaau

SEQ ID NO: 1264830 - RNA, 19 nt, Artificial Sequence
  Description of Artificial Sequence: Synthetic oligonucleotide
  Sense strand starting at position 3544 of SEQ ID NO: 1241338
auguuacugcuguaaauau

SEQ ID NO: 1264831 - RNA, 19 nt, Artificial Sequence
  Description of Artificial Sequence: Synthetic oligonucleotide
  Antisense strand to SEQ ID NO: 1264830
auauuuacagcaguaacau

SEQ ID NO: 1264832 - RNA, 19 nt, Artificial Sequence
  Description of Artificial Sequence: Synthetic oligonucleotide
  Sense strand starting at position 3676 of SEQ ID NO: 1241338
uuucuauugcuugagacac

SEQ ID NO: 1264833 - RNA, 19 nt, Artificial Sequence
  Description of Artificial Sequence: Synthetic oligonucleotide
  Antisense strand to SEQ ID NO: 1264832
gugucucaagcaauagaaa

SEQ ID NO: 1264834 - RNA, 19 nt, Artificial Sequence
  Description of Artificial Sequence: Synthetic oligonucleotide
  Sense strand starting at position 3712 of SEQ ID NO: 1241338
gcaaauugauagcccuaca

SEQ ID NO: 1264835 - RNA, 19 nt, Artificial Sequence
  Description of Artificial Sequence: Synthetic oligonucleotide
  Antisense strand to SEQ ID NO: 1264834
uguagggcuaucaauuugc

SEQ ID NO: 1264836 - RNA, 19 nt, Artificial Sequence
  Description of Artificial Sequence: Synthetic oligonucleotide
  Sense strand starting at position 169 of SEQ ID NO: 1241339
gagacucgccuccagagaa

SEQ ID NO: 1264837 - RNA, 19 nt, Artificial Sequence
  Description of Artificial Sequence: Synthetic oligonucleotide
  Antisense strand to SEQ ID NO: 1264836
uucucuggaggcgagucuc

SEQ ID NO: 1264838 - RNA, 19 nt, Artificial Sequence
  Description of Artificial Sequence: Synthetic oligonucleotide
  Sense strand starting at position 524 of SEQ ID NO: 1241339
ggcggaaguuuauuuagua

SEQ ID NO: 1264839 - RNA, 19 nt, Artificial Sequence
  Description of Artificial Sequence: Synthetic oligonucleotide
  Antisense strand to SEQ ID NO: 1264838
uacuaaauaaacuuccgcc

SEQ ID NO: 1264840 - RNA, 19 nt, Artificial Sequence
  Description of Artificial Sequence: Synthetic oligonucleotide
  Sense strand starting at position 525 of SEQ ID NO: 1241339
gcggaaguuuauuuaguac

SEQ ID NO: 1264841 - RNA, 19 nt, Artificial Sequence
  Description of Artificial Sequence: Synthetic oligonucleotide
  Antisense strand to SEQ ID NO: 1264840
guacuaaauaaacuuccgc

SEQ ID NO: 1264842 - RNA, 19 nt, Artificial Sequence
  Description of Artificial Sequence: Synthetic oligonucleotide
  Sense strand starting at position 529 of SEQ ID NO: 1241339
aaguuuauuuaguacggga

SEQ ID NO: 1264843 - RNA, 19 nt, Artificial Sequence
  Description of Artificial Sequence: Synthetic oligonucleotide
  Antisense strand to SEQ ID NO: 1264842
ucccguacuaaauaaacuu

SEQ ID NO: 1264844 - RNA, 19 nt, Artificial Sequence
  Description of Artificial Sequence: Synthetic oligonucleotide
  Sense strand starting at position 532 of SEQ ID NO: 1241339
uuuauuuaguacgggaaag

SEQ ID NO: 1264845 - RNA, 19 nt, Artificial Sequence
  Description of Artificial Sequence: Synthetic oligonucleotide
  Antisense strand to SEQ ID NO: 1264844
cuuucccguacuaaauaaa

SEQ ID NO: 1264846 - RNA, 19 nt, Artificial Sequence
  Description of Artificial Sequence: Synthetic oligonucleotide
  Sense strand starting at position 573 of SEQ ID NO: 1241339
gaggcuuugcccuaggaug

SEQ ID NO: 1264847 - RNA, 19 nt, Artificial Sequence
  Description of Artificial Sequence: Synthetic oligonucleotide
  Antisense strand to SEQ ID NO: 1264846
cauccuagggcaaagccuc

SEQ ID NO: 1264848 - RNA, 19 nt, Artificial Sequence
  Description of Artificial Sequence: Synthetic oligonucleotide
  Sense strand starting at position 2015 of SEQ ID NO: 1241339
aaaccuguccuaggaaugu

SEQ ID NO: 1264849 - RNA, 19 nt, Artificial Sequence
  Description of Artificial Sequence: Synthetic oligonucleotide
  Antisense strand to SEQ ID NO: 1264848
acauuccuaggacagguuu

SEQ ID NO: 1264850 - RNA, 19 nt, Artificial Sequence
  Description of Artificial Sequence: Synthetic oligonucleotide
  Sense strand starting at position 2045 of SEQ ID NO: 1241339
uuuggugcauuuguauaga

SEQ ID NO: 1264851 - RNA, 19 nt, Artificial Sequence
  Description of Artificial Sequence: Synthetic oligonucleotide
  Antisense strand to SEQ ID NO: 1264850
ucuauacaaaugcaccaaa

SEQ ID NO: 1264852 - RNA, 19 nt, Artificial Sequence
  Description of Artificial Sequence: Synthetic oligonucleotide
  Sense strand starting at position 2097 of SEQ ID NO: 1241339
uugguaucucuugaauaca

SEQ ID NO: 1264853 - RNA, 19 nt, Artificial Sequence
  Description of Artificial Sequence: Synthetic oligonucleotide
  Antisense strand to SEQ ID NO: 1264852
uguauucaagagauaccaa

SEQ ID NO: 1264854 - RNA, 19 nt, Artificial Sequence
  Description of Artificial Sequence: Synthetic oligonucleotide
  Sense strand starting at position 2142 of SEQ ID NO: 1241339
ugaagucugcuuuguugaa

SEQ ID NO: 1264855 - RNA, 19 nt, Artificial Sequence
  Description of Artificial Sequence: Synthetic oligonucleotide
  Antisense strand to SEQ ID NO: 1264854
uucaacaaagcagacuuca

SEQ ID NO: 1264856 - RNA, 19 nt, Artificial Sequence
  Description of Artificial Sequence: Synthetic oligonucleotide
  Sense strand starting at position 2143 of SEQ ID NO: 1241339
gaagucugcuuuguugaau

SEQ ID NO: 1264857 - RNA, 19 nt, Artificial Sequence
  Description of Artificial Sequence: Synthetic oligonucleotide
  Antisense strand to SEQ ID NO: 1264856
auucaacaaagcagacuuc

SEQ ID NO: 1264858 - RNA, 19 nt, Artificial Sequence
  Description of Artificial Sequence: Synthetic oligonucleotide
  Sense strand starting at position 2146 of SEQ ID NO: 1241339
gucugcuuuguugaaucaa

SEQ ID NO: 1264859 - RNA, 19 nt, Artificial Sequence
  Description of Artificial Sequence: Synthetic oligonucleotide
  Antisense strand to SEQ ID NO: 1264858
uugauucaacaaagcagac

SEQ ID NO: 1264860 - RNA, 19 nt, Artificial Sequence
  Description of Artificial Sequence: Synthetic oligonucleotide
  Sense strand starting at position 2244 of SEQ ID NO: 1241339
acuggaggucucugucaaa

SEQ ID NO: 1264861 - RNA, 19 nt, Artificial Sequence
  Description of Artificial Sequence: Synthetic oligonucleotide
  Antisense strand to SEQ ID NO: 1264860
uuugacagagaccuccagu

SEQ ID NO: 1264862 - RNA, 19 nt, Artificial Sequence
  Description of Artificial Sequence: Synthetic oligonucleotide
  Sense strand starting at position 2359 of SEQ ID NO: 1241339
cucuucucaguguggauaa

SEQ ID NO: 1264863 - RNA, 19 nt, Artificial Sequence
  Description of Artificial Sequence: Synthetic oligonucleotide
  Antisense strand to SEQ ID NO: 1264862
uuauccacacugagaagag

SEQ ID NO: 1264864 - RNA, 19 nt, Artificial Sequence
  Description of Artificial Sequence: Synthetic oligonucleotide
  Sense strand starting at position 2457 of SEQ ID NO: 1241339
agguuaaauucugagagag

SEQ ID NO: 1264865 - RNA, 19 nt, Artificial Sequence
  Description of Artificial Sequence: Synthetic oligonucleotide
  Antisense strand to SEQ ID NO: 1264864
cucucucagaauuuaaccu

SEQ ID NO: 1264866 - RNA, 19 nt, Artificial Sequence
  Description of Artificial Sequence: Synthetic oligonucleotide
  Sense strand starting at position 2513 of SEQ ID NO: 1241339
ucagaaaguaucuguguca

SEQ ID NO: 1264867 - RNA, 19 nt, Artificial Sequence
  Description of Artificial Sequence: Synthetic oligonucleotide
  Antisense strand to SEQ ID NO: 1264866
ugacacagauacuuucuga

SEQ ID NO: 1264868 - RNA, 19 nt, Artificial Sequence
  Description of Artificial Sequence: Synthetic oligonucleotide
  Sense strand starting at position 2514 of SEQ ID NO: 1241339
cagaaaguaucugugucaa

SEQ ID NO: 1264869 - RNA, 19 nt, Artificial Sequence
  Description of Artificial Sequence: Synthetic oligonucleotide
  Antisense strand to SEQ ID NO: 1264868
uugacacagauacuuucug

SEQ ID NO: 1264870 - RNA, 19 nt, Artificial Sequence
  Description of Artificial Sequence: Synthetic oligonucleotide
  Sense strand starting at position 2629 of SEQ ID NO: 1241339
uguaauaguugcuuaagua

SEQ ID NO: 1264871 - RNA, 19 nt, Artificial Sequence
  Description of Artificial Sequence: Synthetic oligonucleotide
  Antisense strand to SEQ ID NO: 1264870
uacuuaagcaacuauuaca

SEQ ID NO: 1264872 - RNA, 19 nt, Artificial Sequence
  Description of Artificial Sequence: Synthetic oligonucleotide
  Sense strand starting at position 2630 of SEQ ID NO: 1241339
guaauaguugcuuaaguaa

SEQ ID NO: 1264873 - RNA, 19 nt, Artificial Sequence
  Description of Artificial Sequence: Synthetic oligonucleotide
  Antisense strand to SEQ ID NO: 1264872
uuacuuaagcaacuauuac

SEQ ID NO: 1264874 - RNA, 19 nt, Artificial Sequence
  Description of Artificial Sequence: Synthetic oligonucleotide
  Sense strand starting at position 2633 of SEQ ID NO: 1241339
auaguugcuuaaguaagua

SEQ ID NO: 1264875 - RNA, 19 nt, Artificial Sequence
  Description of Artificial Sequence: Synthetic oligonucleotide
  Antisense strand to SEQ ID NO: 1264874
uacuuacuuaagcaacuau

SEQ ID NO: 1264876 - RNA, 19 nt, Artificial Sequence
  Description of Artificial Sequence: Synthetic oligonucleotide
  Sense strand starting at position 2758 of SEQ ID NO: 1241339
acagaacaaucguuaugau

SEQ ID NO: 1264877 - RNA, 19 nt, Artificial Sequence
  Description of Artificial Sequence: Synthetic oligonucleotide
  Antisense strand to SEQ ID NO: 1264876
aucauaacgauuguucugu

SEQ ID NO: 1264878 - RNA, 19 nt, Artificial Sequence
  Description of Artificial Sequence: Synthetic oligonucleotide
  Sense strand starting at position 2759 of SEQ ID NO: 1241339
cagaacaaucguuaugauc

SEQ ID NO: 1264879 - RNA, 19 nt, Artificial Sequence
  Description of Artificial Sequence: Synthetic oligonucleotide
  Antisense strand to SEQ ID NO: 1264878
gaucauaacgauuguucug

SEQ ID NO: 1264880 - RNA, 19 nt, Artificial Sequence
  Description of Artificial Sequence: Synthetic oligonucleotide
  Sense strand starting at position 2767 of SEQ ID NO: 1241339
ucguuaugaucuguuauac

SEQ ID NO: 1264881 - RNA, 19 nt, Artificial Sequence
  Description of Artificial Sequence: Synthetic oligonucleotide
  Antisense strand to SEQ ID NO: 1264880
guauaacagaucauaacga

SEQ ID NO: 1264882 - RNA, 19 nt, Artificial Sequence
  Description of Artificial Sequence: Synthetic oligonucleotide
  Sense strand starting at position 2824 of SEQ ID NO: 1241339
uauauagccucggucaaau

SEQ ID NO: 1264883 - RNA, 19 nt, Artificial Sequence
  Description of Artificial Sequence: Synthetic oligonucleotide
  Antisense strand to SEQ ID NO: 1264882
auuugaccgaggcuauaua

SEQ ID NO: 1264884 - RNA, 19 nt, Artificial Sequence
  Description of Artificial Sequence: Synthetic oligonucleotide
  Sense strand starting at position 2833 of SEQ ID NO: 1241339
ucggucaaauucuuaacca

SEQ ID NO: 1264885 - RNA, 19 nt, Artificial Sequence
  Description of Artificial Sequence: Synthetic oligonucleotide
  Antisense strand to SEQ ID NO: 1264884
ugguuaagaauuugaccga

SEQ ID NO: 1264886 - RNA, 19 nt, Artificial Sequence
  Description of Artificial Sequence: Synthetic oligonucleotide
  Sense strand starting at position 2962 of SEQ ID NO: 1241339
uugagagauuagcuagauc

SEQ ID NO: 1264887 - RNA, 19 nt, Artificial Sequence
  Description of Artificial Sequence: Synthetic oligonucleotide
  Antisense strand to SEQ ID NO: 1264886
gaucuagcuaaucucucaa

SEQ ID NO: 1264888 - RNA, 19 nt, Artificial Sequence
  Description of Artificial Sequence: Synthetic oligonucleotide
  Sense strand starting at position 2981 of SEQ ID NO: 1241339
aaaguuaaugaacgugaau

SEQ ID NO: 1264889 - RNA, 19 nt, Artificial Sequence
  Description of Artificial Sequence: Synthetic oligonucleotide
  Antisense strand to SEQ ID NO: 1264888
auucacguucauuaacuuu

SEQ ID NO: 1264890 - RNA, 19 nt, Artificial Sequence
  Description of Artificial Sequence: Synthetic oligonucleotide
  Sense strand starting at position 3033 of SEQ ID NO: 1241339
uagaaacugguuugaaauu

SEQ ID NO: 1264891 - RNA, 19 nt, Artificial Sequence
  Description of Artificial Sequence: Synthetic oligonucleotide
  Antisense strand to SEQ ID NO: 1264890
aauuucaaaccaguuucua

SEQ ID NO: 1264892 - RNA, 19 nt, Artificial Sequence
  Description of Artificial Sequence: Synthetic oligonucleotide
  Sense strand starting at position 3034 of SEQ ID NO: 1241339
agaaacugguuugaaauuu

SEQ ID NO: 1264893 - RNA, 19 nt, Artificial Sequence
  Description of Artificial Sequence: Synthetic oligonucleotide
  Antisense strand to SEQ ID NO: 1264892
aaauuucaaaccaguuucu

SEQ ID NO: 1264894 - RNA, 19 nt, Artificial Sequence
  Description of Artificial Sequence: Synthetic oligonucleotide
  Sense strand starting at position 3232 of SEQ ID NO: 1241339
gaaggcuuagcauaagcua

SEQ ID NO: 1264895 - RNA, 19 nt, Artificial Sequence
  Description of Artificial Sequence: Synthetic oligonucleotide
  Antisense strand to SEQ ID NO: 1264894
uagcuuaugcuaagccuuc

SEQ ID NO: 1264896 - RNA, 19 nt, Artificial Sequence
  Description of Artificial Sequence: Synthetic oligonucleotide
  Sense strand starting at position 3299 of SEQ ID NO: 1241339
cugacugucagccauggaa

SEQ ID NO: 1264897 - RNA, 19 nt, Artificial Sequence
  Description of Artificial Sequence: Synthetic oligonucleotide
  Antisense strand to SEQ ID NO: 1264896
uuccauggcugacagucag

SEQ ID NO: 1264898 - RNA, 19 nt, Artificial Sequence
  Description of Artificial Sequence: Synthetic oligonucleotide
  Sense strand starting at position 3334 of SEQ ID NO: 1241339
uuaauuguucucguuguuu

SEQ ID NO: 1264899 - RNA, 19 nt, Artificial Sequence
  Description of Artificial Sequence: Synthetic oligonucleotide
  Antisense strand to SEQ ID NO: 1264898
aaacaacgagaacaauuaa

SEQ ID NO: 1264900 - RNA, 19 nt, Artificial Sequence
  Description of Artificial Sequence: Synthetic oligonucleotide
  Sense strand starting at position 3424 of SEQ ID NO: 1241339
uguuauugccaagagcaag

SEQ ID NO: 1264901 - RNA, 19 nt, Artificial Sequence
  Description of Artificial Sequence: Synthetic oligonucleotide
  Antisense strand to SEQ ID NO: 1264900
cuugcucuuggcaauaaca

SEQ ID NO: 1264902 - RNA, 19 nt, Artificial Sequence
  Description of Artificial Sequence: Synthetic oligonucleotide
  Sense strand starting at position 3769 of SEQ ID NO: 1241339
ugagccagcuccuuaaaca

SEQ ID NO: 1264903 - RNA, 19 nt, Artificial Sequence
  Description of Artificial Sequence: Synthetic oligonucleotide
  Antisense strand to SEQ ID NO: 1264902
uguuuaaggagcuggcuca

SEQ ID NO: 1264904 - RNA, 19 nt, Artificial Sequence
  Description of Artificial Sequence: Synthetic oligonucleotide
  Sense strand starting at position 3866 of SEQ ID NO: 1241339
ugaugaaacuagccagacu

SEQ ID NO: 1264905 - RNA, 19 nt, Artificial Sequence
  Description of Artificial Sequence: Synthetic oligonucleotide
  Antisense strand to SEQ ID NO: 1264904
agucuggcuaguuucauca

SEQ ID NO: 1264906 - RNA, 19 nt, Artificial Sequence
  Description of Artificial Sequence: Synthetic oligonucleotide
  Sense strand starting at position 3901 of SEQ ID NO: 1241339
ugccuccauggcugaaauu

SEQ ID NO: 1264907 - RNA, 19 nt, Artificial Sequence
  Description of Artificial Sequence: Synthetic oligonucleotide
  Antisense strand to SEQ ID NO: 1264906
aauuucagccauggaggca

SEQ ID NO: 1264908 - RNA, 19 nt, Artificial Sequence
  Description of Artificial Sequence: Synthetic oligonucleotide
  Sense strand starting at position 3911 of SEQ ID NO: 1241339
gcugaaauuucugucuucu

SEQ ID NO: 1264909 - RNA, 19 nt, Artificial Sequence
  Description of Artificial Sequence: Synthetic oligonucleotide
  Antisense strand to SEQ ID NO: 1264908
agaagacagaaauuucagc

SEQ ID NO: 1264910 - RNA, 19 nt, Artificial Sequence
  Description of Artificial Sequence: Synthetic oligonucleotide
  Sense strand starting at position 3922 of SEQ ID NO: 1241339
ugucuucuccacugggaua

SEQ ID NO: 1264911 - RNA, 19 nt, Artificial Sequence
  Description of Artificial Sequence: Synthetic oligonucleotide
  Antisense strand to SEQ ID NO: 1264910
uaucccaguggagaagaca

SEQ ID NO: 1264912 - RNA, 19 nt, Artificial Sequence
  Description of Artificial Sequence: Synthetic oligonucleotide
  Sense strand starting at position 3924 of SEQ ID NO: 1241339
ucuucuccacugggauaaa

SEQ ID NO: 1264913 - RNA, 19 nt, Artificial Sequence
  Description of Artificial Sequence: Synthetic oligonucleotide
  Antisense strand to SEQ ID NO: 1264912
uuuaucccaguggagaaga

SEQ ID NO: 1264914 - RNA, 19 nt, Artificial Sequence
  Description of Artificial Sequence: Synthetic oligonucleotide
  Sense strand starting at position 3937 of SEQ ID NO: 1241339
gauaaagcagcauauaguu

SEQ ID NO: 1264915 - RNA, 19 nt, Artificial Sequence
  Description of Artificial Sequence: Synthetic oligonucleotide
  Antisense strand to SEQ ID NO: 1264914
aacuauaugcugcuuuauc

SEQ ID NO: 1264916 - RNA, 19 nt, Artificial Sequence
  Description of Artificial Sequence: Synthetic oligonucleotide
  Sense strand starting at position 139 of SEQ ID NO: 1241340
agggucaccuagcuaucaa

SEQ ID NO: 1264917 - RNA, 19 nt, Artificial Sequence
  Description of Artificial Sequence: Synthetic oligonucleotide
  Antisense strand to SEQ ID NO: 1264916
uugauagcuaggugacccu

SEQ ID NO: 1264918 - RNA, 19 nt, Artificial Sequence
  Description of Artificial Sequence: Synthetic oligonucleotide
  Sense strand starting at position 140 of SEQ ID NO: 1241340
gggucaccuagcuaucaag

SEQ ID NO: 1264919 - RNA, 19 nt, Artificial Sequence
  Description of Artificial Sequence: Synthetic oligonucleotide
  Antisense strand to SEQ ID NO: 1264918
cuugauagcuaggugaccc

SEQ ID NO: 1264920 - RNA, 19 nt, Artificial Sequence
  Description of Artificial Sequence: Synthetic oligonucleotide
  Sense strand starting at position 198 of SEQ ID NO: 1241340
guuccaugucuuuaaucaa

SEQ ID NO: 1264921 - RNA, 19 nt, Artificial Sequence
  Description of Artificial Sequence: Synthetic oligonucleotide
  Antisense strand to SEQ ID NO: 1264920
uugauuaaagacauggaac

SEQ ID NO: 1264922 - RNA, 19 nt, Artificial Sequence
  Description of Artificial Sequence: Synthetic oligonucleotide
  Sense strand starting at position 288 of SEQ ID NO: 1241340
guuaaauaugcagacuguu

SEQ ID NO: 1264923 - RNA, 19 nt, Artificial Sequence
  Description of Artificial Sequence: Synthetic oligonucleotide
  Antisense strand to SEQ ID NO: 1264922
aacagucugcauauuuaac

SEQ ID NO: 1264924 - RNA, 19 nt, Artificial Sequence
  Description of Artificial Sequence: Synthetic oligonucleotide
  Sense strand starting at position 356 of SEQ ID NO: 1241340
aggaaucagcauuguugaa

SEQ ID NO: 1264925 - RNA, 19 nt, Artificial Sequence
  Description of Artificial Sequence: Synthetic oligonucleotide
  Antisense strand to SEQ ID NO: 1264924
uucaacaaugcugauuccu

SEQ ID NO: 1264926 - RNA, 19 nt, Artificial Sequence
  Description of Artificial Sequence: Synthetic oligonucleotide
  Sense strand starting at position 358 of SEQ ID NO: 1241340
gaaucagcauuguugaaca

SEQ ID NO: 1264927 - RNA, 19 nt, Artificial Sequence
  Description of Artificial Sequence: Synthetic oligonucleotide
  Antisense strand to SEQ ID NO: 1264926
uguucaacaaugcugauuc

SEQ ID NO: 1264928 - RNA, 19 nt, Artificial Sequence
  Description of Artificial Sequence: Synthetic oligonucleotide
  Sense strand starting at position 360 of SEQ ID NO: 1241340
aucagcauuguugaacaaa

SEQ ID NO: 1264929 - RNA, 19 nt, Artificial Sequence
  Description of Artificial Sequence: Synthetic oligonucleotide
  Antisense strand to SEQ ID NO: 1264928
uuuguucaacaaugcugau

SEQ ID NO: 1264930 - RNA, 19 nt, Artificial Sequence
  Description of Artificial Sequence: Synthetic oligonucleotide
  Sense strand starting at position 384 of SEQ ID NO: 1241340
caagguaguguauacacaa

SEQ ID NO: 1264931 - RNA, 19 nt, Artificial Sequence
  Description of Artificial Sequence: Synthetic oligonucleotide
  Antisense strand to SEQ ID NO: 1264930
uuguguauacacuaccuug

SEQ ID NO: 1264932 - RNA, 19 nt, Artificial Sequence
  Description of Artificial Sequence: Synthetic oligonucleotide
  Sense strand starting at position 479 of SEQ ID NO: 1241340
uuaggauauagcgaucaau

SEQ ID NO: 1264933 - RNA, 19 nt, Artificial Sequence
  Description of Artificial Sequence: Synthetic oligonucleotide
  Antisense strand to SEQ ID NO: 1264932
auugaucgcuauauccuaa

SEQ ID NO: 1264934 - RNA, 19 nt, Artificial Sequence
  Description of Artificial Sequence: Synthetic oligonucleotide
  Sense strand starting at position 550 of SEQ ID NO: 1241340
agagaaguauagccaaugu

SEQ ID NO: 1264935 - RNA, 19 nt, Artificial Sequence
  Description of Artificial Sequence: Synthetic oligonucleotide
  Antisense strand to SEQ ID NO: 1264934
acauuggcuauacuucucu

SEQ ID NO: 1264936 - RNA, 19 nt, Artificial Sequence
  Description of Artificial Sequence: Synthetic oligonucleotide
  Sense strand starting at position 623 of SEQ ID NO: 1241340
ccgaguauuuaagucuauu

SEQ ID NO: 1264937 - RNA, 19 nt, Artificial Sequence
  Description of Artificial Sequence: Synthetic oligonucleotide
  Antisense strand to SEQ ID NO: 1264936
aauagacuuaaauacucgg

SEQ ID NO: 1264938 - RNA, 19 nt, Artificial Sequence
  Description of Artificial Sequence: Synthetic oligonucleotide
  Sense strand starting at position 944 of SEQ ID NO: 1241340
acuuuacuacuggguuaga

SEQ ID NO: 1264939 - RNA, 19 nt, Artificial Sequence
  Description of Artificial Sequence: Synthetic oligonucleotide
  Antisense strand to SEQ ID NO: 1264938
ucuaacccaguaguaaagu

SEQ ID NO: 1264940 - RNA, 19 nt, Artificial Sequence
  Description of Artificial Sequence: Synthetic oligonucleotide
  Sense strand starting at position 1048 of SEQ ID NO: 1241340
aaagcauuaguggauuacu

SEQ ID NO: 1264941 - RNA, 19 nt, Artificial Sequence
  Description of Artificial Sequence: Synthetic oligonucleotide
  Antisense strand to SEQ ID NO: 1264940
aguaauccacuaaugcuuu

SEQ ID NO: 1264942 - RNA, 19 nt, Artificial Sequence
  Description of Artificial Sequence: Synthetic oligonucleotide
  Sense strand starting at position 1089 of SEQ ID NO: 1241340
ccaguuggccaaugaauga

SEQ ID NO: 1264943 - RNA, 19 nt, Artificial Sequence
  Description of Artificial Sequence: Synthetic oligonucleotide
  Antisense strand to SEQ ID NO: 1264942
ucauucauuggccaacugg

SEQ ID NO: 1264944 - RNA, 19 nt, Artificial Sequence
  Description of Artificial Sequence: Synthetic oligonucleotide
  Sense strand starting at position 1239 of SEQ ID NO: 1241340
aaaugucaaccgugaaaga

SEQ ID NO: 1264945 - RNA, 19 nt, Artificial Sequence
  Description of Artificial Sequence: Synthetic oligonucleotide
  Antisense strand to SEQ ID NO: 1264944
ucuuucacgguugacauuu

SEQ ID NO: 1264946 - RNA, 19 nt, Artificial Sequence
  Description of Artificial Sequence: Synthetic oligonucleotide
  Sense strand starting at position 1468 of SEQ ID NO: 1241340
guggcaacgccuucacagu

SEQ ID NO: 1264947 - RNA, 19 nt, Artificial Sequence
  Description of Artificial Sequence: Synthetic oligonucleotide
  Antisense strand to SEQ ID NO: 1264946
acugugaaggcguugccac

SEQ ID NO: 1264948 - RNA, 19 nt, Artificial Sequence
  Description of Artificial Sequence: Synthetic oligonucleotide
  Sense strand starting at position 1520 of SEQ ID NO: 1241340
agccgaauugguggaaaua

SEQ ID NO: 1264949 - RNA, 19 nt, Artificial Sequence
  Description of Artificial Sequence: Synthetic oligonucleotide
  Antisense strand to SEQ ID NO: 1264948
uauuuccaccaauucggcu

SEQ ID NO: 1264950 - RNA, 19 nt, Artificial Sequence
  Description of Artificial Sequence: Synthetic oligonucleotide
  Sense strand starting at position 1521 of SEQ ID NO: 1241340
gccgaauugguggaaauaa

SEQ ID NO: 1264951 - RNA, 19 nt, Artificial Sequence
  Description of Artificial Sequence: Synthetic oligonucleotide
  Antisense strand to SEQ ID NO: 1264950
uuauuuccaccaauucggc

SEQ ID NO: 1264952 - RNA, 19 nt, Artificial Sequence
  Description of Artificial Sequence: Synthetic oligonucleotide
  Sense strand starting at position 2234 of SEQ ID NO: 1241340
uggacagagaugugcugaa

SEQ ID NO: 1264953 - RNA, 19 nt, Artificial Sequence
  Description of Artificial Sequence: Synthetic oligonucleotide
  Antisense strand to SEQ ID NO: 1264952
uucagcacaucucugucca

SEQ ID NO: 1264954 - RNA, 19 nt, Artificial Sequence
  Description of Artificial Sequence: Synthetic oligonucleotide
  Sense strand starting at position 2439 of SEQ ID NO: 1241340
uauuucuguccuggguuua

SEQ ID NO: 1264955 - RNA, 19 nt, Artificial Sequence
  Description of Artificial Sequence: Synthetic oligonucleotide
  Antisense strand to SEQ ID NO: 1264954
uaaacccaggacagaaaua

SEQ ID NO: 1264956 - RNA, 19 nt, Artificial Sequence
  Description of Artificial Sequence: Synthetic oligonucleotide
  Sense strand starting at position 2503 of SEQ ID NO: 1241340
aaauaaguggucggaccaa

SEQ ID NO: 1264957 - RNA, 19 nt, Artificial Sequence
  Description of Artificial Sequence: Synthetic oligonucleotide
  Antisense strand to SEQ ID NO: 1264956
uugguccgaccacuuauuu

SEQ ID NO: 1264958 - RNA, 19 nt, Artificial Sequence
  Description of Artificial Sequence: Synthetic oligonucleotide
  Sense strand starting at position 2515 of SEQ ID NO: 1241340
ggaccaauuccuggucuca

SEQ ID NO: 1264959 - RNA, 19 nt, Artificial Sequence
  Description of Artificial Sequence: Synthetic oligonucleotide
  Antisense strand to SEQ ID NO: 1264958
ugagaccaggaauuggucc

SEQ ID NO: 1264960 - RNA, 19 nt, Artificial Sequence
  Description of Artificial Sequence: Synthetic oligonucleotide
  Sense strand starting at position 2588 of SEQ ID NO: 1241340
aagggcucacuuuacgaga

SEQ ID NO: 1264961 - RNA, 19 nt, Artificial Sequence
  Description of Artificial Sequence: Synthetic oligonucleotide
  Antisense strand to SEQ ID NO: 1264960
ucucguaaagugagcccuu

SEQ ID NO: 1264962 - RNA, 19 nt, Artificial Sequence
  Description of Artificial Sequence: Synthetic oligonucleotide
  Sense strand starting at position 2593 of SEQ ID NO: 1241340
cucacuuuacgagauuauu

SEQ ID NO: 1264963 - RNA, 19 nt, Artificial Sequence
  Description of Artificial Sequence: Synthetic oligonucleotide
  Antisense strand to SEQ ID NO: 1264962
aauaaucucguaaagugag

SEQ ID NO: 1264964 - RNA, 19 nt, Artificial Sequence
  Description of Artificial Sequence: Synthetic oligonucleotide
  Sense strand starting at position 2652 of SEQ ID NO: 1241340
uccuuuaucgaggaccaca

SEQ ID NO: 1264965 - RNA, 19 nt, Artificial Sequence
  Description of Artificial Sequence: Synthetic oligonucleotide
  Antisense strand to SEQ ID NO: 1264964
ugugguccucgauaaagga

SEQ ID NO: 1264966 - RNA, 19 nt, Artificial Sequence
  Description of Artificial Sequence: Synthetic oligonucleotide
  Sense strand starting at position 2705 of SEQ ID NO: 1241340
aagagacaucugggagcuu

SEQ ID NO: 1264967 - RNA, 19 nt, Artificial Sequence
  Description of Artificial Sequence: Synthetic oligonucleotide
  Antisense strand to SEQ ID NO: 1264966
aagcucccagaugucucuu

SEQ ID NO: 1264968 - RNA, 19 nt, Artificial Sequence
  Description of Artificial Sequence: Synthetic oligonucleotide
  Sense strand starting at position 2799 of SEQ ID NO: 1241340
ugauguugccaccagauca

SEQ ID NO: 1264969 - RNA, 19 nt, Artificial Sequence
  Description of Artificial Sequence: Synthetic oligonucleotide
  Antisense strand to SEQ ID NO: 1264968
ugaucugguggcaacauca

SEQ ID NO: 1264970 - RNA, 19 nt, Artificial Sequence
  Description of Artificial Sequence: Synthetic oligonucleotide
  Sense strand starting at position 3228 of SEQ ID NO: 1241340
uugaaagguuuacuagauu

SEQ ID NO: 1264971 - RNA, 19 nt, Artificial Sequence
  Description of Artificial Sequence: Synthetic oligonucleotide
  Antisense strand to SEQ ID NO: 1264970
aaucuaguaaaccuuucaa

SEQ ID NO: 1264972 - RNA, 19 nt, Artificial Sequence
  Description of Artificial Sequence: Synthetic oligonucleotide
  Sense strand starting at position 3240 of SEQ ID NO: 1241340
cuagauuucugagaaccua

SEQ ID NO: 1264973 - RNA, 19 nt, Artificial Sequence
  Description of Artificial Sequence: Synthetic oligonucleotide
  Antisense strand to SEQ ID NO: 1264972
uagguucucagaaaucuag

SEQ ID NO: 1264974 - RNA, 19 nt, Artificial Sequence
  Description of Artificial Sequence: Synthetic oligonucleotide
  Sense strand starting at position 3252 of SEQ ID NO: 1241340
gaaccuaugcuacagguaa

SEQ ID NO: 1264975 - RNA, 19 nt, Artificial Sequence
  Description of Artificial Sequence: Synthetic oligonucleotide
  Antisense strand to SEQ ID NO: 1264974
uuaccuguagcauagguuc

SEQ ID NO: 1264976 - RNA, 19 nt, Artificial Sequence
  Description of Artificial Sequence: Synthetic oligonucleotide
  Sense strand starting at position 3335 of SEQ ID NO: 1241340
auaaucugugucuacaaau

SEQ ID NO: 1264977 - RNA, 19 nt, Artificial Sequence
  Description of Artificial Sequence: Synthetic oligonucleotide
  Antisense strand to SEQ ID NO: 1264976
auuuguagacacagauuau

SEQ ID NO: 1264978 - RNA, 19 nt, Artificial Sequence
  Description of Artificial Sequence: Synthetic oligonucleotide
  Sense strand starting at position 3361 of SEQ ID NO: 1241340
ggguuaaauacauguaagu

SEQ ID NO: 1264979 - RNA, 19 nt, Artificial Sequence
  Description of Artificial Sequence: Synthetic oligonucleotide
  Antisense strand to SEQ ID NO: 1264978
acuuacauguauuuaaccc

SEQ ID NO: 1264980 - RNA, 19 nt, Artificial Sequence
  Description of Artificial Sequence: Synthetic oligonucleotide
  Sense strand starting at position 3442 of SEQ ID NO: 1241340
cggguacugaaaugaaaua

SEQ ID NO: 1264981 - RNA, 19 nt, Artificial Sequence
  Description of Artificial Sequence: Synthetic oligonucleotide
  Antisense strand to SEQ ID NO: 1264980
uauuucauuucaguacccg

SEQ ID NO: 1264982 - RNA, 19 nt, Artificial Sequence
  Description of Artificial Sequence: Synthetic oligonucleotide
  Sense strand starting at position 3484 of SEQ ID NO: 1241340
uaguauccuuguuugaaag

SEQ ID NO: 1264983 - RNA, 19 nt, Artificial Sequence
  Description of Artificial Sequence: Synthetic oligonucleotide
  Antisense strand to SEQ ID NO: 1264982
cuuucaaacaaggauacua

SEQ ID NO: 1264984 - RNA, 19 nt, Artificial Sequence
  Description of Artificial Sequence: Synthetic oligonucleotide
  Sense strand starting at position 3510 of SEQ ID NO: 1241340
guguauaugguauacaaag

SEQ ID NO: 1264985 - RNA, 19 nt, Artificial Sequence
  Description of Artificial Sequence: Synthetic oligonucleotide
  Antisense strand to SEQ ID NO: 1264984
cuuuguauaccauauacac

SEQ ID NO: 1264986 - RNA, 19 nt, Artificial Sequence
  Description of Artificial Sequence: Synthetic oligonucleotide
  Sense strand starting at position 3512 of SEQ ID NO: 1241340
guauaugguauacaaaguu

SEQ ID NO: 1264987 - RNA, 19 nt, Artificial Sequence
  Description of Artificial Sequence: Synthetic oligonucleotide
  Antisense strand to SEQ ID NO: 1264986
aacuuuguauaccauauac

SEQ ID NO: 1264988 - RNA, 19 nt, Artificial Sequence
  Description of Artificial Sequence: Synthetic oligonucleotide
  Sense strand starting at position 3536 of SEQ ID NO: 1241340
auggauaccuaagcuguaa

SEQ ID NO: 1264989 - RNA, 19 nt, Artificial Sequence
  Description of Artificial Sequence: Synthetic oligonucleotide
  Antisense strand to SEQ ID NO: 1264988
uuacagcuuagguauccau

SEQ ID NO: 1264990 - RNA, 19 nt, Artificial Sequence
  Description of Artificial Sequence: Synthetic oligonucleotide
  Sense strand starting at position 3613 of SEQ ID NO: 1241340
ucacuuuaucaccaguuga

SEQ ID NO: 1264991 - RNA, 19 nt, Artificial Sequence
  Description of Artificial Sequence: Synthetic oligonucleotide
  Antisense strand to SEQ ID NO: 1264990
ucaacuggugauaaaguga

SEQ ID NO: 1264992 - RNA, 19 nt, Artificial Sequence
  Description of Artificial Sequence: Synthetic oligonucleotide
  Sense strand starting at position 3734 of SEQ ID NO: 1241340
gcguauaaauuucuaaugu

SEQ ID NO: 1264993 - RNA, 19 nt, Artificial Sequence
  Description of Artificial Sequence: Synthetic oligonucleotide
  Antisense strand to SEQ ID NO: 1264992
acauuagaaauuuauacgc

SEQ ID NO: 1264994 - RNA, 19 nt, Artificial Sequence
  Description of Artificial Sequence: Synthetic oligonucleotide
  Sense strand starting at position 3912 of SEQ ID NO: 1241340
ggcagaaacuauguuauau

SEQ ID NO: 1264995 - RNA, 19 nt, Artificial Sequence
  Description of Artificial Sequence: Synthetic oligonucleotide
  Antisense strand to SEQ ID NO: 1264994
auauaacauaguuucugcc

SEQ ID NO: 1264996 - RNA, 19 nt, Artificial Sequence
  Description of Artificial Sequence: Synthetic oligonucleotide
  Sense strand starting at position 359 of SEQ ID NO: 1241341
gugguaugcaaauauaaug

SEQ ID NO: 1264997 - RNA, 19 nt, Artificial Sequence
  Description of Artificial Sequence: Synthetic oligonucleotide
  Antisense strand to SEQ ID NO: 1264996
cauuauauuugcauaccac

SEQ ID NO: 1264998 - RNA, 19 nt, Artificial Sequence
  Description of Artificial Sequence: Synthetic oligonucleotide
  Sense strand starting at position 457 of SEQ ID NO: 1241341
ucagauuagguaggaguuu

SEQ ID NO: 1264999 - RNA, 19 nt, Artificial Sequence
  Description of Artificial Sequence: Synthetic oligonucleotide
  Antisense strand to SEQ ID NO: 1264998
aaacuccuaccuaaucuga

SEQ ID NO: 1265000 - RNA, 19 nt, Artificial Sequence
  Description of Artificial Sequence: Synthetic oligonucleotide
  Sense strand starting at position 469 of SEQ ID NO: 1241341
ggaguuuccuacuuugaau

SEQ ID NO: 1265001 - RNA, 19 nt, Artificial Sequence
  Description of Artificial Sequence: Synthetic oligonucleotide
  Antisense strand to SEQ ID NO: 1265000
auucaaaguaggaaacucc

SEQ ID NO: 1265002 - RNA, 19 nt, Artificial Sequence
  Description of Artificial Sequence: Synthetic oligonucleotide
  Sense strand starting at position 489 of SEQ ID NO: 1241341
acgaaaugauucuucucau

SEQ ID NO: 1265003 - RNA, 19 nt, Artificial Sequence
  Description of Artificial Sequence: Synthetic oligonucleotide
  Antisense strand to SEQ ID NO: 1265002
augagaagaaucauuucgu

SEQ ID NO: 1265004 - RNA, 19 nt, Artificial Sequence
  Description of Artificial Sequence: Synthetic oligonucleotide
  Sense strand starting at position 490 of SEQ ID NO: 1241341
cgaaaugauucuucucauc

SEQ ID NO: 1265005 - RNA, 19 nt, Artificial Sequence
  Description of Artificial Sequence: Synthetic oligonucleotide
  Antisense strand to SEQ ID NO: 1265004
gaugagaagaaucauuucg

SEQ ID NO: 1265006 - RNA, 19 nt, Artificial Sequence
  Description of Artificial Sequence: Synthetic oligonucleotide
  Sense strand starting at position 571 of SEQ ID NO: 1241341
gcucuuacccuagauauag

SEQ ID NO: 1265007 - RNA, 19 nt, Artificial Sequence
  Description of Artificial Sequence: Synthetic oligonucleotide
  Antisense strand to SEQ ID NO: 1265006
cuauaucuaggguaagagc

SEQ ID NO: 1265008 - RNA, 19 nt, Artificial Sequence
  Description of Artificial Sequence: Synthetic oligonucleotide
  Sense strand starting at position 619 of SEQ ID NO: 1241341
ggccucacuccaugaaaua

SEQ ID NO: 1265009 - RNA, 19 nt, Artificial Sequence
  Description of Artificial Sequence: Synthetic oligonucleotide
  Antisense strand to SEQ ID NO: 1265008
uauuucauggagugaggcc

SEQ ID NO: 1265010 - RNA, 19 nt, Artificial Sequence
  Description of Artificial Sequence: Synthetic oligonucleotide
  Sense strand starting at position 842 of SEQ ID NO: 1241341
auaucuuguggucacacua

SEQ ID NO: 1265011 - RNA, 19 nt, Artificial Sequence
  Description of Artificial Sequence: Synthetic oligonucleotide
  Antisense strand to SEQ ID NO: 1265010
uagugugaccacaagauau

SEQ ID NO: 1265012 - RNA, 19 nt, Artificial Sequence
  Description of Artificial Sequence: Synthetic oligonucleotide
  Sense strand starting at position 895 of SEQ ID NO: 1241341
uuguucugaguugaaugua

SEQ ID NO: 1265013 - RNA, 19 nt, Artificial Sequence
  Description of Artificial Sequence: Synthetic oligonucleotide
  Antisense strand to SEQ ID NO: 1265012
uacauucaacucagaacaa

SEQ ID NO: 1265014 - RNA, 19 nt, Artificial Sequence
  Description of Artificial Sequence: Synthetic oligonucleotide
  Sense strand starting at position 904 of SEQ ID NO: 1241341
guugaauguaaggaugcaa

SEQ ID NO: 1265015 - RNA, 19 nt, Artificial Sequence
  Description of Artificial Sequence: Synthetic oligonucleotide
  Antisense strand to SEQ ID NO: 1265014
uugcauccuuacauucaac

SEQ ID NO: 1265016 - RNA, 19 nt, Artificial Sequence
  Description of Artificial Sequence: Synthetic oligonucleotide
  Sense strand starting at position 977 of SEQ ID NO: 1241341
acauuagcccuagauguaa

SEQ ID NO: 1265017 - RNA, 19 nt, Artificial Sequence
  Description of Artificial Sequence: Synthetic oligonucleotide
  Antisense strand to SEQ ID NO: 1265016
uuacaucuagggcuaaugu

SEQ ID NO: 1265018 - RNA, 19 nt, Artificial Sequence
  Description of Artificial Sequence: Synthetic oligonucleotide
  Sense strand starting at position 1279 of SEQ ID NO: 1241341
gggcguucucuuucgcaca

SEQ ID NO: 1265019 - RNA, 19 nt, Artificial Sequence
  Description of Artificial Sequence: Synthetic oligonucleotide
  Antisense strand to SEQ ID NO: 1265018
ugugcgaaagagaacgccc

SEQ ID NO: 1265020 - RNA, 19 nt, Artificial Sequence
  Description of Artificial Sequence: Synthetic oligonucleotide
  Sense strand starting at position 1749 of SEQ ID NO: 1241341
cggagucgucgagcacgua

SEQ ID NO: 1265021 - RNA, 19 nt, Artificial Sequence
  Description of Artificial Sequence: Synthetic oligonucleotide
  Antisense strand to SEQ ID NO: 1265020
uacgugcucgacgacuccg

SEQ ID NO: 1265022 - RNA, 19 nt, Artificial Sequence
  Description of Artificial Sequence: Synthetic oligonucleotide
  Sense strand starting at position 2285 of SEQ ID NO: 1241341
auugucaucuugguggaau

SEQ ID NO: 1265023 - RNA, 19 nt, Artificial Sequence
  Description of Artificial Sequence: Synthetic oligonucleotide
  Antisense strand to SEQ ID NO: 1265022
auuccaccaagaugacaau

SEQ ID NO: 1265024 - RNA, 19 nt, Artificial Sequence
  Description of Artificial Sequence: Synthetic oligonucleotide
  Sense strand starting at position 2433 of SEQ ID NO: 1241341
ugagaagguucuccagucu

SEQ ID NO: 1265025 - RNA, 19 nt, Artificial Sequence
  Description of Artificial Sequence: Synthetic oligonucleotide
  Antisense strand to SEQ ID NO: 1265024
agacuggagaaccuucuca

SEQ ID NO: 1265026 - RNA, 19 nt, Artificial Sequence
  Description of Artificial Sequence: Synthetic oligonucleotide
  Sense strand starting at position 2480 of SEQ ID NO: 1241341
uuagccuugaaggaguuaa

SEQ ID NO: 1265027 - RNA, 19 nt, Artificial Sequence
  Description of Artificial Sequence: Synthetic oligonucleotide
  Antisense strand to SEQ ID NO: 1265026
uuaacuccuucaaggcuaa

SEQ ID NO: 1265028 - RNA, 19 nt, Artificial Sequence
  Description of Artificial Sequence: Synthetic oligonucleotide
  Sense strand starting at position 2577 of SEQ ID NO: 1241341
gaucacugucauggauauu

SEQ ID NO: 1265029 - RNA, 19 nt, Artificial Sequence
  Description of Artificial Sequence: Synthetic oligonucleotide
  Antisense strand to SEQ ID NO: 1265028
aauauccaugacagugauc

SEQ ID NO: 1265030 - RNA, 19 nt, Artificial Sequence
  Description of Artificial Sequence: Synthetic oligonucleotide
  Sense strand starting at position 2588 of SEQ ID NO: 1241341
uggauauuaugugucuuaa

SEQ ID NO: 1265031 - RNA, 19 nt, Artificial Sequence
  Description of Artificial Sequence: Synthetic oligonucleotide
  Antisense strand to SEQ ID NO: 1265030
uuaagacacauaauaucca

SEQ ID NO: 1265032 - RNA, 19 nt, Artificial Sequence
  Description of Artificial Sequence: Synthetic oligonucleotide
  Sense strand starting at position 2676 of SEQ ID NO: 1241341
gaaaguugaagucgaggga

SEQ ID NO: 1265033 - RNA, 19 nt, Artificial Sequence
  Description of Artificial Sequence: Synthetic oligonucleotide
  Antisense strand to SEQ ID NO: 1265032
ucccucgacuucaacuuuc

SEQ ID NO: 1265034 - RNA, 19 nt, Artificial Sequence
  Description of Artificial Sequence: Synthetic oligonucleotide
  Sense strand starting at position 2679 of SEQ ID NO: 1241341
aguugaagucgagggaaau

SEQ ID NO: 1265035 - RNA, 19 nt, Artificial Sequence
  Description of Artificial Sequence: Synthetic oligonucleotide
  Antisense strand to SEQ ID NO: 1265034
auuucccucgacuucaacu

SEQ ID NO: 1265036 - RNA, 19 nt, Artificial Sequence
  Description of Artificial Sequence: Synthetic oligonucleotide
  Sense strand starting at position 2680 of SEQ ID NO: 1241341
guugaagucgagggaaauc

SEQ ID NO: 1265037 - RNA, 19 nt, Artificial Sequence
  Description of Artificial Sequence: Synthetic oligonucleotide
  Antisense strand to SEQ ID NO: 1265036
gauuucccucgacuucaac

SEQ ID NO: 1265038 - RNA, 19 nt, Artificial Sequence
  Description of Artificial Sequence: Synthetic oligonucleotide
  Sense strand starting at position 2805 of SEQ ID NO: 1241341
auaagcaauuggcucuuaa

SEQ ID NO: 1265039 - RNA, 19 nt, Artificial Sequence
  Description of Artificial Sequence: Synthetic oligonucleotide
  Antisense strand to SEQ ID NO: 1265038
uuaagagccaauugcuuau

SEQ ID NO: 1265040 - RNA, 19 nt, Artificial Sequence
  Description of Artificial Sequence: Synthetic oligonucleotide
  Sense strand starting at position 2877 of SEQ ID NO: 1241341
uaaacauuugugugguugu

SEQ ID NO: 1265041 - RNA, 19 nt, Artificial Sequence
  Description of Artificial Sequence: Synthetic oligonucleotide
  Antisense strand to SEQ ID NO: 1265040
acaaccacacaaauguuua

SEQ ID NO: 1265042 - RNA, 19 nt, Artificial Sequence
  Description of Artificial Sequence: Synthetic oligonucleotide
  Sense strand starting at position 2956 of SEQ ID NO: 1241341
cagggacgaaggugaaauu

SEQ ID NO: 1265043 - RNA, 19 nt, Artificial Sequence
  Description of Artificial Sequence: Synthetic oligonucleotide
  Antisense strand to SEQ ID NO: 1265042
aauuucaccuucgucccug

SEQ ID NO: 1265044 - RNA, 19 nt, Artificial Sequence
  Description of Artificial Sequence: Synthetic oligonucleotide
  Sense strand starting at position 3011 of SEQ ID NO: 1241341
gucaguugaagugauucca

SEQ ID NO: 1265045 - RNA, 19 nt, Artificial Sequence
  Description of Artificial Sequence: Synthetic oligonucleotide
  Antisense strand to SEQ ID NO: 1265044
uggaaucacuucaacugac

SEQ ID NO: 1265046 - RNA, 19 nt, Artificial Sequence
  Description of Artificial Sequence: Synthetic oligonucleotide
  Sense strand starting at position 3040 of SEQ ID NO: 1241341
ucuaaauugguaggaaagu

SEQ ID NO: 1265047 - RNA, 19 nt, Artificial Sequence
  Description of Artificial Sequence: Synthetic oligonucleotide
  Antisense strand to SEQ ID NO: 1265046
acuuuccuaccaauuuaga

SEQ ID NO: 1265048 - RNA, 19 nt, Artificial Sequence
  Description of Artificial Sequence: Synthetic oligonucleotide
  Sense strand starting at position 3096 of SEQ ID NO: 1241341
uccugagauuucugauuuc

SEQ ID NO: 1265049 - RNA, 19 nt, Artificial Sequence
  Description of Artificial Sequence: Synthetic oligonucleotide
  Antisense strand to SEQ ID NO: 1265048
gaaaucagaaaucucagga

SEQ ID NO: 1265050 - RNA, 19 nt, Artificial Sequence
  Description of Artificial Sequence: Synthetic oligonucleotide
  Sense strand starting at position 3105 of SEQ ID NO: 1241341
uucugauuuccuuguuauu

SEQ ID NO: 1265051 - RNA, 19 nt, Artificial Sequence
  Description of Artificial Sequence: Synthetic oligonucleotide
  Antisense strand to SEQ ID NO: 1265050
aauaacaaggaaaucagaa

SEQ ID NO: 1265052 - RNA, 19 nt, Artificial Sequence
  Description of Artificial Sequence: Synthetic oligonucleotide
  Sense strand starting at position 3180 of SEQ ID NO: 1241341
uuucucuuagcagaaguau

SEQ ID NO: 1265053 - RNA, 19 nt, Artificial Sequence
  Description of Artificial Sequence: Synthetic oligonucleotide
  Antisense strand to SEQ ID NO: 1265052
auacuucugcuaagagaaa

SEQ ID NO: 1265054 - RNA, 19 nt, Artificial Sequence
  Description of Artificial Sequence: Synthetic oligonucleotide
  Sense strand starting at position 3263 of SEQ ID NO: 1241341
gacuuuaggaccuguggga

SEQ ID NO: 1265055 - RNA, 19 nt, Artificial Sequence
  Description of Artificial Sequence: Synthetic oligonucleotide
  Antisense strand to SEQ ID NO: 1265054
ucccacagguccuaaaguc

SEQ ID NO: 1265056 - RNA, 19 nt, Artificial Sequence
  Description of Artificial Sequence: Synthetic oligonucleotide
  Sense strand starting at position 3428 of SEQ ID NO: 1241341
guucuuaauguacauuaga

SEQ ID NO: 1265057 - RNA, 19 nt, Artificial Sequence
  Description of Artificial Sequence: Synthetic oligonucleotide
  Antisense strand to SEQ ID NO: 1265056
ucuaauguacauuaagaac

SEQ ID NO: 1265058 - RNA, 19 nt, Artificial Sequence
  Description of Artificial Sequence: Synthetic oligonucleotide
  Sense strand starting at position 3566 of SEQ ID NO: 1241341
ucuggcuuggaucaguuaa

SEQ ID NO: 1265059 - RNA, 19 nt, Artificial Sequence
  Description of Artificial Sequence: Synthetic oligonucleotide
  Antisense strand to SEQ ID NO: 1265058
uuaacugauccaagccaga

SEQ ID NO: 1265060 - RNA, 19 nt, Artificial Sequence
  Description of Artificial Sequence: Synthetic oligonucleotide
  Sense strand starting at position 3568 of SEQ ID NO: 1241341
uggcuuggaucaguuaaau

SEQ ID NO: 1265061 - RNA, 19 nt, Artificial Sequence
  Description of Artificial Sequence: Synthetic oligonucleotide
  Antisense strand to SEQ ID NO: 1265060
auuuaacugauccaagcca

SEQ ID NO: 1265062 - RNA, 19 nt, Artificial Sequence
  Description of Artificial Sequence: Synthetic oligonucleotide
  Sense strand starting at position 3776 of SEQ ID NO: 1241341
ggagcuccuguggauacaa

SEQ ID NO: 1265063 - RNA, 19 nt, Artificial Sequence
  Description of Artificial Sequence: Synthetic oligonucleotide
  Antisense strand to SEQ ID NO: 1265062
uuguauccacaggagcucc

SEQ ID NO: 1265064 - RNA, 19 nt, Artificial Sequence
  Description of Artificial Sequence: Synthetic oligonucleotide
  Sense strand starting at position 3810 of SEQ ID NO: 1241341
ccaucaagugaauguuaag

SEQ ID NO: 1265065 - RNA, 19 nt, Artificial Sequence
  Description of Artificial Sequence: Synthetic oligonucleotide
  Antisense strand to SEQ ID NO: 1265064
cuuaacauucacuugaugg

SEQ ID NO: 1265066 - RNA, 19 nt, Artificial Sequence
  Description of Artificial Sequence: Synthetic oligonucleotide
  Sense strand starting at position 3864 of SEQ ID NO: 1241341
cacuuaauaccgugacuag

SEQ ID NO: 1265067 - RNA, 19 nt, Artificial Sequence
  Description of Artificial Sequence: Synthetic oligonucleotide
  Antisense strand to SEQ ID NO: 1265066
cuagucacgguauuaagug

SEQ ID NO: 1265068 - RNA, 19 nt, Artificial Sequence
  Description of Artificial Sequence: Synthetic oligonucleotide
  Sense strand starting at position 3865 of SEQ ID NO: 1241341
acuuaauaccgugacuaga

SEQ ID NO: 1265069 - RNA, 19 nt, Artificial Sequence
  Description of Artificial Sequence: Synthetic oligonucleotide
  Antisense strand to SEQ ID NO: 1265068
ucuagucacgguauuaagu

SEQ ID NO: 1265070 - RNA, 19 nt, Artificial Sequence
  Description of Artificial Sequence: Synthetic oligonucleotide
  Sense strand starting at position 3873 of SEQ ID NO: 1241341
ccgugacuagaugggaaau

SEQ ID NO: 1265071 - RNA, 19 nt, Artificial Sequence
  Description of Artificial Sequence: Synthetic oligonucleotide
  Antisense strand to SEQ ID NO: 1265070
auuucccaucuagucacgg

SEQ ID NO: 1265072 - RNA, 19 nt, Artificial Sequence
  Description of Artificial Sequence: Synthetic oligonucleotide
  Sense strand starting at position 3874 of SEQ ID NO: 1241341
cgugacuagaugggaaaua

SEQ ID NO: 1265073 - RNA, 19 nt, Artificial Sequence
  Description of Artificial Sequence: Synthetic oligonucleotide
  Antisense strand to SEQ ID NO: 1265072
uauuucccaucuagucacg

SEQ ID NO: 1265074 - RNA, 19 nt, Artificial Sequence
  Description of Artificial Sequence: Synthetic oligonucleotide
  Sense strand starting at position 3974 of SEQ ID NO: 1241341
uccuguaguacgucauugu

SEQ ID NO: 1265075 - RNA, 19 nt, Artificial Sequence
  Description of Artificial Sequence: Synthetic oligonucleotide
  Antisense strand to SEQ ID NO: 1265074
acaaugacguacuacagga

SEQ ID NO: 1265076 - RNA, 19 nt, Artificial Sequence
  Description of Artificial Sequence: Synthetic oligonucleotide
  Sense strand starting at position 63 of SEQ ID NO: 1241342
ucagauuagguaggaguuu

SEQ ID NO: 1265077 - RNA, 19 nt, Artificial Sequence
  Description of Artificial Sequence: Synthetic oligonucleotide
  Antisense strand to SEQ ID NO: 1265076
aaacuccuaccuaaucuga

SEQ ID NO: 1265078 - RNA, 19 nt, Artificial Sequence
  Description of Artificial Sequence: Synthetic oligonucleotide
  Sense strand starting at position 75 of SEQ ID NO: 1241342
ggaguuuccuacuuugaau

SEQ ID NO: 1265079 - RNA, 19 nt, Artificial Sequence
  Description of Artificial Sequence: Synthetic oligonucleotide
  Antisense strand to SEQ ID NO: 1265078
auucaaaguaggaaacucc

SEQ ID NO: 1265080 - RNA, 19 nt, Artificial Sequence
  Description of Artificial Sequence: Synthetic oligonucleotide
  Sense strand starting at position 95 of SEQ ID NO: 1241342
acgaaaugauucuucucau

SEQ ID NO: 1265081 - RNA, 19 nt, Artificial Sequence
  Description of Artificial Sequence: Synthetic oligonucleotide
  Antisense strand to SEQ ID NO: 1265080
augagaagaaucauuucgu

SEQ ID NO: 1265082 - RNA, 19 nt, Artificial Sequence
  Description of Artificial Sequence: Synthetic oligonucleotide
  Sense strand starting at position 96 of SEQ ID NO: 1241342
cgaaaugauucuucucauc

SEQ ID NO: 1265083 - RNA, 19 nt, Artificial Sequence
  Description of Artificial Sequence: Synthetic oligonucleotide
  Antisense strand to SEQ ID NO: 1265082
gaugagaagaaucauuucg

SEQ ID NO: 1265084 - RNA, 19 nt, Artificial Sequence
  Description of Artificial Sequence: Synthetic oligonucleotide
  Sense strand starting at position 177 of SEQ ID NO: 1241342
gcucuuacccuagauauag

SEQ ID NO: 1265085 - RNA, 19 nt, Artificial Sequence
  Description of Artificial Sequence: Synthetic oligonucleotide
  Antisense strand to SEQ ID NO: 1265084
cuauaucuaggguaagagc

SEQ ID NO: 1265086 - RNA, 19 nt, Artificial Sequence
  Description of Artificial Sequence: Synthetic oligonucleotide
  Sense strand starting at position 225 of SEQ ID NO: 1241342
ggccucacuccaugaaaua

SEQ ID NO: 1265087 - RNA, 19 nt, Artificial Sequence
  Description of Artificial Sequence: Synthetic oligonucleotide
  Antisense strand to SEQ ID NO: 1265086
uauuucauggagugaggcc

SEQ ID NO: 1265088 - RNA, 19 nt, Artificial Sequence
  Description of Artificial Sequence: Synthetic oligonucleotide
  Sense strand starting at position 448 of SEQ ID NO: 1241342
auaucuuguggucacacua

SEQ ID NO: 1265089 - RNA, 19 nt, Artificial Sequence
  Description of Artificial Sequence: Synthetic oligonucleotide
  Antisense strand to SEQ ID NO: 1265088
uagugugaccacaagauau

SEQ ID NO: 1265090 - RNA, 19 nt, Artificial Sequence
  Description of Artificial Sequence: Synthetic oligonucleotide
  Sense strand starting at position 501 of SEQ ID NO: 1241342
uuguucugaguugaaugua

SEQ ID NO: 1265091 - RNA, 19 nt, Artificial Sequence
  Description of Artificial Sequence: Synthetic oligonucleotide
  Antisense strand to SEQ ID NO: 1265090
uacauucaacucagaacaa

SEQ ID NO: 1265092 - RNA, 19 nt, Artificial Sequence
  Description of Artificial Sequence: Synthetic oligonucleotide
  Sense strand starting at position 510 of SEQ ID NO: 1241342
guugaauguaaggaugcaa

SEQ ID NO: 1265093 - RNA, 19 nt, Artificial Sequence
  Description of Artificial Sequence: Synthetic oligonucleotide
  Antisense strand to SEQ ID NO: 1265092
uugcauccuuacauucaac

SEQ ID NO: 1265094 - RNA, 19 nt, Artificial Sequence
  Description of Artificial Sequence: Synthetic oligonucleotide
  Sense strand starting at position 583 of SEQ ID NO: 1241342
acauuagcccuagauguaa

SEQ ID NO: 1265095 - RNA, 19 nt, Artificial Sequence
  Description of Artificial Sequence: Synthetic oligonucleotide
  Antisense strand to SEQ ID NO: 1265094
uuacaucuagggcuaaugu

SEQ ID NO: 1265096 - RNA, 19 nt, Artificial Sequence
  Description of Artificial Sequence: Synthetic oligonucleotide
  Sense strand starting at position 885 of SEQ ID NO: 1241342
gggcguucucuuucgcaca

SEQ ID NO: 1265097 - RNA, 19 nt, Artificial Sequence
  Description of Artificial Sequence: Synthetic oligonucleotide
  Antisense strand to SEQ ID NO: 1265096
ugugcgaaagagaacgccc

SEQ ID NO: 1265098 - RNA, 19 nt, Artificial Sequence
  Description of Artificial Sequence: Synthetic oligonucleotide
  Sense strand starting at position 1355 of SEQ ID NO: 1241342
cggagucgucgagcacgua

SEQ ID NO: 1265099 - RNA, 19 nt, Artificial Sequence
  Description of Artificial Sequence: Synthetic oligonucleotide
  Antisense strand to SEQ ID NO: 1265098
uacgugcucgacgacuccg

SEQ ID NO: 1265100 - RNA, 19 nt, Artificial Sequence
  Description of Artificial Sequence: Synthetic oligonucleotide
  Sense strand starting at position 1891 of SEQ ID NO: 1241342
auugucaucuugguggaau

SEQ ID NO: 1265101 - RNA, 19 nt, Artificial Sequence
  Description of Artificial Sequence: Synthetic oligonucleotide
  Antisense strand to SEQ ID NO: 1265100
auuccaccaagaugacaau

SEQ ID NO: 1265102 - RNA, 19 nt, Artificial Sequence
  Description of Artificial Sequence: Synthetic oligonucleotide
  Sense strand starting at position 2086 of SEQ ID NO: 1241342
uuagccuugaaggaguuaa

SEQ ID NO: 1265103 - RNA, 19 nt, Artificial Sequence
  Description of Artificial Sequence: Synthetic oligonucleotide
  Antisense strand to SEQ ID NO: 1265102
uuaacuccuucaaggcuaa

SEQ ID NO: 1265104 - RNA, 19 nt, Artificial Sequence
  Description of Artificial Sequence: Synthetic oligonucleotide
  Sense strand starting at position 2183 of SEQ ID NO: 1241342
gaucacugucauggauauu

SEQ ID NO: 1265105 - RNA, 19 nt, Artificial Sequence
  Description of Artificial Sequence: Synthetic oligonucleotide
  Antisense strand to SEQ ID NO: 1265104
aauauccaugacagugauc

SEQ ID NO: 1265106 - RNA, 19 nt, Artificial Sequence
  Description of Artificial Sequence: Synthetic oligonucleotide
  Sense strand starting at position 2194 of SEQ ID NO: 1241342
uggauauuaugugucuuaa

SEQ ID NO: 1265107 - RNA, 19 nt, Artificial Sequence
  Description of Artificial Sequence: Synthetic oligonucleotide
  Antisense strand to SEQ ID NO: 1265106
uuaagacacauaauaucca

SEQ ID NO: 1265108 - RNA, 19 nt, Artificial Sequence
  Description of Artificial Sequence: Synthetic oligonucleotide
  Sense strand starting at position 2282 of SEQ ID NO: 1241342
gaaaguugaagucgaggga

SEQ ID NO: 1265109 - RNA, 19 nt, Artificial Sequence
  Description of Artificial Sequence: Synthetic oligonucleotide
  Antisense strand to SEQ ID NO: 1265108
ucccucgacuucaacuuuc

SEQ ID NO: 1265110 - RNA, 19 nt, Artificial Sequence
  Description of Artificial Sequence: Synthetic oligonucleotide
  Sense strand starting at position 2285 of SEQ ID NO: 1241342
aguugaagucgagggaaau

SEQ ID NO: 1265111 - RNA, 19 nt, Artificial Sequence
  Description of Artificial Sequence: Synthetic oligonucleotide
  Antisense strand to SEQ ID NO: 1265110
auuucccucgacuucaacu

SEQ ID NO: 1265112 - RNA, 19 nt, Artificial Sequence
  Description of Artificial Sequence: Synthetic oligonucleotide
  Sense strand starting at position 2286 of SEQ ID NO: 1241342
guugaagucgagggaaauc

SEQ ID NO: 1265113 - RNA, 19 nt, Artificial Sequence
  Description of Artificial Sequence: Synthetic oligonucleotide
  Antisense strand to SEQ ID NO: 1265112
gauuucccucgacuucaac

SEQ ID NO: 1265114 - RNA, 19 nt, Artificial Sequence
  Description of Artificial Sequence: Synthetic oligonucleotide
  Sense strand starting at position 2411 of SEQ ID NO: 1241342
auaagcaauuggcucuuaa

SEQ ID NO: 1265115 - RNA, 19 nt, Artificial Sequence
  Description of Artificial Sequence: Synthetic oligonucleotide
  Antisense strand to SEQ ID NO: 1265114
uuaagagccaauugcuuau

SEQ ID NO: 1265116 - RNA, 19 nt, Artificial Sequence
  Description of Artificial Sequence: Synthetic oligonucleotide
  Sense strand starting at position 2483 of SEQ ID NO: 1241342
uaaacauuugugugguugu

SEQ ID NO: 1265117 - RNA, 19 nt, Artificial Sequence
  Description of Artificial Sequence: Synthetic oligonucleotide
  Antisense strand to SEQ ID NO: 1265116
acaaccacacaaauguuua

SEQ ID NO: 1265118 - RNA, 19 nt, Artificial Sequence
  Description of Artificial Sequence: Synthetic oligonucleotide
  Sense strand starting at position 2562 of SEQ ID NO: 1241342
cagggacgaaggugaaauu

SEQ ID NO: 1265119 - RNA, 19 nt, Artificial Sequence
  Description of Artificial Sequence: Synthetic oligonucleotide
  Antisense strand to SEQ ID NO: 1265118
aauuucaccuucgucccug

SEQ ID NO: 1265120 - RNA, 19 nt, Artificial Sequence
  Description of Artificial Sequence: Synthetic oligonucleotide
  Sense strand starting at position 2617 of SEQ ID NO: 1241342
gucaguugaagugauucca

SEQ ID NO: 1265121 - RNA, 19 nt, Artificial Sequence
  Description of Artificial Sequence: Synthetic oligonucleotide
  Antisense strand to SEQ ID NO: 1265120
uggaaucacuucaacugac

SEQ ID NO: 1265122 - RNA, 19 nt, Artificial Sequence
  Description of Artificial Sequence: Synthetic oligonucleotide
  Sense strand starting at position 2646 of SEQ ID NO: 1241342
ucuaaauugguaggaaagu

SEQ ID NO: 1265123 - RNA, 19 nt, Artificial Sequence
  Description of Artificial Sequence: Synthetic oligonucleotide
  Antisense strand to SEQ ID NO: 1265122
acuuuccuaccaauuuaga

SEQ ID NO: 1265124 - RNA, 19 nt, Artificial Sequence
  Description of Artificial Sequence: Synthetic oligonucleotide
  Sense strand starting at position 2702 of SEQ ID NO: 1241342
uccugagauuucugauuuc

SEQ ID NO: 1265125 - RNA, 19 nt, Artificial Sequence
  Description of Artificial Sequence: Synthetic oligonucleotide
  Antisense strand to SEQ ID NO: 1265124
gaaaucagaaaucucagga

SEQ ID NO: 1265126 - RNA, 19 nt, Artificial Sequence
  Description of Artificial Sequence: Synthetic oligonucleotide
  Sense strand starting at position 2711 of SEQ ID NO: 1241342
uucugauuuccuuguuauu

SEQ ID NO: 1265127 - RNA, 19 nt, Artificial Sequence
  Description of Artificial Sequence: Synthetic oligonucleotide
  Antisense strand to SEQ ID NO: 1265126
aauaacaaggaaaucagaa

SEQ ID NO: 1265128 - RNA, 19 nt, Artificial Sequence
  Description of Artificial Sequence: Synthetic oligonucleotide
  Sense strand starting at position 2786 of SEQ ID NO: 1241342
uuucucuuagcagaaguau

SEQ ID NO: 1265129 - RNA, 19 nt, Artificial Sequence
  Description of Artificial Sequence: Synthetic oligonucleotide
  Antisense strand to SEQ ID NO: 1265128
auacuucugcuaagagaaa

SEQ ID NO: 1265130 - RNA, 19 nt, Artificial Sequence
  Description of Artificial Sequence: Synthetic oligonucleotide
  Sense strand starting at position 2869 of SEQ ID NO: 1241342
gacuuuaggaccuguggga

SEQ ID NO: 1265131 - RNA, 19 nt, Artificial Sequence
  Description of Artificial Sequence: Synthetic oligonucleotide
  Antisense strand to SEQ ID NO: 1265130
ucccacagguccuaaaguc

SEQ ID NO: 1265132 - RNA, 19 nt, Artificial Sequence
  Description of Artificial Sequence: Synthetic oligonucleotide
  Sense strand starting at position 3034 of SEQ ID NO: 1241342
guucuuaauguacauuaga

SEQ ID NO: 1265133 - RNA, 19 nt, Artificial Sequence
  Description of Artificial Sequence: Synthetic oligonucleotide
  Antisense strand to SEQ ID NO: 1265132
ucuaauguacauuaagaac

SEQ ID NO: 1265134 - RNA, 19 nt, Artificial Sequence
  Description of Artificial Sequence: Synthetic oligonucleotide
  Sense strand starting at position 3172 of SEQ ID NO: 1241342
ucuggcuuggaucaguuaa

SEQ ID NO: 1265135 - RNA, 19 nt, Artificial Sequence
  Description of Artificial Sequence: Synthetic oligonucleotide
  Antisense strand to SEQ ID NO: 1265134
uuaacugauccaagccaga

SEQ ID NO: 1265136 - RNA, 19 nt, Artificial Sequence
  Description of Artificial Sequence: Synthetic oligonucleotide
  Sense strand starting at position 3174 of SEQ ID NO: 1241342
uggcuuggaucaguuaaau

SEQ ID NO: 1265137 - RNA, 19 nt, Artificial Sequence
  Description of Artificial Sequence: Synthetic oligonucleotide
  Antisense strand to SEQ ID NO: 1265136
auuuaacugauccaagcca

SEQ ID NO: 1265138 - RNA, 19 nt, Artificial Sequence
  Description of Artificial Sequence: Synthetic oligonucleotide
  Sense strand starting at position 3382 of SEQ ID NO: 1241342
ggagcuccuguggauacaa

SEQ ID NO: 1265139 - RNA, 19 nt, Artificial Sequence
  Description of Artificial Sequence: Synthetic oligonucleotide
  Antisense strand to SEQ ID NO: 1265138
uuguauccacaggagcucc

SEQ ID NO: 1265140 - RNA, 19 nt, Artificial Sequence
  Description of Artificial Sequence: Synthetic oligonucleotide
  Sense strand starting at position 3416 of SEQ ID NO: 1241342
ccaucaagugaauguuaag

SEQ ID NO: 1265141 - RNA, 19 nt, Artificial Sequence
  Description of Artificial Sequence: Synthetic oligonucleotide
  Antisense strand to SEQ ID NO: 1265140
cuuaacauucacuugaugg

SEQ ID NO: 1265142 - RNA, 19 nt, Artificial Sequence
  Description of Artificial Sequence: Synthetic oligonucleotide
  Sense strand starting at position 3470 of SEQ ID NO: 1241342
cacuuaauaccgugacuag

SEQ ID NO: 1265143 - RNA, 19 nt, Artificial Sequence
  Description of Artificial Sequence: Synthetic oligonucleotide
  Antisense strand to SEQ ID NO: 1265142
cuagucacgguauuaagug

SEQ ID NO: 1265144 - RNA, 19 nt, Artificial Sequence
  Description of Artificial Sequence: Synthetic oligonucleotide
  Sense strand starting at position 3471 of SEQ ID NO: 1241342
acuuaauaccgugacuaga

SEQ ID NO: 1265145 - RNA, 19 nt, Artificial Sequence
  Description of Artificial Sequence: Synthetic oligonucleotide
  Antisense strand to SEQ ID NO: 1265144
ucuagucacgguauuaagu

SEQ ID NO: 1265146 - RNA, 19 nt, Artificial Sequence
  Description of Artificial Sequence: Synthetic oligonucleotide
  Sense strand starting at position 3479 of SEQ ID NO: 1241342
ccgugacuagaugggaaau

SEQ ID NO: 1265147 - RNA, 19 nt, Artificial Sequence
  Description of Artificial Sequence: Synthetic oligonucleotide
  Antisense strand to SEQ ID NO: 1265146
auuucccaucuagucacgg

SEQ ID NO: 1265148 - RNA, 19 nt, Artificial Sequence
  Description of Artificial Sequence: Synthetic oligonucleotide
  Sense strand starting at position 3480 of SEQ ID NO: 1241342
cgugacuagaugggaaaua

SEQ ID NO: 1265149 - RNA, 19 nt, Artificial Sequence
  Description of Artificial Sequence: Synthetic oligonucleotide
  Antisense strand to SEQ ID NO: 1265148
uauuucccaucuagucacg

SEQ ID NO: 1265150 - RNA, 19 nt, Artificial Sequence
  Description of Artificial Sequence: Synthetic oligonucleotide
  Sense strand starting at position 3580 of SEQ ID NO: 1241342
uccuguaguacgucauugu

SEQ ID NO: 1265151 - RNA, 19 nt, Artificial Sequence
  Description of Artificial Sequence: Synthetic oligonucleotide
  Antisense strand to SEQ ID NO: 1265150
acaaugacguacuacagga

SEQ ID NO: 1265152 - RNA, 19 nt, Artificial Sequence
  Description of Artificial Sequence: Synthetic oligonucleotide
  Sense strand starting at position 3870 of SEQ ID NO: 1241342
guaugucuuggguaaggau

SEQ ID NO: 1265153 - RNA, 19 nt, Artificial Sequence
  Description of Artificial Sequence: Synthetic oligonucleotide
  Antisense strand to SEQ ID NO: 1265152
auccuuacccaagacauac

SEQ ID NO: 1265154 - RNA, 19 nt, Artificial Sequence
  Description of Artificial Sequence: Synthetic oligonucleotide
  Sense strand starting at position 3918 of SEQ ID NO: 1241342
guggguucuagguaaucac

SEQ ID NO: 1265155 - RNA, 19 nt, Artificial Sequence
  Description of Artificial Sequence: Synthetic oligonucleotide
  Antisense strand to SEQ ID NO: 1265154
gugauuaccuagaacccac

SEQ ID NO: 1265156 - RNA, 19 nt, Artificial Sequence
  Description of Artificial Sequence: Synthetic oligonucleotide
  Sense strand starting at position 31 of SEQ ID NO: 1241343
ggcgacaagugcuuuggaa

SEQ ID NO: 1265157 - RNA, 19 nt, Artificial Sequence
  Description of Artificial Sequence: Synthetic oligonucleotide
  Antisense strand to SEQ ID NO: 1265156
uuccaaagcacuugucgcc

SEQ ID NO: 1265158 - RNA, 19 nt, Artificial Sequence
  Description of Artificial Sequence: Synthetic oligonucleotide
  Sense strand starting at position 33 of SEQ ID NO: 1241343
cgacaagugcuuuggaaac

SEQ ID NO: 1265159 - RNA, 19 nt, Artificial Sequence
  Description of Artificial Sequence: Synthetic oligonucleotide
  Antisense strand to SEQ ID NO: 1265158
guuuccaaagcacuugucg

SEQ ID NO: 1265160 - RNA, 19 nt, Artificial Sequence
  Description of Artificial Sequence: Synthetic oligonucleotide
  Sense strand starting at position 49 of SEQ ID NO: 1241343
aacaguguccugggagaac

SEQ ID NO: 1265161 - RNA, 19 nt, Artificial Sequence
  Description of Artificial Sequence: Synthetic oligonucleotide
  Antisense strand to SEQ ID NO: 1265160
guucucccaggacacuguu

SEQ ID NO: 1265162 - RNA, 19 nt, Artificial Sequence
  Description of Artificial Sequence: Synthetic oligonucleotide
  Sense strand starting at position 258 of SEQ ID NO: 1241343
ugaacuucccgauauuccu

SEQ ID NO: 1265163 - RNA, 19 nt, Artificial Sequence
  Description of Artificial Sequence: Synthetic oligonucleotide
  Antisense strand to SEQ ID NO: 1265162
aggaauaucgggaaguuca

SEQ ID NO: 1265164 - RNA, 19 nt, Artificial Sequence
  Description of Artificial Sequence: Synthetic oligonucleotide
  Sense strand starting at position 389 of SEQ ID NO: 1241343
cagaucuuuccuugucgga

SEQ ID NO: 1265165 - RNA, 19 nt, Artificial Sequence
  Description of Artificial Sequence: Synthetic oligonucleotide
  Antisense strand to SEQ ID NO: 1265164
uccgacaaggaaagaucug

SEQ ID NO: 1265166 - RNA, 19 nt, Artificial Sequence
  Description of Artificial Sequence: Synthetic oligonucleotide
  Sense strand starting at position 391 of SEQ ID NO: 1241343
gaucuuuccuugucggaau

SEQ ID NO: 1265167 - RNA, 19 nt, Artificial Sequence
  Description of Artificial Sequence: Synthetic oligonucleotide
  Antisense strand to SEQ ID NO: 1265166
auuccgacaaggaaagauc

SEQ ID NO: 1265168 - RNA, 19 nt, Artificial Sequence
  Description of Artificial Sequence: Synthetic oligonucleotide
  Sense strand starting at position 786 of SEQ ID NO: 1241343
uuagaugucgcgaggcuga

SEQ ID NO: 1265169 - RNA, 19 nt, Artificial Sequence
  Description of Artificial Sequence: Synthetic oligonucleotide
  Antisense strand to SEQ ID NO: 1265168
ucagccucgcgacaucuaa

SEQ ID NO: 1265170 - RNA, 19 nt, Artificial Sequence
  Description of Artificial Sequence: Synthetic oligonucleotide
  Sense strand starting at position 1353 of SEQ ID NO: 1241343
gcaggaaugcuccaacaua

SEQ ID NO: 1265171 - RNA, 19 nt, Artificial Sequence
  Description of Artificial Sequence: Synthetic oligonucleotide
  Antisense strand to SEQ ID NO: 1265170
uauguuggagcauuccugc

SEQ ID NO: 1265172 - RNA, 19 nt, Artificial Sequence
  Description of Artificial Sequence: Synthetic oligonucleotide
  Sense strand starting at position 2323 of SEQ ID NO: 1241343
ugaguuuguacuggaaucu

SEQ ID NO: 1265173 - RNA, 19 nt, Artificial Sequence
  Description of Artificial Sequence: Synthetic oligonucleotide
  Antisense strand to SEQ ID NO: 1265172
agauuccaguacaaacuca

SEQ ID NO: 1265174 - RNA, 19 nt, Artificial Sequence
  Description of Artificial Sequence: Synthetic oligonucleotide
  Sense strand starting at position 2335 of SEQ ID NO: 1241343
ggaaucugcagcugagauu

SEQ ID NO: 1265175 - RNA, 19 nt, Artificial Sequence
  Description of Artificial Sequence: Synthetic oligonucleotide
  Antisense strand to SEQ ID NO: 1265174
aaucucagcugcagauucc

SEQ ID NO: 1265176 - RNA, 19 nt, Artificial Sequence
  Description of Artificial Sequence: Synthetic oligonucleotide
  Sense strand starting at position 2336 of SEQ ID NO: 1241343
gaaucugcagcugagauua

SEQ ID NO: 1265177 - RNA, 19 nt, Artificial Sequence
  Description of Artificial Sequence: Synthetic oligonucleotide
  Antisense strand to SEQ ID NO: 1265176
uaaucucagcugcagauuc

SEQ ID NO: 1265178 - RNA, 19 nt, Artificial Sequence
  Description of Artificial Sequence: Synthetic oligonucleotide
  Sense strand starting at position 2395 of SEQ ID NO: 1241343
gcacuugacauucgaagag

SEQ ID NO: 1265179 - RNA, 19 nt, Artificial Sequence
  Description of Artificial Sequence: Synthetic oligonucleotide
  Antisense strand to SEQ ID NO: 1265178
cucuucgaaugucaagugc

SEQ ID NO: 1265180 - RNA, 19 nt, Artificial Sequence
  Description of Artificial Sequence: Synthetic oligonucleotide
  Sense strand starting at position 2507 of SEQ ID NO: 1241343
ucacgaugcuucccucuau

SEQ ID NO: 1265181 - RNA, 19 nt, Artificial Sequence
  Description of Artificial Sequence: Synthetic oligonucleotide
  Antisense strand to SEQ ID NO: 1265180
auagagggaagcaucguga

SEQ ID NO: 1265182 - RNA, 19 nt, Artificial Sequence
  Description of Artificial Sequence: Synthetic oligonucleotide
  Sense strand starting at position 2551 of SEQ ID NO: 1241343
ccugaaauaucaucgucag

SEQ ID NO: 1265183 - RNA, 19 nt, Artificial Sequence
  Description of Artificial Sequence: Synthetic oligonucleotide
  Antisense strand to SEQ ID NO: 1265182
cugacgaugauauuucagg

SEQ ID NO: 1265184 - RNA, 19 nt, Artificial Sequence
  Description of Artificial Sequence: Synthetic oligonucleotide
  Sense strand starting at position 2552 of SEQ ID NO: 1241343
cugaaauaucaucgucagc

SEQ ID NO: 1265185 - RNA, 19 nt, Artificial Sequence
  Description of Artificial Sequence: Synthetic oligonucleotide
  Antisense strand to SEQ ID NO: 1265184
gcugacgaugauauuucag

SEQ ID NO: 1265186 - RNA, 19 nt, Artificial Sequence
  Description of Artificial Sequence: Synthetic oligonucleotide
  Sense strand starting at position 2554 of SEQ ID NO: 1241343
gaaauaucaucgucagcau

SEQ ID NO: 1265187 - RNA, 19 nt, Artificial Sequence
  Description of Artificial Sequence: Synthetic oligonucleotide
  Antisense strand to SEQ ID NO: 1265186
augcugacgaugauauuuc

SEQ ID NO: 1265188 - RNA, 19 nt, Artificial Sequence
  Description of Artificial Sequence: Synthetic oligonucleotide
  Sense strand starting at position 2557 of SEQ ID NO: 1241343
auaucaucgucagcauuau

SEQ ID NO: 1265189 - RNA, 19 nt, Artificial Sequence
  Description of Artificial Sequence: Synthetic oligonucleotide
  Antisense strand to SEQ ID NO: 1265188
auaaugcugacgaugauau

SEQ ID NO: 1265190 - RNA, 19 nt, Artificial Sequence
  Description of Artificial Sequence: Synthetic oligonucleotide
  Sense strand starting at position 2604 of SEQ ID NO: 1241343
gccggaugauucucccaag

SEQ ID NO: 1265191 - RNA, 19 nt, Artificial Sequence
  Description of Artificial Sequence: Synthetic oligonucleotide
  Antisense strand to SEQ ID NO: 1265190
cuugggagaaucauccggc

SEQ ID NO: 1265192 - RNA, 19 nt, Artificial Sequence
  Description of Artificial Sequence: Synthetic oligonucleotide
  Sense strand starting at position 2760 of SEQ ID NO: 1241343
agaaucagaacgugaacua

SEQ ID NO: 1265193 - RNA, 19 nt, Artificial Sequence
  Description of Artificial Sequence: Synthetic oligonucleotide
  Antisense strand to SEQ ID NO: 1265192
uaguucacguucugauucu

SEQ ID NO: 1265194 - RNA, 19 nt, Artificial Sequence
  Description of Artificial Sequence: Synthetic oligonucleotide
  Sense strand starting at position 2849 of SEQ ID NO: 1241343
gcgcucaaugaauagaugu

SEQ ID NO: 1265195 - RNA, 19 nt, Artificial Sequence
  Description of Artificial Sequence: Synthetic oligonucleotide
  Antisense strand to SEQ ID NO: 1265194
acaucuauucauugagcgc

SEQ ID NO: 1265196 - RNA, 19 nt, Artificial Sequence
  Description of Artificial Sequence: Synthetic oligonucleotide
  Sense strand starting at position 2913 of SEQ ID NO: 1241343
uaagguggccuuugggaaa

SEQ ID NO: 1265197 - RNA, 19 nt, Artificial Sequence
  Description of Artificial Sequence: Synthetic oligonucleotide
  Antisense strand to SEQ ID NO: 1265196
uuucccaaaggccaccuua

SEQ ID NO: 1265198 - RNA, 19 nt, Artificial Sequence
  Description of Artificial Sequence: Synthetic oligonucleotide
  Sense strand starting at position 2925 of SEQ ID NO: 1241343
ugggaaagcucucagaaag

SEQ ID NO: 1265199 - RNA, 19 nt, Artificial Sequence
  Description of Artificial Sequence: Synthetic oligonucleotide
  Antisense strand to SEQ ID NO: 1265198
cuuucugagagcuuuccca

SEQ ID NO: 1265200 - RNA, 19 nt, Artificial Sequence
  Description of Artificial Sequence: Synthetic oligonucleotide
  Sense strand starting at position 2949 of SEQ ID NO: 1241343
ugaaucacuuaagagguaa

SEQ ID NO: 1265201 - RNA, 19 nt, Artificial Sequence
  Description of Artificial Sequence: Synthetic oligonucleotide
  Antisense strand to SEQ ID NO: 1265200
uuaccucuuaagugauuca

SEQ ID NO: 1265202 - RNA, 19 nt, Artificial Sequence
  Description of Artificial Sequence: Synthetic oligonucleotide
  Sense strand starting at position 3028 of SEQ ID NO: 1241343
gauggaagagcuugaugug

SEQ ID NO: 1265203 - RNA, 19 nt, Artificial Sequence
  Description of Artificial Sequence: Synthetic oligonucleotide
  Antisense strand to SEQ ID NO: 1265202
cacaucaagcucuuccauc

SEQ ID NO: 1265204 - RNA, 19 nt, Artificial Sequence
  Description of Artificial Sequence: Synthetic oligonucleotide
  Sense strand starting at position 3037 of SEQ ID NO: 1241343
gcuugauguguucaagaga

SEQ ID NO: 1265205 - RNA, 19 nt, Artificial Sequence
  Description of Artificial Sequence: Synthetic oligonucleotide
  Antisense strand to SEQ ID NO: 1265204
ucucuugaacacaucaagc

SEQ ID NO: 1265206 - RNA, 19 nt, Artificial Sequence
  Description of Artificial Sequence: Synthetic oligonucleotide
  Sense strand starting at position 3079 of SEQ ID NO: 1241343
ggccuaggauuugauagga

SEQ ID NO: 1265207 - RNA, 19 nt, Artificial Sequence
  Description of Artificial Sequence: Synthetic oligonucleotide
  Antisense strand to SEQ ID NO: 1265206
uccuaucaaauccuaggcc

SEQ ID NO: 1265208 - RNA, 19 nt, Artificial Sequence
  Description of Artificial Sequence: Synthetic oligonucleotide
  Sense strand starting at position 3084 of SEQ ID NO: 1241343
aggauuugauaggaguuga

SEQ ID NO: 1265209 - RNA, 19 nt, Artificial Sequence
  Description of Artificial Sequence: Synthetic oligonucleotide
  Antisense strand to SEQ ID NO: 1265208
ucaacuccuaucaaauccu

SEQ ID NO: 1265210 - RNA, 19 nt, Artificial Sequence
  Description of Artificial Sequence: Synthetic oligonucleotide
  Sense strand starting at position 3088 of SEQ ID NO: 1241343
uuugauaggaguugagguu

SEQ ID NO: 1265211 - RNA, 19 nt, Artificial Sequence
  Description of Artificial Sequence: Synthetic oligonucleotide
  Antisense strand to SEQ ID NO: 1265210
aaccucaacuccuaucaaa

SEQ ID NO: 1265212 - RNA, 19 nt, Artificial Sequence
  Description of Artificial Sequence: Synthetic oligonucleotide
  Sense strand starting at position 3152 of SEQ ID NO: 1241343
ggcagaguuguugaggagu

SEQ ID NO: 1265213 - RNA, 19 nt, Artificial Sequence
  Description of Artificial Sequence: Synthetic oligonucleotide
  Antisense strand to SEQ ID NO: 1265212
acuccucaacaacucugcc

SEQ ID NO: 1265214 - RNA, 19 nt, Artificial Sequence
  Description of Artificial Sequence: Synthetic oligonucleotide
  Sense strand starting at position 3223 of SEQ ID NO: 1241343
ggguccagccucuaaauga

SEQ ID NO: 1265215 - RNA, 19 nt, Artificial Sequence
  Description of Artificial Sequence: Synthetic oligonucleotide
  Antisense strand to SEQ ID NO: 1265214
ucauuuagaggcuggaccc

SEQ ID NO: 1265216 - RNA, 19 nt, Artificial Sequence
  Description of Artificial Sequence: Synthetic oligonucleotide
  Sense strand starting at position 3365 of SEQ ID NO: 1241343
gagacugaaccgcacauau

SEQ ID NO: 1265217 - RNA, 19 nt, Artificial Sequence
  Description of Artificial Sequence: Synthetic oligonucleotide
  Antisense strand to SEQ ID NO: 1265216
auaugugcgguucagucuc

SEQ ID NO: 1265218 - RNA, 19 nt, Artificial Sequence
  Description of Artificial Sequence: Synthetic oligonucleotide
  Sense strand starting at position 3455 of SEQ ID NO: 1241343
ucauuacugcaauacgaua

SEQ ID NO: 1265219 - RNA, 19 nt, Artificial Sequence
  Description of Artificial Sequence: Synthetic oligonucleotide
  Antisense strand to SEQ ID NO: 1265218
uaucguauugcaguaauga

SEQ ID NO: 1265220 - RNA, 19 nt, Artificial Sequence
  Description of Artificial Sequence: Synthetic oligonucleotide
  Sense strand starting at position 3468 of SEQ ID NO: 1241343
acgauauccucacucagaa

SEQ ID NO: 1265221 - RNA, 19 nt, Artificial Sequence
  Description of Artificial Sequence: Synthetic oligonucleotide
  Antisense strand to SEQ ID NO: 1265220
uucugagugaggauaucgu

SEQ ID NO: 1265222 - RNA, 19 nt, Artificial Sequence
  Description of Artificial Sequence: Synthetic oligonucleotide
  Sense strand starting at position 3711 of SEQ ID NO: 1241343
cagggcuuguuugcauaga

SEQ ID NO: 1265223 - RNA, 19 nt, Artificial Sequence
  Description of Artificial Sequence: Synthetic oligonucleotide
  Antisense strand to SEQ ID NO: 1265222
ucuaugcaaacaagcccug

SEQ ID NO: 1265224 - RNA, 19 nt, Artificial Sequence
  Description of Artificial Sequence: Synthetic oligonucleotide
  Sense strand starting at position 3719 of SEQ ID NO: 1241343
guuugcauagauggagaaa

SEQ ID NO: 1265225 - RNA, 19 nt, Artificial Sequence
  Description of Artificial Sequence: Synthetic oligonucleotide
  Antisense strand to SEQ ID NO: 1265224
uuucuccaucuaugcaaac

SEQ ID NO: 1265226 - RNA, 19 nt, Artificial Sequence
  Description of Artificial Sequence: Synthetic oligonucleotide
  Sense strand starting at position 3757 of SEQ ID NO: 1241343
cugguuuccgcaggaauca

SEQ ID NO: 1265227 - RNA, 19 nt, Artificial Sequence
  Description of Artificial Sequence: Synthetic oligonucleotide
  Antisense strand to SEQ ID NO: 1265226
ugauuccugcggaaaccag

SEQ ID NO: 1265228 - RNA, 19 nt, Artificial Sequence
  Description of Artificial Sequence: Synthetic oligonucleotide
  Sense strand starting at position 3758 of SEQ ID NO: 1241343
ugguuuccgcaggaaucau

SEQ ID NO: 1265229 - RNA, 19 nt, Artificial Sequence
  Description of Artificial Sequence: Synthetic oligonucleotide
  Antisense strand to SEQ ID NO: 1265228
augauuccugcggaaacca

SEQ ID NO: 1265230 - RNA, 19 nt, Artificial Sequence
  Description of Artificial Sequence: Synthetic oligonucleotide
  Sense strand starting at position 3816 of SEQ ID NO: 1241343
agaccuugcuccuugggaa

SEQ ID NO: 1265231 - RNA, 19 nt, Artificial Sequence
  Description of Artificial Sequence: Synthetic oligonucleotide
  Antisense strand to SEQ ID NO: 1265230
uucccaaggagcaaggucu

SEQ ID NO: 1265232 - RNA, 19 nt, Artificial Sequence
  Description of Artificial Sequence: Synthetic oligonucleotide
  Sense strand starting at position 3817 of SEQ ID NO: 1241343
gaccuugcuccuugggaau

SEQ ID NO: 1265233 - RNA, 19 nt, Artificial Sequence
  Description of Artificial Sequence: Synthetic oligonucleotide
  Antisense strand to SEQ ID NO: 1265232
auucccaaggagcaagguc

SEQ ID NO: 1265234 - RNA, 19 nt, Artificial Sequence
  Description of Artificial Sequence: Synthetic oligonucleotide
  Sense strand starting at position 3915 of SEQ ID NO: 1241343
ucaggugagccaggugaaa

SEQ ID NO: 1265235 - RNA, 19 nt, Artificial Sequence
  Description of Artificial Sequence: Synthetic oligonucleotide
  Antisense strand to SEQ ID NO: 1265234
uuucaccuggcucaccuga

SEQ ID NO: 1265236 - RNA, 19 nt, Artificial Sequence
  Description of Artificial Sequence: Synthetic oligonucleotide
  Sense strand starting at position 137 of SEQ ID NO: 1241344
uuugaaaucucuucugaga

SEQ ID NO: 1265237 - RNA, 19 nt, Artificial Sequence
  Description of Artificial Sequence: Synthetic oligonucleotide
  Antisense strand to SEQ ID NO: 1265236
ucucagaagagauuucaaa

SEQ ID NO: 1265238 - RNA, 19 nt, Artificial Sequence
  Description of Artificial Sequence: Synthetic oligonucleotide
  Sense strand starting at position 347 of SEQ ID NO: 1241344
guggaaucgcucuacacuc

SEQ ID NO: 1265239 - RNA, 19 nt, Artificial Sequence
  Description of Artificial Sequence: Synthetic oligonucleotide
  Antisense strand to SEQ ID NO: 1265238
gaguguagagcgauuccac

SEQ ID NO: 1265240 - RNA, 19 nt, Artificial Sequence
  Description of Artificial Sequence: Synthetic oligonucleotide
  Sense strand starting at position 444 of SEQ ID NO: 1241344
ugcuucuuagggcaaauaa

SEQ ID NO: 1265241 - RNA, 19 nt, Artificial Sequence
  Description of Artificial Sequence: Synthetic oligonucleotide
  Antisense strand to SEQ ID NO: 1265240
uuauuugcccuaagaagca

SEQ ID NO: 1265242 - RNA, 19 nt, Artificial Sequence
  Description of Artificial Sequence: Synthetic oligonucleotide
  Sense strand starting at position 511 of SEQ ID NO: 1241344
uuuggucccagcuguagaa

SEQ ID NO: 1265243 - RNA, 19 nt, Artificial Sequence
  Description of Artificial Sequence: Synthetic oligonucleotide
  Antisense strand to SEQ ID NO: 1265242
uucuacagcugggaccaaa

SEQ ID NO: 1265244 - RNA, 19 nt, Artificial Sequence
  Description of Artificial Sequence: Synthetic oligonucleotide
  Sense strand starting at position 924 of SEQ ID NO: 1241344
ggaguaaacuugaggugga

SEQ ID NO: 1265245 - RNA, 19 nt, Artificial Sequence
  Description of Artificial Sequence: Synthetic oligonucleotide
  Antisense strand to SEQ ID NO: 1265244
uccaccucaaguuuacucc

SEQ ID NO: 1265246 - RNA, 19 nt, Artificial Sequence
  Description of Artificial Sequence: Synthetic oligonucleotide
  Sense strand starting at position 927 of SEQ ID NO: 1241344
guaaacuugagguggacaa

SEQ ID NO: 1265247 - RNA, 19 nt, Artificial Sequence
  Description of Artificial Sequence: Synthetic oligonucleotide
  Antisense strand to SEQ ID NO: 1265246
uuguccaccucaaguuuac

SEQ ID NO: 1265248 - RNA, 19 nt, Artificial Sequence
  Description of Artificial Sequence: Synthetic oligonucleotide
  Sense strand starting at position 978 of SEQ ID NO: 1241344
cuggcaaaucagugggaau

SEQ ID NO: 1265249 - RNA, 19 nt, Artificial Sequence
  Description of Artificial Sequence: Synthetic oligonucleotide
  Antisense strand to SEQ ID NO: 1265248
auucccacugauuugccag

SEQ ID NO: 1265250 - RNA, 19 nt, Artificial Sequence
  Description of Artificial Sequence: Synthetic oligonucleotide
  Sense strand starting at position 979 of SEQ ID NO: 1241344
uggcaaaucagugggaaug

SEQ ID NO: 1265251 - RNA, 19 nt, Artificial Sequence
  Description of Artificial Sequence: Synthetic oligonucleotide
  Antisense strand to SEQ ID NO: 1265250
cauucccacugauuugcca

SEQ ID NO: 1265252 - RNA, 19 nt, Artificial Sequence
  Description of Artificial Sequence: Synthetic oligonucleotide
  Sense strand starting at position 1111 of SEQ ID NO: 1241344
ccaggugauccuuaucgug

SEQ ID NO: 1265253 - RNA, 19 nt, Artificial Sequence
  Description of Artificial Sequence: Synthetic oligonucleotide
  Antisense strand to SEQ ID NO: 1265252
cacgauaaggaucaccugg

SEQ ID NO: 1265254 - RNA, 19 nt, Artificial Sequence
  Description of Artificial Sequence: Synthetic oligonucleotide
  Sense strand starting at position 1402 of SEQ ID NO: 1241344
gaggcaacuccggaaacuu

SEQ ID NO: 1265255 - RNA, 19 nt, Artificial Sequence
  Description of Artificial Sequence: Synthetic oligonucleotide
  Antisense strand to SEQ ID NO: 1265254
aaguuuccggaguugccuc

SEQ ID NO: 1265256 - RNA, 19 nt, Artificial Sequence
  Description of Artificial Sequence: Synthetic oligonucleotide
  Sense strand starting at position 1497 of SEQ ID NO: 1241344
cugagauggucuccuggua

SEQ ID NO: 1265257 - RNA, 19 nt, Artificial Sequence
  Description of Artificial Sequence: Synthetic oligonucleotide
  Antisense strand to SEQ ID NO: 1265256
uaccaggagaccaucucag

SEQ ID NO: 1265258 - RNA, 19 nt, Artificial Sequence
  Description of Artificial Sequence: Synthetic oligonucleotide
  Sense strand starting at position 1509 of SEQ ID NO: 1241344
ccugguagcccuuggugaa

SEQ ID NO: 1265259 - RNA, 19 nt, Artificial Sequence
  Description of Artificial Sequence: Synthetic oligonucleotide
  Antisense strand to SEQ ID NO: 1265258
uucaccaagggcuaccagg

SEQ ID NO: 1265260 - RNA, 19 nt, Artificial Sequence
  Description of Artificial Sequence: Synthetic oligonucleotide
  Sense strand starting at position 1934 of SEQ ID NO: 1241344
gccggagucaccugaggaa

SEQ ID NO: 1265261 - RNA, 19 nt, Artificial Sequence
  Description of Artificial Sequence: Synthetic oligonucleotide
  Antisense strand to SEQ ID NO: 1265260
uuccucaggugacuccggc

SEQ ID NO: 1265262 - RNA, 19 nt, Artificial Sequence
  Description of Artificial Sequence: Synthetic oligonucleotide
  Sense strand starting at position 2229 of SEQ ID NO: 1241344
ccacuuauugcggaaugag

SEQ ID NO: 1265263 - RNA, 19 nt, Artificial Sequence
  Description of Artificial Sequence: Synthetic oligonucleotide
  Antisense strand to SEQ ID NO: 1265262
cucauuccgcaauaagugg

SEQ ID NO: 1265264 - RNA, 19 nt, Artificial Sequence
  Description of Artificial Sequence: Synthetic oligonucleotide
  Sense strand starting at position 2375 of SEQ ID NO: 1241344
ugugaaagaucagcaaaca

SEQ ID NO: 1265265 - RNA, 19 nt, Artificial Sequence
  Description of Artificial Sequence: Synthetic oligonucleotide
  Antisense strand to SEQ ID NO: 1265264
uguuugcugaucuuucaca

SEQ ID NO: 1265266 - RNA, 19 nt, Artificial Sequence
  Description of Artificial Sequence: Synthetic oligonucleotide
  Sense strand starting at position 2395 of SEQ ID NO: 1241344
guggccuugccuggagaga

SEQ ID NO: 1265267 - RNA, 19 nt, Artificial Sequence
  Description of Artificial Sequence: Synthetic oligonucleotide
  Antisense strand to SEQ ID NO: 1265266
ucucuccaggcaaggccac

SEQ ID NO: 1265268 - RNA, 19 nt, Artificial Sequence
  Description of Artificial Sequence: Synthetic oligonucleotide
  Sense strand starting at position 2418 of SEQ ID NO: 1241344
gaguuaagccaccgauuag

SEQ ID NO: 1265269 - RNA, 19 nt, Artificial Sequence
  Description of Artificial Sequence: Synthetic oligonucleotide
  Antisense strand to SEQ ID NO: 1265268
cuaaucgguggcuuaacuc

SEQ ID NO: 1265270 - RNA, 19 nt, Artificial Sequence
  Description of Artificial Sequence: Synthetic oligonucleotide
  Sense strand starting at position 2479 of SEQ ID NO: 1241344
ucagacucuuggguuuagu

SEQ ID NO: 1265271 - RNA, 19 nt, Artificial Sequence
  Description of Artificial Sequence: Synthetic oligonucleotide
  Antisense strand to SEQ ID NO: 1265270
acuaaacccaagagucuga

SEQ ID NO: 1265272 - RNA, 19 nt, Artificial Sequence
  Description of Artificial Sequence: Synthetic oligonucleotide
  Sense strand starting at position 2482 of SEQ ID NO: 1241344
gacucuuggguuuaguuaa

SEQ ID NO: 1265273 - RNA, 19 nt, Artificial Sequence
  Description of Artificial Sequence: Synthetic oligonucleotide
  Antisense strand to SEQ ID NO: 1265272
uuaacuaaacccaagaguc

SEQ ID NO: 1265274 - RNA, 19 nt, Artificial Sequence
  Description of Artificial Sequence: Synthetic oligonucleotide
  Sense strand starting at position 2571 of SEQ ID NO: 1241344
gugggucccuaugucuaga

SEQ ID NO: 1265275 - RNA, 19 nt, Artificial Sequence
  Description of Artificial Sequence: Synthetic oligonucleotide
  Antisense strand to SEQ ID NO: 1265274
ucuagacauagggacccac

SEQ ID NO: 1265276 - RNA, 19 nt, Artificial Sequence
  Description of Artificial Sequence: Synthetic oligonucleotide
  Sense strand starting at position 2598 of SEQ ID NO: 1241344
auuuaugguugcuagaacu

SEQ ID NO: 1265277 - RNA, 19 nt, Artificial Sequence
  Description of Artificial Sequence: Synthetic oligonucleotide
  Antisense strand to SEQ ID NO: 1265276
aguucuagcaaccauaaau

SEQ ID NO: 1265278 - RNA, 19 nt, Artificial Sequence
  Description of Artificial Sequence: Synthetic oligonucleotide
  Sense strand starting at position 2609 of SEQ ID NO: 1241344
cuagaacuuugauccugga

SEQ ID NO: 1265279 - RNA, 19 nt, Artificial Sequence
  Description of Artificial Sequence: Synthetic oligonucleotide
  Antisense strand to SEQ ID NO: 1265278
uccaggaucaaaguucuag

SEQ ID NO: 1265280 - RNA, 19 nt, Artificial Sequence
  Description of Artificial Sequence: Synthetic oligonucleotide
  Sense strand starting at position 2811 of SEQ ID NO: 1241344
aacgcaguugugcagauuu

SEQ ID NO: 1265281 - RNA, 19 nt, Artificial Sequence
  Description of Artificial Sequence: Synthetic oligonucleotide
  Antisense strand to SEQ ID NO: 1265280
aaaucugcacaacugcguu

SEQ ID NO: 1265282 - RNA, 19 nt, Artificial Sequence
  Description of Artificial Sequence: Synthetic oligonucleotide
  Sense strand starting at position 2843 of SEQ ID NO: 1241344
uuuacaguuccaugcaaag

SEQ ID NO: 1265283 - RNA, 19 nt, Artificial Sequence
  Description of Artificial Sequence: Synthetic oligonucleotide
  Antisense strand to SEQ ID NO: 1265282
cuuugcauggaacuguaaa

SEQ ID NO: 1265284 - RNA, 19 nt, Artificial Sequence
  Description of Artificial Sequence: Synthetic oligonucleotide
  Sense strand starting at position 2877 of SEQ ID NO: 1241344
guugguacaaauugugaaa

SEQ ID NO: 1265285 - RNA, 19 nt, Artificial Sequence
  Description of Artificial Sequence: Synthetic oligonucleotide
  Antisense strand to SEQ ID NO: 1265284
uuucacaauuuguaccaac

SEQ ID NO: 1265286 - RNA, 19 nt, Artificial Sequence
  Description of Artificial Sequence: Synthetic oligonucleotide
  Sense strand starting at position 2925 of SEQ ID NO: 1241344
ugacaucugcuguaacugu

SEQ ID NO: 1265287 - RNA, 19 nt, Artificial Sequence
  Description of Artificial Sequence: Synthetic oligonucleotide
  Antisense strand to SEQ ID NO: 1265286
acaguuacagcagauguca

SEQ ID NO: 1265288 - RNA, 19 nt, Artificial Sequence
  Description of Artificial Sequence: Synthetic oligonucleotide
  Sense strand starting at position 2973 of SEQ ID NO: 1241344
uccucacuugagggauuau

SEQ ID NO: 1265289 - RNA, 19 nt, Artificial Sequence
  Description of Artificial Sequence: Synthetic oligonucleotide
  Antisense strand to SEQ ID NO: 1265288
auaaucccucaagugagga

SEQ ID NO: 1265290 - RNA, 19 nt, Artificial Sequence
  Description of Artificial Sequence: Synthetic oligonucleotide
  Sense strand starting at position 2982 of SEQ ID NO: 1241344
gagggauuaucucauaaug

SEQ ID NO: 1265291 - RNA, 19 nt, Artificial Sequence
  Description of Artificial Sequence: Synthetic oligonucleotide
  Antisense strand to SEQ ID NO: 1265290
cauuaugagauaaucccuc

SEQ ID NO: 1265292 - RNA, 19 nt, Artificial Sequence
  Description of Artificial Sequence: Synthetic oligonucleotide
  Sense strand starting at position 2999 of SEQ ID NO: 1241344
ugccgaaggugagcuuuaa

SEQ ID NO: 1265293 - RNA, 19 nt, Artificial Sequence
  Description of Artificial Sequence: Synthetic oligonucleotide
  Antisense strand to SEQ ID NO: 1265292
uuaaagcucaccuucggca

SEQ ID NO: 1265294 - RNA, 19 nt, Artificial Sequence
  Description of Artificial Sequence: Synthetic oligonucleotide
  Sense strand starting at position 3308 of SEQ ID NO: 1241344
gacauagaagcagguauua

SEQ ID NO: 1265295 - RNA, 19 nt, Artificial Sequence
  Description of Artificial Sequence: Synthetic oligonucleotide
  Antisense strand to SEQ ID NO: 1265294
uaauaccugcuucuauguc

SEQ ID NO: 1265296 - RNA, 19 nt, Artificial Sequence
  Description of Artificial Sequence: Synthetic oligonucleotide
  Sense strand starting at position 3352 of SEQ ID NO: 1241344
uagggaagccuguggaauu

SEQ ID NO: 1265297 - RNA, 19 nt, Artificial Sequence
  Description of Artificial Sequence: Synthetic oligonucleotide
  Antisense strand to SEQ ID NO: 1265296
aauuccacaggcuucccua

SEQ ID NO: 1265298 - RNA, 19 nt, Artificial Sequence
  Description of Artificial Sequence: Synthetic oligonucleotide
  Sense strand starting at position 3365 of SEQ ID NO: 1241344
ggaauuauucuaugcuaac

SEQ ID NO: 1265299 - RNA, 19 nt, Artificial Sequence
  Description of Artificial Sequence: Synthetic oligonucleotide
  Antisense strand to SEQ ID NO: 1265298
guuagcauagaauaauucc

SEQ ID NO: 1265300 - RNA, 19 nt, Artificial Sequence
  Description of Artificial Sequence: Synthetic oligonucleotide
  Sense strand starting at position 3381 of SEQ ID NO: 1241344
aacaauguagcuuggucau

SEQ ID NO: 1265301 - RNA, 19 nt, Artificial Sequence
  Description of Artificial Sequence: Synthetic oligonucleotide
  Antisense strand to SEQ ID NO: 1265300
augaccaagcuacauuguu

SEQ ID NO: 1265302 - RNA, 19 nt, Artificial Sequence
  Description of Artificial Sequence: Synthetic oligonucleotide
  Sense strand starting at position 3383 of SEQ ID NO: 1241344
caauguagcuuggucauua

SEQ ID NO: 1265303 - RNA, 19 nt, Artificial Sequence
  Description of Artificial Sequence: Synthetic oligonucleotide
  Antisense strand to SEQ ID NO: 1265302
uaaugaccaagcuacauug

SEQ ID NO: 1265304 - RNA, 19 nt, Artificial Sequence
  Description of Artificial Sequence: Synthetic oligonucleotide
  Sense strand starting at position 3384 of SEQ ID NO: 1241344
aauguagcuuggucauuau

SEQ ID NO: 1265305 - RNA, 19 nt, Artificial Sequence
  Description of Artificial Sequence: Synthetic oligonucleotide
  Antisense strand to SEQ ID NO: 1265304
auaaugaccaagcuacauu

SEQ ID NO: 1265306 - RNA, 19 nt, Artificial Sequence
  Description of Artificial Sequence: Synthetic oligonucleotide
  Sense strand starting at position 3387 of SEQ ID NO: 1241344
guagcuuggucauuauaau

SEQ ID NO: 1265307 - RNA, 19 nt, Artificial Sequence
  Description of Artificial Sequence: Synthetic oligonucleotide
  Antisense strand to SEQ ID NO: 1265306
auuauaaugaccaagcuac

SEQ ID NO: 1265308 - RNA, 19 nt, Artificial Sequence
  Description of Artificial Sequence: Synthetic oligonucleotide
  Sense strand starting at position 3597 of SEQ ID NO: 1241344
uuaagagcggguuaugaga

SEQ ID NO: 1265309 - RNA, 19 nt, Artificial Sequence
  Description of Artificial Sequence: Synthetic oligonucleotide
  Antisense strand to SEQ ID NO: 1265308
ucucauaacccgcucuuaa

SEQ ID NO: 1265310 - RNA, 19 nt, Artificial Sequence
  Description of Artificial Sequence: Synthetic oligonucleotide
  Sense strand starting at position 3880 of SEQ ID NO: 1241344
gauaccuccuggucagaau

SEQ ID NO: 1265311 - RNA, 19 nt, Artificial Sequence
  Description of Artificial Sequence: Synthetic oligonucleotide
  Antisense strand to SEQ ID NO: 1265310
auucugaccaggagguauc

SEQ ID NO: 1265312 - RNA, 19 nt, Artificial Sequence
  Description of Artificial Sequence: Synthetic oligonucleotide
  Sense strand starting at position 3881 of SEQ ID NO: 1241344
auaccuccuggucagaauu

SEQ ID NO: 1265313 - RNA, 19 nt, Artificial Sequence
  Description of Artificial Sequence: Synthetic oligonucleotide
  Antisense strand to SEQ ID NO: 1265312
aauucugaccaggagguau

SEQ ID NO: 1265314 - RNA, 19 nt, Artificial Sequence
  Description of Artificial Sequence: Synthetic oligonucleotide
  Sense strand starting at position 3892 of SEQ ID NO: 1241344
ucagaauuaucugcugggu

SEQ ID NO: 1265315 - RNA, 19 nt, Artificial Sequence
  Description of Artificial Sequence: Synthetic oligonucleotide
  Antisense strand to SEQ ID NO: 1265314
acccagcagauaauucuga

SEQ ID NO: 1265316 - RNA, 19 nt, Artificial Sequence
  Description of Artificial Sequence: Synthetic oligonucleotide
  Sense strand starting at position 256 of SEQ ID NO: 1241345
cuaugauuccucuacagua

SEQ ID NO: 1265317 - RNA, 19 nt, Artificial Sequence
  Description of Artificial Sequence: Synthetic oligonucleotide
  Antisense strand to SEQ ID NO: 1265316
uacuguagaggaaucauag

SEQ ID NO: 1265318 - RNA, 19 nt, Artificial Sequence
  Description of Artificial Sequence: Synthetic oligonucleotide
  Sense strand starting at position 258 of SEQ ID NO: 1241345
augauuccucuacaguagu

SEQ ID NO: 1265319 - RNA, 19 nt, Artificial Sequence
  Description of Artificial Sequence: Synthetic oligonucleotide
  Antisense strand to SEQ ID NO: 1265318
acuacuguagaggaaucau

SEQ ID NO: 1265320 - RNA, 19 nt, Artificial Sequence
  Description of Artificial Sequence: Synthetic oligonucleotide
  Sense strand starting at position 268 of SEQ ID NO: 1241345
uacaguaguucugucauuu

SEQ ID NO: 1265321 - RNA, 19 nt, Artificial Sequence
  Description of Artificial Sequence: Synthetic oligonucleotide
  Antisense strand to SEQ ID NO: 1265320
aaaugacagaacuacugua

SEQ ID NO: 1265322 - RNA, 19 nt, Artificial Sequence
  Description of Artificial Sequence: Synthetic oligonucleotide
  Sense strand starting at position 272 of SEQ ID NO: 1241345
guaguucugucauuuauug

SEQ ID NO: 1265323 - RNA, 19 nt, Artificial Sequence
  Description of Artificial Sequence: Synthetic oligonucleotide
  Antisense strand to SEQ ID NO: 1265322
caauaaaugacagaacuac

SEQ ID NO: 1265324 - RNA, 19 nt, Artificial Sequence
  Description of Artificial Sequence: Synthetic oligonucleotide
  Sense strand starting at position 363 of SEQ ID NO: 1241345
ugucuuccucaggagggua

SEQ ID NO: 1265325 - RNA, 19 nt, Artificial Sequence
  Description of Artificial Sequence: Synthetic oligonucleotide
  Antisense strand to SEQ ID NO: 1265324
uacccuccugaggaagaca

SEQ ID NO: 1265326 - RNA, 19 nt, Artificial Sequence
  Description of Artificial Sequence: Synthetic oligonucleotide
  Sense strand starting at position 451 of SEQ ID NO: 1241345
cuaguugcuuaauuaaaga

SEQ ID NO: 1265327 - RNA, 19 nt, Artificial Sequence
  Description of Artificial Sequence: Synthetic oligonucleotide
  Antisense strand to SEQ ID NO: 1265326
ucuuuaauuaagcaacuag

SEQ ID NO: 1265328 - RNA, 19 nt, Artificial Sequence
  Description of Artificial Sequence: Synthetic oligonucleotide
  Sense strand starting at position 461 of SEQ ID NO: 1241345
aauuaaagaugugcuggau

SEQ ID NO: 1265329 - RNA, 19 nt, Artificial Sequence
  Description of Artificial Sequence: Synthetic oligonucleotide
  Antisense strand to SEQ ID NO: 1265328
auccagcacaucuuuaauu

SEQ ID NO: 1265330 - RNA, 19 nt, Artificial Sequence
  Description of Artificial Sequence: Synthetic oligonucleotide
  Sense strand starting at position 831 of SEQ ID NO: 1241345
guaagacaucuggguuucu

SEQ ID NO: 1265331 - RNA, 19 nt, Artificial Sequence
  Description of Artificial Sequence: Synthetic oligonucleotide
  Antisense strand to SEQ ID NO: 1265330
agaaacccagaugucuuac

SEQ ID NO: 1265332 - RNA, 19 nt, Artificial Sequence
  Description of Artificial Sequence: Synthetic oligonucleotide
  Sense strand starting at position 832 of SEQ ID NO: 1241345
uaagacaucuggguuucua

SEQ ID NO: 1265333 - RNA, 19 nt, Artificial Sequence
  Description of Artificial Sequence: Synthetic oligonucleotide
  Antisense strand to SEQ ID NO: 1265332
uagaaacccagaugucuua

SEQ ID NO: 1265334 - RNA, 19 nt, Artificial Sequence
  Description of Artificial Sequence: Synthetic oligonucleotide
  Sense strand starting at position 840 of SEQ ID NO: 1241345
cuggguuucuauucuuaaa

SEQ ID NO: 1265335 - RNA, 19 nt, Artificial Sequence
  Description of Artificial Sequence: Synthetic oligonucleotide
  Antisense strand to SEQ ID NO: 1265334
uuuaagaauagaaacccag

SEQ ID NO: 1265336 - RNA, 19 nt, Artificial Sequence
  Description of Artificial Sequence: Synthetic oligonucleotide
  Sense strand starting at position 861 of SEQ ID NO: 1241345
aagugaaacuuggucaaau

SEQ ID NO: 1265337 - RNA, 19 nt, Artificial Sequence
  Description of Artificial Sequence: Synthetic oligonucleotide
  Antisense strand to SEQ ID NO: 1265336
auuugaccaaguuucacuu

SEQ ID NO: 1265338 - RNA, 19 nt, Artificial Sequence
  Description of Artificial Sequence: Synthetic oligonucleotide
  Sense strand starting at position 862 of SEQ ID NO: 1241345
agugaaacuuggucaaauu

SEQ ID NO: 1265339 - RNA, 19 nt, Artificial Sequence
  Description of Artificial Sequence: Synthetic oligonucleotide
  Antisense strand to SEQ ID NO: 1265338
aauuugaccaaguuucacu

SEQ ID NO: 1265340 - RNA, 19 nt, Artificial Sequence
  Description of Artificial Sequence: Synthetic oligonucleotide
  Sense strand starting at position 863 of SEQ ID NO: 1241345
gugaaacuuggucaaauuc

SEQ ID NO: 1265341 - RNA, 19 nt, Artificial Sequence
  Description of Artificial Sequence: Synthetic oligonucleotide
  Antisense strand to SEQ ID NO: 1265340
gaauuugaccaaguuucac

SEQ ID NO: 1265342 - RNA, 19 nt, Artificial Sequence
  Description of Artificial Sequence: Synthetic oligonucleotide
  Sense strand starting at position 888 of SEQ ID NO: 1241345
ugcaaagcacacuaagauu

SEQ ID NO: 1265343 - RNA, 19 nt, Artificial Sequence
  Description of Artificial Sequence: Synthetic oligonucleotide
  Antisense strand to SEQ ID NO: 1265342
aaucuuagugugcuuugca

SEQ ID NO: 1265344 - RNA, 19 nt, Artificial Sequence
  Description of Artificial Sequence: Synthetic oligonucleotide
  Sense strand starting at position 1306 of SEQ ID NO: 1241345
uaggaagagcguuagucuu

SEQ ID NO: 1265345 - RNA, 19 nt, Artificial Sequence
  Description of Artificial Sequence: Synthetic oligonucleotide
  Antisense strand to SEQ ID NO: 1265344
aagacuaacgcucuuccua

SEQ ID NO: 1265346 - RNA, 19 nt, Artificial Sequence
  Description of Artificial Sequence: Synthetic oligonucleotide
  Sense strand starting at position 1341 of SEQ ID NO: 1241345
ggguaaucuccagacgguu

SEQ ID NO: 1265347 - RNA, 19 nt, Artificial Sequence
  Description of Artificial Sequence: Synthetic oligonucleotide
  Antisense strand to SEQ ID NO: 1265346
aaccgucuggagauuaccc

SEQ ID NO: 1265348 - RNA, 19 nt, Artificial Sequence
  Description of Artificial Sequence: Synthetic oligonucleotide
  Sense strand starting at position 1343 of SEQ ID NO: 1241345
guaaucuccagacgguuaa

SEQ ID NO: 1265349 - RNA, 19 nt, Artificial Sequence
  Description of Artificial Sequence: Synthetic oligonucleotide
  Antisense strand to SEQ ID NO: 1265348
uuaaccgucuggagauuac

SEQ ID NO: 1265350 - RNA, 19 nt, Artificial Sequence
  Description of Artificial Sequence: Synthetic oligonucleotide
  Sense strand starting at position 1344 of SEQ ID NO: 1241345
uaaucuccagacgguuaau

SEQ ID NO: 1265351 - RNA, 19 nt, Artificial Sequence
  Description of Artificial Sequence: Synthetic oligonucleotide
  Antisense strand to SEQ ID NO: 1265350
auuaaccgucuggagauua

SEQ ID NO: 1265352 - RNA, 19 nt, Artificial Sequence
  Description of Artificial Sequence: Synthetic oligonucleotide
  Sense strand starting at position 1347 of SEQ ID NO: 1241345
ucuccagacgguuaauaaa

SEQ ID NO: 1265353 - RNA, 19 nt, Artificial Sequence
  Description of Artificial Sequence: Synthetic oligonucleotide
  Antisense strand to SEQ ID NO: 1265352
uuuauuaaccgucuggaga

SEQ ID NO: 1265354 - RNA, 19 nt, Artificial Sequence
  Description of Artificial Sequence: Synthetic oligonucleotide
  Sense strand starting at position 1463 of SEQ ID NO: 1241345
auaaguaauaaacgcgaua

SEQ ID NO: 1265355 - RNA, 19 nt, Artificial Sequence
  Description of Artificial Sequence: Synthetic oligonucleotide
  Antisense strand to SEQ ID NO: 1265354
uaucgcguuuauuacuuau

SEQ ID NO: 1265356 - RNA, 19 nt, Artificial Sequence
  Description of Artificial Sequence: Synthetic oligonucleotide
  Sense strand starting at position 1466 of SEQ ID NO: 1241345
aguaauaaacgcgauaaau

SEQ ID NO: 1265357 - RNA, 19 nt, Artificial Sequence
  Description of Artificial Sequence: Synthetic oligonucleotide
  Antisense strand to SEQ ID NO: 1265356
auuuaucgcguuuauuacu

SEQ ID NO: 1265358 - RNA, 19 nt, Artificial Sequence
  Description of Artificial Sequence: Synthetic oligonucleotide
  Sense strand starting at position 1598 of SEQ ID NO: 1241345
uucugaaauuaucuggauu

SEQ ID NO: 1265359 - RNA, 19 nt, Artificial Sequence
  Description of Artificial Sequence: Synthetic oligonucleotide
  Antisense strand to SEQ ID NO: 1265358
aauccagauaauuucagaa

SEQ ID NO: 1265360 - RNA, 19 nt, Artificial Sequence
  Description of Artificial Sequence: Synthetic oligonucleotide
  Sense strand starting at position 1640 of SEQ ID NO: 1241345
ucuugauacgugcaaucac

SEQ ID NO: 1265361 - RNA, 19 nt, Artificial Sequence
  Description of Artificial Sequence: Synthetic oligonucleotide
  Antisense strand to SEQ ID NO: 1265360
gugauugcacguaucaaga

SEQ ID NO: 1265362 - RNA, 19 nt, Artificial Sequence
  Description of Artificial Sequence: Synthetic oligonucleotide
  Sense strand starting at position 2044 of SEQ ID NO: 1241345
ggcaguuuagggagcguua

SEQ ID NO: 1265363 - RNA, 19 nt, Artificial Sequence
  Description of Artificial Sequence: Synthetic oligonucleotide
  Antisense strand to SEQ ID NO: 1265362
uaacgcucccuaaacugcc

SEQ ID NO: 1265364 - RNA, 19 nt, Artificial Sequence
  Description of Artificial Sequence: Synthetic oligonucleotide
  Sense strand starting at position 2238 of SEQ ID NO: 1241345
cuaguagugagggauccuu

SEQ ID NO: 1265365 - RNA, 19 nt, Artificial Sequence
  Description of Artificial Sequence: Synthetic oligonucleotide
  Antisense strand to SEQ ID NO: 1265364
aaggaucccucacuacuag

SEQ ID NO: 1265366 - RNA, 19 nt, Artificial Sequence
  Description of Artificial Sequence: Synthetic oligonucleotide
  Sense strand starting at position 2350 of SEQ ID NO: 1241345
ugauucuuagaacagucuu

SEQ ID NO: 1265367 - RNA, 19 nt, Artificial Sequence
  Description of Artificial Sequence: Synthetic oligonucleotide
  Antisense strand to SEQ ID NO: 1265366
aagacuguucuaagaauca

SEQ ID NO: 1265368 - RNA, 19 nt, Artificial Sequence
  Description of Artificial Sequence: Synthetic oligonucleotide
  Sense strand starting at position 2451 of SEQ ID NO: 1241345
ugcgaugccaaaugaauga

SEQ ID NO: 1265369 - RNA, 19 nt, Artificial Sequence
  Description of Artificial Sequence: Synthetic oligonucleotide
  Antisense strand to SEQ ID NO: 1265368
ucauucauuuggcaucgca

SEQ ID NO: 1265370 - RNA, 19 nt, Artificial Sequence
  Description of Artificial Sequence: Synthetic oligonucleotide
  Sense strand starting at position 2514 of SEQ ID NO: 1241345
agaucacuguauguuuauu

SEQ ID NO: 1265371 - RNA, 19 nt, Artificial Sequence
  Description of Artificial Sequence: Synthetic oligonucleotide
  Antisense strand to SEQ ID NO: 1265370
aauaaacauacagugaucu

SEQ ID NO: 1265372 - RNA, 19 nt, Artificial Sequence
  Description of Artificial Sequence: Synthetic oligonucleotide
  Sense strand starting at position 2667 of SEQ ID NO: 1241345
caaucuuguuagguagaua

SEQ ID NO: 1265373 - RNA, 19 nt, Artificial Sequence
  Description of Artificial Sequence: Synthetic oligonucleotide
  Antisense strand to SEQ ID NO: 1265372
uaucuaccuaacaagauug

SEQ ID NO: 1265374 - RNA, 19 nt, Artificial Sequence
  Description of Artificial Sequence: Synthetic oligonucleotide
  Sense strand starting at position 2672 of SEQ ID NO: 1241345
uuguuagguagauaguauu

SEQ ID NO: 1265375 - RNA, 19 nt, Artificial Sequence
  Description of Artificial Sequence: Synthetic oligonucleotide
  Antisense strand to SEQ ID NO: 1265374
aauacuaucuaccuaacaa

SEQ ID NO: 1265376 - RNA, 19 nt, Artificial Sequence
  Description of Artificial Sequence: Synthetic oligonucleotide
  Sense strand starting at position 2855 of SEQ ID NO: 1241345
uuuaguuugcaaggaauug

SEQ ID NO: 1265377 - RNA, 19 nt, Artificial Sequence
  Description of Artificial Sequence: Synthetic oligonucleotide
  Antisense strand to SEQ ID NO: 1265376
caauuccuugcaaacuaaa

SEQ ID NO: 1265378 - RNA, 19 nt, Artificial Sequence
  Description of Artificial Sequence: Synthetic oligonucleotide
  Sense strand starting at position 2856 of SEQ ID NO: 1241345
uuaguuugcaaggaauuga

SEQ ID NO: 1265379 - RNA, 19 nt, Artificial Sequence
  Description of Artificial Sequence: Synthetic oligonucleotide
  Antisense strand to SEQ ID NO: 1265378
ucaauuccuugcaaacuaa

SEQ ID NO: 1265380 - RNA, 19 nt, Artificial Sequence
  Description of Artificial Sequence: Synthetic oligonucleotide
  Sense strand starting at position 2912 of SEQ ID NO: 1241345
ugaggauaguccuuagcuu

SEQ ID NO: 1265381 - RNA, 19 nt, Artificial Sequence
  Description of Artificial Sequence: Synthetic oligonucleotide
  Antisense strand to SEQ ID NO: 1265380
aagcuaaggacuauccuca

SEQ ID NO: 1265382 - RNA, 19 nt, Artificial Sequence
  Description of Artificial Sequence: Synthetic oligonucleotide
  Sense strand starting at position 2913 of SEQ ID NO: 1241345
gaggauaguccuuagcuua

SEQ ID NO: 1265383 - RNA, 19 nt, Artificial Sequence
  Description of Artificial Sequence: Synthetic oligonucleotide
  Antisense strand to SEQ ID NO: 1265382
uaagcuaaggacuauccuc

SEQ ID NO: 1265384 - RNA, 19 nt, Artificial Sequence
  Description of Artificial Sequence: Synthetic oligonucleotide
  Sense strand starting at position 2920 of SEQ ID NO: 1241345
guccuuagcuuauuuaagu

SEQ ID NO: 1265385 - RNA, 19 nt, Artificial Sequence
  Description of Artificial Sequence: Synthetic oligonucleotide
  Antisense strand to SEQ ID NO: 1265384
acuuaaauaagcuaaggac

SEQ ID NO: 1265386 - RNA, 19 nt, Artificial Sequence
  Description of Artificial Sequence: Synthetic oligonucleotide
  Sense strand starting at position 2936 of SEQ ID NO: 1241345
aguacuuaaugcuuaggaa

SEQ ID NO: 1265387 - RNA, 19 nt, Artificial Sequence
  Description of Artificial Sequence: Synthetic oligonucleotide
  Antisense strand to SEQ ID NO: 1265386
uuccuaagcauuaaguacu

SEQ ID NO: 1265388 - RNA, 19 nt, Artificial Sequence
  Description of Artificial Sequence: Synthetic oligonucleotide
  Sense strand starting at position 2937 of SEQ ID NO: 1241345
guacuuaaugcuuaggaac

SEQ ID NO: 1265389 - RNA, 19 nt, Artificial Sequence
  Description of Artificial Sequence: Synthetic oligonucleotide
  Antisense strand to SEQ ID NO: 1265388
guuccuaagcauuaaguac

SEQ ID NO: 1265390 - RNA, 19 nt, Artificial Sequence
  Description of Artificial Sequence: Synthetic oligonucleotide
  Sense strand starting at position 3120 of SEQ ID NO: 1241345
uaaguagugacgugaggac

SEQ ID NO: 1265391 - RNA, 19 nt, Artificial Sequence
  Description of Artificial Sequence: Synthetic oligonucleotide
  Antisense strand to SEQ ID NO: 1265390
guccucacgucacuacuua

SEQ ID NO: 1265392 - RNA, 19 nt, Artificial Sequence
  Description of Artificial Sequence: Synthetic oligonucleotide
  Sense strand starting at position 3124 of SEQ ID NO: 1241345
uagugacgugaggacuaaa

SEQ ID NO: 1265393 - RNA, 19 nt, Artificial Sequence
  Description of Artificial Sequence: Synthetic oligonucleotide
  Antisense strand to SEQ ID NO: 1265392
uuuaguccucacgucacua

SEQ ID NO: 1265394 - RNA, 19 nt, Artificial Sequence
  Description of Artificial Sequence: Synthetic oligonucleotide
  Sense strand starting at position 3669 of SEQ ID NO: 1241345
guucuuuguggaggaaauu

SEQ ID NO: 1265395 - RNA, 19 nt, Artificial Sequence
  Description of Artificial Sequence: Synthetic oligonucleotide
  Antisense strand to SEQ ID NO: 1265394
aauuuccuccacaaagaac

SEQ ID NO: 1265396 - RNA, 19 nt, Artificial Sequence
  Description of Artificial Sequence: Synthetic oligonucleotide
  Sense strand starting at position 286 of SEQ ID NO: 1241346
gugcuuucugugccaggua

SEQ ID NO: 1265397 - RNA, 19 nt, Artificial Sequence
  Description of Artificial Sequence: Synthetic oligonucleotide
  Antisense strand to SEQ ID NO: 1265396
uaccuggcacagaaagcac

SEQ ID NO: 1265398 - RNA, 19 nt, Artificial Sequence
  Description of Artificial Sequence: Synthetic oligonucleotide
  Sense strand starting at position 385 of SEQ ID NO: 1241346
aggugagugacuuaaguuu

SEQ ID NO: 1265399 - RNA, 19 nt, Artificial Sequence
  Description of Artificial Sequence: Synthetic oligonucleotide
  Antisense strand to SEQ ID NO: 1265398
aaacuuaagucacucaccu

SEQ ID NO: 1265400 - RNA, 19 nt, Artificial Sequence
  Description of Artificial Sequence: Synthetic oligonucleotide
  Sense strand starting at position 465 of SEQ ID NO: 1241346
ucaucauuguaagcaauga

SEQ ID NO: 1265401 - RNA, 19 nt, Artificial Sequence
  Description of Artificial Sequence: Synthetic oligonucleotide
  Antisense strand to SEQ ID NO: 1265400
ucauugcuuacaaugauga

SEQ ID NO: 1265402 - RNA, 19 nt, Artificial Sequence
  Description of Artificial Sequence: Synthetic oligonucleotide
  Sense strand starting at position 473 of SEQ ID NO: 1241346
guaagcaaugacuaugauu

SEQ ID NO: 1265403 - RNA, 19 nt, Artificial Sequence
  Description of Artificial Sequence: Synthetic oligonucleotide
  Antisense strand to SEQ ID NO: 1265402
aaucauagucauugcuuac

SEQ ID NO: 1265404 - RNA, 19 nt, Artificial Sequence
  Description of Artificial Sequence: Synthetic oligonucleotide
  Sense strand starting at position 577 of SEQ ID NO: 1241346
ggacucagucacugaaagu

SEQ ID NO: 1265405 - RNA, 19 nt, Artificial Sequence
  Description of Artificial Sequence: Synthetic oligonucleotide
  Antisense strand to SEQ ID NO: 1265404
acuuucagugacugagucc

SEQ ID NO: 1265406 - RNA, 19 nt, Artificial Sequence
  Description of Artificial Sequence: Synthetic oligonucleotide
  Sense strand starting at position 590 of SEQ ID NO: 1241346
gaaagucucuaacugggau

SEQ ID NO: 1265407 - RNA, 19 nt, Artificial Sequence
  Description of Artificial Sequence: Synthetic oligonucleotide
  Antisense strand to SEQ ID NO: 1265406
aucccaguuagagacuuuc

SEQ ID NO: 1265408 - RNA, 19 nt, Artificial Sequence
  Description of Artificial Sequence: Synthetic oligonucleotide
  Sense strand starting at position 602 of SEQ ID NO: 1241346
cugggaugcagguauccua

SEQ ID NO: 1265409 - RNA, 19 nt, Artificial Sequence
  Description of Artificial Sequence: Synthetic oligonucleotide
  Antisense strand to SEQ ID NO: 1265408
uaggauaccugcaucccag

SEQ ID NO: 1265410 - RNA, 19 nt, Artificial Sequence
  Description of Artificial Sequence: Synthetic oligonucleotide
  Sense strand starting at position 618 of SEQ ID NO: 1241346
cuaagucacucucuagaag

SEQ ID NO: 1265411 - RNA, 19 nt, Artificial Sequence
  Description of Artificial Sequence: Synthetic oligonucleotide
  Antisense strand to SEQ ID NO: 1265410
cuucuagagagugacuuag

SEQ ID NO: 1265412 - RNA, 19 nt, Artificial Sequence
  Description of Artificial Sequence: Synthetic oligonucleotide
  Sense strand starting at position 728 of SEQ ID NO: 1241346
ucagauaagacuggcgaau

SEQ ID NO: 1265413 - RNA, 19 nt, Artificial Sequence
  Description of Artificial Sequence: Synthetic oligonucleotide
  Antisense strand to SEQ ID NO: 1265412
auucgccagucuuaucuga

SEQ ID NO: 1265414 - RNA, 19 nt, Artificial Sequence
  Description of Artificial Sequence: Synthetic oligonucleotide
  Sense strand starting at position 913 of SEQ ID NO: 1241346
agcccuggcccacauaaau

SEQ ID NO: 1265415 - RNA, 19 nt, Artificial Sequence
  Description of Artificial Sequence: Synthetic oligonucleotide
  Antisense strand to SEQ ID NO: 1265414
auuuaugugggccagggcu

SEQ ID NO: 1265416 - RNA, 19 nt, Artificial Sequence
  Description of Artificial Sequence: Synthetic oligonucleotide
  Sense strand starting at position 957 of SEQ ID NO: 1241346
gccaaaugucaugacucuu

SEQ ID NO: 1265417 - RNA, 19 nt, Artificial Sequence
  Description of Artificial Sequence: Synthetic oligonucleotide
  Antisense strand to SEQ ID NO: 1265416
aagagucaugacauuuggc

SEQ ID NO: 1265418 - RNA, 19 nt, Artificial Sequence
  Description of Artificial Sequence: Synthetic oligonucleotide
  Sense strand starting at position 1314 of SEQ ID NO: 1241346
cuauauuagcucgaaguga

SEQ ID NO: 1265419 - RNA, 19 nt, Artificial Sequence
  Description of Artificial Sequence: Synthetic oligonucleotide
  Antisense strand to SEQ ID NO: 1265418
ucacuucgagcuaauauag

SEQ ID NO: 1265420 - RNA, 19 nt, Artificial Sequence
  Description of Artificial Sequence: Synthetic oligonucleotide
  Sense strand starting at position 1322 of SEQ ID NO: 1241346
gcucgaagugaggauaagu

SEQ ID NO: 1265421 - RNA, 19 nt, Artificial Sequence
  Description of Artificial Sequence: Synthetic oligonucleotide
  Antisense strand to SEQ ID NO: 1265420
acuuauccucacuucgagc

SEQ ID NO: 1265422 - RNA, 19 nt, Artificial Sequence
  Description of Artificial Sequence: Synthetic oligonucleotide
  Sense strand starting at position 2144 of SEQ ID NO: 1241346
gucggcaaccgcuuuguua

SEQ ID NO: 1265423 - RNA, 19 nt, Artificial Sequence
  Description of Artificial Sequence: Synthetic oligonucleotide
  Antisense strand to SEQ ID NO: 1265422
uaacaaagcgguugccgac

SEQ ID NO: 1265424 - RNA, 19 nt, Artificial Sequence
  Description of Artificial Sequence: Synthetic oligonucleotide
  Sense strand starting at position 2156 of SEQ ID NO: 1241346
uuuguuaguuaauuggaga

SEQ ID NO: 1265425 - RNA, 19 nt, Artificial Sequence
  Description of Artificial Sequence: Synthetic oligonucleotide
  Antisense strand to SEQ ID NO: 1265424
ucuccaauuaacuaacaaa

SEQ ID NO: 1265426 - RNA, 19 nt, Artificial Sequence
  Description of Artificial Sequence: Synthetic oligonucleotide
  Sense strand starting at position 2361 of SEQ ID NO: 1241346
gugucagcggcgguugaau

SEQ ID NO: 1265427 - RNA, 19 nt, Artificial Sequence
  Description of Artificial Sequence: Synthetic oligonucleotide
  Antisense strand to SEQ ID NO: 1265426
auucaaccgccgcugacac

SEQ ID NO: 1265428 - RNA, 19 nt, Artificial Sequence
  Description of Artificial Sequence: Synthetic oligonucleotide
  Sense strand starting at position 2644 of SEQ ID NO: 1241346
cgcgauuauuucucuagaa

SEQ ID NO: 1265429 - RNA, 19 nt, Artificial Sequence
  Description of Artificial Sequence: Synthetic oligonucleotide
  Antisense strand to SEQ ID NO: 1265428
uucuagagaaauaaucgcg

SEQ ID NO: 1265430 - RNA, 19 nt, Artificial Sequence
  Description of Artificial Sequence: Synthetic oligonucleotide
  Sense strand starting at position 2702 of SEQ ID NO: 1241346
ugugauuuccucuggguuu

SEQ ID NO: 1265431 - RNA, 19 nt, Artificial Sequence
  Description of Artificial Sequence: Synthetic oligonucleotide
  Antisense strand to SEQ ID NO: 1265430
aaacccagaggaaaucaca

SEQ ID NO: 1265432 - RNA, 19 nt, Artificial Sequence
  Description of Artificial Sequence: Synthetic oligonucleotide
  Sense strand starting at position 3180 of SEQ ID NO: 1241346
uuaccagugcuugacaaua

SEQ ID NO: 1265433 - RNA, 19 nt, Artificial Sequence
  Description of Artificial Sequence: Synthetic oligonucleotide
  Antisense strand to SEQ ID NO: 1265432
uauugucaagcacugguaa

SEQ ID NO: 1265434 - RNA, 19 nt, Artificial Sequence
  Description of Artificial Sequence: Synthetic oligonucleotide
  Sense strand starting at position 3203 of SEQ ID NO: 1241346
guuauuuacuagcuugguu

SEQ ID NO: 1265435 - RNA, 19 nt, Artificial Sequence
  Description of Artificial Sequence: Synthetic oligonucleotide
  Antisense strand to SEQ ID NO: 1265434
aaccaagcuaguaaauaac

SEQ ID NO: 1265436 - RNA, 19 nt, Artificial Sequence
  Description of Artificial Sequence: Synthetic oligonucleotide
  Sense strand starting at position 3206 of SEQ ID NO: 1241346
auuuacuagcuugguuauu

SEQ ID NO: 1265437 - RNA, 19 nt, Artificial Sequence
  Description of Artificial Sequence: Synthetic oligonucleotide
  Antisense strand to SEQ ID NO: 1265436
aauaaccaagcuaguaaau

SEQ ID NO: 1265438 - RNA, 19 nt, Artificial Sequence
  Description of Artificial Sequence: Synthetic oligonucleotide
  Sense strand starting at position 3302 of SEQ ID NO: 1241346
cuccuauuggcgggaagaa

SEQ ID NO: 1265439 - RNA, 19 nt, Artificial Sequence
  Description of Artificial Sequence: Synthetic oligonucleotide
  Antisense strand to SEQ ID NO: 1265438
uucuucccgccaauaggag

SEQ ID NO: 1265440 - RNA, 19 nt, Artificial Sequence
  Description of Artificial Sequence: Synthetic oligonucleotide
  Sense strand starting at position 3303 of SEQ ID NO: 1241346
uccuauuggcgggaagaau

SEQ ID NO: 1265441 - RNA, 19 nt, Artificial Sequence
  Description of Artificial Sequence: Synthetic oligonucleotide
  Antisense strand to SEQ ID NO: 1265440
auucuucccgccaauagga

SEQ ID NO: 1265442 - RNA, 19 nt, Artificial Sequence
  Description of Artificial Sequence: Synthetic oligonucleotide
  Sense strand starting at position 3343 of SEQ ID NO: 1241346
guggacuugcuacauaauc

SEQ ID NO: 1265443 - RNA, 19 nt, Artificial Sequence
  Description of Artificial Sequence: Synthetic oligonucleotide
  Antisense strand to SEQ ID NO: 1265442
gauuauguagcaaguccac

SEQ ID NO: 1265444 - RNA, 19 nt, Artificial Sequence
  Description of Artificial Sequence: Synthetic oligonucleotide
  Sense strand starting at position 3352 of SEQ ID NO: 1241346
cuacauaaucuguagucuu

SEQ ID NO: 1265445 - RNA, 19 nt, Artificial Sequence
  Description of Artificial Sequence: Synthetic oligonucleotide
  Antisense strand to SEQ ID NO: 1265444
aagacuacagauuauguag

SEQ ID NO: 1265446 - RNA, 19 nt, Artificial Sequence
  Description of Artificial Sequence: Synthetic oligonucleotide
  Sense strand starting at position 3355 of SEQ ID NO: 1241346
cauaaucuguagucuugga

SEQ ID NO: 1265447 - RNA, 19 nt, Artificial Sequence
  Description of Artificial Sequence: Synthetic oligonucleotide
  Antisense strand to SEQ ID NO: 1265446
uccaagacuacagauuaug

SEQ ID NO: 1265448 - RNA, 19 nt, Artificial Sequence
  Description of Artificial Sequence: Synthetic oligonucleotide
  Sense strand starting at position 3515 of SEQ ID NO: 1241346
ggugauaaugacugggcua

SEQ ID NO: 1265449 - RNA, 19 nt, Artificial Sequence
  Description of Artificial Sequence: Synthetic oligonucleotide
  Antisense strand to SEQ ID NO: 1265448
uagcccagucauuaucacc

SEQ ID NO: 1265450 - RNA, 19 nt, Artificial Sequence
  Description of Artificial Sequence: Synthetic oligonucleotide
  Sense strand starting at position 3516 of SEQ ID NO: 1241346
gugauaaugacugggcuau

SEQ ID NO: 1265451 - RNA, 19 nt, Artificial Sequence
  Description of Artificial Sequence: Synthetic oligonucleotide
  Antisense strand to SEQ ID NO: 1265450
auagcccagucauuaucac

SEQ ID NO: 1265452 - RNA, 19 nt, Artificial Sequence
  Description of Artificial Sequence: Synthetic oligonucleotide
  Sense strand starting at position 3520 of SEQ ID NO: 1241346
uaaugacugggcuauguca

SEQ ID NO: 1265453 - RNA, 19 nt, Artificial Sequence
  Description of Artificial Sequence: Synthetic oligonucleotide
  Antisense strand to SEQ ID NO: 1265452
ugacauagcccagucauua

SEQ ID NO: 1265454 - RNA, 19 nt, Artificial Sequence
  Description of Artificial Sequence: Synthetic oligonucleotide
  Sense strand starting at position 3528 of SEQ ID NO: 1241346
gggcuaugucauuaucuau

SEQ ID NO: 1265455 - RNA, 19 nt, Artificial Sequence
  Description of Artificial Sequence: Synthetic oligonucleotide
  Antisense strand to SEQ ID NO: 1265454
auagauaaugacauagccc

SEQ ID NO: 1265456 - RNA, 19 nt, Artificial Sequence
  Description of Artificial Sequence: Synthetic oligonucleotide
  Sense strand starting at position 3575 of SEQ ID NO: 1241346
cgagauauuguuuagcaga

SEQ ID NO: 1265457 - RNA, 19 nt, Artificial Sequence
  Description of Artificial Sequence: Synthetic oligonucleotide
  Antisense strand to SEQ ID NO: 1265456
ucugcuaaacaauaucucg

SEQ ID NO: 1265458 - RNA, 19 nt, Artificial Sequence
  Description of Artificial Sequence: Synthetic oligonucleotide
  Sense strand starting at position 3577 of SEQ ID NO: 1241346
agauauuguuuagcagaug

SEQ ID NO: 1265459 - RNA, 19 nt, Artificial Sequence
  Description of Artificial Sequence: Synthetic oligonucleotide
  Antisense strand to SEQ ID NO: 1265458
caucugcuaaacaauaucu

SEQ ID NO: 1265460 - RNA, 19 nt, Artificial Sequence
  Description of Artificial Sequence: Synthetic oligonucleotide
  Sense strand starting at position 3725 of SEQ ID NO: 1241346
aaaucaugucagugaguga

SEQ ID NO: 1265461 - RNA, 19 nt, Artificial Sequence
  Description of Artificial Sequence: Synthetic oligonucleotide
  Antisense strand to SEQ ID NO: 1265460
ucacucacugacaugauuu

SEQ ID NO: 1265462 - RNA, 19 nt, Artificial Sequence
  Description of Artificial Sequence: Synthetic oligonucleotide
  Sense strand starting at position 3753 of SEQ ID NO: 1241346
auaauccuucggcaugaaa

SEQ ID NO: 1265463 - RNA, 19 nt, Artificial Sequence
  Description of Artificial Sequence: Synthetic oligonucleotide
  Antisense strand to SEQ ID NO: 1265462
uuucaugccgaaggauuau

SEQ ID NO: 1265464 - RNA, 19 nt, Artificial Sequence
  Description of Artificial Sequence: Synthetic oligonucleotide
  Sense strand starting at position 3778 of SEQ ID NO: 1241346
ccuaguaaacuaugaaagu

SEQ ID NO: 1265465 - RNA, 19 nt, Artificial Sequence
  Description of Artificial Sequence: Synthetic oligonucleotide
  Antisense strand to SEQ ID NO: 1265464
acuuucauaguuuacuagg

SEQ ID NO: 1265466 - RNA, 19 nt, Artificial Sequence
  Description of Artificial Sequence: Synthetic oligonucleotide
  Sense strand starting at position 3791 of SEQ ID NO: 1241346
gaaaguaaacucggcacau

SEQ ID NO: 1265467 - RNA, 19 nt, Artificial Sequence
  Description of Artificial Sequence: Synthetic oligonucleotide
  Antisense strand to SEQ ID NO: 1265466
augugccgaguuuacuuuc

SEQ ID NO: 1265468 - RNA, 19 nt, Artificial Sequence
  Description of Artificial Sequence: Synthetic oligonucleotide
  Sense strand starting at position 3793 of SEQ ID NO: 1241346
aaguaaacucggcacauua

SEQ ID NO: 1265469 - RNA, 19 nt, Artificial Sequence
  Description of Artificial Sequence: Synthetic oligonucleotide
  Antisense strand to SEQ ID NO: 1265468
uaaugugccgaguuuacuu

SEQ ID NO: 1265470 - RNA, 19 nt, Artificial Sequence
  Description of Artificial Sequence: Synthetic oligonucleotide
  Sense strand starting at position 3803 of SEQ ID NO: 1241346
ggcacauuacccgaaaguc

SEQ ID NO: 1265471 - RNA, 19 nt, Artificial Sequence
  Description of Artificial Sequence: Synthetic oligonucleotide
  Antisense strand to SEQ ID NO: 1265470
gacuuucggguaaugugcc

SEQ ID NO: 1265472 - RNA, 19 nt, Artificial Sequence
  Description of Artificial Sequence: Synthetic oligonucleotide
  Sense strand starting at position 3850 of SEQ ID NO: 1241346
auuauugaugauugcucau

SEQ ID NO: 1265473 - RNA, 19 nt, Artificial Sequence
  Description of Artificial Sequence: Synthetic oligonucleotide
  Antisense strand to SEQ ID NO: 1265472
augagcaaucaucaauaau

SEQ ID NO: 1265474 - RNA, 19 nt, Artificial Sequence
  Description of Artificial Sequence: Synthetic oligonucleotide
  Sense strand starting at position 3891 of SEQ ID NO: 1241346
uuaccaggugcuuaaagaa

SEQ ID NO: 1265475 - RNA, 19 nt, Artificial Sequence
  Description of Artificial Sequence: Synthetic oligonucleotide
  Antisense strand to SEQ ID NO: 1265474
uucuuuaagcaccugguaa

SEQ ID NO: 1265476 - RNA, 19 nt, Artificial Sequence
  Description of Artificial Sequence: Synthetic oligonucleotide
  Sense strand starting at position 736 of SEQ ID NO: 1241347
ucuucugagcuguaaauuc

SEQ ID NO: 1265477 - RNA, 19 nt, Artificial Sequence
  Description of Artificial Sequence: Synthetic oligonucleotide
  Antisense strand to SEQ ID NO: 1265476
gaauuuacagcucagaaga

SEQ ID NO: 1265478 - RNA, 19 nt, Artificial Sequence
  Description of Artificial Sequence: Synthetic oligonucleotide
  Sense strand starting at position 764 of SEQ ID NO: 1241347
cugaauauagaugguaacu

SEQ ID NO: 1265479 - RNA, 19 nt, Artificial Sequence
  Description of Artificial Sequence: Synthetic oligonucleotide
  Antisense strand to SEQ ID NO: 1265478
aguuaccaucuauauucag

SEQ ID NO: 1265480 - RNA, 19 nt, Artificial Sequence
  Description of Artificial Sequence: Synthetic oligonucleotide
  Sense strand starting at position 851 of SEQ ID NO: 1241347
ucgagcauuguccagggaa

SEQ ID NO: 1265481 - RNA, 19 nt, Artificial Sequence
  Description of Artificial Sequence: Synthetic oligonucleotide
  Antisense strand to SEQ ID NO: 1265480
uucccuggacaaugcucga

SEQ ID NO: 1265482 - RNA, 19 nt, Artificial Sequence
  Description of Artificial Sequence: Synthetic oligonucleotide
  Sense strand starting at position 916 of SEQ ID NO: 1241347
ggaggagcucuguauccca

SEQ ID NO: 1265483 - RNA, 19 nt, Artificial Sequence
  Description of Artificial Sequence: Synthetic oligonucleotide
  Antisense strand to SEQ ID NO: 1265482
ugggauacagagcuccucc

SEQ ID NO: 1265484 - RNA, 19 nt, Artificial Sequence
  Description of Artificial Sequence: Synthetic oligonucleotide
  Sense strand starting at position 919 of SEQ ID NO: 1241347
ggagcucuguaucccagaa

SEQ ID NO: 1265485 - RNA, 19 nt, Artificial Sequence
  Description of Artificial Sequence: Synthetic oligonucleotide
  Antisense strand to SEQ ID NO: 1265484
uucugggauacagagcucc

SEQ ID NO: 1265486 - RNA, 19 nt, Artificial Sequence
  Description of Artificial Sequence: Synthetic oligonucleotide
  Sense strand starting at position 923 of SEQ ID NO: 1241347
cucuguaucccagaagcca

SEQ ID NO: 1265487 - RNA, 19 nt, Artificial Sequence
  Description of Artificial Sequence: Synthetic oligonucleotide
  Antisense strand to SEQ ID NO: 1265486
uggcuucugggauacagag

SEQ ID NO: 1265488 - RNA, 19 nt, Artificial Sequence
  Description of Artificial Sequence: Synthetic oligonucleotide
  Sense strand starting at position 983 of SEQ ID NO: 1241347
aguauaacacucuggaaug

SEQ ID NO: 1265489 - RNA, 19 nt, Artificial Sequence
  Description of Artificial Sequence: Synthetic oligonucleotide
  Antisense strand to SEQ ID NO: 1265488
cauuccagaguguuauacu

SEQ ID NO: 1265490 - RNA, 19 nt, Artificial Sequence
  Description of Artificial Sequence: Synthetic oligonucleotide
  Sense strand starting at position 1064 of SEQ ID NO: 1241347
agaucuauucgaugaaagu

SEQ ID NO: 1265491 - RNA, 19 nt, Artificial Sequence
  Description of Artificial Sequence: Synthetic oligonucleotide
  Antisense strand to SEQ ID NO: 1265490
acuuucaucgaauagaucu

SEQ ID NO: 1265492 - RNA, 19 nt, Artificial Sequence
  Description of Artificial Sequence: Synthetic oligonucleotide
  Sense strand starting at position 1075 of SEQ ID NO: 1241347
augaaagugggcugagaau

SEQ ID NO: 1265493 - RNA, 19 nt, Artificial Sequence
  Description of Artificial Sequence: Synthetic oligonucleotide
  Antisense strand to SEQ ID NO: 1265492
auucucagcccacuuucau

SEQ ID NO: 1265494 - RNA, 19 nt, Artificial Sequence
  Description of Artificial Sequence: Synthetic oligonucleotide
  Sense strand starting at position 1087 of SEQ ID NO: 1241347
ugagaauugaguggauggu

SEQ ID NO: 1265495 - RNA, 19 nt, Artificial Sequence
  Description of Artificial Sequence: Synthetic oligonucleotide
  Antisense strand to SEQ ID NO: 1265494
accauccacucaauucuca

SEQ ID NO: 1265496 - RNA, 19 nt, Artificial Sequence
  Description of Artificial Sequence: Synthetic oligonucleotide
  Sense strand starting at position 1093 of SEQ ID NO: 1241347
uugaguggauggucacaga

SEQ ID NO: 1265497 - RNA, 19 nt, Artificial Sequence
  Description of Artificial Sequence: Synthetic oligonucleotide
  Antisense strand to SEQ ID NO: 1265496
ucugugaccauccacucaa

SEQ ID NO: 1265498 - RNA, 19 nt, Artificial Sequence
  Description of Artificial Sequence: Synthetic oligonucleotide
  Sense strand starting at position 1227 of SEQ ID NO: 1241347
ggguccaucccauguaaga

SEQ ID NO: 1265499 - RNA, 19 nt, Artificial Sequence
  Description of Artificial Sequence: Synthetic oligonucleotide
  Antisense strand to SEQ ID NO: 1265498
ucuuacaugggauggaccc

SEQ ID NO: 1265500 - RNA, 19 nt, Artificial Sequence
  Description of Artificial Sequence: Synthetic oligonucleotide
  Sense strand starting at position 1314 of SEQ ID NO: 1241347
aagcuuugggucgaaaggu

SEQ ID NO: 1265501 - RNA, 19 nt, Artificial Sequence
  Description of Artificial Sequence: Synthetic oligonucleotide
  Antisense strand to SEQ ID NO: 1265500
accuuucgacccaaagcuu

SEQ ID NO: 1265502 - RNA, 19 nt, Artificial Sequence
  Description of Artificial Sequence: Synthetic oligonucleotide
  Sense strand starting at position 2246 of SEQ ID NO: 1241347
gagcauguuaauggugaca

SEQ ID NO: 1265503 - RNA, 19 nt, Artificial Sequence
  Description of Artificial Sequence: Synthetic oligonucleotide
  Antisense strand to SEQ ID NO: 1265502
ugucaccauuaacaugcuc

SEQ ID NO: 1265504 - RNA, 19 nt, Artificial Sequence
  Description of Artificial Sequence: Synthetic oligonucleotide
  Sense strand starting at position 2249 of SEQ ID NO: 1241347
cauguuaauggugacauca

SEQ ID NO: 1265505 - RNA, 19 nt, Artificial Sequence
  Description of Artificial Sequence: Synthetic oligonucleotide
  Antisense strand to SEQ ID NO: 1265504
ugaugucaccauuaacaug

SEQ ID NO: 1265506 - RNA, 19 nt, Artificial Sequence
  Description of Artificial Sequence: Synthetic oligonucleotide
  Sense strand starting at position 2279 of SEQ ID NO: 1241347
gguaaauguguguacugac

SEQ ID NO: 1265507 - RNA, 19 nt, Artificial Sequence
  Description of Artificial Sequence: Synthetic oligonucleotide
  Antisense strand to SEQ ID NO: 1265506
gucaguacacacauuuacc

SEQ ID NO: 1265508 - RNA, 19 nt, Artificial Sequence
  Description of Artificial Sequence: Synthetic oligonucleotide
  Sense strand starting at position 2391 of SEQ ID NO: 1241347
cuuccaggacuugguuaau

SEQ ID NO: 1265509 - RNA, 19 nt, Artificial Sequence
  Description of Artificial Sequence: Synthetic oligonucleotide
  Antisense strand to SEQ ID NO: 1265508
auuaaccaaguccuggaag

SEQ ID NO: 1265510 - RNA, 19 nt, Artificial Sequence
  Description of Artificial Sequence: Synthetic oligonucleotide
  Sense strand starting at position 2397 of SEQ ID NO: 1241347
ggacuugguuaaucaaucu

SEQ ID NO: 1265511 - RNA, 19 nt, Artificial Sequence
  Description of Artificial Sequence: Synthetic oligonucleotide
  Antisense strand to SEQ ID NO: 1265510
agauugauuaaccaagucc

SEQ ID NO: 1265512 - RNA, 19 nt, Artificial Sequence
  Description of Artificial Sequence: Synthetic oligonucleotide
  Sense strand starting at position 2589 of SEQ ID NO: 1241347
acgauuauagcucacagca

SEQ ID NO: 1265513 - RNA, 19 nt, Artificial Sequence
  Description of Artificial Sequence: Synthetic oligonucleotide
  Antisense strand to SEQ ID NO: 1265512
ugcugugagcuauaaucgu

SEQ ID NO: 1265514 - RNA, 19 nt, Artificial Sequence
  Description of Artificial Sequence: Synthetic oligonucleotide
  Sense strand starting at position 2921 of SEQ ID NO: 1241347
ucaagaagucucuguacca

SEQ ID NO: 1265515 - RNA, 19 nt, Artificial Sequence
  Description of Artificial Sequence: Synthetic oligonucleotide
  Antisense strand to SEQ ID NO: 1265514
ugguacagagacuucuuga

SEQ ID NO: 1265516 - RNA, 19 nt, Artificial Sequence
  Description of Artificial Sequence: Synthetic oligonucleotide
  Sense strand starting at position 2922 of SEQ ID NO: 1241347
caagaagucucuguaccag

SEQ ID NO: 1265517 - RNA, 19 nt, Artificial Sequence
  Description of Artificial Sequence: Synthetic oligonucleotide
  Antisense strand to SEQ ID NO: 1265516
cugguacagagacuucuug

SEQ ID NO: 1265518 - RNA, 19 nt, Artificial Sequence
  Description of Artificial Sequence: Synthetic oligonucleotide
  Sense strand starting at position 2942 of SEQ ID NO: 1241347
ugcagacuuaguggaacaa

SEQ ID NO: 1265519 - RNA, 19 nt, Artificial Sequence
  Description of Artificial Sequence: Synthetic oligonucleotide
  Antisense strand to SEQ ID NO: 1265518
uuguuccacuaagucugca

SEQ ID NO: 1265520 - RNA, 19 nt, Artificial Sequence
  Description of Artificial Sequence: Synthetic oligonucleotide
  Sense strand starting at position 2978 of SEQ ID NO: 1241347
ugaagaaagugguuuggga

SEQ ID NO: 1265521 - RNA, 19 nt, Artificial Sequence
  Description of Artificial Sequence: Synthetic oligonucleotide
  Antisense strand to SEQ ID NO: 1265520
ucccaaaccacuuucuuca

SEQ ID NO: 1265522 - RNA, 19 nt, Artificial Sequence
  Description of Artificial Sequence: Synthetic oligonucleotide
  Sense strand starting at position 3003 of SEQ ID NO: 1241347
aaguuuaggcucuaggauu

SEQ ID NO: 1265523 - RNA, 19 nt, Artificial Sequence
  Description of Artificial Sequence: Synthetic oligonucleotide
  Antisense strand to SEQ ID NO: 1265522
aauccuagagccuaaacuu

SEQ ID NO: 1265524 - RNA, 19 nt, Artificial Sequence
  Description of Artificial Sequence: Synthetic oligonucleotide
  Sense strand starting at position 3179 of SEQ ID NO: 1241347
auaagagaaugagagaauu

SEQ ID NO: 1265525 - RNA, 19 nt, Artificial Sequence
  Description of Artificial Sequence: Synthetic oligonucleotide
  Antisense strand to SEQ ID NO: 1265524
aauucucucauucucuuau

SEQ ID NO: 1265526 - RNA, 19 nt, Artificial Sequence
  Description of Artificial Sequence: Synthetic oligonucleotide
  Sense strand starting at position 3269 of SEQ ID NO: 1241347
caggguugucuugaguaau

SEQ ID NO: 1265527 - RNA, 19 nt, Artificial Sequence
  Description of Artificial Sequence: Synthetic oligonucleotide
  Antisense strand to SEQ ID NO: 1265526
auuacucaagacaacccug

SEQ ID NO: 1265528 - RNA, 19 nt, Artificial Sequence
  Description of Artificial Sequence: Synthetic oligonucleotide
  Sense strand starting at position 3280 of SEQ ID NO: 1241347
ugaguaaugggccacccaa

SEQ ID NO: 1265529 - RNA, 19 nt, Artificial Sequence
  Description of Artificial Sequence: Synthetic oligonucleotide
  Antisense strand to SEQ ID NO: 1265528
uuggguggcccauuacuca

SEQ ID NO: 1265530 - RNA, 19 nt, Artificial Sequence
  Description of Artificial Sequence: Synthetic oligonucleotide
  Sense strand starting at position 3384 of SEQ ID NO: 1241347
uaaggccagucauuggaau

SEQ ID NO: 1265531 - RNA, 19 nt, Artificial Sequence
  Description of Artificial Sequence: Synthetic oligonucleotide
  Antisense strand to SEQ ID NO: 1265530
auuccaaugacuggccuua

SEQ ID NO: 1265532 - RNA, 19 nt, Artificial Sequence
  Description of Artificial Sequence: Synthetic oligonucleotide
  Sense strand starting at position 3385 of SEQ ID NO: 1241347
aaggccagucauuggaauu

SEQ ID NO: 1265533 - RNA, 19 nt, Artificial Sequence
  Description of Artificial Sequence: Synthetic oligonucleotide
  Antisense strand to SEQ ID NO: 1265532
aauuccaaugacuggccuu

SEQ ID NO: 1265534 - RNA, 19 nt, Artificial Sequence
  Description of Artificial Sequence: Synthetic oligonucleotide
  Sense strand starting at position 3386 of SEQ ID NO: 1241347
aggccagucauuggaauuc

SEQ ID NO: 1265535 - RNA, 19 nt, Artificial Sequence
  Description of Artificial Sequence: Synthetic oligonucleotide
  Antisense strand to SEQ ID NO: 1265534
gaauuccaaugacuggccu

SEQ ID NO: 1265536 - RNA, 19 nt, Artificial Sequence
  Description of Artificial Sequence: Synthetic oligonucleotide
  Sense strand starting at position 3413 of SEQ ID NO: 1241347
aaaggacuauuagcaguaa

SEQ ID NO: 1265537 - RNA, 19 nt, Artificial Sequence
  Description of Artificial Sequence: Synthetic oligonucleotide
  Antisense strand to SEQ ID NO: 1265536
uuacugcuaauaguccuuu

SEQ ID NO: 1265538 - RNA, 19 nt, Artificial Sequence
  Description of Artificial Sequence: Synthetic oligonucleotide
  Sense strand starting at position 3417 of SEQ ID NO: 1241347
gacuauuagcaguaaggua

SEQ ID NO: 1265539 - RNA, 19 nt, Artificial Sequence
  Description of Artificial Sequence: Synthetic oligonucleotide
  Antisense strand to SEQ ID NO: 1265538
uaccuuacugcuaauaguc

SEQ ID NO: 1265540 - RNA, 19 nt, Artificial Sequence
  Description of Artificial Sequence: Synthetic oligonucleotide
  Sense strand starting at position 3442 of SEQ ID NO: 1241347
uggguuugucaugagugga

SEQ ID NO: 1265541 - RNA, 19 nt, Artificial Sequence
  Description of Artificial Sequence: Synthetic oligonucleotide
  Antisense strand to SEQ ID NO: 1265540
uccacucaugacaaaccca

SEQ ID NO: 1265542 - RNA, 19 nt, Artificial Sequence
  Description of Artificial Sequence: Synthetic oligonucleotide
  Sense strand starting at position 3445 of SEQ ID NO: 1241347
guuugucaugaguggaaau

SEQ ID NO: 1265543 - RNA, 19 nt, Artificial Sequence
  Description of Artificial Sequence: Synthetic oligonucleotide
  Antisense strand to SEQ ID NO: 1265542
auuuccacucaugacaaac

SEQ ID NO: 1265544 - RNA, 19 nt, Artificial Sequence
  Description of Artificial Sequence: Synthetic oligonucleotide
  Sense strand starting at position 3446 of SEQ ID NO: 1241347
uuugucaugaguggaaaug

SEQ ID NO: 1265545 - RNA, 19 nt, Artificial Sequence
  Description of Artificial Sequence: Synthetic oligonucleotide
  Antisense strand to SEQ ID NO: 1265544
cauuuccacucaugacaaa

SEQ ID NO: 1265546 - RNA, 19 nt, Artificial Sequence
  Description of Artificial Sequence: Synthetic oligonucleotide
  Sense strand starting at position 3644 of SEQ ID NO: 1241347
ggaaaucucucaccgacug

SEQ ID NO: 1265547 - RNA, 19 nt, Artificial Sequence
  Description of Artificial Sequence: Synthetic oligonucleotide
  Antisense strand to SEQ ID NO: 1265546
cagucggugagagauuucc

SEQ ID NO: 1265548 - RNA, 19 nt, Artificial Sequence
  Description of Artificial Sequence: Synthetic oligonucleotide
  Sense strand starting at position 3656 of SEQ ID NO: 1241347
ccgacuguucuacagacuu

SEQ ID NO: 1265549 - RNA, 19 nt, Artificial Sequence
  Description of Artificial Sequence: Synthetic oligonucleotide
  Antisense strand to SEQ ID NO: 1265548
aagucuguagaacagucgg

SEQ ID NO: 1265550 - RNA, 19 nt, Artificial Sequence
  Description of Artificial Sequence: Synthetic oligonucleotide
  Sense strand starting at position 3688 of SEQ ID NO: 1241347
auaguugaagccuggaaga

SEQ ID NO: 1265551 - RNA, 19 nt, Artificial Sequence
  Description of Artificial Sequence: Synthetic oligonucleotide
  Antisense strand to SEQ ID NO: 1265550
ucuuccaggcuucaacuau

SEQ ID NO: 1265552 - RNA, 19 nt, Artificial Sequence
  Description of Artificial Sequence: Synthetic oligonucleotide
  Sense strand starting at position 3839 of SEQ ID NO: 1241347
uuuggaaucuaagugaaua

SEQ ID NO: 1265553 - RNA, 19 nt, Artificial Sequence
  Description of Artificial Sequence: Synthetic oligonucleotide
  Antisense strand to SEQ ID NO: 1265552
uauucacuuagauuccaaa

SEQ ID NO: 1265554 - RNA, 19 nt, Artificial Sequence
  Description of Artificial Sequence: Synthetic oligonucleotide
  Sense strand starting at position 3944 of SEQ ID NO: 1241347
gguauaaucuauccagaug

SEQ ID NO: 1265555 - RNA, 19 nt, Artificial Sequence
  Description of Artificial Sequence: Synthetic oligonucleotide
  Antisense strand to SEQ ID NO: 1265554
caucuggauagauuauacc

SEQ ID NO: 1265556 - RNA, 19 nt, Artificial Sequence
  Description of Artificial Sequence: Synthetic oligonucleotide
  Sense strand starting at position 69 of SEQ ID NO: 1241348
ugaaguccuuaagacuaau

SEQ ID NO: 1265557 - RNA, 19 nt, Artificial Sequence
  Description of Artificial Sequence: Synthetic oligonucleotide
  Antisense strand to SEQ ID NO: 1265556
auuagucuuaaggacuuca

SEQ ID NO: 1265558 - RNA, 19 nt, Artificial Sequence
  Description of Artificial Sequence: Synthetic oligonucleotide
  Sense strand starting at position 143 of SEQ ID NO: 1241348
gagugcauauguucucaaa

SEQ ID NO: 1265559 - RNA, 19 nt, Artificial Sequence
  Description of Artificial Sequence: Synthetic oligonucleotide
  Antisense strand to SEQ ID NO: 1265558
uuugagaacauaugcacuc

SEQ ID NO: 1265560 - RNA, 19 nt, Artificial Sequence
  Description of Artificial Sequence: Synthetic oligonucleotide
  Sense strand starting at position 145 of SEQ ID NO: 1241348
gugcauauguucucaaagu

SEQ ID NO: 1265561 - RNA, 19 nt, Artificial Sequence
  Description of Artificial Sequence: Synthetic oligonucleotide
  Antisense strand to SEQ ID NO: 1265560
acuuugagaacauaugcac

SEQ ID NO: 1265562 - RNA, 19 nt, Artificial Sequence
  Description of Artificial Sequence: Synthetic oligonucleotide
  Sense strand starting at position 154 of SEQ ID NO: 1241348
uucucaaagugcccagaua

SEQ ID NO: 1265563 - RNA, 19 nt, Artificial Sequence
  Description of Artificial Sequence: Synthetic oligonucleotide
  Antisense strand to SEQ ID NO: 1265562
uaucugggcacuuugagaa

SEQ ID NO: 1265564 - RNA, 19 nt, Artificial Sequence
  Description of Artificial Sequence: Synthetic oligonucleotide
  Sense strand starting at position 155 of SEQ ID NO: 1241348
ucucaaagugcccagauaa

SEQ ID NO: 1265565 - RNA, 19 nt, Artificial Sequence
  Description of Artificial Sequence: Synthetic oligonucleotide
  Antisense strand to SEQ ID NO: 1265564
uuaucugggcacuuugaga

SEQ ID NO: 1265566 - RNA, 19 nt, Artificial Sequence
  Description of Artificial Sequence: Synthetic oligonucleotide
  Sense strand starting at position 406 of SEQ ID NO: 1241348
cuccuaggaucuucuaguu

SEQ ID NO: 1265567 - RNA, 19 nt, Artificial Sequence
  Description of Artificial Sequence: Synthetic oligonucleotide
  Antisense strand to SEQ ID NO: 1265566
aacuagaagauccuaggag

SEQ ID NO: 1265568 - RNA, 19 nt, Artificial Sequence
  Description of Artificial Sequence: Synthetic oligonucleotide
  Sense strand starting at position 411 of SEQ ID NO: 1241348
aggaucuucuaguuaggau

SEQ ID NO: 1265569 - RNA, 19 nt, Artificial Sequence
  Description of Artificial Sequence: Synthetic oligonucleotide
  Antisense strand to SEQ ID NO: 1265568
auccuaacuagaagauccu

SEQ ID NO: 1265570 - RNA, 19 nt, Artificial Sequence
  Description of Artificial Sequence: Synthetic oligonucleotide
  Sense strand starting at position 463 of SEQ ID NO: 1241348
aacagugaaugcuuaaugu

SEQ ID NO: 1265571 - RNA, 19 nt, Artificial Sequence
  Description of Artificial Sequence: Synthetic oligonucleotide
  Antisense strand to SEQ ID NO: 1265570
acauuaagcauucacuguu

SEQ ID NO: 1265572 - RNA, 19 nt, Artificial Sequence
  Description of Artificial Sequence: Synthetic oligonucleotide
  Sense strand starting at position 481 of SEQ ID NO: 1241348
uggacaaucgcauaacuga

SEQ ID NO: 1265573 - RNA, 19 nt, Artificial Sequence
  Description of Artificial Sequence: Synthetic oligonucleotide
  Antisense strand to SEQ ID NO: 1265572
ucaguuaugcgauugucca

SEQ ID NO: 1265574 - RNA, 19 nt, Artificial Sequence
  Description of Artificial Sequence: Synthetic oligonucleotide
  Sense strand starting at position 601 of SEQ ID NO: 1241348
ucagaaauaucggagcaga

SEQ ID NO: 1265575 - RNA, 19 nt, Artificial Sequence
  Description of Artificial Sequence: Synthetic oligonucleotide
  Antisense strand to SEQ ID NO: 1265574
ucugcuccgauauuucuga

SEQ ID NO: 1265576 - RNA, 19 nt, Artificial Sequence
  Description of Artificial Sequence: Synthetic oligonucleotide
  Sense strand starting at position 614 of SEQ ID NO: 1241348
agcagaacuuagcuuugaa

SEQ ID NO: 1265577 - RNA, 19 nt, Artificial Sequence
  Description of Artificial Sequence: Synthetic oligonucleotide
  Antisense strand to SEQ ID NO: 1265576
uucaaagcuaaguucugcu

SEQ ID NO: 1265578 - RNA, 19 nt, Artificial Sequence
  Description of Artificial Sequence: Synthetic oligonucleotide
  Sense strand starting at position 617 of SEQ ID NO: 1241348
agaacuuagcuuugaaucu

SEQ ID NO: 1265579 - RNA, 19 nt, Artificial Sequence
  Description of Artificial Sequence: Synthetic oligonucleotide
  Antisense strand to SEQ ID NO: 1265578
agauucaaagcuaaguucu

SEQ ID NO: 1265580 - RNA, 19 nt, Artificial Sequence
  Description of Artificial Sequence: Synthetic oligonucleotide
  Sense strand starting at position 655 of SEQ ID NO: 1241348
uugaacuuaucagauaaag

SEQ ID NO: 1265581 - RNA, 19 nt, Artificial Sequence
  Description of Artificial Sequence: Synthetic oligonucleotide
  Antisense strand to SEQ ID NO: 1265580
cuuuaucugauaaguucaa

SEQ ID NO: 1265582 - RNA, 19 nt, Artificial Sequence
  Description of Artificial Sequence: Synthetic oligonucleotide
  Sense strand starting at position 703 of SEQ ID NO: 1241348
agagcauccugacugcuaa

SEQ ID NO: 1265583 - RNA, 19 nt, Artificial Sequence
  Description of Artificial Sequence: Synthetic oligonucleotide
  Antisense strand to SEQ ID NO: 1265582
uuagcagucaggaugcucu

SEQ ID NO: 1265584 - RNA, 19 nt, Artificial Sequence
  Description of Artificial Sequence: Synthetic oligonucleotide
  Sense strand starting at position 714 of SEQ ID NO: 1241348
acugcuaacugccagagaa

SEQ ID NO: 1265585 - RNA, 19 nt, Artificial Sequence
  Description of Artificial Sequence: Synthetic oligonucleotide
  Antisense strand to SEQ ID NO: 1265584
uucucuggcaguuagcagu

SEQ ID NO: 1265586 - RNA, 19 nt, Artificial Sequence
  Description of Artificial Sequence: Synthetic oligonucleotide
  Sense strand starting at position 716 of SEQ ID NO: 1241348
ugcuaacugccagagaacu

SEQ ID NO: 1265587 - RNA, 19 nt, Artificial Sequence
  Description of Artificial Sequence: Synthetic oligonucleotide
  Antisense strand to SEQ ID NO: 1265586
aguucucuggcaguuagca

SEQ ID NO: 1265588 - RNA, 19 nt, Artificial Sequence
  Description of Artificial Sequence: Synthetic oligonucleotide
  Sense strand starting at position 726 of SEQ ID NO: 1241348
cagagaacugacugggcau

SEQ ID NO: 1265589 - RNA, 19 nt, Artificial Sequence
  Description of Artificial Sequence: Synthetic oligonucleotide
  Antisense strand to SEQ ID NO: 1265588
augcccagucaguucucug

SEQ ID NO: 1265590 - RNA, 19 nt, Artificial Sequence
  Description of Artificial Sequence: Synthetic oligonucleotide
  Sense strand starting at position 1545 of SEQ ID NO: 1241348
cauaacuaguuuccggaau

SEQ ID NO: 1265591 - RNA, 19 nt, Artificial Sequence
  Description of Artificial Sequence: Synthetic oligonucleotide
  Antisense strand to SEQ ID NO: 1265590
auuccggaaacuaguuaug

SEQ ID NO: 1265592 - RNA, 19 nt, Artificial Sequence
  Description of Artificial Sequence: Synthetic oligonucleotide
  Sense strand starting at position 1546 of SEQ ID NO: 1241348
auaacuaguuuccggaaua

SEQ ID NO: 1265593 - RNA, 19 nt, Artificial Sequence
  Description of Artificial Sequence: Synthetic oligonucleotide
  Antisense strand to SEQ ID NO: 1265592
uauuccggaaacuaguuau

SEQ ID NO: 1265594 - RNA, 19 nt, Artificial Sequence
  Description of Artificial Sequence: Synthetic oligonucleotide
  Sense strand starting at position 1547 of SEQ ID NO: 1241348
uaacuaguuuccggaauag

SEQ ID NO: 1265595 - RNA, 19 nt, Artificial Sequence
  Description of Artificial Sequence: Synthetic oligonucleotide
  Antisense strand to SEQ ID NO: 1265594
cuauuccggaaacuaguua

SEQ ID NO: 1265596 - RNA, 19 nt, Artificial Sequence
  Description of Artificial Sequence: Synthetic oligonucleotide
  Sense strand starting at position 2118 of SEQ ID NO: 1241348
agcaauuuauccgugugca

SEQ ID NO: 1265597 - RNA, 19 nt, Artificial Sequence
  Description of Artificial Sequence: Synthetic oligonucleotide
  Antisense strand to SEQ ID NO: 1265596
ugcacacggauaaauugcu

SEQ ID NO: 1265598 - RNA, 19 nt, Artificial Sequence
  Description of Artificial Sequence: Synthetic oligonucleotide
  Sense strand starting at position 2119 of SEQ ID NO: 1241348
gcaauuuauccgugugcag

SEQ ID NO: 1265599 - RNA, 19 nt, Artificial Sequence
  Description of Artificial Sequence: Synthetic oligonucleotide
  Antisense strand to SEQ ID NO: 1265598
cugcacacggauaaauugc

SEQ ID NO: 1265600 - RNA, 19 nt, Artificial Sequence
  Description of Artificial Sequence: Synthetic oligonucleotide
  Sense strand starting at position 2151 of SEQ ID NO: 1241348
agaagaugcuaauuaaagu

SEQ ID NO: 1265601 - RNA, 19 nt, Artificial Sequence
  Description of Artificial Sequence: Synthetic oligonucleotide
  Antisense strand to SEQ ID NO: 1265600
acuuuaauuagcaucuucu

SEQ ID NO: 1265602 - RNA, 19 nt, Artificial Sequence
  Description of Artificial Sequence: Synthetic oligonucleotide
  Sense strand starting at position 2157 of SEQ ID NO: 1241348
ugcuaauuaaagugaaggu

SEQ ID NO: 1265603 - RNA, 19 nt, Artificial Sequence
  Description of Artificial Sequence: Synthetic oligonucleotide
  Antisense strand to SEQ ID NO: 1265602
accuucacuuuaauuagca

SEQ ID NO: 1265604 - RNA, 19 nt, Artificial Sequence
  Description of Artificial Sequence: Synthetic oligonucleotide
  Sense strand starting at position 2511 of SEQ ID NO: 1241348
cucagauucuuggaguaag

SEQ ID NO: 1265605 - RNA, 19 nt, Artificial Sequence
  Description of Artificial Sequence: Synthetic oligonucleotide
  Antisense strand to SEQ ID NO: 1265604
cuuacuccaagaaucugag

SEQ ID NO: 1265606 - RNA, 19 nt, Artificial Sequence
  Description of Artificial Sequence: Synthetic oligonucleotide
  Sense strand starting at position 2627 of SEQ ID NO: 1241348
gcuagacuaugagccuuua

SEQ ID NO: 1265607 - RNA, 19 nt, Artificial Sequence
  Description of Artificial Sequence: Synthetic oligonucleotide
  Antisense strand to SEQ ID NO: 1265606
uaaaggcucauagucuagc

SEQ ID NO: 1265608 - RNA, 19 nt, Artificial Sequence
  Description of Artificial Sequence: Synthetic oligonucleotide
  Sense strand starting at position 2772 of SEQ ID NO: 1241348
guuaguuaccgcugcccua

SEQ ID NO: 1265609 - RNA, 19 nt, Artificial Sequence
  Description of Artificial Sequence: Synthetic oligonucleotide
  Antisense strand to SEQ ID NO: 1265608
uagggcagcgguaacuaac

SEQ ID NO: 1265610 - RNA, 19 nt, Artificial Sequence
  Description of Artificial Sequence: Synthetic oligonucleotide
  Sense strand starting at position 2838 of SEQ ID NO: 1241348
cguggugguucuucaccaa

SEQ ID NO: 1265611 - RNA, 19 nt, Artificial Sequence
  Description of Artificial Sequence: Synthetic oligonucleotide
  Antisense strand to SEQ ID NO: 1265610
uuggugaagaaccaccacg

SEQ ID NO: 1265612 - RNA, 19 nt, Artificial Sequence
  Description of Artificial Sequence: Synthetic oligonucleotide
  Sense strand starting at position 2958 of SEQ ID NO: 1241348
acaagugaagucuaaugcu

SEQ ID NO: 1265613 - RNA, 19 nt, Artificial Sequence
  Description of Artificial Sequence: Synthetic oligonucleotide
  Antisense strand to SEQ ID NO: 1265612
agcauuagacuucacuugu

SEQ ID NO: 1265614 - RNA, 19 nt, Artificial Sequence
  Description of Artificial Sequence: Synthetic oligonucleotide
  Sense strand starting at position 2999 of SEQ ID NO: 1241348
guaaaucuaucguuauuuc

SEQ ID NO: 1265615 - RNA, 19 nt, Artificial Sequence
  Description of Artificial Sequence: Synthetic oligonucleotide
  Antisense strand to SEQ ID NO: 1265614
gaaauaacgauagauuuac

SEQ ID NO: 1265616 - RNA, 19 nt, Artificial Sequence
  Description of Artificial Sequence: Synthetic oligonucleotide
  Sense strand starting at position 3090 of SEQ ID NO: 1241348
cuucuuagcuaagauuuga

SEQ ID NO: 1265617 - RNA, 19 nt, Artificial Sequence
  Description of Artificial Sequence: Synthetic oligonucleotide
  Antisense strand to SEQ ID NO: 1265616
ucaaaucuuagcuaagaag

SEQ ID NO: 1265618 - RNA, 19 nt, Artificial Sequence
  Description of Artificial Sequence: Synthetic oligonucleotide
  Sense strand starting at position 3151 of SEQ ID NO: 1241348
cguugaguagcggccuaua

SEQ ID NO: 1265619 - RNA, 19 nt, Artificial Sequence
  Description of Artificial Sequence: Synthetic oligonucleotide
  Antisense strand to SEQ ID NO: 1265618
uauaggccgcuacucaacg

SEQ ID NO: 1265620 - RNA, 19 nt, Artificial Sequence
  Description of Artificial Sequence: Synthetic oligonucleotide
  Sense strand starting at position 3154 of SEQ ID NO: 1241348
ugaguagcggccuauauaa

SEQ ID NO: 1265621 - RNA, 19 nt, Artificial Sequence
  Description of Artificial Sequence: Synthetic oligonucleotide
  Antisense strand to SEQ ID NO: 1265620
uuauauaggccgcuacuca

SEQ ID NO: 1265622 - RNA, 19 nt, Artificial Sequence
  Description of Artificial Sequence: Synthetic oligonucleotide
  Sense strand starting at position 3156 of SEQ ID NO: 1241348
aguagcggccuauauaaga

SEQ ID NO: 1265623 - RNA, 19 nt, Artificial Sequence
  Description of Artificial Sequence: Synthetic oligonucleotide
  Antisense strand to SEQ ID NO: 1265622
ucuuauauaggccgcuacu

SEQ ID NO: 1265624 - RNA, 19 nt, Artificial Sequence
  Description of Artificial Sequence: Synthetic oligonucleotide
  Sense strand starting at position 3167 of SEQ ID NO: 1241348
auauaagagucguaacauc

SEQ ID NO: 1265625 - RNA, 19 nt, Artificial Sequence
  Description of Artificial Sequence: Synthetic oligonucleotide
  Antisense strand to SEQ ID NO: 1265624
gauguuacgacucuuauau

SEQ ID NO: 1265626 - RNA, 19 nt, Artificial Sequence
  Description of Artificial Sequence: Synthetic oligonucleotide
  Sense strand starting at position 3203 of SEQ ID NO: 1241348
ggucacuggcgccauuaaa

SEQ ID NO: 1265627 - RNA, 19 nt, Artificial Sequence
  Description of Artificial Sequence: Synthetic oligonucleotide
  Antisense strand to SEQ ID NO: 1265626
uuuaauggcgccagugacc

SEQ ID NO: 1265628 - RNA, 19 nt, Artificial Sequence
  Description of Artificial Sequence: Synthetic oligonucleotide
  Sense strand starting at position 3428 of SEQ ID NO: 1241348
auugauugauccugggaug

SEQ ID NO: 1265629 - RNA, 19 nt, Artificial Sequence
  Description of Artificial Sequence: Synthetic oligonucleotide
  Antisense strand to SEQ ID NO: 1265628
caucccaggaucaaucaau

SEQ ID NO: 1265630 - RNA, 19 nt, Artificial Sequence
  Description of Artificial Sequence: Synthetic oligonucleotide
  Sense strand starting at position 3429 of SEQ ID NO: 1241348
uugauugauccugggaugu

SEQ ID NO: 1265631 - RNA, 19 nt, Artificial Sequence
  Description of Artificial Sequence: Synthetic oligonucleotide
  Antisense strand to SEQ ID NO: 1265630
acaucccaggaucaaucaa

SEQ ID NO: 1265632 - RNA, 19 nt, Artificial Sequence
  Description of Artificial Sequence: Synthetic oligonucleotide
  Sense strand starting at position 3834 of SEQ ID NO: 1241348
auaauauagugcuagguaa

SEQ ID NO: 1265633 - RNA, 19 nt, Artificial Sequence
  Description of Artificial Sequence: Synthetic oligonucleotide
  Antisense strand to SEQ ID NO: 1265632
uuaccuagcacuauauuau

SEQ ID NO: 1265634 - RNA, 19 nt, Artificial Sequence
  Description of Artificial Sequence: Synthetic oligonucleotide
  Sense strand starting at position 3838 of SEQ ID NO: 1241348
uauagugcuagguaaggau

SEQ ID NO: 1265635 - RNA, 19 nt, Artificial Sequence
  Description of Artificial Sequence: Synthetic oligonucleotide
  Antisense strand to SEQ ID NO: 1265634
auccuuaccuagcacuaua

SEQ ID NO: 1265636 - RNA, 19 nt, Artificial Sequence
  Description of Artificial Sequence: Synthetic oligonucleotide
  Sense strand starting at position 93 of SEQ ID NO: 1241349
ucagcagauguuggagaua

SEQ ID NO: 1265637 - RNA, 19 nt, Artificial Sequence
  Description of Artificial Sequence: Synthetic oligonucleotide
  Antisense strand to SEQ ID NO: 1265636
uaucuccaacaucugcuga

SEQ ID NO: 1265638 - RNA, 19 nt, Artificial Sequence
  Description of Artificial Sequence: Synthetic oligonucleotide
  Sense strand starting at position 127 of SEQ ID NO: 1241349
gcaugaugagcacaucaga

SEQ ID NO: 1265639 - RNA, 19 nt, Artificial Sequence
  Description of Artificial Sequence: Synthetic oligonucleotide
  Antisense strand to SEQ ID NO: 1265638
ucugaugugcucaucaugc

SEQ ID NO: 1265640 - RNA, 19 nt, Artificial Sequence
  Description of Artificial Sequence: Synthetic oligonucleotide
  Sense strand starting at position 165 of SEQ ID NO: 1241349
aaagauguuugcuugcauc

SEQ ID NO: 1265641 - RNA, 19 nt, Artificial Sequence
  Description of Artificial Sequence: Synthetic oligonucleotide
  Antisense strand to SEQ ID NO: 1265640
gaugcaagcaaacaucuuu

SEQ ID NO: 1265642 - RNA, 19 nt, Artificial Sequence
  Description of Artificial Sequence: Synthetic oligonucleotide
  Sense strand starting at position 198 of SEQ ID NO: 1241349
caguaagacuuggcucuua

SEQ ID NO: 1265643 - RNA, 19 nt, Artificial Sequence
  Description of Artificial Sequence: Synthetic oligonucleotide
  Antisense strand to SEQ ID NO: 1265642
uaagagccaagucuuacug

SEQ ID NO: 1265644 - RNA, 19 nt, Artificial Sequence
  Description of Artificial Sequence: Synthetic oligonucleotide
  Sense strand starting at position 235 of SEQ ID NO: 1241349
uuuaccucucgucagcaau

SEQ ID NO: 1265645 - RNA, 19 nt, Artificial Sequence
  Description of Artificial Sequence: Synthetic oligonucleotide
  Antisense strand to SEQ ID NO: 1265644
auugcugacgagagguaaa

SEQ ID NO: 1265646 - RNA, 19 nt, Artificial Sequence
  Description of Artificial Sequence: Synthetic oligonucleotide
  Sense strand starting at position 241 of SEQ ID NO: 1241349
ucucgucagcaauacugaa

SEQ ID NO: 1265647 - RNA, 19 nt, Artificial Sequence
  Description of Artificial Sequence: Synthetic oligonucleotide
  Antisense strand to SEQ ID NO: 1265646
uucaguauugcugacgaga

SEQ ID NO: 1265648 - RNA, 19 nt, Artificial Sequence
  Description of Artificial Sequence: Synthetic oligonucleotide
  Sense strand starting at position 320 of SEQ ID NO: 1241349
ccuguuaacucugcaguca

SEQ ID NO: 1265649 - RNA, 19 nt, Artificial Sequence
  Description of Artificial Sequence: Synthetic oligonucleotide
  Antisense strand to SEQ ID NO: 1265648
ugacugcagaguuaacagg

SEQ ID NO: 1265650 - RNA, 19 nt, Artificial Sequence
  Description of Artificial Sequence: Synthetic oligonucleotide
  Sense strand starting at position 404 of SEQ ID NO: 1241349
gcaguuacugaauggcaau

SEQ ID NO: 1265651 - RNA, 19 nt, Artificial Sequence
  Description of Artificial Sequence: Synthetic oligonucleotide
  Antisense strand to SEQ ID NO: 1265650
auugccauucaguaacugc

SEQ ID NO: 1265652 - RNA, 19 nt, Artificial Sequence
  Description of Artificial Sequence: Synthetic oligonucleotide
  Sense strand starting at position 519 of SEQ ID NO: 1241349
ugaaguccuuaagacuaau

SEQ ID NO: 1265653 - RNA, 19 nt, Artificial Sequence
  Description of Artificial Sequence: Synthetic oligonucleotide
  Antisense strand to SEQ ID NO: 1265652
auuagucuuaaggacuuca

SEQ ID NO: 1265654 - RNA, 19 nt, Artificial Sequence
  Description of Artificial Sequence: Synthetic oligonucleotide
  Sense strand starting at position 593 of SEQ ID NO: 1241349
gagugcauauguucucaaa

SEQ ID NO: 1265655 - RNA, 19 nt, Artificial Sequence
  Description of Artificial Sequence: Synthetic oligonucleotide
  Antisense strand to SEQ ID NO: 1265654
uuugagaacauaugcacuc

SEQ ID NO: 1265656 - RNA, 19 nt, Artificial Sequence
  Description of Artificial Sequence: Synthetic oligonucleotide
  Sense strand starting at position 595 of SEQ ID NO: 1241349
gugcauauguucucaaagu

SEQ ID NO: 1265657 - RNA, 19 nt, Artificial Sequence
  Description of Artificial Sequence: Synthetic oligonucleotide
  Antisense strand to SEQ ID NO: 1265656
acuuugagaacauaugcac

SEQ ID NO: 1265658 - RNA, 19 nt, Artificial Sequence
  Description of Artificial Sequence: Synthetic oligonucleotide
  Sense strand starting at position 604 of SEQ ID NO: 1241349
uucucaaagugcccagaua

SEQ ID NO: 1265659 - RNA, 19 nt, Artificial Sequence
  Description of Artificial Sequence: Synthetic oligonucleotide
  Antisense strand to SEQ ID NO: 1265658
uaucugggcacuuugagaa

SEQ ID NO: 1265660 - RNA, 19 nt, Artificial Sequence
  Description of Artificial Sequence: Synthetic oligonucleotide
  Sense strand starting at position 605 of SEQ ID NO: 1241349
ucucaaagugcccagauaa

SEQ ID NO: 1265661 - RNA, 19 nt, Artificial Sequence
  Description of Artificial Sequence: Synthetic oligonucleotide
  Antisense strand to SEQ ID NO: 1265660
uuaucugggcacuuugaga

SEQ ID NO: 1265662 - RNA, 19 nt, Artificial Sequence
  Description of Artificial Sequence: Synthetic oligonucleotide
  Sense strand starting at position 856 of SEQ ID NO: 1241349
cuccuaggaucuucuaguu

SEQ ID NO: 1265663 - RNA, 19 nt, Artificial Sequence
  Description of Artificial Sequence: Synthetic oligonucleotide
  Antisense strand to SEQ ID NO: 1265662
aacuagaagauccuaggag

SEQ ID NO: 1265664 - RNA, 19 nt, Artificial Sequence
  Description of Artificial Sequence: Synthetic oligonucleotide
  Sense strand starting at position 861 of SEQ ID NO: 1241349
aggaucuucuaguuaggau

SEQ ID NO: 1265665 - RNA, 19 nt, Artificial Sequence
  Description of Artificial Sequence: Synthetic oligonucleotide
  Antisense strand to SEQ ID NO: 1265664
auccuaacuagaagauccu

SEQ ID NO: 1265666 - RNA, 19 nt, Artificial Sequence
  Description of Artificial Sequence: Synthetic oligonucleotide
  Sense strand starting at position 913 of SEQ ID NO: 1241349
aacagugaaugcuuaaugu

SEQ ID NO: 1265667 - RNA, 19 nt, Artificial Sequence
  Description of Artificial Sequence: Synthetic oligonucleotide
  Antisense strand to SEQ ID NO: 1265666
acauuaagcauucacuguu

SEQ ID NO: 1265668 - RNA, 19 nt, Artificial Sequence
  Description of Artificial Sequence: Synthetic oligonucleotide
  Sense strand starting at position 931 of SEQ ID NO: 1241349
uggacaaucgcauaacuga

SEQ ID NO: 1265669 - RNA, 19 nt, Artificial Sequence
  Description of Artificial Sequence: Synthetic oligonucleotide
  Antisense strand to SEQ ID NO: 1265668
ucaguuaugcgauugucca

SEQ ID NO: 1265670 - RNA, 19 nt, Artificial Sequence
  Description of Artificial Sequence: Synthetic oligonucleotide
  Sense strand starting at position 1051 of SEQ ID NO: 1241349
ucagaaauaucggagcaga

SEQ ID NO: 1265671 - RNA, 19 nt, Artificial Sequence
  Description of Artificial Sequence: Synthetic oligonucleotide
  Antisense strand to SEQ ID NO: 1265670
ucugcuccgauauuucuga

SEQ ID NO: 1265672 - RNA, 19 nt, Artificial Sequence
  Description of Artificial Sequence: Synthetic oligonucleotide
  Sense strand starting at position 1064 of SEQ ID NO: 1241349
agcagaacuuagcuuugaa

SEQ ID NO: 1265673 - RNA, 19 nt, Artificial Sequence
  Description of Artificial Sequence: Synthetic oligonucleotide
  Antisense strand to SEQ ID NO: 1265672
uucaaagcuaaguucugcu

SEQ ID NO: 1265674 - RNA, 19 nt, Artificial Sequence
  Description of Artificial Sequence: Synthetic oligonucleotide
  Sense strand starting at position 1067 of SEQ ID NO: 1241349
agaacuuagcuuugaaucu

SEQ ID NO: 1265675 - RNA, 19 nt, Artificial Sequence
  Description of Artificial Sequence: Synthetic oligonucleotide
  Antisense strand to SEQ ID NO: 1265674
agauucaaagcuaaguucu

SEQ ID NO: 1265676 - RNA, 19 nt, Artificial Sequence
  Description of Artificial Sequence: Synthetic oligonucleotide
  Sense strand starting at position 1105 of SEQ ID NO: 1241349
uugaacuuaucagauaaag

SEQ ID NO: 1265677 - RNA, 19 nt, Artificial Sequence
  Description of Artificial Sequence: Synthetic oligonucleotide
  Antisense strand to SEQ ID NO: 1265676
cuuuaucugauaaguucaa

SEQ ID NO: 1265678 - RNA, 19 nt, Artificial Sequence
  Description of Artificial Sequence: Synthetic oligonucleotide
  Sense strand starting at position 1153 of SEQ ID NO: 1241349
agagcauccugacugcuaa

SEQ ID NO: 1265679 - RNA, 19 nt, Artificial Sequence
  Description of Artificial Sequence: Synthetic oligonucleotide
  Antisense strand to SEQ ID NO: 1265678
uuagcagucaggaugcucu

SEQ ID NO: 1265680 - RNA, 19 nt, Artificial Sequence
  Description of Artificial Sequence: Synthetic oligonucleotide
  Sense strand starting at position 1166 of SEQ ID NO: 1241349
ugcuaacugccagagaacu

SEQ ID NO: 1265681 - RNA, 19 nt, Artificial Sequence
  Description of Artificial Sequence: Synthetic oligonucleotide
  Antisense strand to SEQ ID NO: 1265680
aguucucuggcaguuagca

SEQ ID NO: 1265682 - RNA, 19 nt, Artificial Sequence
  Description of Artificial Sequence: Synthetic oligonucleotide
  Sense strand starting at position 1176 of SEQ ID NO: 1241349
cagagaacugacugggcau

SEQ ID NO: 1265683 - RNA, 19 nt, Artificial Sequence
  Description of Artificial Sequence: Synthetic oligonucleotide
  Antisense strand to SEQ ID NO: 1265682
augcccagucaguucucug

SEQ ID NO: 1265684 - RNA, 19 nt, Artificial Sequence
  Description of Artificial Sequence: Synthetic oligonucleotide
  Sense strand starting at position 1995 of SEQ ID NO: 1241349
cauaacuaguuuccggaau

SEQ ID NO: 1265685 - RNA, 19 nt, Artificial Sequence
  Description of Artificial Sequence: Synthetic oligonucleotide
  Antisense strand to SEQ ID NO: 1265684
auuccggaaacuaguuaug

SEQ ID NO: 1265686 - RNA, 19 nt, Artificial Sequence
  Description of Artificial Sequence: Synthetic oligonucleotide
  Sense strand starting at position 2568 of SEQ ID NO: 1241349
agcaauuuauccgugugca

SEQ ID NO: 1265687 - RNA, 19 nt, Artificial Sequence
  Description of Artificial Sequence: Synthetic oligonucleotide
  Antisense strand to SEQ ID NO: 1265686
ugcacacggauaaauugcu

SEQ ID NO: 1265688 - RNA, 19 nt, Artificial Sequence
  Description of Artificial Sequence: Synthetic oligonucleotide
  Sense strand starting at position 2569 of SEQ ID NO: 1241349
gcaauuuauccgugugcag

SEQ ID NO: 1265689 - RNA, 19 nt, Artificial Sequence
  Description of Artificial Sequence: Synthetic oligonucleotide
  Antisense strand to SEQ ID NO: 1265688
cugcacacggauaaauugc

SEQ ID NO: 1265690 - RNA, 19 nt, Artificial Sequence
  Description of Artificial Sequence: Synthetic oligonucleotide
  Sense strand starting at position 2601 of SEQ ID NO: 1241349
agaagaugcuaauuaaagu

SEQ ID NO: 1265691 - RNA, 19 nt, Artificial Sequence
  Description of Artificial Sequence: Synthetic oligonucleotide
  Antisense strand to SEQ ID NO: 1265690
acuuuaauuagcaucuucu

SEQ ID NO: 1265692 - RNA, 19 nt, Artificial Sequence
  Description of Artificial Sequence: Synthetic oligonucleotide
  Sense strand starting at position 2607 of SEQ ID NO: 1241349
ugcuaauuaaagugaaggu

SEQ ID NO: 1265693 - RNA, 19 nt, Artificial Sequence
  Description of Artificial Sequence: Synthetic oligonucleotide
  Antisense strand to SEQ ID NO: 1265692
accuucacuuuaauuagca

SEQ ID NO: 1265694 - RNA, 19 nt, Artificial Sequence
  Description of Artificial Sequence: Synthetic oligonucleotide
  Sense strand starting at position 2961 of SEQ ID NO: 1241349
cucagauucuuggaguaag

SEQ ID NO: 1265695 - RNA, 19 nt, Artificial Sequence
  Description of Artificial Sequence: Synthetic oligonucleotide
  Antisense strand to SEQ ID NO: 1265694
cuuacuccaagaaucugag

SEQ ID NO: 1265696 - RNA, 19 nt, Artificial Sequence
  Description of Artificial Sequence: Synthetic oligonucleotide
  Sense strand starting at position 3077 of SEQ ID NO: 1241349
gcuagacuaugagccuuua

SEQ ID NO: 1265697 - RNA, 19 nt, Artificial Sequence
  Description of Artificial Sequence: Synthetic oligonucleotide
  Antisense strand to SEQ ID NO: 1265696
uaaaggcucauagucuagc

SEQ ID NO: 1265698 - RNA, 19 nt, Artificial Sequence
  Description of Artificial Sequence: Synthetic oligonucleotide
  Sense strand starting at position 3288 of SEQ ID NO: 1241349
cguggugguucuucaccaa

SEQ ID NO: 1265699 - RNA, 19 nt, Artificial Sequence
  Description of Artificial Sequence: Synthetic oligonucleotide
  Antisense strand to SEQ ID NO: 1265698
uuggugaagaaccaccacg

SEQ ID NO: 1265700 - RNA, 19 nt, Artificial Sequence
  Description of Artificial Sequence: Synthetic oligonucleotide
  Sense strand starting at position 3408 of SEQ ID NO: 1241349
acaagugaagucuaaugcu

SEQ ID NO: 1265701 - RNA, 19 nt, Artificial Sequence
  Description of Artificial Sequence: Synthetic oligonucleotide
  Antisense strand to SEQ ID NO: 1265700
agcauuagacuucacuugu

SEQ ID NO: 1265702 - RNA, 19 nt, Artificial Sequence
  Description of Artificial Sequence: Synthetic oligonucleotide
  Sense strand starting at position 3449 of SEQ ID NO: 1241349
guaaaucuaucguuauuuc

SEQ ID NO: 1265703 - RNA, 19 nt, Artificial Sequence
  Description of Artificial Sequence: Synthetic oligonucleotide
  Antisense strand to SEQ ID NO: 1265702
gaaauaacgauagauuuac

SEQ ID NO: 1265704 - RNA, 19 nt, Artificial Sequence
  Description of Artificial Sequence: Synthetic oligonucleotide
  Sense strand starting at position 3540 of SEQ ID NO: 1241349
cuucuuagcuaagauuuga

SEQ ID NO: 1265705 - RNA, 19 nt, Artificial Sequence
  Description of Artificial Sequence: Synthetic oligonucleotide
  Antisense strand to SEQ ID NO: 1265704
ucaaaucuuagcuaagaag

SEQ ID NO: 1265706 - RNA, 19 nt, Artificial Sequence
  Description of Artificial Sequence: Synthetic oligonucleotide
  Sense strand starting at position 3601 of SEQ ID NO: 1241349
cguugaguagcggccuaua

SEQ ID NO: 1265707 - RNA, 19 nt, Artificial Sequence
  Description of Artificial Sequence: Synthetic oligonucleotide
  Antisense strand to SEQ ID NO: 1265706
uauaggccgcuacucaacg

SEQ ID NO: 1265708 - RNA, 19 nt, Artificial Sequence
  Description of Artificial Sequence: Synthetic oligonucleotide
  Sense strand starting at position 3604 of SEQ ID NO: 1241349
ugaguagcggccuauauaa

SEQ ID NO: 1265709 - RNA, 19 nt, Artificial Sequence
  Description of Artificial Sequence: Synthetic oligonucleotide
  Antisense strand to SEQ ID NO: 1265708
uuauauaggccgcuacuca

SEQ ID NO: 1265710 - RNA, 19 nt, Artificial Sequence
  Description of Artificial Sequence: Synthetic oligonucleotide
  Sense strand starting at position 3606 of SEQ ID NO: 1241349
aguagcggccuauauaaga

SEQ ID NO: 1265711 - RNA, 19 nt, Artificial Sequence
  Description of Artificial Sequence: Synthetic oligonucleotide
  Antisense strand to SEQ ID NO: 1265710
ucuuauauaggccgcuacu

SEQ ID NO: 1265712 - RNA, 19 nt, Artificial Sequence
  Description of Artificial Sequence: Synthetic oligonucleotide
  Sense strand starting at position 3653 of SEQ ID NO: 1241349
ggucacuggcgccauuaaa

SEQ ID NO: 1265713 - RNA, 19 nt, Artificial Sequence
  Description of Artificial Sequence: Synthetic oligonucleotide
  Antisense strand to SEQ ID NO: 1265712
uuuaauggcgccagugacc

SEQ ID NO: 1265714 - RNA, 19 nt, Artificial Sequence
  Description of Artificial Sequence: Synthetic oligonucleotide
  Sense strand starting at position 3879 of SEQ ID NO: 1241349
uugauugauccugggaugu

SEQ ID NO: 1265715 - RNA, 19 nt, Artificial Sequence
  Description of Artificial Sequence: Synthetic oligonucleotide
  Antisense strand to SEQ ID NO: 1265714
acaucccaggaucaaucaa

SEQ ID NO: 1265716 - RNA, 19 nt, Artificial Sequence
  Description of Artificial Sequence: Synthetic oligonucleotide
  Sense strand starting at position 4 of SEQ ID NO: 1241350
caaggaguuccaugguuuc

SEQ ID NO: 1265717 - RNA, 19 nt, Artificial Sequence
  Description of Artificial Sequence: Synthetic oligonucleotide
  Antisense strand to SEQ ID NO: 1265716
gaaaccauggaacuccuug

SEQ ID NO: 1265718 - RNA, 19 nt, Artificial Sequence
  Description of Artificial Sequence: Synthetic oligonucleotide
  Sense strand starting at position 56 of SEQ ID NO: 1241350
gcagguuuacuuuaaugag

SEQ ID NO: 1265719 - RNA, 19 nt, Artificial Sequence
  Description of Artificial Sequence: Synthetic oligonucleotide
  Antisense strand to SEQ ID NO: 1265718
cucauuaaaguaaaccugc

SEQ ID NO: 1265720 - RNA, 19 nt, Artificial Sequence
  Description of Artificial Sequence: Synthetic oligonucleotide
  Sense strand starting at position 305 of SEQ ID NO: 1241350
aagaaucugugagugucaa

SEQ ID NO: 1265721 - RNA, 19 nt, Artificial Sequence
  Description of Artificial Sequence: Synthetic oligonucleotide
  Antisense strand to SEQ ID NO: 1265720
uugacacucacagauucuu

SEQ ID NO: 1265722 - RNA, 19 nt, Artificial Sequence
  Description of Artificial Sequence: Synthetic oligonucleotide
  Sense strand starting at position 306 of SEQ ID NO: 1241350
agaaucugugagugucaaa

SEQ ID NO: 1265723 - RNA, 19 nt, Artificial Sequence
  Description of Artificial Sequence: Synthetic oligonucleotide
  Antisense strand to SEQ ID NO: 1265722
uuugacacucacagauucu

SEQ ID NO: 1265724 - RNA, 19 nt, Artificial Sequence
  Description of Artificial Sequence: Synthetic oligonucleotide
  Sense strand starting at position 452 of SEQ ID NO: 1241350
acuguacuuucuguugaag

SEQ ID NO: 1265725 - RNA, 19 nt, Artificial Sequence
  Description of Artificial Sequence: Synthetic oligonucleotide
  Antisense strand to SEQ ID NO: 1265724
cuucaacagaaaguacagu

SEQ ID NO: 1265726 - RNA, 19 nt, Artificial Sequence
  Description of Artificial Sequence: Synthetic oligonucleotide
  Sense strand starting at position 455 of SEQ ID NO: 1241350
guacuuucuguugaagauu

SEQ ID NO: 1265727 - RNA, 19 nt, Artificial Sequence
  Description of Artificial Sequence: Synthetic oligonucleotide
  Antisense strand to SEQ ID NO: 1265726
aaucuucaacagaaaguac

SEQ ID NO: 1265728 - RNA, 19 nt, Artificial Sequence
  Description of Artificial Sequence: Synthetic oligonucleotide
  Sense strand starting at position 499 of SEQ ID NO: 1241350
gcugcaugaggguauuaaa

SEQ ID NO: 1265729 - RNA, 19 nt, Artificial Sequence
  Description of Artificial Sequence: Synthetic oligonucleotide
  Antisense strand to SEQ ID NO: 1265728
uuuaauacccucaugcagc

SEQ ID NO: 1265730 - RNA, 19 nt, Artificial Sequence
  Description of Artificial Sequence: Synthetic oligonucleotide
  Sense strand starting at position 625 of SEQ ID NO: 1241350
ccaggcucucauuaagaac

SEQ ID NO: 1265731 - RNA, 19 nt, Artificial Sequence
  Description of Artificial Sequence: Synthetic oligonucleotide
  Antisense strand to SEQ ID NO: 1265730
guucuuaaugagagccugg

SEQ ID NO: 1265732 - RNA, 19 nt, Artificial Sequence
  Description of Artificial Sequence: Synthetic oligonucleotide
  Sense strand starting at position 700 of SEQ ID NO: 1241350
gucuaucuaccagauauuc

SEQ ID NO: 1265733 - RNA, 19 nt, Artificial Sequence
  Description of Artificial Sequence: Synthetic oligonucleotide
  Antisense strand to SEQ ID NO: 1265732
gaauaucugguagauagac

SEQ ID NO: 1265734 - RNA, 19 nt, Artificial Sequence
  Description of Artificial Sequence: Synthetic oligonucleotide
  Sense strand starting at position 710 of SEQ ID NO: 1241350
cagauauucgcguaaggaa

SEQ ID NO: 1265735 - RNA, 19 nt, Artificial Sequence
  Description of Artificial Sequence: Synthetic oligonucleotide
  Antisense strand to SEQ ID NO: 1265734
uuccuuacgcgaauaucug

SEQ ID NO: 1265736 - RNA, 19 nt, Artificial Sequence
  Description of Artificial Sequence: Synthetic oligonucleotide
  Sense strand starting at position 779 of SEQ ID NO: 1241350
ccuugaccuagaggugaau

SEQ ID NO: 1265737 - RNA, 19 nt, Artificial Sequence
  Description of Artificial Sequence: Synthetic oligonucleotide
  Antisense strand to SEQ ID NO: 1265736
auucaccucuaggucaagg

SEQ ID NO: 1265738 - RNA, 19 nt, Artificial Sequence
  Description of Artificial Sequence: Synthetic oligonucleotide
  Sense strand starting at position 830 of SEQ ID NO: 1241350
gcuaguaucugauucugga

SEQ ID NO: 1265739 - RNA, 19 nt, Artificial Sequence
  Description of Artificial Sequence: Synthetic oligonucleotide
  Antisense strand to SEQ ID NO: 1265738
uccagaaucagauacuagc

SEQ ID NO: 1265740 - RNA, 19 nt, Artificial Sequence
  Description of Artificial Sequence: Synthetic oligonucleotide
  Sense strand starting at position 846 of SEQ ID NO: 1241350
ggacaaguuacuggccuua

SEQ ID NO: 1265741 - RNA, 19 nt, Artificial Sequence
  Description of Artificial Sequence: Synthetic oligonucleotide
  Antisense strand to SEQ ID NO: 1265740
uaaggccaguaacuugucc

SEQ ID NO: 1265742 - RNA, 19 nt, Artificial Sequence
  Description of Artificial Sequence: Synthetic oligonucleotide
  Sense strand starting at position 848 of SEQ ID NO: 1241350
acaaguuacuggccuuaaa

SEQ ID NO: 1265743 - RNA, 19 nt, Artificial Sequence
  Description of Artificial Sequence: Synthetic oligonucleotide
  Antisense strand to SEQ ID NO: 1265742
uuuaaggccaguaacuugu

SEQ ID NO: 1265744 - RNA, 19 nt, Artificial Sequence
  Description of Artificial Sequence: Synthetic oligonucleotide
  Sense strand starting at position 932 of SEQ ID NO: 1241350
gucugagguuauccugaaa

SEQ ID NO: 1265745 - RNA, 19 nt, Artificial Sequence
  Description of Artificial Sequence: Synthetic oligonucleotide
  Antisense strand to SEQ ID NO: 1265744
uuucaggauaaccucagac

SEQ ID NO: 1265746 - RNA, 19 nt, Artificial Sequence
  Description of Artificial Sequence: Synthetic oligonucleotide
  Sense strand starting at position 935 of SEQ ID NO: 1241350
ugagguuauccugaaagca

SEQ ID NO: 1265747 - RNA, 19 nt, Artificial Sequence
  Description of Artificial Sequence: Synthetic oligonucleotide
  Antisense strand to SEQ ID NO: 1265746
ugcuuucaggauaaccuca

SEQ ID NO: 1265748 - RNA, 19 nt, Artificial Sequence
  Description of Artificial Sequence: Synthetic oligonucleotide
  Sense strand starting at position 1104 of SEQ ID NO: 1241350
aagauaucccagugcaaug

SEQ ID NO: 1265749 - RNA, 19 nt, Artificial Sequence
  Description of Artificial Sequence: Synthetic oligonucleotide
  Antisense strand to SEQ ID NO: 1265748
cauugcacugggauaucuu

SEQ ID NO: 1265750 - RNA, 19 nt, Artificial Sequence
  Description of Artificial Sequence: Synthetic oligonucleotide
  Sense strand starting at position 1113 of SEQ ID NO: 1241350
cagugcaauguguaagaaa

SEQ ID NO: 1265751 - RNA, 19 nt, Artificial Sequence
  Description of Artificial Sequence: Synthetic oligonucleotide
  Antisense strand to SEQ ID NO: 1265750
uuucuuacacauugcacug

SEQ ID NO: 1265752 - RNA, 19 nt, Artificial Sequence
  Description of Artificial Sequence: Synthetic oligonucleotide
  Sense strand starting at position 1286 of SEQ ID NO: 1241350
gcauguuggccuguuuagu

SEQ ID NO: 1265753 - RNA, 19 nt, Artificial Sequence
  Description of Artificial Sequence: Synthetic oligonucleotide
  Antisense strand to SEQ ID NO: 1265752
acuaaacaggccaacaugc

SEQ ID NO: 1265754 - RNA, 19 nt, Artificial Sequence
  Description of Artificial Sequence: Synthetic oligonucleotide
  Sense strand starting at position 1296 of SEQ ID NO: 1241350
cuguuuagucaucaaaucu

SEQ ID NO: 1265755 - RNA, 19 nt, Artificial Sequence
  Description of Artificial Sequence: Synthetic oligonucleotide
  Antisense strand to SEQ ID NO: 1265754
agauuugaugacuaaacag

SEQ ID NO: 1265756 - RNA, 19 nt, Artificial Sequence
  Description of Artificial Sequence: Synthetic oligonucleotide
  Sense strand starting at position 1351 of SEQ ID NO: 1241350
ucauaaaugugguuauucu

SEQ ID NO: 1265757 - RNA, 19 nt, Artificial Sequence
  Description of Artificial Sequence: Synthetic oligonucleotide
  Antisense strand to SEQ ID NO: 1265756
agaauaaccacauuuauga

SEQ ID NO: 1265758 - RNA, 19 nt, Artificial Sequence
  Description of Artificial Sequence: Synthetic oligonucleotide
  Sense strand starting at position 1413 of SEQ ID NO: 1241350
aagcgaugucucuaucauc

SEQ ID NO: 1265759 - RNA, 19 nt, Artificial Sequence
  Description of Artificial Sequence: Synthetic oligonucleotide
  Antisense strand to SEQ ID NO: 1265758
gaugauagagacaucgcuu

SEQ ID NO: 1265760 - RNA, 19 nt, Artificial Sequence
  Description of Artificial Sequence: Synthetic oligonucleotide
  Sense strand starting at position 2319 of SEQ ID NO: 1241350
ccugauaaguauucuuaug

SEQ ID NO: 1265761 - RNA, 19 nt, Artificial Sequence
  Description of Artificial Sequence: Synthetic oligonucleotide
  Antisense strand to SEQ ID NO: 1265760
cauaagaauacuuaucagg

SEQ ID NO: 1265762 - RNA, 19 nt, Artificial Sequence
  Description of Artificial Sequence: Synthetic oligonucleotide
  Sense strand starting at position 2551 of SEQ ID NO: 1241350
gguaauaucguagaaccca

SEQ ID NO: 1265763 - RNA, 19 nt, Artificial Sequence
  Description of Artificial Sequence: Synthetic oligonucleotide
  Antisense strand to SEQ ID NO: 1265762
uggguucuacgauauuacc

SEQ ID NO: 1265764 - RNA, 19 nt, Artificial Sequence
  Description of Artificial Sequence: Synthetic oligonucleotide
  Sense strand starting at position 2622 of SEQ ID NO: 1241350
gccauuaaugacuguauga

SEQ ID NO: 1265765 - RNA, 19 nt, Artificial Sequence
  Description of Artificial Sequence: Synthetic oligonucleotide
  Antisense strand to SEQ ID NO: 1265764
ucauacagucauuaauggc

SEQ ID NO: 1265766 - RNA, 19 nt, Artificial Sequence
  Description of Artificial Sequence: Synthetic oligonucleotide
  Sense strand starting at position 2633 of SEQ ID NO: 1241350
cuguaugaacuugggcaaa

SEQ ID NO: 1265767 - RNA, 19 nt, Artificial Sequence
  Description of Artificial Sequence: Synthetic oligonucleotide
  Antisense strand to SEQ ID NO: 1265766
uuugcccaaguucauacag

SEQ ID NO: 1265768 - RNA, 19 nt, Artificial Sequence
  Description of Artificial Sequence: Synthetic oligonucleotide
  Sense strand starting at position 2706 of SEQ ID NO: 1241350
agucaugcucuacauugga

SEQ ID NO: 1265769 - RNA, 19 nt, Artificial Sequence
  Description of Artificial Sequence: Synthetic oligonucleotide
  Antisense strand to SEQ ID NO: 1265768
uccaauguagagcaugacu

SEQ ID NO: 1265770 - RNA, 19 nt, Artificial Sequence
  Description of Artificial Sequence: Synthetic oligonucleotide
  Sense strand starting at position 2842 of SEQ ID NO: 1241350
gcaagugauuucgccaguc

SEQ ID NO: 1265771 - RNA, 19 nt, Artificial Sequence
  Description of Artificial Sequence: Synthetic oligonucleotide
  Antisense strand to SEQ ID NO: 1265770
gacuggcgaaaucacuugc

SEQ ID NO: 1265772 - RNA, 19 nt, Artificial Sequence
  Description of Artificial Sequence: Synthetic oligonucleotide
  Sense strand starting at position 3109 of SEQ ID NO: 1241350
aggaaucagugccuggaaa

SEQ ID NO: 1265773 - RNA, 19 nt, Artificial Sequence
  Description of Artificial Sequence: Synthetic oligonucleotide
  Antisense strand to SEQ ID NO: 1265772
uuuccaggcacugauuccu

SEQ ID NO: 1265774 - RNA, 19 nt, Artificial Sequence
  Description of Artificial Sequence: Synthetic oligonucleotide
  Sense strand starting at position 3110 of SEQ ID NO: 1241350
ggaaucagugccuggaaag

SEQ ID NO: 1265775 - RNA, 19 nt, Artificial Sequence
  Description of Artificial Sequence: Synthetic oligonucleotide
  Antisense strand to SEQ ID NO: 1265774
cuuuccaggcacugauucc

SEQ ID NO: 1265776 - RNA, 19 nt, Artificial Sequence
  Description of Artificial Sequence: Synthetic oligonucleotide
  Sense strand starting at position 3129 of SEQ ID NO: 1241350
cuaaucuugccaggaaaca

SEQ ID NO: 1265777 - RNA, 19 nt, Artificial Sequence
  Description of Artificial Sequence: Synthetic oligonucleotide
  Antisense strand to SEQ ID NO: 1265776
uguuuccuggcaagauuag

SEQ ID NO: 1265778 - RNA, 19 nt, Artificial Sequence
  Description of Artificial Sequence: Synthetic oligonucleotide
  Sense strand starting at position 3240 of SEQ ID NO: 1241350
gagaauaacucuccaguug

SEQ ID NO: 1265779 - RNA, 19 nt, Artificial Sequence
  Description of Artificial Sequence: Synthetic oligonucleotide
  Antisense strand to SEQ ID NO: 1265778
caacuggagaguuauucuc

SEQ ID NO: 1265780 - RNA, 19 nt, Artificial Sequence
  Description of Artificial Sequence: Synthetic oligonucleotide
  Sense strand starting at position 3289 of SEQ ID NO: 1241350
cacguuaaccuagaaggua

SEQ ID NO: 1265781 - RNA, 19 nt, Artificial Sequence
  Description of Artificial Sequence: Synthetic oligonucleotide
  Antisense strand to SEQ ID NO: 1265780
uaccuucuagguuaacgug

SEQ ID NO: 1265782 - RNA, 19 nt, Artificial Sequence
  Description of Artificial Sequence: Synthetic oligonucleotide
  Sense strand starting at position 3543 of SEQ ID NO: 1241350
acaugugaguuaucuccaa

SEQ ID NO: 1265783 - RNA, 19 nt, Artificial Sequence
  Description of Artificial Sequence: Synthetic oligonucleotide
  Antisense strand to SEQ ID NO: 1265782
uuggagauaacucacaugu

SEQ ID NO: 1265784 - RNA, 19 nt, Artificial Sequence
  Description of Artificial Sequence: Synthetic oligonucleotide
  Sense strand starting at position 3547 of SEQ ID NO: 1241350
gugaguuaucuccaaacca

SEQ ID NO: 1265785 - RNA, 19 nt, Artificial Sequence
  Description of Artificial Sequence: Synthetic oligonucleotide
  Antisense strand to SEQ ID NO: 1265784
ugguuuggagauaacucac

SEQ ID NO: 1265786 - RNA, 19 nt, Artificial Sequence
  Description of Artificial Sequence: Synthetic oligonucleotide
  Sense strand starting at position 3651 of SEQ ID NO: 1241350
uguuauuaaugguuggaaa

SEQ ID NO: 1265787 - RNA, 19 nt, Artificial Sequence
  Description of Artificial Sequence: Synthetic oligonucleotide
  Antisense strand to SEQ ID NO: 1265786
uuuccaaccauuaauaaca

SEQ ID NO: 1265788 - RNA, 19 nt, Artificial Sequence
  Description of Artificial Sequence: Synthetic oligonucleotide
  Sense strand starting at position 3652 of SEQ ID NO: 1241350
guuauuaaugguuggaaac

SEQ ID NO: 1265789 - RNA, 19 nt, Artificial Sequence
  Description of Artificial Sequence: Synthetic oligonucleotide
  Antisense strand to SEQ ID NO: 1265788
guuuccaaccauuaauaac

SEQ ID NO: 1265790 - RNA, 19 nt, Artificial Sequence
  Description of Artificial Sequence: Synthetic oligonucleotide
  Sense strand starting at position 3653 of SEQ ID NO: 1241350
uuauuaaugguuggaaaca

SEQ ID NO: 1265791 - RNA, 19 nt, Artificial Sequence
  Description of Artificial Sequence: Synthetic oligonucleotide
  Antisense strand to SEQ ID NO: 1265790
uguuuccaaccauuaauaa

SEQ ID NO: 1265792 - RNA, 19 nt, Artificial Sequence
  Description of Artificial Sequence: Synthetic oligonucleotide
  Sense strand starting at position 3703 of SEQ ID NO: 1241350
uggcauaaacucuagauuc

SEQ ID NO: 1265793 - RNA, 19 nt, Artificial Sequence
  Description of Artificial Sequence: Synthetic oligonucleotide
  Antisense strand to SEQ ID NO: 1265792
gaaucuagaguuuaugcca

SEQ ID NO: 1265794 - RNA, 19 nt, Artificial Sequence
  Description of Artificial Sequence: Synthetic oligonucleotide
  Sense strand starting at position 3773 of SEQ ID NO: 1241350
cuccgaugguugguauuua

SEQ ID NO: 1265795 - RNA, 19 nt, Artificial Sequence
  Description of Artificial Sequence: Synthetic oligonucleotide
  Antisense strand to SEQ ID NO: 1265794
uaaauaccaaccaucggag

SEQ ID NO: 1265796 - RNA, 19 nt, Artificial Sequence
  Description of Artificial Sequence: Synthetic oligonucleotide
  Sense strand starting at position 65 of SEQ ID NO: 1241351
ggaaauuucugcgaauaaa

SEQ ID NO: 1265797 - RNA, 19 nt, Artificial Sequence
  Description of Artificial Sequence: Synthetic oligonucleotide
  Antisense strand to SEQ ID NO: 1265796
uuuauucgcagaaauuucc

SEQ ID NO: 1265798 - RNA, 19 nt, Artificial Sequence
  Description of Artificial Sequence: Synthetic oligonucleotide
  Sense strand starting at position 102 of SEQ ID NO: 1241351
gcggaaucucaucauauca

SEQ ID NO: 1265799 - RNA, 19 nt, Artificial Sequence
  Description of Artificial Sequence: Synthetic oligonucleotide
  Antisense strand to SEQ ID NO: 1265798
ugauaugaugagauuccgc

SEQ ID NO: 1265800 - RNA, 19 nt, Artificial Sequence
  Description of Artificial Sequence: Synthetic oligonucleotide
  Sense strand starting at position 109 of SEQ ID NO: 1241351
cucaucauaucauuagguu

SEQ ID NO: 1265801 - RNA, 19 nt, Artificial Sequence
  Description of Artificial Sequence: Synthetic oligonucleotide
  Antisense strand to SEQ ID NO: 1265800
aaccuaaugauaugaugag

SEQ ID NO: 1265802 - RNA, 19 nt, Artificial Sequence
  Description of Artificial Sequence: Synthetic oligonucleotide
  Sense strand starting at position 117 of SEQ ID NO: 1241351
aucauuagguucuuuaaag

SEQ ID NO: 1265803 - RNA, 19 nt, Artificial Sequence
  Description of Artificial Sequence: Synthetic oligonucleotide
  Antisense strand to SEQ ID NO: 1265802
cuuuaaagaaccuaaugau

SEQ ID NO: 1265804 - RNA, 19 nt, Artificial Sequence
  Description of Artificial Sequence: Synthetic oligonucleotide
  Sense strand starting at position 246 of SEQ ID NO: 1241351
cccaauaaugccuagugaa

SEQ ID NO: 1265805 - RNA, 19 nt, Artificial Sequence
  Description of Artificial Sequence: Synthetic oligonucleotide
  Antisense strand to SEQ ID NO: 1265804
uucacuaggcauuauuggg

SEQ ID NO: 1265806 - RNA, 19 nt, Artificial Sequence
  Description of Artificial Sequence: Synthetic oligonucleotide
  Sense strand starting at position 253 of SEQ ID NO: 1241351
augccuagugaaugaauaa

SEQ ID NO: 1265807 - RNA, 19 nt, Artificial Sequence
  Description of Artificial Sequence: Synthetic oligonucleotide
  Antisense strand to SEQ ID NO: 1265806
uuauucauucacuaggcau

SEQ ID NO: 1265808 - RNA, 19 nt, Artificial Sequence
  Description of Artificial Sequence: Synthetic oligonucleotide
  Sense strand starting at position 273 of SEQ ID NO: 1241351
gaauaagacuuaccuguag

SEQ ID NO: 1265809 - RNA, 19 nt, Artificial Sequence
  Description of Artificial Sequence: Synthetic oligonucleotide
  Antisense strand to SEQ ID NO: 1265808
cuacagguaagucuuauuc

SEQ ID NO: 1265810 - RNA, 19 nt, Artificial Sequence
  Description of Artificial Sequence: Synthetic oligonucleotide
  Sense strand starting at position 277 of SEQ ID NO: 1241351
aagacuuaccuguagguca

SEQ ID NO: 1265811 - RNA, 19 nt, Artificial Sequence
  Description of Artificial Sequence: Synthetic oligonucleotide
  Antisense strand to SEQ ID NO: 1265810
ugaccuacagguaagucuu

SEQ ID NO: 1265812 - RNA, 19 nt, Artificial Sequence
  Description of Artificial Sequence: Synthetic oligonucleotide
  Sense strand starting at position 354 of SEQ ID NO: 1241351
cacaauaucgcggaaagca

SEQ ID NO: 1265813 - RNA, 19 nt, Artificial Sequence
  Description of Artificial Sequence: Synthetic oligonucleotide
  Antisense strand to SEQ ID NO: 1265812
ugcuuuccgcgauauugug

SEQ ID NO: 1265814 - RNA, 19 nt, Artificial Sequence
  Description of Artificial Sequence: Synthetic oligonucleotide
  Sense strand starting at position 395 of SEQ ID NO: 1241351
gucaucacaucaguugaau

SEQ ID NO: 1265815 - RNA, 19 nt, Artificial Sequence
  Description of Artificial Sequence: Synthetic oligonucleotide
  Antisense strand to SEQ ID NO: 1265814
auucaacugaugugaugac

SEQ ID NO: 1265816 - RNA, 19 nt, Artificial Sequence
  Description of Artificial Sequence: Synthetic oligonucleotide
  Sense strand starting at position 473 of SEQ ID NO: 1241351
ucuguaucagguuggaaua

SEQ ID NO: 1265817 - RNA, 19 nt, Artificial Sequence
  Description of Artificial Sequence: Synthetic oligonucleotide
  Antisense strand to SEQ ID NO: 1265816
uauuccaaccugauacaga

SEQ ID NO: 1265818 - RNA, 19 nt, Artificial Sequence
  Description of Artificial Sequence: Synthetic oligonucleotide
  Sense strand starting at position 540 of SEQ ID NO: 1241351
aguaauagacaccggagau

SEQ ID NO: 1265819 - RNA, 19 nt, Artificial Sequence
  Description of Artificial Sequence: Synthetic oligonucleotide
  Antisense strand to SEQ ID NO: 1265818
aucuccggugucuauuacu

SEQ ID NO: 1265820 - RNA, 19 nt, Artificial Sequence
  Description of Artificial Sequence: Synthetic oligonucleotide
  Sense strand starting at position 684 of SEQ ID NO: 1241351
gacuucggauuccuuuaua

SEQ ID NO: 1265821 - RNA, 19 nt, Artificial Sequence
  Description of Artificial Sequence: Synthetic oligonucleotide
  Antisense strand to SEQ ID NO: 1265820
uauaaaggaauccgaaguc

SEQ ID NO: 1265822 - RNA, 19 nt, Artificial Sequence
  Description of Artificial Sequence: Synthetic oligonucleotide
  Sense strand starting at position 687 of SEQ ID NO: 1241351
uucggauuccuuuauauuc

SEQ ID NO: 1265823 - RNA, 19 nt, Artificial Sequence
  Description of Artificial Sequence: Synthetic oligonucleotide
  Antisense strand to SEQ ID NO: 1265822
gaauauaaaggaauccgaa

SEQ ID NO: 1265824 - RNA, 19 nt, Artificial Sequence
  Description of Artificial Sequence: Synthetic oligonucleotide
  Sense strand starting at position 740 of SEQ ID NO: 1241351
ugaaucuauuccguuaaag

SEQ ID NO: 1265825 - RNA, 19 nt, Artificial Sequence
  Description of Artificial Sequence: Synthetic oligonucleotide
  Antisense strand to SEQ ID NO: 1265824
cuuuaacggaauagauuca

SEQ ID NO: 1265826 - RNA, 19 nt, Artificial Sequence
  Description of Artificial Sequence: Synthetic oligonucleotide
  Sense strand starting at position 823 of SEQ ID NO: 1241351
cugauaguuugaccuuuac

SEQ ID NO: 1265827 - RNA, 19 nt, Artificial Sequence
  Description of Artificial Sequence: Synthetic oligonucleotide
  Antisense strand to SEQ ID NO: 1265826
guaaaggucaaacuaucag

SEQ ID NO: 1265828 - RNA, 19 nt, Artificial Sequence
  Description of Artificial Sequence: Synthetic oligonucleotide
  Sense strand starting at position 858 of SEQ ID NO: 1241351
ccagucuaccgaugaggaa

SEQ ID NO: 1265829 - RNA, 19 nt, Artificial Sequence
  Description of Artificial Sequence: Synthetic oligonucleotide
  Antisense strand to SEQ ID NO: 1265828
uuccucaucgguagacugg

SEQ ID NO: 1265830 - RNA, 19 nt, Artificial Sequence
  Description of Artificial Sequence: Synthetic oligonucleotide
  Sense strand starting at position 956 of SEQ ID NO: 1241351
ucgcaucuugagcucgauu

SEQ ID NO: 1265831 - RNA, 19 nt, Artificial Sequence
  Description of Artificial Sequence: Synthetic oligonucleotide
  Antisense strand to SEQ ID NO: 1265830
aaucgagcucaagaugcga

SEQ ID NO: 1265832 - RNA, 19 nt, Artificial Sequence
  Description of Artificial Sequence: Synthetic oligonucleotide
  Sense strand starting at position 1078 of SEQ ID NO: 1241351
cuaggauucguucaugagg

SEQ ID NO: 1265833 - RNA, 19 nt, Artificial Sequence
  Description of Artificial Sequence: Synthetic oligonucleotide
  Antisense strand to SEQ ID NO: 1265832
ccucaugaacgaauccuag

SEQ ID NO: 1265834 - RNA, 19 nt, Artificial Sequence
  Description of Artificial Sequence: Synthetic oligonucleotide
  Sense strand starting at position 1081 of SEQ ID NO: 1241351
ggauucguucaugagggau

SEQ ID NO: 1265835 - RNA, 19 nt, Artificial Sequence
  Description of Artificial Sequence: Synthetic oligonucleotide
  Antisense strand to SEQ ID NO: 1265834
aucccucaugaacgaaucc

SEQ ID NO: 1265836 - RNA, 19 nt, Artificial Sequence
  Description of Artificial Sequence: Synthetic oligonucleotide
  Sense strand starting at position 1201 of SEQ ID NO: 1241351
aguacaguacucgguauuu

SEQ ID NO: 1265837 - RNA, 19 nt, Artificial Sequence
  Description of Artificial Sequence: Synthetic oligonucleotide
  Antisense strand to SEQ ID NO: 1265836
aaauaccgaguacuguacu

SEQ ID NO: 1265838 - RNA, 19 nt, Artificial Sequence
  Description of Artificial Sequence: Synthetic oligonucleotide
  Sense strand starting at position 1419 of SEQ ID NO: 1241351
gcgaccaacugucucauuu

SEQ ID NO: 1265839 - RNA, 19 nt, Artificial Sequence
  Description of Artificial Sequence: Synthetic oligonucleotide
  Antisense strand to SEQ ID NO: 1265838
aaaugagacaguuggucgc

SEQ ID NO: 1265840 - RNA, 19 nt, Artificial Sequence
  Description of Artificial Sequence: Synthetic oligonucleotide
  Sense strand starting at position 2468 of SEQ ID NO: 1241351
cuacuccuucgggacuauu

SEQ ID NO: 1265841 - RNA, 19 nt, Artificial Sequence
  Description of Artificial Sequence: Synthetic oligonucleotide
  Antisense strand to SEQ ID NO: 1265840
aauagucccgaaggaguag

SEQ ID NO: 1265842 - RNA, 19 nt, Artificial Sequence
  Description of Artificial Sequence: Synthetic oligonucleotide
  Sense strand starting at position 2510 of SEQ ID NO: 1241351
cccuuuauuggaugaacau

SEQ ID NO: 1265843 - RNA, 19 nt, Artificial Sequence
  Description of Artificial Sequence: Synthetic oligonucleotide
  Antisense strand to SEQ ID NO: 1265842
auguucauccaauaaaggg

SEQ ID NO: 1265844 - RNA, 19 nt, Artificial Sequence
  Description of Artificial Sequence: Synthetic oligonucleotide
  Sense strand starting at position 2580 of SEQ ID NO: 1241351
uuuggcaauguaugaauca

SEQ ID NO: 1265845 - RNA, 19 nt, Artificial Sequence
  Description of Artificial Sequence: Synthetic oligonucleotide
  Antisense strand to SEQ ID NO: 1265844
ugauucauacauugccaaa

SEQ ID NO: 1265846 - RNA, 19 nt, Artificial Sequence
  Description of Artificial Sequence: Synthetic oligonucleotide
  Sense strand starting at position 2619 of SEQ ID NO: 1241351
gugagaugucauuggaauc

SEQ ID NO: 1265847 - RNA, 19 nt, Artificial Sequence
  Description of Artificial Sequence: Synthetic oligonucleotide
  Antisense strand to SEQ ID NO: 1265846
gauuccaaugacaucucac

SEQ ID NO: 1265848 - RNA, 19 nt, Artificial Sequence
  Description of Artificial Sequence: Synthetic oligonucleotide
  Sense strand starting at position 2620 of SEQ ID NO: 1241351
ugagaugucauuggaaucu

SEQ ID NO: 1265849 - RNA, 19 nt, Artificial Sequence
  Description of Artificial Sequence: Synthetic oligonucleotide
  Antisense strand to SEQ ID NO: 1265848
agauuccaaugacaucuca

SEQ ID NO: 1265850 - RNA, 19 nt, Artificial Sequence
  Description of Artificial Sequence: Synthetic oligonucleotide
  Sense strand starting at position 2660 of SEQ ID NO: 1241351
ugaguagaggccgggaaua

SEQ ID NO: 1265851 - RNA, 19 nt, Artificial Sequence
  Description of Artificial Sequence: Synthetic oligonucleotide
  Antisense strand to SEQ ID NO: 1265850
uauucccggccucuacuca

SEQ ID NO: 1265852 - RNA, 19 nt, Artificial Sequence
  Description of Artificial Sequence: Synthetic oligonucleotide
  Sense strand starting at position 2722 of SEQ ID NO: 1241351
agaauuaccuggccugaaa

SEQ ID NO: 1265853 - RNA, 19 nt, Artificial Sequence
  Description of Artificial Sequence: Synthetic oligonucleotide
  Antisense strand to SEQ ID NO: 1265852
uuucaggccagguaauucu

SEQ ID NO: 1265854 - RNA, 19 nt, Artificial Sequence
  Description of Artificial Sequence: Synthetic oligonucleotide
  Sense strand starting at position 2735 of SEQ ID NO: 1241351
cugaaaugucuggagugcu

SEQ ID NO: 1265855 - RNA, 19 nt, Artificial Sequence
  Description of Artificial Sequence: Synthetic oligonucleotide
  Antisense strand to SEQ ID NO: 1265854
agcacuccagacauuucag

SEQ ID NO: 1265856 - RNA, 19 nt, Artificial Sequence
  Description of Artificial Sequence: Synthetic oligonucleotide
  Sense strand starting at position 2760 of SEQ ID NO: 1241351
uagaaaccuuucguuagga

SEQ ID NO: 1265857 - RNA, 19 nt, Artificial Sequence
  Description of Artificial Sequence: Synthetic oligonucleotide
  Antisense strand to SEQ ID NO: 1265856
uccuaacgaaagguuucua

SEQ ID NO: 1265858 - RNA, 19 nt, Artificial Sequence
  Description of Artificial Sequence: Synthetic oligonucleotide
  Sense strand starting at position 3028 of SEQ ID NO: 1241351
uugcucauuugugagauuu

SEQ ID NO: 1265859 - RNA, 19 nt, Artificial Sequence
  Description of Artificial Sequence: Synthetic oligonucleotide
  Antisense strand to SEQ ID NO: 1265858
aaaucucacaaaugagcaa

SEQ ID NO: 1265860 - RNA, 19 nt, Artificial Sequence
  Description of Artificial Sequence: Synthetic oligonucleotide
  Sense strand starting at position 3030 of SEQ ID NO: 1241351
gcucauuugugagauuuaa

SEQ ID NO: 1265861 - RNA, 19 nt, Artificial Sequence
  Description of Artificial Sequence: Synthetic oligonucleotide
  Antisense strand to SEQ ID NO: 1265860
uuaaaucucacaaaugagc

SEQ ID NO: 1265862 - RNA, 19 nt, Artificial Sequence
  Description of Artificial Sequence: Synthetic oligonucleotide
  Sense strand starting at position 3188 of SEQ ID NO: 1241351
ggugguaugcauccguagu

SEQ ID NO: 1265863 - RNA, 19 nt, Artificial Sequence
  Description of Artificial Sequence: Synthetic oligonucleotide
  Antisense strand to SEQ ID NO: 1265862
acuacggaugcauaccacc

SEQ ID NO: 1265864 - RNA, 19 nt, Artificial Sequence
  Description of Artificial Sequence: Synthetic oligonucleotide
  Sense strand starting at position 3585 of SEQ ID NO: 1241351
ccaugauugcaagacugca

SEQ ID NO: 1265865 - RNA, 19 nt, Artificial Sequence
  Description of Artificial Sequence: Synthetic oligonucleotide
  Antisense strand to SEQ ID NO: 1265864
ugcagucuugcaaucaugg

SEQ ID NO: 1265866 - RNA, 19 nt, Artificial Sequence
  Description of Artificial Sequence: Synthetic oligonucleotide
  Sense strand starting at position 3715 of SEQ ID NO: 1241351
ucagacuucuggucaaaug

SEQ ID NO: 1265867 - RNA, 19 nt, Artificial Sequence
  Description of Artificial Sequence: Synthetic oligonucleotide
  Antisense strand to SEQ ID NO: 1265866
cauuugaccagaagucuga

SEQ ID NO: 1265868 - RNA, 19 nt, Artificial Sequence
  Description of Artificial Sequence: Synthetic oligonucleotide
  Sense strand starting at position 3716 of SEQ ID NO: 1241351
cagacuucuggucaaaugu

SEQ ID NO: 1265869 - RNA, 19 nt, Artificial Sequence
  Description of Artificial Sequence: Synthetic oligonucleotide
  Antisense strand to SEQ ID NO: 1265868
acauuugaccagaagucug

SEQ ID NO: 1265870 - RNA, 19 nt, Artificial Sequence
  Description of Artificial Sequence: Synthetic oligonucleotide
  Sense strand starting at position 3744 of SEQ ID NO: 1241351
guuuauccuguacaacaaa

SEQ ID NO: 1265871 - RNA, 19 nt, Artificial Sequence
  Description of Artificial Sequence: Synthetic oligonucleotide
  Antisense strand to SEQ ID NO: 1265870
uuuguuguacaggauaaac

SEQ ID NO: 1265872 - RNA, 19 nt, Artificial Sequence
  Description of Artificial Sequence: Synthetic oligonucleotide
  Sense strand starting at position 3820 of SEQ ID NO: 1241351
gaacacaaggcuuguaaga

SEQ ID NO: 1265873 - RNA, 19 nt, Artificial Sequence
  Description of Artificial Sequence: Synthetic oligonucleotide
  Antisense strand to SEQ ID NO: 1265872
ucuuacaagccuuguguuc

SEQ ID NO: 1265874 - RNA, 19 nt, Artificial Sequence
  Description of Artificial Sequence: Synthetic oligonucleotide
  Sense strand starting at position 3930 of SEQ ID NO: 1241351
gauuacucuggccaguaca

SEQ ID NO: 1265875 - RNA, 19 nt, Artificial Sequence
  Description of Artificial Sequence: Synthetic oligonucleotide
  Antisense strand to SEQ ID NO: 1265874
uguacuggccagaguaauc

SEQ ID NO: 1265876 - RNA, 19 nt, Artificial Sequence
  Description of Artificial Sequence: Synthetic oligonucleotide
  Sense strand starting at position 36 of SEQ ID NO: 1241352
aaacguuuccguuaaauac

SEQ ID NO: 1265877 - RNA, 19 nt, Artificial Sequence
  Description of Artificial Sequence: Synthetic oligonucleotide
  Antisense strand to SEQ ID NO: 1265876
guauuuaacggaaacguuu

SEQ ID NO: 1265878 - RNA, 19 nt, Artificial Sequence
  Description of Artificial Sequence: Synthetic oligonucleotide
  Sense strand starting at position 169 of SEQ ID NO: 1241352
uuaagcuaaguccagaaua

SEQ ID NO: 1265879 - RNA, 19 nt, Artificial Sequence
  Description of Artificial Sequence: Synthetic oligonucleotide
  Antisense strand to SEQ ID NO: 1265878
uauucuggacuuagcuuaa

SEQ ID NO: 1265880 - RNA, 19 nt, Artificial Sequence
  Description of Artificial Sequence: Synthetic oligonucleotide
  Sense strand starting at position 428 of SEQ ID NO: 1241352
ggucaaucauuaucuguac

SEQ ID NO: 1265881 - RNA, 19 nt, Artificial Sequence
  Description of Artificial Sequence: Synthetic oligonucleotide
  Antisense strand to SEQ ID NO: 1265880
guacagauaaugauugacc

SEQ ID NO: 1265882 - RNA, 19 nt, Artificial Sequence
  Description of Artificial Sequence: Synthetic oligonucleotide
  Sense strand starting at position 429 of SEQ ID NO: 1241352
gucaaucauuaucuguaca

SEQ ID NO: 1265883 - RNA, 19 nt, Artificial Sequence
  Description of Artificial Sequence: Synthetic oligonucleotide
  Antisense strand to SEQ ID NO: 1265882
uguacagauaaugauugac

SEQ ID NO: 1265884 - RNA, 19 nt, Artificial Sequence
  Description of Artificial Sequence: Synthetic oligonucleotide
  Sense strand starting at position 542 of SEQ ID NO: 1241352
gauaaagauuaugucuguu

SEQ ID NO: 1265885 - RNA, 19 nt, Artificial Sequence
  Description of Artificial Sequence: Synthetic oligonucleotide
  Antisense strand to SEQ ID NO: 1265884
aacagacauaaucuuuauc

SEQ ID NO: 1265886 - RNA, 19 nt, Artificial Sequence
  Description of Artificial Sequence: Synthetic oligonucleotide
  Sense strand starting at position 567 of SEQ ID NO: 1241352
accaaugaauucccagagu

SEQ ID NO: 1265887 - RNA, 19 nt, Artificial Sequence
  Description of Artificial Sequence: Synthetic oligonucleotide
  Antisense strand to SEQ ID NO: 1265886
acucugggaauucauuggu

SEQ ID NO: 1265888 - RNA, 19 nt, Artificial Sequence
  Description of Artificial Sequence: Synthetic oligonucleotide
  Sense strand starting at position 608 of SEQ ID NO: 1241352
aaauacugcugaguggaau

SEQ ID NO: 1265889 - RNA, 19 nt, Artificial Sequence
  Description of Artificial Sequence: Synthetic oligonucleotide
  Antisense strand to SEQ ID NO: 1265888
auuccacucagcaguauuu

SEQ ID NO: 1265890 - RNA, 19 nt, Artificial Sequence
  Description of Artificial Sequence: Synthetic oligonucleotide
  Sense strand starting at position 701 of SEQ ID NO: 1241352
gguaaacagcaauauccuu

SEQ ID NO: 1265891 - RNA, 19 nt, Artificial Sequence
  Description of Artificial Sequence: Synthetic oligonucleotide
  Antisense strand to SEQ ID NO: 1265890
aaggauauugcuguuuacc

SEQ ID NO: 1265892 - RNA, 19 nt, Artificial Sequence
  Description of Artificial Sequence: Synthetic oligonucleotide
  Sense strand starting at position 959 of SEQ ID NO: 1241352
gaugaaaugcucuguaaca

SEQ ID NO: 1265893 - RNA, 19 nt, Artificial Sequence
  Description of Artificial Sequence: Synthetic oligonucleotide
  Antisense strand to SEQ ID NO: 1265892
uguuacagagcauuucauc

SEQ ID NO: 1265894 - RNA, 19 nt, Artificial Sequence
  Description of Artificial Sequence: Synthetic oligonucleotide
  Sense strand starting at position 961 of SEQ ID NO: 1241352
ugaaaugcucuguaacaua

SEQ ID NO: 1265895 - RNA, 19 nt, Artificial Sequence
  Description of Artificial Sequence: Synthetic oligonucleotide
  Antisense strand to SEQ ID NO: 1265894
uauguuacagagcauuuca

SEQ ID NO: 1265896 - RNA, 19 nt, Artificial Sequence
  Description of Artificial Sequence: Synthetic oligonucleotide
  Sense strand starting at position 1224 of SEQ ID NO: 1241352
auuaaugucgauuaccuaa

SEQ ID NO: 1265897 - RNA, 19 nt, Artificial Sequence
  Description of Artificial Sequence: Synthetic oligonucleotide
  Antisense strand to SEQ ID NO: 1265896
uuagguaaucgacauuaau

SEQ ID NO: 1265898 - RNA, 19 nt, Artificial Sequence
  Description of Artificial Sequence: Synthetic oligonucleotide
  Sense strand starting at position 1474 of SEQ ID NO: 1241352
gggaaucucagguaagcga

SEQ ID NO: 1265899 - RNA, 19 nt, Artificial Sequence
  Description of Artificial Sequence: Synthetic oligonucleotide
  Antisense strand to SEQ ID NO: 1265898
ucgcuuaccugagauuccc

SEQ ID NO: 1265900 - RNA, 19 nt, Artificial Sequence
  Description of Artificial Sequence: Synthetic oligonucleotide
  Sense strand starting at position 2351 of SEQ ID NO: 1241352
aaacaugauccggauugca

SEQ ID NO: 1265901 - RNA, 19 nt, Artificial Sequence
  Description of Artificial Sequence: Synthetic oligonucleotide
  Antisense strand to SEQ ID NO: 1265900
ugcaauccggaucauguuu

SEQ ID NO: 1265902 - RNA, 19 nt, Artificial Sequence
  Description of Artificial Sequence: Synthetic oligonucleotide
  Sense strand starting at position 2394 of SEQ ID NO: 1241352
gacagauauuacguaacag

SEQ ID NO: 1265903 - RNA, 19 nt, Artificial Sequence
  Description of Artificial Sequence: Synthetic oligonucleotide
  Antisense strand to SEQ ID NO: 1265902
cuguuacguaauaucuguc

SEQ ID NO: 1265904 - RNA, 19 nt, Artificial Sequence
  Description of Artificial Sequence: Synthetic oligonucleotide
  Sense strand starting at position 2402 of SEQ ID NO: 1241352
uuacguaacagugaaugga

SEQ ID NO: 1265905 - RNA, 19 nt, Artificial Sequence
  Description of Artificial Sequence: Synthetic oligonucleotide
  Antisense strand to SEQ ID NO: 1265904
uccauucacuguuacguaa

SEQ ID NO: 1265906 - RNA, 19 nt, Artificial Sequence
  Description of Artificial Sequence: Synthetic oligonucleotide
  Sense strand starting at position 2434 of SEQ ID NO: 1241352
gggcguuaccagaguugua

SEQ ID NO: 1265907 - RNA, 19 nt, Artificial Sequence
  Description of Artificial Sequence: Synthetic oligonucleotide
  Antisense strand to SEQ ID NO: 1265906
uacaacucugguaacgccc

SEQ ID NO: 1265908 - RNA, 19 nt, Artificial Sequence
  Description of Artificial Sequence: Synthetic oligonucleotide
  Sense strand starting at position 2579 of SEQ ID NO: 1241352
gguuauguuaugcauacag

SEQ ID NO: 1265909 - RNA, 19 nt, Artificial Sequence
  Description of Artificial Sequence: Synthetic oligonucleotide
  Antisense strand to SEQ ID NO: 1265908
cuguaugcauaacauaacc

SEQ ID NO: 1265910 - RNA, 19 nt, Artificial Sequence
  Description of Artificial Sequence: Synthetic oligonucleotide
  Sense strand starting at position 2581 of SEQ ID NO: 1241352
uuauguuaugcauacaguu

SEQ ID NO: 1265911 - RNA, 19 nt, Artificial Sequence
  Description of Artificial Sequence: Synthetic oligonucleotide
  Antisense strand to SEQ ID NO: 1265910
aacuguaugcauaacauaa

SEQ ID NO: 1265912 - RNA, 19 nt, Artificial Sequence
  Description of Artificial Sequence: Synthetic oligonucleotide
  Sense strand starting at position 2657 of SEQ ID NO: 1241352
ccacuauguguacaggauu

SEQ ID NO: 1265913 - RNA, 19 nt, Artificial Sequence
  Description of Artificial Sequence: Synthetic oligonucleotide
  Antisense strand to SEQ ID NO: 1265912
aauccuguacacauagugg

SEQ ID NO: 1265914 - RNA, 19 nt, Artificial Sequence
  Description of Artificial Sequence: Synthetic oligonucleotide
  Sense strand starting at position 2719 of SEQ ID NO: 1241352
gucucaaaucuuugaauug

SEQ ID NO: 1265915 - RNA, 19 nt, Artificial Sequence
  Description of Artificial Sequence: Synthetic oligonucleotide
  Antisense strand to SEQ ID NO: 1265914
caauucaaagauuugagac

SEQ ID NO: 1265916 - RNA, 19 nt, Artificial Sequence
  Description of Artificial Sequence: Synthetic oligonucleotide
  Sense strand starting at position 2817 of SEQ ID NO: 1241352
cuauuccucguagacucaa

SEQ ID NO: 1265917 - RNA, 19 nt, Artificial Sequence
  Description of Artificial Sequence: Synthetic oligonucleotide
  Antisense strand to SEQ ID NO: 1265916
uugagucuacgaggaauag

SEQ ID NO: 1265918 - RNA, 19 nt, Artificial Sequence
  Description of Artificial Sequence: Synthetic oligonucleotide
  Sense strand starting at position 3000 of SEQ ID NO: 1241352
uguagaauacuguguuaag

SEQ ID NO: 1265919 - RNA, 19 nt, Artificial Sequence
  Description of Artificial Sequence: Synthetic oligonucleotide
  Antisense strand to SEQ ID NO: 1265918
cuuaacacaguauucuaca

SEQ ID NO: 1265920 - RNA, 19 nt, Artificial Sequence
  Description of Artificial Sequence: Synthetic oligonucleotide
  Sense strand starting at position 3092 of SEQ ID NO: 1241352
uguuguuccuaacuauuaa

SEQ ID NO: 1265921 - RNA, 19 nt, Artificial Sequence
  Description of Artificial Sequence: Synthetic oligonucleotide
  Antisense strand to SEQ ID NO: 1265920
uuaauaguuaggaacaaca

SEQ ID NO: 1265922 - RNA, 19 nt, Artificial Sequence
  Description of Artificial Sequence: Synthetic oligonucleotide
  Sense strand starting at position 3202 of SEQ ID NO: 1241352
gaugucaggcuugauugua

SEQ ID NO: 1265923 - RNA, 19 nt, Artificial Sequence
  Description of Artificial Sequence: Synthetic oligonucleotide
  Antisense strand to SEQ ID NO: 1265922
uacaaucaagccugacauc

SEQ ID NO: 1265924 - RNA, 19 nt, Artificial Sequence
  Description of Artificial Sequence: Synthetic oligonucleotide
  Sense strand starting at position 3212 of SEQ ID NO: 1241352
uugauuguaugaucuucuu

SEQ ID NO: 1265925 - RNA, 19 nt, Artificial Sequence
  Description of Artificial Sequence: Synthetic oligonucleotide
  Antisense strand to SEQ ID NO: 1265924
aagaagaucauacaaucaa

SEQ ID NO: 1265926 - RNA, 19 nt, Artificial Sequence
  Description of Artificial Sequence: Synthetic oligonucleotide
  Sense strand starting at position 3243 of SEQ ID NO: 1241352
cuuucugagcaguaguauu

SEQ ID NO: 1265927 - RNA, 19 nt, Artificial Sequence
  Description of Artificial Sequence: Synthetic oligonucleotide
  Antisense strand to SEQ ID NO: 1265926
aauacuacugcucagaaag

SEQ ID NO: 1265928 - RNA, 19 nt, Artificial Sequence
  Description of Artificial Sequence: Synthetic oligonucleotide
  Sense strand starting at position 3301 of SEQ ID NO: 1241352
ucaugagaauagucugugu

SEQ ID NO: 1265929 - RNA, 19 nt, Artificial Sequence
  Description of Artificial Sequence: Synthetic oligonucleotide
  Antisense strand to SEQ ID NO: 1265928
acacagacuauucucauga

SEQ ID NO: 1265930 - RNA, 19 nt, Artificial Sequence
  Description of Artificial Sequence: Synthetic oligonucleotide
  Sense strand starting at position 3303 of SEQ ID NO: 1241352
augagaauagucuguguca

SEQ ID NO: 1265931 - RNA, 19 nt, Artificial Sequence
  Description of Artificial Sequence: Synthetic oligonucleotide
  Antisense strand to SEQ ID NO: 1265930
ugacacagacuauucucau

SEQ ID NO: 1265932 - RNA, 19 nt, Artificial Sequence
  Description of Artificial Sequence: Synthetic oligonucleotide
  Sense strand starting at position 3304 of SEQ ID NO: 1241352
ugagaauagucugugucag

SEQ ID NO: 1265933 - RNA, 19 nt, Artificial Sequence
  Description of Artificial Sequence: Synthetic oligonucleotide
  Antisense strand to SEQ ID NO: 1265932
cugacacagacuauucuca

SEQ ID NO: 1265934 - RNA, 19 nt, Artificial Sequence
  Description of Artificial Sequence: Synthetic oligonucleotide
  Sense strand starting at position 3305 of SEQ ID NO: 1241352
gagaauagucugugucaga

SEQ ID NO: 1265935 - RNA, 19 nt, Artificial Sequence
  Description of Artificial Sequence: Synthetic oligonucleotide
  Antisense strand to SEQ ID NO: 1265934
ucugacacagacuauucuc

SEQ ID NO: 1265936 - RNA, 19 nt, Artificial Sequence
  Description of Artificial Sequence: Synthetic oligonucleotide
  Sense strand starting at position 3339 of SEQ ID NO: 1241352
agccuugguccuggaagaa

SEQ ID NO: 1265937 - RNA, 19 nt, Artificial Sequence
  Description of Artificial Sequence: Synthetic oligonucleotide
  Antisense strand to SEQ ID NO: 1265936
uucuuccaggaccaaggcu

SEQ ID NO: 1265938 - RNA, 19 nt, Artificial Sequence
  Description of Artificial Sequence: Synthetic oligonucleotide
  Sense strand starting at position 3384 of SEQ ID NO: 1241352
ugagaugucacaugaguga

SEQ ID NO: 1265939 - RNA, 19 nt, Artificial Sequence
  Description of Artificial Sequence: Synthetic oligonucleotide
  Antisense strand to SEQ ID NO: 1265938
ucacucaugugacaucuca

SEQ ID NO: 1265940 - RNA, 19 nt, Artificial Sequence
  Description of Artificial Sequence: Synthetic oligonucleotide
  Sense strand starting at position 3387 of SEQ ID NO: 1241352
gaugucacaugagugacau

SEQ ID NO: 1265941 - RNA, 19 nt, Artificial Sequence
  Description of Artificial Sequence: Synthetic oligonucleotide
  Antisense strand to SEQ ID NO: 1265940
augucacucaugugacauc

SEQ ID NO: 1265942 - RNA, 19 nt, Artificial Sequence
  Description of Artificial Sequence: Synthetic oligonucleotide
  Sense strand starting at position 3388 of SEQ ID NO: 1241352
augucacaugagugacaua

SEQ ID NO: 1265943 - RNA, 19 nt, Artificial Sequence
  Description of Artificial Sequence: Synthetic oligonucleotide
  Antisense strand to SEQ ID NO: 1265942
uaugucacucaugugacau

SEQ ID NO: 1265944 - RNA, 19 nt, Artificial Sequence
  Description of Artificial Sequence: Synthetic oligonucleotide
  Sense strand starting at position 3418 of SEQ ID NO: 1241352
uguuauaagucacugagau

SEQ ID NO: 1265945 - RNA, 19 nt, Artificial Sequence
  Description of Artificial Sequence: Synthetic oligonucleotide
  Antisense strand to SEQ ID NO: 1265944
aucucagugacuuauaaca

SEQ ID NO: 1265946 - RNA, 19 nt, Artificial Sequence
  Description of Artificial Sequence: Synthetic oligonucleotide
  Sense strand starting at position 3419 of SEQ ID NO: 1241352
guuauaagucacugagauu

SEQ ID NO: 1265947 - RNA, 19 nt, Artificial Sequence
  Description of Artificial Sequence: Synthetic oligonucleotide
  Antisense strand to SEQ ID NO: 1265946
aaucucagugacuuauaac

SEQ ID NO: 1265948 - RNA, 19 nt, Artificial Sequence
  Description of Artificial Sequence: Synthetic oligonucleotide
  Sense strand starting at position 3422 of SEQ ID NO: 1241352
auaagucacugagauuuag

SEQ ID NO: 1265949 - RNA, 19 nt, Artificial Sequence
  Description of Artificial Sequence: Synthetic oligonucleotide
  Antisense strand to SEQ ID NO: 1265948
cuaaaucucagugacuuau

SEQ ID NO: 1265950 - RNA, 19 nt, Artificial Sequence
  Description of Artificial Sequence: Synthetic oligonucleotide
  Sense strand starting at position 3620 of SEQ ID NO: 1241352
uuaauugucgaagggauga

SEQ ID NO: 1265951 - RNA, 19 nt, Artificial Sequence
  Description of Artificial Sequence: Synthetic oligonucleotide
  Antisense strand to SEQ ID NO: 1265950
ucaucccuucgacaauuaa

SEQ ID NO: 1265952 - RNA, 19 nt, Artificial Sequence
  Description of Artificial Sequence: Synthetic oligonucleotide
  Sense strand starting at position 3672 of SEQ ID NO: 1241352
acuguauuggacgaaaccu

SEQ ID NO: 1265953 - RNA, 19 nt, Artificial Sequence
  Description of Artificial Sequence: Synthetic oligonucleotide
  Antisense strand to SEQ ID NO: 1265952
agguuucguccaauacagu

SEQ ID NO: 1265954 - RNA, 19 nt, Artificial Sequence
  Description of Artificial Sequence: Synthetic oligonucleotide
  Sense strand starting at position 3792 of SEQ ID NO: 1241352
ccuuguuaggacugaugau

SEQ ID NO: 1265955 - RNA, 19 nt, Artificial Sequence
  Description of Artificial Sequence: Synthetic oligonucleotide
  Antisense strand to SEQ ID NO: 1265954
aucaucaguccuaacaagg

SEQ ID NO: 1265956 - RNA, 19 nt, Artificial Sequence
  Description of Artificial Sequence: Synthetic oligonucleotide
  Sense strand starting at position 50 of SEQ ID NO: 1241353
ugacaaugaccauggcaga

SEQ ID NO: 1265957 - RNA, 19 nt, Artificial Sequence
  Description of Artificial Sequence: Synthetic oligonucleotide
  Antisense strand to SEQ ID NO: 1265956
ucugccauggucauuguca

SEQ ID NO: 1265958 - RNA, 19 nt, Artificial Sequence
  Description of Artificial Sequence: Synthetic oligonucleotide
  Sense strand starting at position 133 of SEQ ID NO: 1241353
auuguagugacccagguuu

SEQ ID NO: 1265959 - RNA, 19 nt, Artificial Sequence
  Description of Artificial Sequence: Synthetic oligonucleotide
  Antisense strand to SEQ ID NO: 1265958
aaaccugggucacuacaau

SEQ ID NO: 1265960 - RNA, 19 nt, Artificial Sequence
  Description of Artificial Sequence: Synthetic oligonucleotide
  Sense strand starting at position 229 of SEQ ID NO: 1241353
ccuuauacaguaugucaua

SEQ ID NO: 1265961 - RNA, 19 nt, Artificial Sequence
  Description of Artificial Sequence: Synthetic oligonucleotide
  Antisense strand to SEQ ID NO: 1265960
uaugacauacuguauaagg

SEQ ID NO: 1265962 - RNA, 19 nt, Artificial Sequence
  Description of Artificial Sequence: Synthetic oligonucleotide
  Sense strand starting at position 230 of SEQ ID NO: 1241353
cuuauacaguaugucauau

SEQ ID NO: 1265963 - RNA, 19 nt, Artificial Sequence
  Description of Artificial Sequence: Synthetic oligonucleotide
  Antisense strand to SEQ ID NO: 1265962
auaugacauacuguauaag

SEQ ID NO: 1265964 - RNA, 19 nt, Artificial Sequence
  Description of Artificial Sequence: Synthetic oligonucleotide
  Sense strand starting at position 297 of SEQ ID NO: 1241353
aauaaauguugguccuagu

SEQ ID NO: 1265965 - RNA, 19 nt, Artificial Sequence
  Description of Artificial Sequence: Synthetic oligonucleotide
  Antisense strand to SEQ ID NO: 1265964
acuaggaccaacauuuauu

SEQ ID NO: 1265966 - RNA, 19 nt, Artificial Sequence
  Description of Artificial Sequence: Synthetic oligonucleotide
  Sense strand starting at position 385 of SEQ ID NO: 1241353
ugaaguuucuaagauuucu

SEQ ID NO: 1265967 - RNA, 19 nt, Artificial Sequence
  Description of Artificial Sequence: Synthetic oligonucleotide
  Antisense strand to SEQ ID NO: 1265966
agaaaucuuagaaacuuca

SEQ ID NO: 1265968 - RNA, 19 nt, Artificial Sequence
  Description of Artificial Sequence: Synthetic oligonucleotide
  Sense strand starting at position 885 of SEQ ID NO: 1241353
agcauuaagaagugguuua

SEQ ID NO: 1265969 - RNA, 19 nt, Artificial Sequence
  Description of Artificial Sequence: Synthetic oligonucleotide
  Antisense strand to SEQ ID NO: 1265968
uaaaccacuucuuaaugcu

SEQ ID NO: 1265970 - RNA, 19 nt, Artificial Sequence
  Description of Artificial Sequence: Synthetic oligonucleotide
  Sense strand starting at position 886 of SEQ ID NO: 1241353
gcauuaagaagugguuuau

SEQ ID NO: 1265971 - RNA, 19 nt, Artificial Sequence
  Description of Artificial Sequence: Synthetic oligonucleotide
  Antisense strand to SEQ ID NO: 1265970
auaaaccacuucuuaaugc

SEQ ID NO: 1265972 - RNA, 19 nt, Artificial Sequence
  Description of Artificial Sequence: Synthetic oligonucleotide
  Sense strand starting at position 892 of SEQ ID NO: 1241353
agaagugguuuaucaacac

SEQ ID NO: 1265973 - RNA, 19 nt, Artificial Sequence
  Description of Artificial Sequence: Synthetic oligonucleotide
  Antisense strand to SEQ ID NO: 1265972
guguugauaaaccacuucu

SEQ ID NO: 1265974 - RNA, 19 nt, Artificial Sequence
  Description of Artificial Sequence: Synthetic oligonucleotide
  Sense strand starting at position 896 of SEQ ID NO: 1241353
gugguuuaucaacaccugu

SEQ ID NO: 1265975 - RNA, 19 nt, Artificial Sequence
  Description of Artificial Sequence: Synthetic oligonucleotide
  Antisense strand to SEQ ID NO: 1265974
acagguguugauaaaccac

SEQ ID NO: 1265976 - RNA, 19 nt, Artificial Sequence
  Description of Artificial Sequence: Synthetic oligonucleotide
  Sense strand starting at position 978 of SEQ ID NO: 1241353
agacaacugucccuaagac

SEQ ID NO: 1265977 - RNA, 19 nt, Artificial Sequence
  Description of Artificial Sequence: Synthetic oligonucleotide
  Antisense strand to SEQ ID NO: 1265976
gucuuagggacaguugucu

SEQ ID NO: 1265978 - RNA, 19 nt, Artificial Sequence
  Description of Artificial Sequence: Synthetic oligonucleotide
  Sense strand starting at position 1013 of SEQ ID NO: 1241353
gugggaacagcaugucaaa

SEQ ID NO: 1265979 - RNA, 19 nt, Artificial Sequence
  Description of Artificial Sequence: Synthetic oligonucleotide
  Antisense strand to SEQ ID NO: 1265978
uuugacaugcuguucccac

SEQ ID NO: 1265980 - RNA, 19 nt, Artificial Sequence
  Description of Artificial Sequence: Synthetic oligonucleotide
  Sense strand starting at position 1210 of SEQ ID NO: 1241353
cuguaauuccaacaguagu

SEQ ID NO: 1265981 - RNA, 19 nt, Artificial Sequence
  Description of Artificial Sequence: Synthetic oligonucleotide
  Antisense strand to SEQ ID NO: 1265980
acuacuguuggaauuacag

SEQ ID NO: 1265982 - RNA, 19 nt, Artificial Sequence
  Description of Artificial Sequence: Synthetic oligonucleotide
  Sense strand starting at position 1311 of SEQ ID NO: 1241353
cagagaugaggcugaguca

SEQ ID NO: 1265983 - RNA, 19 nt, Artificial Sequence
  Description of Artificial Sequence: Synthetic oligonucleotide
  Antisense strand to SEQ ID NO: 1265982
ugacucagccucaucucug

SEQ ID NO: 1265984 - RNA, 19 nt, Artificial Sequence
  Description of Artificial Sequence: Synthetic oligonucleotide
  Sense strand starting at position 1534 of SEQ ID NO: 1241353
gcaacauggccacauauau

SEQ ID NO: 1265985 - RNA, 19 nt, Artificial Sequence
  Description of Artificial Sequence: Synthetic oligonucleotide
  Antisense strand to SEQ ID NO: 1265984
auauauguggccauguugc

SEQ ID NO: 1265986 - RNA, 19 nt, Artificial Sequence
  Description of Artificial Sequence: Synthetic oligonucleotide
  Sense strand starting at position 2287 of SEQ ID NO: 1241353
uuuaaugggucugugaagu

SEQ ID NO: 1265987 - RNA, 19 nt, Artificial Sequence
  Description of Artificial Sequence: Synthetic oligonucleotide
  Antisense strand to SEQ ID NO: 1265986
acuucacagacccauuaaa

SEQ ID NO: 1265988 - RNA, 19 nt, Artificial Sequence
  Description of Artificial Sequence: Synthetic oligonucleotide
  Sense strand starting at position 2345 of SEQ ID NO: 1241353
ugguacaaccuuuggaaga

SEQ ID NO: 1265989 - RNA, 19 nt, Artificial Sequence
  Description of Artificial Sequence: Synthetic oligonucleotide
  Antisense strand to SEQ ID NO: 1265988
ucuuccaaagguuguacca

SEQ ID NO: 1265990 - RNA, 19 nt, Artificial Sequence
  Description of Artificial Sequence: Synthetic oligonucleotide
  Sense strand starting at position 2372 of SEQ ID NO: 1241353
ugcacugaguuacucagaa

SEQ ID NO: 1265991 - RNA, 19 nt, Artificial Sequence
  Description of Artificial Sequence: Synthetic oligonucleotide
  Antisense strand to SEQ ID NO: 1265990
uucugaguaacucagugca

SEQ ID NO: 1265992 - RNA, 19 nt, Artificial Sequence
  Description of Artificial Sequence: Synthetic oligonucleotide
  Sense strand starting at position 2395 of SEQ ID NO: 1241353
ucaaauugccuugagcaau

SEQ ID NO: 1265993 - RNA, 19 nt, Artificial Sequence
  Description of Artificial Sequence: Synthetic oligonucleotide
  Antisense strand to SEQ ID NO: 1265992
auugcucaaggcaauuuga

SEQ ID NO: 1265994 - RNA, 19 nt, Artificial Sequence
  Description of Artificial Sequence: Synthetic oligonucleotide
  Sense strand starting at position 2470 of SEQ ID NO: 1241353
ugccgauauaagugauuga

SEQ ID NO: 1265995 - RNA, 19 nt, Artificial Sequence
  Description of Artificial Sequence: Synthetic oligonucleotide
  Antisense strand to SEQ ID NO: 1265994
ucaaucacuuauaucggca

SEQ ID NO: 1265996 - RNA, 19 nt, Artificial Sequence
  Description of Artificial Sequence: Synthetic oligonucleotide
  Sense strand starting at position 2471 of SEQ ID NO: 1241353
gccgauauaagugauugaa

SEQ ID NO: 1265997 - RNA, 19 nt, Artificial Sequence
  Description of Artificial Sequence: Synthetic oligonucleotide
  Antisense strand to SEQ ID NO: 1265996
uucaaucacuuauaucggc

SEQ ID NO: 1265998 - RNA, 19 nt, Artificial Sequence
  Description of Artificial Sequence: Synthetic oligonucleotide
  Sense strand starting at position 2473 of SEQ ID NO: 1241353
cgauauaagugauugaaua

SEQ ID NO: 1265999 - RNA, 19 nt, Artificial Sequence
  Description of Artificial Sequence: Synthetic oligonucleotide
  Antisense strand to SEQ ID NO: 1265998
uauucaaucacuuauaucg

SEQ ID NO: 1266000 - RNA, 19 nt, Artificial Sequence
  Description of Artificial Sequence: Synthetic oligonucleotide
  Sense strand starting at position 2695 of SEQ ID NO: 1241353
ugaucaagacuaugugcua

SEQ ID NO: 1266001 - RNA, 19 nt, Artificial Sequence
  Description of Artificial Sequence: Synthetic oligonucleotide
  Antisense strand to SEQ ID NO: 1266000
uagcacauagucuugauca

SEQ ID NO: 1266002 - RNA, 19 nt, Artificial Sequence
  Description of Artificial Sequence: Synthetic oligonucleotide
  Sense strand starting at position 2696 of SEQ ID NO: 1241353
gaucaagacuaugugcuaa

SEQ ID NO: 1266003 - RNA, 19 nt, Artificial Sequence
  Description of Artificial Sequence: Synthetic oligonucleotide
  Antisense strand to SEQ ID NO: 1266002
uuagcacauagucuugauc

SEQ ID NO: 1266004 - RNA, 19 nt, Artificial Sequence
  Description of Artificial Sequence: Synthetic oligonucleotide
  Sense strand starting at position 2698 of SEQ ID NO: 1241353
ucaagacuaugugcuaaau

SEQ ID NO: 1266005 - RNA, 19 nt, Artificial Sequence
  Description of Artificial Sequence: Synthetic oligonucleotide
  Antisense strand to SEQ ID NO: 1266004
auuuagcacauagucuuga

SEQ ID NO: 1266006 - RNA, 19 nt, Artificial Sequence
  Description of Artificial Sequence: Synthetic oligonucleotide
  Sense strand starting at position 2711 of SEQ ID NO: 1241353
cuaaaucauguugauagua

SEQ ID NO: 1266007 - RNA, 19 nt, Artificial Sequence
  Description of Artificial Sequence: Synthetic oligonucleotide
  Antisense strand to SEQ ID NO: 1266006
uacuaucaacaugauuuag

SEQ ID NO: 1266008 - RNA, 19 nt, Artificial Sequence
  Description of Artificial Sequence: Synthetic oligonucleotide
  Sense strand starting at position 2719 of SEQ ID NO: 1241353
uguugauaguauguggaau

SEQ ID NO: 1266009 - RNA, 19 nt, Artificial Sequence
  Description of Artificial Sequence: Synthetic oligonucleotide
  Antisense strand to SEQ ID NO: 1266008
auuccacauacuaucaaca

SEQ ID NO: 1266010 - RNA, 19 nt, Artificial Sequence
  Description of Artificial Sequence: Synthetic oligonucleotide
  Sense strand starting at position 2720 of SEQ ID NO: 1241353
guugauaguauguggaaug

SEQ ID NO: 1266011 - RNA, 19 nt, Artificial Sequence
  Description of Artificial Sequence: Synthetic oligonucleotide
  Antisense strand to SEQ ID NO: 1266010
cauuccacauacuaucaac

SEQ ID NO: 1266012 - RNA, 19 nt, Artificial Sequence
  Description of Artificial Sequence: Synthetic oligonucleotide
  Sense strand starting at position 2725 of SEQ ID NO: 1241353
uaguauguggaaugauaua

SEQ ID NO: 1266013 - RNA, 19 nt, Artificial Sequence
  Description of Artificial Sequence: Synthetic oligonucleotide
  Antisense strand to SEQ ID NO: 1266012
uauaucauuccacauacua

SEQ ID NO: 1266014 - RNA, 19 nt, Artificial Sequence
  Description of Artificial Sequence: Synthetic oligonucleotide
  Sense strand starting at position 2823 of SEQ ID NO: 1241353
acccgaauugagggacauu

SEQ ID NO: 1266015 - RNA, 19 nt, Artificial Sequence
  Description of Artificial Sequence: Synthetic oligonucleotide
  Antisense strand to SEQ ID NO: 1266014
aaugucccucaauucgggu

SEQ ID NO: 1266016 - RNA, 19 nt, Artificial Sequence
  Description of Artificial Sequence: Synthetic oligonucleotide
  Sense strand starting at position 2832 of SEQ ID NO: 1241353
gagggacauucugcagagu

SEQ ID NO: 1266017 - RNA, 19 nt, Artificial Sequence
  Description of Artificial Sequence: Synthetic oligonucleotide
  Antisense strand to SEQ ID NO: 1266016
acucugcagaaugucccuc

SEQ ID NO: 1266018 - RNA, 19 nt, Artificial Sequence
  Description of Artificial Sequence: Synthetic oligonucleotide
  Sense strand starting at position 2835 of SEQ ID NO: 1241353
ggacauucugcagagugca

SEQ ID NO: 1266019 - RNA, 19 nt, Artificial Sequence
  Description of Artificial Sequence: Synthetic oligonucleotide
  Antisense strand to SEQ ID NO: 1266018
ugcacucugcagaaugucc

SEQ ID NO: 1266020 - RNA, 19 nt, Artificial Sequence
  Description of Artificial Sequence: Synthetic oligonucleotide
  Sense strand starting at position 2849 of SEQ ID NO: 1241353
gugcaugaccaguauucuu

SEQ ID NO: 1266021 - RNA, 19 nt, Artificial Sequence
  Description of Artificial Sequence: Synthetic oligonucleotide
  Antisense strand to SEQ ID NO: 1266020
aagaauacuggucaugcac

SEQ ID NO: 1266022 - RNA, 19 nt, Artificial Sequence
  Description of Artificial Sequence: Synthetic oligonucleotide
  Sense strand starting at position 2933 of SEQ ID NO: 1241353
gaggcaugacaauguaaua

SEQ ID NO: 1266023 - RNA, 19 nt, Artificial Sequence
  Description of Artificial Sequence: Synthetic oligonucleotide
  Antisense strand to SEQ ID NO: 1266022
uauuacauugucaugccuc

SEQ ID NO: 1266024 - RNA, 19 nt, Artificial Sequence
  Description of Artificial Sequence: Synthetic oligonucleotide
  Sense strand starting at position 3021 of SEQ ID NO: 1241353
guaucaacuuuaguuaauc

SEQ ID NO: 1266025 - RNA, 19 nt, Artificial Sequence
  Description of Artificial Sequence: Synthetic oligonucleotide
  Antisense strand to SEQ ID NO: 1266024
gauuaacuaaaguugauac

SEQ ID NO: 1266026 - RNA, 19 nt, Artificial Sequence
  Description of Artificial Sequence: Synthetic oligonucleotide
  Sense strand starting at position 3302 of SEQ ID NO: 1241353
cagccuggucuacaagagu

SEQ ID NO: 1266027 - RNA, 19 nt, Artificial Sequence
  Description of Artificial Sequence: Synthetic oligonucleotide
  Antisense strand to SEQ ID NO: 1266026
acucuuguagaccaggcug

SEQ ID NO: 1266028 - RNA, 19 nt, Artificial Sequence
  Description of Artificial Sequence: Synthetic oligonucleotide
  Sense strand starting at position 3308 of SEQ ID NO: 1241353
ggucuacaagagugaaacu

SEQ ID NO: 1266029 - RNA, 19 nt, Artificial Sequence
  Description of Artificial Sequence: Synthetic oligonucleotide
  Antisense strand to SEQ ID NO: 1266028
aguuucacucuuguagacc

SEQ ID NO: 1266030 - RNA, 19 nt, Artificial Sequence
  Description of Artificial Sequence: Synthetic oligonucleotide
  Sense strand starting at position 3359 of SEQ ID NO: 1241353
aucaauauugguugcaauu

SEQ ID NO: 1266031 - RNA, 19 nt, Artificial Sequence
  Description of Artificial Sequence: Synthetic oligonucleotide
  Antisense strand to SEQ ID NO: 1266030
aauugcaaccaauauugau

SEQ ID NO: 1266032 - RNA, 19 nt, Artificial Sequence
  Description of Artificial Sequence: Synthetic oligonucleotide
  Sense strand starting at position 3386 of SEQ ID NO: 1241353
uguuauacuucuguaagag

SEQ ID NO: 1266033 - RNA, 19 nt, Artificial Sequence
  Description of Artificial Sequence: Synthetic oligonucleotide
  Antisense strand to SEQ ID NO: 1266032
cucuuacagaaguauaaca

SEQ ID NO: 1266034 - RNA, 19 nt, Artificial Sequence
  Description of Artificial Sequence: Synthetic oligonucleotide
  Sense strand starting at position 3387 of SEQ ID NO: 1241353
guuauacuucuguaagagu

SEQ ID NO: 1266035 - RNA, 19 nt, Artificial Sequence
  Description of Artificial Sequence: Synthetic oligonucleotide
  Antisense strand to SEQ ID NO: 1266034
acucuuacagaaguauaac

SEQ ID NO: 1266036 - RNA, 19 nt, Artificial Sequence
  Description of Artificial Sequence: Synthetic oligonucleotide
  Sense strand starting at position 47 of SEQ ID NO: 1241354
accucaguguuccuaagau

SEQ ID NO: 1266037 - RNA, 19 nt, Artificial Sequence
  Description of Artificial Sequence: Synthetic oligonucleotide
  Antisense strand to SEQ ID NO: 1266036
aucuuaggaacacugaggu

SEQ ID NO: 1266038 - RNA, 19 nt, Artificial Sequence
  Description of Artificial Sequence: Synthetic oligonucleotide
  Sense strand starting at position 105 of SEQ ID NO: 1241354
auguucuacaguugggaaa

SEQ ID NO: 1266039 - RNA, 19 nt, Artificial Sequence
  Description of Artificial Sequence: Synthetic oligonucleotide
  Antisense strand to SEQ ID NO: 1266038
uuucccaacuguagaacau

SEQ ID NO: 1266040 - RNA, 19 nt, Artificial Sequence
  Description of Artificial Sequence: Synthetic oligonucleotide
  Sense strand starting at position 157 of SEQ ID NO: 1241354
acaacauggugguuaagaa

SEQ ID NO: 1266041 - RNA, 19 nt, Artificial Sequence
  Description of Artificial Sequence: Synthetic oligonucleotide
  Antisense strand to SEQ ID NO: 1266040
uucuuaaccaccauguugu

SEQ ID NO: 1266042 - RNA, 19 nt, Artificial Sequence
  Description of Artificial Sequence: Synthetic oligonucleotide
  Sense strand starting at position 165 of SEQ ID NO: 1241354
gugguuaagaaugagcuuu

SEQ ID NO: 1266043 - RNA, 19 nt, Artificial Sequence
  Description of Artificial Sequence: Synthetic oligonucleotide
  Antisense strand to SEQ ID NO: 1266042
aaagcucauucuuaaccac

SEQ ID NO: 1266044 - RNA, 19 nt, Artificial Sequence
  Description of Artificial Sequence: Synthetic oligonucleotide
  Sense strand starting at position 171 of SEQ ID NO: 1241354
aagaaugagcuuuggaauc

SEQ ID NO: 1266045 - RNA, 19 nt, Artificial Sequence
  Description of Artificial Sequence: Synthetic oligonucleotide
  Antisense strand to SEQ ID NO: 1266044
gauuccaaagcucauucuu

SEQ ID NO: 1266046 - RNA, 19 nt, Artificial Sequence
  Description of Artificial Sequence: Synthetic oligonucleotide
  Sense strand starting at position 278 of SEQ ID NO: 1241354
agugguauccaccauauag

SEQ ID NO: 1266047 - RNA, 19 nt, Artificial Sequence
  Description of Artificial Sequence: Synthetic oligonucleotide
  Antisense strand to SEQ ID NO: 1266046
cuauaugguggauaccacu

SEQ ID NO: 1266048 - RNA, 19 nt, Artificial Sequence
  Description of Artificial Sequence: Synthetic oligonucleotide
  Sense strand starting at position 315 of SEQ ID NO: 1241354
auaagaguauaugcuaagu

SEQ ID NO: 1266049 - RNA, 19 nt, Artificial Sequence
  Description of Artificial Sequence: Synthetic oligonucleotide
  Antisense strand to SEQ ID NO: 1266048
acuuagcauauacucuuau

SEQ ID NO: 1266050 - RNA, 19 nt, Artificial Sequence
  Description of Artificial Sequence: Synthetic oligonucleotide
  Sense strand starting at position 323 of SEQ ID NO: 1241354
auaugcuaaguccauagua

SEQ ID NO: 1266051 - RNA, 19 nt, Artificial Sequence
  Description of Artificial Sequence: Synthetic oligonucleotide
  Antisense strand to SEQ ID NO: 1266050
uacuauggacuuagcauau

SEQ ID NO: 1266052 - RNA, 19 nt, Artificial Sequence
  Description of Artificial Sequence: Synthetic oligonucleotide
  Sense strand starting at position 325 of SEQ ID NO: 1241354
augcuaaguccauaguaca

SEQ ID NO: 1266053 - RNA, 19 nt, Artificial Sequence
  Description of Artificial Sequence: Synthetic oligonucleotide
  Antisense strand to SEQ ID NO: 1266052
uguacuauggacuuagcau

SEQ ID NO: 1266054 - RNA, 19 nt, Artificial Sequence
  Description of Artificial Sequence: Synthetic oligonucleotide
  Sense strand starting at position 355 of SEQ ID NO: 1241354
auaguugagugcuuaauaa

SEQ ID NO: 1266055 - RNA, 19 nt, Artificial Sequence
  Description of Artificial Sequence: Synthetic oligonucleotide
  Antisense strand to SEQ ID NO: 1266054
uuauuaagcacucaacuau

SEQ ID NO: 1266056 - RNA, 19 nt, Artificial Sequence
  Description of Artificial Sequence: Synthetic oligonucleotide
  Sense strand starting at position 398 of SEQ ID NO: 1241354
agaauacacugguucucaa

SEQ ID NO: 1266057 - RNA, 19 nt, Artificial Sequence
  Description of Artificial Sequence: Synthetic oligonucleotide
  Antisense strand to SEQ ID NO: 1266056
uugagaaccaguguauucu

SEQ ID NO: 1266058 - RNA, 19 nt, Artificial Sequence
  Description of Artificial Sequence: Synthetic oligonucleotide
  Sense strand starting at position 407 of SEQ ID NO: 1241354
ugguucucaacugggagua

SEQ ID NO: 1266059 - RNA, 19 nt, Artificial Sequence
  Description of Artificial Sequence: Synthetic oligonucleotide
  Antisense strand to SEQ ID NO: 1266058
uacucccaguugagaacca

SEQ ID NO: 1266060 - RNA, 19 nt, Artificial Sequence
  Description of Artificial Sequence: Synthetic oligonucleotide
  Sense strand starting at position 451 of SEQ ID NO: 1241354
ggaggccuuuggguugaua

SEQ ID NO: 1266061 - RNA, 19 nt, Artificial Sequence
  Description of Artificial Sequence: Synthetic oligonucleotide
  Antisense strand to SEQ ID NO: 1266060
uaucaacccaaaggccucc

SEQ ID NO: 1266062 - RNA, 19 nt, Artificial Sequence
  Description of Artificial Sequence: Synthetic oligonucleotide
  Sense strand starting at position 453 of SEQ ID NO: 1241354
aggccuuuggguugauaca

SEQ ID NO: 1266063 - RNA, 19 nt, Artificial Sequence
  Description of Artificial Sequence: Synthetic oligonucleotide
  Antisense strand to SEQ ID NO: 1266062
uguaucaacccaaaggccu

SEQ ID NO: 1266064 - RNA, 19 nt, Artificial Sequence
  Description of Artificial Sequence: Synthetic oligonucleotide
  Sense strand starting at position 454 of SEQ ID NO: 1241354
ggccuuuggguugauacaa

SEQ ID NO: 1266065 - RNA, 19 nt, Artificial Sequence
  Description of Artificial Sequence: Synthetic oligonucleotide
  Antisense strand to SEQ ID NO: 1266064
uuguaucaacccaaaggcc

SEQ ID NO: 1266066 - RNA, 19 nt, Artificial Sequence
  Description of Artificial Sequence: Synthetic oligonucleotide
  Sense strand starting at position 553 of SEQ ID NO: 1241354
uggcauccucacuauuaag

SEQ ID NO: 1266067 - RNA, 19 nt, Artificial Sequence
  Description of Artificial Sequence: Synthetic oligonucleotide
  Antisense strand to SEQ ID NO: 1266066
cuuaauagugaggaugcca

SEQ ID NO: 1266068 - RNA, 19 nt, Artificial Sequence
  Description of Artificial Sequence: Synthetic oligonucleotide
  Sense strand starting at position 624 of SEQ ID NO: 1241354
guaucaauguuccuaggac

SEQ ID NO: 1266069 - RNA, 19 nt, Artificial Sequence
  Description of Artificial Sequence: Synthetic oligonucleotide
  Antisense strand to SEQ ID NO: 1266068
guccuaggaacauugauac

SEQ ID NO: 1266070 - RNA, 19 nt, Artificial Sequence
  Description of Artificial Sequence: Synthetic oligonucleotide
  Sense strand starting at position 1226 of SEQ ID NO: 1241354
uagaguggcugguuugaaa

SEQ ID NO: 1266071 - RNA, 19 nt, Artificial Sequence
  Description of Artificial Sequence: Synthetic oligonucleotide
  Antisense strand to SEQ ID NO: 1266070
uuucaaaccagccacucua

SEQ ID NO: 1266072 - RNA, 19 nt, Artificial Sequence
  Description of Artificial Sequence: Synthetic oligonucleotide
  Sense strand starting at position 1256 of SEQ ID NO: 1241354
ccacuaagaccauggaugu

SEQ ID NO: 1266073 - RNA, 19 nt, Artificial Sequence
  Description of Artificial Sequence: Synthetic oligonucleotide
  Antisense strand to SEQ ID NO: 1266072
acauccauggucuuagugg

SEQ ID NO: 1266074 - RNA, 19 nt, Artificial Sequence
  Description of Artificial Sequence: Synthetic oligonucleotide
  Sense strand starting at position 1269 of SEQ ID NO: 1241354
ggaugugcacuuugggaaa

SEQ ID NO: 1266075 - RNA, 19 nt, Artificial Sequence
  Description of Artificial Sequence: Synthetic oligonucleotide
  Antisense strand to SEQ ID NO: 1266074
uuucccaaagugcacaucc

SEQ ID NO: 1266076 - RNA, 19 nt, Artificial Sequence
  Description of Artificial Sequence: Synthetic oligonucleotide
  Sense strand starting at position 2082 of SEQ ID NO: 1241354
ggaauaauuugaugaaaca

SEQ ID NO: 1266077 - RNA, 19 nt, Artificial Sequence
  Description of Artificial Sequence: Synthetic oligonucleotide
  Antisense strand to SEQ ID NO: 1266076
uguuucaucaaauuauucc

SEQ ID NO: 1266078 - RNA, 19 nt, Artificial Sequence
  Description of Artificial Sequence: Synthetic oligonucleotide
  Sense strand starting at position 2219 of SEQ ID NO: 1241354
uguuaaaugccugaaguca

SEQ ID NO: 1266079 - RNA, 19 nt, Artificial Sequence
  Description of Artificial Sequence: Synthetic oligonucleotide
  Antisense strand to SEQ ID NO: 1266078
ugacuucaggcauuuaaca

SEQ ID NO: 1266080 - RNA, 19 nt, Artificial Sequence
  Description of Artificial Sequence: Synthetic oligonucleotide
  Sense strand starting at position 2227 of SEQ ID NO: 1241354
gccugaagucaacauauuc

SEQ ID NO: 1266081 - RNA, 19 nt, Artificial Sequence
  Description of Artificial Sequence: Synthetic oligonucleotide
  Antisense strand to SEQ ID NO: 1266080
gaauauguugacuucaggc

SEQ ID NO: 1266082 - RNA, 19 nt, Artificial Sequence
  Description of Artificial Sequence: Synthetic oligonucleotide
  Sense strand starting at position 2373 of SEQ ID NO: 1241354
aagauuagagacugucuca

SEQ ID NO: 1266083 - RNA, 19 nt, Artificial Sequence
  Description of Artificial Sequence: Synthetic oligonucleotide
  Antisense strand to SEQ ID NO: 1266082
ugagacagucucuaaucuu

SEQ ID NO: 1266084 - RNA, 19 nt, Artificial Sequence
  Description of Artificial Sequence: Synthetic oligonucleotide
  Sense strand starting at position 2376 of SEQ ID NO: 1241354
auuagagacugucucacua

SEQ ID NO: 1266085 - RNA, 19 nt, Artificial Sequence
  Description of Artificial Sequence: Synthetic oligonucleotide
  Antisense strand to SEQ ID NO: 1266084
uagugagacagucucuaau

SEQ ID NO: 1266086 - RNA, 19 nt, Artificial Sequence
  Description of Artificial Sequence: Synthetic oligonucleotide
  Sense strand starting at position 2380 of SEQ ID NO: 1241354
gagacugucucacuagaca

SEQ ID NO: 1266087 - RNA, 19 nt, Artificial Sequence
  Description of Artificial Sequence: Synthetic oligonucleotide
  Antisense strand to SEQ ID NO: 1266086
ugucuagugagacagucuc

SEQ ID NO: 1266088 - RNA, 19 nt, Artificial Sequence
  Description of Artificial Sequence: Synthetic oligonucleotide
  Sense strand starting at position 2426 of SEQ ID NO: 1241354
ucacacuagaguuguggaa

SEQ ID NO: 1266089 - RNA, 19 nt, Artificial Sequence
  Description of Artificial Sequence: Synthetic oligonucleotide
  Antisense strand to SEQ ID NO: 1266088
uuccacaacucuaguguga

SEQ ID NO: 1266090 - RNA, 19 nt, Artificial Sequence
  Description of Artificial Sequence: Synthetic oligonucleotide
  Sense strand starting at position 2458 of SEQ ID NO: 1241354
cauggucucaucgagguau

SEQ ID NO: 1266091 - RNA, 19 nt, Artificial Sequence
  Description of Artificial Sequence: Synthetic oligonucleotide
  Antisense strand to SEQ ID NO: 1266090
auaccucgaugagaccaug

SEQ ID NO: 1266092 - RNA, 19 nt, Artificial Sequence
  Description of Artificial Sequence: Synthetic oligonucleotide
  Sense strand starting at position 2462 of SEQ ID NO: 1241354
gucucaucgagguauugag

SEQ ID NO: 1266093 - RNA, 19 nt, Artificial Sequence
  Description of Artificial Sequence: Synthetic oligonucleotide
  Antisense strand to SEQ ID NO: 1266092
cucaauaccucgaugagac

SEQ ID NO: 1266094 - RNA, 19 nt, Artificial Sequence
  Description of Artificial Sequence: Synthetic oligonucleotide
  Sense strand starting at position 2519 of SEQ ID NO: 1241354
ugacaaugaccauggcaga

SEQ ID NO: 1266095 - RNA, 19 nt, Artificial Sequence
  Description of Artificial Sequence: Synthetic oligonucleotide
  Antisense strand to SEQ ID NO: 1266094
ucugccauggucauuguca

SEQ ID NO: 1266096 - RNA, 19 nt, Artificial Sequence
  Description of Artificial Sequence: Synthetic oligonucleotide
  Sense strand starting at position 2602 of SEQ ID NO: 1241354
auuguagugacccagguuu

SEQ ID NO: 1266097 - RNA, 19 nt, Artificial Sequence
  Description of Artificial Sequence: Synthetic oligonucleotide
  Antisense strand to SEQ ID NO: 1266096
aaaccugggucacuacaau

SEQ ID NO: 1266098 - RNA, 19 nt, Artificial Sequence
  Description of Artificial Sequence: Synthetic oligonucleotide
  Sense strand starting at position 2698 of SEQ ID NO: 1241354
ccuuauacaguaugucaua

SEQ ID NO: 1266099 - RNA, 19 nt, Artificial Sequence
  Description of Artificial Sequence: Synthetic oligonucleotide
  Antisense strand to SEQ ID NO: 1266098
uaugacauacuguauaagg

SEQ ID NO: 1266100 - RNA, 19 nt, Artificial Sequence
  Description of Artificial Sequence: Synthetic oligonucleotide
  Sense strand starting at position 2699 of SEQ ID NO: 1241354
cuuauacaguaugucauau

SEQ ID NO: 1266101 - RNA, 19 nt, Artificial Sequence
  Description of Artificial Sequence: Synthetic oligonucleotide
  Antisense strand to SEQ ID NO: 1266100
auaugacauacuguauaag

SEQ ID NO: 1266102 - RNA, 19 nt, Artificial Sequence
  Description of Artificial Sequence: Synthetic oligonucleotide
  Sense strand starting at position 3354 of SEQ ID NO: 1241354
agcauuaagaagugguuua

SEQ ID NO: 1266103 - RNA, 19 nt, Artificial Sequence
  Description of Artificial Sequence: Synthetic oligonucleotide
  Antisense strand to SEQ ID NO: 1266102
uaaaccacuucuuaaugcu

SEQ ID NO: 1266104 - RNA, 19 nt, Artificial Sequence
  Description of Artificial Sequence: Synthetic oligonucleotide
  Sense strand starting at position 3361 of SEQ ID NO: 1241354
agaagugguuuaucaacac

SEQ ID NO: 1266105 - RNA, 19 nt, Artificial Sequence
  Description of Artificial Sequence: Synthetic oligonucleotide
  Antisense strand to SEQ ID NO: 1266104
guguugauaaaccacuucu

SEQ ID NO: 1266106 - RNA, 19 nt, Artificial Sequence
  Description of Artificial Sequence: Synthetic oligonucleotide
  Sense strand starting at position 3365 of SEQ ID NO: 1241354
gugguuuaucaacaccugu

SEQ ID NO: 1266107 - RNA, 19 nt, Artificial Sequence
  Description of Artificial Sequence: Synthetic oligonucleotide
  Antisense strand to SEQ ID NO: 1266106
acagguguugauaaaccac

SEQ ID NO: 1266108 - RNA, 19 nt, Artificial Sequence
  Description of Artificial Sequence: Synthetic oligonucleotide
  Sense strand starting at position 3447 of SEQ ID NO: 1241354
agacaacugucccuaagac

SEQ ID NO: 1266109 - RNA, 19 nt, Artificial Sequence
  Description of Artificial Sequence: Synthetic oligonucleotide
  Antisense strand to SEQ ID NO: 1266108
gucuuagggacaguugucu

SEQ ID NO: 1266110 - RNA, 19 nt, Artificial Sequence
  Description of Artificial Sequence: Synthetic oligonucleotide
  Sense strand starting at position 3482 of SEQ ID NO: 1241354
gugggaacagcaugucaaa

SEQ ID NO: 1266111 - RNA, 19 nt, Artificial Sequence
  Description of Artificial Sequence: Synthetic oligonucleotide
  Antisense strand to SEQ ID NO: 1266110
uuugacaugcuguucccac

SEQ ID NO: 1266112 - RNA, 19 nt, Artificial Sequence
  Description of Artificial Sequence: Synthetic oligonucleotide
  Sense strand starting at position 3679 of SEQ ID NO: 1241354
cuguaauuccaacaguagu

SEQ ID NO: 1266113 - RNA, 19 nt, Artificial Sequence
  Description of Artificial Sequence: Synthetic oligonucleotide
  Antisense strand to SEQ ID NO: 1266112
acuacuguuggaauuacag

SEQ ID NO: 1266114 - RNA, 19 nt, Artificial Sequence
  Description of Artificial Sequence: Synthetic oligonucleotide
  Sense strand starting at position 3780 of SEQ ID NO: 1241354
cagagaugaggcugaguca

SEQ ID NO: 1266115 - RNA, 19 nt, Artificial Sequence
  Description of Artificial Sequence: Synthetic oligonucleotide
  Antisense strand to SEQ ID NO: 1266114
ugacucagccucaucucug

SEQ ID NO: 1266116 - RNA, 19 nt, Artificial Sequence
  Description of Artificial Sequence: Synthetic oligonucleotide
  Sense strand starting at position 98 of SEQ ID NO: 1241355
cucuuagcccaauaggauu

SEQ ID NO: 1266117 - RNA, 19 nt, Artificial Sequence
  Description of Artificial Sequence: Synthetic oligonucleotide
  Antisense strand to SEQ ID NO: 1266116
aauccuauugggcuaagag

SEQ ID NO: 1266118 - RNA, 19 nt, Artificial Sequence
  Description of Artificial Sequence: Synthetic oligonucleotide
  Sense strand starting at position 116 of SEQ ID NO: 1241355
uuuaacuuuguuugagagu

SEQ ID NO: 1266119 - RNA, 19 nt, Artificial Sequence
  Description of Artificial Sequence: Synthetic oligonucleotide
  Antisense strand to SEQ ID NO: 1266118
acucucaaacaaaguuaaa

SEQ ID NO: 1266120 - RNA, 19 nt, Artificial Sequence
  Description of Artificial Sequence: Synthetic oligonucleotide
  Sense strand starting at position 127 of SEQ ID NO: 1241355
uugagaguguuaucuccac

SEQ ID NO: 1266121 - RNA, 19 nt, Artificial Sequence
  Description of Artificial Sequence: Synthetic oligonucleotide
  Antisense strand to SEQ ID NO: 1266120
guggagauaacacucucaa

SEQ ID NO: 1266122 - RNA, 19 nt, Artificial Sequence
  Description of Artificial Sequence: Synthetic oligonucleotide
  Sense strand starting at position 200 of SEQ ID NO: 1241355
auggauccgucagugauaa

SEQ ID NO: 1266123 - RNA, 19 nt, Artificial Sequence
  Description of Artificial Sequence: Synthetic oligonucleotide
  Antisense strand to SEQ ID NO: 1266122
uuaucacugacggauccau

SEQ ID NO: 1266124 - RNA, 19 nt, Artificial Sequence
  Description of Artificial Sequence: Synthetic oligonucleotide
  Sense strand starting at position 201 of SEQ ID NO: 1241355
uggauccgucagugauaac

SEQ ID NO: 1266125 - RNA, 19 nt, Artificial Sequence
  Description of Artificial Sequence: Synthetic oligonucleotide
  Antisense strand to SEQ ID NO: 1266124
guuaucacugacggaucca

SEQ ID NO: 1266126 - RNA, 19 nt, Artificial Sequence
  Description of Artificial Sequence: Synthetic oligonucleotide
  Sense strand starting at position 318 of SEQ ID NO: 1241355
agggccucuuucuuggaaa

SEQ ID NO: 1266127 - RNA, 19 nt, Artificial Sequence
  Description of Artificial Sequence: Synthetic oligonucleotide
  Antisense strand to SEQ ID NO: 1266126
uuuccaagaaagaggcccu

SEQ ID NO: 1266128 - RNA, 19 nt, Artificial Sequence
  Description of Artificial Sequence: Synthetic oligonucleotide
  Sense strand starting at position 320 of SEQ ID NO: 1241355
ggccucuuucuuggaaacu

SEQ ID NO: 1266129 - RNA, 19 nt, Artificial Sequence
  Description of Artificial Sequence: Synthetic oligonucleotide
  Antisense strand to SEQ ID NO: 1266128
aguuuccaagaaagaggcc

SEQ ID NO: 1266130 - RNA, 19 nt, Artificial Sequence
  Description of Artificial Sequence: Synthetic oligonucleotide
  Sense strand starting at position 369 of SEQ ID NO: 1241355
ggaggaguuugggucacaa

SEQ ID NO: 1266131 - RNA, 19 nt, Artificial Sequence
  Description of Artificial Sequence: Synthetic oligonucleotide
  Antisense strand to SEQ ID NO: 1266130
uugugacccaaacuccucc

SEQ ID NO: 1266132 - RNA, 19 nt, Artificial Sequence
  Description of Artificial Sequence: Synthetic oligonucleotide
  Sense strand starting at position 397 of SEQ ID NO: 1241355
acagauugauucccagcuu

SEQ ID NO: 1266133 - RNA, 19 nt, Artificial Sequence
  Description of Artificial Sequence: Synthetic oligonucleotide
  Antisense strand to SEQ ID NO: 1266132
aagcugggaaucaaucugu

SEQ ID NO: 1266134 - RNA, 19 nt, Artificial Sequence
  Description of Artificial Sequence: Synthetic oligonucleotide
  Sense strand starting at position 559 of SEQ ID NO: 1241355
uaucaaugcuuuguuagag

SEQ ID NO: 1266135 - RNA, 19 nt, Artificial Sequence
  Description of Artificial Sequence: Synthetic oligonucleotide
  Antisense strand to SEQ ID NO: 1266134
cucuaacaaagcauugaua

SEQ ID NO: 1266136 - RNA, 19 nt, Artificial Sequence
  Description of Artificial Sequence: Synthetic oligonucleotide
  Sense strand starting at position 827 of SEQ ID NO: 1241355
uggcuucuuggccaggaaa

SEQ ID NO: 1266137 - RNA, 19 nt, Artificial Sequence
  Description of Artificial Sequence: Synthetic oligonucleotide
  Antisense strand to SEQ ID NO: 1266136
uuuccuggccaagaagcca

SEQ ID NO: 1266138 - RNA, 19 nt, Artificial Sequence
  Description of Artificial Sequence: Synthetic oligonucleotide
  Sense strand starting at position 830 of SEQ ID NO: 1241355
cuucuuggccaggaaagua

SEQ ID NO: 1266139 - RNA, 19 nt, Artificial Sequence
  Description of Artificial Sequence: Synthetic oligonucleotide
  Antisense strand to SEQ ID NO: 1266138
uacuuuccuggccaagaag

SEQ ID NO: 1266140 - RNA, 19 nt, Artificial Sequence
  Description of Artificial Sequence: Synthetic oligonucleotide
  Sense strand starting at position 1246 of SEQ ID NO: 1241355
uuguguguuaaagaaguuu

SEQ ID NO: 1266141 - RNA, 19 nt, Artificial Sequence
  Description of Artificial Sequence: Synthetic oligonucleotide
  Antisense strand to SEQ ID NO: 1266140
aaacuucuuuaacacacaa

SEQ ID NO: 1266142 - RNA, 19 nt, Artificial Sequence
  Description of Artificial Sequence: Synthetic oligonucleotide
  Sense strand starting at position 1252 of SEQ ID NO: 1241355
guuaaagaaguuuguccca

SEQ ID NO: 1266143 - RNA, 19 nt, Artificial Sequence
  Description of Artificial Sequence: Synthetic oligonucleotide
  Antisense strand to SEQ ID NO: 1266142
ugggacaaacuucuuuaac

SEQ ID NO: 1266144 - RNA, 19 nt, Artificial Sequence
  Description of Artificial Sequence: Synthetic oligonucleotide
  Sense strand starting at position 1254 of SEQ ID NO: 1241355
uaaagaaguuugucccagu

SEQ ID NO: 1266145 - RNA, 19 nt, Artificial Sequence
  Description of Artificial Sequence: Synthetic oligonucleotide
  Antisense strand to SEQ ID NO: 1266144
acugggacaaacuucuuua

SEQ ID NO: 1266146 - RNA, 19 nt, Artificial Sequence
  Description of Artificial Sequence: Synthetic oligonucleotide
  Sense strand starting at position 1547 of SEQ ID NO: 1241355
ugaguugguggccauucau

SEQ ID NO: 1266147 - RNA, 19 nt, Artificial Sequence
  Description of Artificial Sequence: Synthetic oligonucleotide
  Antisense strand to SEQ ID NO: 1266146
augaauggccaccaacuca

SEQ ID NO: 1266148 - RNA, 19 nt, Artificial Sequence
  Description of Artificial Sequence: Synthetic oligonucleotide
  Sense strand starting at position 1562 of SEQ ID NO: 1241355
ucauaaauguguccuacuc

SEQ ID NO: 1266149 - RNA, 19 nt, Artificial Sequence
  Description of Artificial Sequence: Synthetic oligonucleotide
  Antisense strand to SEQ ID NO: 1266148
gaguaggacacauuuauga

SEQ ID NO: 1266150 - RNA, 19 nt, Artificial Sequence
  Description of Artificial Sequence: Synthetic oligonucleotide
  Sense strand starting at position 1571 of SEQ ID NO: 1241355
uguccuacucacuguaaau

SEQ ID NO: 1266151 - RNA, 19 nt, Artificial Sequence
  Description of Artificial Sequence: Synthetic oligonucleotide
  Antisense strand to SEQ ID NO: 1266150
auuuacagugaguaggaca

SEQ ID NO: 1266152 - RNA, 19 nt, Artificial Sequence
  Description of Artificial Sequence: Synthetic oligonucleotide
  Sense strand starting at position 1652 of SEQ ID NO: 1241355
auggaaagcauaggaguua

SEQ ID NO: 1266153 - RNA, 19 nt, Artificial Sequence
  Description of Artificial Sequence: Synthetic oligonucleotide
  Antisense strand to SEQ ID NO: 1266152
uaacuccuaugcuuuccau

SEQ ID NO: 1266154 - RNA, 19 nt, Artificial Sequence
  Description of Artificial Sequence: Synthetic oligonucleotide
  Sense strand starting at position 2004 of SEQ ID NO: 1241355
agucacaaugaaugguaga

SEQ ID NO: 1266155 - RNA, 19 nt, Artificial Sequence
  Description of Artificial Sequence: Synthetic oligonucleotide
  Antisense strand to SEQ ID NO: 1266154
ucuaccauucauugugacu

SEQ ID NO: 1266156 - RNA, 19 nt, Artificial Sequence
  Description of Artificial Sequence: Synthetic oligonucleotide
  Sense strand starting at position 2005 of SEQ ID NO: 1241355
gucacaaugaaugguagaa

SEQ ID NO: 1266157 - RNA, 19 nt, Artificial Sequence
  Description of Artificial Sequence: Synthetic oligonucleotide
  Antisense strand to SEQ ID NO: 1266156
uucuaccauucauugugac

SEQ ID NO: 1266158 - RNA, 19 nt, Artificial Sequence
  Description of Artificial Sequence: Synthetic oligonucleotide
  Sense strand starting at position 2033 of SEQ ID NO: 1241355
ggguaaaugucucuaccuu

SEQ ID NO: 1266159 - RNA, 19 nt, Artificial Sequence
  Description of Artificial Sequence: Synthetic oligonucleotide
  Antisense strand to SEQ ID NO: 1266158
aagguagagacauuuaccc

SEQ ID NO: 1266160 - RNA, 19 nt, Artificial Sequence
  Description of Artificial Sequence: Synthetic oligonucleotide
  Sense strand starting at position 2034 of SEQ ID NO: 1241355
gguaaaugucucuaccuuc

SEQ ID NO: 1266161 - RNA, 19 nt, Artificial Sequence
  Description of Artificial Sequence: Synthetic oligonucleotide
  Antisense strand to SEQ ID NO: 1266160
gaagguagagacauuuacc

SEQ ID NO: 1266162 - RNA, 19 nt, Artificial Sequence
  Description of Artificial Sequence: Synthetic oligonucleotide
  Sense strand starting at position 2240 of SEQ ID NO: 1241355
gaaaguuaccuuggugggu

SEQ ID NO: 1266163 - RNA, 19 nt, Artificial Sequence
  Description of Artificial Sequence: Synthetic oligonucleotide
  Antisense strand to SEQ ID NO: 1266162
acccaccaagguaacuuuc

SEQ ID NO: 1266164 - RNA, 19 nt, Artificial Sequence
  Description of Artificial Sequence: Synthetic oligonucleotide
  Sense strand starting at position 2273 of SEQ ID NO: 1241355
gaaauagucagagguaguu

SEQ ID NO: 1266165 - RNA, 19 nt, Artificial Sequence
  Description of Artificial Sequence: Synthetic oligonucleotide
  Antisense strand to SEQ ID NO: 1266164
aacuaccucugacuauuuc

SEQ ID NO: 1266166 - RNA, 19 nt, Artificial Sequence
  Description of Artificial Sequence: Synthetic oligonucleotide
  Sense strand starting at position 2309 of SEQ ID NO: 1241355
gaacaaaugcauuguggca

SEQ ID NO: 1266167 - RNA, 19 nt, Artificial Sequence
  Description of Artificial Sequence: Synthetic oligonucleotide
  Antisense strand to SEQ ID NO: 1266166
ugccacaaugcauuuguuc

SEQ ID NO: 1266168 - RNA, 19 nt, Artificial Sequence
  Description of Artificial Sequence: Synthetic oligonucleotide
  Sense strand starting at position 2316 of SEQ ID NO: 1241355
ugcauuguggcagauggau

SEQ ID NO: 1266169 - RNA, 19 nt, Artificial Sequence
  Description of Artificial Sequence: Synthetic oligonucleotide
  Antisense strand to SEQ ID NO: 1266168
auccaucugccacaaugca

SEQ ID NO: 1266170 - RNA, 19 nt, Artificial Sequence
  Description of Artificial Sequence: Synthetic oligonucleotide
  Sense strand starting at position 2455 of SEQ ID NO: 1241355
cgauaauucuugcuggaaa

SEQ ID NO: 1266171 - RNA, 19 nt, Artificial Sequence
  Description of Artificial Sequence: Synthetic oligonucleotide
  Antisense strand to SEQ ID NO: 1266170
uuuccagcaagaauuaucg

SEQ ID NO: 1266172 - RNA, 19 nt, Artificial Sequence
  Description of Artificial Sequence: Synthetic oligonucleotide
  Sense strand starting at position 2607 of SEQ ID NO: 1241355
guuccaagugauuaucuuc

SEQ ID NO: 1266173 - RNA, 19 nt, Artificial Sequence
  Description of Artificial Sequence: Synthetic oligonucleotide
  Antisense strand to SEQ ID NO: 1266172
gaagauaaucacuuggaac

SEQ ID NO: 1266174 - RNA, 19 nt, Artificial Sequence
  Description of Artificial Sequence: Synthetic oligonucleotide
  Sense strand starting at position 2617 of SEQ ID NO: 1241355
auuaucuuccagcauggga

SEQ ID NO: 1266175 - RNA, 19 nt, Artificial Sequence
  Description of Artificial Sequence: Synthetic oligonucleotide
  Antisense strand to SEQ ID NO: 1266174
ucccaugcuggaagauaau

SEQ ID NO: 1266176 - RNA, 19 nt, Artificial Sequence
  Description of Artificial Sequence: Synthetic oligonucleotide
  Sense strand starting at position 2764 of SEQ ID NO: 1241355
ugcauuuguucugucugua

SEQ ID NO: 1266177 - RNA, 19 nt, Artificial Sequence
  Description of Artificial Sequence: Synthetic oligonucleotide
  Antisense strand to SEQ ID NO: 1266176
uacagacagaacaaaugca

SEQ ID NO: 1266178 - RNA, 19 nt, Artificial Sequence
  Description of Artificial Sequence: Synthetic oligonucleotide
  Sense strand starting at position 2795 of SEQ ID NO: 1241355
gcugcucugauagagaagu

SEQ ID NO: 1266179 - RNA, 19 nt, Artificial Sequence
  Description of Artificial Sequence: Synthetic oligonucleotide
  Antisense strand to SEQ ID NO: 1266178
acuucucuaucagagcagc

SEQ ID NO: 1266180 - RNA, 19 nt, Artificial Sequence
  Description of Artificial Sequence: Synthetic oligonucleotide
  Sense strand starting at position 2901 of SEQ ID NO: 1241355
acagcauaugaguggauua

SEQ ID NO: 1266181 - RNA, 19 nt, Artificial Sequence
  Description of Artificial Sequence: Synthetic oligonucleotide
  Antisense strand to SEQ ID NO: 1266180
uaauccacucauaugcugu

SEQ ID NO: 1266182 - RNA, 19 nt, Artificial Sequence
  Description of Artificial Sequence: Synthetic oligonucleotide
  Sense strand starting at position 2967 of SEQ ID NO: 1241355
ugaagcagacaucaucuuu

SEQ ID NO: 1266183 - RNA, 19 nt, Artificial Sequence
  Description of Artificial Sequence: Synthetic oligonucleotide
  Antisense strand to SEQ ID NO: 1266182
aaagaugaugucugcuuca

SEQ ID NO: 1266184 - RNA, 19 nt, Artificial Sequence
  Description of Artificial Sequence: Synthetic oligonucleotide
  Sense strand starting at position 2979 of SEQ ID NO: 1241355
caucuuugcccuuaggagu

SEQ ID NO: 1266185 - RNA, 19 nt, Artificial Sequence
  Description of Artificial Sequence: Synthetic oligonucleotide
  Antisense strand to SEQ ID NO: 1266184
acuccuaagggcaaagaug

SEQ ID NO: 1266186 - RNA, 19 nt, Artificial Sequence
  Description of Artificial Sequence: Synthetic oligonucleotide
  Sense strand starting at position 3197 of SEQ ID NO: 1241355
cucucuagagcagaauuau

SEQ ID NO: 1266187 - RNA, 19 nt, Artificial Sequence
  Description of Artificial Sequence: Synthetic oligonucleotide
  Antisense strand to SEQ ID NO: 1266186
auaauucugcucuagagag

SEQ ID NO: 1266188 - RNA, 19 nt, Artificial Sequence
  Description of Artificial Sequence: Synthetic oligonucleotide
  Sense strand starting at position 3268 of SEQ ID NO: 1241355
gcgcuucagccugugagua

SEQ ID NO: 1266189 - RNA, 19 nt, Artificial Sequence
  Description of Artificial Sequence: Synthetic oligonucleotide
  Antisense strand to SEQ ID NO: 1266188
uacucacaggcugaagcgc

SEQ ID NO: 1266190 - RNA, 19 nt, Artificial Sequence
  Description of Artificial Sequence: Synthetic oligonucleotide
  Sense strand starting at position 3517 of SEQ ID NO: 1241355
cuuuauaaugcagagaugu

SEQ ID NO: 1266191 - RNA, 19 nt, Artificial Sequence
  Description of Artificial Sequence: Synthetic oligonucleotide
  Antisense strand to SEQ ID NO: 1266190
acaucucugcauuauaaag

SEQ ID NO: 1266192 - RNA, 19 nt, Artificial Sequence
  Description of Artificial Sequence: Synthetic oligonucleotide
  Sense strand starting at position 3965 of SEQ ID NO: 1241355
auauguuaucucuagaccu

SEQ ID NO: 1266193 - RNA, 19 nt, Artificial Sequence
  Description of Artificial Sequence: Synthetic oligonucleotide
  Antisense strand to SEQ ID NO: 1266192
aggucuagagauaacauau

SEQ ID NO: 1266194 - RNA, 19 nt, Artificial Sequence
  Description of Artificial Sequence: Synthetic oligonucleotide
  Sense strand starting at position 3967 of SEQ ID NO: 1241355
auguuaucucuagaccuua

SEQ ID NO: 1266195 - RNA, 19 nt, Artificial Sequence
  Description of Artificial Sequence: Synthetic oligonucleotide
  Antisense strand to SEQ ID NO: 1266194
uaaggucuagagauaacau

SEQ ID NO: 1266196 - RNA, 19 nt, Artificial Sequence
  Description of Artificial Sequence: Synthetic oligonucleotide
  Sense strand starting at position 320 of SEQ ID NO: 1241356
cugagucucguccaggcaa

SEQ ID NO: 1266197 - RNA, 19 nt, Artificial Sequence
  Description of Artificial Sequence: Synthetic oligonucleotide
  Antisense strand to SEQ ID NO: 1266196
uugccuggacgagacucag

SEQ ID NO: 1266198 - RNA, 19 nt, Artificial Sequence
  Description of Artificial Sequence: Synthetic oligonucleotide
  Sense strand starting at position 560 of SEQ ID NO: 1241356
ccaggacuuugcuuccgaa

SEQ ID NO: 1266199 - RNA, 19 nt, Artificial Sequence
  Description of Artificial Sequence: Synthetic oligonucleotide
  Antisense strand to SEQ ID NO: 1266198
uucggaagcaaaguccugg

SEQ ID NO: 1266200 - RNA, 19 nt, Artificial Sequence
  Description of Artificial Sequence: Synthetic oligonucleotide
  Sense strand starting at position 665 of SEQ ID NO: 1241356
cgguucucagcgguuguaa

SEQ ID NO: 1266201 - RNA, 19 nt, Artificial Sequence
  Description of Artificial Sequence: Synthetic oligonucleotide
  Antisense strand to SEQ ID NO: 1266200
uuacaaccgcugagaaccg

SEQ ID NO: 1266202 - RNA, 19 nt, Artificial Sequence
  Description of Artificial Sequence: Synthetic oligonucleotide
  Sense strand starting at position 2088 of SEQ ID NO: 1241356
guauucgugggaugugaga

SEQ ID NO: 1266203 - RNA, 19 nt, Artificial Sequence
  Description of Artificial Sequence: Synthetic oligonucleotide
  Antisense strand to SEQ ID NO: 1266202
ucucacaucccacgaauac

SEQ ID NO: 1266204 - RNA, 19 nt, Artificial Sequence
  Description of Artificial Sequence: Synthetic oligonucleotide
  Sense strand starting at position 2090 of SEQ ID NO: 1241356
auucgugggaugugagauu

SEQ ID NO: 1266205 - RNA, 19 nt, Artificial Sequence
  Description of Artificial Sequence: Synthetic oligonucleotide
  Antisense strand to SEQ ID NO: 1266204
aaucucacaucccacgaau

SEQ ID NO: 1266206 - RNA, 19 nt, Artificial Sequence
  Description of Artificial Sequence: Synthetic oligonucleotide
  Sense strand starting at position 2101 of SEQ ID NO: 1241356
gugagauuaccaugaaagu

SEQ ID NO: 1266207 - RNA, 19 nt, Artificial Sequence
  Description of Artificial Sequence: Synthetic oligonucleotide
  Antisense strand to SEQ ID NO: 1266206
acuuucaugguaaucucac

SEQ ID NO: 1266208 - RNA, 19 nt, Artificial Sequence
  Description of Artificial Sequence: Synthetic oligonucleotide
  Sense strand starting at position 2155 of SEQ ID NO: 1241356
ugaaacguguuauuaauca

SEQ ID NO: 1266209 - RNA, 19 nt, Artificial Sequence
  Description of Artificial Sequence: Synthetic oligonucleotide
  Antisense strand to SEQ ID NO: 1266208
ugauuaauaacacguuuca

SEQ ID NO: 1266210 - RNA, 19 nt, Artificial Sequence
  Description of Artificial Sequence: Synthetic oligonucleotide
  Sense strand starting at position 2160 of SEQ ID NO: 1241356
cguguuauuaaucaccugu

SEQ ID NO: 1266211 - RNA, 19 nt, Artificial Sequence
  Description of Artificial Sequence: Synthetic oligonucleotide
  Antisense strand to SEQ ID NO: 1266210
acaggugauuaauaacacg

SEQ ID NO: 1266212 - RNA, 19 nt, Artificial Sequence
  Description of Artificial Sequence: Synthetic oligonucleotide
  Sense strand starting at position 2166 of SEQ ID NO: 1241356
auuaaucaccuguggcuau

SEQ ID NO: 1266213 - RNA, 19 nt, Artificial Sequence
  Description of Artificial Sequence: Synthetic oligonucleotide
  Antisense strand to SEQ ID NO: 1266212
auagccacaggugauuaau

SEQ ID NO: 1266214 - RNA, 19 nt, Artificial Sequence
  Description of Artificial Sequence: Synthetic oligonucleotide
  Sense strand starting at position 2196 of SEQ ID NO: 1241356
uucuuacuaucguucugga

SEQ ID NO: 1266215 - RNA, 19 nt, Artificial Sequence
  Description of Artificial Sequence: Synthetic oligonucleotide
  Antisense strand to SEQ ID NO: 1266214
uccagaacgauaguaagaa

SEQ ID NO: 1266216 - RNA, 19 nt, Artificial Sequence
  Description of Artificial Sequence: Synthetic oligonucleotide
  Sense strand starting at position 2289 of SEQ ID NO: 1241356
ucuucuuagcuguaguaac

SEQ ID NO: 1266217 - RNA, 19 nt, Artificial Sequence
  Description of Artificial Sequence: Synthetic oligonucleotide
  Antisense strand to SEQ ID NO: 1266216
guuacuacagcuaagaaga

SEQ ID NO: 1266218 - RNA, 19 nt, Artificial Sequence
  Description of Artificial Sequence: Synthetic oligonucleotide
  Sense strand starting at position 2299 of SEQ ID NO: 1241356
uguaguaaccuggaggcau

SEQ ID NO: 1266219 - RNA, 19 nt, Artificial Sequence
  Description of Artificial Sequence: Synthetic oligonucleotide
  Antisense strand to SEQ ID NO: 1266218
augccuccagguuacuaca

SEQ ID NO: 1266220 - RNA, 19 nt, Artificial Sequence
  Description of Artificial Sequence: Synthetic oligonucleotide
  Sense strand starting at position 2342 of SEQ ID NO: 1241356
agauguauaucaguguuua

SEQ ID NO: 1266221 - RNA, 19 nt, Artificial Sequence
  Description of Artificial Sequence: Synthetic oligonucleotide
  Antisense strand to SEQ ID NO: 1266220
uaaacacugauauacaucu

SEQ ID NO: 1266222 - RNA, 19 nt, Artificial Sequence
  Description of Artificial Sequence: Synthetic oligonucleotide
  Sense strand starting at position 2343 of SEQ ID NO: 1241356
gauguauaucaguguuuau

SEQ ID NO: 1266223 - RNA, 19 nt, Artificial Sequence
  Description of Artificial Sequence: Synthetic oligonucleotide
  Antisense strand to SEQ ID NO: 1266222
auaaacacugauauacauc

SEQ ID NO: 1266224 - RNA, 19 nt, Artificial Sequence
  Description of Artificial Sequence: Synthetic oligonucleotide
  Sense strand starting at position 2346 of SEQ ID NO: 1241356
guauaucaguguuuauaca

SEQ ID NO: 1266225 - RNA, 19 nt, Artificial Sequence
  Description of Artificial Sequence: Synthetic oligonucleotide
  Antisense strand to SEQ ID NO: 1266224
uguauaaacacugauauac

SEQ ID NO: 1266226 - RNA, 19 nt, Artificial Sequence
  Description of Artificial Sequence: Synthetic oligonucleotide
  Sense strand starting at position 2614 of SEQ ID NO: 1241356
gauagucucgaucaagauc

SEQ ID NO: 1266227 - RNA, 19 nt, Artificial Sequence
  Description of Artificial Sequence: Synthetic oligonucleotide
  Antisense strand to SEQ ID NO: 1266226
gaucuugaucgagacuauc

SEQ ID NO: 1266228 - RNA, 19 nt, Artificial Sequence
  Description of Artificial Sequence: Synthetic oligonucleotide
  Sense strand starting at position 2719 of SEQ ID NO: 1241356
uauuguuccguuggaacau

SEQ ID NO: 1266229 - RNA, 19 nt, Artificial Sequence
  Description of Artificial Sequence: Synthetic oligonucleotide
  Antisense strand to SEQ ID NO: 1266228
auguuccaacggaacaaua

SEQ ID NO: 1266230 - RNA, 19 nt, Artificial Sequence
  Description of Artificial Sequence: Synthetic oligonucleotide
  Sense strand starting at position 2725 of SEQ ID NO: 1241356
uccguuggaacaugaaauu

SEQ ID NO: 1266231 - RNA, 19 nt, Artificial Sequence
  Description of Artificial Sequence: Synthetic oligonucleotide
  Antisense strand to SEQ ID NO: 1266230
aauuucauguuccaacgga

SEQ ID NO: 1266232 - RNA, 19 nt, Artificial Sequence
  Description of Artificial Sequence: Synthetic oligonucleotide
  Sense strand starting at position 2814 of SEQ ID NO: 1241356
auggaauugaaguggguaa

SEQ ID NO: 1266233 - RNA, 19 nt, Artificial Sequence
  Description of Artificial Sequence: Synthetic oligonucleotide
  Antisense strand to SEQ ID NO: 1266232
uuacccacuucaauuccau

SEQ ID NO: 1266234 - RNA, 19 nt, Artificial Sequence
  Description of Artificial Sequence: Synthetic oligonucleotide
  Sense strand starting at position 2815 of SEQ ID NO: 1241356
uggaauugaaguggguaaa

SEQ ID NO: 1266235 - RNA, 19 nt, Artificial Sequence
  Description of Artificial Sequence: Synthetic oligonucleotide
  Antisense strand to SEQ ID NO: 1266234
uuuacccacuucaauucca

SEQ ID NO: 1266236 - RNA, 19 nt, Artificial Sequence
  Description of Artificial Sequence: Synthetic oligonucleotide
  Sense strand starting at position 2874 of SEQ ID NO: 1241356
auguguauugcugguauuu

SEQ ID NO: 1266237 - RNA, 19 nt, Artificial Sequence
  Description of Artificial Sequence: Synthetic oligonucleotide
  Antisense strand to SEQ ID NO: 1266236
aaauaccagcaauacacau

SEQ ID NO: 1266238 - RNA, 19 nt, Artificial Sequence
  Description of Artificial Sequence: Synthetic oligonucleotide
  Sense strand starting at position 2936 of SEQ ID NO: 1241356
cuaucauugucaccuuaga

SEQ ID NO: 1266239 - RNA, 19 nt, Artificial Sequence
  Description of Artificial Sequence: Synthetic oligonucleotide
  Antisense strand to SEQ ID NO: 1266238
ucuaaggugacaaugauag

SEQ ID NO: 1266240 - RNA, 19 nt, Artificial Sequence
  Description of Artificial Sequence: Synthetic oligonucleotide
  Sense strand starting at position 2971 of SEQ ID NO: 1241356
guuguuaacuaguuugaaa

SEQ ID NO: 1266241 - RNA, 19 nt, Artificial Sequence
  Description of Artificial Sequence: Synthetic oligonucleotide
  Antisense strand to SEQ ID NO: 1266240
uuucaaacuaguuaacaac

SEQ ID NO: 1266242 - RNA, 19 nt, Artificial Sequence
  Description of Artificial Sequence: Synthetic oligonucleotide
  Sense strand starting at position 2973 of SEQ ID NO: 1241356
uguuaacuaguuugaaaug

SEQ ID NO: 1266243 - RNA, 19 nt, Artificial Sequence
  Description of Artificial Sequence: Synthetic oligonucleotide
  Antisense strand to SEQ ID NO: 1266242
cauuucaaacuaguuaaca

SEQ ID NO: 1266244 - RNA, 19 nt, Artificial Sequence
  Description of Artificial Sequence: Synthetic oligonucleotide
  Sense strand starting at position 3054 of SEQ ID NO: 1241356
agagcaaauaguugguuau

SEQ ID NO: 1266245 - RNA, 19 nt, Artificial Sequence
  Description of Artificial Sequence: Synthetic oligonucleotide
  Antisense strand to SEQ ID NO: 1266244
auaaccaacuauuugcucu

SEQ ID NO: 1266246 - RNA, 19 nt, Artificial Sequence
  Description of Artificial Sequence: Synthetic oligonucleotide
  Sense strand starting at position 3055 of SEQ ID NO: 1241356
gagcaaauaguugguuaua

SEQ ID NO: 1266247 - RNA, 19 nt, Artificial Sequence
  Description of Artificial Sequence: Synthetic oligonucleotide
  Antisense strand to SEQ ID NO: 1266246
uauaaccaacuauuugcuc

SEQ ID NO: 1266248 - RNA, 19 nt, Artificial Sequence
  Description of Artificial Sequence: Synthetic oligonucleotide
  Sense strand starting at position 3056 of SEQ ID NO: 1241356
agcaaauaguugguuauau

SEQ ID NO: 1266249 - RNA, 19 nt, Artificial Sequence
  Description of Artificial Sequence: Synthetic oligonucleotide
  Antisense strand to SEQ ID NO: 1266248
auauaaccaacuauuugcu

SEQ ID NO: 1266250 - RNA, 19 nt, Artificial Sequence
  Description of Artificial Sequence: Synthetic oligonucleotide
  Sense strand starting at position 3057 of SEQ ID NO: 1241356
gcaaauaguugguuauauu

SEQ ID NO: 1266251 - RNA, 19 nt, Artificial Sequence
  Description of Artificial Sequence: Synthetic oligonucleotide
  Antisense strand to SEQ ID NO: 1266250
aauauaaccaacuauuugc

SEQ ID NO: 1266252 - RNA, 19 nt, Artificial Sequence
  Description of Artificial Sequence: Synthetic oligonucleotide
  Sense strand starting at position 3058 of SEQ ID NO: 1241356
caaauaguugguuauauug

SEQ ID NO: 1266253 - RNA, 19 nt, Artificial Sequence
  Description of Artificial Sequence: Synthetic oligonucleotide
  Antisense strand to SEQ ID NO: 1266252
caauauaaccaacuauuug

SEQ ID NO: 1266254 - RNA, 19 nt, Artificial Sequence
  Description of Artificial Sequence: Synthetic oligonucleotide
  Sense strand starting at position 3068 of SEQ ID NO: 1241356
guuauauuguuaucuuccu

SEQ ID NO: 1266255 - RNA, 19 nt, Artificial Sequence
  Description of Artificial Sequence: Synthetic oligonucleotide
  Antisense strand to SEQ ID NO: 1266254
aggaagauaacaauauaac

SEQ ID NO: 1266256 - RNA, 19 nt, Artificial Sequence
  Description of Artificial Sequence: Synthetic oligonucleotide
  Sense strand starting at position 3159 of SEQ ID NO: 1241356
cuaucuuagacguaagguc

SEQ ID NO: 1266257 - RNA, 19 nt, Artificial Sequence
  Description of Artificial Sequence: Synthetic oligonucleotide
  Antisense strand to SEQ ID NO: 1266256
gaccuuacgucuaagauag

SEQ ID NO: 1266258 - RNA, 19 nt, Artificial Sequence
  Description of Artificial Sequence: Synthetic oligonucleotide
  Sense strand starting at position 3166 of SEQ ID NO: 1241356
agacguaaggucuaaaccu

SEQ ID NO: 1266259 - RNA, 19 nt, Artificial Sequence
  Description of Artificial Sequence: Synthetic oligonucleotide
  Antisense strand to SEQ ID NO: 1266258
agguuuagaccuuacgucu

SEQ ID NO: 1266260 - RNA, 19 nt, Artificial Sequence
  Description of Artificial Sequence: Synthetic oligonucleotide
  Sense strand starting at position 3238 of SEQ ID NO: 1241356
uaaauaagaugguagacua

SEQ ID NO: 1266261 - RNA, 19 nt, Artificial Sequence
  Description of Artificial Sequence: Synthetic oligonucleotide
  Antisense strand to SEQ ID NO: 1266260
uagucuaccaucuuauuua

SEQ ID NO: 1266262 - RNA, 19 nt, Artificial Sequence
  Description of Artificial Sequence: Synthetic oligonucleotide
  Sense strand starting at position 3438 of SEQ ID NO: 1241356
aaggguggauaugaauuaa

SEQ ID NO: 1266263 - RNA, 19 nt, Artificial Sequence
  Description of Artificial Sequence: Synthetic oligonucleotide
  Antisense strand to SEQ ID NO: 1266262
uuaauucauauccacccuu

SEQ ID NO: 1266264 - RNA, 19 nt, Artificial Sequence
  Description of Artificial Sequence: Synthetic oligonucleotide
  Sense strand starting at position 3554 of SEQ ID NO: 1241356
ucgggaugaagcuguucua

SEQ ID NO: 1266265 - RNA, 19 nt, Artificial Sequence
  Description of Artificial Sequence: Synthetic oligonucleotide
  Antisense strand to SEQ ID NO: 1266264
uagaacagcuucaucccga

SEQ ID NO: 1266266 - RNA, 19 nt, Artificial Sequence
  Description of Artificial Sequence: Synthetic oligonucleotide
  Sense strand starting at position 3557 of SEQ ID NO: 1241356
ggaugaagcuguucuagaa

SEQ ID NO: 1266267 - RNA, 19 nt, Artificial Sequence
  Description of Artificial Sequence: Synthetic oligonucleotide
  Antisense strand to SEQ ID NO: 1266266
uucuagaacagcuucaucc

SEQ ID NO: 1266268 - RNA, 19 nt, Artificial Sequence
  Description of Artificial Sequence: Synthetic oligonucleotide
  Sense strand starting at position 3803 of SEQ ID NO: 1241356
aaaguauauggagguuuau

SEQ ID NO: 1266269 - RNA, 19 nt, Artificial Sequence
  Description of Artificial Sequence: Synthetic oligonucleotide
  Antisense strand to SEQ ID NO: 1266268
auaaaccuccauauacuuu

SEQ ID NO: 1266270 - RNA, 19 nt, Artificial Sequence
  Description of Artificial Sequence: Synthetic oligonucleotide
  Sense strand starting at position 3980 of SEQ ID NO: 1241356
ugacuuuacugucuagagu

SEQ ID NO: 1266271 - RNA, 19 nt, Artificial Sequence
  Description of Artificial Sequence: Synthetic oligonucleotide
  Antisense strand to SEQ ID NO: 1266270
acucuagacaguaaaguca

SEQ ID NO: 1266272 - RNA, 19 nt, Artificial Sequence
  Description of Artificial Sequence: Synthetic oligonucleotide
  Sense strand starting at position 3981 of SEQ ID NO: 1241356
gacuuuacugucuagagug

SEQ ID NO: 1266273 - RNA, 19 nt, Artificial Sequence
  Description of Artificial Sequence: Synthetic oligonucleotide
  Antisense strand to SEQ ID NO: 1266272
cacucuagacaguaaaguc

SEQ ID NO: 1266274 - RNA, 19 nt, Artificial Sequence
  Description of Artificial Sequence: Synthetic oligonucleotide
  Sense strand starting at position 3983 of SEQ ID NO: 1241356
cuuuacugucuagagugaa

SEQ ID NO: 1266275 - RNA, 19 nt, Artificial Sequence
  Description of Artificial Sequence: Synthetic oligonucleotide
  Antisense strand to SEQ ID NO: 1266274
uucacucuagacaguaaag

SEQ ID NO: 1266276 - RNA, 19 nt, Artificial Sequence
  Description of Artificial Sequence: Synthetic oligonucleotide
  Sense strand starting at position 130 of SEQ ID NO: 1241357
uuuguaacuuaugauggaa

SEQ ID NO: 1266277 - RNA, 19 nt, Artificial Sequence
  Description of Artificial Sequence: Synthetic oligonucleotide
  Antisense strand to SEQ ID NO: 1266276
uuccaucauaaguuacaaa

SEQ ID NO: 1266278 - RNA, 19 nt, Artificial Sequence
  Description of Artificial Sequence: Synthetic oligonucleotide
  Sense strand starting at position 133 of SEQ ID NO: 1241357
guaacuuaugauggaacuu

SEQ ID NO: 1266279 - RNA, 19 nt, Artificial Sequence
  Description of Artificial Sequence: Synthetic oligonucleotide
  Antisense strand to SEQ ID NO: 1266278
aaguuccaucauaaguuac

SEQ ID NO: 1266280 - RNA, 19 nt, Artificial Sequence
  Description of Artificial Sequence: Synthetic oligonucleotide
  Sense strand starting at position 205 of SEQ ID NO: 1241357
ggagcaguuccucauucca

SEQ ID NO: 1266281 - RNA, 19 nt, Artificial Sequence
  Description of Artificial Sequence: Synthetic oligonucleotide
  Antisense strand to SEQ ID NO: 1266280
uggaaugaggaacugcucc

SEQ ID NO: 1266282 - RNA, 19 nt, Artificial Sequence
  Description of Artificial Sequence: Synthetic oligonucleotide
  Sense strand starting at position 258 of SEQ ID NO: 1241357
aggucugucuuguggacua

SEQ ID NO: 1266283 - RNA, 19 nt, Artificial Sequence
  Description of Artificial Sequence: Synthetic oligonucleotide
  Antisense strand to SEQ ID NO: 1266282
uaguccacaagacagaccu

SEQ ID NO: 1266284 - RNA, 19 nt, Artificial Sequence
  Description of Artificial Sequence: Synthetic oligonucleotide
  Sense strand starting at position 594 of SEQ ID NO: 1241357
gccuguaauuucuaagcug

SEQ ID NO: 1266285 - RNA, 19 nt, Artificial Sequence
  Description of Artificial Sequence: Synthetic oligonucleotide
  Antisense strand to SEQ ID NO: 1266284
cagcuuagaaauuacaggc

SEQ ID NO: 1266286 - RNA, 19 nt, Artificial Sequence
  Description of Artificial Sequence: Synthetic oligonucleotide
  Sense strand starting at position 597 of SEQ ID NO: 1241357
uguaauuucuaagcuguuu

SEQ ID NO: 1266287 - RNA, 19 nt, Artificial Sequence
  Description of Artificial Sequence: Synthetic oligonucleotide
  Antisense strand to SEQ ID NO: 1266286
aaacagcuuagaaauuaca

SEQ ID NO: 1266288 - RNA, 19 nt, Artificial Sequence
  Description of Artificial Sequence: Synthetic oligonucleotide
  Sense strand starting at position 695 of SEQ ID NO: 1241357
ucugccgucacguuugaga

SEQ ID NO: 1266289 - RNA, 19 nt, Artificial Sequence
  Description of Artificial Sequence: Synthetic oligonucleotide
  Antisense strand to SEQ ID NO: 1266288
ucucaaacgugacggcaga

SEQ ID NO: 1266290 - RNA, 19 nt, Artificial Sequence
  Description of Artificial Sequence: Synthetic oligonucleotide
  Sense strand starting at position 697 of SEQ ID NO: 1241357
ugccgucacguuugagaca

SEQ ID NO: 1266291 - RNA, 19 nt, Artificial Sequence
  Description of Artificial Sequence: Synthetic oligonucleotide
  Antisense strand to SEQ ID NO: 1266290
ugucucaaacgugacggca

SEQ ID NO: 1266292 - RNA, 19 nt, Artificial Sequence
  Description of Artificial Sequence: Synthetic oligonucleotide
  Sense strand starting at position 698 of SEQ ID NO: 1241357
gccgucacguuugagacaa

SEQ ID NO: 1266293 - RNA, 19 nt, Artificial Sequence
  Description of Artificial Sequence: Synthetic oligonucleotide
  Antisense strand to SEQ ID NO: 1266292
uugucucaaacgugacggc

SEQ ID NO: 1266294 - RNA, 19 nt, Artificial Sequence
  Description of Artificial Sequence: Synthetic oligonucleotide
  Sense strand starting at position 804 of SEQ ID NO: 1241357
uucccaauuugauaguguu

SEQ ID NO: 1266295 - RNA, 19 nt, Artificial Sequence
  Description of Artificial Sequence: Synthetic oligonucleotide
  Antisense strand to SEQ ID NO: 1266294
aacacuaucaaauugggaa

SEQ ID NO: 1266296 - RNA, 19 nt, Artificial Sequence
  Description of Artificial Sequence: Synthetic oligonucleotide
  Sense strand starting at position 816 of SEQ ID NO: 1241357
uaguguugcccaggcuaga

SEQ ID NO: 1266297 - RNA, 19 nt, Artificial Sequence
  Description of Artificial Sequence: Synthetic oligonucleotide
  Antisense strand to SEQ ID NO: 1266296
ucuagccugggcaacacua

SEQ ID NO: 1266298 - RNA, 19 nt, Artificial Sequence
  Description of Artificial Sequence: Synthetic oligonucleotide
  Sense strand starting at position 1131 of SEQ ID NO: 1241357
ggccaaucuccugaaauau

SEQ ID NO: 1266299 - RNA, 19 nt, Artificial Sequence
  Description of Artificial Sequence: Synthetic oligonucleotide
  Antisense strand to SEQ ID NO: 1266298
auauuucaggagauuggcc

SEQ ID NO: 1266300 - RNA, 19 nt, Artificial Sequence
  Description of Artificial Sequence: Synthetic oligonucleotide
  Sense strand starting at position 1219 of SEQ ID NO: 1241357
acgucaugcacuugacaga

SEQ ID NO: 1266301 - RNA, 19 nt, Artificial Sequence
  Description of Artificial Sequence: Synthetic oligonucleotide
  Antisense strand to SEQ ID NO: 1266300
ucugucaagugcaugacgu

SEQ ID NO: 1266302 - RNA, 19 nt, Artificial Sequence
  Description of Artificial Sequence: Synthetic oligonucleotide
  Sense strand starting at position 1220 of SEQ ID NO: 1241357
cgucaugcacuugacagaa

SEQ ID NO: 1266303 - RNA, 19 nt, Artificial Sequence
  Description of Artificial Sequence: Synthetic oligonucleotide
  Antisense strand to SEQ ID NO: 1266302
uucugucaagugcaugacg

SEQ ID NO: 1266304 - RNA, 19 nt, Artificial Sequence
  Description of Artificial Sequence: Synthetic oligonucleotide
  Sense strand starting at position 1311 of SEQ ID NO: 1241357
ccaggaucuugucacguga

SEQ ID NO: 1266305 - RNA, 19 nt, Artificial Sequence
  Description of Artificial Sequence: Synthetic oligonucleotide
  Antisense strand to SEQ ID NO: 1266304
ucacgugacaagauccugg

SEQ ID NO: 1266306 - RNA, 19 nt, Artificial Sequence
  Description of Artificial Sequence: Synthetic oligonucleotide
  Sense strand starting at position 1313 of SEQ ID NO: 1241357
aggaucuugucacgugacu

SEQ ID NO: 1266307 - RNA, 19 nt, Artificial Sequence
  Description of Artificial Sequence: Synthetic oligonucleotide
  Antisense strand to SEQ ID NO: 1266306
agucacgugacaagauccu

SEQ ID NO: 1266308 - RNA, 19 nt, Artificial Sequence
  Description of Artificial Sequence: Synthetic oligonucleotide
  Sense strand starting at position 1444 of SEQ ID NO: 1241357
cgaccaaucacggaagcaa

SEQ ID NO: 1266309 - RNA, 19 nt, Artificial Sequence
  Description of Artificial Sequence: Synthetic oligonucleotide
  Antisense strand to SEQ ID NO: 1266308
uugcuuccgugauuggucg

SEQ ID NO: 1266310 - RNA, 19 nt, Artificial Sequence
  Description of Artificial Sequence: Synthetic oligonucleotide
  Sense strand starting at position 1560 of SEQ ID NO: 1241357
ggaagguggcggugacaaa

SEQ ID NO: 1266311 - RNA, 19 nt, Artificial Sequence
  Description of Artificial Sequence: Synthetic oligonucleotide
  Antisense strand to SEQ ID NO: 1266310
uuugucaccgccaccuucc

SEQ ID NO: 1266312 - RNA, 19 nt, Artificial Sequence
  Description of Artificial Sequence: Synthetic oligonucleotide
  Sense strand starting at position 1651 of SEQ ID NO: 1241357
uggguucucucgggaggga

SEQ ID NO: 1266313 - RNA, 19 nt, Artificial Sequence
  Description of Artificial Sequence: Synthetic oligonucleotide
  Antisense strand to SEQ ID NO: 1266312
ucccucccgagagaaccca

SEQ ID NO: 1266314 - RNA, 19 nt, Artificial Sequence
  Description of Artificial Sequence: Synthetic oligonucleotide
  Sense strand starting at position 1903 of SEQ ID NO: 1241357
gucuaauuauguucugucu

SEQ ID NO: 1266315 - RNA, 19 nt, Artificial Sequence
  Description of Artificial Sequence: Synthetic oligonucleotide
  Antisense strand to SEQ ID NO: 1266314
agacagaacauaauuagac

SEQ ID NO: 1266316 - RNA, 19 nt, Artificial Sequence
  Description of Artificial Sequence: Synthetic oligonucleotide
  Sense strand starting at position 1905 of SEQ ID NO: 1241357
cuaauuauguucugucuag

SEQ ID NO: 1266317 - RNA, 19 nt, Artificial Sequence
  Description of Artificial Sequence: Synthetic oligonucleotide
  Antisense strand to SEQ ID NO: 1266316
cuagacagaacauaauuag

SEQ ID NO: 1266318 - RNA, 19 nt, Artificial Sequence
  Description of Artificial Sequence: Synthetic oligonucleotide
  Sense strand starting at position 1909 of SEQ ID NO: 1241357
uuauguucugucuagaacu

SEQ ID NO: 1266319 - RNA, 19 nt, Artificial Sequence
  Description of Artificial Sequence: Synthetic oligonucleotide
  Antisense strand to SEQ ID NO: 1266318
aguucuagacagaacauaa

SEQ ID NO: 1266320 - RNA, 19 nt, Artificial Sequence
  Description of Artificial Sequence: Synthetic oligonucleotide
  Sense strand starting at position 1975 of SEQ ID NO: 1241357
ggguaucuuacuggugaug

SEQ ID NO: 1266321 - RNA, 19 nt, Artificial Sequence
  Description of Artificial Sequence: Synthetic oligonucleotide
  Antisense strand to SEQ ID NO: 1266320
caucaccaguaagauaccc

SEQ ID NO: 1266322 - RNA, 19 nt, Artificial Sequence
  Description of Artificial Sequence: Synthetic oligonucleotide
  Sense strand starting at position 1977 of SEQ ID NO: 1241357
guaucuuacuggugaugac

SEQ ID NO: 1266323 - RNA, 19 nt, Artificial Sequence
  Description of Artificial Sequence: Synthetic oligonucleotide
  Antisense strand to SEQ ID NO: 1266322
gucaucaccaguaagauac

SEQ ID NO: 1266324 - RNA, 19 nt, Artificial Sequence
  Description of Artificial Sequence: Synthetic oligonucleotide
  Sense strand starting at position 2619 of SEQ ID NO: 1241357
caggguugccugggacagu

SEQ ID NO: 1266325 - RNA, 19 nt, Artificial Sequence
  Description of Artificial Sequence: Synthetic oligonucleotide
  Antisense strand to SEQ ID NO: 1266324
acugucccaggcaacccug

SEQ ID NO: 1266326 - RNA, 19 nt, Artificial Sequence
  Description of Artificial Sequence: Synthetic oligonucleotide
  Sense strand starting at position 2669 of SEQ ID NO: 1241357
ggcccaguuuccuuggaca

SEQ ID NO: 1266327 - RNA, 19 nt, Artificial Sequence
  Description of Artificial Sequence: Synthetic oligonucleotide
  Antisense strand to SEQ ID NO: 1266326
uguccaaggaaacugggcc

SEQ ID NO: 1266328 - RNA, 19 nt, Artificial Sequence
  Description of Artificial Sequence: Synthetic oligonucleotide
  Sense strand starting at position 2671 of SEQ ID NO: 1241357
cccaguuuccuuggacaaa

SEQ ID NO: 1266329 - RNA, 19 nt, Artificial Sequence
  Description of Artificial Sequence: Synthetic oligonucleotide
  Antisense strand to SEQ ID NO: 1266328
uuuguccaaggaaacuggg

SEQ ID NO: 1266330 - RNA, 19 nt, Artificial Sequence
  Description of Artificial Sequence: Synthetic oligonucleotide
  Sense strand starting at position 2672 of SEQ ID NO: 1241357
ccaguuuccuuggacaaag

SEQ ID NO: 1266331 - RNA, 19 nt, Artificial Sequence
  Description of Artificial Sequence: Synthetic oligonucleotide
  Antisense strand to SEQ ID NO: 1266330
cuuuguccaaggaaacugg

SEQ ID NO: 1266332 - RNA, 19 nt, Artificial Sequence
  Description of Artificial Sequence: Synthetic oligonucleotide
  Sense strand starting at position 2730 of SEQ ID NO: 1241357
ccaggcugcuucugaguuu

SEQ ID NO: 1266333 - RNA, 19 nt, Artificial Sequence
  Description of Artificial Sequence: Synthetic oligonucleotide
  Antisense strand to SEQ ID NO: 1266332
aaacucagaagcagccugg

SEQ ID NO: 1266334 - RNA, 19 nt, Artificial Sequence
  Description of Artificial Sequence: Synthetic oligonucleotide
  Sense strand starting at position 2858 of SEQ ID NO: 1241357
cacaaaugucuccaagcga

SEQ ID NO: 1266335 - RNA, 19 nt, Artificial Sequence
  Description of Artificial Sequence: Synthetic oligonucleotide
  Antisense strand to SEQ ID NO: 1266334
ucgcuuggagacauuugug

SEQ ID NO: 1266336 - RNA, 19 nt, Artificial Sequence
  Description of Artificial Sequence: Synthetic oligonucleotide
  Sense strand starting at position 3531 of SEQ ID NO: 1241357
ccgggaauagccgauucaa

SEQ ID NO: 1266337 - RNA, 19 nt, Artificial Sequence
  Description of Artificial Sequence: Synthetic oligonucleotide
  Antisense strand to SEQ ID NO: 1266336
uugaaucggcuauucccgg

SEQ ID NO: 1266338 - RNA, 19 nt, Artificial Sequence
  Description of Artificial Sequence: Synthetic oligonucleotide
  Sense strand starting at position 3542 of SEQ ID NO: 1241357
cgauucaagugaggucagu

SEQ ID NO: 1266339 - RNA, 19 nt, Artificial Sequence
  Description of Artificial Sequence: Synthetic oligonucleotide
  Antisense strand to SEQ ID NO: 1266338
acugaccucacuugaaucg

SEQ ID NO: 1266340 - RNA, 19 nt, Artificial Sequence
  Description of Artificial Sequence: Synthetic oligonucleotide
  Sense strand starting at position 3827 of SEQ ID NO: 1241357
ggguguugucucugagaag

SEQ ID NO: 1266341 - RNA, 19 nt, Artificial Sequence
  Description of Artificial Sequence: Synthetic oligonucleotide
  Antisense strand to SEQ ID NO: 1266340
cuucucagagacaacaccc

SEQ ID NO: 1266342 - RNA, 19 nt, Artificial Sequence
  Description of Artificial Sequence: Synthetic oligonucleotide
  Sense strand starting at position 3828 of SEQ ID NO: 1241357
gguguugucucugagaagc

SEQ ID NO: 1266343 - RNA, 19 nt, Artificial Sequence
  Description of Artificial Sequence: Synthetic oligonucleotide
  Antisense strand to SEQ ID NO: 1266342
gcuucucagagacaacacc

SEQ ID NO: 1266344 - RNA, 19 nt, Artificial Sequence
  Description of Artificial Sequence: Synthetic oligonucleotide
  Sense strand starting at position 3960 of SEQ ID NO: 1241357
ggcugagucacgugccaga

SEQ ID NO: 1266345 - RNA, 19 nt, Artificial Sequence
  Description of Artificial Sequence: Synthetic oligonucleotide
  Antisense strand to SEQ ID NO: 1266344
ucuggcacgugacucagcc

SEQ ID NO: 1266346 - RNA, 19 nt, Artificial Sequence
  Description of Artificial Sequence: Synthetic oligonucleotide
  Sense strand starting at position 36 of SEQ ID NO: 1241358
uccugaaauucuguguagu

SEQ ID NO: 1266347 - RNA, 19 nt, Artificial Sequence
  Description of Artificial Sequence: Synthetic oligonucleotide
  Antisense strand to SEQ ID NO: 1266346
acuacacagaauuucagga

SEQ ID NO: 1266348 - RNA, 19 nt, Artificial Sequence
  Description of Artificial Sequence: Synthetic oligonucleotide
  Sense strand starting at position 37 of SEQ ID NO: 1241358
ccugaaauucuguguaguu

SEQ ID NO: 1266349 - RNA, 19 nt, Artificial Sequence
  Description of Artificial Sequence: Synthetic oligonucleotide
  Antisense strand to SEQ ID NO: 1266348
aacuacacagaauuucagg

SEQ ID NO: 1266350 - RNA, 19 nt, Artificial Sequence
  Description of Artificial Sequence: Synthetic oligonucleotide
  Sense strand starting at position 38 of SEQ ID NO: 1241358
cugaaauucuguguaguug

SEQ ID NO: 1266351 - RNA, 19 nt, Artificial Sequence
  Description of Artificial Sequence: Synthetic oligonucleotide
  Antisense strand to SEQ ID NO: 1266350
caacuacacagaauuucag

SEQ ID NO: 1266352 - RNA, 19 nt, Artificial Sequence
  Description of Artificial Sequence: Synthetic oligonucleotide
  Sense strand starting at position 39 of SEQ ID NO: 1241358
ugaaauucuguguaguuga

SEQ ID NO: 1266353 - RNA, 19 nt, Artificial Sequence
  Description of Artificial Sequence: Synthetic oligonucleotide
  Antisense strand to SEQ ID NO: 1266352
ucaacuacacagaauuuca

SEQ ID NO: 1266354 - RNA, 19 nt, Artificial Sequence
  Description of Artificial Sequence: Synthetic oligonucleotide
  Sense strand starting at position 42 of SEQ ID NO: 1241358
aauucuguguaguugaaca

SEQ ID NO: 1266355 - RNA, 19 nt, Artificial Sequence
  Description of Artificial Sequence: Synthetic oligonucleotide
  Antisense strand to SEQ ID NO: 1266354
uguucaacuacacagaauu

SEQ ID NO: 1266356 - RNA, 19 nt, Artificial Sequence
  Description of Artificial Sequence: Synthetic oligonucleotide
  Sense strand starting at position 44 of SEQ ID NO: 1241358
uucuguguaguugaacaau

SEQ ID NO: 1266357 - RNA, 19 nt, Artificial Sequence
  Description of Artificial Sequence: Synthetic oligonucleotide
  Antisense strand to SEQ ID NO: 1266356
auuguucaacuacacagaa

SEQ ID NO: 1266358 - RNA, 19 nt, Artificial Sequence
  Description of Artificial Sequence: Synthetic oligonucleotide
  Sense strand starting at position 47 of SEQ ID NO: 1241358
uguguaguugaacaauacu

SEQ ID NO: 1266359 - RNA, 19 nt, Artificial Sequence
  Description of Artificial Sequence: Synthetic oligonucleotide
  Antisense strand to SEQ ID NO: 1266358
aguauuguucaacuacaca

SEQ ID NO: 1266360 - RNA, 19 nt, Artificial Sequence
  Description of Artificial Sequence: Synthetic oligonucleotide
  Sense strand starting at position 56 of SEQ ID NO: 1241358
gaacaauacugguugcauu

SEQ ID NO: 1266361 - RNA, 19 nt, Artificial Sequence
  Description of Artificial Sequence: Synthetic oligonucleotide
  Antisense strand to SEQ ID NO: 1266360
aaugcaaccaguauuguuc

SEQ ID NO: 1266362 - RNA, 19 nt, Artificial Sequence
  Description of Artificial Sequence: Synthetic oligonucleotide
  Sense strand starting at position 174 of SEQ ID NO: 1241358
uugguuaugugguuuaaga

SEQ ID NO: 1266363 - RNA, 19 nt, Artificial Sequence
  Description of Artificial Sequence: Synthetic oligonucleotide
  Antisense strand to SEQ ID NO: 1266362
ucuuaaaccacauaaccaa

SEQ ID NO: 1266364 - RNA, 19 nt, Artificial Sequence
  Description of Artificial Sequence: Synthetic oligonucleotide
  Sense strand starting at position 176 of SEQ ID NO: 1241358
gguuaugugguuuaagauu

SEQ ID NO: 1266365 - RNA, 19 nt, Artificial Sequence
  Description of Artificial Sequence: Synthetic oligonucleotide
  Antisense strand to SEQ ID NO: 1266364
aaucuuaaaccacauaacc

SEQ ID NO: 1266366 - RNA, 19 nt, Artificial Sequence
  Description of Artificial Sequence: Synthetic oligonucleotide
  Sense strand starting at position 300 of SEQ ID NO: 1241358
aauguuuggcuuuaugaaa

SEQ ID NO: 1266367 - RNA, 19 nt, Artificial Sequence
  Description of Artificial Sequence: Synthetic oligonucleotide
  Antisense strand to SEQ ID NO: 1266366
uuucauaaagccaaacauu

SEQ ID NO: 1266368 - RNA, 19 nt, Artificial Sequence
  Description of Artificial Sequence: Synthetic oligonucleotide
  Sense strand starting at position 351 of SEQ ID NO: 1241358
aaauaaugcgaguggaaau

SEQ ID NO: 1266369 - RNA, 19 nt, Artificial Sequence
  Description of Artificial Sequence: Synthetic oligonucleotide
  Antisense strand to SEQ ID NO: 1266368
auuuccacucgcauuauuu

SEQ ID NO: 1266370 - RNA, 19 nt, Artificial Sequence
  Description of Artificial Sequence: Synthetic oligonucleotide
  Sense strand starting at position 426 of SEQ ID NO: 1241358
gauuuaggcuguuugguca

SEQ ID NO: 1266371 - RNA, 19 nt, Artificial Sequence
  Description of Artificial Sequence: Synthetic oligonucleotide
  Antisense strand to SEQ ID NO: 1266370
ugaccaaacagccuaaauc

SEQ ID NO: 1266372 - RNA, 19 nt, Artificial Sequence
  Description of Artificial Sequence: Synthetic oligonucleotide
  Sense strand starting at position 605 of SEQ ID NO: 1241358
gcggcuucuggcuugcaga

SEQ ID NO: 1266373 - RNA, 19 nt, Artificial Sequence
  Description of Artificial Sequence: Synthetic oligonucleotide
  Antisense strand to SEQ ID NO: 1266372
ucugcaagccagaagccgc

SEQ ID NO: 1266374 - RNA, 19 nt, Artificial Sequence
  Description of Artificial Sequence: Synthetic oligonucleotide
  Sense strand starting at position 724 of SEQ ID NO: 1241358
cguagaugacaggguugau

SEQ ID NO: 1266375 - RNA, 19 nt, Artificial Sequence
  Description of Artificial Sequence: Synthetic oligonucleotide
  Antisense strand to SEQ ID NO: 1266374
aucaacccugucaucuacg

SEQ ID NO: 1266376 - RNA, 19 nt, Artificial Sequence
  Description of Artificial Sequence: Synthetic oligonucleotide
  Sense strand starting at position 2060 of SEQ ID NO: 1241358
cgagggaaccgcguguuua

SEQ ID NO: 1266377 - RNA, 19 nt, Artificial Sequence
  Description of Artificial Sequence: Synthetic oligonucleotide
  Antisense strand to SEQ ID NO: 1266376
uaaacacgcgguucccucg

SEQ ID NO: 1266378 - RNA, 19 nt, Artificial Sequence
  Description of Artificial Sequence: Synthetic oligonucleotide
  Sense strand starting at position 2169 of SEQ ID NO: 1241358
cggguuuccgagagugcca

SEQ ID NO: 1266379 - RNA, 19 nt, Artificial Sequence
  Description of Artificial Sequence: Synthetic oligonucleotide
  Antisense strand to SEQ ID NO: 1266378
uggcacucucggaaacccg

SEQ ID NO: 1266380 - RNA, 19 nt, Artificial Sequence
  Description of Artificial Sequence: Synthetic oligonucleotide
  Sense strand starting at position 2361 of SEQ ID NO: 1241358
uugguauauacagguagga

SEQ ID NO: 1266381 - RNA, 19 nt, Artificial Sequence
  Description of Artificial Sequence: Synthetic oligonucleotide
  Antisense strand to SEQ ID NO: 1266380
uccuaccuguauauaccaa

SEQ ID NO: 1266382 - RNA, 19 nt, Artificial Sequence
  Description of Artificial Sequence: Synthetic oligonucleotide
  Sense strand starting at position 2641 of SEQ ID NO: 1241358
cacugaugucaagaguuuc

SEQ ID NO: 1266383 - RNA, 19 nt, Artificial Sequence
  Description of Artificial Sequence: Synthetic oligonucleotide
  Antisense strand to SEQ ID NO: 1266382
gaaacucuugacaucagug

SEQ ID NO: 1266384 - RNA, 19 nt, Artificial Sequence
  Description of Artificial Sequence: Synthetic oligonucleotide
  Sense strand starting at position 2750 of SEQ ID NO: 1241358
gagcuaggauaguuccuuu

SEQ ID NO: 1266385 - RNA, 19 nt, Artificial Sequence
  Description of Artificial Sequence: Synthetic oligonucleotide
  Antisense strand to SEQ ID NO: 1266384
aaaggaacuauccuagcuc

SEQ ID NO: 1266386 - RNA, 19 nt, Artificial Sequence
  Description of Artificial Sequence: Synthetic oligonucleotide
  Sense strand starting at position 2753 of SEQ ID NO: 1241358
cuaggauaguuccuuuaga

SEQ ID NO: 1266387 - RNA, 19 nt, Artificial Sequence
  Description of Artificial Sequence: Synthetic oligonucleotide
  Antisense strand to SEQ ID NO: 1266386
ucuaaaggaacuauccuag

SEQ ID NO: 1266388 - RNA, 19 nt, Artificial Sequence
  Description of Artificial Sequence: Synthetic oligonucleotide
  Sense strand starting at position 2754 of SEQ ID NO: 1241358
uaggauaguuccuuuagau

SEQ ID NO: 1266389 - RNA, 19 nt, Artificial Sequence
  Description of Artificial Sequence: Synthetic oligonucleotide
  Antisense strand to SEQ ID NO: 1266388
aucuaaaggaacuauccua

SEQ ID NO: 1266390 - RNA, 19 nt, Artificial Sequence
  Description of Artificial Sequence: Synthetic oligonucleotide
  Sense strand starting at position 3035 of SEQ ID NO: 1241358
gugauaaacccucagguua

SEQ ID NO: 1266391 - RNA, 19 nt, Artificial Sequence
  Description of Artificial Sequence: Synthetic oligonucleotide
  Antisense strand to SEQ ID NO: 1266390
uaaccugaggguuuaucac

SEQ ID NO: 1266392 - RNA, 19 nt, Artificial Sequence
  Description of Artificial Sequence: Synthetic oligonucleotide
  Sense strand starting at position 3127 of SEQ ID NO: 1241358
uggaaaccuugagaaauac

SEQ ID NO: 1266393 - RNA, 19 nt, Artificial Sequence
  Description of Artificial Sequence: Synthetic oligonucleotide
  Antisense strand to SEQ ID NO: 1266392
guauuucucaagguuucca

SEQ ID NO: 1266394 - RNA, 19 nt, Artificial Sequence
  Description of Artificial Sequence: Synthetic oligonucleotide
  Sense strand starting at position 3249 of SEQ ID NO: 1241358
gcacaaauuugagaaacac

SEQ ID NO: 1266395 - RNA, 19 nt, Artificial Sequence
  Description of Artificial Sequence: Synthetic oligonucleotide
  Antisense strand to SEQ ID NO: 1266394
guguuucucaaauuugugc

SEQ ID NO: 1266396 - RNA, 19 nt, Artificial Sequence
  Description of Artificial Sequence: Synthetic oligonucleotide
  Sense strand starting at position 3283 of SEQ ID NO: 1241358
cuaguauauuuguagaucu

SEQ ID NO: 1266397 - RNA, 19 nt, Artificial Sequence
  Description of Artificial Sequence: Synthetic oligonucleotide
  Antisense strand to SEQ ID NO: 1266396
agaucuacaaauauacuag

SEQ ID NO: 1266398 - RNA, 19 nt, Artificial Sequence
  Description of Artificial Sequence: Synthetic oligonucleotide
  Sense strand starting at position 3290 of SEQ ID NO: 1241358
auuuguagaucuuagaauc

SEQ ID NO: 1266399 - RNA, 19 nt, Artificial Sequence
  Description of Artificial Sequence: Synthetic oligonucleotide
  Antisense strand to SEQ ID NO: 1266398
gauucuaagaucuacaaau

SEQ ID NO: 1266400 - RNA, 19 nt, Artificial Sequence
  Description of Artificial Sequence: Synthetic oligonucleotide
  Sense strand starting at position 3316 of SEQ ID NO: 1241358
uuaguauuggagugcuuau

SEQ ID NO: 1266401 - RNA, 19 nt, Artificial Sequence
  Description of Artificial Sequence: Synthetic oligonucleotide
  Antisense strand to SEQ ID NO: 1266400
auaagcacuccaauacuaa

SEQ ID NO: 1266402 - RNA, 19 nt, Artificial Sequence
  Description of Artificial Sequence: Synthetic oligonucleotide
  Sense strand starting at position 3356 of SEQ ID NO: 1241358
acaggaaauuuacaguaua

SEQ ID NO: 1266403 - RNA, 19 nt, Artificial Sequence
  Description of Artificial Sequence: Synthetic oligonucleotide
  Antisense strand to SEQ ID NO: 1266402
uauacuguaaauuuccugu

SEQ ID NO: 1266404 - RNA, 19 nt, Artificial Sequence
  Description of Artificial Sequence: Synthetic oligonucleotide
  Sense strand starting at position 3382 of SEQ ID NO: 1241358
gaacguuuaagguggcaaa

SEQ ID NO: 1266405 - RNA, 19 nt, Artificial Sequence
  Description of Artificial Sequence: Synthetic oligonucleotide
  Antisense strand to SEQ ID NO: 1266404
uuugccaccuuaaacguuc

SEQ ID NO: 1266406 - RNA, 19 nt, Artificial Sequence
  Description of Artificial Sequence: Synthetic oligonucleotide
  Sense strand starting at position 3467 of SEQ ID NO: 1241358
ccaucuauacauuguauga

SEQ ID NO: 1266407 - RNA, 19 nt, Artificial Sequence
  Description of Artificial Sequence: Synthetic oligonucleotide
  Antisense strand to SEQ ID NO: 1266406
ucauacaauguauagaugg

SEQ ID NO: 1266408 - RNA, 19 nt, Artificial Sequence
  Description of Artificial Sequence: Synthetic oligonucleotide
  Sense strand starting at position 3471 of SEQ ID NO: 1241358
cuauacauuguaugauguu

SEQ ID NO: 1266409 - RNA, 19 nt, Artificial Sequence
  Description of Artificial Sequence: Synthetic oligonucleotide
  Antisense strand to SEQ ID NO: 1266408
aacaucauacaauguauag

SEQ ID NO: 1266410 - RNA, 19 nt, Artificial Sequence
  Description of Artificial Sequence: Synthetic oligonucleotide
  Sense strand starting at position 3762 of SEQ ID NO: 1241358
cggccaacacaguauauua

SEQ ID NO: 1266411 - RNA, 19 nt, Artificial Sequence
  Description of Artificial Sequence: Synthetic oligonucleotide
  Antisense strand to SEQ ID NO: 1266410
uaauauacuguguuggccg

SEQ ID NO: 1266412 - RNA, 19 nt, Artificial Sequence
  Description of Artificial Sequence: Synthetic oligonucleotide
  Sense strand starting at position 3775 of SEQ ID NO: 1241358
auauuacagugugcuaaau

SEQ ID NO: 1266413 - RNA, 19 nt, Artificial Sequence
  Description of Artificial Sequence: Synthetic oligonucleotide
  Antisense strand to SEQ ID NO: 1266412
auuuagcacacuguaauau

SEQ ID NO: 1266414 - RNA, 19 nt, Artificial Sequence
  Description of Artificial Sequence: Synthetic oligonucleotide
  Sense strand starting at position 3844 of SEQ ID NO: 1241358
uuguacaagaggugacauu

SEQ ID NO: 1266415 - RNA, 19 nt, Artificial Sequence
  Description of Artificial Sequence: Synthetic oligonucleotide
  Antisense strand to SEQ ID NO: 1266414
aaugucaccucuuguacaa

SEQ ID NO: 1266416 - RNA, 19 nt, Artificial Sequence
  Description of Artificial Sequence: Synthetic oligonucleotide
  Sense strand starting at position 3907 of SEQ ID NO: 1241358
gugcaaagucuggagguua

SEQ ID NO: 1266417 - RNA, 19 nt, Artificial Sequence
  Description of Artificial Sequence: Synthetic oligonucleotide
  Antisense strand to SEQ ID NO: 1266416
uaaccuccagacuuugcac

SEQ ID NO: 1266418 - RNA, 19 nt, Artificial Sequence
  Description of Artificial Sequence: Synthetic oligonucleotide
  Sense strand starting at position 3919 of SEQ ID NO: 1241358
gagguuaguguugaaguga

SEQ ID NO: 1266419 - RNA, 19 nt, Artificial Sequence
  Description of Artificial Sequence: Synthetic oligonucleotide
  Antisense strand to SEQ ID NO: 1266418
ucacuucaacacuaaccuc

SEQ ID NO: 1266420 - RNA, 19 nt, Artificial Sequence
  Description of Artificial Sequence: Synthetic oligonucleotide
  Sense strand starting at position 3920 of SEQ ID NO: 1241358
agguuaguguugaagugag

SEQ ID NO: 1266421 - RNA, 19 nt, Artificial Sequence
  Description of Artificial Sequence: Synthetic oligonucleotide
  Antisense strand to SEQ ID NO: 1266420
cucacuucaacacuaaccu

SEQ ID NO: 1266422 - RNA, 19 nt, Artificial Sequence
  Description of Artificial Sequence: Synthetic oligonucleotide
  Sense strand starting at position 3930 of SEQ ID NO: 1241358
ugaagugagcagugucuga

SEQ ID NO: 1266423 - RNA, 19 nt, Artificial Sequence
  Description of Artificial Sequence: Synthetic oligonucleotide
  Antisense strand to SEQ ID NO: 1266422
ucagacacugcucacuuca

SEQ ID NO: 1266424 - RNA, 19 nt, Artificial Sequence
  Description of Artificial Sequence: Synthetic oligonucleotide
  Sense strand starting at position 3943 of SEQ ID NO: 1241358
gucugaauucuaggauauu

SEQ ID NO: 1266425 - RNA, 19 nt, Artificial Sequence
  Description of Artificial Sequence: Synthetic oligonucleotide
  Antisense strand to SEQ ID NO: 1266424
aauauccuagaauucagac

SEQ ID NO: 1266426 - RNA, 19 nt, Artificial Sequence
  Description of Artificial Sequence: Synthetic oligonucleotide
  Sense strand starting at position 26 of SEQ ID NO: 1241359
uugagaagucacuaacgca

SEQ ID NO: 1266427 - RNA, 19 nt, Artificial Sequence
  Description of Artificial Sequence: Synthetic oligonucleotide
  Antisense strand to SEQ ID NO: 1266426
ugcguuagugacuucucaa

SEQ ID NO: 1266428 - RNA, 19 nt, Artificial Sequence
  Description of Artificial Sequence: Synthetic oligonucleotide
  Sense strand starting at position 105 of SEQ ID NO: 1241359
guuauaacagcuuaaacga

SEQ ID NO: 1266429 - RNA, 19 nt, Artificial Sequence
  Description of Artificial Sequence: Synthetic oligonucleotide
  Antisense strand to SEQ ID NO: 1266428
ucguuuaagcuguuauaac

SEQ ID NO: 1266430 - RNA, 19 nt, Artificial Sequence
  Description of Artificial Sequence: Synthetic oligonucleotide
  Sense strand starting at position 168 of SEQ ID NO: 1241359
ucauuugauuugugauaac

SEQ ID NO: 1266431 - RNA, 19 nt, Artificial Sequence
  Description of Artificial Sequence: Synthetic oligonucleotide
  Antisense strand to SEQ ID NO: 1266430
guuaucacaaaucaaauga

SEQ ID NO: 1266432 - RNA, 19 nt, Artificial Sequence
  Description of Artificial Sequence: Synthetic oligonucleotide
  Sense strand starting at position 314 of SEQ ID NO: 1241359
ugcuaaauagcugacauua

SEQ ID NO: 1266433 - RNA, 19 nt, Artificial Sequence
  Description of Artificial Sequence: Synthetic oligonucleotide
  Antisense strand to SEQ ID NO: 1266432
uaaugucagcuauuuagca

SEQ ID NO: 1266434 - RNA, 19 nt, Artificial Sequence
  Description of Artificial Sequence: Synthetic oligonucleotide
  Sense strand starting at position 325 of SEQ ID NO: 1241359
ugacauuaugacugauuau

SEQ ID NO: 1266435 - RNA, 19 nt, Artificial Sequence
  Description of Artificial Sequence: Synthetic oligonucleotide
  Antisense strand to SEQ ID NO: 1266434
auaaucagucauaauguca

SEQ ID NO: 1266436 - RNA, 19 nt, Artificial Sequence
  Description of Artificial Sequence: Synthetic oligonucleotide
  Sense strand starting at position 383 of SEQ ID NO: 1241359
uugguuuaugcaggaaaua

SEQ ID NO: 1266437 - RNA, 19 nt, Artificial Sequence
  Description of Artificial Sequence: Synthetic oligonucleotide
  Antisense strand to SEQ ID NO: 1266436
uauuuccugcauaaaccaa

SEQ ID NO: 1266438 - RNA, 19 nt, Artificial Sequence
  Description of Artificial Sequence: Synthetic oligonucleotide
  Sense strand starting at position 384 of SEQ ID NO: 1241359
ugguuuaugcaggaaauau

SEQ ID NO: 1266439 - RNA, 19 nt, Artificial Sequence
  Description of Artificial Sequence: Synthetic oligonucleotide
  Antisense strand to SEQ ID NO: 1266438
auauuuccugcauaaacca

SEQ ID NO: 1266440 - RNA, 19 nt, Artificial Sequence
  Description of Artificial Sequence: Synthetic oligonucleotide
  Sense strand starting at position 496 of SEQ ID NO: 1241359
ugcauaggccaauauuauu

SEQ ID NO: 1266441 - RNA, 19 nt, Artificial Sequence
  Description of Artificial Sequence: Synthetic oligonucleotide
  Antisense strand to SEQ ID NO: 1266440
aauaauauuggccuaugca

SEQ ID NO: 1266442 - RNA, 19 nt, Artificial Sequence
  Description of Artificial Sequence: Synthetic oligonucleotide
  Sense strand starting at position 525 of SEQ ID NO: 1241359
cuguauuaagcauaugaug

SEQ ID NO: 1266443 - RNA, 19 nt, Artificial Sequence
  Description of Artificial Sequence: Synthetic oligonucleotide
  Antisense strand to SEQ ID NO: 1266442
caucauaugcuuaauacag

SEQ ID NO: 1266444 - RNA, 19 nt, Artificial Sequence
  Description of Artificial Sequence: Synthetic oligonucleotide
  Sense strand starting at position 670 of SEQ ID NO: 1241359
cccaaaccuguuugaaaug

SEQ ID NO: 1266445 - RNA, 19 nt, Artificial Sequence
  Description of Artificial Sequence: Synthetic oligonucleotide
  Antisense strand to SEQ ID NO: 1266444
cauuucaaacagguuuggg

SEQ ID NO: 1266446 - RNA, 19 nt, Artificial Sequence
  Description of Artificial Sequence: Synthetic oligonucleotide
  Sense strand starting at position 675 of SEQ ID NO: 1241359
accuguuugaaauggguca

SEQ ID NO: 1266447 - RNA, 19 nt, Artificial Sequence
  Description of Artificial Sequence: Synthetic oligonucleotide
  Antisense strand to SEQ ID NO: 1266446
ugacccauuucaaacaggu

SEQ ID NO: 1266448 - RNA, 19 nt, Artificial Sequence
  Description of Artificial Sequence: Synthetic oligonucleotide
  Sense strand starting at position 676 of SEQ ID NO: 1241359
ccuguuugaaaugggucaa

SEQ ID NO: 1266449 - RNA, 19 nt, Artificial Sequence
  Description of Artificial Sequence: Synthetic oligonucleotide
  Antisense strand to SEQ ID NO: 1266448
uugacccauuucaaacagg

SEQ ID NO: 1266450 - RNA, 19 nt, Artificial Sequence
  Description of Artificial Sequence: Synthetic oligonucleotide
  Sense strand starting at position 677 of SEQ ID NO: 1241359
cuguuugaaaugggucaaa

SEQ ID NO: 1266451 - RNA, 19 nt, Artificial Sequence
  Description of Artificial Sequence: Synthetic oligonucleotide
  Antisense strand to SEQ ID NO: 1266450
uuugacccauuucaaacag

SEQ ID NO: 1266452 - RNA, 19 nt, Artificial Sequence
  Description of Artificial Sequence: Synthetic oligonucleotide
  Sense strand starting at position 768 of SEQ ID NO: 1241359
uccagauauuaagcaaguu

SEQ ID NO: 1266453 - RNA, 19 nt, Artificial Sequence
  Description of Artificial Sequence: Synthetic oligonucleotide
  Antisense strand to SEQ ID NO: 1266452
aacuugcuuaauaucugga

SEQ ID NO: 1266454 - RNA, 19 nt, Artificial Sequence
  Description of Artificial Sequence: Synthetic oligonucleotide
  Sense strand starting at position 961 of SEQ ID NO: 1241359
cucagcauugguuauugau

SEQ ID NO: 1266455 - RNA, 19 nt, Artificial Sequence
  Description of Artificial Sequence: Synthetic oligonucleotide
  Antisense strand to SEQ ID NO: 1266454
aucaauaaccaaugcugag

SEQ ID NO: 1266456 - RNA, 19 nt, Artificial Sequence
  Description of Artificial Sequence: Synthetic oligonucleotide
  Sense strand starting at position 963 of SEQ ID NO: 1241359
cagcauugguuauugauca

SEQ ID NO: 1266457 - RNA, 19 nt, Artificial Sequence
  Description of Artificial Sequence: Synthetic oligonucleotide
  Antisense strand to SEQ ID NO: 1266456
ugaucaauaaccaaugcug

SEQ ID NO: 1266458 - RNA, 19 nt, Artificial Sequence
  Description of Artificial Sequence: Synthetic oligonucleotide
  Sense strand starting at position 967 of SEQ ID NO: 1241359
auugguuauugaucaucaa

SEQ ID NO: 1266459 - RNA, 19 nt, Artificial Sequence
  Description of Artificial Sequence: Synthetic oligonucleotide
  Antisense strand to SEQ ID NO: 1266458
uugaugaucaauaaccaau

SEQ ID NO: 1266460 - RNA, 19 nt, Artificial Sequence
  Description of Artificial Sequence: Synthetic oligonucleotide
  Sense strand starting at position 968 of SEQ ID NO: 1241359
uugguuauugaucaucaac

SEQ ID NO: 1266461 - RNA, 19 nt, Artificial Sequence
  Description of Artificial Sequence: Synthetic oligonucleotide
  Antisense strand to SEQ ID NO: 1266460
guugaugaucaauaaccaa

SEQ ID NO: 1266462 - RNA, 19 nt, Artificial Sequence
  Description of Artificial Sequence: Synthetic oligonucleotide
  Sense strand starting at position 995 of SEQ ID NO: 1241359
ggaacuaucgaacgaaauu

SEQ ID NO: 1266463 - RNA, 19 nt, Artificial Sequence
  Description of Artificial Sequence: Synthetic oligonucleotide
  Antisense strand to SEQ ID NO: 1266462
aauuucguucgauaguucc

SEQ ID NO: 1266464 - RNA, 19 nt, Artificial Sequence
  Description of Artificial Sequence: Synthetic oligonucleotide
  Sense strand starting at position 1052 of SEQ ID NO: 1241359
gagggaauauaagcuucua

SEQ ID NO: 1266465 - RNA, 19 nt, Artificial Sequence
  Description of Artificial Sequence: Synthetic oligonucleotide
  Antisense strand to SEQ ID NO: 1266464
uagaagcuuauauucccuc

SEQ ID NO: 1266466 - RNA, 19 nt, Artificial Sequence
  Description of Artificial Sequence: Synthetic oligonucleotide
  Sense strand starting at position 2421 of SEQ ID NO: 1241359
gcguaauuucccuacuuuc

SEQ ID NO: 1266467 - RNA, 19 nt, Artificial Sequence
  Description of Artificial Sequence: Synthetic oligonucleotide
  Antisense strand to SEQ ID NO: 1266466
gaaaguagggaaauuacgc

SEQ ID NO: 1266468 - RNA, 19 nt, Artificial Sequence
  Description of Artificial Sequence: Synthetic oligonucleotide
  Sense strand starting at position 2552 of SEQ ID NO: 1241359
guuucccauugguuagaga

SEQ ID NO: 1266469 - RNA, 19 nt, Artificial Sequence
  Description of Artificial Sequence: Synthetic oligonucleotide
  Antisense strand to SEQ ID NO: 1266468
ucucuaaccaaugggaaac

SEQ ID NO: 1266470 - RNA, 19 nt, Artificial Sequence
  Description of Artificial Sequence: Synthetic oligonucleotide
  Sense strand starting at position 2932 of SEQ ID NO: 1241359
uccggagucugacuuaaga

SEQ ID NO: 1266471 - RNA, 19 nt, Artificial Sequence
  Description of Artificial Sequence: Synthetic oligonucleotide
  Antisense strand to SEQ ID NO: 1266470
ucuuaagucagacuccgga

SEQ ID NO: 1266472 - RNA, 19 nt, Artificial Sequence
  Description of Artificial Sequence: Synthetic oligonucleotide
  Sense strand starting at position 3090 of SEQ ID NO: 1241359
ggagcucuuaagugaaaga

SEQ ID NO: 1266473 - RNA, 19 nt, Artificial Sequence
  Description of Artificial Sequence: Synthetic oligonucleotide
  Antisense strand to SEQ ID NO: 1266472
ucuuucacuuaagagcucc

SEQ ID NO: 1266474 - RNA, 19 nt, Artificial Sequence
  Description of Artificial Sequence: Synthetic oligonucleotide
  Sense strand starting at position 3156 of SEQ ID NO: 1241359
aguaguaucagauggaugu

SEQ ID NO: 1266475 - RNA, 19 nt, Artificial Sequence
  Description of Artificial Sequence: Synthetic oligonucleotide
  Antisense strand to SEQ ID NO: 1266474
acauccaucugauacuacu

SEQ ID NO: 1266476 - RNA, 19 nt, Artificial Sequence
  Description of Artificial Sequence: Synthetic oligonucleotide
  Sense strand starting at position 3157 of SEQ ID NO: 1241359
guaguaucagauggauguu

SEQ ID NO: 1266477 - RNA, 19 nt, Artificial Sequence
  Description of Artificial Sequence: Synthetic oligonucleotide
  Antisense strand to SEQ ID NO: 1266476
aacauccaucugauacuac

SEQ ID NO: 1266478 - RNA, 19 nt, Artificial Sequence
  Description of Artificial Sequence: Synthetic oligonucleotide
  Sense strand starting at position 3160 of SEQ ID NO: 1241359
guaucagauggauguugaa

SEQ ID NO: 1266479 - RNA, 19 nt, Artificial Sequence
  Description of Artificial Sequence: Synthetic oligonucleotide
  Antisense strand to SEQ ID NO: 1266478
uucaacauccaucugauac

SEQ ID NO: 1266480 - RNA, 19 nt, Artificial Sequence
  Description of Artificial Sequence: Synthetic oligonucleotide
  Sense strand starting at position 3215 of SEQ ID NO: 1241359
cguagaauuugggaagaug

SEQ ID NO: 1266481 - RNA, 19 nt, Artificial Sequence
  Description of Artificial Sequence: Synthetic oligonucleotide
  Antisense strand to SEQ ID NO: 1266480
caucuucccaaauucuacg

SEQ ID NO: 1266482 - RNA, 19 nt, Artificial Sequence
  Description of Artificial Sequence: Synthetic oligonucleotide
  Sense strand starting at position 3227 of SEQ ID NO: 1241359
gaagaugcucugggcuuaa

SEQ ID NO: 1266483 - RNA, 19 nt, Artificial Sequence
  Description of Artificial Sequence: Synthetic oligonucleotide
  Antisense strand to SEQ ID NO: 1266482
uuaagcccagagcaucuuc

SEQ ID NO: 1266484 - RNA, 19 nt, Artificial Sequence
  Description of Artificial Sequence: Synthetic oligonucleotide
  Sense strand starting at position 3266 of SEQ ID NO: 1241359
acagacuuguaaguaugau

SEQ ID NO: 1266485 - RNA, 19 nt, Artificial Sequence
  Description of Artificial Sequence: Synthetic oligonucleotide
  Antisense strand to SEQ ID NO: 1266484
aucauacuuacaagucugu

SEQ ID NO: 1266486 - RNA, 19 nt, Artificial Sequence
  Description of Artificial Sequence: Synthetic oligonucleotide
  Sense strand starting at position 3279 of SEQ ID NO: 1241359
uaugaugauugccuggaga

SEQ ID NO: 1266487 - RNA, 19 nt, Artificial Sequence
  Description of Artificial Sequence: Synthetic oligonucleotide
  Antisense strand to SEQ ID NO: 1266486
ucuccaggcaaucaucaua

SEQ ID NO: 1266488 - RNA, 19 nt, Artificial Sequence
  Description of Artificial Sequence: Synthetic oligonucleotide
  Sense strand starting at position 3281 of SEQ ID NO: 1241359
ugaugauugccuggagagg

SEQ ID NO: 1266489 - RNA, 19 nt, Artificial Sequence
  Description of Artificial Sequence: Synthetic oligonucleotide
  Antisense strand to SEQ ID NO: 1266488
ccucuccaggcaaucauca

SEQ ID NO: 1266490 - RNA, 19 nt, Artificial Sequence
  Description of Artificial Sequence: Synthetic oligonucleotide
  Sense strand starting at position 3299 of SEQ ID NO: 1241359
gaaguagaauauucuguac

SEQ ID NO: 1266491 - RNA, 19 nt, Artificial Sequence
  Description of Artificial Sequence: Synthetic oligonucleotide
  Antisense strand to SEQ ID NO: 1266490
guacagaauauucuacuuc

SEQ ID NO: 1266492 - RNA, 19 nt, Artificial Sequence
  Description of Artificial Sequence: Synthetic oligonucleotide
  Sense strand starting at position 3344 of SEQ ID NO: 1241359
cuuggaccuguguauggua

SEQ ID NO: 1266493 - RNA, 19 nt, Artificial Sequence
  Description of Artificial Sequence: Synthetic oligonucleotide
  Antisense strand to SEQ ID NO: 1266492
uaccauacacagguccaag

SEQ ID NO: 1266494 - RNA, 19 nt, Artificial Sequence
  Description of Artificial Sequence: Synthetic oligonucleotide
  Sense strand starting at position 3374 of SEQ ID NO: 1241359
uauuccugggccugagaga

SEQ ID NO: 1266495 - RNA, 19 nt, Artificial Sequence
  Description of Artificial Sequence: Synthetic oligonucleotide
  Antisense strand to SEQ ID NO: 1266494
ucucucaggcccaggaaua

SEQ ID NO: 1266496 - RNA, 19 nt, Artificial Sequence
  Description of Artificial Sequence: Synthetic oligonucleotide
  Sense strand starting at position 3402 of SEQ ID NO: 1241359
ugcuguguuacugcuguga

SEQ ID NO: 1266497 - RNA, 19 nt, Artificial Sequence
  Description of Artificial Sequence: Synthetic oligonucleotide
  Antisense strand to SEQ ID NO: 1266496
ucacagcaguaacacagca

SEQ ID NO: 1266498 - RNA, 19 nt, Artificial Sequence
  Description of Artificial Sequence: Synthetic oligonucleotide
  Sense strand starting at position 3600 of SEQ ID NO: 1241359
cguuuauuggagcaacaaa

SEQ ID NO: 1266499 - RNA, 19 nt, Artificial Sequence
  Description of Artificial Sequence: Synthetic oligonucleotide
  Antisense strand to SEQ ID NO: 1266498
uuuguugcuccaauaaacg

SEQ ID NO: 1266500 - RNA, 19 nt, Artificial Sequence
  Description of Artificial Sequence: Synthetic oligonucleotide
  Sense strand starting at position 3882 of SEQ ID NO: 1241359
auaugcuuugcccaagaag

SEQ ID NO: 1266501 - RNA, 19 nt, Artificial Sequence
  Description of Artificial Sequence: Synthetic oligonucleotide
  Antisense strand to SEQ ID NO: 1266500
cuucuugggcaaagcauau

SEQ ID NO: 1266502 - RNA, 19 nt, Artificial Sequence
  Description of Artificial Sequence: Synthetic oligonucleotide
  Sense strand starting at position 3885 of SEQ ID NO: 1241359
ugcuuugcccaagaagagu

SEQ ID NO: 1266503 - RNA, 19 nt, Artificial Sequence
  Description of Artificial Sequence: Synthetic oligonucleotide
  Antisense strand to SEQ ID NO: 1266502
acucuucuugggcaaagca

SEQ ID NO: 1266504 - RNA, 19 nt, Artificial Sequence
  Description of Artificial Sequence: Synthetic oligonucleotide
  Sense strand starting at position 3927 of SEQ ID NO: 1241359
aguauuccacagggaacuu

SEQ ID NO: 1266505 - RNA, 19 nt, Artificial Sequence
  Description of Artificial Sequence: Synthetic oligonucleotide
  Antisense strand to SEQ ID NO: 1266504
aaguucccuguggaauacu

SEQ ID NO: 1266506 - RNA, 19 nt, Artificial Sequence
  Description of Artificial Sequence: Synthetic oligonucleotide
  Sense strand starting at position 21 of SEQ ID NO: 1241360
agagucauaucagcaaauu

SEQ ID NO: 1266507 - RNA, 19 nt, Artificial Sequence
  Description of Artificial Sequence: Synthetic oligonucleotide
  Antisense strand to SEQ ID NO: 1266506
aauuugcugauaugacucu

SEQ ID NO: 1266508 - RNA, 19 nt, Artificial Sequence
  Description of Artificial Sequence: Synthetic oligonucleotide
  Sense strand starting at position 22 of SEQ ID NO: 1241360
gagucauaucagcaaauug

SEQ ID NO: 1266509 - RNA, 19 nt, Artificial Sequence
  Description of Artificial Sequence: Synthetic oligonucleotide
  Antisense strand to SEQ ID NO: 1266508
caauuugcugauaugacuc

SEQ ID NO: 1266510 - RNA, 19 nt, Artificial Sequence
  Description of Artificial Sequence: Synthetic oligonucleotide
  Sense strand starting at position 560 of SEQ ID NO: 1241360
aguagucuucuuugggaau

SEQ ID NO: 1266511 - RNA, 19 nt, Artificial Sequence
  Description of Artificial Sequence: Synthetic oligonucleotide
  Antisense strand to SEQ ID NO: 1266510
auucccaaagaagacuacu

SEQ ID NO: 1266512 - RNA, 19 nt, Artificial Sequence
  Description of Artificial Sequence: Synthetic oligonucleotide
  Sense strand starting at position 589 of SEQ ID NO: 1241360
gucugaagcauaugaaaug

SEQ ID NO: 1266513 - RNA, 19 nt, Artificial Sequence
  Description of Artificial Sequence: Synthetic oligonucleotide
  Antisense strand to SEQ ID NO: 1266512
cauuucauaugcuucagac

SEQ ID NO: 1266514 - RNA, 19 nt, Artificial Sequence
  Description of Artificial Sequence: Synthetic oligonucleotide
  Sense strand starting at position 982 of SEQ ID NO: 1241360
uguguaucucaguguauuu

SEQ ID NO: 1266515 - RNA, 19 nt, Artificial Sequence
  Description of Artificial Sequence: Synthetic oligonucleotide
  Antisense strand to SEQ ID NO: 1266514
aaauacacugagauacaca

SEQ ID NO: 1266516 - RNA, 19 nt, Artificial Sequence
  Description of Artificial Sequence: Synthetic oligonucleotide
  Sense strand starting at position 989 of SEQ ID NO: 1241360
cucaguguauuugugugau

SEQ ID NO: 1266517 - RNA, 19 nt, Artificial Sequence
  Description of Artificial Sequence: Synthetic oligonucleotide
  Antisense strand to SEQ ID NO: 1266516
aucacacaaauacacugag

SEQ ID NO: 1266518 - RNA, 19 nt, Artificial Sequence
  Description of Artificial Sequence: Synthetic oligonucleotide
  Sense strand starting at position 991 of SEQ ID NO: 1241360
caguguauuugugugaucu

SEQ ID NO: 1266519 - RNA, 19 nt, Artificial Sequence
  Description of Artificial Sequence: Synthetic oligonucleotide
  Antisense strand to SEQ ID NO: 1266518
agaucacacaaauacacug

SEQ ID NO: 1266520 - RNA, 19 nt, Artificial Sequence
  Description of Artificial Sequence: Synthetic oligonucleotide
  Sense strand starting at position 992 of SEQ ID NO: 1241360
aguguauuugugugaucuc

SEQ ID NO: 1266521 - RNA, 19 nt, Artificial Sequence
  Description of Artificial Sequence: Synthetic oligonucleotide
  Antisense strand to SEQ ID NO: 1266520
gagaucacacaaauacacu

SEQ ID NO: 1266522 - RNA, 19 nt, Artificial Sequence
  Description of Artificial Sequence: Synthetic oligonucleotide
  Sense strand starting at position 995 of SEQ ID NO: 1241360
guauuugugugaucucugu

SEQ ID NO: 1266523 - RNA, 19 nt, Artificial Sequence
  Description of Artificial Sequence: Synthetic oligonucleotide
  Antisense strand to SEQ ID NO: 1266522
acagagaucacacaaauac

SEQ ID NO: 1266524 - RNA, 19 nt, Artificial Sequence
  Description of Artificial Sequence: Synthetic oligonucleotide
  Sense strand starting at position 1021 of SEQ ID NO: 1241360
ugugucuguggucuuugua

SEQ ID NO: 1266525 - RNA, 19 nt, Artificial Sequence
  Description of Artificial Sequence: Synthetic oligonucleotide
  Antisense strand to SEQ ID NO: 1266524
uacaaagaccacagacaca

SEQ ID NO: 1266526 - RNA, 19 nt, Artificial Sequence
  Description of Artificial Sequence: Synthetic oligonucleotide
  Sense strand starting at position 1022 of SEQ ID NO: 1241360
gugucuguggucuuuguau

SEQ ID NO: 1266527 - RNA, 19 nt, Artificial Sequence
  Description of Artificial Sequence: Synthetic oligonucleotide
  Antisense strand to SEQ ID NO: 1266526
auacaaagaccacagacac

SEQ ID NO: 1266528 - RNA, 19 nt, Artificial Sequence
  Description of Artificial Sequence: Synthetic oligonucleotide
  Sense strand starting at position 1050 of SEQ ID NO: 1241360
uggaauguguguaugugua

SEQ ID NO: 1266529 - RNA, 19 nt, Artificial Sequence
  Description of Artificial Sequence: Synthetic oligonucleotide
  Antisense strand to SEQ ID NO: 1266528
uacacauacacacauucca

SEQ ID NO: 1266530 - RNA, 19 nt, Artificial Sequence
  Description of Artificial Sequence: Synthetic oligonucleotide
  Sense strand starting at position 1090 of SEQ ID NO: 1241360
augcguguggucucuuuau

SEQ ID NO: 1266531 - RNA, 19 nt, Artificial Sequence
  Description of Artificial Sequence: Synthetic oligonucleotide
  Antisense strand to SEQ ID NO: 1266530
auaaagagaccacacgcau

SEQ ID NO: 1266532 - RNA, 19 nt, Artificial Sequence
  Description of Artificial Sequence: Synthetic oligonucleotide
  Sense strand starting at position 1092 of SEQ ID NO: 1241360
gcguguggucucuuuaugu

SEQ ID NO: 1266533 - RNA, 19 nt, Artificial Sequence
  Description of Artificial Sequence: Synthetic oligonucleotide
  Antisense strand to SEQ ID NO: 1266532
acauaaagagaccacacgc

SEQ ID NO: 1266534 - RNA, 19 nt, Artificial Sequence
  Description of Artificial Sequence: Synthetic oligonucleotide
  Sense strand starting at position 1235 of SEQ ID NO: 1241360
ugaucaauguugguaguga

SEQ ID NO: 1266535 - RNA, 19 nt, Artificial Sequence
  Description of Artificial Sequence: Synthetic oligonucleotide
  Antisense strand to SEQ ID NO: 1266534
ucacuaccaacauugauca

SEQ ID NO: 1266536 - RNA, 19 nt, Artificial Sequence
  Description of Artificial Sequence: Synthetic oligonucleotide
  Sense strand starting at position 1295 of SEQ ID NO: 1241360
ugcacauaaccaggagauu

SEQ ID NO: 1266537 - RNA, 19 nt, Artificial Sequence
  Description of Artificial Sequence: Synthetic oligonucleotide
  Antisense strand to SEQ ID NO: 1266536
aaucuccugguuaugugca

SEQ ID NO: 1266538 - RNA, 19 nt, Artificial Sequence
  Description of Artificial Sequence: Synthetic oligonucleotide
  Sense strand starting at position 1445 of SEQ ID NO: 1241360
ucagauaacuuguugagac

SEQ ID NO: 1266539 - RNA, 19 nt, Artificial Sequence
  Description of Artificial Sequence: Synthetic oligonucleotide
  Antisense strand to SEQ ID NO: 1266538
gucucaacaaguuaucuga

SEQ ID NO: 1266540 - RNA, 19 nt, Artificial Sequence
  Description of Artificial Sequence: Synthetic oligonucleotide
  Sense strand starting at position 1872 of SEQ ID NO: 1241360
ggaagcuaaugugcaauaa

SEQ ID NO: 1266541 - RNA, 19 nt, Artificial Sequence
  Description of Artificial Sequence: Synthetic oligonucleotide
  Antisense strand to SEQ ID NO: 1266540
uuauugcacauuagcuucc

SEQ ID NO: 1266542 - RNA, 19 nt, Artificial Sequence
  Description of Artificial Sequence: Synthetic oligonucleotide
  Sense strand starting at position 1900 of SEQ ID NO: 1241360
gucaauucggaugauagcu

SEQ ID NO: 1266543 - RNA, 19 nt, Artificial Sequence
  Description of Artificial Sequence: Synthetic oligonucleotide
  Antisense strand to SEQ ID NO: 1266542
agcuaucauccgaauugac

SEQ ID NO: 1266544 - RNA, 19 nt, Artificial Sequence
  Description of Artificial Sequence: Synthetic oligonucleotide
  Sense strand starting at position 1910 of SEQ ID NO: 1241360
augauagcucuaggauaaa

SEQ ID NO: 1266545 - RNA, 19 nt, Artificial Sequence
  Description of Artificial Sequence: Synthetic oligonucleotide
  Antisense strand to SEQ ID NO: 1266544
uuuauccuagagcuaucau

SEQ ID NO: 1266546 - RNA, 19 nt, Artificial Sequence
  Description of Artificial Sequence: Synthetic oligonucleotide
  Sense strand starting at position 2118 of SEQ ID NO: 1241360
uuuaaauacucagugaggu

SEQ ID NO: 1266547 - RNA, 19 nt, Artificial Sequence
  Description of Artificial Sequence: Synthetic oligonucleotide
  Antisense strand to SEQ ID NO: 1266546
accucacugaguauuuaaa

SEQ ID NO: 1266548 - RNA, 19 nt, Artificial Sequence
  Description of Artificial Sequence: Synthetic oligonucleotide
  Sense strand starting at position 2119 of SEQ ID NO: 1241360
uuaaauacucagugagguc

SEQ ID NO: 1266549 - RNA, 19 nt, Artificial Sequence
  Description of Artificial Sequence: Synthetic oligonucleotide
  Antisense strand to SEQ ID NO: 1266548
gaccucacugaguauuuaa

SEQ ID NO: 1266550 - RNA, 19 nt, Artificial Sequence
  Description of Artificial Sequence: Synthetic oligonucleotide
  Sense strand starting at position 2168 of SEQ ID NO: 1241360
ggaauuuacugcuauagag

SEQ ID NO: 1266551 - RNA, 19 nt, Artificial Sequence
  Description of Artificial Sequence: Synthetic oligonucleotide
  Antisense strand to SEQ ID NO: 1266550
cucuauagcaguaaauucc

SEQ ID NO: 1266552 - RNA, 19 nt, Artificial Sequence
  Description of Artificial Sequence: Synthetic oligonucleotide
  Sense strand starting at position 2469 of SEQ ID NO: 1241360
uaugaucaugguggugaau

SEQ ID NO: 1266553 - RNA, 19 nt, Artificial Sequence
  Description of Artificial Sequence: Synthetic oligonucleotide
  Antisense strand to SEQ ID NO: 1266552
auucaccaccaugaucaua

SEQ ID NO: 1266554 - RNA, 19 nt, Artificial Sequence
  Description of Artificial Sequence: Synthetic oligonucleotide
  Sense strand starting at position 2562 of SEQ ID NO: 1241360
ugcauaagcuaagucauuu

SEQ ID NO: 1266555 - RNA, 19 nt, Artificial Sequence
  Description of Artificial Sequence: Synthetic oligonucleotide
  Antisense strand to SEQ ID NO: 1266554
aaaugacuuagcuuaugca

SEQ ID NO: 1266556 - RNA, 19 nt, Artificial Sequence
  Description of Artificial Sequence: Synthetic oligonucleotide
  Sense strand starting at position 2610 of SEQ ID NO: 1241360
guguuaauucccuucucgu

SEQ ID NO: 1266557 - RNA, 19 nt, Artificial Sequence
  Description of Artificial Sequence: Synthetic oligonucleotide
  Antisense strand to SEQ ID NO: 1266556
acgagaagggaauuaacac

SEQ ID NO: 1266558 - RNA, 19 nt, Artificial Sequence
  Description of Artificial Sequence: Synthetic oligonucleotide
  Sense strand starting at position 2673 of SEQ ID NO: 1241360
uguuuauuagcagauggau

SEQ ID NO: 1266559 - RNA, 19 nt, Artificial Sequence
  Description of Artificial Sequence: Synthetic oligonucleotide
  Antisense strand to SEQ ID NO: 1266558
auccaucugcuaauaaaca

SEQ ID NO: 1266560 - RNA, 19 nt, Artificial Sequence
  Description of Artificial Sequence: Synthetic oligonucleotide
  Sense strand starting at position 2693 of SEQ ID NO: 1241360
gaugguguuggguacauaa

SEQ ID NO: 1266561 - RNA, 19 nt, Artificial Sequence
  Description of Artificial Sequence: Synthetic oligonucleotide
  Antisense strand to SEQ ID NO: 1266560
uuauguacccaacaccauc

SEQ ID NO: 1266562 - RNA, 19 nt, Artificial Sequence
  Description of Artificial Sequence: Synthetic oligonucleotide
  Sense strand starting at position 2759 of SEQ ID NO: 1241360
gcuaucuaaucuuucugga

SEQ ID NO: 1266563 - RNA, 19 nt, Artificial Sequence
  Description of Artificial Sequence: Synthetic oligonucleotide
  Antisense strand to SEQ ID NO: 1266562
uccagaaagauuagauagc

SEQ ID NO: 1266564 - RNA, 19 nt, Artificial Sequence
  Description of Artificial Sequence: Synthetic oligonucleotide
  Sense strand starting at position 2862 of SEQ ID NO: 1241360
uucaguuuggguugaugaa

SEQ ID NO: 1266565 - RNA, 19 nt, Artificial Sequence
  Description of Artificial Sequence: Synthetic oligonucleotide
  Antisense strand to SEQ ID NO: 1266564
uucaucaacccaaacugaa

SEQ ID NO: 1266566 - RNA, 19 nt, Artificial Sequence
  Description of Artificial Sequence: Synthetic oligonucleotide
  Sense strand starting at position 2899 of SEQ ID NO: 1241360
ucugcauuuguaugauggu

SEQ ID NO: 1266567 - RNA, 19 nt, Artificial Sequence
  Description of Artificial Sequence: Synthetic oligonucleotide
  Antisense strand to SEQ ID NO: 1266566
accaucauacaaaugcaga

SEQ ID NO: 1266568 - RNA, 19 nt, Artificial Sequence
  Description of Artificial Sequence: Synthetic oligonucleotide
  Sense strand starting at position 2906 of SEQ ID NO: 1241360
uuguaugaugguuguagaa

SEQ ID NO: 1266569 - RNA, 19 nt, Artificial Sequence
  Description of Artificial Sequence: Synthetic oligonucleotide
  Antisense strand to SEQ ID NO: 1266568
uucuacaaccaucauacaa

SEQ ID NO: 1266570 - RNA, 19 nt, Artificial Sequence
  Description of Artificial Sequence: Synthetic oligonucleotide
  Sense strand starting at position 3027 of SEQ ID NO: 1241360
guucuacauuuccuauguu

SEQ ID NO: 1266571 - RNA, 19 nt, Artificial Sequence
  Description of Artificial Sequence: Synthetic oligonucleotide
  Antisense strand to SEQ ID NO: 1266570
aacauaggaaauguagaac

SEQ ID NO: 1266572 - RNA, 19 nt, Artificial Sequence
  Description of Artificial Sequence: Synthetic oligonucleotide
  Sense strand starting at position 3179 of SEQ ID NO: 1241360
gcagcguugguggucaaga

SEQ ID NO: 1266573 - RNA, 19 nt, Artificial Sequence
  Description of Artificial Sequence: Synthetic oligonucleotide
  Antisense strand to SEQ ID NO: 1266572
ucuugaccaccaacgcugc

SEQ ID NO: 1266574 - RNA, 19 nt, Artificial Sequence
  Description of Artificial Sequence: Synthetic oligonucleotide
  Sense strand starting at position 3184 of SEQ ID NO: 1241360
guugguggucaagaguuua

SEQ ID NO: 1266575 - RNA, 19 nt, Artificial Sequence
  Description of Artificial Sequence: Synthetic oligonucleotide
  Antisense strand to SEQ ID NO: 1266574
uaaacucuugaccaccaac

SEQ ID NO: 1266576 - RNA, 19 nt, Artificial Sequence
  Description of Artificial Sequence: Synthetic oligonucleotide
  Sense strand starting at position 3250 of SEQ ID NO: 1241360
cuuuaacugcuagauugua

SEQ ID NO: 1266577 - RNA, 19 nt, Artificial Sequence
  Description of Artificial Sequence: Synthetic oligonucleotide
  Antisense strand to SEQ ID NO: 1266576
uacaaucuagcaguuaaag

SEQ ID NO: 1266578 - RNA, 19 nt, Artificial Sequence
  Description of Artificial Sequence: Synthetic oligonucleotide
  Sense strand starting at position 3333 of SEQ ID NO: 1241360
agaacugaucuuugcaggu

SEQ ID NO: 1266579 - RNA, 19 nt, Artificial Sequence
  Description of Artificial Sequence: Synthetic oligonucleotide
  Antisense strand to SEQ ID NO: 1266578
accugcaaagaucaguucu

SEQ ID NO: 1266580 - RNA, 19 nt, Artificial Sequence
  Description of Artificial Sequence: Synthetic oligonucleotide
  Sense strand starting at position 3340 of SEQ ID NO: 1241360
aucuuugcagguuaaggau

SEQ ID NO: 1266581 - RNA, 19 nt, Artificial Sequence
  Description of Artificial Sequence: Synthetic oligonucleotide
  Antisense strand to SEQ ID NO: 1266580
auccuuaaccugcaaagau

SEQ ID NO: 1266582 - RNA, 19 nt, Artificial Sequence
  Description of Artificial Sequence: Synthetic oligonucleotide
  Sense strand starting at position 3487 of SEQ ID NO: 1241360
uucugaagauuagcaaacu

SEQ ID NO: 1266583 - RNA, 19 nt, Artificial Sequence
  Description of Artificial Sequence: Synthetic oligonucleotide
  Antisense strand to SEQ ID NO: 1266582
aguuugcuaaucuucagaa

SEQ ID NO: 1266584 - RNA, 19 nt, Artificial Sequence
  Description of Artificial Sequence: Synthetic oligonucleotide
  Sense strand starting at position 3683 of SEQ ID NO: 1241360
agggacuaguucuuaacuu

SEQ ID NO: 1266585 - RNA, 19 nt, Artificial Sequence
  Description of Artificial Sequence: Synthetic oligonucleotide
  Antisense strand to SEQ ID NO: 1266584
aaguuaagaacuagucccu

SEQ ID NO: 1266586 - RNA, 19 nt, Artificial Sequence
  Description of Artificial Sequence: Synthetic oligonucleotide
  Sense strand starting at position 63 of SEQ ID NO: 1241361
ucucaacagcgauaacaga

SEQ ID NO: 1266587 - RNA, 19 nt, Artificial Sequence
  Description of Artificial Sequence: Synthetic oligonucleotide
  Antisense strand to SEQ ID NO: 1266586
ucuguuaucgcuguugaga

SEQ ID NO: 1266588 - RNA, 19 nt, Artificial Sequence
  Description of Artificial Sequence: Synthetic oligonucleotide
  Sense strand starting at position 467 of SEQ ID NO: 1241361
cguguuacucaauagauag

SEQ ID NO: 1266589 - RNA, 19 nt, Artificial Sequence
  Description of Artificial Sequence: Synthetic oligonucleotide
  Antisense strand to SEQ ID NO: 1266588
cuaucuauugaguaacacg

SEQ ID NO: 1266590 - RNA, 19 nt, Artificial Sequence
  Description of Artificial Sequence: Synthetic oligonucleotide
  Sense strand starting at position 690 of SEQ ID NO: 1241361
gugggcucuggagacaauu

SEQ ID NO: 1266591 - RNA, 19 nt, Artificial Sequence
  Description of Artificial Sequence: Synthetic oligonucleotide
  Antisense strand to SEQ ID NO: 1266590
aauugucuccagagcccac

SEQ ID NO: 1266592 - RNA, 19 nt, Artificial Sequence
  Description of Artificial Sequence: Synthetic oligonucleotide
  Sense strand starting at position 815 of SEQ ID NO: 1241361
gguuaaaugaaacgacaua

SEQ ID NO: 1266593 - RNA, 19 nt, Artificial Sequence
  Description of Artificial Sequence: Synthetic oligonucleotide
  Antisense strand to SEQ ID NO: 1266592
uaugucguuucauuuaacc

SEQ ID NO: 1266594 - RNA, 19 nt, Artificial Sequence
  Description of Artificial Sequence: Synthetic oligonucleotide
  Sense strand starting at position 827 of SEQ ID NO: 1241361
cgacauaugaagcaaaguu

SEQ ID NO: 1266595 - RNA, 19 nt, Artificial Sequence
  Description of Artificial Sequence: Synthetic oligonucleotide
  Antisense strand to SEQ ID NO: 1266594
aacuuugcuucauaugucg

SEQ ID NO: 1266596 - RNA, 19 nt, Artificial Sequence
  Description of Artificial Sequence: Synthetic oligonucleotide
  Sense strand starting at position 901 of SEQ ID NO: 1241361
auugguagucugcaccaau

SEQ ID NO: 1266597 - RNA, 19 nt, Artificial Sequence
  Description of Artificial Sequence: Synthetic oligonucleotide
  Antisense strand to SEQ ID NO: 1266596
auuggugcagacuaccaau

SEQ ID NO: 1266598 - RNA, 19 nt, Artificial Sequence
  Description of Artificial Sequence: Synthetic oligonucleotide
  Sense strand starting at position 1037 of SEQ ID NO: 1241361
auacuaggcucugcagaua

SEQ ID NO: 1266599 - RNA, 19 nt, Artificial Sequence
  Description of Artificial Sequence: Synthetic oligonucleotide
  Antisense strand to SEQ ID NO: 1266598
uaucugcagagccuaguau

SEQ ID NO: 1266600 - RNA, 19 nt, Artificial Sequence
  Description of Artificial Sequence: Synthetic oligonucleotide
  Sense strand starting at position 1040 of SEQ ID NO: 1241361
cuaggcucugcagauaaua

SEQ ID NO: 1266601 - RNA, 19 nt, Artificial Sequence
  Description of Artificial Sequence: Synthetic oligonucleotide
  Antisense strand to SEQ ID NO: 1266600
uauuaucugcagagccuag

SEQ ID NO: 1266602 - RNA, 19 nt, Artificial Sequence
  Description of Artificial Sequence: Synthetic oligonucleotide
  Sense strand starting at position 1042 of SEQ ID NO: 1241361
aggcucugcagauaauagu

SEQ ID NO: 1266603 - RNA, 19 nt, Artificial Sequence
  Description of Artificial Sequence: Synthetic oligonucleotide
  Antisense strand to SEQ ID NO: 1266602
acuauuaucugcagagccu

SEQ ID NO: 1266604 - RNA, 19 nt, Artificial Sequence
  Description of Artificial Sequence: Synthetic oligonucleotide
  Sense strand starting at position 1064 of SEQ ID NO: 1241361
ucauuuaauuuggguggau

SEQ ID NO: 1266605 - RNA, 19 nt, Artificial Sequence
  Description of Artificial Sequence: Synthetic oligonucleotide
  Antisense strand to SEQ ID NO: 1266604
auccacccaaauuaaauga

SEQ ID NO: 1266606 - RNA, 19 nt, Artificial Sequence
  Description of Artificial Sequence: Synthetic oligonucleotide
  Sense strand starting at position 1312 of SEQ ID NO: 1241361
cauugaugacgaugaccaa

SEQ ID NO: 1266607 - RNA, 19 nt, Artificial Sequence
  Description of Artificial Sequence: Synthetic oligonucleotide
  Antisense strand to SEQ ID NO: 1266606
uuggucaucgucaucaaug

SEQ ID NO: 1266608 - RNA, 19 nt, Artificial Sequence
  Description of Artificial Sequence: Synthetic oligonucleotide
  Sense strand starting at position 1428 of SEQ ID NO: 1241361
gugguagucacuuauuaac

SEQ ID NO: 1266609 - RNA, 19 nt, Artificial Sequence
  Description of Artificial Sequence: Synthetic oligonucleotide
  Antisense strand to SEQ ID NO: 1266608
guuaauaagugacuaccac

SEQ ID NO: 1266610 - RNA, 19 nt, Artificial Sequence
  Description of Artificial Sequence: Synthetic oligonucleotide
  Sense strand starting at position 1430 of SEQ ID NO: 1241361
gguagucacuuauuaacua

SEQ ID NO: 1266611 - RNA, 19 nt, Artificial Sequence
  Description of Artificial Sequence: Synthetic oligonucleotide
  Antisense strand to SEQ ID NO: 1266610
uaguuaauaagugacuacc

SEQ ID NO: 1266612 - RNA, 19 nt, Artificial Sequence
  Description of Artificial Sequence: Synthetic oligonucleotide
  Sense strand starting at position 1600 of SEQ ID NO: 1241361
ccuaauacugaaugaaguu

SEQ ID NO: 1266613 - RNA, 19 nt, Artificial Sequence
  Description of Artificial Sequence: Synthetic oligonucleotide
  Antisense strand to SEQ ID NO: 1266612
aacuucauucaguauuagg

SEQ ID NO: 1266614 - RNA, 19 nt, Artificial Sequence
  Description of Artificial Sequence: Synthetic oligonucleotide
  Sense strand starting at position 1607 of SEQ ID NO: 1241361
cugaaugaaguuugccaaa

SEQ ID NO: 1266615 - RNA, 19 nt, Artificial Sequence
  Description of Artificial Sequence: Synthetic oligonucleotide
  Antisense strand to SEQ ID NO: 1266614
uuuggcaaacuucauucag

SEQ ID NO: 1266616 - RNA, 19 nt, Artificial Sequence
  Description of Artificial Sequence: Synthetic oligonucleotide
  Sense strand starting at position 1746 of SEQ ID NO: 1241361
ccaugugucuuccucauuu

SEQ ID NO: 1266617 - RNA, 19 nt, Artificial Sequence
  Description of Artificial Sequence: Synthetic oligonucleotide
  Antisense strand to SEQ ID NO: 1266616
aaaugaggaagacacaugg

SEQ ID NO: 1266618 - RNA, 19 nt, Artificial Sequence
  Description of Artificial Sequence: Synthetic oligonucleotide
  Sense strand starting at position 1750 of SEQ ID NO: 1241361
gugucuuccucauuucuuu

SEQ ID NO: 1266619 - RNA, 19 nt, Artificial Sequence
  Description of Artificial Sequence: Synthetic oligonucleotide
  Antisense strand to SEQ ID NO: 1266618
aaagaaaugaggaagacac

SEQ ID NO: 1266620 - RNA, 19 nt, Artificial Sequence
  Description of Artificial Sequence: Synthetic oligonucleotide
  Sense strand starting at position 1819 of SEQ ID NO: 1241361
gaauguugcgaacaucacu

SEQ ID NO: 1266621 - RNA, 19 nt, Artificial Sequence
  Description of Artificial Sequence: Synthetic oligonucleotide
  Antisense strand to SEQ ID NO: 1266620
agugauguucgcaacauuc

SEQ ID NO: 1266622 - RNA, 19 nt, Artificial Sequence
  Description of Artificial Sequence: Synthetic oligonucleotide
  Sense strand starting at position 1824 of SEQ ID NO: 1241361
uugcgaacaucacugacaa

SEQ ID NO: 1266623 - RNA, 19 nt, Artificial Sequence
  Description of Artificial Sequence: Synthetic oligonucleotide
  Antisense strand to SEQ ID NO: 1266622
uugucagugauguucgcaa

SEQ ID NO: 1266624 - RNA, 19 nt, Artificial Sequence
  Description of Artificial Sequence: Synthetic oligonucleotide
  Sense strand starting at position 1825 of SEQ ID NO: 1241361
ugcgaacaucacugacaau

SEQ ID NO: 1266625 - RNA, 19 nt, Artificial Sequence
  Description of Artificial Sequence: Synthetic oligonucleotide
  Antisense strand to SEQ ID NO: 1266624
auugucagugauguucgca

SEQ ID NO: 1266626 - RNA, 19 nt, Artificial Sequence
  Description of Artificial Sequence: Synthetic oligonucleotide
  Sense strand starting at position 2039 of SEQ ID NO: 1241361
gcagcaucucaaugagaag

SEQ ID NO: 1266627 - RNA, 19 nt, Artificial Sequence
  Description of Artificial Sequence: Synthetic oligonucleotide
  Antisense strand to SEQ ID NO: 1266626
cuucucauugagaugcugc

SEQ ID NO: 1266628 - RNA, 19 nt, Artificial Sequence
  Description of Artificial Sequence: Synthetic oligonucleotide
  Sense strand starting at position 2065 of SEQ ID NO: 1241361
guuauccaaguuugaacaa

SEQ ID NO: 1266629 - RNA, 19 nt, Artificial Sequence
  Description of Artificial Sequence: Synthetic oligonucleotide
  Antisense strand to SEQ ID NO: 1266628
uuguucaaacuuggauaac

SEQ ID NO: 1266630 - RNA, 19 nt, Artificial Sequence
  Description of Artificial Sequence: Synthetic oligonucleotide
  Sense strand starting at position 2302 of SEQ ID NO: 1241361
gggagauguauacgaacug

SEQ ID NO: 1266631 - RNA, 19 nt, Artificial Sequence
  Description of Artificial Sequence: Synthetic oligonucleotide
  Antisense strand to SEQ ID NO: 1266630
caguucguauacaucuccc

SEQ ID NO: 1266632 - RNA, 19 nt, Artificial Sequence
  Description of Artificial Sequence: Synthetic oligonucleotide
  Sense strand starting at position 2464 of SEQ ID NO: 1241361
ggaggauauuguagguaga

SEQ ID NO: 1266633 - RNA, 19 nt, Artificial Sequence
  Description of Artificial Sequence: Synthetic oligonucleotide
  Antisense strand to SEQ ID NO: 1266632
ucuaccuacaauauccucc

SEQ ID NO: 1266634 - RNA, 19 nt, Artificial Sequence
  Description of Artificial Sequence: Synthetic oligonucleotide
  Sense strand starting at position 2465 of SEQ ID NO: 1241361
gaggauauuguagguagau

SEQ ID NO: 1266635 - RNA, 19 nt, Artificial Sequence
  Description of Artificial Sequence: Synthetic oligonucleotide
  Antisense strand to SEQ ID NO: 1266634
aucuaccuacaauauccuc

SEQ ID NO: 1266636 - RNA, 19 nt, Artificial Sequence
  Description of Artificial Sequence: Synthetic oligonucleotide
  Sense strand starting at position 2466 of SEQ ID NO: 1241361
aggauauuguagguagauu

SEQ ID NO: 1266637 - RNA, 19 nt, Artificial Sequence
  Description of Artificial Sequence: Synthetic oligonucleotide
  Antisense strand to SEQ ID NO: 1266636
aaucuaccuacaauauccu

SEQ ID NO: 1266638 - RNA, 19 nt, Artificial Sequence
  Description of Artificial Sequence: Synthetic oligonucleotide
  Sense strand starting at position 2467 of SEQ ID NO: 1241361
ggauauuguagguagauuc

SEQ ID NO: 1266639 - RNA, 19 nt, Artificial Sequence
  Description of Artificial Sequence: Synthetic oligonucleotide
  Antisense strand to SEQ ID NO: 1266638
gaaucuaccuacaauaucc

SEQ ID NO: 1266640 - RNA, 19 nt, Artificial Sequence
  Description of Artificial Sequence: Synthetic oligonucleotide
  Sense strand starting at position 2478 of SEQ ID NO: 1241361
guagauucagggugauaaa

SEQ ID NO: 1266641 - RNA, 19 nt, Artificial Sequence
  Description of Artificial Sequence: Synthetic oligonucleotide
  Antisense strand to SEQ ID NO: 1266640
uuuaucacccugaaucuac

SEQ ID NO: 1266642 - RNA, 19 nt, Artificial Sequence
  Description of Artificial Sequence: Synthetic oligonucleotide
  Sense strand starting at position 2538 of SEQ ID NO: 1241361
ggguuuaaugauggauauu

SEQ ID NO: 1266643 - RNA, 19 nt, Artificial Sequence
  Description of Artificial Sequence: Synthetic oligonucleotide
  Antisense strand to SEQ ID NO: 1266642
aauauccaucauuaaaccc

SEQ ID NO: 1266644 - RNA, 19 nt, Artificial Sequence
  Description of Artificial Sequence: Synthetic oligonucleotide
  Sense strand starting at position 2717 of SEQ ID NO: 1241361
ugaauuaacuagcugagac

SEQ ID NO: 1266645 - RNA, 19 nt, Artificial Sequence
  Description of Artificial Sequence: Synthetic oligonucleotide
  Antisense strand to SEQ ID NO: 1266644
gucucagcuaguuaauuca

SEQ ID NO: 1266646 - RNA, 19 nt, Artificial Sequence
  Description of Artificial Sequence: Synthetic oligonucleotide
  Sense strand starting at position 2829 of SEQ ID NO: 1241361
cuauaagugguuuaauaug

SEQ ID NO: 1266647 - RNA, 19 nt, Artificial Sequence
  Description of Artificial Sequence: Synthetic oligonucleotide
  Antisense strand to SEQ ID NO: 1266646
cauauuaaaccacuuauag

SEQ ID NO: 1266648 - RNA, 19 nt, Artificial Sequence
  Description of Artificial Sequence: Synthetic oligonucleotide
  Sense strand starting at position 2834 of SEQ ID NO: 1241361
agugguuuaauaugaagug

SEQ ID NO: 1266649 - RNA, 19 nt, Artificial Sequence
  Description of Artificial Sequence: Synthetic oligonucleotide
  Antisense strand to SEQ ID NO: 1266648
cacuucauauuaaaccacu

SEQ ID NO: 1266650 - RNA, 19 nt, Artificial Sequence
  Description of Artificial Sequence: Synthetic oligonucleotide
  Sense strand starting at position 3149 of SEQ ID NO: 1241361
gaaguugaucaggguauau

SEQ ID NO: 1266651 - RNA, 19 nt, Artificial Sequence
  Description of Artificial Sequence: Synthetic oligonucleotide
  Antisense strand to SEQ ID NO: 1266650
auauacccugaucaacuuc

SEQ ID NO: 1266652 - RNA, 19 nt, Artificial Sequence
  Description of Artificial Sequence: Synthetic oligonucleotide
  Sense strand starting at position 3162 of SEQ ID NO: 1241361
guauaucaggaauguaaag

SEQ ID NO: 1266653 - RNA, 19 nt, Artificial Sequence
  Description of Artificial Sequence: Synthetic oligonucleotide
  Antisense strand to SEQ ID NO: 1266652
cuuuacauuccugauauac

SEQ ID NO: 1266654 - RNA, 19 nt, Artificial Sequence
  Description of Artificial Sequence: Synthetic oligonucleotide
  Sense strand starting at position 3200 of SEQ ID NO: 1241361
uaggucuuucuuugagaau

SEQ ID NO: 1266655 - RNA, 19 nt, Artificial Sequence
  Description of Artificial Sequence: Synthetic oligonucleotide
  Antisense strand to SEQ ID NO: 1266654
auucucaaagaaagaccua

SEQ ID NO: 1266656 - RNA, 19 nt, Artificial Sequence
  Description of Artificial Sequence: Synthetic oligonucleotide
  Sense strand starting at position 3246 of SEQ ID NO: 1241361
agcacaggauaguuuauaa

SEQ ID NO: 1266657 - RNA, 19 nt, Artificial Sequence
  Description of Artificial Sequence: Synthetic oligonucleotide
  Antisense strand to SEQ ID NO: 1266656
uuauaaacuauccugugcu

SEQ ID NO: 1266658 - RNA, 19 nt, Artificial Sequence
  Description of Artificial Sequence: Synthetic oligonucleotide
  Sense strand starting at position 3501 of SEQ ID NO: 1241361
cauuguuacguagguauuu

SEQ ID NO: 1266659 - RNA, 19 nt, Artificial Sequence
  Description of Artificial Sequence: Synthetic oligonucleotide
  Antisense strand to SEQ ID NO: 1266658
aaauaccuacguaacaaug

SEQ ID NO: 1266660 - RNA, 19 nt, Artificial Sequence
  Description of Artificial Sequence: Synthetic oligonucleotide
  Sense strand starting at position 3697 of SEQ ID NO: 1241361
ggagcugaccuaugcuaaa

SEQ ID NO: 1266661 - RNA, 19 nt, Artificial Sequence
  Description of Artificial Sequence: Synthetic oligonucleotide
  Antisense strand to SEQ ID NO: 1266660
uuuagcauaggucagcucc

SEQ ID NO: 1266662 - RNA, 19 nt, Artificial Sequence
  Description of Artificial Sequence: Synthetic oligonucleotide
  Sense strand starting at position 3819 of SEQ ID NO: 1241361
uuuauaaugaacgguuaga

SEQ ID NO: 1266663 - RNA, 19 nt, Artificial Sequence
  Description of Artificial Sequence: Synthetic oligonucleotide
  Antisense strand to SEQ ID NO: 1266662
ucuaaccguucauuauaaa

SEQ ID NO: 1266664 - RNA, 19 nt, Artificial Sequence
  Description of Artificial Sequence: Synthetic oligonucleotide
  Sense strand starting at position 3824 of SEQ ID NO: 1241361
aaugaacgguuagaaauuu

SEQ ID NO: 1266665 - RNA, 19 nt, Artificial Sequence
  Description of Artificial Sequence: Synthetic oligonucleotide
  Antisense strand to SEQ ID NO: 1266664
aaauuucuaaccguucauu

SEQ ID NO: 1266666 - RNA, 19 nt, Artificial Sequence
  Description of Artificial Sequence: Synthetic oligonucleotide
  Sense strand starting at position 44 of SEQ ID NO: 1241362
gggugaauguguaaaugga

SEQ ID NO: 1266667 - RNA, 19 nt, Artificial Sequence
  Description of Artificial Sequence: Synthetic oligonucleotide
  Antisense strand to SEQ ID NO: 1266666
uccauuuacacauucaccc

SEQ ID NO: 1266668 - RNA, 19 nt, Artificial Sequence
  Description of Artificial Sequence: Synthetic oligonucleotide
  Sense strand starting at position 101 of SEQ ID NO: 1241362
auggguggcagauggauua

SEQ ID NO: 1266669 - RNA, 19 nt, Artificial Sequence
  Description of Artificial Sequence: Synthetic oligonucleotide
  Antisense strand to SEQ ID NO: 1266668
uaauccaucugccacccau

SEQ ID NO: 1266670 - RNA, 19 nt, Artificial Sequence
  Description of Artificial Sequence: Synthetic oligonucleotide
  Sense strand starting at position 114 of SEQ ID NO: 1241362
ggauuauggguggguggau

SEQ ID NO: 1266671 - RNA, 19 nt, Artificial Sequence
  Description of Artificial Sequence: Synthetic oligonucleotide
  Antisense strand to SEQ ID NO: 1266670
auccacccacccauaaucc

SEQ ID NO: 1266672 - RNA, 19 nt, Artificial Sequence
  Description of Artificial Sequence: Synthetic oligonucleotide
  Sense strand starting at position 115 of SEQ ID NO: 1241362
gauuauggguggguggaua

SEQ ID NO: 1266673 - RNA, 19 nt, Artificial Sequence
  Description of Artificial Sequence: Synthetic oligonucleotide
  Antisense strand to SEQ ID NO: 1266672
uauccacccacccauaauc

SEQ ID NO: 1266674 - RNA, 19 nt, Artificial Sequence
  Description of Artificial Sequence: Synthetic oligonucleotide
  Sense strand starting at position 201 of SEQ ID NO: 1241362
cagugaggauaucauuaau

SEQ ID NO: 1266675 - RNA, 19 nt, Artificial Sequence
  Description of Artificial Sequence: Synthetic oligonucleotide
  Antisense strand to SEQ ID NO: 1266674
auuaaugauauccucacug

SEQ ID NO: 1266676 - RNA, 19 nt, Artificial Sequence
  Description of Artificial Sequence: Synthetic oligonucleotide
  Sense strand starting at position 207 of SEQ ID NO: 1241362
ggauaucauuaauagaaac

SEQ ID NO: 1266677 - RNA, 19 nt, Artificial Sequence
  Description of Artificial Sequence: Synthetic oligonucleotide
  Antisense strand to SEQ ID NO: 1266676
guuucuauuaaugauaucc

SEQ ID NO: 1266678 - RNA, 19 nt, Artificial Sequence
  Description of Artificial Sequence: Synthetic oligonucleotide
  Sense strand starting at position 319 of SEQ ID NO: 1241362
uucuacuguucccugagga

SEQ ID NO: 1266679 - RNA, 19 nt, Artificial Sequence
  Description of Artificial Sequence: Synthetic oligonucleotide
  Antisense strand to SEQ ID NO: 1266678
uccucagggaacaguagaa

SEQ ID NO: 1266680 - RNA, 19 nt, Artificial Sequence
  Description of Artificial Sequence: Synthetic oligonucleotide
  Sense strand starting at position 320 of SEQ ID NO: 1241362
ucuacuguucccugaggac

SEQ ID NO: 1266681 - RNA, 19 nt, Artificial Sequence
  Description of Artificial Sequence: Synthetic oligonucleotide
  Antisense strand to SEQ ID NO: 1266680
guccucagggaacaguaga

SEQ ID NO: 1266682 - RNA, 19 nt, Artificial Sequence
  Description of Artificial Sequence: Synthetic oligonucleotide
  Sense strand starting at position 495 of SEQ ID NO: 1241362
gcacuugccaggcaaguuu

SEQ ID NO: 1266683 - RNA, 19 nt, Artificial Sequence
  Description of Artificial Sequence: Synthetic oligonucleotide
  Antisense strand to SEQ ID NO: 1266682
aaacuugccuggcaagugc

SEQ ID NO: 1266684 - RNA, 19 nt, Artificial Sequence
  Description of Artificial Sequence: Synthetic oligonucleotide
  Sense strand starting at position 602 of SEQ ID NO: 1241362
ugcugaagucucugcaguu

SEQ ID NO: 1266685 - RNA, 19 nt, Artificial Sequence
  Description of Artificial Sequence: Synthetic oligonucleotide
  Antisense strand to SEQ ID NO: 1266684
aacugcagagacuucagca

SEQ ID NO: 1266686 - RNA, 19 nt, Artificial Sequence
  Description of Artificial Sequence: Synthetic oligonucleotide
  Sense strand starting at position 732 of SEQ ID NO: 1241362
agcuccaguccucacagau

SEQ ID NO: 1266687 - RNA, 19 nt, Artificial Sequence
  Description of Artificial Sequence: Synthetic oligonucleotide
  Antisense strand to SEQ ID NO: 1266686
aucugugaggacuggagcu

SEQ ID NO: 1266688 - RNA, 19 nt, Artificial Sequence
  Description of Artificial Sequence: Synthetic oligonucleotide
  Sense strand starting at position 806 of SEQ ID NO: 1241362
gcuuuagcaggucaaccau

SEQ ID NO: 1266689 - RNA, 19 nt, Artificial Sequence
  Description of Artificial Sequence: Synthetic oligonucleotide
  Antisense strand to SEQ ID NO: 1266688
augguugaccugcuaaagc

SEQ ID NO: 1266690 - RNA, 19 nt, Artificial Sequence
  Description of Artificial Sequence: Synthetic oligonucleotide
  Sense strand starting at position 963 of SEQ ID NO: 1241362
agcaaaucuuuagcaaaug

SEQ ID NO: 1266691 - RNA, 19 nt, Artificial Sequence
  Description of Artificial Sequence: Synthetic oligonucleotide
  Antisense strand to SEQ ID NO: 1266690
cauuugcuaaagauuugcu

SEQ ID NO: 1266692 - RNA, 19 nt, Artificial Sequence
  Description of Artificial Sequence: Synthetic oligonucleotide
  Sense strand starting at position 1002 of SEQ ID NO: 1241362
ugaggacuuuaaugaccaa

SEQ ID NO: 1266693 - RNA, 19 nt, Artificial Sequence
  Description of Artificial Sequence: Synthetic oligonucleotide
  Antisense strand to SEQ ID NO: 1266692
uuggucauuaaaguccuca

SEQ ID NO: 1266694 - RNA, 19 nt, Artificial Sequence
  Description of Artificial Sequence: Synthetic oligonucleotide
  Sense strand starting at position 1050 of SEQ ID NO: 1241362
ggccucucugacuaagcua

SEQ ID NO: 1266695 - RNA, 19 nt, Artificial Sequence
  Description of Artificial Sequence: Synthetic oligonucleotide
  Antisense strand to SEQ ID NO: 1266694
uagcuuagucagagaggcc

SEQ ID NO: 1266696 - RNA, 19 nt, Artificial Sequence
  Description of Artificial Sequence: Synthetic oligonucleotide
  Sense strand starting at position 1106 of SEQ ID NO: 1241362
gccuaaaugcuggauucca

SEQ ID NO: 1266697 - RNA, 19 nt, Artificial Sequence
  Description of Artificial Sequence: Synthetic oligonucleotide
  Antisense strand to SEQ ID NO: 1266696
uggaauccagcauuuaggc

SEQ ID NO: 1266698 - RNA, 19 nt, Artificial Sequence
  Description of Artificial Sequence: Synthetic oligonucleotide
  Sense strand starting at position 1292 of SEQ ID NO: 1241362
cucugcaugcuuuaagcaa

SEQ ID NO: 1266699 - RNA, 19 nt, Artificial Sequence
  Description of Artificial Sequence: Synthetic oligonucleotide
  Antisense strand to SEQ ID NO: 1266698
uugcuuaaagcaugcagag

SEQ ID NO: 1266700 - RNA, 19 nt, Artificial Sequence
  Description of Artificial Sequence: Synthetic oligonucleotide
  Sense strand starting at position 1323 of SEQ ID NO: 1241362
uucugaaagugcuuuauuu

SEQ ID NO: 1266701 - RNA, 19 nt, Artificial Sequence
  Description of Artificial Sequence: Synthetic oligonucleotide
  Antisense strand to SEQ ID NO: 1266700
aaauaaagcacuuucagaa

SEQ ID NO: 1266702 - RNA, 19 nt, Artificial Sequence
  Description of Artificial Sequence: Synthetic oligonucleotide
  Sense strand starting at position 1491 of SEQ ID NO: 1241362
ccacgaagucccugugagu

SEQ ID NO: 1266703 - RNA, 19 nt, Artificial Sequence
  Description of Artificial Sequence: Synthetic oligonucleotide
  Antisense strand to SEQ ID NO: 1266702
acucacagggacuucgugg

SEQ ID NO: 1266704 - RNA, 19 nt, Artificial Sequence
  Description of Artificial Sequence: Synthetic oligonucleotide
  Sense strand starting at position 1846 of SEQ ID NO: 1241362
ggucaugagcuaugaaguu

SEQ ID NO: 1266705 - RNA, 19 nt, Artificial Sequence
  Description of Artificial Sequence: Synthetic oligonucleotide
  Antisense strand to SEQ ID NO: 1266704
aacuucauagcucaugacc

SEQ ID NO: 1266706 - RNA, 19 nt, Artificial Sequence
  Description of Artificial Sequence: Synthetic oligonucleotide
  Sense strand starting at position 2049 of SEQ ID NO: 1241362
ugaaacgaguccucucuga

SEQ ID NO: 1266707 - RNA, 19 nt, Artificial Sequence
  Description of Artificial Sequence: Synthetic oligonucleotide
  Antisense strand to SEQ ID NO: 1266706
ucagagaggacucguuuca

SEQ ID NO: 1266708 - RNA, 19 nt, Artificial Sequence
  Description of Artificial Sequence: Synthetic oligonucleotide
  Sense strand starting at position 2053 of SEQ ID NO: 1241362
acgaguccucucugacucu

SEQ ID NO: 1266709 - RNA, 19 nt, Artificial Sequence
  Description of Artificial Sequence: Synthetic oligonucleotide
  Antisense strand to SEQ ID NO: 1266708
agagucagagaggacucgu

SEQ ID NO: 1266710 - RNA, 19 nt, Artificial Sequence
  Description of Artificial Sequence: Synthetic oligonucleotide
  Sense strand starting at position 2247 of SEQ ID NO: 1241362
cgagcugaggcagaaucau

SEQ ID NO: 1266711 - RNA, 19 nt, Artificial Sequence
  Description of Artificial Sequence: Synthetic oligonucleotide
  Antisense strand to SEQ ID NO: 1266710
augauucugccucagcucg

SEQ ID NO: 1266712 - RNA, 19 nt, Artificial Sequence
  Description of Artificial Sequence: Synthetic oligonucleotide
  Sense strand starting at position 2255 of SEQ ID NO: 1241362
ggcagaaucaugugaacuc

SEQ ID NO: 1266713 - RNA, 19 nt, Artificial Sequence
  Description of Artificial Sequence: Synthetic oligonucleotide
  Antisense strand to SEQ ID NO: 1266712
gaguucacaugauucugcc

SEQ ID NO: 1266714 - RNA, 19 nt, Artificial Sequence
  Description of Artificial Sequence: Synthetic oligonucleotide
  Sense strand starting at position 2397 of SEQ ID NO: 1241362
ccucgcugggaaugugaaa

SEQ ID NO: 1266715 - RNA, 19 nt, Artificial Sequence
  Description of Artificial Sequence: Synthetic oligonucleotide
  Antisense strand to SEQ ID NO: 1266714
uuucacauucccagcgagg

SEQ ID NO: 1266716 - RNA, 19 nt, Artificial Sequence
  Description of Artificial Sequence: Synthetic oligonucleotide
  Sense strand starting at position 2476 of SEQ ID NO: 1241362
ggcuaauucuagccaccuu

SEQ ID NO: 1266717 - RNA, 19 nt, Artificial Sequence
  Description of Artificial Sequence: Synthetic oligonucleotide
  Antisense strand to SEQ ID NO: 1266716
aagguggcuagaauuagcc

SEQ ID NO: 1266718 - RNA, 19 nt, Artificial Sequence
  Description of Artificial Sequence: Synthetic oligonucleotide
  Sense strand starting at position 2571 of SEQ ID NO: 1241362
uggccaugugcaugagaac

SEQ ID NO: 1266719 - RNA, 19 nt, Artificial Sequence
  Description of Artificial Sequence: Synthetic oligonucleotide
  Antisense strand to SEQ ID NO: 1266718
guucucaugcacauggcca

SEQ ID NO: 1266720 - RNA, 19 nt, Artificial Sequence
  Description of Artificial Sequence: Synthetic oligonucleotide
  Sense strand starting at position 2572 of SEQ ID NO: 1241362
ggccaugugcaugagaaca

SEQ ID NO: 1266721 - RNA, 19 nt, Artificial Sequence
  Description of Artificial Sequence: Synthetic oligonucleotide
  Antisense strand to SEQ ID NO: 1266720
uguucucaugcacauggcc

SEQ ID NO: 1266722 - RNA, 19 nt, Artificial Sequence
  Description of Artificial Sequence: Synthetic oligonucleotide
  Sense strand starting at position 2574 of SEQ ID NO: 1241362
ccaugugcaugagaacaua

SEQ ID NO: 1266723 - RNA, 19 nt, Artificial Sequence
  Description of Artificial Sequence: Synthetic oligonucleotide
  Antisense strand to SEQ ID NO: 1266722
uauguucucaugcacaugg

SEQ ID NO: 1266724 - RNA, 19 nt, Artificial Sequence
  Description of Artificial Sequence: Synthetic oligonucleotide
  Sense strand starting at position 2649 of SEQ ID NO: 1241362
ucauguuuccuggaaguga

SEQ ID NO: 1266725 - RNA, 19 nt, Artificial Sequence
  Description of Artificial Sequence: Synthetic oligonucleotide
  Antisense strand to SEQ ID NO: 1266724
ucacuuccaggaaacauga

SEQ ID NO: 1266726 - RNA, 19 nt, Artificial Sequence
  Description of Artificial Sequence: Synthetic oligonucleotide
  Sense strand starting at position 2673 of SEQ ID NO: 1241362
cagcaucaguggcucuaaa

SEQ ID NO: 1266727 - RNA, 19 nt, Artificial Sequence
  Description of Artificial Sequence: Synthetic oligonucleotide
  Antisense strand to SEQ ID NO: 1266726
uuuagagccacugaugcug

SEQ ID NO: 1266728 - RNA, 19 nt, Artificial Sequence
  Description of Artificial Sequence: Synthetic oligonucleotide
  Sense strand starting at position 2791 of SEQ ID NO: 1241362
gagcuaaggcucugggcau

SEQ ID NO: 1266729 - RNA, 19 nt, Artificial Sequence
  Description of Artificial Sequence: Synthetic oligonucleotide
  Antisense strand to SEQ ID NO: 1266728
augcccagagccuuagcuc

SEQ ID NO: 1266730 - RNA, 19 nt, Artificial Sequence
  Description of Artificial Sequence: Synthetic oligonucleotide
  Sense strand starting at position 2952 of SEQ ID NO: 1241362
gauggaaaggcccagcauu

SEQ ID NO: 1266731 - RNA, 19 nt, Artificial Sequence
  Description of Artificial Sequence: Synthetic oligonucleotide
  Antisense strand to SEQ ID NO: 1266730
aaugcugggccuuuccauc

SEQ ID NO: 1266732 - RNA, 19 nt, Artificial Sequence
  Description of Artificial Sequence: Synthetic oligonucleotide
  Sense strand starting at position 2994 of SEQ ID NO: 1241362
ggcagacuccuuggaagcu

SEQ ID NO: 1266733 - RNA, 19 nt, Artificial Sequence
  Description of Artificial Sequence: Synthetic oligonucleotide
  Antisense strand to SEQ ID NO: 1266732
agcuuccaaggagucugcc

SEQ ID NO: 1266734 - RNA, 19 nt, Artificial Sequence
  Description of Artificial Sequence: Synthetic oligonucleotide
  Sense strand starting at position 3003 of SEQ ID NO: 1241362
cuuggaagcugauuauaag

SEQ ID NO: 1266735 - RNA, 19 nt, Artificial Sequence
  Description of Artificial Sequence: Synthetic oligonucleotide
  Antisense strand to SEQ ID NO: 1266734
cuuauaaucagcuuccaag

SEQ ID NO: 1266736 - RNA, 19 nt, Artificial Sequence
  Description of Artificial Sequence: Synthetic oligonucleotide
  Sense strand starting at position 3588 of SEQ ID NO: 1241362
aaaguuuccuacgucaguu

SEQ ID NO: 1266737 - RNA, 19 nt, Artificial Sequence
  Description of Artificial Sequence: Synthetic oligonucleotide
  Antisense strand to SEQ ID NO: 1266736
aacugacguaggaaacuuu

SEQ ID NO: 1266738 - RNA, 19 nt, Artificial Sequence
  Description of Artificial Sequence: Synthetic oligonucleotide
  Sense strand starting at position 3610 of SEQ ID NO: 1241362
ucuugcaggccuuauguua

SEQ ID NO: 1266739 - RNA, 19 nt, Artificial Sequence
  Description of Artificial Sequence: Synthetic oligonucleotide
  Antisense strand to SEQ ID NO: 1266738
uaacauaaggccugcaaga

SEQ ID NO: 1266740 - RNA, 19 nt, Artificial Sequence
  Description of Artificial Sequence: Synthetic oligonucleotide
  Sense strand starting at position 3683 of SEQ ID NO: 1241362
cuacuucugaguugcggaa

SEQ ID NO: 1266741 - RNA, 19 nt, Artificial Sequence
  Description of Artificial Sequence: Synthetic oligonucleotide
  Antisense strand to SEQ ID NO: 1266740
uuccgcaacucagaaguag

SEQ ID NO: 1266742 - RNA, 19 nt, Artificial Sequence
  Description of Artificial Sequence: Synthetic oligonucleotide
  Sense strand starting at position 3687 of SEQ ID NO: 1241362
uucugaguugcggaagugu

SEQ ID NO: 1266743 - RNA, 19 nt, Artificial Sequence
  Description of Artificial Sequence: Synthetic oligonucleotide
  Antisense strand to SEQ ID NO: 1266742
acacuuccgcaacucagaa

SEQ ID NO: 1266744 - RNA, 19 nt, Artificial Sequence
  Description of Artificial Sequence: Synthetic oligonucleotide
  Sense strand starting at position 3708 of SEQ ID NO: 1241362
cuggcuuucccugauguca

SEQ ID NO: 1266745 - RNA, 19 nt, Artificial Sequence
  Description of Artificial Sequence: Synthetic oligonucleotide
  Antisense strand to SEQ ID NO: 1266744
ugacaucagggaaagccag

SEQ ID NO: 1266746 - RNA, 19 nt, Artificial Sequence
  Description of Artificial Sequence: Synthetic oligonucleotide
  Sense strand starting at position 221 of SEQ ID NO: 1241363
uccacuuuguuuccuguua

SEQ ID NO: 1266747 - RNA, 19 nt, Artificial Sequence
  Description of Artificial Sequence: Synthetic oligonucleotide
  Antisense strand to SEQ ID NO: 1266746
uaacaggaaacaaagugga

SEQ ID NO: 1266748 - RNA, 19 nt, Artificial Sequence
  Description of Artificial Sequence: Synthetic oligonucleotide
  Sense strand starting at position 242 of SEQ ID NO: 1241363
ugagucuucucuucugaca

SEQ ID NO: 1266749 - RNA, 19 nt, Artificial Sequence
  Description of Artificial Sequence: Synthetic oligonucleotide
  Antisense strand to SEQ ID NO: 1266748
ugucagaagagaagacuca

SEQ ID NO: 1266750 - RNA, 19 nt, Artificial Sequence
  Description of Artificial Sequence: Synthetic oligonucleotide
  Sense strand starting at position 284 of SEQ ID NO: 1241363
gugguaugacaguaauaau

SEQ ID NO: 1266751 - RNA, 19 nt, Artificial Sequence
  Description of Artificial Sequence: Synthetic oligonucleotide
  Antisense strand to SEQ ID NO: 1266750
auuauuacugucauaccac

SEQ ID NO: 1266752 - RNA, 19 nt, Artificial Sequence
  Description of Artificial Sequence: Synthetic oligonucleotide
  Sense strand starting at position 737 of SEQ ID NO: 1241363
aagcgacuugcccaguaau

SEQ ID NO: 1266753 - RNA, 19 nt, Artificial Sequence
  Description of Artificial Sequence: Synthetic oligonucleotide
  Antisense strand to SEQ ID NO: 1266752
auuacugggcaagucgcuu

SEQ ID NO: 1266754 - RNA, 19 nt, Artificial Sequence
  Description of Artificial Sequence: Synthetic oligonucleotide
  Sense strand starting at position 740 of SEQ ID NO: 1241363
cgacuugcccaguaauagc

SEQ ID NO: 1266755 - RNA, 19 nt, Artificial Sequence
  Description of Artificial Sequence: Synthetic oligonucleotide
  Antisense strand to SEQ ID NO: 1266754
gcuauuacugggcaagucg

SEQ ID NO: 1266756 - RNA, 19 nt, Artificial Sequence
  Description of Artificial Sequence: Synthetic oligonucleotide
  Sense strand starting at position 789 of SEQ ID NO: 1241363
uagacuaucugguucugga

SEQ ID NO: 1266757 - RNA, 19 nt, Artificial Sequence
  Description of Artificial Sequence: Synthetic oligonucleotide
  Antisense strand to SEQ ID NO: 1266756
uccagaaccagauagucua

SEQ ID NO: 1266758 - RNA, 19 nt, Artificial Sequence
  Description of Artificial Sequence: Synthetic oligonucleotide
  Sense strand starting at position 868 of SEQ ID NO: 1241363
cacuguugagcucaggaau

SEQ ID NO: 1266759 - RNA, 19 nt, Artificial Sequence
  Description of Artificial Sequence: Synthetic oligonucleotide
  Antisense strand to SEQ ID NO: 1266758
auuccugagcucaacagug

SEQ ID NO: 1266760 - RNA, 19 nt, Artificial Sequence
  Description of Artificial Sequence: Synthetic oligonucleotide
  Sense strand starting at position 1001 of SEQ ID NO: 1241363
accucagugaggugacaau

SEQ ID NO: 1266761 - RNA, 19 nt, Artificial Sequence
  Description of Artificial Sequence: Synthetic oligonucleotide
  Antisense strand to SEQ ID NO: 1266760
auugucaccucacugaggu

SEQ ID NO: 1266762 - RNA, 19 nt, Artificial Sequence
  Description of Artificial Sequence: Synthetic oligonucleotide
  Sense strand starting at position 1011 of SEQ ID NO: 1241363
ggugacaauggcuaacauu

SEQ ID NO: 1266763 - RNA, 19 nt, Artificial Sequence
  Description of Artificial Sequence: Synthetic oligonucleotide
  Antisense strand to SEQ ID NO: 1266762
aauguuagccauugucacc

SEQ ID NO: 1266764 - RNA, 19 nt, Artificial Sequence
  Description of Artificial Sequence: Synthetic oligonucleotide
  Sense strand starting at position 1208 of SEQ ID NO: 1241363
uuugcuuggcggaguaguu

SEQ ID NO: 1266765 - RNA, 19 nt, Artificial Sequence
  Description of Artificial Sequence: Synthetic oligonucleotide
  Antisense strand to SEQ ID NO: 1266764
aacuacuccgccaagcaaa

SEQ ID NO: 1266766 - RNA, 19 nt, Artificial Sequence
  Description of Artificial Sequence: Synthetic oligonucleotide
  Sense strand starting at position 1317 of SEQ ID NO: 1241363
gggagcugucgggaucuca

SEQ ID NO: 1266767 - RNA, 19 nt, Artificial Sequence
  Description of Artificial Sequence: Synthetic oligonucleotide
  Antisense strand to SEQ ID NO: 1266766
ugagaucccgacagcuccc

SEQ ID NO: 1266768 - RNA, 19 nt, Artificial Sequence
  Description of Artificial Sequence: Synthetic oligonucleotide
  Sense strand starting at position 1954 of SEQ ID NO: 1241363
ggccaaguugugcuccgau

SEQ ID NO: 1266769 - RNA, 19 nt, Artificial Sequence
  Description of Artificial Sequence: Synthetic oligonucleotide
  Antisense strand to SEQ ID NO: 1266768
aucggagcacaacuuggcc

SEQ ID NO: 1266770 - RNA, 19 nt, Artificial Sequence
  Description of Artificial Sequence: Synthetic oligonucleotide
  Sense strand starting at position 2416 of SEQ ID NO: 1241363
gggaucugcacuuagguuu

SEQ ID NO: 1266771 - RNA, 19 nt, Artificial Sequence
  Description of Artificial Sequence: Synthetic oligonucleotide
  Antisense strand to SEQ ID NO: 1266770
aaaccuaagugcagauccc

SEQ ID NO: 1266772 - RNA, 19 nt, Artificial Sequence
  Description of Artificial Sequence: Synthetic oligonucleotide
  Sense strand starting at position 2620 of SEQ ID NO: 1241363
ugggcucuguuguuaagua

SEQ ID NO: 1266773 - RNA, 19 nt, Artificial Sequence
  Description of Artificial Sequence: Synthetic oligonucleotide
  Antisense strand to SEQ ID NO: 1266772
uacuuaacaacagagccca

SEQ ID NO: 1266774 - RNA, 19 nt, Artificial Sequence
  Description of Artificial Sequence: Synthetic oligonucleotide
  Sense strand starting at position 2624 of SEQ ID NO: 1241363
cucuguuguuaaguacuua

SEQ ID NO: 1266775 - RNA, 19 nt, Artificial Sequence
  Description of Artificial Sequence: Synthetic oligonucleotide
  Antisense strand to SEQ ID NO: 1266774
uaaguacuuaacaacagag

SEQ ID NO: 1266776 - RNA, 19 nt, Artificial Sequence
  Description of Artificial Sequence: Synthetic oligonucleotide
  Sense strand starting at position 2662 of SEQ ID NO: 1241363
uguucagggcucuaugaug

SEQ ID NO: 1266777 - RNA, 19 nt, Artificial Sequence
  Description of Artificial Sequence: Synthetic oligonucleotide
  Antisense strand to SEQ ID NO: 1266776
caucauagagcccugaaca

SEQ ID NO: 1266778 - RNA, 19 nt, Artificial Sequence
  Description of Artificial Sequence: Synthetic oligonucleotide
  Sense strand starting at position 2671 of SEQ ID NO: 1241363
cucuaugauguagacagua

SEQ ID NO: 1266779 - RNA, 19 nt, Artificial Sequence
  Description of Artificial Sequence: Synthetic oligonucleotide
  Antisense strand to SEQ ID NO: 1266778
uacugucuacaucauagag

SEQ ID NO: 1266780 - RNA, 19 nt, Artificial Sequence
  Description of Artificial Sequence: Synthetic oligonucleotide
  Sense strand starting at position 2676 of SEQ ID NO: 1241363
ugauguagacaguauuguu

SEQ ID NO: 1266781 - RNA, 19 nt, Artificial Sequence
  Description of Artificial Sequence: Synthetic oligonucleotide
  Antisense strand to SEQ ID NO: 1266780
aacaauacugucuacauca

SEQ ID NO: 1266782 - RNA, 19 nt, Artificial Sequence
  Description of Artificial Sequence: Synthetic oligonucleotide
  Sense strand starting at position 2684 of SEQ ID NO: 1241363
acaguauuguuauucccau

SEQ ID NO: 1266783 - RNA, 19 nt, Artificial Sequence
  Description of Artificial Sequence: Synthetic oligonucleotide
  Antisense strand to SEQ ID NO: 1266782
augggaauaacaauacugu

SEQ ID NO: 1266784 - RNA, 19 nt, Artificial Sequence
  Description of Artificial Sequence: Synthetic oligonucleotide
  Sense strand starting at position 2995 of SEQ ID NO: 1241363
ccagguaaugugugcugaa

SEQ ID NO: 1266785 - RNA, 19 nt, Artificial Sequence
  Description of Artificial Sequence: Synthetic oligonucleotide
  Antisense strand to SEQ ID NO: 1266784
uucagcacacauuaccugg

SEQ ID NO: 1266786 - RNA, 19 nt, Artificial Sequence
  Description of Artificial Sequence: Synthetic oligonucleotide
  Sense strand starting at position 3110 of SEQ ID NO: 1241363
aguuauccugcucaaagca

SEQ ID NO: 1266787 - RNA, 19 nt, Artificial Sequence
  Description of Artificial Sequence: Synthetic oligonucleotide
  Antisense strand to SEQ ID NO: 1266786
ugcuuugagcaggauaacu

SEQ ID NO: 1266788 - RNA, 19 nt, Artificial Sequence
  Description of Artificial Sequence: Synthetic oligonucleotide
  Sense strand starting at position 3139 of SEQ ID NO: 1241363
auuccuauuugugaaauga

SEQ ID NO: 1266789 - RNA, 19 nt, Artificial Sequence
  Description of Artificial Sequence: Synthetic oligonucleotide
  Antisense strand to SEQ ID NO: 1266788
ucauuucacaaauaggaau

SEQ ID NO: 1266790 - RNA, 19 nt, Artificial Sequence
  Description of Artificial Sequence: Synthetic oligonucleotide
  Sense strand starting at position 3163 of SEQ ID NO: 1241363
uggaacugucacggcaaga

SEQ ID NO: 1266791 - RNA, 19 nt, Artificial Sequence
  Description of Artificial Sequence: Synthetic oligonucleotide
  Antisense strand to SEQ ID NO: 1266790
ucuugccgugacaguucca

SEQ ID NO: 1266792 - RNA, 19 nt, Artificial Sequence
  Description of Artificial Sequence: Synthetic oligonucleotide
  Sense strand starting at position 3173 of SEQ ID NO: 1241363
acggcaagagucugcagaa

SEQ ID NO: 1266793 - RNA, 19 nt, Artificial Sequence
  Description of Artificial Sequence: Synthetic oligonucleotide
  Antisense strand to SEQ ID NO: 1266792
uucugcagacucuugccgu

SEQ ID NO: 1266794 - RNA, 19 nt, Artificial Sequence
  Description of Artificial Sequence: Synthetic oligonucleotide
  Sense strand starting at position 3197 of SEQ ID NO: 1241363
ggcgguugucaggacagau

SEQ ID NO: 1266795 - RNA, 19 nt, Artificial Sequence
  Description of Artificial Sequence: Synthetic oligonucleotide
  Antisense strand to SEQ ID NO: 1266794
aucuguccugacaaccgcc

SEQ ID NO: 1266796 - RNA, 19 nt, Artificial Sequence
  Description of Artificial Sequence: Synthetic oligonucleotide
  Sense strand starting at position 3330 of SEQ ID NO: 1241363
cggugugacuuagccucua

SEQ ID NO: 1266797 - RNA, 19 nt, Artificial Sequence
  Description of Artificial Sequence: Synthetic oligonucleotide
  Antisense strand to SEQ ID NO: 1266796
uagaggcuaagucacaccg

SEQ ID NO: 1266798 - RNA, 19 nt, Artificial Sequence
  Description of Artificial Sequence: Synthetic oligonucleotide
  Sense strand starting at position 3335 of SEQ ID NO: 1241363
ugacuuagccucuagguga

SEQ ID NO: 1266799 - RNA, 19 nt, Artificial Sequence
  Description of Artificial Sequence: Synthetic oligonucleotide
  Antisense strand to SEQ ID NO: 1266798
ucaccuagaggcuaaguca

SEQ ID NO: 1266800 - RNA, 19 nt, Artificial Sequence
  Description of Artificial Sequence: Synthetic oligonucleotide
  Sense strand starting at position 3505 of SEQ ID NO: 1241363
aggcuaagaggcuggauaa

SEQ ID NO: 1266801 - RNA, 19 nt, Artificial Sequence
  Description of Artificial Sequence: Synthetic oligonucleotide
  Antisense strand to SEQ ID NO: 1266800
uuauccagccucuuagccu

SEQ ID NO: 1266802 - RNA, 19 nt, Artificial Sequence
  Description of Artificial Sequence: Synthetic oligonucleotide
  Sense strand starting at position 3558 of SEQ ID NO: 1241363
cuuagaaaguccucacaag

SEQ ID NO: 1266803 - RNA, 19 nt, Artificial Sequence
  Description of Artificial Sequence: Synthetic oligonucleotide
  Antisense strand to SEQ ID NO: 1266802
cuugugaggacuuucuaag

SEQ ID NO: 1266804 - RNA, 19 nt, Artificial Sequence
  Description of Artificial Sequence: Synthetic oligonucleotide
  Sense strand starting at position 3559 of SEQ ID NO: 1241363
uuagaaaguccucacaagu

SEQ ID NO: 1266805 - RNA, 19 nt, Artificial Sequence
  Description of Artificial Sequence: Synthetic oligonucleotide
  Antisense strand to SEQ ID NO: 1266804
acuugugaggacuuucuaa

SEQ ID NO: 1266806 - RNA, 19 nt, Artificial Sequence
  Description of Artificial Sequence: Synthetic oligonucleotide
  Sense strand starting at position 3586 of SEQ ID NO: 1241363
cuggguugacuaugccaua

SEQ ID NO: 1266807 - RNA, 19 nt, Artificial Sequence
  Description of Artificial Sequence: Synthetic oligonucleotide
  Antisense strand to SEQ ID NO: 1266806
uauggcauagucaacccag

SEQ ID NO: 1266808 - RNA, 19 nt, Artificial Sequence
  Description of Artificial Sequence: Synthetic oligonucleotide
  Sense strand starting at position 3587 of SEQ ID NO: 1241363
uggguugacuaugccauaa

SEQ ID NO: 1266809 - RNA, 19 nt, Artificial Sequence
  Description of Artificial Sequence: Synthetic oligonucleotide
  Antisense strand to SEQ ID NO: 1266808
uuauggcauagucaaccca

SEQ ID NO: 1266810 - RNA, 19 nt, Artificial Sequence
  Description of Artificial Sequence: Synthetic oligonucleotide
  Sense strand starting at position 3636 of SEQ ID NO: 1241363
aacugaauguaguugugaa

SEQ ID NO: 1266811 - RNA, 19 nt, Artificial Sequence
  Description of Artificial Sequence: Synthetic oligonucleotide
  Antisense strand to SEQ ID NO: 1266810
uucacaacuacauucaguu

SEQ ID NO: 1266812 - RNA, 19 nt, Artificial Sequence
  Description of Artificial Sequence: Synthetic oligonucleotide
  Sense strand starting at position 3637 of SEQ ID NO: 1241363
acugaauguaguugugaag

SEQ ID NO: 1266813 - RNA, 19 nt, Artificial Sequence
  Description of Artificial Sequence: Synthetic oligonucleotide
  Antisense strand to SEQ ID NO: 1266812
cuucacaacuacauucagu

SEQ ID NO: 1266814 - RNA, 19 nt, Artificial Sequence
  Description of Artificial Sequence: Synthetic oligonucleotide
  Sense strand starting at position 3650 of SEQ ID NO: 1241363
gugaagaguuuggcguuga

SEQ ID NO: 1266815 - RNA, 19 nt, Artificial Sequence
  Description of Artificial Sequence: Synthetic oligonucleotide
  Antisense strand to SEQ ID NO: 1266814
ucaacgccaaacucuucac

SEQ ID NO: 1266816 - RNA, 19 nt, Artificial Sequence
  Description of Artificial Sequence: Synthetic oligonucleotide
  Sense strand starting at position 3789 of SEQ ID NO: 1241363
gggcuaagaugauuacaug

SEQ ID NO: 1266817 - RNA, 19 nt, Artificial Sequence
  Description of Artificial Sequence: Synthetic oligonucleotide
  Antisense strand to SEQ ID NO: 1266816
cauguaaucaucuuagccc

SEQ ID NO: 1266818 - RNA, 19 nt, Artificial Sequence
  Description of Artificial Sequence: Synthetic oligonucleotide
  Sense strand starting at position 3859 of SEQ ID NO: 1241363
aauagauguuagcuguuau

SEQ ID NO: 1266819 - RNA, 19 nt, Artificial Sequence
  Description of Artificial Sequence: Synthetic oligonucleotide
  Antisense strand to SEQ ID NO: 1266818
auaacagcuaacaucuauu

SEQ ID NO: 1266820 - RNA, 19 nt, Artificial Sequence
  Description of Artificial Sequence: Synthetic oligonucleotide
  Sense strand starting at position 3871 of SEQ ID NO: 1241363
cuguuauuaucacugucau

SEQ ID NO: 1266821 - RNA, 19 nt, Artificial Sequence
  Description of Artificial Sequence: Synthetic oligonucleotide
  Antisense strand to SEQ ID NO: 1266820
augacagugauaauaacag

SEQ ID NO: 1266822 - RNA, 19 nt, Artificial Sequence
  Description of Artificial Sequence: Synthetic oligonucleotide
  Sense strand starting at position 3872 of SEQ ID NO: 1241363
uguuauuaucacugucauu

SEQ ID NO: 1266823 - RNA, 19 nt, Artificial Sequence
  Description of Artificial Sequence: Synthetic oligonucleotide
  Antisense strand to SEQ ID NO: 1266822
aaugacagugauaauaaca

SEQ ID NO: 1266824 - RNA, 19 nt, Artificial Sequence
  Description of Artificial Sequence: Synthetic oligonucleotide
  Sense strand starting at position 3877 of SEQ ID NO: 1241363
uuaucacugucauuggaca

SEQ ID NO: 1266825 - RNA, 19 nt, Artificial Sequence
  Description of Artificial Sequence: Synthetic oligonucleotide
  Antisense strand to SEQ ID NO: 1266824
uguccaaugacagugauaa

SEQ ID NO: 1266826 - RNA, 19 nt, Artificial Sequence
  Description of Artificial Sequence: Synthetic oligonucleotide
  Sense strand starting at position 38 of SEQ ID NO: 1241364
cagauaccuuccucuggga

SEQ ID NO: 1266827 - RNA, 19 nt, Artificial Sequence
  Description of Artificial Sequence: Synthetic oligonucleotide
  Antisense strand to SEQ ID NO: 1266826
ucccagaggaagguaucug

SEQ ID NO: 1266828 - RNA, 19 nt, Artificial Sequence
  Description of Artificial Sequence: Synthetic oligonucleotide
  Sense strand starting at position 40 of SEQ ID NO: 1241364
gauaccuuccucugggaga

SEQ ID NO: 1266829 - RNA, 19 nt, Artificial Sequence
  Description of Artificial Sequence: Synthetic oligonucleotide
  Antisense strand to SEQ ID NO: 1266828
ucucccagaggaagguauc

SEQ ID NO: 1266830 - RNA, 19 nt, Artificial Sequence
  Description of Artificial Sequence: Synthetic oligonucleotide
  Sense strand starting at position 57 of SEQ ID NO: 1241364
gaaaguuccugcuucugac

SEQ ID NO: 1266831 - RNA, 19 nt, Artificial Sequence
  Description of Artificial Sequence: Synthetic oligonucleotide
  Antisense strand to SEQ ID NO: 1266830
gucagaagcaggaacuuuc

SEQ ID NO: 1266832 - RNA, 19 nt, Artificial Sequence
  Description of Artificial Sequence: Synthetic oligonucleotide
  Sense strand starting at position 67 of SEQ ID NO: 1241364
gcuucugaccugugagaac

SEQ ID NO: 1266833 - RNA, 19 nt, Artificial Sequence
  Description of Artificial Sequence: Synthetic oligonucleotide
  Antisense strand to SEQ ID NO: 1266832
guucucacaggucagaagc

SEQ ID NO: 1266834 - RNA, 19 nt, Artificial Sequence
  Description of Artificial Sequence: Synthetic oligonucleotide
  Sense strand starting at position 130 of SEQ ID NO: 1241364
agagcugaucucuagugga

SEQ ID NO: 1266835 - RNA, 19 nt, Artificial Sequence
  Description of Artificial Sequence: Synthetic oligonucleotide
  Antisense strand to SEQ ID NO: 1266834
uccacuagagaucagcucu

SEQ ID NO: 1266836 - RNA, 19 nt, Artificial Sequence
  Description of Artificial Sequence: Synthetic oligonucleotide
  Sense strand starting at position 535 of SEQ ID NO: 1241364
ggcugaagagaugguguga

SEQ ID NO: 1266837 - RNA, 19 nt, Artificial Sequence
  Description of Artificial Sequence: Synthetic oligonucleotide
  Antisense strand to SEQ ID NO: 1266836
ucacaccaucucuucagcc

SEQ ID NO: 1266838 - RNA, 19 nt, Artificial Sequence
  Description of Artificial Sequence: Synthetic oligonucleotide
  Sense strand starting at position 589 of SEQ ID NO: 1241364
gaaagaggguuugcuacuu

SEQ ID NO: 1266839 - RNA, 19 nt, Artificial Sequence
  Description of Artificial Sequence: Synthetic oligonucleotide
  Antisense strand to SEQ ID NO: 1266838
aaguagcaaacccucuuuc

SEQ ID NO: 1266840 - RNA, 19 nt, Artificial Sequence
  Description of Artificial Sequence: Synthetic oligonucleotide
  Sense strand starting at position 848 of SEQ ID NO: 1241364
aagagaacucgaggugugu

SEQ ID NO: 1266841 - RNA, 19 nt, Artificial Sequence
  Description of Artificial Sequence: Synthetic oligonucleotide
  Antisense strand to SEQ ID NO: 1266840
acacaccucgaguucucuu

SEQ ID NO: 1266842 - RNA, 19 nt, Artificial Sequence
  Description of Artificial Sequence: Synthetic oligonucleotide
  Sense strand starting at position 899 of SEQ ID NO: 1241364
aucagaaauaggugcaugu

SEQ ID NO: 1266843 - RNA, 19 nt, Artificial Sequence
  Description of Artificial Sequence: Synthetic oligonucleotide
  Antisense strand to SEQ ID NO: 1266842
acaugcaccuauuucugau

SEQ ID NO: 1266844 - RNA, 19 nt, Artificial Sequence
  Description of Artificial Sequence: Synthetic oligonucleotide
  Sense strand starting at position 901 of SEQ ID NO: 1241364
cagaaauaggugcauguaa

SEQ ID NO: 1266845 - RNA, 19 nt, Artificial Sequence
  Description of Artificial Sequence: Synthetic oligonucleotide
  Antisense strand to SEQ ID NO: 1266844
uuacaugcaccuauuucug

SEQ ID NO: 1266846 - RNA, 19 nt, Artificial Sequence
  Description of Artificial Sequence: Synthetic oligonucleotide
  Sense strand starting at position 903 of SEQ ID NO: 1241364
gaaauaggugcauguaaug

SEQ ID NO: 1266847 - RNA, 19 nt, Artificial Sequence
  Description of Artificial Sequence: Synthetic oligonucleotide
  Antisense strand to SEQ ID NO: 1266846
cauuacaugcaccuauuuc

SEQ ID NO: 1266848 - RNA, 19 nt, Artificial Sequence
  Description of Artificial Sequence: Synthetic oligonucleotide
  Sense strand starting at position 1028 of SEQ ID NO: 1241364
cuugcauuugcauaguacu

SEQ ID NO: 1266849 - RNA, 19 nt, Artificial Sequence
  Description of Artificial Sequence: Synthetic oligonucleotide
  Antisense strand to SEQ ID NO: 1266848
aguacuaugcaaaugcaag

SEQ ID NO: 1266850 - RNA, 19 nt, Artificial Sequence
  Description of Artificial Sequence: Synthetic oligonucleotide
  Sense strand starting at position 1359 of SEQ ID NO: 1241364
gcccucauggaguaauaua

SEQ ID NO: 1266851 - RNA, 19 nt, Artificial Sequence
  Description of Artificial Sequence: Synthetic oligonucleotide
  Antisense strand to SEQ ID NO: 1266850
uauauuacuccaugagggc

SEQ ID NO: 1266852 - RNA, 19 nt, Artificial Sequence
  Description of Artificial Sequence: Synthetic oligonucleotide
  Sense strand starting at position 1412 of SEQ ID NO: 1241364
cucaguguuuaaucuuaaa

SEQ ID NO: 1266853 - RNA, 19 nt, Artificial Sequence
  Description of Artificial Sequence: Synthetic oligonucleotide
  Antisense strand to SEQ ID NO: 1266852
uuuaagauuaaacacugag

SEQ ID NO: 1266854 - RNA, 19 nt, Artificial Sequence
  Description of Artificial Sequence: Synthetic oligonucleotide
  Sense strand starting at position 2070 of SEQ ID NO: 1241364
gggccaauuugauaucuau

SEQ ID NO: 1266855 - RNA, 19 nt, Artificial Sequence
  Description of Artificial Sequence: Synthetic oligonucleotide
  Antisense strand to SEQ ID NO: 1266854
auagauaucaaauuggccc

SEQ ID NO: 1266856 - RNA, 19 nt, Artificial Sequence
  Description of Artificial Sequence: Synthetic oligonucleotide
  Sense strand starting at position 2240 of SEQ ID NO: 1241364
gagugucaaucucugaauu

SEQ ID NO: 1266857 - RNA, 19 nt, Artificial Sequence
  Description of Artificial Sequence: Synthetic oligonucleotide
  Antisense strand to SEQ ID NO: 1266856
aauucagagauugacacuc

SEQ ID NO: 1266858 - RNA, 19 nt, Artificial Sequence
  Description of Artificial Sequence: Synthetic oligonucleotide
  Sense strand starting at position 2241 of SEQ ID NO: 1241364
agugucaaucucugaauug

SEQ ID NO: 1266859 - RNA, 19 nt, Artificial Sequence
  Description of Artificial Sequence: Synthetic oligonucleotide
  Antisense strand to SEQ ID NO: 1266858
caauucagagauugacacu

SEQ ID NO: 1266860 - RNA, 19 nt, Artificial Sequence
  Description of Artificial Sequence: Synthetic oligonucleotide
  Sense strand starting at position 2313 of SEQ ID NO: 1241364
gccuccuauccaugggacu

SEQ ID NO: 1266861 - RNA, 19 nt, Artificial Sequence
  Description of Artificial Sequence: Synthetic oligonucleotide
  Antisense strand to SEQ ID NO: 1266860
agucccauggauaggaggc

SEQ ID NO: 1266862 - RNA, 19 nt, Artificial Sequence
  Description of Artificial Sequence: Synthetic oligonucleotide
  Sense strand starting at position 2379 of SEQ ID NO: 1241364
guugcuuuccaccaggaca

SEQ ID NO: 1266863 - RNA, 19 nt, Artificial Sequence
  Description of Artificial Sequence: Synthetic oligonucleotide
  Antisense strand to SEQ ID NO: 1266862
uguccugguggaaagcaac

SEQ ID NO: 1266864 - RNA, 19 nt, Artificial Sequence
  Description of Artificial Sequence: Synthetic oligonucleotide
  Sense strand starting at position 2381 of SEQ ID NO: 1241364
ugcuuuccaccaggacaaa

SEQ ID NO: 1266865 - RNA, 19 nt, Artificial Sequence
  Description of Artificial Sequence: Synthetic oligonucleotide
  Antisense strand to SEQ ID NO: 1266864
uuuguccugguggaaagca

SEQ ID NO: 1266866 - RNA, 19 nt, Artificial Sequence
  Description of Artificial Sequence: Synthetic oligonucleotide
  Sense strand starting at position 2485 of SEQ ID NO: 1241364
agacaaaguuguguuuauc

SEQ ID NO: 1266867 - RNA, 19 nt, Artificial Sequence
  Description of Artificial Sequence: Synthetic oligonucleotide
  Antisense strand to SEQ ID NO: 1266866
gauaaacacaacuuugucu

SEQ ID NO: 1266868 - RNA, 19 nt, Artificial Sequence
  Description of Artificial Sequence: Synthetic oligonucleotide
  Sense strand starting at position 2491 of SEQ ID NO: 1241364
aguuguguuuaucuugaaa

SEQ ID NO: 1266869 - RNA, 19 nt, Artificial Sequence
  Description of Artificial Sequence: Synthetic oligonucleotide
  Antisense strand to SEQ ID NO: 1266868
uuucaagauaaacacaacu

SEQ ID NO: 1266870 - RNA, 19 nt, Artificial Sequence
  Description of Artificial Sequence: Synthetic oligonucleotide
  Sense strand starting at position 2528 of SEQ ID NO: 1241364
gccacuuguccuggagaac

SEQ ID NO: 1266871 - RNA, 19 nt, Artificial Sequence
  Description of Artificial Sequence: Synthetic oligonucleotide
  Antisense strand to SEQ ID NO: 1266870
guucuccaggacaaguggc

SEQ ID NO: 1266872 - RNA, 19 nt, Artificial Sequence
  Description of Artificial Sequence: Synthetic oligonucleotide
  Sense strand starting at position 2941 of SEQ ID NO: 1241364
ccgccaacucaacaaguua

SEQ ID NO: 1266873 - RNA, 19 nt, Artificial Sequence
  Description of Artificial Sequence: Synthetic oligonucleotide
  Antisense strand to SEQ ID NO: 1266872
uaacuuguugaguuggcgg

SEQ ID NO: 1266874 - RNA, 19 nt, Artificial Sequence
  Description of Artificial Sequence: Synthetic oligonucleotide
  Sense strand starting at position 3010 of SEQ ID NO: 1241364
uugaccuagcuuugggauu

SEQ ID NO: 1266875 - RNA, 19 nt, Artificial Sequence
  Description of Artificial Sequence: Synthetic oligonucleotide
  Antisense strand to SEQ ID NO: 1266874
aaucccaaagcuaggucaa

SEQ ID NO: 1266876 - RNA, 19 nt, Artificial Sequence
  Description of Artificial Sequence: Synthetic oligonucleotide
  Sense strand starting at position 3055 of SEQ ID NO: 1241364
aaauguuuacuaggguguu

SEQ ID NO: 1266877 - RNA, 19 nt, Artificial Sequence
  Description of Artificial Sequence: Synthetic oligonucleotide
  Antisense strand to SEQ ID NO: 1266876
aacacccuaguaaacauuu

SEQ ID NO: 1266878 - RNA, 19 nt, Artificial Sequence
  Description of Artificial Sequence: Synthetic oligonucleotide
  Sense strand starting at position 3082 of SEQ ID NO: 1241364
ggcacauccauugggaacu

SEQ ID NO: 1266879 - RNA, 19 nt, Artificial Sequence
  Description of Artificial Sequence: Synthetic oligonucleotide
  Antisense strand to SEQ ID NO: 1266878
aguucccaauggaugugcc

SEQ ID NO: 1266880 - RNA, 19 nt, Artificial Sequence
  Description of Artificial Sequence: Synthetic oligonucleotide
  Sense strand starting at position 3095 of SEQ ID NO: 1241364
ggaacugucuccuuggaac

SEQ ID NO: 1266881 - RNA, 19 nt, Artificial Sequence
  Description of Artificial Sequence: Synthetic oligonucleotide
  Antisense strand to SEQ ID NO: 1266880
guuccaaggagacaguucc

SEQ ID NO: 1266882 - RNA, 19 nt, Artificial Sequence
  Description of Artificial Sequence: Synthetic oligonucleotide
  Sense strand starting at position 3136 of SEQ ID NO: 1241364
gcagcuggucuugagaauc

SEQ ID NO: 1266883 - RNA, 19 nt, Artificial Sequence
  Description of Artificial Sequence: Synthetic oligonucleotide
  Antisense strand to SEQ ID NO: 1266882
gauucucaagaccagcugc

SEQ ID NO: 1266884 - RNA, 19 nt, Artificial Sequence
  Description of Artificial Sequence: Synthetic oligonucleotide
  Sense strand starting at position 3144 of SEQ ID NO: 1241364
ucuugagaaucugauuugu

SEQ ID NO: 1266885 - RNA, 19 nt, Artificial Sequence
  Description of Artificial Sequence: Synthetic oligonucleotide
  Antisense strand to SEQ ID NO: 1266884
acaaaucagauucucaaga

SEQ ID NO: 1266886 - RNA, 19 nt, Artificial Sequence
  Description of Artificial Sequence: Synthetic oligonucleotide
  Sense strand starting at position 3154 of SEQ ID NO: 1241364
cugauuuguugagaugaga

SEQ ID NO: 1266887 - RNA, 19 nt, Artificial Sequence
  Description of Artificial Sequence: Synthetic oligonucleotide
  Antisense strand to SEQ ID NO: 1266886
ucucaucucaacaaaucag

SEQ ID NO: 1266888 - RNA, 19 nt, Artificial Sequence
  Description of Artificial Sequence: Synthetic oligonucleotide
  Sense strand starting at position 3406 of SEQ ID NO: 1241364
aggacuuggcacugauagu

SEQ ID NO: 1266889 - RNA, 19 nt, Artificial Sequence
  Description of Artificial Sequence: Synthetic oligonucleotide
  Antisense strand to SEQ ID NO: 1266888
acuaucagugccaaguccu

SEQ ID NO: 1266890 - RNA, 19 nt, Artificial Sequence
  Description of Artificial Sequence: Synthetic oligonucleotide
  Sense strand starting at position 3407 of SEQ ID NO: 1241364
ggacuuggcacugauagug

SEQ ID NO: 1266891 - RNA, 19 nt, Artificial Sequence
  Description of Artificial Sequence: Synthetic oligonucleotide
  Antisense strand to SEQ ID NO: 1266890
cacuaucagugccaagucc

SEQ ID NO: 1266892 - RNA, 19 nt, Artificial Sequence
  Description of Artificial Sequence: Synthetic oligonucleotide
  Sense strand starting at position 3433 of SEQ ID NO: 1241364
cuguaacuugccggauuua

SEQ ID NO: 1266893 - RNA, 19 nt, Artificial Sequence
  Description of Artificial Sequence: Synthetic oligonucleotide
  Antisense strand to SEQ ID NO: 1266892
uaaauccggcaaguuacag

SEQ ID NO: 1266894 - RNA, 19 nt, Artificial Sequence
  Description of Artificial Sequence: Synthetic oligonucleotide
  Sense strand starting at position 3442 of SEQ ID NO: 1241364
gccggauuuaugugcauac

SEQ ID NO: 1266895 - RNA, 19 nt, Artificial Sequence
  Description of Artificial Sequence: Synthetic oligonucleotide
  Antisense strand to SEQ ID NO: 1266894
guaugcacauaaauccggc

SEQ ID NO: 1266896 - RNA, 19 nt, Artificial Sequence
  Description of Artificial Sequence: Synthetic oligonucleotide
  Sense strand starting at position 3777 of SEQ ID NO: 1241364
uauggcuuucugugggaca

SEQ ID NO: 1266897 - RNA, 19 nt, Artificial Sequence
  Description of Artificial Sequence: Synthetic oligonucleotide
  Antisense strand to SEQ ID NO: 1266896
ugucccacagaaagccaua

SEQ ID NO: 1266898 - RNA, 19 nt, Artificial Sequence
  Description of Artificial Sequence: Synthetic oligonucleotide
  Sense strand starting at position 3862 of SEQ ID NO: 1241364
gcaaaugagaauuguuugu

SEQ ID NO: 1266899 - RNA, 19 nt, Artificial Sequence
  Description of Artificial Sequence: Synthetic oligonucleotide
  Antisense strand to SEQ ID NO: 1266898
acaaacaauucucauuugc

SEQ ID NO: 1266900 - RNA, 19 nt, Artificial Sequence
  Description of Artificial Sequence: Synthetic oligonucleotide
  Sense strand starting at position 3864 of SEQ ID NO: 1241364
aaaugagaauuguuuguag

SEQ ID NO: 1266901 - RNA, 19 nt, Artificial Sequence
  Description of Artificial Sequence: Synthetic oligonucleotide
  Antisense strand to SEQ ID NO: 1266900
cuacaaacaauucucauuu

SEQ ID NO: 1266902 - RNA, 19 nt, Artificial Sequence
  Description of Artificial Sequence: Synthetic oligonucleotide
  Sense strand starting at position 3866 of SEQ ID NO: 1241364
augagaauuguuuguagga

SEQ ID NO: 1266903 - RNA, 19 nt, Artificial Sequence
  Description of Artificial Sequence: Synthetic oligonucleotide
  Antisense strand to SEQ ID NO: 1266902
uccuacaaacaauucucau

SEQ ID NO: 1266904 - RNA, 19 nt, Artificial Sequence
  Description of Artificial Sequence: Synthetic oligonucleotide
  Sense strand starting at position 3867 of SEQ ID NO: 1241364
ugagaauuguuuguaggaa

SEQ ID NO: 1266905 - RNA, 19 nt, Artificial Sequence
  Description of Artificial Sequence: Synthetic oligonucleotide
  Antisense strand to SEQ ID NO: 1266904
uuccuacaaacaauucuca

SEQ ID NO: 1266906 - RNA, 19 nt, Artificial Sequence
  Description of Artificial Sequence: Synthetic oligonucleotide
  Sense strand starting at position 65 of SEQ ID NO: 1241365
ucgccaucacuuuauugua

SEQ ID NO: 1266907 - RNA, 19 nt, Artificial Sequence
  Description of Artificial Sequence: Synthetic oligonucleotide
  Antisense strand to SEQ ID NO: 1266906
uacaauaaagugauggcga

SEQ ID NO: 1266908 - RNA, 19 nt, Artificial Sequence
  Description of Artificial Sequence: Synthetic oligonucleotide
  Sense strand starting at position 78 of SEQ ID NO: 1241365
auuguacugucacccuuaa

SEQ ID NO: 1266909 - RNA, 19 nt, Artificial Sequence
  Description of Artificial Sequence: Synthetic oligonucleotide
  Antisense strand to SEQ ID NO: 1266908
uuaagggugacaguacaau

SEQ ID NO: 1266910 - RNA, 19 nt, Artificial Sequence
  Description of Artificial Sequence: Synthetic oligonucleotide
  Sense strand starting at position 277 of SEQ ID NO: 1241365
ugugcaaguccuucgaguu

SEQ ID NO: 1266911 - RNA, 19 nt, Artificial Sequence
  Description of Artificial Sequence: Synthetic oligonucleotide
  Antisense strand to SEQ ID NO: 1266910
aacucgaaggacuugcaca

SEQ ID NO: 1266912 - RNA, 19 nt, Artificial Sequence
  Description of Artificial Sequence: Synthetic oligonucleotide
  Sense strand starting at position 283 of SEQ ID NO: 1241365
aguccuucgaguuagguaa

SEQ ID NO: 1266913 - RNA, 19 nt, Artificial Sequence
  Description of Artificial Sequence: Synthetic oligonucleotide
  Antisense strand to SEQ ID NO: 1266912
uuaccuaacucgaaggacu

SEQ ID NO: 1266914 - RNA, 19 nt, Artificial Sequence
  Description of Artificial Sequence: Synthetic oligonucleotide
  Sense strand starting at position 287 of SEQ ID NO: 1241365
cuucgaguuagguaaguaa

SEQ ID NO: 1266915 - RNA, 19 nt, Artificial Sequence
  Description of Artificial Sequence: Synthetic oligonucleotide
  Antisense strand to SEQ ID NO: 1266914
uuacuuaccuaacucgaag

SEQ ID NO: 1266916 - RNA, 19 nt, Artificial Sequence
  Description of Artificial Sequence: Synthetic oligonucleotide
  Sense strand starting at position 290 of SEQ ID NO: 1241365
cgaguuagguaaguaauac

SEQ ID NO: 1266917 - RNA, 19 nt, Artificial Sequence
  Description of Artificial Sequence: Synthetic oligonucleotide
  Antisense strand to SEQ ID NO: 1266916
guauuacuuaccuaacucg

SEQ ID NO: 1266918 - RNA, 19 nt, Artificial Sequence
  Description of Artificial Sequence: Synthetic oligonucleotide
  Sense strand starting at position 298 of SEQ ID NO: 1241365
guaaguaauacgggcaagu

SEQ ID NO: 1266919 - RNA, 19 nt, Artificial Sequence
  Description of Artificial Sequence: Synthetic oligonucleotide
  Antisense strand to SEQ ID NO: 1266918
acuugcccguauuacuuac

SEQ ID NO: 1266920 - RNA, 19 nt, Artificial Sequence
  Description of Artificial Sequence: Synthetic oligonucleotide
  Sense strand starting at position 300 of SEQ ID NO: 1241365
aaguaauacgggcaagugu

SEQ ID NO: 1266921 - RNA, 19 nt, Artificial Sequence
  Description of Artificial Sequence: Synthetic oligonucleotide
  Antisense strand to SEQ ID NO: 1266920
acacuugcccguauuacuu

SEQ ID NO: 1266922 - RNA, 19 nt, Artificial Sequence
  Description of Artificial Sequence: Synthetic oligonucleotide
  Sense strand starting at position 637 of SEQ ID NO: 1241365
ucaacuuccugggccuaaa

SEQ ID NO: 1266923 - RNA, 19 nt, Artificial Sequence
  Description of Artificial Sequence: Synthetic oligonucleotide
  Antisense strand to SEQ ID NO: 1266922
uuuaggcccaggaaguuga

SEQ ID NO: 1266924 - RNA, 19 nt, Artificial Sequence
  Description of Artificial Sequence: Synthetic oligonucleotide
  Sense strand starting at position 858 of SEQ ID NO: 1241365
gguacuuggucuccuggaa

SEQ ID NO: 1266925 - RNA, 19 nt, Artificial Sequence
  Description of Artificial Sequence: Synthetic oligonucleotide
  Antisense strand to SEQ ID NO: 1266924
uuccaggagaccaaguacc

SEQ ID NO: 1266926 - RNA, 19 nt, Artificial Sequence
  Description of Artificial Sequence: Synthetic oligonucleotide
  Sense strand starting at position 1413 of SEQ ID NO: 1241365
aaguuugaggaaggugaau

SEQ ID NO: 1266927 - RNA, 19 nt, Artificial Sequence
  Description of Artificial Sequence: Synthetic oligonucleotide
  Antisense strand to SEQ ID NO: 1266926
auucaccuuccucaaacuu

SEQ ID NO: 1266928 - RNA, 19 nt, Artificial Sequence
  Description of Artificial Sequence: Synthetic oligonucleotide
  Sense strand starting at position 1415 of SEQ ID NO: 1241365
guuugaggaaggugaauua

SEQ ID NO: 1266929 - RNA, 19 nt, Artificial Sequence
  Description of Artificial Sequence: Synthetic oligonucleotide
  Antisense strand to SEQ ID NO: 1266928
uaauucaccuuccucaaac

SEQ ID NO: 1266930 - RNA, 19 nt, Artificial Sequence
  Description of Artificial Sequence: Synthetic oligonucleotide
  Sense strand starting at position 1820 of SEQ ID NO: 1241365
ggauguugucgaugcugaa

SEQ ID NO: 1266931 - RNA, 19 nt, Artificial Sequence
  Description of Artificial Sequence: Synthetic oligonucleotide
  Antisense strand to SEQ ID NO: 1266930
uucagcaucgacaacaucc

SEQ ID NO: 1266932 - RNA, 19 nt, Artificial Sequence
  Description of Artificial Sequence: Synthetic oligonucleotide
  Sense strand starting at position 2113 of SEQ ID NO: 1241365
cgacgucauccuggauuua

SEQ ID NO: 1266933 - RNA, 19 nt, Artificial Sequence
  Description of Artificial Sequence: Synthetic oligonucleotide
  Antisense strand to SEQ ID NO: 1266932
uaaauccaggaugacgucg

SEQ ID NO: 1266934 - RNA, 19 nt, Artificial Sequence
  Description of Artificial Sequence: Synthetic oligonucleotide
  Sense strand starting at position 2135 of SEQ ID NO: 1241365
ccugguaauaugcagauga

SEQ ID NO: 1266935 - RNA, 19 nt, Artificial Sequence
  Description of Artificial Sequence: Synthetic oligonucleotide
  Antisense strand to SEQ ID NO: 1266934
ucaucugcauauuaccagg

SEQ ID NO: 1266936 - RNA, 19 nt, Artificial Sequence
  Description of Artificial Sequence: Synthetic oligonucleotide
  Sense strand starting at position 2256 of SEQ ID NO: 1241365
gagauuguggauugcgaau

SEQ ID NO: 1266937 - RNA, 19 nt, Artificial Sequence
  Description of Artificial Sequence: Synthetic oligonucleotide
  Antisense strand to SEQ ID NO: 1266936
auucgcaauccacaaucuc

SEQ ID NO: 1266938 - RNA, 19 nt, Artificial Sequence
  Description of Artificial Sequence: Synthetic oligonucleotide
  Sense strand starting at position 2342 of SEQ ID NO: 1241365
ccuaauugccuugguuaau

SEQ ID NO: 1266939 - RNA, 19 nt, Artificial Sequence
  Description of Artificial Sequence: Synthetic oligonucleotide
  Antisense strand to SEQ ID NO: 1266938
auuaaccaaggcaauuagg

SEQ ID NO: 1266940 - RNA, 19 nt, Artificial Sequence
  Description of Artificial Sequence: Synthetic oligonucleotide
  Sense strand starting at position 2343 of SEQ ID NO: 1241365
cuaauugccuugguuaauc

SEQ ID NO: 1266941 - RNA, 19 nt, Artificial Sequence
  Description of Artificial Sequence: Synthetic oligonucleotide
  Antisense strand to SEQ ID NO: 1266940
gauuaaccaaggcaauuag

SEQ ID NO: 1266942 - RNA, 19 nt, Artificial Sequence
  Description of Artificial Sequence: Synthetic oligonucleotide
  Sense strand starting at position 2348 of SEQ ID NO: 1241365
ugccuugguuaaucucauu

SEQ ID NO: 1266943 - RNA, 19 nt, Artificial Sequence
  Description of Artificial Sequence: Synthetic oligonucleotide
  Antisense strand to SEQ ID NO: 1266942
aaugagauuaaccaaggca

SEQ ID NO: 1266944 - RNA, 19 nt, Artificial Sequence
  Description of Artificial Sequence: Synthetic oligonucleotide
  Sense strand starting at position 2443 of SEQ ID NO: 1241365
uccuauuauugggugcgau

SEQ ID NO: 1266945 - RNA, 19 nt, Artificial Sequence
  Description of Artificial Sequence: Synthetic oligonucleotide
  Antisense strand to SEQ ID NO: 1266944
aucgcacccaauaauagga

SEQ ID NO: 1266946 - RNA, 19 nt, Artificial Sequence
  Description of Artificial Sequence: Synthetic oligonucleotide
  Sense strand starting at position 2457 of SEQ ID NO: 1241365
gcgauuuccucugccugua

SEQ ID NO: 1266947 - RNA, 19 nt, Artificial Sequence
  Description of Artificial Sequence: Synthetic oligonucleotide
  Antisense strand to SEQ ID NO: 1266946
uacaggcagaggaaaucgc

SEQ ID NO: 1266948 - RNA, 19 nt, Artificial Sequence
  Description of Artificial Sequence: Synthetic oligonucleotide
  Sense strand starting at position 2615 of SEQ ID NO: 1241365
guacucaccgccugauuua

SEQ ID NO: 1266949 - RNA, 19 nt, Artificial Sequence
  Description of Artificial Sequence: Synthetic oligonucleotide
  Antisense strand to SEQ ID NO: 1266948
uaaaucaggcggugaguac

SEQ ID NO: 1266950 - RNA, 19 nt, Artificial Sequence
  Description of Artificial Sequence: Synthetic oligonucleotide
  Sense strand starting at position 2647 of SEQ ID NO: 1241365
ucuugaguuucucucccga

SEQ ID NO: 1266951 - RNA, 19 nt, Artificial Sequence
  Description of Artificial Sequence: Synthetic oligonucleotide
  Antisense strand to SEQ ID NO: 1266950
ucgggagagaaacucaaga

SEQ ID NO: 1266952 - RNA, 19 nt, Artificial Sequence
  Description of Artificial Sequence: Synthetic oligonucleotide
  Sense strand starting at position 2649 of SEQ ID NO: 1241365
uugaguuucucucccgaau

SEQ ID NO: 1266953 - RNA, 19 nt, Artificial Sequence
  Description of Artificial Sequence: Synthetic oligonucleotide
  Antisense strand to SEQ ID NO: 1266952
auucgggagagaaacucaa

SEQ ID NO: 1266954 - RNA, 19 nt, Artificial Sequence
  Description of Artificial Sequence: Synthetic oligonucleotide
  Sense strand starting at position 2652 of SEQ ID NO: 1241365
aguuucucucccgaaugga

SEQ ID NO: 1266955 - RNA, 19 nt, Artificial Sequence
  Description of Artificial Sequence: Synthetic oligonucleotide
  Antisense strand to SEQ ID NO: 1266954
uccauucgggagagaaacu

SEQ ID NO: 1266956 - RNA, 19 nt, Artificial Sequence
  Description of Artificial Sequence: Synthetic oligonucleotide
  Sense strand starting at position 2662 of SEQ ID NO: 1241365
ccgaauggaacuuguuaac

SEQ ID NO: 1266957 - RNA, 19 nt, Artificial Sequence
  Description of Artificial Sequence: Synthetic oligonucleotide
  Antisense strand to SEQ ID NO: 1266956
guuaacaaguuccauucgg

SEQ ID NO: 1266958 - RNA, 19 nt, Artificial Sequence
  Description of Artificial Sequence: Synthetic oligonucleotide
  Sense strand starting at position 2745 of SEQ ID NO: 1241365
gggugcaucgugcuucuua

SEQ ID NO: 1266959 - RNA, 19 nt, Artificial Sequence
  Description of Artificial Sequence: Synthetic oligonucleotide
  Antisense strand to SEQ ID NO: 1266958
uaagaagcacgaugcaccc

SEQ ID NO: 1266960 - RNA, 19 nt, Artificial Sequence
  Description of Artificial Sequence: Synthetic oligonucleotide
  Sense strand starting at position 2747 of SEQ ID NO: 1241365
gugcaucgugcuucuuaaa

SEQ ID NO: 1266961 - RNA, 19 nt, Artificial Sequence
  Description of Artificial Sequence: Synthetic oligonucleotide
  Antisense strand to SEQ ID NO: 1266960
uuuaagaagcacgaugcac

SEQ ID NO: 1266962 - RNA, 19 nt, Artificial Sequence
  Description of Artificial Sequence: Synthetic oligonucleotide
  Sense strand starting at position 2879 of SEQ ID NO: 1241365
gucugaagcggugcuucua

SEQ ID NO: 1266963 - RNA, 19 nt, Artificial Sequence
  Description of Artificial Sequence: Synthetic oligonucleotide
  Antisense strand to SEQ ID NO: 1266962
uagaagcaccgcuucagac

SEQ ID NO: 1266964 - RNA, 19 nt, Artificial Sequence
  Description of Artificial Sequence: Synthetic oligonucleotide
  Sense strand starting at position 3034 of SEQ ID NO: 1241365
caauaauugggucgcauuu

SEQ ID NO: 1266965 - RNA, 19 nt, Artificial Sequence
  Description of Artificial Sequence: Synthetic oligonucleotide
  Antisense strand to SEQ ID NO: 1266964
aaaugcgacccaauuauug

SEQ ID NO: 1266966 - RNA, 19 nt, Artificial Sequence
  Description of Artificial Sequence: Synthetic oligonucleotide
  Sense strand starting at position 3167 of SEQ ID NO: 1241365
ccgcgaugauuugcgggau

SEQ ID NO: 1266967 - RNA, 19 nt, Artificial Sequence
  Description of Artificial Sequence: Synthetic oligonucleotide
  Antisense strand to SEQ ID NO: 1266966
aucccgcaaaucaucgcgg

SEQ ID NO: 1266968 - RNA, 19 nt, Artificial Sequence
  Description of Artificial Sequence: Synthetic oligonucleotide
  Sense strand starting at position 3170 of SEQ ID NO: 1241365
cgaugauuugcgggauucu

SEQ ID NO: 1266969 - RNA, 19 nt, Artificial Sequence
  Description of Artificial Sequence: Synthetic oligonucleotide
  Antisense strand to SEQ ID NO: 1266968
agaaucccgcaaaucaucg

SEQ ID NO: 1266970 - RNA, 19 nt, Artificial Sequence
  Description of Artificial Sequence: Synthetic oligonucleotide
  Sense strand starting at position 3180 of SEQ ID NO: 1241365
cgggauucucggcauggca

SEQ ID NO: 1266971 - RNA, 19 nt, Artificial Sequence
  Description of Artificial Sequence: Synthetic oligonucleotide
  Antisense strand to SEQ ID NO: 1266970
ugccaugccgagaaucccg

SEQ ID NO: 1266972 - RNA, 19 nt, Artificial Sequence
  Description of Artificial Sequence: Synthetic oligonucleotide
  Sense strand starting at position 3516 of SEQ ID NO: 1241365
cccgcaaaguugucugaag

SEQ ID NO: 1266973 - RNA, 19 nt, Artificial Sequence
  Description of Artificial Sequence: Synthetic oligonucleotide
  Antisense strand to SEQ ID NO: 1266972
cuucagacaacuuugcggg

SEQ ID NO: 1266974 - RNA, 19 nt, Artificial Sequence
  Description of Artificial Sequence: Synthetic oligonucleotide
  Sense strand starting at position 3604 of SEQ ID NO: 1241365
gucaauuucuguucggguu

SEQ ID NO: 1266975 - RNA, 19 nt, Artificial Sequence
  Description of Artificial Sequence: Synthetic oligonucleotide
  Antisense strand to SEQ ID NO: 1266974
aacccgaacagaaauugac

SEQ ID NO: 1266976 - RNA, 19 nt, Artificial Sequence
  Description of Artificial Sequence: Synthetic oligonucleotide
  Sense strand starting at position 3605 of SEQ ID NO: 1241365
ucaauuucuguucggguuu

SEQ ID NO: 1266977 - RNA, 19 nt, Artificial Sequence
  Description of Artificial Sequence: Synthetic oligonucleotide
  Antisense strand to SEQ ID NO: 1266976
aaacccgaacagaaauuga

SEQ ID NO: 1266978 - RNA, 19 nt, Artificial Sequence
  Description of Artificial Sequence: Synthetic oligonucleotide
  Sense strand starting at position 3764 of SEQ ID NO: 1241365
gcuuguggccugagaguug

SEQ ID NO: 1266979 - RNA, 19 nt, Artificial Sequence
  Description of Artificial Sequence: Synthetic oligonucleotide
  Antisense strand to SEQ ID NO: 1266978
caacucucaggccacaagc

SEQ ID NO: 1266980 - RNA, 19 nt, Artificial Sequence
  Description of Artificial Sequence: Synthetic oligonucleotide
  Sense strand starting at position 3775 of SEQ ID NO: 1241365
gagaguugcuccuuccagu

SEQ ID NO: 1266981 - RNA, 19 nt, Artificial Sequence
  Description of Artificial Sequence: Synthetic oligonucleotide
  Antisense strand to SEQ ID NO: 1266980
acuggaaggagcaacucuc

SEQ ID NO: 1266982 - RNA, 19 nt, Artificial Sequence
  Description of Artificial Sequence: Synthetic oligonucleotide
  Sense strand starting at position 3803 of SEQ ID NO: 1241365
acuagaggugguuguaaau

SEQ ID NO: 1266983 - RNA, 19 nt, Artificial Sequence
  Description of Artificial Sequence: Synthetic oligonucleotide
  Antisense strand to SEQ ID NO: 1266982
auuuacaaccaccucuagu

SEQ ID NO: 1266984 - RNA, 19 nt, Artificial Sequence
  Description of Artificial Sequence: Synthetic oligonucleotide
  Sense strand starting at position 3839 of SEQ ID NO: 1241365
ggagaugggucucaauuug

SEQ ID NO: 1266985 - RNA, 19 nt, Artificial Sequence
  Description of Artificial Sequence: Synthetic oligonucleotide
  Antisense strand to SEQ ID NO: 1266984
caaauugagacccaucucc

SEQ ID NO: 1266986 - RNA, 19 nt, Artificial Sequence
  Description of Artificial Sequence: Synthetic oligonucleotide
  Sense strand starting at position 117 of SEQ ID NO: 1241366
acaccuggccaggguaauu

SEQ ID NO: 1266987 - RNA, 19 nt, Artificial Sequence
  Description of Artificial Sequence: Synthetic oligonucleotide
  Antisense strand to SEQ ID NO: 1266986
aauuacccuggccaggugu

SEQ ID NO: 1266988 - RNA, 19 nt, Artificial Sequence
  Description of Artificial Sequence: Synthetic oligonucleotide
  Sense strand starting at position 150 of SEQ ID NO: 1241366
uaauuaaugcaagguguua

SEQ ID NO: 1266989 - RNA, 19 nt, Artificial Sequence
  Description of Artificial Sequence: Synthetic oligonucleotide
  Antisense strand to SEQ ID NO: 1266988
uaacaccuugcauuaauua

SEQ ID NO: 1266990 - RNA, 19 nt, Artificial Sequence
  Description of Artificial Sequence: Synthetic oligonucleotide
  Sense strand starting at position 179 of SEQ ID NO: 1241366
acagguacuuugucuuuga

SEQ ID NO: 1266991 - RNA, 19 nt, Artificial Sequence
  Description of Artificial Sequence: Synthetic oligonucleotide
  Antisense strand to SEQ ID NO: 1266990
ucaaagacaaaguaccugu

SEQ ID NO: 1266992 - RNA, 19 nt, Artificial Sequence
  Description of Artificial Sequence: Synthetic oligonucleotide
  Sense strand starting at position 182 of SEQ ID NO: 1241366
gguacuuugucuuugacaa

SEQ ID NO: 1266993 - RNA, 19 nt, Artificial Sequence
  Description of Artificial Sequence: Synthetic oligonucleotide
  Antisense strand to SEQ ID NO: 1266992
uugucaaagacaaaguacc

SEQ ID NO: 1266994 - RNA, 19 nt, Artificial Sequence
  Description of Artificial Sequence: Synthetic oligonucleotide
  Sense strand starting at position 183 of SEQ ID NO: 1241366
guacuuugucuuugacaaa

SEQ ID NO: 1266995 - RNA, 19 nt, Artificial Sequence
  Description of Artificial Sequence: Synthetic oligonucleotide
  Antisense strand to SEQ ID NO: 1266994
uuugucaaagacaaaguac

SEQ ID NO: 1266996 - RNA, 19 nt, Artificial Sequence
  Description of Artificial Sequence: Synthetic oligonucleotide
  Sense strand starting at position 230 of SEQ ID NO: 1241366
gaguuuguacccuacugua

SEQ ID NO: 1266997 - RNA, 19 nt, Artificial Sequence
  Description of Artificial Sequence: Synthetic oligonucleotide
  Antisense strand to SEQ ID NO: 1266996
uacaguaggguacaaacuc

SEQ ID NO: 1266998 - RNA, 19 nt, Artificial Sequence
  Description of Artificial Sequence: Synthetic oligonucleotide
  Sense strand starting at position 248 of SEQ ID NO: 1241366
agccaaagauaucauaaug

SEQ ID NO: 1266999 - RNA, 19 nt, Artificial Sequence
  Description of Artificial Sequence: Synthetic oligonucleotide
  Antisense strand to SEQ ID NO: 1266998
cauuaugauaucuuuggcu

SEQ ID NO: 1267000 - RNA, 19 nt, Artificial Sequence
  Description of Artificial Sequence: Synthetic oligonucleotide
  Sense strand starting at position 293 of SEQ ID NO: 1241366
cugaauuucuccuagaaag

SEQ ID NO: 1267001 - RNA, 19 nt, Artificial Sequence
  Description of Artificial Sequence: Synthetic oligonucleotide
  Antisense strand to SEQ ID NO: 1267000
cuuucuaggagaaauucag

SEQ ID NO: 1267002 - RNA, 19 nt, Artificial Sequence
  Description of Artificial Sequence: Synthetic oligonucleotide
  Sense strand starting at position 349 of SEQ ID NO: 1241366
gagcauauuuguuauugca

SEQ ID NO: 1267003 - RNA, 19 nt, Artificial Sequence
  Description of Artificial Sequence: Synthetic oligonucleotide
  Antisense strand to SEQ ID NO: 1267002
ugcaauaacaaauaugcuc

SEQ ID NO: 1267004 - RNA, 19 nt, Artificial Sequence
  Description of Artificial Sequence: Synthetic oligonucleotide
  Sense strand starting at position 351 of SEQ ID NO: 1241366
gcauauuuguuauugcaaa

SEQ ID NO: 1267005 - RNA, 19 nt, Artificial Sequence
  Description of Artificial Sequence: Synthetic oligonucleotide
  Antisense strand to SEQ ID NO: 1267004
uuugcaauaacaaauaugc

SEQ ID NO: 1267006 - RNA, 19 nt, Artificial Sequence
  Description of Artificial Sequence: Synthetic oligonucleotide
  Sense strand starting at position 464 of SEQ ID NO: 1241366
uuuaauaacugcugaaaga

SEQ ID NO: 1267007 - RNA, 19 nt, Artificial Sequence
  Description of Artificial Sequence: Synthetic oligonucleotide
  Antisense strand to SEQ ID NO: 1267006
ucuuucagcaguuauuaaa

SEQ ID NO: 1267008 - RNA, 19 nt, Artificial Sequence
  Description of Artificial Sequence: Synthetic oligonucleotide
  Sense strand starting at position 493 of SEQ ID NO: 1241366
guaucuauuugucagaagu

SEQ ID NO: 1267009 - RNA, 19 nt, Artificial Sequence
  Description of Artificial Sequence: Synthetic oligonucleotide
  Antisense strand to SEQ ID NO: 1267008
acuucugacaaauagauac

SEQ ID NO: 1267010 - RNA, 19 nt, Artificial Sequence
  Description of Artificial Sequence: Synthetic oligonucleotide
  Sense strand starting at position 495 of SEQ ID NO: 1241366
aucuauuugucagaagucu

SEQ ID NO: 1267011 - RNA, 19 nt, Artificial Sequence
  Description of Artificial Sequence: Synthetic oligonucleotide
  Antisense strand to SEQ ID NO: 1267010
agacuucugacaaauagau

SEQ ID NO: 1267012 - RNA, 19 nt, Artificial Sequence
  Description of Artificial Sequence: Synthetic oligonucleotide
  Sense strand starting at position 721 of SEQ ID NO: 1241366
cuugcauuacggugauauc

SEQ ID NO: 1267013 - RNA, 19 nt, Artificial Sequence
  Description of Artificial Sequence: Synthetic oligonucleotide
  Antisense strand to SEQ ID NO: 1267012
gauaucaccguaaugcaag

SEQ ID NO: 1267014 - RNA, 19 nt, Artificial Sequence
  Description of Artificial Sequence: Synthetic oligonucleotide
  Sense strand starting at position 732 of SEQ ID NO: 1241366
gugauauccuucuaacugg

SEQ ID NO: 1267015 - RNA, 19 nt, Artificial Sequence
  Description of Artificial Sequence: Synthetic oligonucleotide
  Antisense strand to SEQ ID NO: 1267014
ccaguuagaaggauaucac

SEQ ID NO: 1267016 - RNA, 19 nt, Artificial Sequence
  Description of Artificial Sequence: Synthetic oligonucleotide
  Sense strand starting at position 808 of SEQ ID NO: 1241366
uuagcaugaucccauagaa

SEQ ID NO: 1267017 - RNA, 19 nt, Artificial Sequence
  Description of Artificial Sequence: Synthetic oligonucleotide
  Antisense strand to SEQ ID NO: 1267016
uucuaugggaucaugcuaa

SEQ ID NO: 1267018 - RNA, 19 nt, Artificial Sequence
  Description of Artificial Sequence: Synthetic oligonucleotide
  Sense strand starting at position 1194 of SEQ ID NO: 1241366
aguucuuaucaauggccua

SEQ ID NO: 1267019 - RNA, 19 nt, Artificial Sequence
  Description of Artificial Sequence: Synthetic oligonucleotide
  Antisense strand to SEQ ID NO: 1267018
uaggccauugauaagaacu

SEQ ID NO: 1267020 - RNA, 19 nt, Artificial Sequence
  Description of Artificial Sequence: Synthetic oligonucleotide
  Sense strand starting at position 2049 of SEQ ID NO: 1241366
cuaaguuacugagaauacu

SEQ ID NO: 1267021 - RNA, 19 nt, Artificial Sequence
  Description of Artificial Sequence: Synthetic oligonucleotide
  Antisense strand to SEQ ID NO: 1267020
aguauucucaguaacuuag

SEQ ID NO: 1267022 - RNA, 19 nt, Artificial Sequence
  Description of Artificial Sequence: Synthetic oligonucleotide
  Sense strand starting at position 2059 of SEQ ID NO: 1241366
gagaauacuugagaugagu

SEQ ID NO: 1267023 - RNA, 19 nt, Artificial Sequence
  Description of Artificial Sequence: Synthetic oligonucleotide
  Antisense strand to SEQ ID NO: 1267022
acucaucucaaguauucuc

SEQ ID NO: 1267024 - RNA, 19 nt, Artificial Sequence
  Description of Artificial Sequence: Synthetic oligonucleotide
  Sense strand starting at position 2079 of SEQ ID NO: 1241366
uacaaagaaugagggaaau

SEQ ID NO: 1267025 - RNA, 19 nt, Artificial Sequence
  Description of Artificial Sequence: Synthetic oligonucleotide
  Antisense strand to SEQ ID NO: 1267024
auuucccucauucuuugua

SEQ ID NO: 1267026 - RNA, 19 nt, Artificial Sequence
  Description of Artificial Sequence: Synthetic oligonucleotide
  Sense strand starting at position 2166 of SEQ ID NO: 1241366
accagauguuucuccaucu

SEQ ID NO: 1267027 - RNA, 19 nt, Artificial Sequence
  Description of Artificial Sequence: Synthetic oligonucleotide
  Antisense strand to SEQ ID NO: 1267026
agauggagaaacaucuggu

SEQ ID NO: 1267028 - RNA, 19 nt, Artificial Sequence
  Description of Artificial Sequence: Synthetic oligonucleotide
  Sense strand starting at position 2167 of SEQ ID NO: 1241366
ccagauguuucuccaucua

SEQ ID NO: 1267029 - RNA, 19 nt, Artificial Sequence
  Description of Artificial Sequence: Synthetic oligonucleotide
  Antisense strand to SEQ ID NO: 1267028
uagauggagaaacaucugg

SEQ ID NO: 1267030 - RNA, 19 nt, Artificial Sequence
  Description of Artificial Sequence: Synthetic oligonucleotide
  Sense strand starting at position 2220 of SEQ ID NO: 1241366
gaaaguugccgagacagua

SEQ ID NO: 1267031 - RNA, 19 nt, Artificial Sequence
  Description of Artificial Sequence: Synthetic oligonucleotide
  Antisense strand to SEQ ID NO: 1267030
uacugucucggcaacuuuc

SEQ ID NO: 1267032 - RNA, 19 nt, Artificial Sequence
  Description of Artificial Sequence: Synthetic oligonucleotide
  Sense strand starting at position 2249 of SEQ ID NO: 1241366
uccuuaaacuggucgucuu

SEQ ID NO: 1267033 - RNA, 19 nt, Artificial Sequence
  Description of Artificial Sequence: Synthetic oligonucleotide
  Antisense strand to SEQ ID NO: 1267032
aagacgaccaguuuaagga

SEQ ID NO: 1267034 - RNA, 19 nt, Artificial Sequence
  Description of Artificial Sequence: Synthetic oligonucleotide
  Sense strand starting at position 2250 of SEQ ID NO: 1241366
ccuuaaacuggucgucuua

SEQ ID NO: 1267035 - RNA, 19 nt, Artificial Sequence
  Description of Artificial Sequence: Synthetic oligonucleotide
  Antisense strand to SEQ ID NO: 1267034
uaagacgaccaguuuaagg

SEQ ID NO: 1267036 - RNA, 19 nt, Artificial Sequence
  Description of Artificial Sequence: Synthetic oligonucleotide
  Sense strand starting at position 2252 of SEQ ID NO: 1241366
uuaaacuggucgucuuaau

SEQ ID NO: 1267037 - RNA, 19 nt, Artificial Sequence
  Description of Artificial Sequence: Synthetic oligonucleotide
  Antisense strand to SEQ ID NO: 1267036
auuaagacgaccaguuuaa

SEQ ID NO: 1267038 - RNA, 19 nt, Artificial Sequence
  Description of Artificial Sequence: Synthetic oligonucleotide
  Sense strand starting at position 2440 of SEQ ID NO: 1241366
gcggcuaauaggugucagu

SEQ ID NO: 1267039 - RNA, 19 nt, Artificial Sequence
  Description of Artificial Sequence: Synthetic oligonucleotide
  Antisense strand to SEQ ID NO: 1267038
acugacaccuauuagccgc

SEQ ID NO: 1267040 - RNA, 19 nt, Artificial Sequence
  Description of Artificial Sequence: Synthetic oligonucleotide
  Sense strand starting at position 2483 of SEQ ID NO: 1241366
uggcuucugggccauagaa

SEQ ID NO: 1267041 - RNA, 19 nt, Artificial Sequence
  Description of Artificial Sequence: Synthetic oligonucleotide
  Antisense strand to SEQ ID NO: 1267040
uucuauggcccagaagcca

SEQ ID NO: 1267042 - RNA, 19 nt, Artificial Sequence
  Description of Artificial Sequence: Synthetic oligonucleotide
  Sense strand starting at position 2485 of SEQ ID NO: 1241366
gcuucugggccauagaaca

SEQ ID NO: 1267043 - RNA, 19 nt, Artificial Sequence
  Description of Artificial Sequence: Synthetic oligonucleotide
  Antisense strand to SEQ ID NO: 1267042
uguucuauggcccagaagc

SEQ ID NO: 1267044 - RNA, 19 nt, Artificial Sequence
  Description of Artificial Sequence: Synthetic oligonucleotide
  Sense strand starting at position 2515 of SEQ ID NO: 1241366
gccuuucgagguugacuua

SEQ ID NO: 1267045 - RNA, 19 nt, Artificial Sequence
  Description of Artificial Sequence: Synthetic oligonucleotide
  Antisense strand to SEQ ID NO: 1267044
uaagucaaccucgaaaggc

SEQ ID NO: 1267046 - RNA, 19 nt, Artificial Sequence
  Description of Artificial Sequence: Synthetic oligonucleotide
  Sense strand starting at position 2518 of SEQ ID NO: 1241366
uuucgagguugacuuaacu

SEQ ID NO: 1267047 - RNA, 19 nt, Artificial Sequence
  Description of Artificial Sequence: Synthetic oligonucleotide
  Antisense strand to SEQ ID NO: 1267046
aguuaagucaaccucgaaa

SEQ ID NO: 1267048 - RNA, 19 nt, Artificial Sequence
  Description of Artificial Sequence: Synthetic oligonucleotide
  Sense strand starting at position 2650 of SEQ ID NO: 1241366
uuuagcauuucucaaggaa

SEQ ID NO: 1267049 - RNA, 19 nt, Artificial Sequence
  Description of Artificial Sequence: Synthetic oligonucleotide
  Antisense strand to SEQ ID NO: 1267048
uuccuugagaaaugcuaaa

SEQ ID NO: 1267050 - RNA, 19 nt, Artificial Sequence
  Description of Artificial Sequence: Synthetic oligonucleotide
  Sense strand starting at position 2678 of SEQ ID NO: 1241366
gcccacagaugcuucgaaa

SEQ ID NO: 1267051 - RNA, 19 nt, Artificial Sequence
  Description of Artificial Sequence: Synthetic oligonucleotide
  Antisense strand to SEQ ID NO: 1267050
uuucgaagcaucugugggc

SEQ ID NO: 1267052 - RNA, 19 nt, Artificial Sequence
  Description of Artificial Sequence: Synthetic oligonucleotide
  Sense strand starting at position 2703 of SEQ ID NO: 1241366
guuuccugaucguugcuau

SEQ ID NO: 1267053 - RNA, 19 nt, Artificial Sequence
  Description of Artificial Sequence: Synthetic oligonucleotide
  Antisense strand to SEQ ID NO: 1267052
auagcaacgaucaggaaac

SEQ ID NO: 1267054 - RNA, 19 nt, Artificial Sequence
  Description of Artificial Sequence: Synthetic oligonucleotide
  Sense strand starting at position 2729 of SEQ ID NO: 1241366
ccaggauuaagcgagcgua

SEQ ID NO: 1267055 - RNA, 19 nt, Artificial Sequence
  Description of Artificial Sequence: Synthetic oligonucleotide
  Antisense strand to SEQ ID NO: 1267054
uacgcucgcuuaauccugg

SEQ ID NO: 1267056 - RNA, 19 nt, Artificial Sequence
  Description of Artificial Sequence: Synthetic oligonucleotide
  Sense strand starting at position 2749 of SEQ ID NO: 1241366
gcgagaagcgcucugcaaa

SEQ ID NO: 1267057 - RNA, 19 nt, Artificial Sequence
  Description of Artificial Sequence: Synthetic oligonucleotide
  Antisense strand to SEQ ID NO: 1267056
uuugcagagcgcuucucgc

SEQ ID NO: 1267058 - RNA, 19 nt, Artificial Sequence
  Description of Artificial Sequence: Synthetic oligonucleotide
  Sense strand starting at position 2750 of SEQ ID NO: 1241366
cgagaagcgcucugcaaac

SEQ ID NO: 1267059 - RNA, 19 nt, Artificial Sequence
  Description of Artificial Sequence: Synthetic oligonucleotide
  Antisense strand to SEQ ID NO: 1267058
guuugcagagcgcuucucg

SEQ ID NO: 1267060 - RNA, 19 nt, Artificial Sequence
  Description of Artificial Sequence: Synthetic oligonucleotide
  Sense strand starting at position 2786 of SEQ ID NO: 1241366
cgaagaagcugccucagaa

SEQ ID NO: 1267061 - RNA, 19 nt, Artificial Sequence
  Description of Artificial Sequence: Synthetic oligonucleotide
  Antisense strand to SEQ ID NO: 1267060
uucugaggcagcuucuucg

SEQ ID NO: 1267062 - RNA, 19 nt, Artificial Sequence
  Description of Artificial Sequence: Synthetic oligonucleotide
  Sense strand starting at position 3827 of SEQ ID NO: 1241366
ggccacuuucugcaggaga

SEQ ID NO: 1267063 - RNA, 19 nt, Artificial Sequence
  Description of Artificial Sequence: Synthetic oligonucleotide
  Antisense strand to SEQ ID NO: 1267062
ucuccugcagaaaguggcc

SEQ ID NO: 1267064 - RNA, 19 nt, Artificial Sequence
  Description of Artificial Sequence: Synthetic oligonucleotide
  Sense strand starting at position 3829 of SEQ ID NO: 1241366
ccacuuucugcaggagaag

SEQ ID NO: 1267065 - RNA, 19 nt, Artificial Sequence
  Description of Artificial Sequence: Synthetic oligonucleotide
  Antisense strand to SEQ ID NO: 1267064
cuucuccugcagaaagugg

SEQ ID NO: 1267066 - RNA, 19 nt, Artificial Sequence
  Description of Artificial Sequence: Synthetic oligonucleotide
  Sense strand starting at position 795 of SEQ ID NO: 1241367
uacaaagaaugagggaaau

SEQ ID NO: 1267067 - RNA, 19 nt, Artificial Sequence
  Description of Artificial Sequence: Synthetic oligonucleotide
  Antisense strand to SEQ ID NO: 1267066
auuucccucauucuuugua

SEQ ID NO: 1267068 - RNA, 19 nt, Artificial Sequence
  Description of Artificial Sequence: Synthetic oligonucleotide
  Sense strand starting at position 882 of SEQ ID NO: 1241367
accagauguuucuccaucu

SEQ ID NO: 1267069 - RNA, 19 nt, Artificial Sequence
  Description of Artificial Sequence: Synthetic oligonucleotide
  Antisense strand to SEQ ID NO: 1267068
agauggagaaacaucuggu

SEQ ID NO: 1267070 - RNA, 19 nt, Artificial Sequence
  Description of Artificial Sequence: Synthetic oligonucleotide
  Sense strand starting at position 883 of SEQ ID NO: 1241367
ccagauguuucuccaucua

SEQ ID NO: 1267071 - RNA, 19 nt, Artificial Sequence
  Description of Artificial Sequence: Synthetic oligonucleotide
  Antisense strand to SEQ ID NO: 1267070
uagauggagaaacaucugg

SEQ ID NO: 1267072 - RNA, 19 nt, Artificial Sequence
  Description of Artificial Sequence: Synthetic oligonucleotide
  Sense strand starting at position 936 of SEQ ID NO: 1241367
gaaaguugccgagacagua

SEQ ID NO: 1267073 - RNA, 19 nt, Artificial Sequence
  Description of Artificial Sequence: Synthetic oligonucleotide
  Antisense strand to SEQ ID NO: 1267072
uacugucucggcaacuuuc

SEQ ID NO: 1267074 - RNA, 19 nt, Artificial Sequence
  Description of Artificial Sequence: Synthetic oligonucleotide
  Sense strand starting at position 1199 of SEQ ID NO: 1241367
uggcuucugggccauagaa

SEQ ID NO: 1267075 - RNA, 19 nt, Artificial Sequence
  Description of Artificial Sequence: Synthetic oligonucleotide
  Antisense strand to SEQ ID NO: 1267074
uucuauggcccagaagcca

SEQ ID NO: 1267076 - RNA, 19 nt, Artificial Sequence
  Description of Artificial Sequence: Synthetic oligonucleotide
  Sense strand starting at position 1201 of SEQ ID NO: 1241367
gcuucugggccauagaaca

SEQ ID NO: 1267077 - RNA, 19 nt, Artificial Sequence
  Description of Artificial Sequence: Synthetic oligonucleotide
  Antisense strand to SEQ ID NO: 1267076
uguucuauggcccagaagc

SEQ ID NO: 1267078 - RNA, 19 nt, Artificial Sequence
  Description of Artificial Sequence: Synthetic oligonucleotide
  Sense strand starting at position 1234 of SEQ ID NO: 1241367
uuucgagguugacuuaacu

SEQ ID NO: 1267079 - RNA, 19 nt, Artificial Sequence
  Description of Artificial Sequence: Synthetic oligonucleotide
  Antisense strand to SEQ ID NO: 1267078
aguuaagucaaccucgaaa

SEQ ID NO: 1267080 - RNA, 19 nt, Artificial Sequence
  Description of Artificial Sequence: Synthetic oligonucleotide
  Sense strand starting at position 1366 of SEQ ID NO: 1241367
uuuagcauuucucaaggaa

SEQ ID NO: 1267081 - RNA, 19 nt, Artificial Sequence
  Description of Artificial Sequence: Synthetic oligonucleotide
  Antisense strand to SEQ ID NO: 1267080
uuccuugagaaaugcuaaa

SEQ ID NO: 1267082 - RNA, 19 nt, Artificial Sequence
  Description of Artificial Sequence: Synthetic oligonucleotide
  Sense strand starting at position 1394 of SEQ ID NO: 1241367
gcccacagaugcuucgaaa

SEQ ID NO: 1267083 - RNA, 19 nt, Artificial Sequence
  Description of Artificial Sequence: Synthetic oligonucleotide
  Antisense strand to SEQ ID NO: 1267082
uuucgaagcaucugugggc

SEQ ID NO: 1267084 - RNA, 19 nt, Artificial Sequence
  Description of Artificial Sequence: Synthetic oligonucleotide
  Sense strand starting at position 1465 of SEQ ID NO: 1241367
gcgagaagcgcucugcaaa

SEQ ID NO: 1267085 - RNA, 19 nt, Artificial Sequence
  Description of Artificial Sequence: Synthetic oligonucleotide
  Antisense strand to SEQ ID NO: 1267084
uuugcagagcgcuucucgc

SEQ ID NO: 1267086 - RNA, 19 nt, Artificial Sequence
  Description of Artificial Sequence: Synthetic oligonucleotide
  Sense strand starting at position 1502 of SEQ ID NO: 1241367
cgaagaagcugccucagaa

SEQ ID NO: 1267087 - RNA, 19 nt, Artificial Sequence
  Description of Artificial Sequence: Synthetic oligonucleotide
  Antisense strand to SEQ ID NO: 1267086
uucugaggcagcuucuucg

SEQ ID NO: 1267088 - RNA, 19 nt, Artificial Sequence
  Description of Artificial Sequence: Synthetic oligonucleotide
  Sense strand starting at position 2543 of SEQ ID NO: 1241367
ggccacuuucugcaggaga

SEQ ID NO: 1267089 - RNA, 19 nt, Artificial Sequence
  Description of Artificial Sequence: Synthetic oligonucleotide
  Antisense strand to SEQ ID NO: 1267088
ucuccugcagaaaguggcc

SEQ ID NO: 1267090 - RNA, 19 nt, Artificial Sequence
  Description of Artificial Sequence: Synthetic oligonucleotide
  Sense strand starting at position 2545 of SEQ ID NO: 1241367
ccacuuucugcaggagaag

SEQ ID NO: 1267091 - RNA, 19 nt, Artificial Sequence
  Description of Artificial Sequence: Synthetic oligonucleotide
  Antisense strand to SEQ ID NO: 1267090
cuucuccugcagaaagugg

SEQ ID NO: 1267092 - RNA, 19 nt, Artificial Sequence
  Description of Artificial Sequence: Synthetic oligonucleotide
  Sense strand starting at position 2723 of SEQ ID NO: 1241367
gucagucccuccuugggaa

SEQ ID NO: 1267093 - RNA, 19 nt, Artificial Sequence
  Description of Artificial Sequence: Synthetic oligonucleotide
  Antisense strand to SEQ ID NO: 1267092
uucccaaggagggacugac

SEQ ID NO: 1267094 - RNA, 19 nt, Artificial Sequence
  Description of Artificial Sequence: Synthetic oligonucleotide
  Sense strand starting at position 2765 of SEQ ID NO: 1241367
ggcucagagaaauguguua

SEQ ID NO: 1267095 - RNA, 19 nt, Artificial Sequence
  Description of Artificial Sequence: Synthetic oligonucleotide
  Antisense strand to SEQ ID NO: 1267094
uaacacauuucucugagcc

SEQ ID NO: 1267096 - RNA, 19 nt, Artificial Sequence
  Description of Artificial Sequence: Synthetic oligonucleotide
  Sense strand starting at position 2767 of SEQ ID NO: 1241367
cucagagaaauguguuaga

SEQ ID NO: 1267097 - RNA, 19 nt, Artificial Sequence
  Description of Artificial Sequence: Synthetic oligonucleotide
  Antisense strand to SEQ ID NO: 1267096
ucuaacacauuucucugag

SEQ ID NO: 1267098 - RNA, 19 nt, Artificial Sequence
  Description of Artificial Sequence: Synthetic oligonucleotide
  Sense strand starting at position 2782 of SEQ ID NO: 1241367
uagaguguuguuuaaucug

SEQ ID NO: 1267099 - RNA, 19 nt, Artificial Sequence
  Description of Artificial Sequence: Synthetic oligonucleotide
  Antisense strand to SEQ ID NO: 1267098
cagauuaaacaacacucua

SEQ ID NO: 1267100 - RNA, 19 nt, Artificial Sequence
  Description of Artificial Sequence: Synthetic oligonucleotide
  Sense strand starting at position 2790 of SEQ ID NO: 1241367
uguuuaaucuguuucuaac

SEQ ID NO: 1267101 - RNA, 19 nt, Artificial Sequence
  Description of Artificial Sequence: Synthetic oligonucleotide
  Antisense strand to SEQ ID NO: 1267100
guuagaaacagauuaaaca

SEQ ID NO: 1267102 - RNA, 19 nt, Artificial Sequence
  Description of Artificial Sequence: Synthetic oligonucleotide
  Sense strand starting at position 2826 of SEQ ID NO: 1241367
ucacguguuccggaaacuu

SEQ ID NO: 1267103 - RNA, 19 nt, Artificial Sequence
  Description of Artificial Sequence: Synthetic oligonucleotide
  Antisense strand to SEQ ID NO: 1267102
aaguuuccggaacacguga

SEQ ID NO: 1267104 - RNA, 19 nt, Artificial Sequence
  Description of Artificial Sequence: Synthetic oligonucleotide
  Sense strand starting at position 2859 of SEQ ID NO: 1241367
gaaucuacacugugggaau

SEQ ID NO: 1267105 - RNA, 19 nt, Artificial Sequence
  Description of Artificial Sequence: Synthetic oligonucleotide
  Antisense strand to SEQ ID NO: 1267104
auucccacaguguagauuc

SEQ ID NO: 1267106 - RNA, 19 nt, Artificial Sequence
  Description of Artificial Sequence: Synthetic oligonucleotide
  Sense strand starting at position 2994 of SEQ ID NO: 1241367
ugccuugugggaugacauu

SEQ ID NO: 1267107 - RNA, 19 nt, Artificial Sequence
  Description of Artificial Sequence: Synthetic oligonucleotide
  Antisense strand to SEQ ID NO: 1267106
aaugucaucccacaaggca

SEQ ID NO: 1267108 - RNA, 19 nt, Artificial Sequence
  Description of Artificial Sequence: Synthetic oligonucleotide
  Sense strand starting at position 3034 of SEQ ID NO: 1241367
aggaccuuuggaugucaga

SEQ ID NO: 1267109 - RNA, 19 nt, Artificial Sequence
  Description of Artificial Sequence: Synthetic oligonucleotide
  Antisense strand to SEQ ID NO: 1267108
ucugacauccaaagguccu

SEQ ID NO: 1267110 - RNA, 19 nt, Artificial Sequence
  Description of Artificial Sequence: Synthetic oligonucleotide
  Sense strand starting at position 3045 of SEQ ID NO: 1241367
augucagaaucccuaguua

SEQ ID NO: 1267111 - RNA, 19 nt, Artificial Sequence
  Description of Artificial Sequence: Synthetic oligonucleotide
  Antisense strand to SEQ ID NO: 1267110
uaacuagggauucugacau

SEQ ID NO: 1267112 - RNA, 19 nt, Artificial Sequence
  Description of Artificial Sequence: Synthetic oligonucleotide
  Sense strand starting at position 3120 of SEQ ID NO: 1241367
guuugccaucuggaagaaa

SEQ ID NO: 1267113 - RNA, 19 nt, Artificial Sequence
  Description of Artificial Sequence: Synthetic oligonucleotide
  Antisense strand to SEQ ID NO: 1267112
uuucuuccagauggcaaac

SEQ ID NO: 1267114 - RNA, 19 nt, Artificial Sequence
  Description of Artificial Sequence: Synthetic oligonucleotide
  Sense strand starting at position 3123 of SEQ ID NO: 1241367
ugccaucuggaagaaaguu

SEQ ID NO: 1267115 - RNA, 19 nt, Artificial Sequence
  Description of Artificial Sequence: Synthetic oligonucleotide
  Antisense strand to SEQ ID NO: 1267114
aacuuucuuccagauggca

SEQ ID NO: 1267116 - RNA, 19 nt, Artificial Sequence
  Description of Artificial Sequence: Synthetic oligonucleotide
  Sense strand starting at position 3177 of SEQ ID NO: 1241367
gcuugauuauauguuuaca

SEQ ID NO: 1267117 - RNA, 19 nt, Artificial Sequence
  Description of Artificial Sequence: Synthetic oligonucleotide
  Antisense strand to SEQ ID NO: 1267116
uguaaacauauaaucaagc

SEQ ID NO: 1267118 - RNA, 19 nt, Artificial Sequence
  Description of Artificial Sequence: Synthetic oligonucleotide
  Sense strand starting at position 3193 of SEQ ID NO: 1241367
acaagauagguuuguguau

SEQ ID NO: 1267119 - RNA, 19 nt, Artificial Sequence
  Description of Artificial Sequence: Synthetic oligonucleotide
  Antisense strand to SEQ ID NO: 1267118
auacacaaaccuaucuugu

SEQ ID NO: 1267120 - RNA, 19 nt, Artificial Sequence
  Description of Artificial Sequence: Synthetic oligonucleotide
  Sense strand starting at position 3194 of SEQ ID NO: 1241367
caagauagguuuguguauc

SEQ ID NO: 1267121 - RNA, 19 nt, Artificial Sequence
  Description of Artificial Sequence: Synthetic oligonucleotide
  Antisense strand to SEQ ID NO: 1267120
gauacacaaaccuaucuug

SEQ ID NO: 1267122 - RNA, 19 nt, Artificial Sequence
  Description of Artificial Sequence: Synthetic oligonucleotide
  Sense strand starting at position 3343 of SEQ ID NO: 1241367
uucuacuugucaucuagag

SEQ ID NO: 1267123 - RNA, 19 nt, Artificial Sequence
  Description of Artificial Sequence: Synthetic oligonucleotide
  Antisense strand to SEQ ID NO: 1267122
cucuagaugacaaguagaa

SEQ ID NO: 1267124 - RNA, 19 nt, Artificial Sequence
  Description of Artificial Sequence: Synthetic oligonucleotide
  Sense strand starting at position 3352 of SEQ ID NO: 1241367
ucaucuagaggcugugaau

SEQ ID NO: 1267125 - RNA, 19 nt, Artificial Sequence
  Description of Artificial Sequence: Synthetic oligonucleotide
  Antisense strand to SEQ ID NO: 1267124
auucacagccucuagauga

SEQ ID NO: 1267126 - RNA, 19 nt, Artificial Sequence
  Description of Artificial Sequence: Synthetic oligonucleotide
  Sense strand starting at position 3479 of SEQ ID NO: 1241367
uuggguuugacaggaauag

SEQ ID NO: 1267127 - RNA, 19 nt, Artificial Sequence
  Description of Artificial Sequence: Synthetic oligonucleotide
  Antisense strand to SEQ ID NO: 1267126
cuauuccugucaaacccaa

SEQ ID NO: 1267128 - RNA, 19 nt, Artificial Sequence
  Description of Artificial Sequence: Synthetic oligonucleotide
  Sense strand starting at position 3580 of SEQ ID NO: 1241367
aagcgaauuugugcuagag

SEQ ID NO: 1267129 - RNA, 19 nt, Artificial Sequence
  Description of Artificial Sequence: Synthetic oligonucleotide
  Antisense strand to SEQ ID NO: 1267128
cucuagcacaaauucgcuu

SEQ ID NO: 1267130 - RNA, 19 nt, Artificial Sequence
  Description of Artificial Sequence: Synthetic oligonucleotide
  Sense strand starting at position 3589 of SEQ ID NO: 1241367
ugugcuagagacuauaaau

SEQ ID NO: 1267131 - RNA, 19 nt, Artificial Sequence
  Description of Artificial Sequence: Synthetic oligonucleotide
  Antisense strand to SEQ ID NO: 1267130
auuuauagucucuagcaca

SEQ ID NO: 1267132 - RNA, 19 nt, Artificial Sequence
  Description of Artificial Sequence: Synthetic oligonucleotide
  Sense strand starting at position 3622 of SEQ ID NO: 1241367
aucaguauguaccugacau

SEQ ID NO: 1267133 - RNA, 19 nt, Artificial Sequence
  Description of Artificial Sequence: Synthetic oligonucleotide
  Antisense strand to SEQ ID NO: 1267132
augucagguacauacugau

SEQ ID NO: 1267134 - RNA, 19 nt, Artificial Sequence
  Description of Artificial Sequence: Synthetic oligonucleotide
  Sense strand starting at position 3752 of SEQ ID NO: 1241367
ccacaauuagccgagugau

SEQ ID NO: 1267135 - RNA, 19 nt, Artificial Sequence
  Description of Artificial Sequence: Synthetic oligonucleotide
  Antisense strand to SEQ ID NO: 1267134
aucacucggcuaauugugg

SEQ ID NO: 1267136 - RNA, 19 nt, Artificial Sequence
  Description of Artificial Sequence: Synthetic oligonucleotide
  Sense strand starting at position 3755 of SEQ ID NO: 1241367
caauuagccgagugauaau

SEQ ID NO: 1267137 - RNA, 19 nt, Artificial Sequence
  Description of Artificial Sequence: Synthetic oligonucleotide
  Antisense strand to SEQ ID NO: 1267136
auuaucacucggcuaauug

SEQ ID NO: 1267138 - RNA, 19 nt, Artificial Sequence
  Description of Artificial Sequence: Synthetic oligonucleotide
  Sense strand starting at position 3762 of SEQ ID NO: 1241367
ccgagugauaauggacuua

SEQ ID NO: 1267139 - RNA, 19 nt, Artificial Sequence
  Description of Artificial Sequence: Synthetic oligonucleotide
  Antisense strand to SEQ ID NO: 1267138
uaaguccauuaucacucgg

SEQ ID NO: 1267140 - RNA, 19 nt, Artificial Sequence
  Description of Artificial Sequence: Synthetic oligonucleotide
  Sense strand starting at position 3850 of SEQ ID NO: 1241367
auuguauuccuguaauucu

SEQ ID NO: 1267141 - RNA, 19 nt, Artificial Sequence
  Description of Artificial Sequence: Synthetic oligonucleotide
  Antisense strand to SEQ ID NO: 1267140
agaauuacaggaauacaau

SEQ ID NO: 1267142 - RNA, 19 nt, Artificial Sequence
  Description of Artificial Sequence: Synthetic oligonucleotide
  Sense strand starting at position 3940 of SEQ ID NO: 1241367
augaauagguuaucuugaa

SEQ ID NO: 1267143 - RNA, 19 nt, Artificial Sequence
  Description of Artificial Sequence: Synthetic oligonucleotide
  Antisense strand to SEQ ID NO: 1267142
uucaagauaaccuauucau

SEQ ID NO: 1267144 - RNA, 19 nt, Artificial Sequence
  Description of Artificial Sequence: Synthetic oligonucleotide
  Sense strand starting at position 3941 of SEQ ID NO: 1241367
ugaauagguuaucuugaaa

SEQ ID NO: 1267145 - RNA, 19 nt, Artificial Sequence
  Description of Artificial Sequence: Synthetic oligonucleotide
  Antisense strand to SEQ ID NO: 1267144
uuucaagauaaccuauuca

SEQ ID NO: 1267146 - RNA, 19 nt, Artificial Sequence
  Description of Artificial Sequence: Synthetic oligonucleotide
  Sense strand starting at position 114 of SEQ ID NO: 1241368
gcagcaauugaugggaaca

SEQ ID NO: 1267147 - RNA, 19 nt, Artificial Sequence
  Description of Artificial Sequence: Synthetic oligonucleotide
  Antisense strand to SEQ ID NO: 1267146
uguucccaucaauugcugc

SEQ ID NO: 1267148 - RNA, 19 nt, Artificial Sequence
  Description of Artificial Sequence: Synthetic oligonucleotide
  Sense strand starting at position 245 of SEQ ID NO: 1241368
cgaucucuacuccaagguu

SEQ ID NO: 1267149 - RNA, 19 nt, Artificial Sequence
  Description of Artificial Sequence: Synthetic oligonucleotide
  Antisense strand to SEQ ID NO: 1267148
aaccuuggaguagagaucg

SEQ ID NO: 1267150 - RNA, 19 nt, Artificial Sequence
  Description of Artificial Sequence: Synthetic oligonucleotide
  Sense strand starting at position 327 of SEQ ID NO: 1241368
aggaaagacucgccaguga

SEQ ID NO: 1267151 - RNA, 19 nt, Artificial Sequence
  Description of Artificial Sequence: Synthetic oligonucleotide
  Antisense strand to SEQ ID NO: 1267150
ucacuggcgagucuuuccu

SEQ ID NO: 1267152 - RNA, 19 nt, Artificial Sequence
  Description of Artificial Sequence: Synthetic oligonucleotide
  Sense strand starting at position 331 of SEQ ID NO: 1241368
aagacucgccagugauuag

SEQ ID NO: 1267153 - RNA, 19 nt, Artificial Sequence
  Description of Artificial Sequence: Synthetic oligonucleotide
  Antisense strand to SEQ ID NO: 1267152
cuaaucacuggcgagucuu

SEQ ID NO: 1267154 - RNA, 19 nt, Artificial Sequence
  Description of Artificial Sequence: Synthetic oligonucleotide
  Sense strand starting at position 373 of SEQ ID NO: 1241368
acauguguaucccuaugga

SEQ ID NO: 1267155 - RNA, 19 nt, Artificial Sequence
  Description of Artificial Sequence: Synthetic oligonucleotide
  Antisense strand to SEQ ID NO: 1267154
uccauagggauacacaugu

SEQ ID NO: 1267156 - RNA, 19 nt, Artificial Sequence
  Description of Artificial Sequence: Synthetic oligonucleotide
  Sense strand starting at position 376 of SEQ ID NO: 1241368
uguguaucccuauggauag

SEQ ID NO: 1267157 - RNA, 19 nt, Artificial Sequence
  Description of Artificial Sequence: Synthetic oligonucleotide
  Antisense strand to SEQ ID NO: 1267156
cuauccauagggauacaca

SEQ ID NO: 1267158 - RNA, 19 nt, Artificial Sequence
  Description of Artificial Sequence: Synthetic oligonucleotide
  Sense strand starting at position 535 of SEQ ID NO: 1241368
ccaacucagucugcuagau

SEQ ID NO: 1267159 - RNA, 19 nt, Artificial Sequence
  Description of Artificial Sequence: Synthetic oligonucleotide
  Antisense strand to SEQ ID NO: 1267158
aucuagcagacugaguugg

SEQ ID NO: 1267160 - RNA, 19 nt, Artificial Sequence
  Description of Artificial Sequence: Synthetic oligonucleotide
  Sense strand starting at position 819 of SEQ ID NO: 1241368
uagaguguggcagacauua

SEQ ID NO: 1267161 - RNA, 19 nt, Artificial Sequence
  Description of Artificial Sequence: Synthetic oligonucleotide
  Antisense strand to SEQ ID NO: 1267160
uaaugucugccacacucua

SEQ ID NO: 1267162 - RNA, 19 nt, Artificial Sequence
  Description of Artificial Sequence: Synthetic oligonucleotide
  Sense strand starting at position 821 of SEQ ID NO: 1241368
gaguguggcagacauuaau

SEQ ID NO: 1267163 - RNA, 19 nt, Artificial Sequence
  Description of Artificial Sequence: Synthetic oligonucleotide
  Antisense strand to SEQ ID NO: 1267162
auuaaugucugccacacuc

SEQ ID NO: 1267164 - RNA, 19 nt, Artificial Sequence
  Description of Artificial Sequence: Synthetic oligonucleotide
  Sense strand starting at position 827 of SEQ ID NO: 1241368
ggcagacauuaauuagcuu

SEQ ID NO: 1267165 - RNA, 19 nt, Artificial Sequence
  Description of Artificial Sequence: Synthetic oligonucleotide
  Antisense strand to SEQ ID NO: 1267164
aagcuaauuaaugucugcc

SEQ ID NO: 1267166 - RNA, 19 nt, Artificial Sequence
  Description of Artificial Sequence: Synthetic oligonucleotide
  Sense strand starting at position 830 of SEQ ID NO: 1241368
agacauuaauuagcuuaga

SEQ ID NO: 1267167 - RNA, 19 nt, Artificial Sequence
  Description of Artificial Sequence: Synthetic oligonucleotide
  Antisense strand to SEQ ID NO: 1267166
ucuaagcuaauuaaugucu

SEQ ID NO: 1267168 - RNA, 19 nt, Artificial Sequence
  Description of Artificial Sequence: Synthetic oligonucleotide
  Sense strand starting at position 841 of SEQ ID NO: 1241368
agcuuagaaucccugaaga

SEQ ID NO: 1267169 - RNA, 19 nt, Artificial Sequence
  Description of Artificial Sequence: Synthetic oligonucleotide
  Antisense strand to SEQ ID NO: 1267168
ucuucagggauucuaagcu

SEQ ID NO: 1267170 - RNA, 19 nt, Artificial Sequence
  Description of Artificial Sequence: Synthetic oligonucleotide
  Sense strand starting at position 857 of SEQ ID NO: 1241368
agaaaugccuuaccuaaug

SEQ ID NO: 1267171 - RNA, 19 nt, Artificial Sequence
  Description of Artificial Sequence: Synthetic oligonucleotide
  Antisense strand to SEQ ID NO: 1267170
cauuagguaaggcauuucu

SEQ ID NO: 1267172 - RNA, 19 nt, Artificial Sequence
  Description of Artificial Sequence: Synthetic oligonucleotide
  Sense strand starting at position 876 of SEQ ID NO: 1241368
gcuaaaugccuuuggauua

SEQ ID NO: 1267173 - RNA, 19 nt, Artificial Sequence
  Description of Artificial Sequence: Synthetic oligonucleotide
  Antisense strand to SEQ ID NO: 1267172
uaauccaaaggcauuuagc

SEQ ID NO: 1267174 - RNA, 19 nt, Artificial Sequence
  Description of Artificial Sequence: Synthetic oligonucleotide
  Sense strand starting at position 889 of SEQ ID NO: 1241368
ggauuacaccuuuggaucu

SEQ ID NO: 1267175 - RNA, 19 nt, Artificial Sequence
  Description of Artificial Sequence: Synthetic oligonucleotide
  Antisense strand to SEQ ID NO: 1267174
agauccaaagguguaaucc

SEQ ID NO: 1267176 - RNA, 19 nt, Artificial Sequence
  Description of Artificial Sequence: Synthetic oligonucleotide
  Sense strand starting at position 902 of SEQ ID NO: 1241368
ggaucuguacuacgaguga

SEQ ID NO: 1267177 - RNA, 19 nt, Artificial Sequence
  Description of Artificial Sequence: Synthetic oligonucleotide
  Antisense strand to SEQ ID NO: 1267176
ucacucguaguacagaucc

SEQ ID NO: 1267178 - RNA, 19 nt, Artificial Sequence
  Description of Artificial Sequence: Synthetic oligonucleotide
  Sense strand starting at position 918 of SEQ ID NO: 1241368
ugaccagaagcaugguaaa

SEQ ID NO: 1267179 - RNA, 19 nt, Artificial Sequence
  Description of Artificial Sequence: Synthetic oligonucleotide
  Antisense strand to SEQ ID NO: 1267178
uuuaccaugcuucugguca

SEQ ID NO: 1267180 - RNA, 19 nt, Artificial Sequence
  Description of Artificial Sequence: Synthetic oligonucleotide
  Sense strand starting at position 1043 of SEQ ID NO: 1241368
ucugcacuuguagaacuaa

SEQ ID NO: 1267181 - RNA, 19 nt, Artificial Sequence
  Description of Artificial Sequence: Synthetic oligonucleotide
  Antisense strand to SEQ ID NO: 1267180
uuaguucuacaagugcaga

SEQ ID NO: 1267182 - RNA, 19 nt, Artificial Sequence
  Description of Artificial Sequence: Synthetic oligonucleotide
  Sense strand starting at position 1099 of SEQ ID NO: 1241368
gaagaccuguguuuccaau

SEQ ID NO: 1267183 - RNA, 19 nt, Artificial Sequence
  Description of Artificial Sequence: Synthetic oligonucleotide
  Antisense strand to SEQ ID NO: 1267182
auuggaaacacaggucuuc

SEQ ID NO: 1267184 - RNA, 19 nt, Artificial Sequence
  Description of Artificial Sequence: Synthetic oligonucleotide
  Sense strand starting at position 1129 of SEQ ID NO: 1241368
uucugauuacuuuagcaga

SEQ ID NO: 1267185 - RNA, 19 nt, Artificial Sequence
  Description of Artificial Sequence: Synthetic oligonucleotide
  Antisense strand to SEQ ID NO: 1267184
ucugcuaaaguaaucagaa

SEQ ID NO: 1267186 - RNA, 19 nt, Artificial Sequence
  Description of Artificial Sequence: Synthetic oligonucleotide
  Sense strand starting at position 1131 of SEQ ID NO: 1241368
cugauuacuuuagcagauu

SEQ ID NO: 1267187 - RNA, 19 nt, Artificial Sequence
  Description of Artificial Sequence: Synthetic oligonucleotide
  Antisense strand to SEQ ID NO: 1267186
aaucugcuaaaguaaucag

SEQ ID NO: 1267188 - RNA, 19 nt, Artificial Sequence
  Description of Artificial Sequence: Synthetic oligonucleotide
  Sense strand starting at position 1132 of SEQ ID NO: 1241368
ugauuacuuuagcagauuu

SEQ ID NO: 1267189 - RNA, 19 nt, Artificial Sequence
  Description of Artificial Sequence: Synthetic oligonucleotide
  Antisense strand to SEQ ID NO: 1267188
aaaucugcuaaaguaauca

SEQ ID NO: 1267190 - RNA, 19 nt, Artificial Sequence
  Description of Artificial Sequence: Synthetic oligonucleotide
  Sense strand starting at position 1226 of SEQ ID NO: 1241368
cauuauuaacgugacgcaa

SEQ ID NO: 1267191 - RNA, 19 nt, Artificial Sequence
  Description of Artificial Sequence: Synthetic oligonucleotide
  Antisense strand to SEQ ID NO: 1267190
uugcgucacguuaauaaug

SEQ ID NO: 1267192 - RNA, 19 nt, Artificial Sequence
  Description of Artificial Sequence: Synthetic oligonucleotide
  Sense strand starting at position 1353 of SEQ ID NO: 1241368
cccguuccaccagagauga

SEQ ID NO: 1267193 - RNA, 19 nt, Artificial Sequence
  Description of Artificial Sequence: Synthetic oligonucleotide
  Antisense strand to SEQ ID NO: 1267192
ucaucucugguggaacggg

SEQ ID NO: 1267194 - RNA, 19 nt, Artificial Sequence
  Description of Artificial Sequence: Synthetic oligonucleotide
  Sense strand starting at position 2128 of SEQ ID NO: 1241368
agggucuccaggugucuaa

SEQ ID NO: 1267195 - RNA, 19 nt, Artificial Sequence
  Description of Artificial Sequence: Synthetic oligonucleotide
  Antisense strand to SEQ ID NO: 1267194
uuagacaccuggagacccu

SEQ ID NO: 1267196 - RNA, 19 nt, Artificial Sequence
  Description of Artificial Sequence: Synthetic oligonucleotide
  Sense strand starting at position 2564 of SEQ ID NO: 1241368
agugaagggcguugcauuu

SEQ ID NO: 1267197 - RNA, 19 nt, Artificial Sequence
  Description of Artificial Sequence: Synthetic oligonucleotide
  Antisense strand to SEQ ID NO: 1267196
aaaugcaacgcccuucacu

SEQ ID NO: 1267198 - RNA, 19 nt, Artificial Sequence
  Description of Artificial Sequence: Synthetic oligonucleotide
  Sense strand starting at position 2921 of SEQ ID NO: 1241368
cgcacaucuggugagugau

SEQ ID NO: 1267199 - RNA, 19 nt, Artificial Sequence
  Description of Artificial Sequence: Synthetic oligonucleotide
  Antisense strand to SEQ ID NO: 1267198
aucacucaccagaugugcg

SEQ ID NO: 1267200 - RNA, 19 nt, Artificial Sequence
  Description of Artificial Sequence: Synthetic oligonucleotide
  Sense strand starting at position 2987 of SEQ ID NO: 1241368
ucugauuggcccgagggua

SEQ ID NO: 1267201 - RNA, 19 nt, Artificial Sequence
  Description of Artificial Sequence: Synthetic oligonucleotide
  Antisense strand to SEQ ID NO: 1267200
uacccucgggccaaucaga

SEQ ID NO: 1267202 - RNA, 19 nt, Artificial Sequence
  Description of Artificial Sequence: Synthetic oligonucleotide
  Sense strand starting at position 3133 of SEQ ID NO: 1241368
gauucuuaguaucugagga

SEQ ID NO: 1267203 - RNA, 19 nt, Artificial Sequence
  Description of Artificial Sequence: Synthetic oligonucleotide
  Antisense strand to SEQ ID NO: 1267202
uccucagauacuaagaauc

SEQ ID NO: 1267204 - RNA, 19 nt, Artificial Sequence
  Description of Artificial Sequence: Synthetic oligonucleotide
  Sense strand starting at position 3160 of SEQ ID NO: 1241368
ucaugucuuccagguuaug

SEQ ID NO: 1267205 - RNA, 19 nt, Artificial Sequence
  Description of Artificial Sequence: Synthetic oligonucleotide
  Antisense strand to SEQ ID NO: 1267204
cauaaccuggaagacauga

SEQ ID NO: 1267206 - RNA, 19 nt, Artificial Sequence
  Description of Artificial Sequence: Synthetic oligonucleotide
  Sense strand starting at position 3282 of SEQ ID NO: 1241368
uuccuaugucugcaggauu

SEQ ID NO: 1267207 - RNA, 19 nt, Artificial Sequence
  Description of Artificial Sequence: Synthetic oligonucleotide
  Antisense strand to SEQ ID NO: 1267206
aauccugcagacauaggaa

SEQ ID NO: 1267208 - RNA, 19 nt, Artificial Sequence
  Description of Artificial Sequence: Synthetic oligonucleotide
  Sense strand starting at position 3338 of SEQ ID NO: 1241368
accuuuauccuauagggca

SEQ ID NO: 1267209 - RNA, 19 nt, Artificial Sequence
  Description of Artificial Sequence: Synthetic oligonucleotide
  Antisense strand to SEQ ID NO: 1267208
ugcccuauaggauaaaggu

SEQ ID NO: 1267210 - RNA, 19 nt, Artificial Sequence
  Description of Artificial Sequence: Synthetic oligonucleotide
  Sense strand starting at position 3460 of SEQ ID NO: 1241368
ccagauacugggugucaga

SEQ ID NO: 1267211 - RNA, 19 nt, Artificial Sequence
  Description of Artificial Sequence: Synthetic oligonucleotide
  Antisense strand to SEQ ID NO: 1267210
ucugacacccaguaucugg

SEQ ID NO: 1267212 - RNA, 19 nt, Artificial Sequence
  Description of Artificial Sequence: Synthetic oligonucleotide
  Sense strand starting at position 3469 of SEQ ID NO: 1241368
gggugucagaaauggaauu

SEQ ID NO: 1267213 - RNA, 19 nt, Artificial Sequence
  Description of Artificial Sequence: Synthetic oligonucleotide
  Antisense strand to SEQ ID NO: 1267212
aauuccauuucugacaccc

SEQ ID NO: 1267214 - RNA, 19 nt, Artificial Sequence
  Description of Artificial Sequence: Synthetic oligonucleotide
  Sense strand starting at position 3610 of SEQ ID NO: 1241368
aggacuuuauuacaggaaa

SEQ ID NO: 1267215 - RNA, 19 nt, Artificial Sequence
  Description of Artificial Sequence: Synthetic oligonucleotide
  Antisense strand to SEQ ID NO: 1267214
uuuccuguaauaaaguccu

SEQ ID NO: 1267216 - RNA, 19 nt, Artificial Sequence
  Description of Artificial Sequence: Synthetic oligonucleotide
  Sense strand starting at position 3714 of SEQ ID NO: 1241368
guggguugcauccaaguga

SEQ ID NO: 1267217 - RNA, 19 nt, Artificial Sequence
  Description of Artificial Sequence: Synthetic oligonucleotide
  Antisense strand to SEQ ID NO: 1267216
ucacuuggaugcaacccac

SEQ ID NO: 1267218 - RNA, 19 nt, Artificial Sequence
  Description of Artificial Sequence: Synthetic oligonucleotide
  Sense strand starting at position 3718 of SEQ ID NO: 1241368
guugcauccaagugaagga

SEQ ID NO: 1267219 - RNA, 19 nt, Artificial Sequence
  Description of Artificial Sequence: Synthetic oligonucleotide
  Antisense strand to SEQ ID NO: 1267218
uccuucacuuggaugcaac

SEQ ID NO: 1267220 - RNA, 19 nt, Artificial Sequence
  Description of Artificial Sequence: Synthetic oligonucleotide
  Sense strand starting at position 3787 of SEQ ID NO: 1241368
ccucuuuguccuggaggga

SEQ ID NO: 1267221 - RNA, 19 nt, Artificial Sequence
  Description of Artificial Sequence: Synthetic oligonucleotide
  Antisense strand to SEQ ID NO: 1267220
ucccuccaggacaaagagg

SEQ ID NO: 1267222 - RNA, 19 nt, Artificial Sequence
  Description of Artificial Sequence: Synthetic oligonucleotide
  Sense strand starting at position 3852 of SEQ ID NO: 1241368
agaaauggcccaggugaga

SEQ ID NO: 1267223 - RNA, 19 nt, Artificial Sequence
  Description of Artificial Sequence: Synthetic oligonucleotide
  Antisense strand to SEQ ID NO: 1267222
ucucaccugggccauuucu

SEQ ID NO: 1267224 - RNA, 19 nt, Artificial Sequence
  Description of Artificial Sequence: Synthetic oligonucleotide
  Sense strand starting at position 3900 of SEQ ID NO: 1241368
cccagaaugauguguagag

SEQ ID NO: 1267225 - RNA, 19 nt, Artificial Sequence
  Description of Artificial Sequence: Synthetic oligonucleotide
  Antisense strand to SEQ ID NO: 1267224
cucuacacaucauucuggg

SEQ ID NO: 1267226 - RNA, 19 nt, Artificial Sequence
  Description of Artificial Sequence: Synthetic oligonucleotide
  Sense strand starting at position 59 of SEQ ID NO: 1241369
ccaacucagucugcuagau

SEQ ID NO: 1267227 - RNA, 19 nt, Artificial Sequence
  Description of Artificial Sequence: Synthetic oligonucleotide
  Antisense strand to SEQ ID NO: 1267226
aucuagcagacugaguugg

SEQ ID NO: 1267228 - RNA, 19 nt, Artificial Sequence
  Description of Artificial Sequence: Synthetic oligonucleotide
  Sense strand starting at position 343 of SEQ ID NO: 1241369
uagaguguggcagacauua

SEQ ID NO: 1267229 - RNA, 19 nt, Artificial Sequence
  Description of Artificial Sequence: Synthetic oligonucleotide
  Antisense strand to SEQ ID NO: 1267228
uaaugucugccacacucua

SEQ ID NO: 1267230 - RNA, 19 nt, Artificial Sequence
  Description of Artificial Sequence: Synthetic oligonucleotide
  Sense strand starting at position 345 of SEQ ID NO: 1241369
gaguguggcagacauuaau

SEQ ID NO: 1267231 - RNA, 19 nt, Artificial Sequence
  Description of Artificial Sequence: Synthetic oligonucleotide
  Antisense strand to SEQ ID NO: 1267230
auuaaugucugccacacuc

SEQ ID NO: 1267232 - RNA, 19 nt, Artificial Sequence
  Description of Artificial Sequence: Synthetic oligonucleotide
  Sense strand starting at position 351 of SEQ ID NO: 1241369
ggcagacauuaauuagcuu

SEQ ID NO: 1267233 - RNA, 19 nt, Artificial Sequence
  Description of Artificial Sequence: Synthetic oligonucleotide
  Antisense strand to SEQ ID NO: 1267232
aagcuaauuaaugucugcc

SEQ ID NO: 1267234 - RNA, 19 nt, Artificial Sequence
  Description of Artificial Sequence: Synthetic oligonucleotide
  Sense strand starting at position 354 of SEQ ID NO: 1241369
agacauuaauuagcuuaga

SEQ ID NO: 1267235 - RNA, 19 nt, Artificial Sequence
  Description of Artificial Sequence: Synthetic oligonucleotide
  Antisense strand to SEQ ID NO: 1267234
ucuaagcuaauuaaugucu

SEQ ID NO: 1267236 - RNA, 19 nt, Artificial Sequence
  Description of Artificial Sequence: Synthetic oligonucleotide
  Sense strand starting at position 365 of SEQ ID NO: 1241369
agcuuagaaucccugaaga

SEQ ID NO: 1267237 - RNA, 19 nt, Artificial Sequence
  Description of Artificial Sequence: Synthetic oligonucleotide
  Antisense strand to SEQ ID NO: 1267236
ucuucagggauucuaagcu

SEQ ID NO: 1267238 - RNA, 19 nt, Artificial Sequence
  Description of Artificial Sequence: Synthetic oligonucleotide
  Sense strand starting at position 381 of SEQ ID NO: 1241369
agaaaugccuuaccuaaug

SEQ ID NO: 1267239 - RNA, 19 nt, Artificial Sequence
  Description of Artificial Sequence: Synthetic oligonucleotide
  Antisense strand to SEQ ID NO: 1267238
cauuagguaaggcauuucu

SEQ ID NO: 1267240 - RNA, 19 nt, Artificial Sequence
  Description of Artificial Sequence: Synthetic oligonucleotide
  Sense strand starting at position 400 of SEQ ID NO: 1241369
gcuaaaugccuuuggauua

SEQ ID NO: 1267241 - RNA, 19 nt, Artificial Sequence
  Description of Artificial Sequence: Synthetic oligonucleotide
  Antisense strand to SEQ ID NO: 1267240
uaauccaaaggcauuuagc

SEQ ID NO: 1267242 - RNA, 19 nt, Artificial Sequence
  Description of Artificial Sequence: Synthetic oligonucleotide
  Sense strand starting at position 413 of SEQ ID NO: 1241369
ggauuacaccuuuggaucu

SEQ ID NO: 1267243 - RNA, 19 nt, Artificial Sequence
  Description of Artificial Sequence: Synthetic oligonucleotide
  Antisense strand to SEQ ID NO: 1267242
agauccaaagguguaaucc

SEQ ID NO: 1267244 - RNA, 19 nt, Artificial Sequence
  Description of Artificial Sequence: Synthetic oligonucleotide
  Sense strand starting at position 426 of SEQ ID NO: 1241369
ggaucuguacuacgaguga

SEQ ID NO: 1267245 - RNA, 19 nt, Artificial Sequence
  Description of Artificial Sequence: Synthetic oligonucleotide
  Antisense strand to SEQ ID NO: 1267244
ucacucguaguacagaucc

SEQ ID NO: 1267246 - RNA, 19 nt, Artificial Sequence
  Description of Artificial Sequence: Synthetic oligonucleotide
  Sense strand starting at position 442 of SEQ ID NO: 1241369
ugaccagaagcaugguaaa

SEQ ID NO: 1267247 - RNA, 19 nt, Artificial Sequence
  Description of Artificial Sequence: Synthetic oligonucleotide
  Antisense strand to SEQ ID NO: 1267246
uuuaccaugcuucugguca

SEQ ID NO: 1267248 - RNA, 19 nt, Artificial Sequence
  Description of Artificial Sequence: Synthetic oligonucleotide
  Sense strand starting at position 567 of SEQ ID NO: 1241369
ucugcacuuguagaacuaa

SEQ ID NO: 1267249 - RNA, 19 nt, Artificial Sequence
  Description of Artificial Sequence: Synthetic oligonucleotide
  Antisense strand to SEQ ID NO: 1267248
uuaguucuacaagugcaga

SEQ ID NO: 1267250 - RNA, 19 nt, Artificial Sequence
  Description of Artificial Sequence: Synthetic oligonucleotide
  Sense strand starting at position 623 of SEQ ID NO: 1241369
gaagaccuguguuuccaau

SEQ ID NO: 1267251 - RNA, 19 nt, Artificial Sequence
  Description of Artificial Sequence: Synthetic oligonucleotide
  Antisense strand to SEQ ID NO: 1267250
auuggaaacacaggucuuc

SEQ ID NO: 1267252 - RNA, 19 nt, Artificial Sequence
  Description of Artificial Sequence: Synthetic oligonucleotide
  Sense strand starting at position 653 of SEQ ID NO: 1241369
uucugauuacuuuagcaga

SEQ ID NO: 1267253 - RNA, 19 nt, Artificial Sequence
  Description of Artificial Sequence: Synthetic oligonucleotide
  Antisense strand to SEQ ID NO: 1267252
ucugcuaaaguaaucagaa

SEQ ID NO: 1267254 - RNA, 19 nt, Artificial Sequence
  Description of Artificial Sequence: Synthetic oligonucleotide
  Sense strand starting at position 655 of SEQ ID NO: 1241369
cugauuacuuuagcagauu

SEQ ID NO: 1267255 - RNA, 19 nt, Artificial Sequence
  Description of Artificial Sequence: Synthetic oligonucleotide
  Antisense strand to SEQ ID NO: 1267254
aaucugcuaaaguaaucag

SEQ ID NO: 1267256 - RNA, 19 nt, Artificial Sequence
  Description of Artificial Sequence: Synthetic oligonucleotide
  Sense strand starting at position 656 of SEQ ID NO: 1241369
ugauuacuuuagcagauuu

SEQ ID NO: 1267257 - RNA, 19 nt, Artificial Sequence
  Description of Artificial Sequence: Synthetic oligonucleotide
  Antisense strand to SEQ ID NO: 1267256
aaaucugcuaaaguaauca

SEQ ID NO: 1267258 - RNA, 19 nt, Artificial Sequence
  Description of Artificial Sequence: Synthetic oligonucleotide
  Sense strand starting at position 750 of SEQ ID NO: 1241369
cauuauuaacgugacgcaa

SEQ ID NO: 1267259 - RNA, 19 nt, Artificial Sequence
  Description of Artificial Sequence: Synthetic oligonucleotide
  Antisense strand to SEQ ID NO: 1267258
uugcgucacguuaauaaug

SEQ ID NO: 1267260 - RNA, 19 nt, Artificial Sequence
  Description of Artificial Sequence: Synthetic oligonucleotide
  Sense strand starting at position 877 of SEQ ID NO: 1241369
cccguuccaccagagauga

SEQ ID NO: 1267261 - RNA, 19 nt, Artificial Sequence
  Description of Artificial Sequence: Synthetic oligonucleotide
  Antisense strand to SEQ ID NO: 1267260
ucaucucugguggaacggg

SEQ ID NO: 1267262 - RNA, 19 nt, Artificial Sequence
  Description of Artificial Sequence: Synthetic oligonucleotide
  Sense strand starting at position 1652 of SEQ ID NO: 1241369
agggucuccaggugucuaa

SEQ ID NO: 1267263 - RNA, 19 nt, Artificial Sequence
  Description of Artificial Sequence: Synthetic oligonucleotide
  Antisense strand to SEQ ID NO: 1267262
uuagacaccuggagacccu

SEQ ID NO: 1267264 - RNA, 19 nt, Artificial Sequence
  Description of Artificial Sequence: Synthetic oligonucleotide
  Sense strand starting at position 2088 of SEQ ID NO: 1241369
agugaagggcguugcauuu

SEQ ID NO: 1267265 - RNA, 19 nt, Artificial Sequence
  Description of Artificial Sequence: Synthetic oligonucleotide
  Antisense strand to SEQ ID NO: 1267264
aaaugcaacgcccuucacu

SEQ ID NO: 1267266 - RNA, 19 nt, Artificial Sequence
  Description of Artificial Sequence: Synthetic oligonucleotide
  Sense strand starting at position 2445 of SEQ ID NO: 1241369
cgcacaucuggugagugau

SEQ ID NO: 1267267 - RNA, 19 nt, Artificial Sequence
  Description of Artificial Sequence: Synthetic oligonucleotide
  Antisense strand to SEQ ID NO: 1267266
aucacucaccagaugugcg

SEQ ID NO: 1267268 - RNA, 19 nt, Artificial Sequence
  Description of Artificial Sequence: Synthetic oligonucleotide
  Sense strand starting at position 2511 of SEQ ID NO: 1241369
ucugauuggcccgagggua

SEQ ID NO: 1267269 - RNA, 19 nt, Artificial Sequence
  Description of Artificial Sequence: Synthetic oligonucleotide
  Antisense strand to SEQ ID NO: 1267268
uacccucgggccaaucaga

SEQ ID NO: 1267270 - RNA, 19 nt, Artificial Sequence
  Description of Artificial Sequence: Synthetic oligonucleotide
  Sense strand starting at position 2657 of SEQ ID NO: 1241369
gauucuuaguaucugagga

SEQ ID NO: 1267271 - RNA, 19 nt, Artificial Sequence
  Description of Artificial Sequence: Synthetic oligonucleotide
  Antisense strand to SEQ ID NO: 1267270
uccucagauacuaagaauc

SEQ ID NO: 1267272 - RNA, 19 nt, Artificial Sequence
  Description of Artificial Sequence: Synthetic oligonucleotide
  Sense strand starting at position 2684 of SEQ ID NO: 1241369
ucaugucuuccagguuaug

SEQ ID NO: 1267273 - RNA, 19 nt, Artificial Sequence
  Description of Artificial Sequence: Synthetic oligonucleotide
  Antisense strand to SEQ ID NO: 1267272
cauaaccuggaagacauga

SEQ ID NO: 1267274 - RNA, 19 nt, Artificial Sequence
  Description of Artificial Sequence: Synthetic oligonucleotide
  Sense strand starting at position 2806 of SEQ ID NO: 1241369
uuccuaugucugcaggauu

SEQ ID NO: 1267275 - RNA, 19 nt, Artificial Sequence
  Description of Artificial Sequence: Synthetic oligonucleotide
  Antisense strand to SEQ ID NO: 1267274
aauccugcagacauaggaa

SEQ ID NO: 1267276 - RNA, 19 nt, Artificial Sequence
  Description of Artificial Sequence: Synthetic oligonucleotide
  Sense strand starting at position 2862 of SEQ ID NO: 1241369
accuuuauccuauagggca

SEQ ID NO: 1267277 - RNA, 19 nt, Artificial Sequence
  Description of Artificial Sequence: Synthetic oligonucleotide
  Antisense strand to SEQ ID NO: 1267276
ugcccuauaggauaaaggu

SEQ ID NO: 1267278 - RNA, 19 nt, Artificial Sequence
  Description of Artificial Sequence: Synthetic oligonucleotide
  Sense strand starting at position 2984 of SEQ ID NO: 1241369
ccagauacugggugucaga

SEQ ID NO: 1267279 - RNA, 19 nt, Artificial Sequence
  Description of Artificial Sequence: Synthetic oligonucleotide
  Antisense strand to SEQ ID NO: 1267278
ucugacacccaguaucugg

SEQ ID NO: 1267280 - RNA, 19 nt, Artificial Sequence
  Description of Artificial Sequence: Synthetic oligonucleotide
  Sense strand starting at position 2993 of SEQ ID NO: 1241369
gggugucagaaauggaauu

SEQ ID NO: 1267281 - RNA, 19 nt, Artificial Sequence
  Description of Artificial Sequence: Synthetic oligonucleotide
  Antisense strand to SEQ ID NO: 1267280
aauuccauuucugacaccc

SEQ ID NO: 1267282 - RNA, 19 nt, Artificial Sequence
  Description of Artificial Sequence: Synthetic oligonucleotide
  Sense strand starting at position 3134 of SEQ ID NO: 1241369
aggacuuuauuacaggaaa

SEQ ID NO: 1267283 - RNA, 19 nt, Artificial Sequence
  Description of Artificial Sequence: Synthetic oligonucleotide
  Antisense strand to SEQ ID NO: 1267282
uuuccuguaauaaaguccu

SEQ ID NO: 1267284 - RNA, 19 nt, Artificial Sequence
  Description of Artificial Sequence: Synthetic oligonucleotide
  Sense strand starting at position 3238 of SEQ ID NO: 1241369
guggguugcauccaaguga

SEQ ID NO: 1267285 - RNA, 19 nt, Artificial Sequence
  Description of Artificial Sequence: Synthetic oligonucleotide
  Antisense strand to SEQ ID NO: 1267284
ucacuuggaugcaacccac

SEQ ID NO: 1267286 - RNA, 19 nt, Artificial Sequence
  Description of Artificial Sequence: Synthetic oligonucleotide
  Sense strand starting at position 3242 of SEQ ID NO: 1241369
guugcauccaagugaagga

SEQ ID NO: 1267287 - RNA, 19 nt, Artificial Sequence
  Description of Artificial Sequence: Synthetic oligonucleotide
  Antisense strand to SEQ ID NO: 1267286
uccuucacuuggaugcaac

SEQ ID NO: 1267288 - RNA, 19 nt, Artificial Sequence
  Description of Artificial Sequence: Synthetic oligonucleotide
  Sense strand starting at position 3311 of SEQ ID NO: 1241369
ccucuuuguccuggaggga

SEQ ID NO: 1267289 - RNA, 19 nt, Artificial Sequence
  Description of Artificial Sequence: Synthetic oligonucleotide
  Antisense strand to SEQ ID NO: 1267288
ucccuccaggacaaagagg

SEQ ID NO: 1267290 - RNA, 19 nt, Artificial Sequence
  Description of Artificial Sequence: Synthetic oligonucleotide
  Sense strand starting at position 3376 of SEQ ID NO: 1241369
agaaauggcccaggugaga

SEQ ID NO: 1267291 - RNA, 19 nt, Artificial Sequence
  Description of Artificial Sequence: Synthetic oligonucleotide
  Antisense strand to SEQ ID NO: 1267290
ucucaccugggccauuucu

SEQ ID NO: 1267292 - RNA, 19 nt, Artificial Sequence
  Description of Artificial Sequence: Synthetic oligonucleotide
  Sense strand starting at position 3424 of SEQ ID NO: 1241369
cccagaaugauguguagag

SEQ ID NO: 1267293 - RNA, 19 nt, Artificial Sequence
  Description of Artificial Sequence: Synthetic oligonucleotide
  Antisense strand to SEQ ID NO: 1267292
cucuacacaucauucuggg

SEQ ID NO: 1267294 - RNA, 19 nt, Artificial Sequence
  Description of Artificial Sequence: Synthetic oligonucleotide
  Sense strand starting at position 3567 of SEQ ID NO: 1241369
uaauuaagguuguugucaa

SEQ ID NO: 1267295 - RNA, 19 nt, Artificial Sequence
  Description of Artificial Sequence: Synthetic oligonucleotide
  Antisense strand to SEQ ID NO: 1267294
uugacaacaaccuuaauua

SEQ ID NO: 1267296 - RNA, 19 nt, Artificial Sequence
  Description of Artificial Sequence: Synthetic oligonucleotide
  Sense strand starting at position 3574 of SEQ ID NO: 1241369
gguuguugucaaugggacu

SEQ ID NO: 1267297 - RNA, 19 nt, Artificial Sequence
  Description of Artificial Sequence: Synthetic oligonucleotide
  Antisense strand to SEQ ID NO: 1267296
agucccauugacaacaacc

SEQ ID NO: 1267298 - RNA, 19 nt, Artificial Sequence
  Description of Artificial Sequence: Synthetic oligonucleotide
  Sense strand starting at position 3600 of SEQ ID NO: 1241369
gcagaauaaggccagcuua

SEQ ID NO: 1267299 - RNA, 19 nt, Artificial Sequence
  Description of Artificial Sequence: Synthetic oligonucleotide
  Antisense strand to SEQ ID NO: 1267298
uaagcuggccuuauucugc

SEQ ID NO: 1267300 - RNA, 19 nt, Artificial Sequence
  Description of Artificial Sequence: Synthetic oligonucleotide
  Sense strand starting at position 3764 of SEQ ID NO: 1241369
ucagauugaucucugaucu

SEQ ID NO: 1267301 - RNA, 19 nt, Artificial Sequence
  Description of Artificial Sequence: Synthetic oligonucleotide
  Antisense strand to SEQ ID NO: 1267300
agaucagagaucaaucuga

SEQ ID NO: 1267302 - RNA, 19 nt, Artificial Sequence
  Description of Artificial Sequence: Synthetic oligonucleotide
  Sense strand starting at position 3787 of SEQ ID NO: 1241369
ugucauuaccaguaauuac

SEQ ID NO: 1267303 - RNA, 19 nt, Artificial Sequence
  Description of Artificial Sequence: Synthetic oligonucleotide
  Antisense strand to SEQ ID NO: 1267302
guaauuacugguaaugaca

SEQ ID NO: 1267304 - RNA, 19 nt, Artificial Sequence
  Description of Artificial Sequence: Synthetic oligonucleotide
  Sense strand starting at position 3981 of SEQ ID NO: 1241369
aagacuuagccgggcauga

SEQ ID NO: 1267305 - RNA, 19 nt, Artificial Sequence
  Description of Artificial Sequence: Synthetic oligonucleotide
  Antisense strand to SEQ ID NO: 1267304
ucaugcccggcuaagucuu

SEQ ID NO: 1267306 - RNA, 19 nt, Artificial Sequence
  Description of Artificial Sequence: Synthetic oligonucleotide
  Sense strand starting at position 201 of SEQ ID NO: 1241370
cagcgauucggauauauuc

SEQ ID NO: 1267307 - RNA, 19 nt, Artificial Sequence
  Description of Artificial Sequence: Synthetic oligonucleotide
  Antisense strand to SEQ ID NO: 1267306
gaauauauccgaaucgcug

SEQ ID NO: 1267308 - RNA, 19 nt, Artificial Sequence
  Description of Artificial Sequence: Synthetic oligonucleotide
  Sense strand starting at position 304 of SEQ ID NO: 1241370
ugcgaaaucacagggugaa

SEQ ID NO: 1267309 - RNA, 19 nt, Artificial Sequence
  Description of Artificial Sequence: Synthetic oligonucleotide
  Antisense strand to SEQ ID NO: 1267308
uucacccugugauuucgca

SEQ ID NO: 1267310 - RNA, 19 nt, Artificial Sequence
  Description of Artificial Sequence: Synthetic oligonucleotide
  Sense strand starting at position 305 of SEQ ID NO: 1241370
gcgaaaucacagggugaaa

SEQ ID NO: 1267311 - RNA, 19 nt, Artificial Sequence
  Description of Artificial Sequence: Synthetic oligonucleotide
  Antisense strand to SEQ ID NO: 1267310
uuucacccugugauuucgc

SEQ ID NO: 1267312 - RNA, 19 nt, Artificial Sequence
  Description of Artificial Sequence: Synthetic oligonucleotide
  Sense strand starting at position 481 of SEQ ID NO: 1241370
ccuggcagagucuauauua

SEQ ID NO: 1267313 - RNA, 19 nt, Artificial Sequence
  Description of Artificial Sequence: Synthetic oligonucleotide
  Antisense strand to SEQ ID NO: 1267312
uaauauagacucugccagg

SEQ ID NO: 1267314 - RNA, 19 nt, Artificial Sequence
  Description of Artificial Sequence: Synthetic oligonucleotide
  Sense strand starting at position 505 of SEQ ID NO: 1241370
cggcaauggcucuauauaa

SEQ ID NO: 1267315 - RNA, 19 nt, Artificial Sequence
  Description of Artificial Sequence: Synthetic oligonucleotide
  Antisense strand to SEQ ID NO: 1267314
uuauauagagccauugccg

SEQ ID NO: 1267316 - RNA, 19 nt, Artificial Sequence
  Description of Artificial Sequence: Synthetic oligonucleotide
  Sense strand starting at position 697 of SEQ ID NO: 1241370
auaagaguuggguggacua

SEQ ID NO: 1267317 - RNA, 19 nt, Artificial Sequence
  Description of Artificial Sequence: Synthetic oligonucleotide
  Antisense strand to SEQ ID NO: 1267316
uaguccacccaacucuuau

SEQ ID NO: 1267318 - RNA, 19 nt, Artificial Sequence
  Description of Artificial Sequence: Synthetic oligonucleotide
  Sense strand starting at position 708 of SEQ ID NO: 1241370
guggacuagugaucacacu

SEQ ID NO: 1267319 - RNA, 19 nt, Artificial Sequence
  Description of Artificial Sequence: Synthetic oligonucleotide
  Antisense strand to SEQ ID NO: 1267318
agugugaucacuaguccac

SEQ ID NO: 1267320 - RNA, 19 nt, Artificial Sequence
  Description of Artificial Sequence: Synthetic oligonucleotide
  Sense strand starting at position 746 of SEQ ID NO: 1241370
uuauuuaugugacugcuuu

SEQ ID NO: 1267321 - RNA, 19 nt, Artificial Sequence
  Description of Artificial Sequence: Synthetic oligonucleotide
  Antisense strand to SEQ ID NO: 1267320
aaagcagucacauaaauaa

SEQ ID NO: 1267322 - RNA, 19 nt, Artificial Sequence
  Description of Artificial Sequence: Synthetic oligonucleotide
  Sense strand starting at position 805 of SEQ ID NO: 1241370
cgggaagaaguagguaaau

SEQ ID NO: 1267323 - RNA, 19 nt, Artificial Sequence
  Description of Artificial Sequence: Synthetic oligonucleotide
  Antisense strand to SEQ ID NO: 1267322
auuuaccuacuucuucccg

SEQ ID NO: 1267324 - RNA, 19 nt, Artificial Sequence
  Description of Artificial Sequence: Synthetic oligonucleotide
  Sense strand starting at position 1660 of SEQ ID NO: 1241370
cccaaaucaccgcaagauu

SEQ ID NO: 1267325 - RNA, 19 nt, Artificial Sequence
  Description of Artificial Sequence: Synthetic oligonucleotide
  Antisense strand to SEQ ID NO: 1267324
aaucuugcggugauuuggg

SEQ ID NO: 1267326 - RNA, 19 nt, Artificial Sequence
  Description of Artificial Sequence: Synthetic oligonucleotide
  Sense strand starting at position 2176 of SEQ ID NO: 1241370
aguagugaaaucggaccua

SEQ ID NO: 1267327 - RNA, 19 nt, Artificial Sequence
  Description of Artificial Sequence: Synthetic oligonucleotide
  Antisense strand to SEQ ID NO: 1267326
uagguccgauuucacuacu

SEQ ID NO: 1267328 - RNA, 19 nt, Artificial Sequence
  Description of Artificial Sequence: Synthetic oligonucleotide
  Sense strand starting at position 2367 of SEQ ID NO: 1241370
cgcuuuaggagcuaggaaa

SEQ ID NO: 1267329 - RNA, 19 nt, Artificial Sequence
  Description of Artificial Sequence: Synthetic oligonucleotide
  Antisense strand to SEQ ID NO: 1267328
uuuccuagcuccuaaagcg

SEQ ID NO: 1267330 - RNA, 19 nt, Artificial Sequence
  Description of Artificial Sequence: Synthetic oligonucleotide
  Sense strand starting at position 2374 of SEQ ID NO: 1241370
ggagcuaggaaaugugaca

SEQ ID NO: 1267331 - RNA, 19 nt, Artificial Sequence
  Description of Artificial Sequence: Synthetic oligonucleotide
  Antisense strand to SEQ ID NO: 1267330
ugucacauuuccuagcucc

SEQ ID NO: 1267332 - RNA, 19 nt, Artificial Sequence
  Description of Artificial Sequence: Synthetic oligonucleotide
  Sense strand starting at position 2471 of SEQ ID NO: 1241370
guuccuauucgggaagguu

SEQ ID NO: 1267333 - RNA, 19 nt, Artificial Sequence
  Description of Artificial Sequence: Synthetic oligonucleotide
  Antisense strand to SEQ ID NO: 1267332
aaccuucccgaauaggaac

SEQ ID NO: 1267334 - RNA, 19 nt, Artificial Sequence
  Description of Artificial Sequence: Synthetic oligonucleotide
  Sense strand starting at position 2501 of SEQ ID NO: 1241370
gucaucucuugauuuguca

SEQ ID NO: 1267335 - RNA, 19 nt, Artificial Sequence
  Description of Artificial Sequence: Synthetic oligonucleotide
  Antisense strand to SEQ ID NO: 1267334
ugacaaaucaagagaugac

SEQ ID NO: 1267336 - RNA, 19 nt, Artificial Sequence
  Description of Artificial Sequence: Synthetic oligonucleotide
  Sense strand starting at position 2505 of SEQ ID NO: 1241370
ucucuugauuugucagcga

SEQ ID NO: 1267337 - RNA, 19 nt, Artificial Sequence
  Description of Artificial Sequence: Synthetic oligonucleotide
  Antisense strand to SEQ ID NO: 1267336
ucgcugacaaaucaagaga

SEQ ID NO: 1267338 - RNA, 19 nt, Artificial Sequence
  Description of Artificial Sequence: Synthetic oligonucleotide
  Sense strand starting at position 2509 of SEQ ID NO: 1241370
uugauuugucagcgaggcu

SEQ ID NO: 1267339 - RNA, 19 nt, Artificial Sequence
  Description of Artificial Sequence: Synthetic oligonucleotide
  Antisense strand to SEQ ID NO: 1267338
agccucgcugacaaaucaa

SEQ ID NO: 1267340 - RNA, 19 nt, Artificial Sequence
  Description of Artificial Sequence: Synthetic oligonucleotide
  Sense strand starting at position 2510 of SEQ ID NO: 1241370
ugauuugucagcgaggcuu

SEQ ID NO: 1267341 - RNA, 19 nt, Artificial Sequence
  Description of Artificial Sequence: Synthetic oligonucleotide
  Antisense strand to SEQ ID NO: 1267340
aagccucgcugacaaauca

SEQ ID NO: 1267342 - RNA, 19 nt, Artificial Sequence
  Description of Artificial Sequence: Synthetic oligonucleotide
  Sense strand starting at position 2699 of SEQ ID NO: 1241370
gaagacuaggcuuauguua

SEQ ID NO: 1267343 - RNA, 19 nt, Artificial Sequence
  Description of Artificial Sequence: Synthetic oligonucleotide
  Antisense strand to SEQ ID NO: 1267342
uaacauaagccuagucuuc

SEQ ID NO: 1267344 - RNA, 19 nt, Artificial Sequence
  Description of Artificial Sequence: Synthetic oligonucleotide
  Sense strand starting at position 2710 of SEQ ID NO: 1241370
uuauguuacccagagguua

SEQ ID NO: 1267345 - RNA, 19 nt, Artificial Sequence
  Description of Artificial Sequence: Synthetic oligonucleotide
  Antisense strand to SEQ ID NO: 1267344
uaaccucuggguaacauaa

SEQ ID NO: 1267346 - RNA, 19 nt, Artificial Sequence
  Description of Artificial Sequence: Synthetic oligonucleotide
  Sense strand starting at position 2721 of SEQ ID NO: 1241370
agagguuaguccucuacua

SEQ ID NO: 1267347 - RNA, 19 nt, Artificial Sequence
  Description of Artificial Sequence: Synthetic oligonucleotide
  Antisense strand to SEQ ID NO: 1267346
uaguagaggacuaaccucu

SEQ ID NO: 1267348 - RNA, 19 nt, Artificial Sequence
  Description of Artificial Sequence: Synthetic oligonucleotide
  Sense strand starting at position 2740 of SEQ ID NO: 1241370
ggccacguacuuuaaauaa

SEQ ID NO: 1267349 - RNA, 19 nt, Artificial Sequence
  Description of Artificial Sequence: Synthetic oligonucleotide
  Antisense strand to SEQ ID NO: 1267348
uuauuuaaaguacguggcc

SEQ ID NO: 1267350 - RNA, 19 nt, Artificial Sequence
  Description of Artificial Sequence: Synthetic oligonucleotide
  Sense strand starting at position 2880 of SEQ ID NO: 1241370
aacguauagugacugauca

SEQ ID NO: 1267351 - RNA, 19 nt, Artificial Sequence
  Description of Artificial Sequence: Synthetic oligonucleotide
  Antisense strand to SEQ ID NO: 1267350
ugaucagucacuauacguu

SEQ ID NO: 1267352 - RNA, 19 nt, Artificial Sequence
  Description of Artificial Sequence: Synthetic oligonucleotide
  Sense strand starting at position 2882 of SEQ ID NO: 1241370
cguauagugacugaucacu

SEQ ID NO: 1267353 - RNA, 19 nt, Artificial Sequence
  Description of Artificial Sequence: Synthetic oligonucleotide
  Antisense strand to SEQ ID NO: 1267352
agugaucagucacuauacg

SEQ ID NO: 1267354 - RNA, 19 nt, Artificial Sequence
  Description of Artificial Sequence: Synthetic oligonucleotide
  Sense strand starting at position 2887 of SEQ ID NO: 1241370
agugacugaucacuuugaa

SEQ ID NO: 1267355 - RNA, 19 nt, Artificial Sequence
  Description of Artificial Sequence: Synthetic oligonucleotide
  Antisense strand to SEQ ID NO: 1267354
uucaaagugaucagucacu

SEQ ID NO: 1267356 - RNA, 19 nt, Artificial Sequence
  Description of Artificial Sequence: Synthetic oligonucleotide
  Sense strand starting at position 2935 of SEQ ID NO: 1241370
ggccucucgcuauaagaga

SEQ ID NO: 1267357 - RNA, 19 nt, Artificial Sequence
  Description of Artificial Sequence: Synthetic oligonucleotide
  Antisense strand to SEQ ID NO: 1267356
ucucuuauagcgagaggcc

SEQ ID NO: 1267358 - RNA, 19 nt, Artificial Sequence
  Description of Artificial Sequence: Synthetic oligonucleotide
  Sense strand starting at position 3061 of SEQ ID NO: 1241370
agagaaugcuguuuggaag

SEQ ID NO: 1267359 - RNA, 19 nt, Artificial Sequence
  Description of Artificial Sequence: Synthetic oligonucleotide
  Antisense strand to SEQ ID NO: 1267358
cuuccaaacagcauucucu

SEQ ID NO: 1267360 - RNA, 19 nt, Artificial Sequence
  Description of Artificial Sequence: Synthetic oligonucleotide
  Sense strand starting at position 3153 of SEQ ID NO: 1241370
gggaguuugucuuccagag

SEQ ID NO: 1267361 - RNA, 19 nt, Artificial Sequence
  Description of Artificial Sequence: Synthetic oligonucleotide
  Antisense strand to SEQ ID NO: 1267360
cucuggaagacaaacuccc

SEQ ID NO: 1267362 - RNA, 19 nt, Artificial Sequence
  Description of Artificial Sequence: Synthetic oligonucleotide
  Sense strand starting at position 3157 of SEQ ID NO: 1241370
guuugucuuccagagacaa

SEQ ID NO: 1267363 - RNA, 19 nt, Artificial Sequence
  Description of Artificial Sequence: Synthetic oligonucleotide
  Antisense strand to SEQ ID NO: 1267362
uugucucuggaagacaaac

SEQ ID NO: 1267364 - RNA, 19 nt, Artificial Sequence
  Description of Artificial Sequence: Synthetic oligonucleotide
  Sense strand starting at position 3230 of SEQ ID NO: 1241370
aaaggcgucuuaccaaaga

SEQ ID NO: 1267365 - RNA, 19 nt, Artificial Sequence
  Description of Artificial Sequence: Synthetic oligonucleotide
  Antisense strand to SEQ ID NO: 1267364
ucuuugguaagacgccuuu

SEQ ID NO: 1267366 - RNA, 19 nt, Artificial Sequence
  Description of Artificial Sequence: Synthetic oligonucleotide
  Sense strand starting at position 3260 of SEQ ID NO: 1241370
gcaucuugccaagacuuga

SEQ ID NO: 1267367 - RNA, 19 nt, Artificial Sequence
  Description of Artificial Sequence: Synthetic oligonucleotide
  Antisense strand to SEQ ID NO: 1267366
ucaagucuuggcaagaugc

SEQ ID NO: 1267368 - RNA, 19 nt, Artificial Sequence
  Description of Artificial Sequence: Synthetic oligonucleotide
  Sense strand starting at position 3302 of SEQ ID NO: 1241370
ggccuugaauacucagaaa

SEQ ID NO: 1267369 - RNA, 19 nt, Artificial Sequence
  Description of Artificial Sequence: Synthetic oligonucleotide
  Antisense strand to SEQ ID NO: 1267368
uuucugaguauucaaggcc

SEQ ID NO: 1267370 - RNA, 19 nt, Artificial Sequence
  Description of Artificial Sequence: Synthetic oligonucleotide
  Sense strand starting at position 3324 of SEQ ID NO: 1241370
ggagauugugaaugggugu

SEQ ID NO: 1267371 - RNA, 19 nt, Artificial Sequence
  Description of Artificial Sequence: Synthetic oligonucleotide
  Antisense strand to SEQ ID NO: 1267370
acacccauucacaaucucc

SEQ ID NO: 1267372 - RNA, 19 nt, Artificial Sequence
  Description of Artificial Sequence: Synthetic oligonucleotide
  Sense strand starting at position 3325 of SEQ ID NO: 1241370
gagauugugaaugggugua

SEQ ID NO: 1267373 - RNA, 19 nt, Artificial Sequence
  Description of Artificial Sequence: Synthetic oligonucleotide
  Antisense strand to SEQ ID NO: 1267372
uacacccauucacaaucuc

SEQ ID NO: 1267374 - RNA, 19 nt, Artificial Sequence
  Description of Artificial Sequence: Synthetic oligonucleotide
  Sense strand starting at position 3327 of SEQ ID NO: 1241370
gauugugaauggguguaga

SEQ ID NO: 1267375 - RNA, 19 nt, Artificial Sequence
  Description of Artificial Sequence: Synthetic oligonucleotide
  Antisense strand to SEQ ID NO: 1267374
ucuacacccauucacaauc

SEQ ID NO: 1267376 - RNA, 19 nt, Artificial Sequence
  Description of Artificial Sequence: Synthetic oligonucleotide
  Sense strand starting at position 3459 of SEQ ID NO: 1241370
acaggaaaucaguguucuu

SEQ ID NO: 1267377 - RNA, 19 nt, Artificial Sequence
  Description of Artificial Sequence: Synthetic oligonucleotide
  Antisense strand to SEQ ID NO: 1267376
aagaacacugauuuccugu

SEQ ID NO: 1267378 - RNA, 19 nt, Artificial Sequence
  Description of Artificial Sequence: Synthetic oligonucleotide
  Sense strand starting at position 3793 of SEQ ID NO: 1241370
cugugaaauaauggauugu

SEQ ID NO: 1267379 - RNA, 19 nt, Artificial Sequence
  Description of Artificial Sequence: Synthetic oligonucleotide
  Antisense strand to SEQ ID NO: 1267378
acaauccauuauuucacag

SEQ ID NO: 1267380 - RNA, 19 nt, Artificial Sequence
  Description of Artificial Sequence: Synthetic oligonucleotide
  Sense strand starting at position 3797 of SEQ ID NO: 1241370
gaaauaauggauuguaguu

SEQ ID NO: 1267381 - RNA, 19 nt, Artificial Sequence
  Description of Artificial Sequence: Synthetic oligonucleotide
  Antisense strand to SEQ ID NO: 1267380
aacuacaauccauuauuuc

SEQ ID NO: 1267382 - RNA, 19 nt, Artificial Sequence
  Description of Artificial Sequence: Synthetic oligonucleotide
  Sense strand starting at position 3922 of SEQ ID NO: 1241370
cuaagcacuugguuaauau

SEQ ID NO: 1267383 - RNA, 19 nt, Artificial Sequence
  Description of Artificial Sequence: Synthetic oligonucleotide
  Antisense strand to SEQ ID NO: 1267382
auauuaaccaagugcuuag

SEQ ID NO: 1267384 - RNA, 19 nt, Artificial Sequence
  Description of Artificial Sequence: Synthetic oligonucleotide
  Sense strand starting at position 3973 of SEQ ID NO: 1241370
gcaucuagccaucauggau

SEQ ID NO: 1267385 - RNA, 19 nt, Artificial Sequence
  Description of Artificial Sequence: Synthetic oligonucleotide
  Antisense strand to SEQ ID NO: 1267384
auccaugauggcuagaugc

SEQ ID NO: 1267386 - RNA, 19 nt, Artificial Sequence
  Description of Artificial Sequence: Synthetic oligonucleotide
  Sense strand starting at position 25 of SEQ ID NO: 1241371
ugcgaaaucacagggugaa

SEQ ID NO: 1267387 - RNA, 19 nt, Artificial Sequence
  Description of Artificial Sequence: Synthetic oligonucleotide
  Antisense strand to SEQ ID NO: 1267386
uucacccugugauuucgca

SEQ ID NO: 1267388 - RNA, 19 nt, Artificial Sequence
  Description of Artificial Sequence: Synthetic oligonucleotide
  Sense strand starting at position 26 of SEQ ID NO: 1241371
gcgaaaucacagggugaaa

SEQ ID NO: 1267389 - RNA, 19 nt, Artificial Sequence
  Description of Artificial Sequence: Synthetic oligonucleotide
  Antisense strand to SEQ ID NO: 1267388
uuucacccugugauuucgc

SEQ ID NO: 1267390 - RNA, 19 nt, Artificial Sequence
  Description of Artificial Sequence: Synthetic oligonucleotide
  Sense strand starting at position 202 of SEQ ID NO: 1241371
ccuggcagagucuauauua

SEQ ID NO: 1267391 - RNA, 19 nt, Artificial Sequence
  Description of Artificial Sequence: Synthetic oligonucleotide
  Antisense strand to SEQ ID NO: 1267390
uaauauagacucugccagg

SEQ ID NO: 1267392 - RNA, 19 nt, Artificial Sequence
  Description of Artificial Sequence: Synthetic oligonucleotide
  Sense strand starting at position 226 of SEQ ID NO: 1241371
cggcaauggcucuauauaa

SEQ ID NO: 1267393 - RNA, 19 nt, Artificial Sequence
  Description of Artificial Sequence: Synthetic oligonucleotide
  Antisense strand to SEQ ID NO: 1267392
uuauauagagccauugccg

SEQ ID NO: 1267394 - RNA, 19 nt, Artificial Sequence
  Description of Artificial Sequence: Synthetic oligonucleotide
  Sense strand starting at position 418 of SEQ ID NO: 1241371
auaagaguuggguggacua

SEQ ID NO: 1267395 - RNA, 19 nt, Artificial Sequence
  Description of Artificial Sequence: Synthetic oligonucleotide
  Antisense strand to SEQ ID NO: 1267394
uaguccacccaacucuuau

SEQ ID NO: 1267396 - RNA, 19 nt, Artificial Sequence
  Description of Artificial Sequence: Synthetic oligonucleotide
  Sense strand starting at position 429 of SEQ ID NO: 1241371
guggacuagugaucacacu

SEQ ID NO: 1267397 - RNA, 19 nt, Artificial Sequence
  Description of Artificial Sequence: Synthetic oligonucleotide
  Antisense strand to SEQ ID NO: 1267396
agugugaucacuaguccac

SEQ ID NO: 1267398 - RNA, 19 nt, Artificial Sequence
  Description of Artificial Sequence: Synthetic oligonucleotide
  Sense strand starting at position 467 of SEQ ID NO: 1241371
uuauuuaugugacugcuuu

SEQ ID NO: 1267399 - RNA, 19 nt, Artificial Sequence
  Description of Artificial Sequence: Synthetic oligonucleotide
  Antisense strand to SEQ ID NO: 1267398
aaagcagucacauaaauaa

SEQ ID NO: 1267400 - RNA, 19 nt, Artificial Sequence
  Description of Artificial Sequence: Synthetic oligonucleotide
  Sense strand starting at position 526 of SEQ ID NO: 1241371
cgggaagaaguagguaaau

SEQ ID NO: 1267401 - RNA, 19 nt, Artificial Sequence
  Description of Artificial Sequence: Synthetic oligonucleotide
  Antisense strand to SEQ ID NO: 1267400
auuuaccuacuucuucccg

SEQ ID NO: 1267402 - RNA, 19 nt, Artificial Sequence
  Description of Artificial Sequence: Synthetic oligonucleotide
  Sense strand starting at position 1381 of SEQ ID NO: 1241371
cccaaaucaccgcaagauu

SEQ ID NO: 1267403 - RNA, 19 nt, Artificial Sequence
  Description of Artificial Sequence: Synthetic oligonucleotide
  Antisense strand to SEQ ID NO: 1267402
aaucuugcggugauuuggg

SEQ ID NO: 1267404 - RNA, 19 nt, Artificial Sequence
  Description of Artificial Sequence: Synthetic oligonucleotide
  Sense strand starting at position 1897 of SEQ ID NO: 1241371
aguagugaaaucggaccua

SEQ ID NO: 1267405 - RNA, 19 nt, Artificial Sequence
  Description of Artificial Sequence: Synthetic oligonucleotide
  Antisense strand to SEQ ID NO: 1267404
uagguccgauuucacuacu

SEQ ID NO: 1267406 - RNA, 19 nt, Artificial Sequence
  Description of Artificial Sequence: Synthetic oligonucleotide
  Sense strand starting at position 2088 of SEQ ID NO: 1241371
cgcuuuaggagcuaggaaa

SEQ ID NO: 1267407 - RNA, 19 nt, Artificial Sequence
  Description of Artificial Sequence: Synthetic oligonucleotide
  Antisense strand to SEQ ID NO: 1267406
uuuccuagcuccuaaagcg

SEQ ID NO: 1267408 - RNA, 19 nt, Artificial Sequence
  Description of Artificial Sequence: Synthetic oligonucleotide
  Sense strand starting at position 2095 of SEQ ID NO: 1241371
ggagcuaggaaaugugaca

SEQ ID NO: 1267409 - RNA, 19 nt, Artificial Sequence
  Description of Artificial Sequence: Synthetic oligonucleotide
  Antisense strand to SEQ ID NO: 1267408
ugucacauuuccuagcucc

SEQ ID NO: 1267410 - RNA, 19 nt, Artificial Sequence
  Description of Artificial Sequence: Synthetic oligonucleotide
  Sense strand starting at position 2192 of SEQ ID NO: 1241371
guuccuauucgggaagguu

SEQ ID NO: 1267411 - RNA, 19 nt, Artificial Sequence
  Description of Artificial Sequence: Synthetic oligonucleotide
  Antisense strand to SEQ ID NO: 1267410
aaccuucccgaauaggaac

SEQ ID NO: 1267412 - RNA, 19 nt, Artificial Sequence
  Description of Artificial Sequence: Synthetic oligonucleotide
  Sense strand starting at position 2222 of SEQ ID NO: 1241371
gucaucucuugauuuguca

SEQ ID NO: 1267413 - RNA, 19 nt, Artificial Sequence
  Description of Artificial Sequence: Synthetic oligonucleotide
  Antisense strand to SEQ ID NO: 1267412
ugacaaaucaagagaugac

SEQ ID NO: 1267414 - RNA, 19 nt, Artificial Sequence
  Description of Artificial Sequence: Synthetic oligonucleotide
  Sense strand starting at position 2226 of SEQ ID NO: 1241371
ucucuugauuugucagcga

SEQ ID NO: 1267415 - RNA, 19 nt, Artificial Sequence
  Description of Artificial Sequence: Synthetic oligonucleotide
  Antisense strand to SEQ ID NO: 1267414
ucgcugacaaaucaagaga

SEQ ID NO: 1267416 - RNA, 19 nt, Artificial Sequence
  Description of Artificial Sequence: Synthetic oligonucleotide
  Sense strand starting at position 2230 of SEQ ID NO: 1241371
uugauuugucagcgaggcu

SEQ ID NO: 1267417 - RNA, 19 nt, Artificial Sequence
  Description of Artificial Sequence: Synthetic oligonucleotide
  Antisense strand to SEQ ID NO: 1267416
agccucgcugacaaaucaa

SEQ ID NO: 1267418 - RNA, 19 nt, Artificial Sequence
  Description of Artificial Sequence: Synthetic oligonucleotide
  Sense strand starting at position 2231 of SEQ ID NO: 1241371
ugauuugucagcgaggcuu

SEQ ID NO: 1267419 - RNA, 19 nt, Artificial Sequence
  Description of Artificial Sequence: Synthetic oligonucleotide
  Antisense strand to SEQ ID NO: 1267418
aagccucgcugacaaauca

SEQ ID NO: 1267420 - RNA, 19 nt, Artificial Sequence
  Description of Artificial Sequence: Synthetic oligonucleotide
  Sense strand starting at position 2420 of SEQ ID NO: 1241371
gaagacuaggcuuauguua

SEQ ID NO: 1267421 - RNA, 19 nt, Artificial Sequence
  Description of Artificial Sequence: Synthetic oligonucleotide
  Antisense strand to SEQ ID NO: 1267420
uaacauaagccuagucuuc

SEQ ID NO: 1267422 - RNA, 19 nt, Artificial Sequence
  Description of Artificial Sequence: Synthetic oligonucleotide
  Sense strand starting at position 2431 of SEQ ID NO: 1241371
uuauguuacccagagguua

SEQ ID NO: 1267423 - RNA, 19 nt, Artificial Sequence
  Description of Artificial Sequence: Synthetic oligonucleotide
  Antisense strand to SEQ ID NO: 1267422
uaaccucuggguaacauaa

SEQ ID NO: 1267424 - RNA, 19 nt, Artificial Sequence
  Description of Artificial Sequence: Synthetic oligonucleotide
  Sense strand starting at position 2442 of SEQ ID NO: 1241371
agagguuaguccucuacua

SEQ ID NO: 1267425 - RNA, 19 nt, Artificial Sequence
  Description of Artificial Sequence: Synthetic oligonucleotide
  Antisense strand to SEQ ID NO: 1267424
uaguagaggacuaaccucu

SEQ ID NO: 1267426 - RNA, 19 nt, Artificial Sequence
  Description of Artificial Sequence: Synthetic oligonucleotide
  Sense strand starting at position 2461 of SEQ ID NO: 1241371
ggccacguacuuuaaauaa

SEQ ID NO: 1267427 - RNA, 19 nt, Artificial Sequence
  Description of Artificial Sequence: Synthetic oligonucleotide
  Antisense strand to SEQ ID NO: 1267426
uuauuuaaaguacguggcc

SEQ ID NO: 1267428 - RNA, 19 nt, Artificial Sequence
  Description of Artificial Sequence: Synthetic oligonucleotide
  Sense strand starting at position 2601 of SEQ ID NO: 1241371
aacguauagugacugauca

SEQ ID NO: 1267429 - RNA, 19 nt, Artificial Sequence
  Description of Artificial Sequence: Synthetic oligonucleotide
  Antisense strand to SEQ ID NO: 1267428
ugaucagucacuauacguu

SEQ ID NO: 1267430 - RNA, 19 nt, Artificial Sequence
  Description of Artificial Sequence: Synthetic oligonucleotide
  Sense strand starting at position 2603 of SEQ ID NO: 1241371
cguauagugacugaucacu

SEQ ID NO: 1267431 - RNA, 19 nt, Artificial Sequence
  Description of Artificial Sequence: Synthetic oligonucleotide
  Antisense strand to SEQ ID NO: 1267430
agugaucagucacuauacg

SEQ ID NO: 1267432 - RNA, 19 nt, Artificial Sequence
  Description of Artificial Sequence: Synthetic oligonucleotide
  Sense strand starting at position 2608 of SEQ ID NO: 1241371
agugacugaucacuuugaa

SEQ ID NO: 1267433 - RNA, 19 nt, Artificial Sequence
  Description of Artificial Sequence: Synthetic oligonucleotide
  Antisense strand to SEQ ID NO: 1267432
uucaaagugaucagucacu

SEQ ID NO: 1267434 - RNA, 19 nt, Artificial Sequence
  Description of Artificial Sequence: Synthetic oligonucleotide
  Sense strand starting at position 2782 of SEQ ID NO: 1241371
agagaaugcuguuuggaag

SEQ ID NO: 1267435 - RNA, 19 nt, Artificial Sequence
  Description of Artificial Sequence: Synthetic oligonucleotide
  Antisense strand to SEQ ID NO: 1267434
cuuccaaacagcauucucu

SEQ ID NO: 1267436 - RNA, 19 nt, Artificial Sequence
  Description of Artificial Sequence: Synthetic oligonucleotide
  Sense strand starting at position 2874 of SEQ ID NO: 1241371
gggaguuugucuuccagag

SEQ ID NO: 1267437 - RNA, 19 nt, Artificial Sequence
  Description of Artificial Sequence: Synthetic oligonucleotide
  Antisense strand to SEQ ID NO: 1267436
cucuggaagacaaacuccc

SEQ ID NO: 1267438 - RNA, 19 nt, Artificial Sequence
  Description of Artificial Sequence: Synthetic oligonucleotide
  Sense strand starting at position 2878 of SEQ ID NO: 1241371
guuugucuuccagagacaa

SEQ ID NO: 1267439 - RNA, 19 nt, Artificial Sequence
  Description of Artificial Sequence: Synthetic oligonucleotide
  Antisense strand to SEQ ID NO: 1267438
uugucucuggaagacaaac

SEQ ID NO: 1267440 - RNA, 19 nt, Artificial Sequence
  Description of Artificial Sequence: Synthetic oligonucleotide
  Sense strand starting at position 2951 of SEQ ID NO: 1241371
aaaggcgucuuaccaaaga

SEQ ID NO: 1267441 - RNA, 19 nt, Artificial Sequence
  Description of Artificial Sequence: Synthetic oligonucleotide
  Antisense strand to SEQ ID NO: 1267440
ucuuugguaagacgccuuu

SEQ ID NO: 1267442 - RNA, 19 nt, Artificial Sequence
  Description of Artificial Sequence: Synthetic oligonucleotide
  Sense strand starting at position 2981 of SEQ ID NO: 1241371
gcaucuugccaagacuuga

SEQ ID NO: 1267443 - RNA, 19 nt, Artificial Sequence
  Description of Artificial Sequence: Synthetic oligonucleotide
  Antisense strand to SEQ ID NO: 1267442
ucaagucuuggcaagaugc

SEQ ID NO: 1267444 - RNA, 19 nt, Artificial Sequence
  Description of Artificial Sequence: Synthetic oligonucleotide
  Sense strand starting at position 3023 of SEQ ID NO: 1241371
ggccuugaauacucagaaa

SEQ ID NO: 1267445 - RNA, 19 nt, Artificial Sequence
  Description of Artificial Sequence: Synthetic oligonucleotide
  Antisense strand to SEQ ID NO: 1267444
uuucugaguauucaaggcc

SEQ ID NO: 1267446 - RNA, 19 nt, Artificial Sequence
  Description of Artificial Sequence: Synthetic oligonucleotide
  Sense strand starting at position 3045 of SEQ ID NO: 1241371
ggagauugugaaugggugu

SEQ ID NO: 1267447 - RNA, 19 nt, Artificial Sequence
  Description of Artificial Sequence: Synthetic oligonucleotide
  Antisense strand to SEQ ID NO: 1267446
acacccauucacaaucucc

SEQ ID NO: 1267448 - RNA, 19 nt, Artificial Sequence
  Description of Artificial Sequence: Synthetic oligonucleotide
  Sense strand starting at position 3046 of SEQ ID NO: 1241371
gagauugugaaugggugua

SEQ ID NO: 1267449 - RNA, 19 nt, Artificial Sequence
  Description of Artificial Sequence: Synthetic oligonucleotide
  Antisense strand to SEQ ID NO: 1267448
uacacccauucacaaucuc

SEQ ID NO: 1267450 - RNA, 19 nt, Artificial Sequence
  Description of Artificial Sequence: Synthetic oligonucleotide
  Sense strand starting at position 3048 of SEQ ID NO: 1241371
gauugugaauggguguaga

SEQ ID NO: 1267451 - RNA, 19 nt, Artificial Sequence
  Description of Artificial Sequence: Synthetic oligonucleotide
  Antisense strand to SEQ ID NO: 1267450
ucuacacccauucacaauc

SEQ ID NO: 1267452 - RNA, 19 nt, Artificial Sequence
  Description of Artificial Sequence: Synthetic oligonucleotide
  Sense strand starting at position 3180 of SEQ ID NO: 1241371
acaggaaaucaguguucuu

SEQ ID NO: 1267453 - RNA, 19 nt, Artificial Sequence
  Description of Artificial Sequence: Synthetic oligonucleotide
  Antisense strand to SEQ ID NO: 1267452
aagaacacugauuuccugu

SEQ ID NO: 1267454 - RNA, 19 nt, Artificial Sequence
  Description of Artificial Sequence: Synthetic oligonucleotide
  Sense strand starting at position 3514 of SEQ ID NO: 1241371
cugugaaauaauggauugu

SEQ ID NO: 1267455 - RNA, 19 nt, Artificial Sequence
  Description of Artificial Sequence: Synthetic oligonucleotide
  Antisense strand to SEQ ID NO: 1267454
acaauccauuauuucacag

SEQ ID NO: 1267456 - RNA, 19 nt, Artificial Sequence
  Description of Artificial Sequence: Synthetic oligonucleotide
  Sense strand starting at position 3518 of SEQ ID NO: 1241371
gaaauaauggauuguaguu

SEQ ID NO: 1267457 - RNA, 19 nt, Artificial Sequence
  Description of Artificial Sequence: Synthetic oligonucleotide
  Antisense strand to SEQ ID NO: 1267456
aacuacaauccauuauuuc

SEQ ID NO: 1267458 - RNA, 19 nt, Artificial Sequence
  Description of Artificial Sequence: Synthetic oligonucleotide
  Sense strand starting at position 3694 of SEQ ID NO: 1241371
gcaucuagccaucauggau

SEQ ID NO: 1267459 - RNA, 19 nt, Artificial Sequence
  Description of Artificial Sequence: Synthetic oligonucleotide
  Antisense strand to SEQ ID NO: 1267458
auccaugauggcuagaugc

SEQ ID NO: 1267460 - RNA, 19 nt, Artificial Sequence
  Description of Artificial Sequence: Synthetic oligonucleotide
  Sense strand starting at position 3777 of SEQ ID NO: 1241371
gugugccauccaguuuagu

SEQ ID NO: 1267461 - RNA, 19 nt, Artificial Sequence
  Description of Artificial Sequence: Synthetic oligonucleotide
  Antisense strand to SEQ ID NO: 1267460
acuaaacuggauggcacac

SEQ ID NO: 1267462 - RNA, 19 nt, Artificial Sequence
  Description of Artificial Sequence: Synthetic oligonucleotide
  Sense strand starting at position 3834 of SEQ ID NO: 1241371
gacugaauacuuggaagcu

SEQ ID NO: 1267463 - RNA, 19 nt, Artificial Sequence
  Description of Artificial Sequence: Synthetic oligonucleotide
  Antisense strand to SEQ ID NO: 1267462
agcuuccaaguauucaguc

SEQ ID NO: 1267464 - RNA, 19 nt, Artificial Sequence
  Description of Artificial Sequence: Synthetic oligonucleotide
  Sense strand starting at position 3961 of SEQ ID NO: 1241371
ucuccuacagcuugaauga

SEQ ID NO: 1267465 - RNA, 19 nt, Artificial Sequence
  Description of Artificial Sequence: Synthetic oligonucleotide
  Antisense strand to SEQ ID NO: 1267464
ucauucaagcuguaggaga

SEQ ID NO: 1267466 - RNA, 19 nt, Artificial Sequence
  Description of Artificial Sequence: Synthetic oligonucleotide
  Sense strand starting at position 261 of SEQ ID NO: 1241372
gguggagucacaggguaua

SEQ ID NO: 1267467 - RNA, 19 nt, Artificial Sequence
  Description of Artificial Sequence: Synthetic oligonucleotide
  Antisense strand to SEQ ID NO: 1267466
uauacccugugacuccacc

SEQ ID NO: 1267468 - RNA, 19 nt, Artificial Sequence
  Description of Artificial Sequence: Synthetic oligonucleotide
  Sense strand starting at position 648 of SEQ ID NO: 1241372
gaguguuuccaggagggug

SEQ ID NO: 1267469 - RNA, 19 nt, Artificial Sequence
  Description of Artificial Sequence: Synthetic oligonucleotide
  Antisense strand to SEQ ID NO: 1267468
cacccuccuggaaacacuc

SEQ ID NO: 1267470 - RNA, 19 nt, Artificial Sequence
  Description of Artificial Sequence: Synthetic oligonucleotide
  Sense strand starting at position 714 of SEQ ID NO: 1241372
gcacgaagucgucucguau

SEQ ID NO: 1267471 - RNA, 19 nt, Artificial Sequence
  Description of Artificial Sequence: Synthetic oligonucleotide
  Antisense strand to SEQ ID NO: 1267470
auacgagacgacuucgugc

SEQ ID NO: 1267472 - RNA, 19 nt, Artificial Sequence
  Description of Artificial Sequence: Synthetic oligonucleotide
  Sense strand starting at position 715 of SEQ ID NO: 1241372
cacgaagucgucucguauc

SEQ ID NO: 1267473 - RNA, 19 nt, Artificial Sequence
  Description of Artificial Sequence: Synthetic oligonucleotide
  Antisense strand to SEQ ID NO: 1267472
gauacgagacgacuucgug

SEQ ID NO: 1267474 - RNA, 19 nt, Artificial Sequence
  Description of Artificial Sequence: Synthetic oligonucleotide
  Sense strand starting at position 1006 of SEQ ID NO: 1241372
gacuuuggucuguaaaucu

SEQ ID NO: 1267475 - RNA, 19 nt, Artificial Sequence
  Description of Artificial Sequence: Synthetic oligonucleotide
  Antisense strand to SEQ ID NO: 1267474
agauuuacagaccaaaguc

SEQ ID NO: 1267476 - RNA, 19 nt, Artificial Sequence
  Description of Artificial Sequence: Synthetic oligonucleotide
  Sense strand starting at position 1021 of SEQ ID NO: 1241372
aucuuucuuccauauguag

SEQ ID NO: 1267477 - RNA, 19 nt, Artificial Sequence
  Description of Artificial Sequence: Synthetic oligonucleotide
  Antisense strand to SEQ ID NO: 1267476
cuacauauggaagaaagau

SEQ ID NO: 1267478 - RNA, 19 nt, Artificial Sequence
  Description of Artificial Sequence: Synthetic oligonucleotide
  Sense strand starting at position 1056 of SEQ ID NO: 1241372
cugucuuagggacagugaa

SEQ ID NO: 1267479 - RNA, 19 nt, Artificial Sequence
  Description of Artificial Sequence: Synthetic oligonucleotide
  Antisense strand to SEQ ID NO: 1267478
uucacugucccuaagacag

SEQ ID NO: 1267480 - RNA, 19 nt, Artificial Sequence
  Description of Artificial Sequence: Synthetic oligonucleotide
  Sense strand starting at position 1123 of SEQ ID NO: 1241372
gugaguuuccaagacccuu

SEQ ID NO: 1267481 - RNA, 19 nt, Artificial Sequence
  Description of Artificial Sequence: Synthetic oligonucleotide
  Antisense strand to SEQ ID NO: 1267480
aagggucuuggaaacucac

SEQ ID NO: 1267482 - RNA, 19 nt, Artificial Sequence
  Description of Artificial Sequence: Synthetic oligonucleotide
  Sense strand starting at position 1188 of SEQ ID NO: 1241372
guguaaguggagggaucua

SEQ ID NO: 1267483 - RNA, 19 nt, Artificial Sequence
  Description of Artificial Sequence: Synthetic oligonucleotide
  Antisense strand to SEQ ID NO: 1267482
uagaucccuccacuuacac

SEQ ID NO: 1267484 - RNA, 19 nt, Artificial Sequence
  Description of Artificial Sequence: Synthetic oligonucleotide
  Sense strand starting at position 1367 of SEQ ID NO: 1241372
ugccucauccuuggaaaga

SEQ ID NO: 1267485 - RNA, 19 nt, Artificial Sequence
  Description of Artificial Sequence: Synthetic oligonucleotide
  Antisense strand to SEQ ID NO: 1267484
ucuuuccaaggaugaggca

SEQ ID NO: 1267486 - RNA, 19 nt, Artificial Sequence
  Description of Artificial Sequence: Synthetic oligonucleotide
  Sense strand starting at position 1453 of SEQ ID NO: 1241372
guguucugaggacagugau

SEQ ID NO: 1267487 - RNA, 19 nt, Artificial Sequence
  Description of Artificial Sequence: Synthetic oligonucleotide
  Antisense strand to SEQ ID NO: 1267486
aucacuguccucagaacac

SEQ ID NO: 1267488 - RNA, 19 nt, Artificial Sequence
  Description of Artificial Sequence: Synthetic oligonucleotide
  Sense strand starting at position 1559 of SEQ ID NO: 1241372
ccaggccuacucuagaaua

SEQ ID NO: 1267489 - RNA, 19 nt, Artificial Sequence
  Description of Artificial Sequence: Synthetic oligonucleotide
  Antisense strand to SEQ ID NO: 1267488
uauucuagaguaggccugg

SEQ ID NO: 1267490 - RNA, 19 nt, Artificial Sequence
  Description of Artificial Sequence: Synthetic oligonucleotide
  Sense strand starting at position 1683 of SEQ ID NO: 1241372
cuggcucuucuugagaaug

SEQ ID NO: 1267491 - RNA, 19 nt, Artificial Sequence
  Description of Artificial Sequence: Synthetic oligonucleotide
  Antisense strand to SEQ ID NO: 1267490
cauucucaagaagagccag

SEQ ID NO: 1267492 - RNA, 19 nt, Artificial Sequence
  Description of Artificial Sequence: Synthetic oligonucleotide
  Sense strand starting at position 1753 of SEQ ID NO: 1241372
gggucuugguagaauggga

SEQ ID NO: 1267493 - RNA, 19 nt, Artificial Sequence
  Description of Artificial Sequence: Synthetic oligonucleotide
  Antisense strand to SEQ ID NO: 1267492
ucccauucuaccaagaccc

SEQ ID NO: 1267494 - RNA, 19 nt, Artificial Sequence
  Description of Artificial Sequence: Synthetic oligonucleotide
  Sense strand starting at position 1781 of SEQ ID NO: 1241372
cagaacauuccugguagau

SEQ ID NO: 1267495 - RNA, 19 nt, Artificial Sequence
  Description of Artificial Sequence: Synthetic oligonucleotide
  Antisense strand to SEQ ID NO: 1267494
aucuaccaggaauguucug

SEQ ID NO: 1267496 - RNA, 19 nt, Artificial Sequence
  Description of Artificial Sequence: Synthetic oligonucleotide
  Sense strand starting at position 1931 of SEQ ID NO: 1241372
gcaucuucucaggaaggcu

SEQ ID NO: 1267497 - RNA, 19 nt, Artificial Sequence
  Description of Artificial Sequence: Synthetic oligonucleotide
  Antisense strand to SEQ ID NO: 1267496
agccuuccugagaagaugc

SEQ ID NO: 1267498 - RNA, 19 nt, Artificial Sequence
  Description of Artificial Sequence: Synthetic oligonucleotide
  Sense strand starting at position 2132 of SEQ ID NO: 1241372
gugagaaucaugcagugac

SEQ ID NO: 1267499 - RNA, 19 nt, Artificial Sequence
  Description of Artificial Sequence: Synthetic oligonucleotide
  Antisense strand to SEQ ID NO: 1267498
gucacugcaugauucucac

SEQ ID NO: 1267500 - RNA, 19 nt, Artificial Sequence
  Description of Artificial Sequence: Synthetic oligonucleotide
  Sense strand starting at position 2277 of SEQ ID NO: 1241372
cugaguucccagugauaga

SEQ ID NO: 1267501 - RNA, 19 nt, Artificial Sequence
  Description of Artificial Sequence: Synthetic oligonucleotide
  Antisense strand to SEQ ID NO: 1267500
ucuaucacugggaacucag

SEQ ID NO: 1267502 - RNA, 19 nt, Artificial Sequence
  Description of Artificial Sequence: Synthetic oligonucleotide
  Sense strand starting at position 2356 of SEQ ID NO: 1241372
guguuugagcccuucuguu

SEQ ID NO: 1267503 - RNA, 19 nt, Artificial Sequence
  Description of Artificial Sequence: Synthetic oligonucleotide
  Antisense strand to SEQ ID NO: 1267502
aacagaagggcucaaacac

SEQ ID NO: 1267504 - RNA, 19 nt, Artificial Sequence
  Description of Artificial Sequence: Synthetic oligonucleotide
  Sense strand starting at position 2422 of SEQ ID NO: 1241372
cugaccaucugguugaaga

SEQ ID NO: 1267505 - RNA, 19 nt, Artificial Sequence
  Description of Artificial Sequence: Synthetic oligonucleotide
  Antisense strand to SEQ ID NO: 1267504
ucuucaaccagauggucag

SEQ ID NO: 1267506 - RNA, 19 nt, Artificial Sequence
  Description of Artificial Sequence: Synthetic oligonucleotide
  Sense strand starting at position 2559 of SEQ ID NO: 1241372
auagcuuccuuucuagaga

SEQ ID NO: 1267507 - RNA, 19 nt, Artificial Sequence
  Description of Artificial Sequence: Synthetic oligonucleotide
  Antisense strand to SEQ ID NO: 1267506
ucucuagaaaggaagcuau

SEQ ID NO: 1267508 - RNA, 19 nt, Artificial Sequence
  Description of Artificial Sequence: Synthetic oligonucleotide
  Sense strand starting at position 2562 of SEQ ID NO: 1241372
gcuuccuuucuagagaauu

SEQ ID NO: 1267509 - RNA, 19 nt, Artificial Sequence
  Description of Artificial Sequence: Synthetic oligonucleotide
  Antisense strand to SEQ ID NO: 1267508
aauucucuagaaaggaagc

SEQ ID NO: 1267510 - RNA, 19 nt, Artificial Sequence
  Description of Artificial Sequence: Synthetic oligonucleotide
  Sense strand starting at position 2669 of SEQ ID NO: 1241372
uuuauugggcuagauuaau

SEQ ID NO: 1267511 - RNA, 19 nt, Artificial Sequence
  Description of Artificial Sequence: Synthetic oligonucleotide
  Antisense strand to SEQ ID NO: 1267510
auuaaucuagcccaauaaa

SEQ ID NO: 1267512 - RNA, 19 nt, Artificial Sequence
  Description of Artificial Sequence: Synthetic oligonucleotide
  Sense strand starting at position 2685 of SEQ ID NO: 1241372
aaugaauugcuaggaguca

SEQ ID NO: 1267513 - RNA, 19 nt, Artificial Sequence
  Description of Artificial Sequence: Synthetic oligonucleotide
  Antisense strand to SEQ ID NO: 1267512
ugacuccuagcaauucauu

SEQ ID NO: 1267514 - RNA, 19 nt, Artificial Sequence
  Description of Artificial Sequence: Synthetic oligonucleotide
  Sense strand starting at position 2801 of SEQ ID NO: 1241372
gcugauaccauaugaagug

SEQ ID NO: 1267515 - RNA, 19 nt, Artificial Sequence
  Description of Artificial Sequence: Synthetic oligonucleotide
  Antisense strand to SEQ ID NO: 1267514
cacuucauaugguaucagc

SEQ ID NO: 1267516 - RNA, 19 nt, Artificial Sequence
  Description of Artificial Sequence: Synthetic oligonucleotide
  Sense strand starting at position 2847 of SEQ ID NO: 1241372
aguaguuguguuguuuagu

SEQ ID NO: 1267517 - RNA, 19 nt, Artificial Sequence
  Description of Artificial Sequence: Synthetic oligonucleotide
  Antisense strand to SEQ ID NO: 1267516
acuaaacaacacaacuacu

SEQ ID NO: 1267518 - RNA, 19 nt, Artificial Sequence
  Description of Artificial Sequence: Synthetic oligonucleotide
  Sense strand starting at position 2920 of SEQ ID NO: 1241372
acaggcucacaguaaacau

SEQ ID NO: 1267519 - RNA, 19 nt, Artificial Sequence
  Description of Artificial Sequence: Synthetic oligonucleotide
  Antisense strand to SEQ ID NO: 1267518
auguuuacugugagccugu

SEQ ID NO: 1267520 - RNA, 19 nt, Artificial Sequence
  Description of Artificial Sequence: Synthetic oligonucleotide
  Sense strand starting at position 2981 of SEQ ID NO: 1241372
gaaagauuguuguuucuga

SEQ ID NO: 1267521 - RNA, 19 nt, Artificial Sequence
  Description of Artificial Sequence: Synthetic oligonucleotide
  Antisense strand to SEQ ID NO: 1267520
ucagaaacaacaaucuuuc

SEQ ID NO: 1267522 - RNA, 19 nt, Artificial Sequence
  Description of Artificial Sequence: Synthetic oligonucleotide
  Sense strand starting at position 2982 of SEQ ID NO: 1241372
aaagauuguuguuucugaa

SEQ ID NO: 1267523 - RNA, 19 nt, Artificial Sequence
  Description of Artificial Sequence: Synthetic oligonucleotide
  Antisense strand to SEQ ID NO: 1267522
uucagaaacaacaaucuuu

SEQ ID NO: 1267524 - RNA, 19 nt, Artificial Sequence
  Description of Artificial Sequence: Synthetic oligonucleotide
  Sense strand starting at position 3051 of SEQ ID NO: 1241372
cgauucuugugauuuguuu

SEQ ID NO: 1267525 - RNA, 19 nt, Artificial Sequence
  Description of Artificial Sequence: Synthetic oligonucleotide
  Antisense strand to SEQ ID NO: 1267524
aaacaaaucacaagaaucg

SEQ ID NO: 1267526 - RNA, 19 nt, Artificial Sequence
  Description of Artificial Sequence: Synthetic oligonucleotide
  Sense strand starting at position 3058 of SEQ ID NO: 1241372
ugugauuuguuuccaccuu

SEQ ID NO: 1267527 - RNA, 19 nt, Artificial Sequence
  Description of Artificial Sequence: Synthetic oligonucleotide
  Antisense strand to SEQ ID NO: 1267526
aagguggaaacaaaucaca

SEQ ID NO: 1267528 - RNA, 19 nt, Artificial Sequence
  Description of Artificial Sequence: Synthetic oligonucleotide
  Sense strand starting at position 3099 of SEQ ID NO: 1241372
uucuaugaggaaugguaua

SEQ ID NO: 1267529 - RNA, 19 nt, Artificial Sequence
  Description of Artificial Sequence: Synthetic oligonucleotide
  Antisense strand to SEQ ID NO: 1267528
uauaccauuccucauagaa

SEQ ID NO: 1267530 - RNA, 19 nt, Artificial Sequence
  Description of Artificial Sequence: Synthetic oligonucleotide
  Sense strand starting at position 3127 of SEQ ID NO: 1241372
auagaauuccaguguaaac

SEQ ID NO: 1267531 - RNA, 19 nt, Artificial Sequence
  Description of Artificial Sequence: Synthetic oligonucleotide
  Antisense strand to SEQ ID NO: 1267530
guuuacacuggaauucuau

SEQ ID NO: 1267532 - RNA, 19 nt, Artificial Sequence
  Description of Artificial Sequence: Synthetic oligonucleotide
  Sense strand starting at position 3129 of SEQ ID NO: 1241372
agaauuccaguguaaacgu

SEQ ID NO: 1267533 - RNA, 19 nt, Artificial Sequence
  Description of Artificial Sequence: Synthetic oligonucleotide
  Antisense strand to SEQ ID NO: 1267532
acguuuacacuggaauucu

SEQ ID NO: 1267534 - RNA, 19 nt, Artificial Sequence
  Description of Artificial Sequence: Synthetic oligonucleotide
  Sense strand starting at position 3324 of SEQ ID NO: 1241372
gacugacuguuaccauaag

SEQ ID NO: 1267535 - RNA, 19 nt, Artificial Sequence
  Description of Artificial Sequence: Synthetic oligonucleotide
  Antisense strand to SEQ ID NO: 1267534
cuuaugguaacagucaguc

SEQ ID NO: 1267536 - RNA, 19 nt, Artificial Sequence
  Description of Artificial Sequence: Synthetic oligonucleotide
  Sense strand starting at position 3360 of SEQ ID NO: 1241372
uugggaucacauuguacau

SEQ ID NO: 1267537 - RNA, 19 nt, Artificial Sequence
  Description of Artificial Sequence: Synthetic oligonucleotide
  Antisense strand to SEQ ID NO: 1267536
auguacaaugugaucccaa

SEQ ID NO: 1267538 - RNA, 19 nt, Artificial Sequence
  Description of Artificial Sequence: Synthetic oligonucleotide
  Sense strand starting at position 3438 of SEQ ID NO: 1241372
guagaaaucuuagucaaua

SEQ ID NO: 1267539 - RNA, 19 nt, Artificial Sequence
  Description of Artificial Sequence: Synthetic oligonucleotide
  Antisense strand to SEQ ID NO: 1267538
uauugacuaagauuucuac

SEQ ID NO: 1267540 - RNA, 19 nt, Artificial Sequence
  Description of Artificial Sequence: Synthetic oligonucleotide
  Sense strand starting at position 3588 of SEQ ID NO: 1241372
ugaaauaugcucuagcaca

SEQ ID NO: 1267541 - RNA, 19 nt, Artificial Sequence
  Description of Artificial Sequence: Synthetic oligonucleotide
  Antisense strand to SEQ ID NO: 1267540
ugugcuagagcauauuuca

SEQ ID NO: 1267542 - RNA, 19 nt, Artificial Sequence
  Description of Artificial Sequence: Synthetic oligonucleotide
  Sense strand starting at position 3842 of SEQ ID NO: 1241372
guaauaauguuucugagau

SEQ ID NO: 1267543 - RNA, 19 nt, Artificial Sequence
  Description of Artificial Sequence: Synthetic oligonucleotide
  Antisense strand to SEQ ID NO: 1267542
aucucagaaacauuauuac

SEQ ID NO: 1267544 - RNA, 19 nt, Artificial Sequence
  Description of Artificial Sequence: Synthetic oligonucleotide
  Sense strand starting at position 3925 of SEQ ID NO: 1241372
auguuuauaccacaaguua

SEQ ID NO: 1267545 - RNA, 19 nt, Artificial Sequence
  Description of Artificial Sequence: Synthetic oligonucleotide
  Antisense strand to SEQ ID NO: 1267544
uaacuugugguauaaacau

SEQ ID NO: 1267546 - RNA, 19 nt, Artificial Sequence
  Description of Artificial Sequence: Synthetic oligonucleotide
  Sense strand starting at position 243 of SEQ ID NO: 1241373
augaaauugcucgaguuug

SEQ ID NO: 1267547 - RNA, 19 nt, Artificial Sequence
  Description of Artificial Sequence: Synthetic oligonucleotide
  Antisense strand to SEQ ID NO: 1267546
caaacucgagcaauuucau

SEQ ID NO: 1267548 - RNA, 19 nt, Artificial Sequence
  Description of Artificial Sequence: Synthetic oligonucleotide
  Sense strand starting at position 440 of SEQ ID NO: 1241373
uuguguuaccaggaacucu

SEQ ID NO: 1267549 - RNA, 19 nt, Artificial Sequence
  Description of Artificial Sequence: Synthetic oligonucleotide
  Antisense strand to SEQ ID NO: 1267548
agaguuccugguaacacaa

SEQ ID NO: 1267550 - RNA, 19 nt, Artificial Sequence
  Description of Artificial Sequence: Synthetic oligonucleotide
  Sense strand starting at position 576 of SEQ ID NO: 1241373
aguccuuucucacuaggau

SEQ ID NO: 1267551 - RNA, 19 nt, Artificial Sequence
  Description of Artificial Sequence: Synthetic oligonucleotide
  Antisense strand to SEQ ID NO: 1267550
auccuagugagaaaggacu

SEQ ID NO: 1267552 - RNA, 19 nt, Artificial Sequence
  Description of Artificial Sequence: Synthetic oligonucleotide
  Sense strand starting at position 577 of SEQ ID NO: 1241373
guccuuucucacuaggaug

SEQ ID NO: 1267553 - RNA, 19 nt, Artificial Sequence
  Description of Artificial Sequence: Synthetic oligonucleotide
  Antisense strand to SEQ ID NO: 1267552
cauccuagugagaaaggac

SEQ ID NO: 1267554 - RNA, 19 nt, Artificial Sequence
  Description of Artificial Sequence: Synthetic oligonucleotide
  Sense strand starting at position 749 of SEQ ID NO: 1241373
ggcuuaggacgacagugau

SEQ ID NO: 1267555 - RNA, 19 nt, Artificial Sequence
  Description of Artificial Sequence: Synthetic oligonucleotide
  Antisense strand to SEQ ID NO: 1267554
aucacugucguccuaagcc

SEQ ID NO: 1267556 - RNA, 19 nt, Artificial Sequence
  Description of Artificial Sequence: Synthetic oligonucleotide
  Sense strand starting at position 1076 of SEQ ID NO: 1241373
augaucuacccaugagcuu

SEQ ID NO: 1267557 - RNA, 19 nt, Artificial Sequence
  Description of Artificial Sequence: Synthetic oligonucleotide
  Antisense strand to SEQ ID NO: 1267556
aagcucauggguagaucau

SEQ ID NO: 1267558 - RNA, 19 nt, Artificial Sequence
  Description of Artificial Sequence: Synthetic oligonucleotide
  Sense strand starting at position 1161 of SEQ ID NO: 1241373
uuguuuggugcauaaauga

SEQ ID NO: 1267559 - RNA, 19 nt, Artificial Sequence
  Description of Artificial Sequence: Synthetic oligonucleotide
  Antisense strand to SEQ ID NO: 1267558
ucauuuaugcaccaaacaa

SEQ ID NO: 1267560 - RNA, 19 nt, Artificial Sequence
  Description of Artificial Sequence: Synthetic oligonucleotide
  Sense strand starting at position 1234 of SEQ ID NO: 1241373
ucaggaccucagggauguu

SEQ ID NO: 1267561 - RNA, 19 nt, Artificial Sequence
  Description of Artificial Sequence: Synthetic oligonucleotide
  Antisense strand to SEQ ID NO: 1267560
aacaucccugagguccuga

SEQ ID NO: 1267562 - RNA, 19 nt, Artificial Sequence
  Description of Artificial Sequence: Synthetic oligonucleotide
  Sense strand starting at position 1237 of SEQ ID NO: 1241373
ggaccucagggauguuaga

SEQ ID NO: 1267563 - RNA, 19 nt, Artificial Sequence
  Description of Artificial Sequence: Synthetic oligonucleotide
  Antisense strand to SEQ ID NO: 1267562
ucuaacaucccugaggucc

SEQ ID NO: 1267564 - RNA, 19 nt, Artificial Sequence
  Description of Artificial Sequence: Synthetic oligonucleotide
  Sense strand starting at position 1452 of SEQ ID NO: 1241373
cugaauaagugguucuuaa

SEQ ID NO: 1267565 - RNA, 19 nt, Artificial Sequence
  Description of Artificial Sequence: Synthetic oligonucleotide
  Antisense strand to SEQ ID NO: 1267564
uuaagaaccacuuauucag

SEQ ID NO: 1267566 - RNA, 19 nt, Artificial Sequence
  Description of Artificial Sequence: Synthetic oligonucleotide
  Sense strand starting at position 1470 of SEQ ID NO: 1241373
agcugaguccaguaacaac

SEQ ID NO: 1267567 - RNA, 19 nt, Artificial Sequence
  Description of Artificial Sequence: Synthetic oligonucleotide
  Antisense strand to SEQ ID NO: 1267566
guuguuacuggacucagcu

SEQ ID NO: 1267568 - RNA, 19 nt, Artificial Sequence
  Description of Artificial Sequence: Synthetic oligonucleotide
  Sense strand starting at position 1532 of SEQ ID NO: 1241373
uggaguguagaguaauaau

SEQ ID NO: 1267569 - RNA, 19 nt, Artificial Sequence
  Description of Artificial Sequence: Synthetic oligonucleotide
  Antisense strand to SEQ ID NO: 1267568
auuauuacucuacacucca

SEQ ID NO: 1267570 - RNA, 19 nt, Artificial Sequence
  Description of Artificial Sequence: Synthetic oligonucleotide
  Sense strand starting at position 1742 of SEQ ID NO: 1241373
gugggcucagauugaggaa

SEQ ID NO: 1267571 - RNA, 19 nt, Artificial Sequence
  Description of Artificial Sequence: Synthetic oligonucleotide
  Antisense strand to SEQ ID NO: 1267570
uuccucaaucugagcccac

SEQ ID NO: 1267572 - RNA, 19 nt, Artificial Sequence
  Description of Artificial Sequence: Synthetic oligonucleotide
  Sense strand starting at position 1782 of SEQ ID NO: 1241373
gguacaggguaucuuauaa

SEQ ID NO: 1267573 - RNA, 19 nt, Artificial Sequence
  Description of Artificial Sequence: Synthetic oligonucleotide
  Antisense strand to SEQ ID NO: 1267572
uuauaagauacccuguacc

SEQ ID NO: 1267574 - RNA, 19 nt, Artificial Sequence
  Description of Artificial Sequence: Synthetic oligonucleotide
  Sense strand starting at position 1805 of SEQ ID NO: 1241373
gguucaggccucuggaaua

SEQ ID NO: 1267575 - RNA, 19 nt, Artificial Sequence
  Description of Artificial Sequence: Synthetic oligonucleotide
  Antisense strand to SEQ ID NO: 1267574
uauuccagaggccugaacc

SEQ ID NO: 1267576 - RNA, 19 nt, Artificial Sequence
  Description of Artificial Sequence: Synthetic oligonucleotide
  Sense strand starting at position 1822 of SEQ ID NO: 1241373
uagggauagucacuuaccu

SEQ ID NO: 1267577 - RNA, 19 nt, Artificial Sequence
  Description of Artificial Sequence: Synthetic oligonucleotide
  Antisense strand to SEQ ID NO: 1267576
agguaagugacuaucccua

SEQ ID NO: 1267578 - RNA, 19 nt, Artificial Sequence
  Description of Artificial Sequence: Synthetic oligonucleotide
  Sense strand starting at position 1824 of SEQ ID NO: 1241373
gggauagucacuuaccugu

SEQ ID NO: 1267579 - RNA, 19 nt, Artificial Sequence
  Description of Artificial Sequence: Synthetic oligonucleotide
  Antisense strand to SEQ ID NO: 1267578
acagguaagugacuauccc

SEQ ID NO: 1267580 - RNA, 19 nt, Artificial Sequence
  Description of Artificial Sequence: Synthetic oligonucleotide
  Sense strand starting at position 2035 of SEQ ID NO: 1241373
auuauagaaggugguuuau

SEQ ID NO: 1267581 - RNA, 19 nt, Artificial Sequence
  Description of Artificial Sequence: Synthetic oligonucleotide
  Antisense strand to SEQ ID NO: 1267580
auaaaccaccuucuauaau

SEQ ID NO: 1267582 - RNA, 19 nt, Artificial Sequence
  Description of Artificial Sequence: Synthetic oligonucleotide
  Sense strand starting at position 2037 of SEQ ID NO: 1241373
uauagaaggugguuuauua

SEQ ID NO: 1267583 - RNA, 19 nt, Artificial Sequence
  Description of Artificial Sequence: Synthetic oligonucleotide
  Antisense strand to SEQ ID NO: 1267582
uaauaaaccaccuucuaua

SEQ ID NO: 1267584 - RNA, 19 nt, Artificial Sequence
  Description of Artificial Sequence: Synthetic oligonucleotide
  Sense strand starting at position 2204 of SEQ ID NO: 1241373
gcuccucagugacugagaa

SEQ ID NO: 1267585 - RNA, 19 nt, Artificial Sequence
  Description of Artificial Sequence: Synthetic oligonucleotide
  Antisense strand to SEQ ID NO: 1267584
uucucagucacugaggagc

SEQ ID NO: 1267586 - RNA, 19 nt, Artificial Sequence
  Description of Artificial Sequence: Synthetic oligonucleotide
  Sense strand starting at position 2294 of SEQ ID NO: 1241373
aagccagauccagggauau

SEQ ID NO: 1267587 - RNA, 19 nt, Artificial Sequence
  Description of Artificial Sequence: Synthetic oligonucleotide
  Antisense strand to SEQ ID NO: 1267586
auaucccuggaucuggcuu

SEQ ID NO: 1267588 - RNA, 19 nt, Artificial Sequence
  Description of Artificial Sequence: Synthetic oligonucleotide
  Sense strand starting at position 2336 of SEQ ID NO: 1241373
aagaauugaugguuagcaa

SEQ ID NO: 1267589 - RNA, 19 nt, Artificial Sequence
  Description of Artificial Sequence: Synthetic oligonucleotide
  Antisense strand to SEQ ID NO: 1267588
uugcuaaccaucaauucuu

SEQ ID NO: 1267590 - RNA, 19 nt, Artificial Sequence
  Description of Artificial Sequence: Synthetic oligonucleotide
  Sense strand starting at position 2343 of SEQ ID NO: 1241373
gaugguuagcaagaguaga

SEQ ID NO: 1267591 - RNA, 19 nt, Artificial Sequence
  Description of Artificial Sequence: Synthetic oligonucleotide
  Antisense strand to SEQ ID NO: 1267590
ucuacucuugcuaaccauc

SEQ ID NO: 1267592 - RNA, 19 nt, Artificial Sequence
  Description of Artificial Sequence: Synthetic oligonucleotide
  Sense strand starting at position 2743 of SEQ ID NO: 1241373
aucuauggugcuuaugaau

SEQ ID NO: 1267593 - RNA, 19 nt, Artificial Sequence
  Description of Artificial Sequence: Synthetic oligonucleotide
  Antisense strand to SEQ ID NO: 1267592
auucauaagcaccauagau

SEQ ID NO: 1267594 - RNA, 19 nt, Artificial Sequence
  Description of Artificial Sequence: Synthetic oligonucleotide
  Sense strand starting at position 2791 of SEQ ID NO: 1241373
guuguuguugccaggugau

SEQ ID NO: 1267595 - RNA, 19 nt, Artificial Sequence
  Description of Artificial Sequence: Synthetic oligonucleotide
  Antisense strand to SEQ ID NO: 1267594
aucaccuggcaacaacaac

SEQ ID NO: 1267596 - RNA, 19 nt, Artificial Sequence
  Description of Artificial Sequence: Synthetic oligonucleotide
  Sense strand starting at position 2822 of SEQ ID NO: 1241373
gcugaucauccugauaaua

SEQ ID NO: 1267597 - RNA, 19 nt, Artificial Sequence
  Description of Artificial Sequence: Synthetic oligonucleotide
  Antisense strand to SEQ ID NO: 1267596
uauuaucaggaugaucagc

SEQ ID NO: 1267598 - RNA, 19 nt, Artificial Sequence
  Description of Artificial Sequence: Synthetic oligonucleotide
  Sense strand starting at position 3224 of SEQ ID NO: 1241373
auaggcuguccauaaacaa

SEQ ID NO: 1267599 - RNA, 19 nt, Artificial Sequence
  Description of Artificial Sequence: Synthetic oligonucleotide
  Antisense strand to SEQ ID NO: 1267598
uuguuuauggacagccuau

SEQ ID NO: 1267600 - RNA, 19 nt, Artificial Sequence
  Description of Artificial Sequence: Synthetic oligonucleotide
  Sense strand starting at position 3301 of SEQ ID NO: 1241373
auguauaguuaaguaggaa

SEQ ID NO: 1267601 - RNA, 19 nt, Artificial Sequence
  Description of Artificial Sequence: Synthetic oligonucleotide
  Antisense strand to SEQ ID NO: 1267600
uuccuacuuaacuauacau

SEQ ID NO: 1267602 - RNA, 19 nt, Artificial Sequence
  Description of Artificial Sequence: Synthetic oligonucleotide
  Sense strand starting at position 3302 of SEQ ID NO: 1241373
uguauaguuaaguaggaac

SEQ ID NO: 1267603 - RNA, 19 nt, Artificial Sequence
  Description of Artificial Sequence: Synthetic oligonucleotide
  Antisense strand to SEQ ID NO: 1267602
guuccuacuuaacuauaca

SEQ ID NO: 1267604 - RNA, 19 nt, Artificial Sequence
  Description of Artificial Sequence: Synthetic oligonucleotide
  Sense strand starting at position 3304 of SEQ ID NO: 1241373
uauaguuaaguaggaacau

SEQ ID NO: 1267605 - RNA, 19 nt, Artificial Sequence
  Description of Artificial Sequence: Synthetic oligonucleotide
  Antisense strand to SEQ ID NO: 1267604
auguuccuacuuaacuaua

SEQ ID NO: 1267606 - RNA, 19 nt, Artificial Sequence
  Description of Artificial Sequence: Synthetic oligonucleotide
  Sense strand starting at position 3633 of SEQ ID NO: 1241373
agguuugacuguuuaacau

SEQ ID NO: 1267607 - RNA, 19 nt, Artificial Sequence
  Description of Artificial Sequence: Synthetic oligonucleotide
  Antisense strand to SEQ ID NO: 1267606
auguuaaacagucaaaccu

SEQ ID NO: 1267608 - RNA, 19 nt, Artificial Sequence
  Description of Artificial Sequence: Synthetic oligonucleotide
  Sense strand starting at position 3735 of SEQ ID NO: 1241373
auugucuuugcgcucugaa

SEQ ID NO: 1267609 - RNA, 19 nt, Artificial Sequence
  Description of Artificial Sequence: Synthetic oligonucleotide
  Antisense strand to SEQ ID NO: 1267608
uucagagcgcaaagacaau

SEQ ID NO: 1267610 - RNA, 19 nt, Artificial Sequence
  Description of Artificial Sequence: Synthetic oligonucleotide
  Sense strand starting at position 3736 of SEQ ID NO: 1241373
uugucuuugcgcucugaag

SEQ ID NO: 1267611 - RNA, 19 nt, Artificial Sequence
  Description of Artificial Sequence: Synthetic oligonucleotide
  Antisense strand to SEQ ID NO: 1267610
cuucagagcgcaaagacaa

SEQ ID NO: 1267612 - RNA, 19 nt, Artificial Sequence
  Description of Artificial Sequence: Synthetic oligonucleotide
  Sense strand starting at position 3737 of SEQ ID NO: 1241373
ugucuuugcgcucugaagu

SEQ ID NO: 1267613 - RNA, 19 nt, Artificial Sequence
  Description of Artificial Sequence: Synthetic oligonucleotide
  Antisense strand to SEQ ID NO: 1267612
acuucagagcgcaaagaca

SEQ ID NO: 1267614 - RNA, 19 nt, Artificial Sequence
  Description of Artificial Sequence: Synthetic oligonucleotide
  Sense strand starting at position 3766 of SEQ ID NO: 1241373
gcuuguucuagucuagugu

SEQ ID NO: 1267615 - RNA, 19 nt, Artificial Sequence
  Description of Artificial Sequence: Synthetic oligonucleotide
  Antisense strand to SEQ ID NO: 1267614
acacuagacuagaacaagc

SEQ ID NO: 1267616 - RNA, 19 nt, Artificial Sequence
  Description of Artificial Sequence: Synthetic oligonucleotide
  Sense strand starting at position 3774 of SEQ ID NO: 1241373
uagucuaguguugaaacuu

SEQ ID NO: 1267617 - RNA, 19 nt, Artificial Sequence
  Description of Artificial Sequence: Synthetic oligonucleotide
  Antisense strand to SEQ ID NO: 1267616
aaguuucaacacuagacua

SEQ ID NO: 1267618 - RNA, 19 nt, Artificial Sequence
  Description of Artificial Sequence: Synthetic oligonucleotide
  Sense strand starting at position 3962 of SEQ ID NO: 1241373
ccuugaguagcuuaaugau

SEQ ID NO: 1267619 - RNA, 19 nt, Artificial Sequence
  Description of Artificial Sequence: Synthetic oligonucleotide
  Antisense strand to SEQ ID NO: 1267618
aucauuaagcuacucaagg

SEQ ID NO: 1267620 - RNA, 19 nt, Artificial Sequence
  Description of Artificial Sequence: Synthetic oligonucleotide
  Sense strand starting at position 3971 of SEQ ID NO: 1241373
gcuuaaugaucuucuggau

SEQ ID NO: 1267621 - RNA, 19 nt, Artificial Sequence
  Description of Artificial Sequence: Synthetic oligonucleotide
  Antisense strand to SEQ ID NO: 1267620
auccagaagaucauuaagc

SEQ ID NO: 1267622 - RNA, 19 nt, Artificial Sequence
  Description of Artificial Sequence: Synthetic oligonucleotide
  Sense strand starting at position 3975 of SEQ ID NO: 1241373
aaugaucuucuggauuguu

SEQ ID NO: 1267623 - RNA, 19 nt, Artificial Sequence
  Description of Artificial Sequence: Synthetic oligonucleotide
  Antisense strand to SEQ ID NO: 1267622
aacaauccagaagaucauu

SEQ ID NO: 1267624 - RNA, 19 nt, Artificial Sequence
  Description of Artificial Sequence: Synthetic oligonucleotide
  Sense strand starting at position 3978 of SEQ ID NO: 1241373
gaucuucuggauuguuuau

SEQ ID NO: 1267625 - RNA, 19 nt, Artificial Sequence
  Description of Artificial Sequence: Synthetic oligonucleotide
  Antisense strand to SEQ ID NO: 1267624
auaaacaauccagaagauc

SEQ ID NO: 1267626 - RNA, 19 nt, Artificial Sequence
  Description of Artificial Sequence: Synthetic oligonucleotide
  Sense strand starting at position 24 of SEQ ID NO: 1241374
gggauucuaaucuguggaa

SEQ ID NO: 1267627 - RNA, 19 nt, Artificial Sequence
  Description of Artificial Sequence: Synthetic oligonucleotide
  Antisense strand to SEQ ID NO: 1267626
uuccacagauuagaauccc

SEQ ID NO: 1267628 - RNA, 19 nt, Artificial Sequence
  Description of Artificial Sequence: Synthetic oligonucleotide
  Sense strand starting at position 25 of SEQ ID NO: 1241374
ggauucuaaucuguggaac

SEQ ID NO: 1267629 - RNA, 19 nt, Artificial Sequence
  Description of Artificial Sequence: Synthetic oligonucleotide
  Antisense strand to SEQ ID NO: 1267628
guuccacagauuagaaucc

SEQ ID NO: 1267630 - RNA, 19 nt, Artificial Sequence
  Description of Artificial Sequence: Synthetic oligonucleotide
  Sense strand starting at position 393 of SEQ ID NO: 1241374
cccaguuaugagugaacug

SEQ ID NO: 1267631 - RNA, 19 nt, Artificial Sequence
  Description of Artificial Sequence: Synthetic oligonucleotide
  Antisense strand to SEQ ID NO: 1267630
caguucacucauaacuggg

SEQ ID NO: 1267632 - RNA, 19 nt, Artificial Sequence
  Description of Artificial Sequence: Synthetic oligonucleotide
  Sense strand starting at position 501 of SEQ ID NO: 1241374
uugucuaagaucuguuggu

SEQ ID NO: 1267633 - RNA, 19 nt, Artificial Sequence
  Description of Artificial Sequence: Synthetic oligonucleotide
  Antisense strand to SEQ ID NO: 1267632
accaacagaucuuagacaa

SEQ ID NO: 1267634 - RNA, 19 nt, Artificial Sequence
  Description of Artificial Sequence: Synthetic oligonucleotide
  Sense strand starting at position 502 of SEQ ID NO: 1241374
ugucuaagaucuguuggua

SEQ ID NO: 1267635 - RNA, 19 nt, Artificial Sequence
  Description of Artificial Sequence: Synthetic oligonucleotide
  Antisense strand to SEQ ID NO: 1267634
uaccaacagaucuuagaca

SEQ ID NO: 1267636 - RNA, 19 nt, Artificial Sequence
  Description of Artificial Sequence: Synthetic oligonucleotide
  Sense strand starting at position 505 of SEQ ID NO: 1241374
cuaagaucuguugguaguu

SEQ ID NO: 1267637 - RNA, 19 nt, Artificial Sequence
  Description of Artificial Sequence: Synthetic oligonucleotide
  Antisense strand to SEQ ID NO: 1267636
aacuaccaacagaucuuag

SEQ ID NO: 1267638 - RNA, 19 nt, Artificial Sequence
  Description of Artificial Sequence: Synthetic oligonucleotide
  Sense strand starting at position 506 of SEQ ID NO: 1241374
uaagaucuguugguaguuu

SEQ ID NO: 1267639 - RNA, 19 nt, Artificial Sequence
  Description of Artificial Sequence: Synthetic oligonucleotide
  Antisense strand to SEQ ID NO: 1267638
aaacuaccaacagaucuua

SEQ ID NO: 1267640 - RNA, 19 nt, Artificial Sequence
  Description of Artificial Sequence: Synthetic oligonucleotide
  Sense strand starting at position 656 of SEQ ID NO: 1241374
cagugaggucaguggcaaa

SEQ ID NO: 1267641 - RNA, 19 nt, Artificial Sequence
  Description of Artificial Sequence: Synthetic oligonucleotide
  Antisense strand to SEQ ID NO: 1267640
uuugccacugaccucacug

SEQ ID NO: 1267642 - RNA, 19 nt, Artificial Sequence
  Description of Artificial Sequence: Synthetic oligonucleotide
  Sense strand starting at position 676 of SEQ ID NO: 1241374
gaguaaugcaaagguguaa

SEQ ID NO: 1267643 - RNA, 19 nt, Artificial Sequence
  Description of Artificial Sequence: Synthetic oligonucleotide
  Antisense strand to SEQ ID NO: 1267642
uuacaccuuugcauuacuc

SEQ ID NO: 1267644 - RNA, 19 nt, Artificial Sequence
  Description of Artificial Sequence: Synthetic oligonucleotide
  Sense strand starting at position 688 of SEQ ID NO: 1241374
gguguaauguggcuacaac

SEQ ID NO: 1267645 - RNA, 19 nt, Artificial Sequence
  Description of Artificial Sequence: Synthetic oligonucleotide
  Antisense strand to SEQ ID NO: 1267644
guuguagccacauuacacc

SEQ ID NO: 1267646 - RNA, 19 nt, Artificial Sequence
  Description of Artificial Sequence: Synthetic oligonucleotide
  Sense strand starting at position 911 of SEQ ID NO: 1241374
ggcauugaagguuauuaug

SEQ ID NO: 1267647 - RNA, 19 nt, Artificial Sequence
  Description of Artificial Sequence: Synthetic oligonucleotide
  Antisense strand to SEQ ID NO: 1267646
cauaauaaccuucaaugcc

SEQ ID NO: 1267648 - RNA, 19 nt, Artificial Sequence
  Description of Artificial Sequence: Synthetic oligonucleotide
  Sense strand starting at position 913 of SEQ ID NO: 1241374
cauugaagguuauuaugau

SEQ ID NO: 1267649 - RNA, 19 nt, Artificial Sequence
  Description of Artificial Sequence: Synthetic oligonucleotide
  Antisense strand to SEQ ID NO: 1267648
aucauaauaaccuucaaug

SEQ ID NO: 1267650 - RNA, 19 nt, Artificial Sequence
  Description of Artificial Sequence: Synthetic oligonucleotide
  Sense strand starting at position 956 of SEQ ID NO: 1241374
uuugguuuacucgaucguu

SEQ ID NO: 1267651 - RNA, 19 nt, Artificial Sequence
  Description of Artificial Sequence: Synthetic oligonucleotide
  Antisense strand to SEQ ID NO: 1267650
aacgaucgaguaaaccaaa

SEQ ID NO: 1267652 - RNA, 19 nt, Artificial Sequence
  Description of Artificial Sequence: Synthetic oligonucleotide
  Sense strand starting at position 1044 of SEQ ID NO: 1241374
ggcagaaugcugggacuua

SEQ ID NO: 1267653 - RNA, 19 nt, Artificial Sequence
  Description of Artificial Sequence: Synthetic oligonucleotide
  Antisense strand to SEQ ID NO: 1267652
uaagucccagcauucugcc

SEQ ID NO: 1267654 - RNA, 19 nt, Artificial Sequence
  Description of Artificial Sequence: Synthetic oligonucleotide
  Sense strand starting at position 1151 of SEQ ID NO: 1241374
aacgauuccugccuuggau

SEQ ID NO: 1267655 - RNA, 19 nt, Artificial Sequence
  Description of Artificial Sequence: Synthetic oligonucleotide
  Antisense strand to SEQ ID NO: 1267654
auccaaggcaggaaucguu

SEQ ID NO: 1267656 - RNA, 19 nt, Artificial Sequence
  Description of Artificial Sequence: Synthetic oligonucleotide
  Sense strand starting at position 1153 of SEQ ID NO: 1241374
cgauuccugccuuggauga

SEQ ID NO: 1267657 - RNA, 19 nt, Artificial Sequence
  Description of Artificial Sequence: Synthetic oligonucleotide
  Antisense strand to SEQ ID NO: 1267656
ucauccaaggcaggaaucg

SEQ ID NO: 1267658 - RNA, 19 nt, Artificial Sequence
  Description of Artificial Sequence: Synthetic oligonucleotide
  Sense strand starting at position 1160 of SEQ ID NO: 1241374
ugccuuggaugagacauua

SEQ ID NO: 1267659 - RNA, 19 nt, Artificial Sequence
  Description of Artificial Sequence: Synthetic oligonucleotide
  Antisense strand to SEQ ID NO: 1267658
uaaugucucauccaaggca

SEQ ID NO: 1267660 - RNA, 19 nt, Artificial Sequence
  Description of Artificial Sequence: Synthetic oligonucleotide
  Sense strand starting at position 1191 of SEQ ID NO: 1241374
acaaucgacuugucaacaa

SEQ ID NO: 1267661 - RNA, 19 nt, Artificial Sequence
  Description of Artificial Sequence: Synthetic oligonucleotide
  Antisense strand to SEQ ID NO: 1267660
uuguugacaagucgauugu

SEQ ID NO: 1267662 - RNA, 19 nt, Artificial Sequence
  Description of Artificial Sequence: Synthetic oligonucleotide
  Sense strand starting at position 1212 of SEQ ID NO: 1241374
gccacuacuuaguuaaguu

SEQ ID NO: 1267663 - RNA, 19 nt, Artificial Sequence
  Description of Artificial Sequence: Synthetic oligonucleotide
  Antisense strand to SEQ ID NO: 1267662
aacuuaacuaaguaguggc

SEQ ID NO: 1267664 - RNA, 19 nt, Artificial Sequence
  Description of Artificial Sequence: Synthetic oligonucleotide
  Sense strand starting at position 1242 of SEQ ID NO: 1241374
caauucuguuuaucguuga

SEQ ID NO: 1267665 - RNA, 19 nt, Artificial Sequence
  Description of Artificial Sequence: Synthetic oligonucleotide
  Antisense strand to SEQ ID NO: 1267664
ucaacgauaaacagaauug

SEQ ID NO: 1267666 - RNA, 19 nt, Artificial Sequence
  Description of Artificial Sequence: Synthetic oligonucleotide
  Sense strand starting at position 1245 of SEQ ID NO: 1241374
uucuguuuaucguugaucu

SEQ ID NO: 1267667 - RNA, 19 nt, Artificial Sequence
  Description of Artificial Sequence: Synthetic oligonucleotide
  Antisense strand to SEQ ID NO: 1267666
agaucaacgauaaacagaa

SEQ ID NO: 1267668 - RNA, 19 nt, Artificial Sequence
  Description of Artificial Sequence: Synthetic oligonucleotide
  Sense strand starting at position 1246 of SEQ ID NO: 1241374
ucuguuuaucguugaucua

SEQ ID NO: 1267669 - RNA, 19 nt, Artificial Sequence
  Description of Artificial Sequence: Synthetic oligonucleotide
  Antisense strand to SEQ ID NO: 1267668
uagaucaacgauaaacaga

SEQ ID NO: 1267670 - RNA, 19 nt, Artificial Sequence
  Description of Artificial Sequence: Synthetic oligonucleotide
  Sense strand starting at position 1247 of SEQ ID NO: 1241374
cuguuuaucguugaucuau

SEQ ID NO: 1267671 - RNA, 19 nt, Artificial Sequence
  Description of Artificial Sequence: Synthetic oligonucleotide
  Antisense strand to SEQ ID NO: 1267670
auagaucaacgauaaacag

SEQ ID NO: 1267672 - RNA, 19 nt, Artificial Sequence
  Description of Artificial Sequence: Synthetic oligonucleotide
  Sense strand starting at position 1249 of SEQ ID NO: 1241374
guuuaucguugaucuauga

SEQ ID NO: 1267673 - RNA, 19 nt, Artificial Sequence
  Description of Artificial Sequence: Synthetic oligonucleotide
  Antisense strand to SEQ ID NO: 1267672
ucauagaucaacgauaaac

SEQ ID NO: 1267674 - RNA, 19 nt, Artificial Sequence
  Description of Artificial Sequence: Synthetic oligonucleotide
  Sense strand starting at position 1256 of SEQ ID NO: 1241374
guugaucuaugacugcaaa

SEQ ID NO: 1267675 - RNA, 19 nt, Artificial Sequence
  Description of Artificial Sequence: Synthetic oligonucleotide
  Antisense strand to SEQ ID NO: 1267674
uuugcagucauagaucaac

SEQ ID NO: 1267676 - RNA, 19 nt, Artificial Sequence
  Description of Artificial Sequence: Synthetic oligonucleotide
  Sense strand starting at position 1257 of SEQ ID NO: 1241374
uugaucuaugacugcaaau

SEQ ID NO: 1267677 - RNA, 19 nt, Artificial Sequence
  Description of Artificial Sequence: Synthetic oligonucleotide
  Antisense strand to SEQ ID NO: 1267676
auuugcagucauagaucaa

SEQ ID NO: 1267678 - RNA, 19 nt, Artificial Sequence
  Description of Artificial Sequence: Synthetic oligonucleotide
  Sense strand starting at position 1451 of SEQ ID NO: 1241374
ucugcacucagacguguua

SEQ ID NO: 1267679 - RNA, 19 nt, Artificial Sequence
  Description of Artificial Sequence: Synthetic oligonucleotide
  Antisense strand to SEQ ID NO: 1267678
uaacacgucugagugcaga

SEQ ID NO: 1267680 - RNA, 19 nt, Artificial Sequence
  Description of Artificial Sequence: Synthetic oligonucleotide
  Sense strand starting at position 1453 of SEQ ID NO: 1241374
ugcacucagacguguuaaa

SEQ ID NO: 1267681 - RNA, 19 nt, Artificial Sequence
  Description of Artificial Sequence: Synthetic oligonucleotide
  Antisense strand to SEQ ID NO: 1267680
uuuaacacgucugagugca

SEQ ID NO: 1267682 - RNA, 19 nt, Artificial Sequence
  Description of Artificial Sequence: Synthetic oligonucleotide
  Sense strand starting at position 2559 of SEQ ID NO: 1241374
ggccucguuuaguucuuaa

SEQ ID NO: 1267683 - RNA, 19 nt, Artificial Sequence
  Description of Artificial Sequence: Synthetic oligonucleotide
  Antisense strand to SEQ ID NO: 1267682
uuaagaacuaaacgaggcc

SEQ ID NO: 1267684 - RNA, 19 nt, Artificial Sequence
  Description of Artificial Sequence: Synthetic oligonucleotide
  Sense strand starting at position 2575 of SEQ ID NO: 1241374
uaaagcguccugugagaaa

SEQ ID NO: 1267685 - RNA, 19 nt, Artificial Sequence
  Description of Artificial Sequence: Synthetic oligonucleotide
  Antisense strand to SEQ ID NO: 1267684
uuucucacaggacgcuuua

SEQ ID NO: 1267686 - RNA, 19 nt, Artificial Sequence
  Description of Artificial Sequence: Synthetic oligonucleotide
  Sense strand starting at position 2586 of SEQ ID NO: 1241374
gugagaaagucaccauuau

SEQ ID NO: 1267687 - RNA, 19 nt, Artificial Sequence
  Description of Artificial Sequence: Synthetic oligonucleotide
  Antisense strand to SEQ ID NO: 1267686
auaauggugacuuucucac

SEQ ID NO: 1267688 - RNA, 19 nt, Artificial Sequence
  Description of Artificial Sequence: Synthetic oligonucleotide
  Sense strand starting at position 2669 of SEQ ID NO: 1241374
gucuaaaccugucccaaua

SEQ ID NO: 1267689 - RNA, 19 nt, Artificial Sequence
  Description of Artificial Sequence: Synthetic oligonucleotide
  Antisense strand to SEQ ID NO: 1267688
uauugggacagguuuagac

SEQ ID NO: 1267690 - RNA, 19 nt, Artificial Sequence
  Description of Artificial Sequence: Synthetic oligonucleotide
  Sense strand starting at position 2682 of SEQ ID NO: 1241374
ccaauagcucucggaagga

SEQ ID NO: 1267691 - RNA, 19 nt, Artificial Sequence
  Description of Artificial Sequence: Synthetic oligonucleotide
  Antisense strand to SEQ ID NO: 1267690
uccuuccgagagcuauugg

SEQ ID NO: 1267692 - RNA, 19 nt, Artificial Sequence
  Description of Artificial Sequence: Synthetic oligonucleotide
  Sense strand starting at position 2732 of SEQ ID NO: 1241374
cugcgagucuccucacuaa

SEQ ID NO: 1267693 - RNA, 19 nt, Artificial Sequence
  Description of Artificial Sequence: Synthetic oligonucleotide
  Antisense strand to SEQ ID NO: 1267692
uuagugaggagacucgcag

SEQ ID NO: 1267694 - RNA, 19 nt, Artificial Sequence
  Description of Artificial Sequence: Synthetic oligonucleotide
  Sense strand starting at position 2830 of SEQ ID NO: 1241374
gggucaccuuccucucgaa

SEQ ID NO: 1267695 - RNA, 19 nt, Artificial Sequence
  Description of Artificial Sequence: Synthetic oligonucleotide
  Antisense strand to SEQ ID NO: 1267694
uucgagaggaaggugaccc

SEQ ID NO: 1267696 - RNA, 19 nt, Artificial Sequence
  Description of Artificial Sequence: Synthetic oligonucleotide
  Sense strand starting at position 3143 of SEQ ID NO: 1241374
agcaaucugcccggccaaa

SEQ ID NO: 1267697 - RNA, 19 nt, Artificial Sequence
  Description of Artificial Sequence: Synthetic oligonucleotide
  Antisense strand to SEQ ID NO: 1267696
uuuggccgggcagauugcu

SEQ ID NO: 1267698 - RNA, 19 nt, Artificial Sequence
  Description of Artificial Sequence: Synthetic oligonucleotide
  Sense strand starting at position 3241 of SEQ ID NO: 1241374
gcgcgaucucugcaaccuu

SEQ ID NO: 1267699 - RNA, 19 nt, Artificial Sequence
  Description of Artificial Sequence: Synthetic oligonucleotide
  Antisense strand to SEQ ID NO: 1267698
aagguugcagagaucgcgc

SEQ ID NO: 1267700 - RNA, 19 nt, Artificial Sequence
  Description of Artificial Sequence: Synthetic oligonucleotide
  Sense strand starting at position 3512 of SEQ ID NO: 1241374
cccacaccuucggugaauu

SEQ ID NO: 1267701 - RNA, 19 nt, Artificial Sequence
  Description of Artificial Sequence: Synthetic oligonucleotide
  Antisense strand to SEQ ID NO: 1267700
aauucaccgaagguguggg

SEQ ID NO: 1267702 - RNA, 19 nt, Artificial Sequence
  Description of Artificial Sequence: Synthetic oligonucleotide
  Sense strand starting at position 3513 of SEQ ID NO: 1241374
ccacaccuucggugaauua

SEQ ID NO: 1267703 - RNA, 19 nt, Artificial Sequence
  Description of Artificial Sequence: Synthetic oligonucleotide
  Antisense strand to SEQ ID NO: 1267702
uaauucaccgaaggugugg

SEQ ID NO: 1267704 - RNA, 19 nt, Artificial Sequence
  Description of Artificial Sequence: Synthetic oligonucleotide
  Sense strand starting at position 3514 of SEQ ID NO: 1241374
cacaccuucggugaauuau

SEQ ID NO: 1267705 - RNA, 19 nt, Artificial Sequence
  Description of Artificial Sequence: Synthetic oligonucleotide
  Antisense strand to SEQ ID NO: 1267704
auaauucaccgaaggugug

SEQ ID NO: 1267706 - RNA, 19 nt, Artificial Sequence
  Description of Artificial Sequence: Synthetic oligonucleotide
  Sense strand starting at position 12 of SEQ ID NO: 1241375
uuuggaggcuccuuauuau

SEQ ID NO: 1267707 - RNA, 19 nt, Artificial Sequence
  Description of Artificial Sequence: Synthetic oligonucleotide
  Antisense strand to SEQ ID NO: 1267706
auaauaaggagccuccaaa

SEQ ID NO: 1267708 - RNA, 19 nt, Artificial Sequence
  Description of Artificial Sequence: Synthetic oligonucleotide
  Sense strand starting at position 15 of SEQ ID NO: 1241375
ggaggcuccuuauuaucga

SEQ ID NO: 1267709 - RNA, 19 nt, Artificial Sequence
  Description of Artificial Sequence: Synthetic oligonucleotide
  Antisense strand to SEQ ID NO: 1267708
ucgauaauaaggagccucc

SEQ ID NO: 1267710 - RNA, 19 nt, Artificial Sequence
  Description of Artificial Sequence: Synthetic oligonucleotide
  Sense strand starting at position 41 of SEQ ID NO: 1241375
acauuacgugaccagcauu

SEQ ID NO: 1267711 - RNA, 19 nt, Artificial Sequence
  Description of Artificial Sequence: Synthetic oligonucleotide
  Antisense strand to SEQ ID NO: 1267710
aaugcuggucacguaaugu

SEQ ID NO: 1267712 - RNA, 19 nt, Artificial Sequence
  Description of Artificial Sequence: Synthetic oligonucleotide
  Sense strand starting at position 44 of SEQ ID NO: 1241375
uuacgugaccagcauuaug

SEQ ID NO: 1267713 - RNA, 19 nt, Artificial Sequence
  Description of Artificial Sequence: Synthetic oligonucleotide
  Antisense strand to SEQ ID NO: 1267712
cauaaugcuggucacguaa

SEQ ID NO: 1267714 - RNA, 19 nt, Artificial Sequence
  Description of Artificial Sequence: Synthetic oligonucleotide
  Sense strand starting at position 273 of SEQ ID NO: 1241375
gccacaugccucuaguuaa

SEQ ID NO: 1267715 - RNA, 19 nt, Artificial Sequence
  Description of Artificial Sequence: Synthetic oligonucleotide
  Antisense strand to SEQ ID NO: 1267714
uuaacuagaggcauguggc

SEQ ID NO: 1267716 - RNA, 19 nt, Artificial Sequence
  Description of Artificial Sequence: Synthetic oligonucleotide
  Sense strand starting at position 324 of SEQ ID NO: 1241375
aaacguaggaguuggacua

SEQ ID NO: 1267717 - RNA, 19 nt, Artificial Sequence
  Description of Artificial Sequence: Synthetic oligonucleotide
  Antisense strand to SEQ ID NO: 1267716
uaguccaacuccuacguuu

SEQ ID NO: 1267718 - RNA, 19 nt, Artificial Sequence
  Description of Artificial Sequence: Synthetic oligonucleotide
  Sense strand starting at position 384 of SEQ ID NO: 1241375
aacucaaacuggguaguau

SEQ ID NO: 1267719 - RNA, 19 nt, Artificial Sequence
  Description of Artificial Sequence: Synthetic oligonucleotide
  Antisense strand to SEQ ID NO: 1267718
auacuacccaguuugaguu

SEQ ID NO: 1267720 - RNA, 19 nt, Artificial Sequence
  Description of Artificial Sequence: Synthetic oligonucleotide
  Sense strand starting at position 436 of SEQ ID NO: 1241375
uuugcuuaucagucgcuua

SEQ ID NO: 1267721 - RNA, 19 nt, Artificial Sequence
  Description of Artificial Sequence: Synthetic oligonucleotide
  Antisense strand to SEQ ID NO: 1267720
uaagcgacugauaagcaaa

SEQ ID NO: 1267722 - RNA, 19 nt, Artificial Sequence
  Description of Artificial Sequence: Synthetic oligonucleotide
  Sense strand starting at position 457 of SEQ ID NO: 1241375
cucacccucuggucugaua

SEQ ID NO: 1267723 - RNA, 19 nt, Artificial Sequence
  Description of Artificial Sequence: Synthetic oligonucleotide
  Antisense strand to SEQ ID NO: 1267722
uaucagaccagagggugag

SEQ ID NO: 1267724 - RNA, 19 nt, Artificial Sequence
  Description of Artificial Sequence: Synthetic oligonucleotide
  Sense strand starting at position 468 of SEQ ID NO: 1241375
gucugauaccuuuauccug

SEQ ID NO: 1267725 - RNA, 19 nt, Artificial Sequence
  Description of Artificial Sequence: Synthetic oligonucleotide
  Antisense strand to SEQ ID NO: 1267724
caggauaaagguaucagac

SEQ ID NO: 1267726 - RNA, 19 nt, Artificial Sequence
  Description of Artificial Sequence: Synthetic oligonucleotide
  Sense strand starting at position 470 of SEQ ID NO: 1241375
cugauaccuuuauccugua

SEQ ID NO: 1267727 - RNA, 19 nt, Artificial Sequence
  Description of Artificial Sequence: Synthetic oligonucleotide
  Antisense strand to SEQ ID NO: 1267726
uacaggauaaagguaucag

SEQ ID NO: 1267728 - RNA, 19 nt, Artificial Sequence
  Description of Artificial Sequence: Synthetic oligonucleotide
  Sense strand starting at position 475 of SEQ ID NO: 1241375
accuuuauccuguacaagu

SEQ ID NO: 1267729 - RNA, 19 nt, Artificial Sequence
  Description of Artificial Sequence: Synthetic oligonucleotide
  Antisense strand to SEQ ID NO: 1267728
acuuguacaggauaaaggu

SEQ ID NO: 1267730 - RNA, 19 nt, Artificial Sequence
  Description of Artificial Sequence: Synthetic oligonucleotide
  Sense strand starting at position 485 of SEQ ID NO: 1241375
uguacaaguggucaaagua

SEQ ID NO: 1267731 - RNA, 19 nt, Artificial Sequence
  Description of Artificial Sequence: Synthetic oligonucleotide
  Antisense strand to SEQ ID NO: 1267730
uacuuugaccacuuguaca

SEQ ID NO: 1267732 - RNA, 19 nt, Artificial Sequence
  Description of Artificial Sequence: Synthetic oligonucleotide
  Sense strand starting at position 495 of SEQ ID NO: 1241375
gucaaaguagguugaguaa

SEQ ID NO: 1267733 - RNA, 19 nt, Artificial Sequence
  Description of Artificial Sequence: Synthetic oligonucleotide
  Antisense strand to SEQ ID NO: 1267732
uuacucaaccuacuuugac

SEQ ID NO: 1267734 - RNA, 19 nt, Artificial Sequence
  Description of Artificial Sequence: Synthetic oligonucleotide
  Sense strand starting at position 498 of SEQ ID NO: 1241375
aaaguagguugaguaacau

SEQ ID NO: 1267735 - RNA, 19 nt, Artificial Sequence
  Description of Artificial Sequence: Synthetic oligonucleotide
  Antisense strand to SEQ ID NO: 1267734
auguuacucaaccuacuuu

SEQ ID NO: 1267736 - RNA, 19 nt, Artificial Sequence
  Description of Artificial Sequence: Synthetic oligonucleotide
  Sense strand starting at position 594 of SEQ ID NO: 1241375
agcaauaagccuuaguauc

SEQ ID NO: 1267737 - RNA, 19 nt, Artificial Sequence
  Description of Artificial Sequence: Synthetic oligonucleotide
  Antisense strand to SEQ ID NO: 1267736
gauacuaaggcuuauugcu

SEQ ID NO: 1267738 - RNA, 19 nt, Artificial Sequence
  Description of Artificial Sequence: Synthetic oligonucleotide
  Sense strand starting at position 608 of SEQ ID NO: 1241375
guaucaguaucuucugaaa

SEQ ID NO: 1267739 - RNA, 19 nt, Artificial Sequence
  Description of Artificial Sequence: Synthetic oligonucleotide
  Antisense strand to SEQ ID NO: 1267738
uuucagaagauacugauac

SEQ ID NO: 1267740 - RNA, 19 nt, Artificial Sequence
  Description of Artificial Sequence: Synthetic oligonucleotide
  Sense strand starting at position 721 of SEQ ID NO: 1241375
guguuuguuagauacaguu

SEQ ID NO: 1267741 - RNA, 19 nt, Artificial Sequence
  Description of Artificial Sequence: Synthetic oligonucleotide
  Antisense strand to SEQ ID NO: 1267740
aacuguaucuaacaaacac

SEQ ID NO: 1267742 - RNA, 19 nt, Artificial Sequence
  Description of Artificial Sequence: Synthetic oligonucleotide
  Sense strand starting at position 1004 of SEQ ID NO: 1241375
uccagaaaugcugggacua

SEQ ID NO: 1267743 - RNA, 19 nt, Artificial Sequence
  Description of Artificial Sequence: Synthetic oligonucleotide
  Antisense strand to SEQ ID NO: 1267742
uagucccagcauuucugga

SEQ ID NO: 1267744 - RNA, 19 nt, Artificial Sequence
  Description of Artificial Sequence: Synthetic oligonucleotide
  Sense strand starting at position 1005 of SEQ ID NO: 1241375
ccagaaaugcugggacuau

SEQ ID NO: 1267745 - RNA, 19 nt, Artificial Sequence
  Description of Artificial Sequence: Synthetic oligonucleotide
  Antisense strand to SEQ ID NO: 1267744
auagucccagcauuucugg

SEQ ID NO: 1267746 - RNA, 19 nt, Artificial Sequence
  Description of Artificial Sequence: Synthetic oligonucleotide
  Sense strand starting at position 1014 of SEQ ID NO: 1241375
cugggacuaugccuggaau

SEQ ID NO: 1267747 - RNA, 19 nt, Artificial Sequence
  Description of Artificial Sequence: Synthetic oligonucleotide
  Antisense strand to SEQ ID NO: 1267746
auuccaggcauagucccag

SEQ ID NO: 1267748 - RNA, 19 nt, Artificial Sequence
  Description of Artificial Sequence: Synthetic oligonucleotide
  Sense strand starting at position 1015 of SEQ ID NO: 1241375
ugggacuaugccuggaaua

SEQ ID NO: 1267749 - RNA, 19 nt, Artificial Sequence
  Description of Artificial Sequence: Synthetic oligonucleotide
  Antisense strand to SEQ ID NO: 1267748
uauuccaggcauaguccca

SEQ ID NO: 1267750 - RNA, 19 nt, Artificial Sequence
  Description of Artificial Sequence: Synthetic oligonucleotide
  Sense strand starting at position 1016 of SEQ ID NO: 1241375
gggacuaugccuggaauag

SEQ ID NO: 1267751 - RNA, 19 nt, Artificial Sequence
  Description of Artificial Sequence: Synthetic oligonucleotide
  Antisense strand to SEQ ID NO: 1267750
cuauuccaggcauaguccc

SEQ ID NO: 1267752 - RNA, 19 nt, Artificial Sequence
  Description of Artificial Sequence: Synthetic oligonucleotide
  Sense strand starting at position 1102 of SEQ ID NO: 1241375
gcaagugaggccuagaaau

SEQ ID NO: 1267753 - RNA, 19 nt, Artificial Sequence
  Description of Artificial Sequence: Synthetic oligonucleotide
  Antisense strand to SEQ ID NO: 1267752
auuucuaggccucacuugc

SEQ ID NO: 1267754 - RNA, 19 nt, Artificial Sequence
  Description of Artificial Sequence: Synthetic oligonucleotide
  Sense strand starting at position 1134 of SEQ ID NO: 1241375
agcucucagguuuaauaca

SEQ ID NO: 1267755 - RNA, 19 nt, Artificial Sequence
  Description of Artificial Sequence: Synthetic oligonucleotide
  Antisense strand to SEQ ID NO: 1267754
uguauuaaaccugagagcu

SEQ ID NO: 1267756 - RNA, 19 nt, Artificial Sequence
  Description of Artificial Sequence: Synthetic oligonucleotide
  Sense strand starting at position 1377 of SEQ ID NO: 1241375
ucuggaaacucugcuauaa

SEQ ID NO: 1267757 - RNA, 19 nt, Artificial Sequence
  Description of Artificial Sequence: Synthetic oligonucleotide
  Antisense strand to SEQ ID NO: 1267756
uuauagcagaguuuccaga

SEQ ID NO: 1267758 - RNA, 19 nt, Artificial Sequence
  Description of Artificial Sequence: Synthetic oligonucleotide
  Sense strand starting at position 1549 of SEQ ID NO: 1241375
acaccacucucgguuaaau

SEQ ID NO: 1267759 - RNA, 19 nt, Artificial Sequence
  Description of Artificial Sequence: Synthetic oligonucleotide
  Antisense strand to SEQ ID NO: 1267758
auuuaaccgagaguggugu

SEQ ID NO: 1267760 - RNA, 19 nt, Artificial Sequence
  Description of Artificial Sequence: Synthetic oligonucleotide
  Sense strand starting at position 2036 of SEQ ID NO: 1241375
uuuagaauuccaugagucu

SEQ ID NO: 1267761 - RNA, 19 nt, Artificial Sequence
  Description of Artificial Sequence: Synthetic oligonucleotide
  Antisense strand to SEQ ID NO: 1267760
agacucauggaauucuaaa

SEQ ID NO: 1267762 - RNA, 19 nt, Artificial Sequence
  Description of Artificial Sequence: Synthetic oligonucleotide
  Sense strand starting at position 2039 of SEQ ID NO: 1241375
agaauuccaugagucuacu

SEQ ID NO: 1267763 - RNA, 19 nt, Artificial Sequence
  Description of Artificial Sequence: Synthetic oligonucleotide
  Antisense strand to SEQ ID NO: 1267762
aguagacucauggaauucu

SEQ ID NO: 1267764 - RNA, 19 nt, Artificial Sequence
  Description of Artificial Sequence: Synthetic oligonucleotide
  Sense strand starting at position 2045 of SEQ ID NO: 1241375
ccaugagucuacucagaga

SEQ ID NO: 1267765 - RNA, 19 nt, Artificial Sequence
  Description of Artificial Sequence: Synthetic oligonucleotide
  Antisense strand to SEQ ID NO: 1267764
ucucugaguagacucaugg

SEQ ID NO: 1267766 - RNA, 19 nt, Artificial Sequence
  Description of Artificial Sequence: Synthetic oligonucleotide
  Sense strand starting at position 2060 of SEQ ID NO: 1241375
gagaacuuguggguucagu

SEQ ID NO: 1267767 - RNA, 19 nt, Artificial Sequence
  Description of Artificial Sequence: Synthetic oligonucleotide
  Antisense strand to SEQ ID NO: 1267766
acugaacccacaaguucuc

SEQ ID NO: 1267768 - RNA, 19 nt, Artificial Sequence
  Description of Artificial Sequence: Synthetic oligonucleotide
  Sense strand starting at position 2116 of SEQ ID NO: 1241375
uuuguaaacugagcuuuga

SEQ ID NO: 1267769 - RNA, 19 nt, Artificial Sequence
  Description of Artificial Sequence: Synthetic oligonucleotide
  Antisense strand to SEQ ID NO: 1267768
ucaaagcucaguuuacaaa

SEQ ID NO: 1267770 - RNA, 19 nt, Artificial Sequence
  Description of Artificial Sequence: Synthetic oligonucleotide
  Sense strand starting at position 2918 of SEQ ID NO: 1241375
gucagauuaccaggcugau

SEQ ID NO: 1267771 - RNA, 19 nt, Artificial Sequence
  Description of Artificial Sequence: Synthetic oligonucleotide
  Antisense strand to SEQ ID NO: 1267770
aucagccugguaaucugac

SEQ ID NO: 1267772 - RNA, 19 nt, Artificial Sequence
  Description of Artificial Sequence: Synthetic oligonucleotide
  Sense strand starting at position 2921 of SEQ ID NO: 1241375
agauuaccaggcugauaaa

SEQ ID NO: 1267773 - RNA, 19 nt, Artificial Sequence
  Description of Artificial Sequence: Synthetic oligonucleotide
  Antisense strand to SEQ ID NO: 1267772
uuuaucagccugguaaucu

SEQ ID NO: 1267774 - RNA, 19 nt, Artificial Sequence
  Description of Artificial Sequence: Synthetic oligonucleotide
  Sense strand starting at position 3047 of SEQ ID NO: 1241375
ucucuaaauccuggcuaga

SEQ ID NO: 1267775 - RNA, 19 nt, Artificial Sequence
  Description of Artificial Sequence: Synthetic oligonucleotide
  Antisense strand to SEQ ID NO: 1267774
ucuagccaggauuuagaga

SEQ ID NO: 1267776 - RNA, 19 nt, Artificial Sequence
  Description of Artificial Sequence: Synthetic oligonucleotide
  Sense strand starting at position 3049 of SEQ ID NO: 1241375
ucuaaauccuggcuagauu

SEQ ID NO: 1267777 - RNA, 19 nt, Artificial Sequence
  Description of Artificial Sequence: Synthetic oligonucleotide
  Antisense strand to SEQ ID NO: 1267776
aaucuagccaggauuuaga

SEQ ID NO: 1267778 - RNA, 19 nt, Artificial Sequence
  Description of Artificial Sequence: Synthetic oligonucleotide
  Sense strand starting at position 3050 of SEQ ID NO: 1241375
cuaaauccuggcuagauua

SEQ ID NO: 1267779 - RNA, 19 nt, Artificial Sequence
  Description of Artificial Sequence: Synthetic oligonucleotide
  Antisense strand to SEQ ID NO: 1267778
uaaucuagccaggauuuag

SEQ ID NO: 1267780 - RNA, 19 nt, Artificial Sequence
  Description of Artificial Sequence: Synthetic oligonucleotide
  Sense strand starting at position 3060 of SEQ ID NO: 1241375
gcuagauuauuagccauua

SEQ ID NO: 1267781 - RNA, 19 nt, Artificial Sequence
  Description of Artificial Sequence: Synthetic oligonucleotide
  Antisense strand to SEQ ID NO: 1267780
uaauggcuaauaaucuagc

SEQ ID NO: 1267782 - RNA, 19 nt, Artificial Sequence
  Description of Artificial Sequence: Synthetic oligonucleotide
  Sense strand starting at position 3193 of SEQ ID NO: 1241375
aagagucccuuugugaaac

SEQ ID NO: 1267783 - RNA, 19 nt, Artificial Sequence
  Description of Artificial Sequence: Synthetic oligonucleotide
  Antisense strand to SEQ ID NO: 1267782
guuucacaaagggacucuu

SEQ ID NO: 1267784 - RNA, 19 nt, Artificial Sequence
  Description of Artificial Sequence: Synthetic oligonucleotide
  Sense strand starting at position 3855 of SEQ ID NO: 1241375
gggagacccuguuucuaau

SEQ ID NO: 1267785 - RNA, 19 nt, Artificial Sequence
  Description of Artificial Sequence: Synthetic oligonucleotide
  Antisense strand to SEQ ID NO: 1267784
auuagaaacagggucuccc

SEQ ID NO: 1267786 - RNA, 19 nt, Artificial Sequence
  Description of Artificial Sequence: Synthetic oligonucleotide
  Sense strand starting at position 74 of SEQ ID NO: 1241376
uguuauuuauaugaggacu

SEQ ID NO: 1267787 - RNA, 19 nt, Artificial Sequence
  Description of Artificial Sequence: Synthetic oligonucleotide
  Antisense strand to SEQ ID NO: 1267786
aguccucauauaaauaaca

SEQ ID NO: 1267788 - RNA, 19 nt, Artificial Sequence
  Description of Artificial Sequence: Synthetic oligonucleotide
  Sense strand starting at position 76 of SEQ ID NO: 1241376
uuauuuauaugaggacugu

SEQ ID NO: 1267789 - RNA, 19 nt, Artificial Sequence
  Description of Artificial Sequence: Synthetic oligonucleotide
  Antisense strand to SEQ ID NO: 1267788
acaguccucauauaaauaa

SEQ ID NO: 1267790 - RNA, 19 nt, Artificial Sequence
  Description of Artificial Sequence: Synthetic oligonucleotide
  Sense strand starting at position 85 of SEQ ID NO: 1241376
ugaggacuguggucucauu

SEQ ID NO: 1267791 - RNA, 19 nt, Artificial Sequence
  Description of Artificial Sequence: Synthetic oligonucleotide
  Antisense strand to SEQ ID NO: 1267790
aaugagaccacaguccuca

SEQ ID NO: 1267792 - RNA, 19 nt, Artificial Sequence
  Description of Artificial Sequence: Synthetic oligonucleotide
  Sense strand starting at position 95 of SEQ ID NO: 1241376
ggucucauuaaaggauugu

SEQ ID NO: 1267793 - RNA, 19 nt, Artificial Sequence
  Description of Artificial Sequence: Synthetic oligonucleotide
  Antisense strand to SEQ ID NO: 1267792
acaauccuuuaaugagacc

SEQ ID NO: 1267794 - RNA, 19 nt, Artificial Sequence
  Description of Artificial Sequence: Synthetic oligonucleotide
  Sense strand starting at position 135 of SEQ ID NO: 1241376
ugggauaauuaaugaacca

SEQ ID NO: 1267795 - RNA, 19 nt, Artificial Sequence
  Description of Artificial Sequence: Synthetic oligonucleotide
  Antisense strand to SEQ ID NO: 1267794
ugguucauuaauuauccca

SEQ ID NO: 1267796 - RNA, 19 nt, Artificial Sequence
  Description of Artificial Sequence: Synthetic oligonucleotide
  Sense strand starting at position 320 of SEQ ID NO: 1241376
guaaguguauugguuaaag

SEQ ID NO: 1267797 - RNA, 19 nt, Artificial Sequence
  Description of Artificial Sequence: Synthetic oligonucleotide
  Antisense strand to SEQ ID NO: 1267796
cuuuaaccaauacacuuac

SEQ ID NO: 1267798 - RNA, 19 nt, Artificial Sequence
  Description of Artificial Sequence: Synthetic oligonucleotide
  Sense strand starting at position 322 of SEQ ID NO: 1241376
aaguguauugguuaaagac

SEQ ID NO: 1267799 - RNA, 19 nt, Artificial Sequence
  Description of Artificial Sequence: Synthetic oligonucleotide
  Antisense strand to SEQ ID NO: 1267798
gucuuuaaccaauacacuu

SEQ ID NO: 1267800 - RNA, 19 nt, Artificial Sequence
  Description of Artificial Sequence: Synthetic oligonucleotide
  Sense strand starting at position 423 of SEQ ID NO: 1241376
aaagguacuuuggagucau

SEQ ID NO: 1267801 - RNA, 19 nt, Artificial Sequence
  Description of Artificial Sequence: Synthetic oligonucleotide
  Antisense strand to SEQ ID NO: 1267800
augacuccaaaguaccuuu

SEQ ID NO: 1267802 - RNA, 19 nt, Artificial Sequence
  Description of Artificial Sequence: Synthetic oligonucleotide
  Sense strand starting at position 427 of SEQ ID NO: 1241376
guacuuuggagucauguau

SEQ ID NO: 1267803 - RNA, 19 nt, Artificial Sequence
  Description of Artificial Sequence: Synthetic oligonucleotide
  Antisense strand to SEQ ID NO: 1267802
auacaugacuccaaaguac

SEQ ID NO: 1267804 - RNA, 19 nt, Artificial Sequence
  Description of Artificial Sequence: Synthetic oligonucleotide
  Sense strand starting at position 452 of SEQ ID NO: 1241376
ugacuaaagucagauacaa

SEQ ID NO: 1267805 - RNA, 19 nt, Artificial Sequence
  Description of Artificial Sequence: Synthetic oligonucleotide
  Antisense strand to SEQ ID NO: 1267804
uuguaucugacuuuaguca

SEQ ID NO: 1267806 - RNA, 19 nt, Artificial Sequence
  Description of Artificial Sequence: Synthetic oligonucleotide
  Sense strand starting at position 550 of SEQ ID NO: 1241376
ugacuuucaggugaggagu

SEQ ID NO: 1267807 - RNA, 19 nt, Artificial Sequence
  Description of Artificial Sequence: Synthetic oligonucleotide
  Antisense strand to SEQ ID NO: 1267806
acuccucaccugaaaguca

SEQ ID NO: 1267808 - RNA, 19 nt, Artificial Sequence
  Description of Artificial Sequence: Synthetic oligonucleotide
  Sense strand starting at position 585 of SEQ ID NO: 1241376
auucuauagucaucuaggu

SEQ ID NO: 1267809 - RNA, 19 nt, Artificial Sequence
  Description of Artificial Sequence: Synthetic oligonucleotide
  Antisense strand to SEQ ID NO: 1267808
accuagaugacuauagaau

SEQ ID NO: 1267810 - RNA, 19 nt, Artificial Sequence
  Description of Artificial Sequence: Synthetic oligonucleotide
  Sense strand starting at position 683 of SEQ ID NO: 1241376
gccugcuuaucagugaaga

SEQ ID NO: 1267811 - RNA, 19 nt, Artificial Sequence
  Description of Artificial Sequence: Synthetic oligonucleotide
  Antisense strand to SEQ ID NO: 1267810
ucuucacugauaagcaggc

SEQ ID NO: 1267812 - RNA, 19 nt, Artificial Sequence
  Description of Artificial Sequence: Synthetic oligonucleotide
  Sense strand starting at position 684 of SEQ ID NO: 1241376
ccugcuuaucagugaagaa

SEQ ID NO: 1267813 - RNA, 19 nt, Artificial Sequence
  Description of Artificial Sequence: Synthetic oligonucleotide
  Antisense strand to SEQ ID NO: 1267812
uucuucacugauaagcagg

SEQ ID NO: 1267814 - RNA, 19 nt, Artificial Sequence
  Description of Artificial Sequence: Synthetic oligonucleotide
  Sense strand starting at position 732 of SEQ ID NO: 1241376
acacaaaucucggcuucga

SEQ ID NO: 1267815 - RNA, 19 nt, Artificial Sequence
  Description of Artificial Sequence: Synthetic oligonucleotide
  Antisense strand to SEQ ID NO: 1267814
ucgaagccgagauuugugu

SEQ ID NO: 1267816 - RNA, 19 nt, Artificial Sequence
  Description of Artificial Sequence: Synthetic oligonucleotide
  Sense strand starting at position 736 of SEQ ID NO: 1241376
aaaucucggcuucgauacu

SEQ ID NO: 1267817 - RNA, 19 nt, Artificial Sequence
  Description of Artificial Sequence: Synthetic oligonucleotide
  Antisense strand to SEQ ID NO: 1267816
aguaucgaagccgagauuu

SEQ ID NO: 1267818 - RNA, 19 nt, Artificial Sequence
  Description of Artificial Sequence: Synthetic oligonucleotide
  Sense strand starting at position 905 of SEQ ID NO: 1241376
ggaaguucuuaaguguacu

SEQ ID NO: 1267819 - RNA, 19 nt, Artificial Sequence
  Description of Artificial Sequence: Synthetic oligonucleotide
  Antisense strand to SEQ ID NO: 1267818
aguacacuuaagaacuucc

SEQ ID NO: 1267820 - RNA, 19 nt, Artificial Sequence
  Description of Artificial Sequence: Synthetic oligonucleotide
  Sense strand starting at position 1120 of SEQ ID NO: 1241376
cccaacuugccagagguau

SEQ ID NO: 1267821 - RNA, 19 nt, Artificial Sequence
  Description of Artificial Sequence: Synthetic oligonucleotide
  Antisense strand to SEQ ID NO: 1267820
auaccucuggcaaguuggg

SEQ ID NO: 1267822 - RNA, 19 nt, Artificial Sequence
  Description of Artificial Sequence: Synthetic oligonucleotide
  Sense strand starting at position 1131 of SEQ ID NO: 1241376
agagguauccauuacugug

SEQ ID NO: 1267823 - RNA, 19 nt, Artificial Sequence
  Description of Artificial Sequence: Synthetic oligonucleotide
  Antisense strand to SEQ ID NO: 1267822
cacaguaauggauaccucu

SEQ ID NO: 1267824 - RNA, 19 nt, Artificial Sequence
  Description of Artificial Sequence: Synthetic oligonucleotide
  Sense strand starting at position 1133 of SEQ ID NO: 1241376
agguauccauuacugugau

SEQ ID NO: 1267825 - RNA, 19 nt, Artificial Sequence
  Description of Artificial Sequence: Synthetic oligonucleotide
  Antisense strand to SEQ ID NO: 1267824
aucacaguaauggauaccu

SEQ ID NO: 1267826 - RNA, 19 nt, Artificial Sequence
  Description of Artificial Sequence: Synthetic oligonucleotide
  Sense strand starting at position 1350 of SEQ ID NO: 1241376
gggaacucucuuugagggu

SEQ ID NO: 1267827 - RNA, 19 nt, Artificial Sequence
  Description of Artificial Sequence: Synthetic oligonucleotide
  Antisense strand to SEQ ID NO: 1267826
acccucaaagagaguuccc

SEQ ID NO: 1267828 - RNA, 19 nt, Artificial Sequence
  Description of Artificial Sequence: Synthetic oligonucleotide
  Sense strand starting at position 1351 of SEQ ID NO: 1241376
ggaacucucuuugaggguu

SEQ ID NO: 1267829 - RNA, 19 nt, Artificial Sequence
  Description of Artificial Sequence: Synthetic oligonucleotide
  Antisense strand to SEQ ID NO: 1267828
aacccucaaagagaguucc

SEQ ID NO: 1267830 - RNA, 19 nt, Artificial Sequence
  Description of Artificial Sequence: Synthetic oligonucleotide
  Sense strand starting at position 1359 of SEQ ID NO: 1241376
cuuugaggguuccugcaga

SEQ ID NO: 1267831 - RNA, 19 nt, Artificial Sequence
  Description of Artificial Sequence: Synthetic oligonucleotide
  Antisense strand to SEQ ID NO: 1267830
ucugcaggaacccucaaag

SEQ ID NO: 1267832 - RNA, 19 nt, Artificial Sequence
  Description of Artificial Sequence: Synthetic oligonucleotide
  Sense strand starting at position 1590 of SEQ ID NO: 1241376
cagacuuucccguagucca

SEQ ID NO: 1267833 - RNA, 19 nt, Artificial Sequence
  Description of Artificial Sequence: Synthetic oligonucleotide
  Antisense strand to SEQ ID NO: 1267832
uggacuacgggaaagucug

SEQ ID NO: 1267834 - RNA, 19 nt, Artificial Sequence
  Description of Artificial Sequence: Synthetic oligonucleotide
  Sense strand starting at position 1597 of SEQ ID NO: 1241376
ucccguaguccaggaggaa

SEQ ID NO: 1267835 - RNA, 19 nt, Artificial Sequence
  Description of Artificial Sequence: Synthetic oligonucleotide
  Antisense strand to SEQ ID NO: 1267834
uuccuccuggacuacggga

SEQ ID NO: 1267836 - RNA, 19 nt, Artificial Sequence
  Description of Artificial Sequence: Synthetic oligonucleotide
  Sense strand starting at position 1725 of SEQ ID NO: 1241376
ggcuucuuucgcgaucaca

SEQ ID NO: 1267837 - RNA, 19 nt, Artificial Sequence
  Description of Artificial Sequence: Synthetic oligonucleotide
  Antisense strand to SEQ ID NO: 1267836
ugugaucgcgaaagaagcc

SEQ ID NO: 1267838 - RNA, 19 nt, Artificial Sequence
  Description of Artificial Sequence: Synthetic oligonucleotide
  Sense strand starting at position 1956 of SEQ ID NO: 1241376
ccuagcagagucuggaauu

SEQ ID NO: 1267839 - RNA, 19 nt, Artificial Sequence
  Description of Artificial Sequence: Synthetic oligonucleotide
  Antisense strand to SEQ ID NO: 1267838
aauuccagacucugcuagg

SEQ ID NO: 1267840 - RNA, 19 nt, Artificial Sequence
  Description of Artificial Sequence: Synthetic oligonucleotide
  Sense strand starting at position 2157 of SEQ ID NO: 1241376
cugcuucaccgucgaaaga

SEQ ID NO: 1267841 - RNA, 19 nt, Artificial Sequence
  Description of Artificial Sequence: Synthetic oligonucleotide
  Antisense strand to SEQ ID NO: 1267840
ucuuucgacggugaagcag

SEQ ID NO: 1267842 - RNA, 19 nt, Artificial Sequence
  Description of Artificial Sequence: Synthetic oligonucleotide
  Sense strand starting at position 2380 of SEQ ID NO: 1241376
gacugugaggacugaggua

SEQ ID NO: 1267843 - RNA, 19 nt, Artificial Sequence
  Description of Artificial Sequence: Synthetic oligonucleotide
  Antisense strand to SEQ ID NO: 1267842
uaccucaguccucacaguc

SEQ ID NO: 1267844 - RNA, 19 nt, Artificial Sequence
  Description of Artificial Sequence: Synthetic oligonucleotide
  Sense strand starting at position 2420 of SEQ ID NO: 1241376
auacuaagucaauggcaga

SEQ ID NO: 1267845 - RNA, 19 nt, Artificial Sequence
  Description of Artificial Sequence: Synthetic oligonucleotide
  Antisense strand to SEQ ID NO: 1267844
ucugccauugacuuaguau

SEQ ID NO: 1267846 - RNA, 19 nt, Artificial Sequence
  Description of Artificial Sequence: Synthetic oligonucleotide
  Sense strand starting at position 2441 of SEQ ID NO: 1241376
ugagacuaauagccucuua

SEQ ID NO: 1267847 - RNA, 19 nt, Artificial Sequence
  Description of Artificial Sequence: Synthetic oligonucleotide
  Antisense strand to SEQ ID NO: 1267846
uaagaggcuauuagucuca

SEQ ID NO: 1267848 - RNA, 19 nt, Artificial Sequence
  Description of Artificial Sequence: Synthetic oligonucleotide
  Sense strand starting at position 2451 of SEQ ID NO: 1241376
agccucuuaccuugaguca

SEQ ID NO: 1267849 - RNA, 19 nt, Artificial Sequence
  Description of Artificial Sequence: Synthetic oligonucleotide
  Antisense strand to SEQ ID NO: 1267848
ugacucaagguaagaggcu

SEQ ID NO: 1267850 - RNA, 19 nt, Artificial Sequence
  Description of Artificial Sequence: Synthetic oligonucleotide
  Sense strand starting at position 2452 of SEQ ID NO: 1241376
gccucuuaccuugagucau

SEQ ID NO: 1267851 - RNA, 19 nt, Artificial Sequence
  Description of Artificial Sequence: Synthetic oligonucleotide
  Antisense strand to SEQ ID NO: 1267850
augacucaagguaagaggc

SEQ ID NO: 1267852 - RNA, 19 nt, Artificial Sequence
  Description of Artificial Sequence: Synthetic oligonucleotide
  Sense strand starting at position 2613 of SEQ ID NO: 1241376
gccacauugucccuaagca

SEQ ID NO: 1267853 - RNA, 19 nt, Artificial Sequence
  Description of Artificial Sequence: Synthetic oligonucleotide
  Antisense strand to SEQ ID NO: 1267852
ugcuuagggacaauguggc

SEQ ID NO: 1267854 - RNA, 19 nt, Artificial Sequence
  Description of Artificial Sequence: Synthetic oligonucleotide
  Sense strand starting at position 2815 of SEQ ID NO: 1241376
uauucuugacgcuguuaaa

SEQ ID NO: 1267855 - RNA, 19 nt, Artificial Sequence
  Description of Artificial Sequence: Synthetic oligonucleotide
  Antisense strand to SEQ ID NO: 1267854
uuuaacagcgucaagaaua

SEQ ID NO: 1267856 - RNA, 19 nt, Artificial Sequence
  Description of Artificial Sequence: Synthetic oligonucleotide
  Sense strand starting at position 2831 of SEQ ID NO: 1241376
aaagauuccuggccaguua

SEQ ID NO: 1267857 - RNA, 19 nt, Artificial Sequence
  Description of Artificial Sequence: Synthetic oligonucleotide
  Antisense strand to SEQ ID NO: 1267856
uaacuggccaggaaucuuu

SEQ ID NO: 1267858 - RNA, 19 nt, Artificial Sequence
  Description of Artificial Sequence: Synthetic oligonucleotide
  Sense strand starting at position 2874 of SEQ ID NO: 1241376
gggucugucugauauuuac

SEQ ID NO: 1267859 - RNA, 19 nt, Artificial Sequence
  Description of Artificial Sequence: Synthetic oligonucleotide
  Antisense strand to SEQ ID NO: 1267858
guaaauaucagacagaccc

SEQ ID NO: 1267860 - RNA, 19 nt, Artificial Sequence
  Description of Artificial Sequence: Synthetic oligonucleotide
  Sense strand starting at position 2926 of SEQ ID NO: 1241376
cuagaaguguugcugcuuu

SEQ ID NO: 1267861 - RNA, 19 nt, Artificial Sequence
  Description of Artificial Sequence: Synthetic oligonucleotide
  Antisense strand to SEQ ID NO: 1267860
aaagcagcaacacuucuag

SEQ ID NO: 1267862 - RNA, 19 nt, Artificial Sequence
  Description of Artificial Sequence: Synthetic oligonucleotide
  Sense strand starting at position 3030 of SEQ ID NO: 1241376
uguccagugugguuacuuu

SEQ ID NO: 1267863 - RNA, 19 nt, Artificial Sequence
  Description of Artificial Sequence: Synthetic oligonucleotide
  Antisense strand to SEQ ID NO: 1267862
aaaguaaccacacuggaca

SEQ ID NO: 1267864 - RNA, 19 nt, Artificial Sequence
  Description of Artificial Sequence: Synthetic oligonucleotide
  Sense strand starting at position 3166 of SEQ ID NO: 1241376
uuaguauggauccagaggu

SEQ ID NO: 1267865 - RNA, 19 nt, Artificial Sequence
  Description of Artificial Sequence: Synthetic oligonucleotide
  Antisense strand to SEQ ID NO: 1267864
accucuggauccauacuaa

SEQ ID NO: 1267866 - RNA, 19 nt, Artificial Sequence
  Description of Artificial Sequence: Synthetic oligonucleotide
  Sense strand starting at position 59 of SEQ ID NO: 1241377
guauuugugucaucguaau

SEQ ID NO: 1267867 - RNA, 19 nt, Artificial Sequence
  Description of Artificial Sequence: Synthetic oligonucleotide
  Antisense strand to SEQ ID NO: 1267866
auuacgaugacacaaauac

SEQ ID NO: 1267868 - RNA, 19 nt, Artificial Sequence
  Description of Artificial Sequence: Synthetic oligonucleotide
  Sense strand starting at position 77 of SEQ ID NO: 1241377
ucaucaguccuagaguuuc

SEQ ID NO: 1267869 - RNA, 19 nt, Artificial Sequence
  Description of Artificial Sequence: Synthetic oligonucleotide
  Antisense strand to SEQ ID NO: 1267868
gaaacucuaggacugauga

SEQ ID NO: 1267870 - RNA, 19 nt, Artificial Sequence
  Description of Artificial Sequence: Synthetic oligonucleotide
  Sense strand starting at position 258 of SEQ ID NO: 1241377
gaaggaauguacuuacguu

SEQ ID NO: 1267871 - RNA, 19 nt, Artificial Sequence
  Description of Artificial Sequence: Synthetic oligonucleotide
  Antisense strand to SEQ ID NO: 1267870
aacguaaguacauuccuuc

SEQ ID NO: 1267872 - RNA, 19 nt, Artificial Sequence
  Description of Artificial Sequence: Synthetic oligonucleotide
  Sense strand starting at position 284 of SEQ ID NO: 1241377
aacgauccacguugucaga

SEQ ID NO: 1267873 - RNA, 19 nt, Artificial Sequence
  Description of Artificial Sequence: Synthetic oligonucleotide
  Antisense strand to SEQ ID NO: 1267872
ucugacaacguggaucguu

SEQ ID NO: 1267874 - RNA, 19 nt, Artificial Sequence
  Description of Artificial Sequence: Synthetic oligonucleotide
  Sense strand starting at position 387 of SEQ ID NO: 1241377
caauguaucuggguccaca

SEQ ID NO: 1267875 - RNA, 19 nt, Artificial Sequence
  Description of Artificial Sequence: Synthetic oligonucleotide
  Antisense strand to SEQ ID NO: 1267874
uguggacccagauacauug

SEQ ID NO: 1267876 - RNA, 19 nt, Artificial Sequence
  Description of Artificial Sequence: Synthetic oligonucleotide
  Sense strand starting at position 466 of SEQ ID NO: 1241377
cuuuaaauuccgggacuga

SEQ ID NO: 1267877 - RNA, 19 nt, Artificial Sequence
  Description of Artificial Sequence: Synthetic oligonucleotide
  Antisense strand to SEQ ID NO: 1267876
ucagucccggaauuuaaag

SEQ ID NO: 1267878 - RNA, 19 nt, Artificial Sequence
  Description of Artificial Sequence: Synthetic oligonucleotide
  Sense strand starting at position 573 of SEQ ID NO: 1241377
uacguuuggacguaagagu

SEQ ID NO: 1267879 - RNA, 19 nt, Artificial Sequence
  Description of Artificial Sequence: Synthetic oligonucleotide
  Antisense strand to SEQ ID NO: 1267878
acucuuacguccaaacgua

SEQ ID NO: 1267880 - RNA, 19 nt, Artificial Sequence
  Description of Artificial Sequence: Synthetic oligonucleotide
  Sense strand starting at position 624 of SEQ ID NO: 1241377
ccagguuuaacguacagau

SEQ ID NO: 1267881 - RNA, 19 nt, Artificial Sequence
  Description of Artificial Sequence: Synthetic oligonucleotide
  Antisense strand to SEQ ID NO: 1267880
aucuguacguuaaaccugg

SEQ ID NO: 1267882 - RNA, 19 nt, Artificial Sequence
  Description of Artificial Sequence: Synthetic oligonucleotide
  Sense strand starting at position 626 of SEQ ID NO: 1241377
agguuuaacguacagauau

SEQ ID NO: 1267883 - RNA, 19 nt, Artificial Sequence
  Description of Artificial Sequence: Synthetic oligonucleotide
  Antisense strand to SEQ ID NO: 1267882
auaucuguacguuaaaccu

SEQ ID NO: 1267884 - RNA, 19 nt, Artificial Sequence
  Description of Artificial Sequence: Synthetic oligonucleotide
  Sense strand starting at position 665 of SEQ ID NO: 1241377
uuugcacaagaguauauaa

SEQ ID NO: 1267885 - RNA, 19 nt, Artificial Sequence
  Description of Artificial Sequence: Synthetic oligonucleotide
  Antisense strand to SEQ ID NO: 1267884
uuauauacucuugugcaaa

SEQ ID NO: 1267886 - RNA, 19 nt, Artificial Sequence
  Description of Artificial Sequence: Synthetic oligonucleotide
  Sense strand starting at position 672 of SEQ ID NO: 1241377
aagaguauauaagcugauu

SEQ ID NO: 1267887 - RNA, 19 nt, Artificial Sequence
  Description of Artificial Sequence: Synthetic oligonucleotide
  Antisense strand to SEQ ID NO: 1267886
aaucagcuuauauacucuu

SEQ ID NO: 1267888 - RNA, 19 nt, Artificial Sequence
  Description of Artificial Sequence: Synthetic oligonucleotide
  Sense strand starting at position 677 of SEQ ID NO: 1241377
uauauaagcugauuagguu

SEQ ID NO: 1267889 - RNA, 19 nt, Artificial Sequence
  Description of Artificial Sequence: Synthetic oligonucleotide
  Antisense strand to SEQ ID NO: 1267888
aaccuaaucagcuuauaua

SEQ ID NO: 1267890 - RNA, 19 nt, Artificial Sequence
  Description of Artificial Sequence: Synthetic oligonucleotide
  Sense strand starting at position 693 of SEQ ID NO: 1241377
guugcugcuuaacuagaaa

SEQ ID NO: 1267891 - RNA, 19 nt, Artificial Sequence
  Description of Artificial Sequence: Synthetic oligonucleotide
  Antisense strand to SEQ ID NO: 1267890
uuucuaguuaagcagcaac

SEQ ID NO: 1267892 - RNA, 19 nt, Artificial Sequence
  Description of Artificial Sequence: Synthetic oligonucleotide
  Sense strand starting at position 696 of SEQ ID NO: 1241377
gcugcuuaacuagaaacca

SEQ ID NO: 1267893 - RNA, 19 nt, Artificial Sequence
  Description of Artificial Sequence: Synthetic oligonucleotide
  Antisense strand to SEQ ID NO: 1267892
ugguuucuaguuaagcagc

SEQ ID NO: 1267894 - RNA, 19 nt, Artificial Sequence
  Description of Artificial Sequence: Synthetic oligonucleotide
  Sense strand starting at position 1043 of SEQ ID NO: 1241377
ugaauaaagaguugguuag

SEQ ID NO: 1267895 - RNA, 19 nt, Artificial Sequence
  Description of Artificial Sequence: Synthetic oligonucleotide
  Antisense strand to SEQ ID NO: 1267894
cuaaccaacucuuuauuca

SEQ ID NO: 1267896 - RNA, 19 nt, Artificial Sequence
  Description of Artificial Sequence: Synthetic oligonucleotide
  Sense strand starting at position 1049 of SEQ ID NO: 1241377
aagaguugguuaggaauuu

SEQ ID NO: 1267897 - RNA, 19 nt, Artificial Sequence
  Description of Artificial Sequence: Synthetic oligonucleotide
  Antisense strand to SEQ ID NO: 1267896
aaauuccuaaccaacucuu

SEQ ID NO: 1267898 - RNA, 19 nt, Artificial Sequence
  Description of Artificial Sequence: Synthetic oligonucleotide
  Sense strand starting at position 1262 of SEQ ID NO: 1241377
acagguaagucauuacaaa

SEQ ID NO: 1267899 - RNA, 19 nt, Artificial Sequence
  Description of Artificial Sequence: Synthetic oligonucleotide
  Antisense strand to SEQ ID NO: 1267898
uuuguaaugacuuaccugu

SEQ ID NO: 1267900 - RNA, 19 nt, Artificial Sequence
  Description of Artificial Sequence: Synthetic oligonucleotide
  Sense strand starting at position 1869 of SEQ ID NO: 1241377
cgggcuugucguuccaaac

SEQ ID NO: 1267901 - RNA, 19 nt, Artificial Sequence
  Description of Artificial Sequence: Synthetic oligonucleotide
  Antisense strand to SEQ ID NO: 1267900
guuuggaacgacaagcccg

SEQ ID NO: 1267902 - RNA, 19 nt, Artificial Sequence
  Description of Artificial Sequence: Synthetic oligonucleotide
  Sense strand starting at position 1939 of SEQ ID NO: 1241377
gcccuagaguucccaagaa

SEQ ID NO: 1267903 - RNA, 19 nt, Artificial Sequence
  Description of Artificial Sequence: Synthetic oligonucleotide
  Antisense strand to SEQ ID NO: 1267902
uucuugggaacucuagggc

SEQ ID NO: 1267904 - RNA, 19 nt, Artificial Sequence
  Description of Artificial Sequence: Synthetic oligonucleotide
  Sense strand starting at position 2769 of SEQ ID NO: 1241377
gacgauuaucaacguugua

SEQ ID NO: 1267905 - RNA, 19 nt, Artificial Sequence
  Description of Artificial Sequence: Synthetic oligonucleotide
  Antisense strand to SEQ ID NO: 1267904
uacaacguugauaaucguc

SEQ ID NO: 1267906 - RNA, 19 nt, Artificial Sequence
  Description of Artificial Sequence: Synthetic oligonucleotide
  Sense strand starting at position 2778 of SEQ ID NO: 1241377
caacguuguacagaugaga

SEQ ID NO: 1267907 - RNA, 19 nt, Artificial Sequence
  Description of Artificial Sequence: Synthetic oligonucleotide
  Antisense strand to SEQ ID NO: 1267906
ucucaucuguacaacguug

SEQ ID NO: 1267908 - RNA, 19 nt, Artificial Sequence
  Description of Artificial Sequence: Synthetic oligonucleotide
  Sense strand starting at position 3046 of SEQ ID NO: 1241377
acaugauaguguuugagac

SEQ ID NO: 1267909 - RNA, 19 nt, Artificial Sequence
  Description of Artificial Sequence: Synthetic oligonucleotide
  Antisense strand to SEQ ID NO: 1267908
gucucaaacacuaucaugu

SEQ ID NO: 1267910 - RNA, 19 nt, Artificial Sequence
  Description of Artificial Sequence: Synthetic oligonucleotide
  Sense strand starting at position 3047 of SEQ ID NO: 1241377
caugauaguguuugagaca

SEQ ID NO: 1267911 - RNA, 19 nt, Artificial Sequence
  Description of Artificial Sequence: Synthetic oligonucleotide
  Antisense strand to SEQ ID NO: 1267910
ugucucaaacacuaucaug

SEQ ID NO: 1267912 - RNA, 19 nt, Artificial Sequence
  Description of Artificial Sequence: Synthetic oligonucleotide
  Sense strand starting at position 3052 of SEQ ID NO: 1241377
uaguguuugagacaugguc

SEQ ID NO: 1267913 - RNA, 19 nt, Artificial Sequence
  Description of Artificial Sequence: Synthetic oligonucleotide
  Antisense strand to SEQ ID NO: 1267912
gaccaugucucaaacacua

SEQ ID NO: 1267914 - RNA, 19 nt, Artificial Sequence
  Description of Artificial Sequence: Synthetic oligonucleotide
  Sense strand starting at position 3086 of SEQ ID NO: 1241377
ggagcugcuagguaugagu

SEQ ID NO: 1267915 - RNA, 19 nt, Artificial Sequence
  Description of Artificial Sequence: Synthetic oligonucleotide
  Antisense strand to SEQ ID NO: 1267914
acucauaccuagcagcucc

SEQ ID NO: 1267916 - RNA, 19 nt, Artificial Sequence
  Description of Artificial Sequence: Synthetic oligonucleotide
  Sense strand starting at position 3202 of SEQ ID NO: 1241377
uagaccuggucucugcaaa

SEQ ID NO: 1267917 - RNA, 19 nt, Artificial Sequence
  Description of Artificial Sequence: Synthetic oligonucleotide
  Antisense strand to SEQ ID NO: 1267916
uuugcagagaccaggucua

SEQ ID NO: 1267918 - RNA, 19 nt, Artificial Sequence
  Description of Artificial Sequence: Synthetic oligonucleotide
  Sense strand starting at position 3287 of SEQ ID NO: 1241377
gcgguugagaugggaugau

SEQ ID NO: 1267919 - RNA, 19 nt, Artificial Sequence
  Description of Artificial Sequence: Synthetic oligonucleotide
  Antisense strand to SEQ ID NO: 1267918
aucaucccaucucaaccgc

SEQ ID NO: 1267920 - RNA, 19 nt, Artificial Sequence
  Description of Artificial Sequence: Synthetic oligonucleotide
  Sense strand starting at position 3600 of SEQ ID NO: 1241377
uuauuuagaugucaugagu

SEQ ID NO: 1267921 - RNA, 19 nt, Artificial Sequence
  Description of Artificial Sequence: Synthetic oligonucleotide
  Antisense strand to SEQ ID NO: 1267920
acucaugacaucuaaauaa

SEQ ID NO: 1267922 - RNA, 19 nt, Artificial Sequence
  Description of Artificial Sequence: Synthetic oligonucleotide
  Sense strand starting at position 3606 of SEQ ID NO: 1241377
agaugucaugagugugaau

SEQ ID NO: 1267923 - RNA, 19 nt, Artificial Sequence
  Description of Artificial Sequence: Synthetic oligonucleotide
  Antisense strand to SEQ ID NO: 1267922
auucacacucaugacaucu

SEQ ID NO: 1267924 - RNA, 19 nt, Artificial Sequence
  Description of Artificial Sequence: Synthetic oligonucleotide
  Sense strand starting at position 3608 of SEQ ID NO: 1241377
augucaugagugugaauug

SEQ ID NO: 1267925 - RNA, 19 nt, Artificial Sequence
  Description of Artificial Sequence: Synthetic oligonucleotide
  Antisense strand to SEQ ID NO: 1267924
caauucacacucaugacau

SEQ ID NO: 1267926 - RNA, 19 nt, Artificial Sequence
  Description of Artificial Sequence: Synthetic oligonucleotide
  Sense strand starting at position 3662 of SEQ ID NO: 1241377
cccucuggaccuugaagaa

SEQ ID NO: 1267927 - RNA, 19 nt, Artificial Sequence
  Description of Artificial Sequence: Synthetic oligonucleotide
  Antisense strand to SEQ ID NO: 1267926
uucuucaagguccagaggg

SEQ ID NO: 1267928 - RNA, 19 nt, Artificial Sequence
  Description of Artificial Sequence: Synthetic oligonucleotide
  Sense strand starting at position 3724 of SEQ ID NO: 1241377
ccugauauguuccuagaca

SEQ ID NO: 1267929 - RNA, 19 nt, Artificial Sequence
  Description of Artificial Sequence: Synthetic oligonucleotide
  Antisense strand to SEQ ID NO: 1267928
ugucuaggaacauaucagg

SEQ ID NO: 1267930 - RNA, 19 nt, Artificial Sequence
  Description of Artificial Sequence: Synthetic oligonucleotide
  Sense strand starting at position 3793 of SEQ ID NO: 1241377
gagagaaauuuggagcuaa

SEQ ID NO: 1267931 - RNA, 19 nt, Artificial Sequence
  Description of Artificial Sequence: Synthetic oligonucleotide
  Antisense strand to SEQ ID NO: 1267930
uuagcuccaaauuucucuc

SEQ ID NO: 1267932 - RNA, 19 nt, Artificial Sequence
  Description of Artificial Sequence: Synthetic oligonucleotide
  Sense strand starting at position 3839 of SEQ ID NO: 1241377
cagaaauuaggcugagcua

SEQ ID NO: 1267933 - RNA, 19 nt, Artificial Sequence
  Description of Artificial Sequence: Synthetic oligonucleotide
  Antisense strand to SEQ ID NO: 1267932
uagcucagccuaauuucug

SEQ ID NO: 1267934 - RNA, 19 nt, Artificial Sequence
  Description of Artificial Sequence: Synthetic oligonucleotide
  Sense strand starting at position 3842 of SEQ ID NO: 1241377
aaauuaggcugagcuaagu

SEQ ID NO: 1267935 - RNA, 19 nt, Artificial Sequence
  Description of Artificial Sequence: Synthetic oligonucleotide
  Antisense strand to SEQ ID NO: 1267934
acuuagcucagccuaauuu

SEQ ID NO: 1267936 - RNA, 19 nt, Artificial Sequence
  Description of Artificial Sequence: Synthetic oligonucleotide
  Sense strand starting at position 3860 of SEQ ID NO: 1241377
uagcaaguucuggacuaca

SEQ ID NO: 1267937 - RNA, 19 nt, Artificial Sequence
  Description of Artificial Sequence: Synthetic oligonucleotide
  Antisense strand to SEQ ID NO: 1267936
uguaguccagaacuugcua

SEQ ID NO: 1267938 - RNA, 19 nt, Artificial Sequence
  Description of Artificial Sequence: Synthetic oligonucleotide
  Sense strand starting at position 3901 of SEQ ID NO: 1241377
gaagacuaauuauggaaag

SEQ ID NO: 1267939 - RNA, 19 nt, Artificial Sequence
  Description of Artificial Sequence: Synthetic oligonucleotide
  Antisense strand to SEQ ID NO: 1267938
cuuuccauaauuagucuuc

SEQ ID NO: 1267940 - RNA, 19 nt, Artificial Sequence
  Description of Artificial Sequence: Synthetic oligonucleotide
  Sense strand starting at position 3917 of SEQ ID NO: 1241377
aagugucuagaacgacuaa

SEQ ID NO: 1267941 - RNA, 19 nt, Artificial Sequence
  Description of Artificial Sequence: Synthetic oligonucleotide
  Antisense strand to SEQ ID NO: 1267940
uuagucguucuagacacuu

SEQ ID NO: 1267942 - RNA, 19 nt, Artificial Sequence
  Description of Artificial Sequence: Synthetic oligonucleotide
  Sense strand starting at position 3918 of SEQ ID NO: 1241377
agugucuagaacgacuaaa

SEQ ID NO: 1267943 - RNA, 19 nt, Artificial Sequence
  Description of Artificial Sequence: Synthetic oligonucleotide
  Antisense strand to SEQ ID NO: 1267942
uuuagucguucuagacacu

SEQ ID NO: 1267944 - RNA, 19 nt, Artificial Sequence
  Description of Artificial Sequence: Synthetic oligonucleotide
  Sense strand starting at position 3969 of SEQ ID NO: 1241377
gucgaaaugcugcaauaau

SEQ ID NO: 1267945 - RNA, 19 nt, Artificial Sequence
  Description of Artificial Sequence: Synthetic oligonucleotide
  Antisense strand to SEQ ID NO: 1267944
auuauugcagcauuucgac

SEQ ID NO: 1267946 - RNA, 19 nt, Artificial Sequence
  Description of Artificial Sequence: Synthetic oligonucleotide
  Sense strand starting at position 80 of SEQ ID NO: 1241378
gccucugagucuuccuuga

SEQ ID NO: 1267947 - RNA, 19 nt, Artificial Sequence
  Description of Artificial Sequence: Synthetic oligonucleotide
  Antisense strand to SEQ ID NO: 1267946
ucaaggaagacucagaggc

SEQ ID NO: 1267948 - RNA, 19 nt, Artificial Sequence
  Description of Artificial Sequence: Synthetic oligonucleotide
  Sense strand starting at position 82 of SEQ ID NO: 1241378
cucugagucuuccuugauu

SEQ ID NO: 1267949 - RNA, 19 nt, Artificial Sequence
  Description of Artificial Sequence: Synthetic oligonucleotide
  Antisense strand to SEQ ID NO: 1267948
aaucaaggaagacucagag

SEQ ID NO: 1267950 - RNA, 19 nt, Artificial Sequence
  Description of Artificial Sequence: Synthetic oligonucleotide
  Sense strand starting at position 154 of SEQ ID NO: 1241378
caaggaagcccucgagaaa

SEQ ID NO: 1267951 - RNA, 19 nt, Artificial Sequence
  Description of Artificial Sequence: Synthetic oligonucleotide
  Antisense strand to SEQ ID NO: 1267950
uuucucgagggcuuccuug

SEQ ID NO: 1267952 - RNA, 19 nt, Artificial Sequence
  Description of Artificial Sequence: Synthetic oligonucleotide
  Sense strand starting at position 198 of SEQ ID NO: 1241378
ccuaguauguggcauuuaa

SEQ ID NO: 1267953 - RNA, 19 nt, Artificial Sequence
  Description of Artificial Sequence: Synthetic oligonucleotide
  Antisense strand to SEQ ID NO: 1267952
uuaaaugccacauacuagg

SEQ ID NO: 1267954 - RNA, 19 nt, Artificial Sequence
  Description of Artificial Sequence: Synthetic oligonucleotide
  Sense strand starting at position 1054 of SEQ ID NO: 1241378
agagcugucgcucagucuu

SEQ ID NO: 1267955 - RNA, 19 nt, Artificial Sequence
  Description of Artificial Sequence: Synthetic oligonucleotide
  Antisense strand to SEQ ID NO: 1267954
aagacugagcgacagcucu

SEQ ID NO: 1267956 - RNA, 19 nt, Artificial Sequence
  Description of Artificial Sequence: Synthetic oligonucleotide
  Sense strand starting at position 1060 of SEQ ID NO: 1241378
gucgcucagucuugagaga

SEQ ID NO: 1267957 - RNA, 19 nt, Artificial Sequence
  Description of Artificial Sequence: Synthetic oligonucleotide
  Antisense strand to SEQ ID NO: 1267956
ucucucaagacugagcgac

SEQ ID NO: 1267958 - RNA, 19 nt, Artificial Sequence
  Description of Artificial Sequence: Synthetic oligonucleotide
  Sense strand starting at position 1399 of SEQ ID NO: 1241378
aggaaaugaugacaucauc

SEQ ID NO: 1267959 - RNA, 19 nt, Artificial Sequence
  Description of Artificial Sequence: Synthetic oligonucleotide
  Antisense strand to SEQ ID NO: 1267958
gaugaugucaucauuuccu

SEQ ID NO: 1267960 - RNA, 19 nt, Artificial Sequence
  Description of Artificial Sequence: Synthetic oligonucleotide
  Sense strand starting at position 2158 of SEQ ID NO: 1241378
uuccaaauucgaugggagu

SEQ ID NO: 1267961 - RNA, 19 nt, Artificial Sequence
  Description of Artificial Sequence: Synthetic oligonucleotide
  Antisense strand to SEQ ID NO: 1267960
acucccaucgaauuuggaa

SEQ ID NO: 1267962 - RNA, 19 nt, Artificial Sequence
  Description of Artificial Sequence: Synthetic oligonucleotide
  Sense strand starting at position 2175 of SEQ ID NO: 1241378
guggcccggucuguuuaaa

SEQ ID NO: 1267963 - RNA, 19 nt, Artificial Sequence
  Description of Artificial Sequence: Synthetic oligonucleotide
  Antisense strand to SEQ ID NO: 1267962
uuuaaacagaccgggccac

SEQ ID NO: 1267964 - RNA, 19 nt, Artificial Sequence
  Description of Artificial Sequence: Synthetic oligonucleotide
  Sense strand starting at position 2345 of SEQ ID NO: 1241378
cccgaaagcucccacguaa

SEQ ID NO: 1267965 - RNA, 19 nt, Artificial Sequence
  Description of Artificial Sequence: Synthetic oligonucleotide
  Antisense strand to SEQ ID NO: 1267964
uuacgugggagcuuucggg

SEQ ID NO: 1267966 - RNA, 19 nt, Artificial Sequence
  Description of Artificial Sequence: Synthetic oligonucleotide
  Sense strand starting at position 2409 of SEQ ID NO: 1241378
ccaggacucucagggagaa

SEQ ID NO: 1267967 - RNA, 19 nt, Artificial Sequence
  Description of Artificial Sequence: Synthetic oligonucleotide
  Antisense strand to SEQ ID NO: 1267966
uucucccugagaguccugg

SEQ ID NO: 1267968 - RNA, 19 nt, Artificial Sequence
  Description of Artificial Sequence: Synthetic oligonucleotide
  Sense strand starting at position 2424 of SEQ ID NO: 1241378
agaagugaaaccuggcgua

SEQ ID NO: 1267969 - RNA, 19 nt, Artificial Sequence
  Description of Artificial Sequence: Synthetic oligonucleotide
  Antisense strand to SEQ ID NO: 1267968
uacgccagguuucacuucu

SEQ ID NO: 1267970 - RNA, 19 nt, Artificial Sequence
  Description of Artificial Sequence: Synthetic oligonucleotide
  Sense strand starting at position 2597 of SEQ ID NO: 1241378
gaaucuaccuccugggaug

SEQ ID NO: 1267971 - RNA, 19 nt, Artificial Sequence
  Description of Artificial Sequence: Synthetic oligonucleotide
  Antisense strand to SEQ ID NO: 1267970
caucccaggagguagauuc

SEQ ID NO: 1267972 - RNA, 19 nt, Artificial Sequence
  Description of Artificial Sequence: Synthetic oligonucleotide
  Sense strand starting at position 2952 of SEQ ID NO: 1241378
gggaucauguuucugucuu

SEQ ID NO: 1267973 - RNA, 19 nt, Artificial Sequence
  Description of Artificial Sequence: Synthetic oligonucleotide
  Antisense strand to SEQ ID NO: 1267972
aagacagaaacaugauccc

SEQ ID NO: 1267974 - RNA, 19 nt, Artificial Sequence
  Description of Artificial Sequence: Synthetic oligonucleotide
  Sense strand starting at position 2953 of SEQ ID NO: 1241378
ggaucauguuucugucuuu

SEQ ID NO: 1267975 - RNA, 19 nt, Artificial Sequence
  Description of Artificial Sequence: Synthetic oligonucleotide
  Antisense strand to SEQ ID NO: 1267974
aaagacagaaacaugaucc

SEQ ID NO: 1267976 - RNA, 19 nt, Artificial Sequence
  Description of Artificial Sequence: Synthetic oligonucleotide
  Sense strand starting at position 3086 of SEQ ID NO: 1241378
agccaaacaucucugagua

SEQ ID NO: 1267977 - RNA, 19 nt, Artificial Sequence
  Description of Artificial Sequence: Synthetic oligonucleotide
  Antisense strand to SEQ ID NO: 1267976
uacucagagauguuuggcu

SEQ ID NO: 1267978 - RNA, 19 nt, Artificial Sequence
  Description of Artificial Sequence: Synthetic oligonucleotide
  Sense strand starting at position 3087 of SEQ ID NO: 1241378
gccaaacaucucugaguau

SEQ ID NO: 1267979 - RNA, 19 nt, Artificial Sequence
  Description of Artificial Sequence: Synthetic oligonucleotide
  Antisense strand to SEQ ID NO: 1267978
auacucagagauguuuggc

SEQ ID NO: 1267980 - RNA, 19 nt, Artificial Sequence
  Description of Artificial Sequence: Synthetic oligonucleotide
  Sense strand starting at position 3096 of SEQ ID NO: 1241378
cucugaguauuugaaacac

SEQ ID NO: 1267981 - RNA, 19 nt, Artificial Sequence
  Description of Artificial Sequence: Synthetic oligonucleotide
  Antisense strand to SEQ ID NO: 1267980
guguuucaaauacucagag

SEQ ID NO: 1267982 - RNA, 19 nt, Artificial Sequence
  Description of Artificial Sequence: Synthetic oligonucleotide
  Sense strand starting at position 3166 of SEQ ID NO: 1241378
ggcucagugaaguaaccuu

SEQ ID NO: 1267983 - RNA, 19 nt, Artificial Sequence
  Description of Artificial Sequence: Synthetic oligonucleotide
  Antisense strand to SEQ ID NO: 1267982
aagguuacuucacugagcc

SEQ ID NO: 1267984 - RNA, 19 nt, Artificial Sequence
  Description of Artificial Sequence: Synthetic oligonucleotide
  Sense strand starting at position 3181 of SEQ ID NO: 1241378
ccuugagaucagcaacagu

SEQ ID NO: 1267985 - RNA, 19 nt, Artificial Sequence
  Description of Artificial Sequence: Synthetic oligonucleotide
  Antisense strand to SEQ ID NO: 1267984
acuguugcugaucucaagg

SEQ ID NO: 1267986 - RNA, 19 nt, Artificial Sequence
  Description of Artificial Sequence: Synthetic oligonucleotide
  Sense strand starting at position 3224 of SEQ ID NO: 1241378
gcaggaagagcagauguua

SEQ ID NO: 1267987 - RNA, 19 nt, Artificial Sequence
  Description of Artificial Sequence: Synthetic oligonucleotide
  Antisense strand to SEQ ID NO: 1267986
uaacaucugcucuuccugc

SEQ ID NO: 1267988 - RNA, 19 nt, Artificial Sequence
  Description of Artificial Sequence: Synthetic oligonucleotide
  Sense strand starting at position 3310 of SEQ ID NO: 1241378
ggagauagccacugucaga

SEQ ID NO: 1267989 - RNA, 19 nt, Artificial Sequence
  Description of Artificial Sequence: Synthetic oligonucleotide
  Antisense strand to SEQ ID NO: 1267988
ucugacaguggcuaucucc

SEQ ID NO: 1267990 - RNA, 19 nt, Artificial Sequence
  Description of Artificial Sequence: Synthetic oligonucleotide
  Sense strand starting at position 3313 of SEQ ID NO: 1241378
gauagccacugucagagau

SEQ ID NO: 1267991 - RNA, 19 nt, Artificial Sequence
  Description of Artificial Sequence: Synthetic oligonucleotide
  Antisense strand to SEQ ID NO: 1267990
aucucugacaguggcuauc

SEQ ID NO: 1267992 - RNA, 19 nt, Artificial Sequence
  Description of Artificial Sequence: Synthetic oligonucleotide
  Sense strand starting at position 3323 of SEQ ID NO: 1241378
gucagagauucugcacaga

SEQ ID NO: 1267993 - RNA, 19 nt, Artificial Sequence
  Description of Artificial Sequence: Synthetic oligonucleotide
  Antisense strand to SEQ ID NO: 1267992
ucugugcagaaucucugac

SEQ ID NO: 1267994 - RNA, 19 nt, Artificial Sequence
  Description of Artificial Sequence: Synthetic oligonucleotide
  Sense strand starting at position 3539 of SEQ ID NO: 1241378
cucagaacugggugauagu

SEQ ID NO: 1267995 - RNA, 19 nt, Artificial Sequence
  Description of Artificial Sequence: Synthetic oligonucleotide
  Antisense strand to SEQ ID NO: 1267994
acuaucacccaguucugag

SEQ ID NO: 1267996 - RNA, 19 nt, Artificial Sequence
  Description of Artificial Sequence: Synthetic oligonucleotide
  Sense strand starting at position 3546 of SEQ ID NO: 1241378
cugggugauagucacacau

SEQ ID NO: 1267997 - RNA, 19 nt, Artificial Sequence
  Description of Artificial Sequence: Synthetic oligonucleotide
  Antisense strand to SEQ ID NO: 1267996
augugugacuaucacccag

SEQ ID NO: 1267998 - RNA, 19 nt, Artificial Sequence
  Description of Artificial Sequence: Synthetic oligonucleotide
  Sense strand starting at position 3548 of SEQ ID NO: 1241378
gggugauagucacacauca

SEQ ID NO: 1267999 - RNA, 19 nt, Artificial Sequence
  Description of Artificial Sequence: Synthetic oligonucleotide
  Antisense strand to SEQ ID NO: 1267998
ugaugugugacuaucaccc

SEQ ID NO: 1268000 - RNA, 19 nt, Artificial Sequence
  Description of Artificial Sequence: Synthetic oligonucleotide
  Sense strand starting at position 3718 of SEQ ID NO: 1241378
cucgguuucuguuaucuag

SEQ ID NO: 1268001 - RNA, 19 nt, Artificial Sequence
  Description of Artificial Sequence: Synthetic oligonucleotide
  Antisense strand to SEQ ID NO: 1268000
cuagauaacagaaaccgag

SEQ ID NO: 1268002 - RNA, 19 nt, Artificial Sequence
  Description of Artificial Sequence: Synthetic oligonucleotide
  Sense strand starting at position 3720 of SEQ ID NO: 1241378
cgguuucuguuaucuagua

SEQ ID NO: 1268003 - RNA, 19 nt, Artificial Sequence
  Description of Artificial Sequence: Synthetic oligonucleotide
  Antisense strand to SEQ ID NO: 1268002
uacuagauaacagaaaccg

SEQ ID NO: 1268004 - RNA, 19 nt, Artificial Sequence
  Description of Artificial Sequence: Synthetic oligonucleotide
  Sense strand starting at position 3743 of SEQ ID NO: 1241378
cugauuggcuuuccagaaa

SEQ ID NO: 1268005 - RNA, 19 nt, Artificial Sequence
  Description of Artificial Sequence: Synthetic oligonucleotide
  Antisense strand to SEQ ID NO: 1268004
uuucuggaaagccaaucag

SEQ ID NO: 1268006 - RNA, 19 nt, Artificial Sequence
  Description of Artificial Sequence: Synthetic oligonucleotide
  Sense strand starting at position 356 of SEQ ID NO: 1241379
ugcaguggaccguaggaau

SEQ ID NO: 1268007 - RNA, 19 nt, Artificial Sequence
  Description of Artificial Sequence: Synthetic oligonucleotide
  Antisense strand to SEQ ID NO: 1268006
auuccuacgguccacugca

SEQ ID NO: 1268008 - RNA, 19 nt, Artificial Sequence
  Description of Artificial Sequence: Synthetic oligonucleotide
  Sense strand starting at position 507 of SEQ ID NO: 1241379
gauggaacccaauggucuu

SEQ ID NO: 1268009 - RNA, 19 nt, Artificial Sequence
  Description of Artificial Sequence: Synthetic oligonucleotide
  Antisense strand to SEQ ID NO: 1268008
aagaccauuggguuccauc

SEQ ID NO: 1268010 - RNA, 19 nt, Artificial Sequence
  Description of Artificial Sequence: Synthetic oligonucleotide
  Sense strand starting at position 519 of SEQ ID NO: 1241379
uggucuuaacucuggagaa

SEQ ID NO: 1268011 - RNA, 19 nt, Artificial Sequence
  Description of Artificial Sequence: Synthetic oligonucleotide
  Antisense strand to SEQ ID NO: 1268010
uucuccagaguuaagacca

SEQ ID NO: 1268012 - RNA, 19 nt, Artificial Sequence
  Description of Artificial Sequence: Synthetic oligonucleotide
  Sense strand starting at position 636 of SEQ ID NO: 1241379
gucuaaacuuuggcaucaa

SEQ ID NO: 1268013 - RNA, 19 nt, Artificial Sequence
  Description of Artificial Sequence: Synthetic oligonucleotide
  Antisense strand to SEQ ID NO: 1268012
uugaugccaaaguuuagac

SEQ ID NO: 1268014 - RNA, 19 nt, Artificial Sequence
  Description of Artificial Sequence: Synthetic oligonucleotide
  Sense strand starting at position 732 of SEQ ID NO: 1241379
acuagaauacuguguaugu

SEQ ID NO: 1268015 - RNA, 19 nt, Artificial Sequence
  Description of Artificial Sequence: Synthetic oligonucleotide
  Antisense strand to SEQ ID NO: 1268014
acauacacaguauucuagu

SEQ ID NO: 1268016 - RNA, 19 nt, Artificial Sequence
  Description of Artificial Sequence: Synthetic oligonucleotide
  Sense strand starting at position 733 of SEQ ID NO: 1241379
cuagaauacuguguauguu

SEQ ID NO: 1268017 - RNA, 19 nt, Artificial Sequence
  Description of Artificial Sequence: Synthetic oligonucleotide
  Antisense strand to SEQ ID NO: 1268016
aacauacacaguauucuag

SEQ ID NO: 1268018 - RNA, 19 nt, Artificial Sequence
  Description of Artificial Sequence: Synthetic oligonucleotide
  Sense strand starting at position 734 of SEQ ID NO: 1241379
uagaauacuguguauguuu

SEQ ID NO: 1268019 - RNA, 19 nt, Artificial Sequence
  Description of Artificial Sequence: Synthetic oligonucleotide
  Antisense strand to SEQ ID NO: 1268018
aaacauacacaguauucua

SEQ ID NO: 1268020 - RNA, 19 nt, Artificial Sequence
  Description of Artificial Sequence: Synthetic oligonucleotide
  Sense strand starting at position 736 of SEQ ID NO: 1241379
gaauacuguguauguuuga

SEQ ID NO: 1268021 - RNA, 19 nt, Artificial Sequence
  Description of Artificial Sequence: Synthetic oligonucleotide
  Antisense strand to SEQ ID NO: 1268020
ucaaacauacacaguauuc

SEQ ID NO: 1268022 - RNA, 19 nt, Artificial Sequence
  Description of Artificial Sequence: Synthetic oligonucleotide
  Sense strand starting at position 743 of SEQ ID NO: 1241379
guguauguuugacucuaga

SEQ ID NO: 1268023 - RNA, 19 nt, Artificial Sequence
  Description of Artificial Sequence: Synthetic oligonucleotide
  Antisense strand to SEQ ID NO: 1268022
ucuagagucaaacauacac

SEQ ID NO: 1268024 - RNA, 19 nt, Artificial Sequence
  Description of Artificial Sequence: Synthetic oligonucleotide
  Sense strand starting at position 746 of SEQ ID NO: 1241379
uauguuugacucuagaguc

SEQ ID NO: 1268025 - RNA, 19 nt, Artificial Sequence
  Description of Artificial Sequence: Synthetic oligonucleotide
  Antisense strand to SEQ ID NO: 1268024
gacucuagagucaaacaua

SEQ ID NO: 1268026 - RNA, 19 nt, Artificial Sequence
  Description of Artificial Sequence: Synthetic oligonucleotide
  Sense strand starting at position 766 of SEQ ID NO: 1241379
agaguaaacucaguauucu

SEQ ID NO: 1268027 - RNA, 19 nt, Artificial Sequence
  Description of Artificial Sequence: Synthetic oligonucleotide
  Antisense strand to SEQ ID NO: 1268026
agaauacugaguuuacucu

SEQ ID NO: 1268028 - RNA, 19 nt, Artificial Sequence
  Description of Artificial Sequence: Synthetic oligonucleotide
  Sense strand starting at position 824 of SEQ ID NO: 1241379
ggaggccuccacuagagua

SEQ ID NO: 1268029 - RNA, 19 nt, Artificial Sequence
  Description of Artificial Sequence: Synthetic oligonucleotide
  Antisense strand to SEQ ID NO: 1268028
uacucuaguggaggccucc

SEQ ID NO: 1268030 - RNA, 19 nt, Artificial Sequence
  Description of Artificial Sequence: Synthetic oligonucleotide
  Sense strand starting at position 1054 of SEQ ID NO: 1241379
uuaagaguuguggaaguuu

SEQ ID NO: 1268031 - RNA, 19 nt, Artificial Sequence
  Description of Artificial Sequence: Synthetic oligonucleotide
  Antisense strand to SEQ ID NO: 1268030
aaacuuccacaacucuuaa

SEQ ID NO: 1268032 - RNA, 19 nt, Artificial Sequence
  Description of Artificial Sequence: Synthetic oligonucleotide
  Sense strand starting at position 1292 of SEQ ID NO: 1241379
agagguaucugccucuaga

SEQ ID NO: 1268033 - RNA, 19 nt, Artificial Sequence
  Description of Artificial Sequence: Synthetic oligonucleotide
  Antisense strand to SEQ ID NO: 1268032
ucuagaggcagauaccucu

SEQ ID NO: 1268034 - RNA, 19 nt, Artificial Sequence
  Description of Artificial Sequence: Synthetic oligonucleotide
  Sense strand starting at position 1364 of SEQ ID NO: 1241379
auagaaucauaaggagaaa

SEQ ID NO: 1268035 - RNA, 19 nt, Artificial Sequence
  Description of Artificial Sequence: Synthetic oligonucleotide
  Antisense strand to SEQ ID NO: 1268034
uuucuccuuaugauucuau

SEQ ID NO: 1268036 - RNA, 19 nt, Artificial Sequence
  Description of Artificial Sequence: Synthetic oligonucleotide
  Sense strand starting at position 1434 of SEQ ID NO: 1241379
gaaggaaauuaaggaauau

SEQ ID NO: 1268037 - RNA, 19 nt, Artificial Sequence
  Description of Artificial Sequence: Synthetic oligonucleotide
  Antisense strand to SEQ ID NO: 1268036
auauuccuuaauuuccuuc

SEQ ID NO: 1268038 - RNA, 19 nt, Artificial Sequence
  Description of Artificial Sequence: Synthetic oligonucleotide
  Sense strand starting at position 1509 of SEQ ID NO: 1241379
gaaggagucuggccugaag

SEQ ID NO: 1268039 - RNA, 19 nt, Artificial Sequence
  Description of Artificial Sequence: Synthetic oligonucleotide
  Antisense strand to SEQ ID NO: 1268038
cuucaggccagacuccuuc

SEQ ID NO: 1268040 - RNA, 19 nt, Artificial Sequence
  Description of Artificial Sequence: Synthetic oligonucleotide
  Sense strand starting at position 1518 of SEQ ID NO: 1241379
uggccugaagccugaaaca

SEQ ID NO: 1268041 - RNA, 19 nt, Artificial Sequence
  Description of Artificial Sequence: Synthetic oligonucleotide
  Antisense strand to SEQ ID NO: 1268040
uguuucaggcuucaggcca

SEQ ID NO: 1268042 - RNA, 19 nt, Artificial Sequence
  Description of Artificial Sequence: Synthetic oligonucleotide
  Sense strand starting at position 1640 of SEQ ID NO: 1241379
gcguuaaaucuacaguauc

SEQ ID NO: 1268043 - RNA, 19 nt, Artificial Sequence
  Description of Artificial Sequence: Synthetic oligonucleotide
  Antisense strand to SEQ ID NO: 1268042
gauacuguagauuuaacgc

SEQ ID NO: 1268044 - RNA, 19 nt, Artificial Sequence
  Description of Artificial Sequence: Synthetic oligonucleotide
  Sense strand starting at position 2109 of SEQ ID NO: 1241379
ugauauucugaacggauga

SEQ ID NO: 1268045 - RNA, 19 nt, Artificial Sequence
  Description of Artificial Sequence: Synthetic oligonucleotide
  Antisense strand to SEQ ID NO: 1268044
ucauccguucagaauauca

SEQ ID NO: 1268046 - RNA, 19 nt, Artificial Sequence
  Description of Artificial Sequence: Synthetic oligonucleotide
  Sense strand starting at position 2134 of SEQ ID NO: 1241379
aaacaaugaguucgauacu

SEQ ID NO: 1268047 - RNA, 19 nt, Artificial Sequence
  Description of Artificial Sequence: Synthetic oligonucleotide
  Antisense strand to SEQ ID NO: 1268046
aguaucgaacucauuguuu

SEQ ID NO: 1268048 - RNA, 19 nt, Artificial Sequence
  Description of Artificial Sequence: Synthetic oligonucleotide
  Sense strand starting at position 2137 of SEQ ID NO: 1241379
caaugaguucgauacugua

SEQ ID NO: 1268049 - RNA, 19 nt, Artificial Sequence
  Description of Artificial Sequence: Synthetic oligonucleotide
  Antisense strand to SEQ ID NO: 1268048
uacaguaucgaacucauug

SEQ ID NO: 1268050 - RNA, 19 nt, Artificial Sequence
  Description of Artificial Sequence: Synthetic oligonucleotide
  Sense strand starting at position 2239 of SEQ ID NO: 1241379
gagguaaucugccuuaggu

SEQ ID NO: 1268051 - RNA, 19 nt, Artificial Sequence
  Description of Artificial Sequence: Synthetic oligonucleotide
  Antisense strand to SEQ ID NO: 1268050
accuaaggcagauuaccuc

SEQ ID NO: 1268052 - RNA, 19 nt, Artificial Sequence
  Description of Artificial Sequence: Synthetic oligonucleotide
  Sense strand starting at position 2241 of SEQ ID NO: 1241379
gguaaucugccuuagguuu

SEQ ID NO: 1268053 - RNA, 19 nt, Artificial Sequence
  Description of Artificial Sequence: Synthetic oligonucleotide
  Antisense strand to SEQ ID NO: 1268052
aaaccuaaggcagauuacc

SEQ ID NO: 1268054 - RNA, 19 nt, Artificial Sequence
  Description of Artificial Sequence: Synthetic oligonucleotide
  Sense strand starting at position 2247 of SEQ ID NO: 1241379
cugccuuagguuuacaaua

SEQ ID NO: 1268055 - RNA, 19 nt, Artificial Sequence
  Description of Artificial Sequence: Synthetic oligonucleotide
  Antisense strand to SEQ ID NO: 1268054
uauuguaaaccuaaggcag

SEQ ID NO: 1268056 - RNA, 19 nt, Artificial Sequence
  Description of Artificial Sequence: Synthetic oligonucleotide
  Sense strand starting at position 2252 of SEQ ID NO: 1241379
uuagguuuacaauauagca

SEQ ID NO: 1268057 - RNA, 19 nt, Artificial Sequence
  Description of Artificial Sequence: Synthetic oligonucleotide
  Antisense strand to SEQ ID NO: 1268056
ugcuauauuguaaaccuaa

SEQ ID NO: 1268058 - RNA, 19 nt, Artificial Sequence
  Description of Artificial Sequence: Synthetic oligonucleotide
  Sense strand starting at position 2319 of SEQ ID NO: 1241379
ugcaauuaauuccugguaa

SEQ ID NO: 1268059 - RNA, 19 nt, Artificial Sequence
  Description of Artificial Sequence: Synthetic oligonucleotide
  Antisense strand to SEQ ID NO: 1268058
uuaccaggaauuaauugca

SEQ ID NO: 1268060 - RNA, 19 nt, Artificial Sequence
  Description of Artificial Sequence: Synthetic oligonucleotide
  Sense strand starting at position 2331 of SEQ ID NO: 1241379
cugguaacucuuggaauua

SEQ ID NO: 1268061 - RNA, 19 nt, Artificial Sequence
  Description of Artificial Sequence: Synthetic oligonucleotide
  Antisense strand to SEQ ID NO: 1268060
uaauuccaagaguuaccag

SEQ ID NO: 1268062 - RNA, 19 nt, Artificial Sequence
  Description of Artificial Sequence: Synthetic oligonucleotide
  Sense strand starting at position 2479 of SEQ ID NO: 1241379
aguuuaucuucugcugaua

SEQ ID NO: 1268063 - RNA, 19 nt, Artificial Sequence
  Description of Artificial Sequence: Synthetic oligonucleotide
  Antisense strand to SEQ ID NO: 1268062
uaucagcagaagauaaacu

SEQ ID NO: 1268064 - RNA, 19 nt, Artificial Sequence
  Description of Artificial Sequence: Synthetic oligonucleotide
  Sense strand starting at position 2490 of SEQ ID NO: 1241379
ugcugauacugauuaggga

SEQ ID NO: 1268065 - RNA, 19 nt, Artificial Sequence
  Description of Artificial Sequence: Synthetic oligonucleotide
  Antisense strand to SEQ ID NO: 1268064
ucccuaaucaguaucagca

SEQ ID NO: 1268066 - RNA, 19 nt, Artificial Sequence
  Description of Artificial Sequence: Synthetic oligonucleotide
  Sense strand starting at position 2514 of SEQ ID NO: 1241379
aucucucugccagaagagu

SEQ ID NO: 1268067 - RNA, 19 nt, Artificial Sequence
  Description of Artificial Sequence: Synthetic oligonucleotide
  Antisense strand to SEQ ID NO: 1268066
acucuucuggcagagagau

SEQ ID NO: 1268068 - RNA, 19 nt, Artificial Sequence
  Description of Artificial Sequence: Synthetic oligonucleotide
  Sense strand starting at position 2756 of SEQ ID NO: 1241379
uuaaguucuaaccgaguga

SEQ ID NO: 1268069 - RNA, 19 nt, Artificial Sequence
  Description of Artificial Sequence: Synthetic oligonucleotide
  Antisense strand to SEQ ID NO: 1268068
ucacucgguuagaacuuaa

SEQ ID NO: 1268070 - RNA, 19 nt, Artificial Sequence
  Description of Artificial Sequence: Synthetic oligonucleotide
  Sense strand starting at position 2760 of SEQ ID NO: 1241379
guucuaaccgagugauuac

SEQ ID NO: 1268071 - RNA, 19 nt, Artificial Sequence
  Description of Artificial Sequence: Synthetic oligonucleotide
  Antisense strand to SEQ ID NO: 1268070
guaaucacucgguuagaac

SEQ ID NO: 1268072 - RNA, 19 nt, Artificial Sequence
  Description of Artificial Sequence: Synthetic oligonucleotide
  Sense strand starting at position 2763 of SEQ ID NO: 1241379
cuaaccgagugauuacuua

SEQ ID NO: 1268073 - RNA, 19 nt, Artificial Sequence
  Description of Artificial Sequence: Synthetic oligonucleotide
  Antisense strand to SEQ ID NO: 1268072
uaaguaaucacucgguuag

SEQ ID NO: 1268074 - RNA, 19 nt, Artificial Sequence
  Description of Artificial Sequence: Synthetic oligonucleotide
  Sense strand starting at position 2767 of SEQ ID NO: 1241379
ccgagugauuacuuacuuu

SEQ ID NO: 1268075 - RNA, 19 nt, Artificial Sequence
  Description of Artificial Sequence: Synthetic oligonucleotide
  Antisense strand to SEQ ID NO: 1268074
aaaguaaguaaucacucgg

SEQ ID NO: 1268076 - RNA, 19 nt, Artificial Sequence
  Description of Artificial Sequence: Synthetic oligonucleotide
  Sense strand starting at position 2770 of SEQ ID NO: 1241379
agugauuacuuacuuuaga

SEQ ID NO: 1268077 - RNA, 19 nt, Artificial Sequence
  Description of Artificial Sequence: Synthetic oligonucleotide
  Antisense strand to SEQ ID NO: 1268076
ucuaaaguaaguaaucacu

SEQ ID NO: 1268078 - RNA, 19 nt, Artificial Sequence
  Description of Artificial Sequence: Synthetic oligonucleotide
  Sense strand starting at position 2771 of SEQ ID NO: 1241379
gugauuacuuacuuuagau

SEQ ID NO: 1268079 - RNA, 19 nt, Artificial Sequence
  Description of Artificial Sequence: Synthetic oligonucleotide
  Antisense strand to SEQ ID NO: 1268078
aucuaaaguaaguaaucac

SEQ ID NO: 1268080 - RNA, 19 nt, Artificial Sequence
  Description of Artificial Sequence: Synthetic oligonucleotide
  Sense strand starting at position 2785 of SEQ ID NO: 1241379
uagauauauguugacgguu

SEQ ID NO: 1268081 - RNA, 19 nt, Artificial Sequence
  Description of Artificial Sequence: Synthetic oligonucleotide
  Antisense strand to SEQ ID NO: 1268080
aaccgucaacauauaucua

SEQ ID NO: 1268082 - RNA, 19 nt, Artificial Sequence
  Description of Artificial Sequence: Synthetic oligonucleotide
  Sense strand starting at position 2983 of SEQ ID NO: 1241379
auaauaucugcguucucgu

SEQ ID NO: 1268083 - RNA, 19 nt, Artificial Sequence
  Description of Artificial Sequence: Synthetic oligonucleotide
  Antisense strand to SEQ ID NO: 1268082
acgagaacgcagauauuau

SEQ ID NO: 1268084 - RNA, 19 nt, Artificial Sequence
  Description of Artificial Sequence: Synthetic oligonucleotide
  Sense strand starting at position 2996 of SEQ ID NO: 1241379
ucucgugacaggugauaug

SEQ ID NO: 1268085 - RNA, 19 nt, Artificial Sequence
  Description of Artificial Sequence: Synthetic oligonucleotide
  Antisense strand to SEQ ID NO: 1268084
cauaucaccugucacgaga

SEQ ID NO: 1268086 - RNA, 19 nt, Artificial Sequence
  Description of Artificial Sequence: Synthetic oligonucleotide
  Sense strand starting at position 18 of SEQ ID NO: 1241380
gagguaaucugccuuaggu

SEQ ID NO: 1268087 - RNA, 19 nt, Artificial Sequence
  Description of Artificial Sequence: Synthetic oligonucleotide
  Antisense strand to SEQ ID NO: 1268086
accuaaggcagauuaccuc

SEQ ID NO: 1268088 - RNA, 19 nt, Artificial Sequence
  Description of Artificial Sequence: Synthetic oligonucleotide
  Sense strand starting at position 20 of SEQ ID NO: 1241380
gguaaucugccuuagguuu

SEQ ID NO: 1268089 - RNA, 19 nt, Artificial Sequence
  Description of Artificial Sequence: Synthetic oligonucleotide
  Antisense strand to SEQ ID NO: 1268088
aaaccuaaggcagauuacc

SEQ ID NO: 1268090 - RNA, 19 nt, Artificial Sequence
  Description of Artificial Sequence: Synthetic oligonucleotide
  Sense strand starting at position 26 of SEQ ID NO: 1241380
cugccuuagguuuacaaua

SEQ ID NO: 1268091 - RNA, 19 nt, Artificial Sequence
  Description of Artificial Sequence: Synthetic oligonucleotide
  Antisense strand to SEQ ID NO: 1268090
uauuguaaaccuaaggcag

SEQ ID NO: 1268092 - RNA, 19 nt, Artificial Sequence
  Description of Artificial Sequence: Synthetic oligonucleotide
  Sense strand starting at position 31 of SEQ ID NO: 1241380
uuagguuuacaauauagca

SEQ ID NO: 1268093 - RNA, 19 nt, Artificial Sequence
  Description of Artificial Sequence: Synthetic oligonucleotide
  Antisense strand to SEQ ID NO: 1268092
ugcuauauuguaaaccuaa

SEQ ID NO: 1268094 - RNA, 19 nt, Artificial Sequence
  Description of Artificial Sequence: Synthetic oligonucleotide
  Sense strand starting at position 98 of SEQ ID NO: 1241380
ugcaauuaauuccugguaa

SEQ ID NO: 1268095 - RNA, 19 nt, Artificial Sequence
  Description of Artificial Sequence: Synthetic oligonucleotide
  Antisense strand to SEQ ID NO: 1268094
uuaccaggaauuaauugca

SEQ ID NO: 1268096 - RNA, 19 nt, Artificial Sequence
  Description of Artificial Sequence: Synthetic oligonucleotide
  Sense strand starting at position 110 of SEQ ID NO: 1241380
cugguaacucuuggaauua

SEQ ID NO: 1268097 - RNA, 19 nt, Artificial Sequence
  Description of Artificial Sequence: Synthetic oligonucleotide
  Antisense strand to SEQ ID NO: 1268096
uaauuccaagaguuaccag

SEQ ID NO: 1268098 - RNA, 19 nt, Artificial Sequence
  Description of Artificial Sequence: Synthetic oligonucleotide
  Sense strand starting at position 258 of SEQ ID NO: 1241380
aguuuaucuucugcugaua

SEQ ID NO: 1268099 - RNA, 19 nt, Artificial Sequence
  Description of Artificial Sequence: Synthetic oligonucleotide
  Antisense strand to SEQ ID NO: 1268098
uaucagcagaagauaaacu

SEQ ID NO: 1268100 - RNA, 19 nt, Artificial Sequence
  Description of Artificial Sequence: Synthetic oligonucleotide
  Sense strand starting at position 269 of SEQ ID NO: 1241380
ugcugauacugauuaggga

SEQ ID NO: 1268101 - RNA, 19 nt, Artificial Sequence
  Description of Artificial Sequence: Synthetic oligonucleotide
  Antisense strand to SEQ ID NO: 1268100
ucccuaaucaguaucagca

SEQ ID NO: 1268102 - RNA, 19 nt, Artificial Sequence
  Description of Artificial Sequence: Synthetic oligonucleotide
  Sense strand starting at position 293 of SEQ ID NO: 1241380
aucucucugccagaagagu

SEQ ID NO: 1268103 - RNA, 19 nt, Artificial Sequence
  Description of Artificial Sequence: Synthetic oligonucleotide
  Antisense strand to SEQ ID NO: 1268102
acucuucuggcagagagau

SEQ ID NO: 1268104 - RNA, 19 nt, Artificial Sequence
  Description of Artificial Sequence: Synthetic oligonucleotide
  Sense strand starting at position 535 of SEQ ID NO: 1241380
uuaaguucuaaccgaguga

SEQ ID NO: 1268105 - RNA, 19 nt, Artificial Sequence
  Description of Artificial Sequence: Synthetic oligonucleotide
  Antisense strand to SEQ ID NO: 1268104
ucacucgguuagaacuuaa

SEQ ID NO: 1268106 - RNA, 19 nt, Artificial Sequence
  Description of Artificial Sequence: Synthetic oligonucleotide
  Sense strand starting at position 539 of SEQ ID NO: 1241380
guucuaaccgagugauuac

SEQ ID NO: 1268107 - RNA, 19 nt, Artificial Sequence
  Description of Artificial Sequence: Synthetic oligonucleotide
  Antisense strand to SEQ ID NO: 1268106
guaaucacucgguuagaac

SEQ ID NO: 1268108 - RNA, 19 nt, Artificial Sequence
  Description of Artificial Sequence: Synthetic oligonucleotide
  Sense strand starting at position 542 of SEQ ID NO: 1241380
cuaaccgagugauuacuua

SEQ ID NO: 1268109 - RNA, 19 nt, Artificial Sequence
  Description of Artificial Sequence: Synthetic oligonucleotide
  Antisense strand to SEQ ID NO: 1268108
uaaguaaucacucgguuag

SEQ ID NO: 1268110 - RNA, 19 nt, Artificial Sequence
  Description of Artificial Sequence: Synthetic oligonucleotide
  Sense strand starting at position 546 of SEQ ID NO: 1241380
ccgagugauuacuuacuuu

SEQ ID NO: 1268111 - RNA, 19 nt, Artificial Sequence
  Description of Artificial Sequence: Synthetic oligonucleotide
  Antisense strand to SEQ ID NO: 1268110
aaaguaaguaaucacucgg

SEQ ID NO: 1268112 - RNA, 19 nt, Artificial Sequence
  Description of Artificial Sequence: Synthetic oligonucleotide
  Sense strand starting at position 549 of SEQ ID NO: 1241380
agugauuacuuacuuuaga

SEQ ID NO: 1268113 - RNA, 19 nt, Artificial Sequence
  Description of Artificial Sequence: Synthetic oligonucleotide
  Antisense strand to SEQ ID NO: 1268112
ucuaaaguaaguaaucacu

SEQ ID NO: 1268114 - RNA, 19 nt, Artificial Sequence
  Description of Artificial Sequence: Synthetic oligonucleotide
  Sense strand starting at position 550 of SEQ ID NO: 1241380
gugauuacuuacuuuagau

SEQ ID NO: 1268115 - RNA, 19 nt, Artificial Sequence
  Description of Artificial Sequence: Synthetic oligonucleotide
  Antisense strand to SEQ ID NO: 1268114
aucuaaaguaaguaaucac

SEQ ID NO: 1268116 - RNA, 19 nt, Artificial Sequence
  Description of Artificial Sequence: Synthetic oligonucleotide
  Sense strand starting at position 564 of SEQ ID NO: 1241380
uagauauauguugacgguu

SEQ ID NO: 1268117 - RNA, 19 nt, Artificial Sequence
  Description of Artificial Sequence: Synthetic oligonucleotide
  Antisense strand to SEQ ID NO: 1268116
aaccgucaacauauaucua

SEQ ID NO: 1268118 - RNA, 19 nt, Artificial Sequence
  Description of Artificial Sequence: Synthetic oligonucleotide
  Sense strand starting at position 762 of SEQ ID NO: 1241380
auaauaucugcguucucgu

SEQ ID NO: 1268119 - RNA, 19 nt, Artificial Sequence
  Description of Artificial Sequence: Synthetic oligonucleotide
  Antisense strand to SEQ ID NO: 1268118
acgagaacgcagauauuau

SEQ ID NO: 1268120 - RNA, 19 nt, Artificial Sequence
  Description of Artificial Sequence: Synthetic oligonucleotide
  Sense strand starting at position 775 of SEQ ID NO: 1241380
ucucgugacaggugauaug

SEQ ID NO: 1268121 - RNA, 19 nt, Artificial Sequence
  Description of Artificial Sequence: Synthetic oligonucleotide
  Antisense strand to SEQ ID NO: 1268120
cauaucaccugucacgaga

SEQ ID NO: 1268122 - RNA, 19 nt, Artificial Sequence
  Description of Artificial Sequence: Synthetic oligonucleotide
  Sense strand starting at position 2033 of SEQ ID NO: 1241380
cggguuccucgagauccaa

SEQ ID NO: 1268123 - RNA, 19 nt, Artificial Sequence
  Description of Artificial Sequence: Synthetic oligonucleotide
  Antisense strand to SEQ ID NO: 1268122
uuggaucucgaggaacccg

SEQ ID NO: 1268124 - RNA, 19 nt, Artificial Sequence
  Description of Artificial Sequence: Synthetic oligonucleotide
  Sense strand starting at position 2324 of SEQ ID NO: 1241380
cuacucuuggugcaguaau

SEQ ID NO: 1268125 - RNA, 19 nt, Artificial Sequence
  Description of Artificial Sequence: Synthetic oligonucleotide
  Antisense strand to SEQ ID NO: 1268124
auuacugcaccaagaguag

SEQ ID NO: 1268126 - RNA, 19 nt, Artificial Sequence
  Description of Artificial Sequence: Synthetic oligonucleotide
  Sense strand starting at position 2383 of SEQ ID NO: 1241380
gcacgauugccgcccaacu

SEQ ID NO: 1268127 - RNA, 19 nt, Artificial Sequence
  Description of Artificial Sequence: Synthetic oligonucleotide
  Antisense strand to SEQ ID NO: 1268126
aguugggcggcaaucgugc

SEQ ID NO: 1268128 - RNA, 19 nt, Artificial Sequence
  Description of Artificial Sequence: Synthetic oligonucleotide
  Sense strand starting at position 2490 of SEQ ID NO: 1241380
ggucuuuccuuaccagauu

SEQ ID NO: 1268129 - RNA, 19 nt, Artificial Sequence
  Description of Artificial Sequence: Synthetic oligonucleotide
  Antisense strand to SEQ ID NO: 1268128
aaucugguaaggaaagacc

SEQ ID NO: 1268130 - RNA, 19 nt, Artificial Sequence
  Description of Artificial Sequence: Synthetic oligonucleotide
  Sense strand starting at position 2592 of SEQ ID NO: 1241380
ggcggaguuuacuuacuga

SEQ ID NO: 1268131 - RNA, 19 nt, Artificial Sequence
  Description of Artificial Sequence: Synthetic oligonucleotide
  Antisense strand to SEQ ID NO: 1268130
ucaguaaguaaacuccgcc

SEQ ID NO: 1268132 - RNA, 19 nt, Artificial Sequence
  Description of Artificial Sequence: Synthetic oligonucleotide
  Sense strand starting at position 2595 of SEQ ID NO: 1241380
ggaguuuacuuacugaaua

SEQ ID NO: 1268133 - RNA, 19 nt, Artificial Sequence
  Description of Artificial Sequence: Synthetic oligonucleotide
  Antisense strand to SEQ ID NO: 1268132
uauucaguaaguaaacucc

SEQ ID NO: 1268134 - RNA, 19 nt, Artificial Sequence
  Description of Artificial Sequence: Synthetic oligonucleotide
  Sense strand starting at position 2664 of SEQ ID NO: 1241380
aauaaaguugcagggaaau

SEQ ID NO: 1268135 - RNA, 19 nt, Artificial Sequence
  Description of Artificial Sequence: Synthetic oligonucleotide
  Antisense strand to SEQ ID NO: 1268134
auuucccugcaacuuuauu

SEQ ID NO: 1268136 - RNA, 19 nt, Artificial Sequence
  Description of Artificial Sequence: Synthetic oligonucleotide
  Sense strand starting at position 2820 of SEQ ID NO: 1241380
uuugucuuuggaggcauaa

SEQ ID NO: 1268137 - RNA, 19 nt, Artificial Sequence
  Description of Artificial Sequence: Synthetic oligonucleotide
  Antisense strand to SEQ ID NO: 1268136
uuaugccuccaaagacaaa

SEQ ID NO: 1268138 - RNA, 19 nt, Artificial Sequence
  Description of Artificial Sequence: Synthetic oligonucleotide
  Sense strand starting at position 2822 of SEQ ID NO: 1241380
ugucuuuggaggcauaaac

SEQ ID NO: 1268139 - RNA, 19 nt, Artificial Sequence
  Description of Artificial Sequence: Synthetic oligonucleotide
  Antisense strand to SEQ ID NO: 1268138
guuuaugccuccaaagaca

SEQ ID NO: 1268140 - RNA, 19 nt, Artificial Sequence
  Description of Artificial Sequence: Synthetic oligonucleotide
  Sense strand starting at position 2890 of SEQ ID NO: 1241380
aguagcauugcacauauau

SEQ ID NO: 1268141 - RNA, 19 nt, Artificial Sequence
  Description of Artificial Sequence: Synthetic oligonucleotide
  Antisense strand to SEQ ID NO: 1268140
auauaugugcaaugcuacu

SEQ ID NO: 1268142 - RNA, 19 nt, Artificial Sequence
  Description of Artificial Sequence: Synthetic oligonucleotide
  Sense strand starting at position 2910 of SEQ ID NO: 1241380
uccacuuggcgcuaaauua

SEQ ID NO: 1268143 - RNA, 19 nt, Artificial Sequence
  Description of Artificial Sequence: Synthetic oligonucleotide
  Antisense strand to SEQ ID NO: 1268142
uaauuuagcgccaagugga

SEQ ID NO: 1268144 - RNA, 19 nt, Artificial Sequence
  Description of Artificial Sequence: Synthetic oligonucleotide
  Sense strand starting at position 2938 of SEQ ID NO: 1241380
ucaccuuugccuuaugagu

SEQ ID NO: 1268145 - RNA, 19 nt, Artificial Sequence
  Description of Artificial Sequence: Synthetic oligonucleotide
  Antisense strand to SEQ ID NO: 1268144
acucauaaggcaaagguga

SEQ ID NO: 1268146 - RNA, 19 nt, Artificial Sequence
  Description of Artificial Sequence: Synthetic oligonucleotide
  Sense strand starting at position 3009 of SEQ ID NO: 1241380
ucaauuguauuagcaugua

SEQ ID NO: 1268147 - RNA, 19 nt, Artificial Sequence
  Description of Artificial Sequence: Synthetic oligonucleotide
  Antisense strand to SEQ ID NO: 1268146
uacaugcuaauacaauuga

SEQ ID NO: 1268148 - RNA, 19 nt, Artificial Sequence
  Description of Artificial Sequence: Synthetic oligonucleotide
  Sense strand starting at position 3123 of SEQ ID NO: 1241380
acgauuaaacauugaccuu

SEQ ID NO: 1268149 - RNA, 19 nt, Artificial Sequence
  Description of Artificial Sequence: Synthetic oligonucleotide
  Antisense strand to SEQ ID NO: 1268148
aaggucaauguuuaaucgu

SEQ ID NO: 1268150 - RNA, 19 nt, Artificial Sequence
  Description of Artificial Sequence: Synthetic oligonucleotide
  Sense strand starting at position 3159 of SEQ ID NO: 1241380
cagcuacucagagguguga

SEQ ID NO: 1268151 - RNA, 19 nt, Artificial Sequence
  Description of Artificial Sequence: Synthetic oligonucleotide
  Antisense strand to SEQ ID NO: 1268150
ucacaccucugaguagcug

SEQ ID NO: 1268152 - RNA, 19 nt, Artificial Sequence
  Description of Artificial Sequence: Synthetic oligonucleotide
  Sense strand starting at position 3193 of SEQ ID NO: 1241380
gguguuccagccuagggaa

SEQ ID NO: 1268153 - RNA, 19 nt, Artificial Sequence
  Description of Artificial Sequence: Synthetic oligonucleotide
  Antisense strand to SEQ ID NO: 1268152
uucccuaggcuggaacacc

SEQ ID NO: 1268154 - RNA, 19 nt, Artificial Sequence
  Description of Artificial Sequence: Synthetic oligonucleotide
  Sense strand starting at position 3218 of SEQ ID NO: 1241380
gagacuccgucucuuuaga

SEQ ID NO: 1268155 - RNA, 19 nt, Artificial Sequence
  Description of Artificial Sequence: Synthetic oligonucleotide
  Antisense strand to SEQ ID NO: 1268154
ucuaaagagacggagucuc

SEQ ID NO: 1268156 - RNA, 19 nt, Artificial Sequence
  Description of Artificial Sequence: Synthetic oligonucleotide
  Sense strand starting at position 3220 of SEQ ID NO: 1241380
gacuccgucucuuuagaaa

SEQ ID NO: 1268157 - RNA, 19 nt, Artificial Sequence
  Description of Artificial Sequence: Synthetic oligonucleotide
  Antisense strand to SEQ ID NO: 1268156
uuucuaaagagacggaguc

SEQ ID NO: 1268158 - RNA, 19 nt, Artificial Sequence
  Description of Artificial Sequence: Synthetic oligonucleotide
  Sense strand starting at position 3551 of SEQ ID NO: 1241380
gugucuauaccacaguauu

SEQ ID NO: 1268159 - RNA, 19 nt, Artificial Sequence
  Description of Artificial Sequence: Synthetic oligonucleotide
  Antisense strand to SEQ ID NO: 1268158
aauacugugguauagacac

SEQ ID NO: 1268160 - RNA, 19 nt, Artificial Sequence
  Description of Artificial Sequence: Synthetic oligonucleotide
  Sense strand starting at position 3563 of SEQ ID NO: 1241380
caguauuauggaugguuaa

SEQ ID NO: 1268161 - RNA, 19 nt, Artificial Sequence
  Description of Artificial Sequence: Synthetic oligonucleotide
  Antisense strand to SEQ ID NO: 1268160
uuaaccauccauaauacug

SEQ ID NO: 1268162 - RNA, 19 nt, Artificial Sequence
  Description of Artificial Sequence: Synthetic oligonucleotide
  Sense strand starting at position 3564 of SEQ ID NO: 1241380
aguauuauggaugguuaaa

SEQ ID NO: 1268163 - RNA, 19 nt, Artificial Sequence
  Description of Artificial Sequence: Synthetic oligonucleotide
  Antisense strand to SEQ ID NO: 1268162
uuuaaccauccauaauacu

SEQ ID NO: 1268164 - RNA, 19 nt, Artificial Sequence
  Description of Artificial Sequence: Synthetic oligonucleotide
  Sense strand starting at position 3566 of SEQ ID NO: 1241380
uauuauggaugguuaaaug

SEQ ID NO: 1268165 - RNA, 19 nt, Artificial Sequence
  Description of Artificial Sequence: Synthetic oligonucleotide
  Antisense strand to SEQ ID NO: 1268164
cauuuaaccauccauaaua

SEQ ID NO: 1268166 - RNA, 19 nt, Artificial Sequence
  Description of Artificial Sequence: Synthetic oligonucleotide
  Sense strand starting at position 35 of SEQ ID NO: 1241381
ccaaguauucccgagagug

SEQ ID NO: 1268167 - RNA, 19 nt, Artificial Sequence
  Description of Artificial Sequence: Synthetic oligonucleotide
  Antisense strand to SEQ ID NO: 1268166
cacucucgggaauacuugg

SEQ ID NO: 1268168 - RNA, 19 nt, Artificial Sequence
  Description of Artificial Sequence: Synthetic oligonucleotide
  Sense strand starting at position 149 of SEQ ID NO: 1241381
acgccuaucuaguugagaa

SEQ ID NO: 1268169 - RNA, 19 nt, Artificial Sequence
  Description of Artificial Sequence: Synthetic oligonucleotide
  Antisense strand to SEQ ID NO: 1268168
uucucaacuagauaggcgu

SEQ ID NO: 1268170 - RNA, 19 nt, Artificial Sequence
  Description of Artificial Sequence: Synthetic oligonucleotide
  Sense strand starting at position 151 of SEQ ID NO: 1241381
gccuaucuaguugagaaca

SEQ ID NO: 1268171 - RNA, 19 nt, Artificial Sequence
  Description of Artificial Sequence: Synthetic oligonucleotide
  Antisense strand to SEQ ID NO: 1268170
uguucucaacuagauaggc

SEQ ID NO: 1268172 - RNA, 19 nt, Artificial Sequence
  Description of Artificial Sequence: Synthetic oligonucleotide
  Sense strand starting at position 184 of SEQ ID NO: 1241381
auauaaauaccguggcaaa

SEQ ID NO: 1268173 - RNA, 19 nt, Artificial Sequence
  Description of Artificial Sequence: Synthetic oligonucleotide
  Antisense strand to SEQ ID NO: 1268172
uuugccacgguauuuauau

SEQ ID NO: 1268174 - RNA, 19 nt, Artificial Sequence
  Description of Artificial Sequence: Synthetic oligonucleotide
  Sense strand starting at position 201 of SEQ ID NO: 1241381
aacaguuucggauauuaac

SEQ ID NO: 1268175 - RNA, 19 nt, Artificial Sequence
  Description of Artificial Sequence: Synthetic oligonucleotide
  Antisense strand to SEQ ID NO: 1268174
guuaauauccgaaacuguu

SEQ ID NO: 1268176 - RNA, 19 nt, Artificial Sequence
  Description of Artificial Sequence: Synthetic oligonucleotide
  Sense strand starting at position 459 of SEQ ID NO: 1241381
auguuuaagccuuaagaaa

SEQ ID NO: 1268177 - RNA, 19 nt, Artificial Sequence
  Description of Artificial Sequence: Synthetic oligonucleotide
  Antisense strand to SEQ ID NO: 1268176
uuucuuaaggcuuaaacau

SEQ ID NO: 1268178 - RNA, 19 nt, Artificial Sequence
  Description of Artificial Sequence: Synthetic oligonucleotide
  Sense strand starting at position 533 of SEQ ID NO: 1241381
agaugaauuucuuacccug

SEQ ID NO: 1268179 - RNA, 19 nt, Artificial Sequence
  Description of Artificial Sequence: Synthetic oligonucleotide
  Antisense strand to SEQ ID NO: 1268178
caggguaagaaauucaucu

SEQ ID NO: 1268180 - RNA, 19 nt, Artificial Sequence
  Description of Artificial Sequence: Synthetic oligonucleotide
  Sense strand starting at position 548 of SEQ ID NO: 1241381
ccugcagaauggguuuaaa

SEQ ID NO: 1268181 - RNA, 19 nt, Artificial Sequence
  Description of Artificial Sequence: Synthetic oligonucleotide
  Antisense strand to SEQ ID NO: 1268180
uuuaaacccauucugcagg

SEQ ID NO: 1268182 - RNA, 19 nt, Artificial Sequence
  Description of Artificial Sequence: Synthetic oligonucleotide
  Sense strand starting at position 650 of SEQ ID NO: 1241381
agcgaugucccagauaagu

SEQ ID NO: 1268183 - RNA, 19 nt, Artificial Sequence
  Description of Artificial Sequence: Synthetic oligonucleotide
  Antisense strand to SEQ ID NO: 1268182
acuuaucugggacaucgcu

SEQ ID NO: 1268184 - RNA, 19 nt, Artificial Sequence
  Description of Artificial Sequence: Synthetic oligonucleotide
  Sense strand starting at position 652 of SEQ ID NO: 1241381
cgaugucccagauaaguca

SEQ ID NO: 1268185 - RNA, 19 nt, Artificial Sequence
  Description of Artificial Sequence: Synthetic oligonucleotide
  Antisense strand to SEQ ID NO: 1268184
ugacuuaucugggacaucg

SEQ ID NO: 1268186 - RNA, 19 nt, Artificial Sequence
  Description of Artificial Sequence: Synthetic oligonucleotide
  Sense strand starting at position 660 of SEQ ID NO: 1241381
cagauaagucaaugugaca

SEQ ID NO: 1268187 - RNA, 19 nt, Artificial Sequence
  Description of Artificial Sequence: Synthetic oligonucleotide
  Antisense strand to SEQ ID NO: 1268186
ugucacauugacuuaucug

SEQ ID NO: 1268188 - RNA, 19 nt, Artificial Sequence
  Description of Artificial Sequence: Synthetic oligonucleotide
  Sense strand starting at position 767 of SEQ ID NO: 1241381
aauauaacguagcugugaa

SEQ ID NO: 1268189 - RNA, 19 nt, Artificial Sequence
  Description of Artificial Sequence: Synthetic oligonucleotide
  Antisense strand to SEQ ID NO: 1268188
uucacagcuacguuauauu

SEQ ID NO: 1268190 - RNA, 19 nt, Artificial Sequence
  Description of Artificial Sequence: Synthetic oligonucleotide
  Sense strand starting at position 822 of SEQ ID NO: 1241381
ccagaauaucccgaaaguc

SEQ ID NO: 1268191 - RNA, 19 nt, Artificial Sequence
  Description of Artificial Sequence: Synthetic oligonucleotide
  Antisense strand to SEQ ID NO: 1268190
gacuuucgggauauucugg

SEQ ID NO: 1268192 - RNA, 19 nt, Artificial Sequence
  Description of Artificial Sequence: Synthetic oligonucleotide
  Sense strand starting at position 957 of SEQ ID NO: 1241381
cuuggcaaagauugcaaua

SEQ ID NO: 1268193 - RNA, 19 nt, Artificial Sequence
  Description of Artificial Sequence: Synthetic oligonucleotide
  Antisense strand to SEQ ID NO: 1268192
uauugcaaucuuugccaag

SEQ ID NO: 1268194 - RNA, 19 nt, Artificial Sequence
  Description of Artificial Sequence: Synthetic oligonucleotide
  Sense strand starting at position 1003 of SEQ ID NO: 1241381
guauuccauuaacuaggua

SEQ ID NO: 1268195 - RNA, 19 nt, Artificial Sequence
  Description of Artificial Sequence: Synthetic oligonucleotide
  Antisense strand to SEQ ID NO: 1268194
uaccuaguuaauggaauac

SEQ ID NO: 1268196 - RNA, 19 nt, Artificial Sequence
  Description of Artificial Sequence: Synthetic oligonucleotide
  Sense strand starting at position 1032 of SEQ ID NO: 1241381
gacugaccucguggucaaa

SEQ ID NO: 1268197 - RNA, 19 nt, Artificial Sequence
  Description of Artificial Sequence: Synthetic oligonucleotide
  Antisense strand to SEQ ID NO: 1268196
uuugaccacgaggucaguc

SEQ ID NO: 1268198 - RNA, 19 nt, Artificial Sequence
  Description of Artificial Sequence: Synthetic oligonucleotide
  Sense strand starting at position 1042 of SEQ ID NO: 1241381
guggucaaauuccuuacua

SEQ ID NO: 1268199 - RNA, 19 nt, Artificial Sequence
  Description of Artificial Sequence: Synthetic oligonucleotide
  Antisense strand to SEQ ID NO: 1268198
uaguaaggaauuugaccac

SEQ ID NO: 1268200 - RNA, 19 nt, Artificial Sequence
  Description of Artificial Sequence: Synthetic oligonucleotide
  Sense strand starting at position 1043 of SEQ ID NO: 1241381
uggucaaauuccuuacuag

SEQ ID NO: 1268201 - RNA, 19 nt, Artificial Sequence
  Description of Artificial Sequence: Synthetic oligonucleotide
  Antisense strand to SEQ ID NO: 1268200
cuaguaaggaauuugacca

SEQ ID NO: 1268202 - RNA, 19 nt, Artificial Sequence
  Description of Artificial Sequence: Synthetic oligonucleotide
  Sense strand starting at position 1044 of SEQ ID NO: 1241381
ggucaaauuccuuacuagu

SEQ ID NO: 1268203 - RNA, 19 nt, Artificial Sequence
  Description of Artificial Sequence: Synthetic oligonucleotide
  Antisense strand to SEQ ID NO: 1268202
acuaguaaggaauuugacc

SEQ ID NO: 1268204 - RNA, 19 nt, Artificial Sequence
  Description of Artificial Sequence: Synthetic oligonucleotide
  Sense strand starting at position 1183 of SEQ ID NO: 1241381
uuguaaccugcagaugaaa

SEQ ID NO: 1268205 - RNA, 19 nt, Artificial Sequence
  Description of Artificial Sequence: Synthetic oligonucleotide
  Antisense strand to SEQ ID NO: 1268204
uuucaucugcagguuacaa

SEQ ID NO: 1268206 - RNA, 19 nt, Artificial Sequence
  Description of Artificial Sequence: Synthetic oligonucleotide
  Sense strand starting at position 1282 of SEQ ID NO: 1241381
aucauuugcucauagagag

SEQ ID NO: 1268207 - RNA, 19 nt, Artificial Sequence
  Description of Artificial Sequence: Synthetic oligonucleotide
  Antisense strand to SEQ ID NO: 1268206
cucucuaugagcaaaugau

SEQ ID NO: 1268208 - RNA, 19 nt, Artificial Sequence
  Description of Artificial Sequence: Synthetic oligonucleotide
  Sense strand starting at position 1378 of SEQ ID NO: 1241381
gauuuaaaggcucgcgaua

SEQ ID NO: 1268209 - RNA, 19 nt, Artificial Sequence
  Description of Artificial Sequence: Synthetic oligonucleotide
  Antisense strand to SEQ ID NO: 1268208
uaucgcgagccuuuaaauc

SEQ ID NO: 1268210 - RNA, 19 nt, Artificial Sequence
  Description of Artificial Sequence: Synthetic oligonucleotide
  Sense strand starting at position 1392 of SEQ ID NO: 1241381
cgauacaucuacuugguaa

SEQ ID NO: 1268211 - RNA, 19 nt, Artificial Sequence
  Description of Artificial Sequence: Synthetic oligonucleotide
  Antisense strand to SEQ ID NO: 1268210
uuaccaaguagauguaucg

SEQ ID NO: 1268212 - RNA, 19 nt, Artificial Sequence
  Description of Artificial Sequence: Synthetic oligonucleotide
  Sense strand starting at position 1481 of SEQ ID NO: 1241381
guuaacuucgacuauauua

SEQ ID NO: 1268213 - RNA, 19 nt, Artificial Sequence
  Description of Artificial Sequence: Synthetic oligonucleotide
  Antisense strand to SEQ ID NO: 1268212
uaauauagucgaaguuaac

SEQ ID NO: 1268214 - RNA, 19 nt, Artificial Sequence
  Description of Artificial Sequence: Synthetic oligonucleotide
  Sense strand starting at position 1561 of SEQ ID NO: 1241381
gaaagcagccguuaacaca

SEQ ID NO: 1268215 - RNA, 19 nt, Artificial Sequence
  Description of Artificial Sequence: Synthetic oligonucleotide
  Antisense strand to SEQ ID NO: 1268214
uguguuaacggcugcuuuc

SEQ ID NO: 1268216 - RNA, 19 nt, Artificial Sequence
  Description of Artificial Sequence: Synthetic oligonucleotide
  Sense strand starting at position 1864 of SEQ ID NO: 1241381
cggguucugcguagagaag

SEQ ID NO: 1268217 - RNA, 19 nt, Artificial Sequence
  Description of Artificial Sequence: Synthetic oligonucleotide
  Antisense strand to SEQ ID NO: 1268216
cuucucuacgcagaacccg

SEQ ID NO: 1268218 - RNA, 19 nt, Artificial Sequence
  Description of Artificial Sequence: Synthetic oligonucleotide
  Sense strand starting at position 2083 of SEQ ID NO: 1241381
cacaauuagcaguggguua

SEQ ID NO: 1268219 - RNA, 19 nt, Artificial Sequence
  Description of Artificial Sequence: Synthetic oligonucleotide
  Antisense strand to SEQ ID NO: 1268218
uaacccacugcuaauugug

SEQ ID NO: 1268220 - RNA, 19 nt, Artificial Sequence
  Description of Artificial Sequence: Synthetic oligonucleotide
  Sense strand starting at position 2085 of SEQ ID NO: 1241381
caauuagcaguggguuaga

SEQ ID NO: 1268221 - RNA, 19 nt, Artificial Sequence
  Description of Artificial Sequence: Synthetic oligonucleotide
  Antisense strand to SEQ ID NO: 1268220
ucuaacccacugcuaauug

SEQ ID NO: 1268222 - RNA, 19 nt, Artificial Sequence
  Description of Artificial Sequence: Synthetic oligonucleotide
  Sense strand starting at position 2088 of SEQ ID NO: 1241381
uuagcaguggguuagacua

SEQ ID NO: 1268223 - RNA, 19 nt, Artificial Sequence
  Description of Artificial Sequence: Synthetic oligonucleotide
  Antisense strand to SEQ ID NO: 1268222
uagucuaacccacugcuaa

SEQ ID NO: 1268224 - RNA, 19 nt, Artificial Sequence
  Description of Artificial Sequence: Synthetic oligonucleotide
  Sense strand starting at position 2111 of SEQ ID NO: 1241381
ggcgaauuuccacaugcgu

SEQ ID NO: 1268225 - RNA, 19 nt, Artificial Sequence
  Description of Artificial Sequence: Synthetic oligonucleotide
  Antisense strand to SEQ ID NO: 1268224
acgcauguggaaauucgcc

SEQ ID NO: 1268226 - RNA, 19 nt, Artificial Sequence
  Description of Artificial Sequence: Synthetic oligonucleotide
  Sense strand starting at position 2113 of SEQ ID NO: 1241381
cgaauuuccacaugcguga

SEQ ID NO: 1268227 - RNA, 19 nt, Artificial Sequence
  Description of Artificial Sequence: Synthetic oligonucleotide
  Antisense strand to SEQ ID NO: 1268226
ucacgcauguggaaauucg

SEQ ID NO: 1268228 - RNA, 19 nt, Artificial Sequence
  Description of Artificial Sequence: Synthetic oligonucleotide
  Sense strand starting at position 2137 of SEQ ID NO: 1241381
acuaguuuauaacugguua

SEQ ID NO: 1268229 - RNA, 19 nt, Artificial Sequence
  Description of Artificial Sequence: Synthetic oligonucleotide
  Antisense strand to SEQ ID NO: 1268228
uaaccaguuauaaacuagu

SEQ ID NO: 1268230 - RNA, 19 nt, Artificial Sequence
  Description of Artificial Sequence: Synthetic oligonucleotide
  Sense strand starting at position 2178 of SEQ ID NO: 1241381
ggagaaugcuuauuggcua

SEQ ID NO: 1268231 - RNA, 19 nt, Artificial Sequence
  Description of Artificial Sequence: Synthetic oligonucleotide
  Antisense strand to SEQ ID NO: 1268230
uagccaauaagcauucucc

SEQ ID NO: 1268232 - RNA, 19 nt, Artificial Sequence
  Description of Artificial Sequence: Synthetic oligonucleotide
  Sense strand starting at position 2521 of SEQ ID NO: 1241381
uuguuaaaguguguagaaa

SEQ ID NO: 1268233 - RNA, 19 nt, Artificial Sequence
  Description of Artificial Sequence: Synthetic oligonucleotide
  Antisense strand to SEQ ID NO: 1268232
uuucuacacacuuuaacaa

SEQ ID NO: 1268234 - RNA, 19 nt, Artificial Sequence
  Description of Artificial Sequence: Synthetic oligonucleotide
  Sense strand starting at position 2577 of SEQ ID NO: 1241381
uucucaguuccagauucga

SEQ ID NO: 1268235 - RNA, 19 nt, Artificial Sequence
  Description of Artificial Sequence: Synthetic oligonucleotide
  Antisense strand to SEQ ID NO: 1268234
ucgaaucuggaacugagaa

SEQ ID NO: 1268236 - RNA, 19 nt, Artificial Sequence
  Description of Artificial Sequence: Synthetic oligonucleotide
  Sense strand starting at position 2736 of SEQ ID NO: 1241381
ggcaucuaauaucuuaagu

SEQ ID NO: 1268237 - RNA, 19 nt, Artificial Sequence
  Description of Artificial Sequence: Synthetic oligonucleotide
  Antisense strand to SEQ ID NO: 1268236
acuuaagauauuagaugcc

SEQ ID NO: 1268238 - RNA, 19 nt, Artificial Sequence
  Description of Artificial Sequence: Synthetic oligonucleotide
  Sense strand starting at position 2846 of SEQ ID NO: 1241381
agucucucugguuacauua

SEQ ID NO: 1268239 - RNA, 19 nt, Artificial Sequence
  Description of Artificial Sequence: Synthetic oligonucleotide
  Antisense strand to SEQ ID NO: 1268238
uaauguaaccagagagacu

SEQ ID NO: 1268240 - RNA, 19 nt, Artificial Sequence
  Description of Artificial Sequence: Synthetic oligonucleotide
  Sense strand starting at position 3660 of SEQ ID NO: 1241381
aucuacuuugagcaaguaa

SEQ ID NO: 1268241 - RNA, 19 nt, Artificial Sequence
  Description of Artificial Sequence: Synthetic oligonucleotide
  Antisense strand to SEQ ID NO: 1268240
uuacuugcucaaaguagau

SEQ ID NO: 1268242 - RNA, 19 nt, Artificial Sequence
  Description of Artificial Sequence: Synthetic oligonucleotide
  Sense strand starting at position 3703 of SEQ ID NO: 1241381
gcuuaaagccucgacucaa

SEQ ID NO: 1268243 - RNA, 19 nt, Artificial Sequence
  Description of Artificial Sequence: Synthetic oligonucleotide
  Antisense strand to SEQ ID NO: 1268242
uugagucgaggcuuuaagc

SEQ ID NO: 1268244 - RNA, 19 nt, Artificial Sequence
  Description of Artificial Sequence: Synthetic oligonucleotide
  Sense strand starting at position 3812 of SEQ ID NO: 1241381
ggcagaguuuaauucuuac

SEQ ID NO: 1268245 - RNA, 19 nt, Artificial Sequence
  Description of Artificial Sequence: Synthetic oligonucleotide
  Antisense strand to SEQ ID NO: 1268244
guaagaauuaaacucugcc

SEQ ID NO: 1268246 - RNA, 19 nt, Artificial Sequence
  Description of Artificial Sequence: Synthetic oligonucleotide
  Sense strand starting at position 160 of SEQ ID NO: 1241382
guuugaugugaaugaacgu

SEQ ID NO: 1268247 - RNA, 19 nt, Artificial Sequence
  Description of Artificial Sequence: Synthetic oligonucleotide
  Antisense strand to SEQ ID NO: 1268246
acguucauucacaucaaac

SEQ ID NO: 1268248 - RNA, 19 nt, Artificial Sequence
  Description of Artificial Sequence: Synthetic oligonucleotide
  Sense strand starting at position 161 of SEQ ID NO: 1241382
uuugaugugaaugaacgua

SEQ ID NO: 1268249 - RNA, 19 nt, Artificial Sequence
  Description of Artificial Sequence: Synthetic oligonucleotide
  Antisense strand to SEQ ID NO: 1268248
uacguucauucacaucaaa

SEQ ID NO: 1268250 - RNA, 19 nt, Artificial Sequence
  Description of Artificial Sequence: Synthetic oligonucleotide
  Sense strand starting at position 174 of SEQ ID NO: 1241382
aacguaaagaguugaugga

SEQ ID NO: 1268251 - RNA, 19 nt, Artificial Sequence
  Description of Artificial Sequence: Synthetic oligonucleotide
  Antisense strand to SEQ ID NO: 1268250
uccaucaacucuuuacguu

SEQ ID NO: 1268252 - RNA, 19 nt, Artificial Sequence
  Description of Artificial Sequence: Synthetic oligonucleotide
  Sense strand starting at position 234 of SEQ ID NO: 1241382
ugugauauuaguuggaaag

SEQ ID NO: 1268253 - RNA, 19 nt, Artificial Sequence
  Description of Artificial Sequence: Synthetic oligonucleotide
  Antisense strand to SEQ ID NO: 1268252
cuuuccaacuaauaucaca

SEQ ID NO: 1268254 - RNA, 19 nt, Artificial Sequence
  Description of Artificial Sequence: Synthetic oligonucleotide
  Sense strand starting at position 235 of SEQ ID NO: 1241382
gugauauuaguuggaaaga

SEQ ID NO: 1268255 - RNA, 19 nt, Artificial Sequence
  Description of Artificial Sequence: Synthetic oligonucleotide
  Antisense strand to SEQ ID NO: 1268254
ucuuuccaacuaauaucac

SEQ ID NO: 1268256 - RNA, 19 nt, Artificial Sequence
  Description of Artificial Sequence: Synthetic oligonucleotide
  Sense strand starting at position 236 of SEQ ID NO: 1241382
ugauauuaguuggaaagag

SEQ ID NO: 1268257 - RNA, 19 nt, Artificial Sequence
  Description of Artificial Sequence: Synthetic oligonucleotide
  Antisense strand to SEQ ID NO: 1268256
cucuuuccaacuaauauca

SEQ ID NO: 1268258 - RNA, 19 nt, Artificial Sequence
  Description of Artificial Sequence: Synthetic oligonucleotide
  Sense strand starting at position 433 of SEQ ID NO: 1241382
accugcuuauguccauauu

SEQ ID NO: 1268259 - RNA, 19 nt, Artificial Sequence
  Description of Artificial Sequence: Synthetic oligonucleotide
  Antisense strand to SEQ ID NO: 1268258
aauauggacauaagcaggu

SEQ ID NO: 1268260 - RNA, 19 nt, Artificial Sequence
  Description of Artificial Sequence: Synthetic oligonucleotide
  Sense strand starting at position 473 of SEQ ID NO: 1241382
guaauuaaaccucauguua

SEQ ID NO: 1268261 - RNA, 19 nt, Artificial Sequence
  Description of Artificial Sequence: Synthetic oligonucleotide
  Antisense strand to SEQ ID NO: 1268260
uaacaugagguuuaauuac

SEQ ID NO: 1268262 - RNA, 19 nt, Artificial Sequence
  Description of Artificial Sequence: Synthetic oligonucleotide
  Sense strand starting at position 625 of SEQ ID NO: 1241382
uugaguugggagugagcaa

SEQ ID NO: 1268263 - RNA, 19 nt, Artificial Sequence
  Description of Artificial Sequence: Synthetic oligonucleotide
  Antisense strand to SEQ ID NO: 1268262
uugcucacucccaacucaa

SEQ ID NO: 1268264 - RNA, 19 nt, Artificial Sequence
  Description of Artificial Sequence: Synthetic oligonucleotide
  Sense strand starting at position 695 of SEQ ID NO: 1241382
cucagaagugucuaaauuc

SEQ ID NO: 1268265 - RNA, 19 nt, Artificial Sequence
  Description of Artificial Sequence: Synthetic oligonucleotide
  Antisense strand to SEQ ID NO: 1268264
gaauuuagacacuucugag

SEQ ID NO: 1268266 - RNA, 19 nt, Artificial Sequence
  Description of Artificial Sequence: Synthetic oligonucleotide
  Sense strand starting at position 903 of SEQ ID NO: 1241382
guuugagacucccugugua

SEQ ID NO: 1268267 - RNA, 19 nt, Artificial Sequence
  Description of Artificial Sequence: Synthetic oligonucleotide
  Antisense strand to SEQ ID NO: 1268266
uacacagggagucucaaac

SEQ ID NO: 1268268 - RNA, 19 nt, Artificial Sequence
  Description of Artificial Sequence: Synthetic oligonucleotide
  Sense strand starting at position 906 of SEQ ID NO: 1241382
ugagacucccuguguaguu

SEQ ID NO: 1268269 - RNA, 19 nt, Artificial Sequence
  Description of Artificial Sequence: Synthetic oligonucleotide
  Antisense strand to SEQ ID NO: 1268268
aacuacacagggagucuca

SEQ ID NO: 1268270 - RNA, 19 nt, Artificial Sequence
  Description of Artificial Sequence: Synthetic oligonucleotide
  Sense strand starting at position 907 of SEQ ID NO: 1241382
gagacucccuguguaguua

SEQ ID NO: 1268271 - RNA, 19 nt, Artificial Sequence
  Description of Artificial Sequence: Synthetic oligonucleotide
  Antisense strand to SEQ ID NO: 1268270
uaacuacacagggagucuc

SEQ ID NO: 1268272 - RNA, 19 nt, Artificial Sequence
  Description of Artificial Sequence: Synthetic oligonucleotide
  Sense strand starting at position 908 of SEQ ID NO: 1241382
agacucccuguguaguuaa

SEQ ID NO: 1268273 - RNA, 19 nt, Artificial Sequence
  Description of Artificial Sequence: Synthetic oligonucleotide
  Antisense strand to SEQ ID NO: 1268272
uuaacuacacagggagucu

SEQ ID NO: 1268274 - RNA, 19 nt, Artificial Sequence
  Description of Artificial Sequence: Synthetic oligonucleotide
  Sense strand starting at position 919 of SEQ ID NO: 1241382
guaguuaauacuggaaaga

SEQ ID NO: 1268275 - RNA, 19 nt, Artificial Sequence
  Description of Artificial Sequence: Synthetic oligonucleotide
  Antisense strand to SEQ ID NO: 1268274
ucuuuccaguauuaacuac

SEQ ID NO: 1268276 - RNA, 19 nt, Artificial Sequence
  Description of Artificial Sequence: Synthetic oligonucleotide
  Sense strand starting at position 1030 of SEQ ID NO: 1241382
uguuuaagauauguaugca

SEQ ID NO: 1268277 - RNA, 19 nt, Artificial Sequence
  Description of Artificial Sequence: Synthetic oligonucleotide
  Antisense strand to SEQ ID NO: 1268276
ugcauacauaucuuaaaca

SEQ ID NO: 1268278 - RNA, 19 nt, Artificial Sequence
  Description of Artificial Sequence: Synthetic oligonucleotide
  Sense strand starting at position 1116 of SEQ ID NO: 1241382
gggcuucaaguguaugaug

SEQ ID NO: 1268279 - RNA, 19 nt, Artificial Sequence
  Description of Artificial Sequence: Synthetic oligonucleotide
  Antisense strand to SEQ ID NO: 1268278
caucauacacuugaagccc

SEQ ID NO: 1268280 - RNA, 19 nt, Artificial Sequence
  Description of Artificial Sequence: Synthetic oligonucleotide
  Sense strand starting at position 1265 of SEQ ID NO: 1241382
ggacucagguucucaguuu

SEQ ID NO: 1268281 - RNA, 19 nt, Artificial Sequence
  Description of Artificial Sequence: Synthetic oligonucleotide
  Antisense strand to SEQ ID NO: 1268280
aaacugagaaccugagucc

SEQ ID NO: 1268282 - RNA, 19 nt, Artificial Sequence
  Description of Artificial Sequence: Synthetic oligonucleotide
  Sense strand starting at position 2296 of SEQ ID NO: 1241382
ggaccaggauccuuccgaa

SEQ ID NO: 1268283 - RNA, 19 nt, Artificial Sequence
  Description of Artificial Sequence: Synthetic oligonucleotide
  Antisense strand to SEQ ID NO: 1268282
uucggaaggauccuggucc

SEQ ID NO: 1268284 - RNA, 19 nt, Artificial Sequence
  Description of Artificial Sequence: Synthetic oligonucleotide
  Sense strand starting at position 2446 of SEQ ID NO: 1241382
gcgccuuucccagccgaga

SEQ ID NO: 1268285 - RNA, 19 nt, Artificial Sequence
  Description of Artificial Sequence: Synthetic oligonucleotide
  Antisense strand to SEQ ID NO: 1268284
ucucggcugggaaaggcgc

SEQ ID NO: 1268286 - RNA, 19 nt, Artificial Sequence
  Description of Artificial Sequence: Synthetic oligonucleotide
  Sense strand starting at position 2481 of SEQ ID NO: 1241382
cagcgucagcuguaacaaa

SEQ ID NO: 1268287 - RNA, 19 nt, Artificial Sequence
  Description of Artificial Sequence: Synthetic oligonucleotide
  Antisense strand to SEQ ID NO: 1268286
uuuguuacagcugacgcug

SEQ ID NO: 1268288 - RNA, 19 nt, Artificial Sequence
  Description of Artificial Sequence: Synthetic oligonucleotide
  Sense strand starting at position 2515 of SEQ ID NO: 1241382
gggaacuuguucucgagag

SEQ ID NO: 1268289 - RNA, 19 nt, Artificial Sequence
  Description of Artificial Sequence: Synthetic oligonucleotide
  Antisense strand to SEQ ID NO: 1268288
cucucgagaacaaguuccc

SEQ ID NO: 1268290 - RNA, 19 nt, Artificial Sequence
  Description of Artificial Sequence: Synthetic oligonucleotide
  Sense strand starting at position 2519 of SEQ ID NO: 1241382
acuuguucucgagagggau

SEQ ID NO: 1268291 - RNA, 19 nt, Artificial Sequence
  Description of Artificial Sequence: Synthetic oligonucleotide
  Antisense strand to SEQ ID NO: 1268290
aucccucucgagaacaagu

SEQ ID NO: 1268292 - RNA, 19 nt, Artificial Sequence
  Description of Artificial Sequence: Synthetic oligonucleotide
  Sense strand starting at position 2521 of SEQ ID NO: 1241382
uuguucucgagagggauca

SEQ ID NO: 1268293 - RNA, 19 nt, Artificial Sequence
  Description of Artificial Sequence: Synthetic oligonucleotide
  Antisense strand to SEQ ID NO: 1268292
ugaucccucucgagaacaa

SEQ ID NO: 1268294 - RNA, 19 nt, Artificial Sequence
  Description of Artificial Sequence: Synthetic oligonucleotide
  Sense strand starting at position 2533 of SEQ ID NO: 1241382
gggaucagaugucuugcca

SEQ ID NO: 1268295 - RNA, 19 nt, Artificial Sequence
  Description of Artificial Sequence: Synthetic oligonucleotide
  Antisense strand to SEQ ID NO: 1268294
uggcaagacaucugauccc

SEQ ID NO: 1268296 - RNA, 19 nt, Artificial Sequence
  Description of Artificial Sequence: Synthetic oligonucleotide
  Sense strand starting at position 2617 of SEQ ID NO: 1241382
ccagacagauguucccaaa

SEQ ID NO: 1268297 - RNA, 19 nt, Artificial Sequence
  Description of Artificial Sequence: Synthetic oligonucleotide
  Antisense strand to SEQ ID NO: 1268296
uuugggaacaucugucugg

SEQ ID NO: 1268298 - RNA, 19 nt, Artificial Sequence
  Description of Artificial Sequence: Synthetic oligonucleotide
  Sense strand starting at position 2714 of SEQ ID NO: 1241382
cggagcucuccauaguauu

SEQ ID NO: 1268299 - RNA, 19 nt, Artificial Sequence
  Description of Artificial Sequence: Synthetic oligonucleotide
  Antisense strand to SEQ ID NO: 1268298
aauacuauggagagcuccg

SEQ ID NO: 1268300 - RNA, 19 nt, Artificial Sequence
  Description of Artificial Sequence: Synthetic oligonucleotide
  Sense strand starting at position 2892 of SEQ ID NO: 1241382
agcaguaucccacacagua

SEQ ID NO: 1268301 - RNA, 19 nt, Artificial Sequence
  Description of Artificial Sequence: Synthetic oligonucleotide
  Antisense strand to SEQ ID NO: 1268300
uacugugugggauacugcu

SEQ ID NO: 1268302 - RNA, 19 nt, Artificial Sequence
  Description of Artificial Sequence: Synthetic oligonucleotide
  Sense strand starting at position 2950 of SEQ ID NO: 1241382
ucuucugugagacagagua

SEQ ID NO: 1268303 - RNA, 19 nt, Artificial Sequence
  Description of Artificial Sequence: Synthetic oligonucleotide
  Antisense strand to SEQ ID NO: 1268302
uacucugucucacagaaga

SEQ ID NO: 1268304 - RNA, 19 nt, Artificial Sequence
  Description of Artificial Sequence: Synthetic oligonucleotide
  Sense strand starting at position 2978 of SEQ ID NO: 1241382
agaagacaggcuugcucaa

SEQ ID NO: 1268305 - RNA, 19 nt, Artificial Sequence
  Description of Artificial Sequence: Synthetic oligonucleotide
  Antisense strand to SEQ ID NO: 1268304
uugagcaagccugucuucu

SEQ ID NO: 1268306 - RNA, 19 nt, Artificial Sequence
  Description of Artificial Sequence: Synthetic oligonucleotide
  Sense strand starting at position 2998 of SEQ ID NO: 1241382
ucuguuuggcaacauaauu

SEQ ID NO: 1268307 - RNA, 19 nt, Artificial Sequence
  Description of Artificial Sequence: Synthetic oligonucleotide
  Antisense strand to SEQ ID NO: 1268306
aauuauguugccaaacaga

SEQ ID NO: 1268308 - RNA, 19 nt, Artificial Sequence
  Description of Artificial Sequence: Synthetic oligonucleotide
  Sense strand starting at position 3032 of SEQ ID NO: 1241382
cucugacgucucuggaaag

SEQ ID NO: 1268309 - RNA, 19 nt, Artificial Sequence
  Description of Artificial Sequence: Synthetic oligonucleotide
  Antisense strand to SEQ ID NO: 1268308
cuuuccagagacgucagag

SEQ ID NO: 1268310 - RNA, 19 nt, Artificial Sequence
  Description of Artificial Sequence: Synthetic oligonucleotide
  Sense strand starting at position 3514 of SEQ ID NO: 1241382
uagggauguugccucugua

SEQ ID NO: 1268311 - RNA, 19 nt, Artificial Sequence
  Description of Artificial Sequence: Synthetic oligonucleotide
  Antisense strand to SEQ ID NO: 1268310
uacagaggcaacaucccua

SEQ ID NO: 1268312 - RNA, 19 nt, Artificial Sequence
  Description of Artificial Sequence: Synthetic oligonucleotide
  Sense strand starting at position 3579 of SEQ ID NO: 1241382
gcuuuaauguaacuuauga

SEQ ID NO: 1268313 - RNA, 19 nt, Artificial Sequence
  Description of Artificial Sequence: Synthetic oligonucleotide
  Antisense strand to SEQ ID NO: 1268312
ucauaaguuacauuaaagc

SEQ ID NO: 1268314 - RNA, 19 nt, Artificial Sequence
  Description of Artificial Sequence: Synthetic oligonucleotide
  Sense strand starting at position 3586 of SEQ ID NO: 1241382
uguaacuuaugagcaaauu

SEQ ID NO: 1268315 - RNA, 19 nt, Artificial Sequence
  Description of Artificial Sequence: Synthetic oligonucleotide
  Antisense strand to SEQ ID NO: 1268314
aauuugcucauaaguuaca

SEQ ID NO: 1268316 - RNA, 19 nt, Artificial Sequence
  Description of Artificial Sequence: Synthetic oligonucleotide
  Sense strand starting at position 3596 of SEQ ID NO: 1241382
gagcaaauuugagguaacu

SEQ ID NO: 1268317 - RNA, 19 nt, Artificial Sequence
  Description of Artificial Sequence: Synthetic oligonucleotide
  Antisense strand to SEQ ID NO: 1268316
aguuaccucaaauuugcuc

SEQ ID NO: 1268318 - RNA, 19 nt, Artificial Sequence
  Description of Artificial Sequence: Synthetic oligonucleotide
  Sense strand starting at position 3608 of SEQ ID NO: 1241382
gguaacuucugagcacaua

SEQ ID NO: 1268319 - RNA, 19 nt, Artificial Sequence
  Description of Artificial Sequence: Synthetic oligonucleotide
  Antisense strand to SEQ ID NO: 1268318
uaugugcucagaaguuacc

SEQ ID NO: 1268320 - RNA, 19 nt, Artificial Sequence
  Description of Artificial Sequence: Synthetic oligonucleotide
  Sense strand starting at position 3640 of SEQ ID NO: 1241382
accuguauguaagcuguaa

SEQ ID NO: 1268321 - RNA, 19 nt, Artificial Sequence
  Description of Artificial Sequence: Synthetic oligonucleotide
  Antisense strand to SEQ ID NO: 1268320
uuacagcuuacauacaggu

SEQ ID NO: 1268322 - RNA, 19 nt, Artificial Sequence
  Description of Artificial Sequence: Synthetic oligonucleotide
  Sense strand starting at position 3644 of SEQ ID NO: 1241382
guauguaagcuguaaauua

SEQ ID NO: 1268323 - RNA, 19 nt, Artificial Sequence
  Description of Artificial Sequence: Synthetic oligonucleotide
  Antisense strand to SEQ ID NO: 1268322
uaauuuacagcuuacauac

SEQ ID NO: 1268324 - RNA, 19 nt, Artificial Sequence
  Description of Artificial Sequence: Synthetic oligonucleotide
  Sense strand starting at position 3858 of SEQ ID NO: 1241382
augcgcugccaugacuaau

SEQ ID NO: 1268325 - RNA, 19 nt, Artificial Sequence
  Description of Artificial Sequence: Synthetic oligonucleotide
  Antisense strand to SEQ ID NO: 1268324
auuagucauggcagcgcau

SEQ ID NO: 1268326 - RNA, 19 nt, Artificial Sequence
  Description of Artificial Sequence: Synthetic oligonucleotide
  Sense strand starting at position 287 of SEQ ID NO: 1241383
aaaggcuaugcaugagaca

SEQ ID NO: 1268327 - RNA, 19 nt, Artificial Sequence
  Description of Artificial Sequence: Synthetic oligonucleotide
  Antisense strand to SEQ ID NO: 1268326
ugucucaugcauagccuuu

SEQ ID NO: 1268328 - RNA, 19 nt, Artificial Sequence
  Description of Artificial Sequence: Synthetic oligonucleotide
  Sense strand starting at position 365 of SEQ ID NO: 1241383
uugauagaaugcuugaauu

SEQ ID NO: 1268329 - RNA, 19 nt, Artificial Sequence
  Description of Artificial Sequence: Synthetic oligonucleotide
  Antisense strand to SEQ ID NO: 1268328
aauucaagcauucuaucaa

SEQ ID NO: 1268330 - RNA, 19 nt, Artificial Sequence
  Description of Artificial Sequence: Synthetic oligonucleotide
  Sense strand starting at position 405 of SEQ ID NO: 1241383
caauguuaugguuaauuga

SEQ ID NO: 1268331 - RNA, 19 nt, Artificial Sequence
  Description of Artificial Sequence: Synthetic oligonucleotide
  Antisense strand to SEQ ID NO: 1268330
ucaauuaaccauaacauug

SEQ ID NO: 1268332 - RNA, 19 nt, Artificial Sequence
  Description of Artificial Sequence: Synthetic oligonucleotide
  Sense strand starting at position 408 of SEQ ID NO: 1241383
uguuaugguuaauugaaga

SEQ ID NO: 1268333 - RNA, 19 nt, Artificial Sequence
  Description of Artificial Sequence: Synthetic oligonucleotide
  Antisense strand to SEQ ID NO: 1268332
ucuucaauuaaccauaaca

SEQ ID NO: 1268334 - RNA, 19 nt, Artificial Sequence
  Description of Artificial Sequence: Synthetic oligonucleotide
  Sense strand starting at position 605 of SEQ ID NO: 1241383
aguuauggaguuugggaua

SEQ ID NO: 1268335 - RNA, 19 nt, Artificial Sequence
  Description of Artificial Sequence: Synthetic oligonucleotide
  Antisense strand to SEQ ID NO: 1268334
uaucccaaacuccauaacu

SEQ ID NO: 1268336 - RNA, 19 nt, Artificial Sequence
  Description of Artificial Sequence: Synthetic oligonucleotide
  Sense strand starting at position 616 of SEQ ID NO: 1241383
uugggauauagccauggua

SEQ ID NO: 1268337 - RNA, 19 nt, Artificial Sequence
  Description of Artificial Sequence: Synthetic oligonucleotide
  Antisense strand to SEQ ID NO: 1268336
uaccauggcuauaucccaa

SEQ ID NO: 1268338 - RNA, 19 nt, Artificial Sequence
  Description of Artificial Sequence: Synthetic oligonucleotide
  Sense strand starting at position 618 of SEQ ID NO: 1241383
gggauauagccaugguaac

SEQ ID NO: 1268339 - RNA, 19 nt, Artificial Sequence
  Description of Artificial Sequence: Synthetic oligonucleotide
  Antisense strand to SEQ ID NO: 1268338
guuaccauggcuauauccc

SEQ ID NO: 1268340 - RNA, 19 nt, Artificial Sequence
  Description of Artificial Sequence: Synthetic oligonucleotide
  Sense strand starting at position 721 of SEQ ID NO: 1241383
aggcucuauuaauuaagaa

SEQ ID NO: 1268341 - RNA, 19 nt, Artificial Sequence
  Description of Artificial Sequence: Synthetic oligonucleotide
  Antisense strand to SEQ ID NO: 1268340
uucuuaauuaauagagccu

SEQ ID NO: 1268342 - RNA, 19 nt, Artificial Sequence
  Description of Artificial Sequence: Synthetic oligonucleotide
  Sense strand starting at position 858 of SEQ ID NO: 1241383
uacggaagauguuuaugau

SEQ ID NO: 1268343 - RNA, 19 nt, Artificial Sequence
  Description of Artificial Sequence: Synthetic oligonucleotide
  Antisense strand to SEQ ID NO: 1268342
aucauaaacaucuuccgua

SEQ ID NO: 1268344 - RNA, 19 nt, Artificial Sequence
  Description of Artificial Sequence: Synthetic oligonucleotide
  Sense strand starting at position 862 of SEQ ID NO: 1241383
gaagauguuuaugauuuac

SEQ ID NO: 1268345 - RNA, 19 nt, Artificial Sequence
  Description of Artificial Sequence: Synthetic oligonucleotide
  Antisense strand to SEQ ID NO: 1268344
guaaaucauaaacaucuuc

SEQ ID NO: 1268346 - RNA, 19 nt, Artificial Sequence
  Description of Artificial Sequence: Synthetic oligonucleotide
  Sense strand starting at position 953 of SEQ ID NO: 1241383
aauagaucauucuuggugu

SEQ ID NO: 1268347 - RNA, 19 nt, Artificial Sequence
  Description of Artificial Sequence: Synthetic oligonucleotide
  Antisense strand to SEQ ID NO: 1268346
acaccaagaaugaucuauu

SEQ ID NO: 1268348 - RNA, 19 nt, Artificial Sequence
  Description of Artificial Sequence: Synthetic oligonucleotide
  Sense strand starting at position 1037 of SEQ ID NO: 1241383
cuuauucugguguaacaug

SEQ ID NO: 1268349 - RNA, 19 nt, Artificial Sequence
  Description of Artificial Sequence: Synthetic oligonucleotide
  Antisense strand to SEQ ID NO: 1268348
cauguuacaccagaauaag

SEQ ID NO: 1268350 - RNA, 19 nt, Artificial Sequence
  Description of Artificial Sequence: Synthetic oligonucleotide
  Sense strand starting at position 1084 of SEQ ID NO: 1241383
uguugaaucuuacuuugac

SEQ ID NO: 1268351 - RNA, 19 nt, Artificial Sequence
  Description of Artificial Sequence: Synthetic oligonucleotide
  Antisense strand to SEQ ID NO: 1268350
gucaaaguaagauucaaca

SEQ ID NO: 1268352 - RNA, 19 nt, Artificial Sequence
  Description of Artificial Sequence: Synthetic oligonucleotide
  Sense strand starting at position 1085 of SEQ ID NO: 1241383
guugaaucuuacuuugaca

SEQ ID NO: 1268353 - RNA, 19 nt, Artificial Sequence
  Description of Artificial Sequence: Synthetic oligonucleotide
  Antisense strand to SEQ ID NO: 1268352
ugucaaaguaagauucaac

SEQ ID NO: 1268354 - RNA, 19 nt, Artificial Sequence
  Description of Artificial Sequence: Synthetic oligonucleotide
  Sense strand starting at position 1103 of SEQ ID NO: 1241383
acgugugcccguccuuaua

SEQ ID NO: 1268355 - RNA, 19 nt, Artificial Sequence
  Description of Artificial Sequence: Synthetic oligonucleotide
  Antisense strand to SEQ ID NO: 1268354
uauaaggacgggcacacgu

SEQ ID NO: 1268356 - RNA, 19 nt, Artificial Sequence
  Description of Artificial Sequence: Synthetic oligonucleotide
  Sense strand starting at position 1249 of SEQ ID NO: 1241383
guaaccuacugagcaagau

SEQ ID NO: 1268357 - RNA, 19 nt, Artificial Sequence
  Description of Artificial Sequence: Synthetic oligonucleotide
  Antisense strand to SEQ ID NO: 1268356
aucuugcucaguagguuac

SEQ ID NO: 1268358 - RNA, 19 nt, Artificial Sequence
  Description of Artificial Sequence: Synthetic oligonucleotide
  Sense strand starting at position 1258 of SEQ ID NO: 1241383
ugagcaagaucagugaauc

SEQ ID NO: 1268359 - RNA, 19 nt, Artificial Sequence
  Description of Artificial Sequence: Synthetic oligonucleotide
  Antisense strand to SEQ ID NO: 1268358
gauucacugaucuugcuca

SEQ ID NO: 1268360 - RNA, 19 nt, Artificial Sequence
  Description of Artificial Sequence: Synthetic oligonucleotide
  Sense strand starting at position 1342 of SEQ ID NO: 1241383
ggacaaaccuccgcuaaga

SEQ ID NO: 1268361 - RNA, 19 nt, Artificial Sequence
  Description of Artificial Sequence: Synthetic oligonucleotide
  Antisense strand to SEQ ID NO: 1268360
ucuuagcggagguuugucc

SEQ ID NO: 1268362 - RNA, 19 nt, Artificial Sequence
  Description of Artificial Sequence: Synthetic oligonucleotide
  Sense strand starting at position 1379 of SEQ ID NO: 1241383
ucaucacacgcaggaauua

SEQ ID NO: 1268363 - RNA, 19 nt, Artificial Sequence
  Description of Artificial Sequence: Synthetic oligonucleotide
  Antisense strand to SEQ ID NO: 1268362
uaauuccugcgugugauga

SEQ ID NO: 1268364 - RNA, 19 nt, Artificial Sequence
  Description of Artificial Sequence: Synthetic oligonucleotide
  Sense strand starting at position 1392 of SEQ ID NO: 1241383
gaauuaggauaucuggcuu

SEQ ID NO: 1268365 - RNA, 19 nt, Artificial Sequence
  Description of Artificial Sequence: Synthetic oligonucleotide
  Antisense strand to SEQ ID NO: 1268364
aagccagauauccuaauuc

SEQ ID NO: 1268366 - RNA, 19 nt, Artificial Sequence
  Description of Artificial Sequence: Synthetic oligonucleotide
  Sense strand starting at position 1398 of SEQ ID NO: 1241383
ggauaucuggcuugagaac

SEQ ID NO: 1268367 - RNA, 19 nt, Artificial Sequence
  Description of Artificial Sequence: Synthetic oligonucleotide
  Antisense strand to SEQ ID NO: 1268366
guucucaagccagauaucc

SEQ ID NO: 1268368 - RNA, 19 nt, Artificial Sequence
  Description of Artificial Sequence: Synthetic oligonucleotide
  Sense strand starting at position 1410 of SEQ ID NO: 1241383
ugagaacaccuaugcugua

SEQ ID NO: 1268369 - RNA, 19 nt, Artificial Sequence
  Description of Artificial Sequence: Synthetic oligonucleotide
  Antisense strand to SEQ ID NO: 1268368
uacagcauagguguucuca

SEQ ID NO: 1268370 - RNA, 19 nt, Artificial Sequence
  Description of Artificial Sequence: Synthetic oligonucleotide
  Sense strand starting at position 1493 of SEQ ID NO: 1241383
cuugguaccuucucagaaa

SEQ ID NO: 1268371 - RNA, 19 nt, Artificial Sequence
  Description of Artificial Sequence: Synthetic oligonucleotide
  Antisense strand to SEQ ID NO: 1268370
uuucugagaagguaccaag

SEQ ID NO: 1268372 - RNA, 19 nt, Artificial Sequence
  Description of Artificial Sequence: Synthetic oligonucleotide
  Sense strand starting at position 2768 of SEQ ID NO: 1241383
ccgucuugucugcuucgau

SEQ ID NO: 1268373 - RNA, 19 nt, Artificial Sequence
  Description of Artificial Sequence: Synthetic oligonucleotide
  Antisense strand to SEQ ID NO: 1268372
aucgaagcagacaagacgg

SEQ ID NO: 1268374 - RNA, 19 nt, Artificial Sequence
  Description of Artificial Sequence: Synthetic oligonucleotide
  Sense strand starting at position 2851 of SEQ ID NO: 1241383
uuaacaagaucucuguaag

SEQ ID NO: 1268375 - RNA, 19 nt, Artificial Sequence
  Description of Artificial Sequence: Synthetic oligonucleotide
  Antisense strand to SEQ ID NO: 1268374
cuuacagagaucuuguuaa

SEQ ID NO: 1268376 - RNA, 19 nt, Artificial Sequence
  Description of Artificial Sequence: Synthetic oligonucleotide
  Sense strand starting at position 3064 of SEQ ID NO: 1241383
uaaggagagucaucuuguc

SEQ ID NO: 1268377 - RNA, 19 nt, Artificial Sequence
  Description of Artificial Sequence: Synthetic oligonucleotide
  Antisense strand to SEQ ID NO: 1268376
gacaagaugacucuccuua

SEQ ID NO: 1268378 - RNA, 19 nt, Artificial Sequence
  Description of Artificial Sequence: Synthetic oligonucleotide
  Sense strand starting at position 3100 of SEQ ID NO: 1241383
ggcugaguacuacaguuga

SEQ ID NO: 1268379 - RNA, 19 nt, Artificial Sequence
  Description of Artificial Sequence: Synthetic oligonucleotide
  Antisense strand to SEQ ID NO: 1268378
ucaacuguaguacucagcc

SEQ ID NO: 1268380 - RNA, 19 nt, Artificial Sequence
  Description of Artificial Sequence: Synthetic oligonucleotide
  Sense strand starting at position 3115 of SEQ ID NO: 1241383
uugaaaugauguuuccagu

SEQ ID NO: 1268381 - RNA, 19 nt, Artificial Sequence
  Description of Artificial Sequence: Synthetic oligonucleotide
  Antisense strand to SEQ ID NO: 1268380
acuggaaacaucauuucaa

SEQ ID NO: 1268382 - RNA, 19 nt, Artificial Sequence
  Description of Artificial Sequence: Synthetic oligonucleotide
  Sense strand starting at position 3164 of SEQ ID NO: 1241383
gagugcccagauuaaucuu

SEQ ID NO: 1268383 - RNA, 19 nt, Artificial Sequence
  Description of Artificial Sequence: Synthetic oligonucleotide
  Antisense strand to SEQ ID NO: 1268382
aagauuaaucugggcacuc

SEQ ID NO: 1268384 - RNA, 19 nt, Artificial Sequence
  Description of Artificial Sequence: Synthetic oligonucleotide
  Sense strand starting at position 3400 of SEQ ID NO: 1241383
agucuuugacuugauguca

SEQ ID NO: 1268385 - RNA, 19 nt, Artificial Sequence
  Description of Artificial Sequence: Synthetic oligonucleotide
  Antisense strand to SEQ ID NO: 1268384
ugacaucaagucaaagacu

SEQ ID NO: 1268386 - RNA, 19 nt, Artificial Sequence
  Description of Artificial Sequence: Synthetic oligonucleotide
  Sense strand starting at position 3409 of SEQ ID NO: 1241383
cuugaugucauggaagagu

SEQ ID NO: 1268387 - RNA, 19 nt, Artificial Sequence
  Description of Artificial Sequence: Synthetic oligonucleotide
  Antisense strand to SEQ ID NO: 1268386
acucuuccaugacaucaag

SEQ ID NO: 1268388 - RNA, 19 nt, Artificial Sequence
  Description of Artificial Sequence: Synthetic oligonucleotide
  Sense strand starting at position 3598 of SEQ ID NO: 1241383
ggaaaugacagugguaucu

SEQ ID NO: 1268389 - RNA, 19 nt, Artificial Sequence
  Description of Artificial Sequence: Synthetic oligonucleotide
  Antisense strand to SEQ ID NO: 1268388
agauaccacugucauuucc

SEQ ID NO: 1268390 - RNA, 19 nt, Artificial Sequence
  Description of Artificial Sequence: Synthetic oligonucleotide
  Sense strand starting at position 3673 of SEQ ID NO: 1241383
ugauaauaaguguaccacu

SEQ ID NO: 1268391 - RNA, 19 nt, Artificial Sequence
  Description of Artificial Sequence: Synthetic oligonucleotide
  Antisense strand to SEQ ID NO: 1268390
agugguacacuuauuauca

SEQ ID NO: 1268392 - RNA, 19 nt, Artificial Sequence
  Description of Artificial Sequence: Synthetic oligonucleotide
  Sense strand starting at position 3705 of SEQ ID NO: 1241383
gcuguuggaaguuauuaag

SEQ ID NO: 1268393 - RNA, 19 nt, Artificial Sequence
  Description of Artificial Sequence: Synthetic oligonucleotide
  Antisense strand to SEQ ID NO: 1268392
cuuaauaacuuccaacagc

SEQ ID NO: 1268394 - RNA, 19 nt, Artificial Sequence
  Description of Artificial Sequence: Synthetic oligonucleotide
  Sense strand starting at position 3837 of SEQ ID NO: 1241383
uugggugaccuuggauaag

SEQ ID NO: 1268395 - RNA, 19 nt, Artificial Sequence
  Description of Artificial Sequence: Synthetic oligonucleotide
  Antisense strand to SEQ ID NO: 1268394
cuuauccaaggucacccaa

SEQ ID NO: 1268396 - RNA, 19 nt, Artificial Sequence
  Description of Artificial Sequence: Synthetic oligonucleotide
  Sense strand starting at position 3840 of SEQ ID NO: 1241383
ggugaccuuggauaaguua

SEQ ID NO: 1268397 - RNA, 19 nt, Artificial Sequence
  Description of Artificial Sequence: Synthetic oligonucleotide
  Antisense strand to SEQ ID NO: 1268396
uaacuuauccaaggucacc

SEQ ID NO: 1268398 - RNA, 19 nt, Artificial Sequence
  Description of Artificial Sequence: Synthetic oligonucleotide
  Sense strand starting at position 3894 of SEQ ID NO: 1241383
guuacagugcacguuguaa

SEQ ID NO: 1268399 - RNA, 19 nt, Artificial Sequence
  Description of Artificial Sequence: Synthetic oligonucleotide
  Antisense strand to SEQ ID NO: 1268398
uuacaacgugcacuguaac

SEQ ID NO: 1268400 - RNA, 19 nt, Artificial Sequence
  Description of Artificial Sequence: Synthetic oligonucleotide
  Sense strand starting at position 3937 of SEQ ID NO: 1241383
acuuuaaggcccugaaaca

SEQ ID NO: 1268401 - RNA, 19 nt, Artificial Sequence
  Description of Artificial Sequence: Synthetic oligonucleotide
  Antisense strand to SEQ ID NO: 1268400
uguuucagggccuuaaagu

SEQ ID NO: 1268402 - RNA, 19 nt, Artificial Sequence
  Description of Artificial Sequence: Synthetic oligonucleotide
  Sense strand starting at position 3948 of SEQ ID NO: 1241383
cugaaacacucaguagaug

SEQ ID NO: 1268403 - RNA, 19 nt, Artificial Sequence
  Description of Artificial Sequence: Synthetic oligonucleotide
  Antisense strand to SEQ ID NO: 1268402
caucuacugaguguuucag

SEQ ID NO: 1268404 - RNA, 19 nt, Artificial Sequence
  Description of Artificial Sequence: Synthetic oligonucleotide
  Sense strand starting at position 3976 of SEQ ID NO: 1241383
guuaaauacugacugucaa

SEQ ID NO: 1268405 - RNA, 19 nt, Artificial Sequence
  Description of Artificial Sequence: Synthetic oligonucleotide
  Antisense strand to SEQ ID NO: 1268404
uugacagucaguauuuaac

SEQ ID NO: 1268406 - RNA, 19 nt, Artificial Sequence
  Description of Artificial Sequence: Synthetic oligonucleotide
  Sense strand starting at position 142 of SEQ ID NO: 1241384
ccaauaaacugagaauguu

SEQ ID NO: 1268407 - RNA, 19 nt, Artificial Sequence
  Description of Artificial Sequence: Synthetic oligonucleotide
  Antisense strand to SEQ ID NO: 1268406
aacauucucaguuuauugg

SEQ ID NO: 1268408 - RNA, 19 nt, Artificial Sequence
  Description of Artificial Sequence: Synthetic oligonucleotide
  Sense strand starting at position 215 of SEQ ID NO: 1241384
ucagguguaggauaacuuu

SEQ ID NO: 1268409 - RNA, 19 nt, Artificial Sequence
  Description of Artificial Sequence: Synthetic oligonucleotide
  Antisense strand to SEQ ID NO: 1268408
aaaguuauccuacaccuga

SEQ ID NO: 1268410 - RNA, 19 nt, Artificial Sequence
  Description of Artificial Sequence: Synthetic oligonucleotide
  Sense strand starting at position 324 of SEQ ID NO: 1241384
cuuauaacgugucuauaaa

SEQ ID NO: 1268411 - RNA, 19 nt, Artificial Sequence
  Description of Artificial Sequence: Synthetic oligonucleotide
  Antisense strand to SEQ ID NO: 1268410
uuuauagacacguuauaag

SEQ ID NO: 1268412 - RNA, 19 nt, Artificial Sequence
  Description of Artificial Sequence: Synthetic oligonucleotide
  Sense strand starting at position 325 of SEQ ID NO: 1241384
uuauaacgugucuauaaag

SEQ ID NO: 1268413 - RNA, 19 nt, Artificial Sequence
  Description of Artificial Sequence: Synthetic oligonucleotide
  Antisense strand to SEQ ID NO: 1268412
cuuuauagacacguuauaa

SEQ ID NO: 1268414 - RNA, 19 nt, Artificial Sequence
  Description of Artificial Sequence: Synthetic oligonucleotide
  Sense strand starting at position 332 of SEQ ID NO: 1241384
gugucuauaaagcaagguu

SEQ ID NO: 1268415 - RNA, 19 nt, Artificial Sequence
  Description of Artificial Sequence: Synthetic oligonucleotide
  Antisense strand to SEQ ID NO: 1268414
aaccuugcuuuauagacac

SEQ ID NO: 1268416 - RNA, 19 nt, Artificial Sequence
  Description of Artificial Sequence: Synthetic oligonucleotide
  Sense strand starting at position 345 of SEQ ID NO: 1241384
aagguuugccguuacuaca

SEQ ID NO: 1268417 - RNA, 19 nt, Artificial Sequence
  Description of Artificial Sequence: Synthetic oligonucleotide
  Antisense strand to SEQ ID NO: 1268416
uguaguaacggcaaaccuu

SEQ ID NO: 1268418 - RNA, 19 nt, Artificial Sequence
  Description of Artificial Sequence: Synthetic oligonucleotide
  Sense strand starting at position 352 of SEQ ID NO: 1241384
gccguuacuacagaugcaa

SEQ ID NO: 1268419 - RNA, 19 nt, Artificial Sequence
  Description of Artificial Sequence: Synthetic oligonucleotide
  Antisense strand to SEQ ID NO: 1268418
uugcaucuguaguaacggc

SEQ ID NO: 1268420 - RNA, 19 nt, Artificial Sequence
  Description of Artificial Sequence: Synthetic oligonucleotide
  Sense strand starting at position 444 of SEQ ID NO: 1241384
cuaauuaagugcucuagcu

SEQ ID NO: 1268421 - RNA, 19 nt, Artificial Sequence
  Description of Artificial Sequence: Synthetic oligonucleotide
  Antisense strand to SEQ ID NO: 1268420
agcuagagcacuuaauuag

SEQ ID NO: 1268422 - RNA, 19 nt, Artificial Sequence
  Description of Artificial Sequence: Synthetic oligonucleotide
  Sense strand starting at position 448 of SEQ ID NO: 1241384
uuaagugcucuagcuuguu

SEQ ID NO: 1268423 - RNA, 19 nt, Artificial Sequence
  Description of Artificial Sequence: Synthetic oligonucleotide
  Antisense strand to SEQ ID NO: 1268422
aacaagcuagagcacuuaa

SEQ ID NO: 1268424 - RNA, 19 nt, Artificial Sequence
  Description of Artificial Sequence: Synthetic oligonucleotide
  Sense strand starting at position 458 of SEQ ID NO: 1241384
uagcuuguuccugaucguu

SEQ ID NO: 1268425 - RNA, 19 nt, Artificial Sequence
  Description of Artificial Sequence: Synthetic oligonucleotide
  Antisense strand to SEQ ID NO: 1268424
aacgaucaggaacaagcua

SEQ ID NO: 1268426 - RNA, 19 nt, Artificial Sequence
  Description of Artificial Sequence: Synthetic oligonucleotide
  Sense strand starting at position 552 of SEQ ID NO: 1241384
ucacuuaaccagugaaugu

SEQ ID NO: 1268427 - RNA, 19 nt, Artificial Sequence
  Description of Artificial Sequence: Synthetic oligonucleotide
  Antisense strand to SEQ ID NO: 1268426
acauucacugguuaaguga

SEQ ID NO: 1268428 - RNA, 19 nt, Artificial Sequence
  Description of Artificial Sequence: Synthetic oligonucleotide
  Sense strand starting at position 637 of SEQ ID NO: 1241384
gcucaucaucguuauguuu

SEQ ID NO: 1268429 - RNA, 19 nt, Artificial Sequence
  Description of Artificial Sequence: Synthetic oligonucleotide
  Antisense strand to SEQ ID NO: 1268428
aaacauaacgaugaugagc

SEQ ID NO: 1268430 - RNA, 19 nt, Artificial Sequence
  Description of Artificial Sequence: Synthetic oligonucleotide
  Sense strand starting at position 645 of SEQ ID NO: 1241384
ucguuauguuuggugauca

SEQ ID NO: 1268431 - RNA, 19 nt, Artificial Sequence
  Description of Artificial Sequence: Synthetic oligonucleotide
  Antisense strand to SEQ ID NO: 1268430
ugaucaccaaacauaacga

SEQ ID NO: 1268432 - RNA, 19 nt, Artificial Sequence
  Description of Artificial Sequence: Synthetic oligonucleotide
  Sense strand starting at position 856 of SEQ ID NO: 1241384
cuuguuuguucgguauaag

SEQ ID NO: 1268433 - RNA, 19 nt, Artificial Sequence
  Description of Artificial Sequence: Synthetic oligonucleotide
  Antisense strand to SEQ ID NO: 1268432
cuuauaccgaacaaacaag

SEQ ID NO: 1268434 - RNA, 19 nt, Artificial Sequence
  Description of Artificial Sequence: Synthetic oligonucleotide
  Sense strand starting at position 857 of SEQ ID NO: 1241384
uuguuuguucgguauaagg

SEQ ID NO: 1268435 - RNA, 19 nt, Artificial Sequence
  Description of Artificial Sequence: Synthetic oligonucleotide
  Antisense strand to SEQ ID NO: 1268434
ccuuauaccgaacaaacaa

SEQ ID NO: 1268436 - RNA, 19 nt, Artificial Sequence
  Description of Artificial Sequence: Synthetic oligonucleotide
  Sense strand starting at position 859 of SEQ ID NO: 1241384
guuuguucgguauaagguu

SEQ ID NO: 1268437 - RNA, 19 nt, Artificial Sequence
  Description of Artificial Sequence: Synthetic oligonucleotide
  Antisense strand to SEQ ID NO: 1268436
aaccuuauaccgaacaaac

SEQ ID NO: 1268438 - RNA, 19 nt, Artificial Sequence
  Description of Artificial Sequence: Synthetic oligonucleotide
  Sense strand starting at position 865 of SEQ ID NO: 1241384
ucgguauaagguuaauaug

SEQ ID NO: 1268439 - RNA, 19 nt, Artificial Sequence
  Description of Artificial Sequence: Synthetic oligonucleotide
  Antisense strand to SEQ ID NO: 1268438
cauauuaaccuuauaccga

SEQ ID NO: 1268440 - RNA, 19 nt, Artificial Sequence
  Description of Artificial Sequence: Synthetic oligonucleotide
  Sense strand starting at position 1013 of SEQ ID NO: 1241384
auccgauucuggguuaaua

SEQ ID NO: 1268441 - RNA, 19 nt, Artificial Sequence
  Description of Artificial Sequence: Synthetic oligonucleotide
  Antisense strand to SEQ ID NO: 1268440
uauuaacccagaaucggau

SEQ ID NO: 1268442 - RNA, 19 nt, Artificial Sequence
  Description of Artificial Sequence: Synthetic oligonucleotide
  Sense strand starting at position 1015 of SEQ ID NO: 1241384
ccgauucuggguuaauaag

SEQ ID NO: 1268443 - RNA, 19 nt, Artificial Sequence
  Description of Artificial Sequence: Synthetic oligonucleotide
  Antisense strand to SEQ ID NO: 1268442
cuuauuaacccagaaucgg

SEQ ID NO: 1268444 - RNA, 19 nt, Artificial Sequence
  Description of Artificial Sequence: Synthetic oligonucleotide
  Sense strand starting at position 1022 of SEQ ID NO: 1241384
uggguuaauaagugacuua

SEQ ID NO: 1268445 - RNA, 19 nt, Artificial Sequence
  Description of Artificial Sequence: Synthetic oligonucleotide
  Antisense strand to SEQ ID NO: 1268444
uaagucacuuauuaaccca

SEQ ID NO: 1268446 - RNA, 19 nt, Artificial Sequence
  Description of Artificial Sequence: Synthetic oligonucleotide
  Sense strand starting at position 1025 of SEQ ID NO: 1241384
guuaauaagugacuuacau

SEQ ID NO: 1268447 - RNA, 19 nt, Artificial Sequence
  Description of Artificial Sequence: Synthetic oligonucleotide
  Antisense strand to SEQ ID NO: 1268446
auguaagucacuuauuaac

SEQ ID NO: 1268448 - RNA, 19 nt, Artificial Sequence
  Description of Artificial Sequence: Synthetic oligonucleotide
  Sense strand starting at position 1034 of SEQ ID NO: 1241384
ugacuuacaucugaugaau

SEQ ID NO: 1268449 - RNA, 19 nt, Artificial Sequence
  Description of Artificial Sequence: Synthetic oligonucleotide
  Antisense strand to SEQ ID NO: 1268448
auucaucagauguaaguca

SEQ ID NO: 1268450 - RNA, 19 nt, Artificial Sequence
  Description of Artificial Sequence: Synthetic oligonucleotide
  Sense strand starting at position 1266 of SEQ ID NO: 1241384
caucgcguucuccaaauau

SEQ ID NO: 1268451 - RNA, 19 nt, Artificial Sequence
  Description of Artificial Sequence: Synthetic oligonucleotide
  Antisense strand to SEQ ID NO: 1268450
auauuuggagaacgcgaug

SEQ ID NO: 1268452 - RNA, 19 nt, Artificial Sequence
  Description of Artificial Sequence: Synthetic oligonucleotide
  Sense strand starting at position 1655 of SEQ ID NO: 1241384
ucccgaggccuccggaaua

SEQ ID NO: 1268453 - RNA, 19 nt, Artificial Sequence
  Description of Artificial Sequence: Synthetic oligonucleotide
  Antisense strand to SEQ ID NO: 1268452
uauuccggaggccucggga

SEQ ID NO: 1268454 - RNA, 19 nt, Artificial Sequence
  Description of Artificial Sequence: Synthetic oligonucleotide
  Sense strand starting at position 2070 of SEQ ID NO: 1241384
cgggcaaccuucccucaau

SEQ ID NO: 1268455 - RNA, 19 nt, Artificial Sequence
  Description of Artificial Sequence: Synthetic oligonucleotide
  Antisense strand to SEQ ID NO: 1268454
auugagggaagguugcccg

SEQ ID NO: 1268456 - RNA, 19 nt, Artificial Sequence
  Description of Artificial Sequence: Synthetic oligonucleotide
  Sense strand starting at position 2145 of SEQ ID NO: 1241384
cggaauucucgggaagguc

SEQ ID NO: 1268457 - RNA, 19 nt, Artificial Sequence
  Description of Artificial Sequence: Synthetic oligonucleotide
  Antisense strand to SEQ ID NO: 1268456
gaccuucccgagaauuccg

SEQ ID NO: 1268458 - RNA, 19 nt, Artificial Sequence
  Description of Artificial Sequence: Synthetic oligonucleotide
  Sense strand starting at position 2251 of SEQ ID NO: 1241384
uuugaagugagguguaguu

SEQ ID NO: 1268459 - RNA, 19 nt, Artificial Sequence
  Description of Artificial Sequence: Synthetic oligonucleotide
  Antisense strand to SEQ ID NO: 1268458
aacuacaccucacuucaaa

SEQ ID NO: 1268460 - RNA, 19 nt, Artificial Sequence
  Description of Artificial Sequence: Synthetic oligonucleotide
  Sense strand starting at position 2603 of SEQ ID NO: 1241384
ggucccuuagcuugggaau

SEQ ID NO: 1268461 - RNA, 19 nt, Artificial Sequence
  Description of Artificial Sequence: Synthetic oligonucleotide
  Antisense strand to SEQ ID NO: 1268460
auucccaagcuaagggacc

SEQ ID NO: 1268462 - RNA, 19 nt, Artificial Sequence
  Description of Artificial Sequence: Synthetic oligonucleotide
  Sense strand starting at position 2723 of SEQ ID NO: 1241384
ucuaacacuuuggugauua

SEQ ID NO: 1268463 - RNA, 19 nt, Artificial Sequence
  Description of Artificial Sequence: Synthetic oligonucleotide
  Antisense strand to SEQ ID NO: 1268462
uaaucaccaaaguguuaga

SEQ ID NO: 1268464 - RNA, 19 nt, Artificial Sequence
  Description of Artificial Sequence: Synthetic oligonucleotide
  Sense strand starting at position 2727 of SEQ ID NO: 1241384
acacuuuggugauuaacuu

SEQ ID NO: 1268465 - RNA, 19 nt, Artificial Sequence
  Description of Artificial Sequence: Synthetic oligonucleotide
  Antisense strand to SEQ ID NO: 1268464
aaguuaaucaccaaagugu

SEQ ID NO: 1268466 - RNA, 19 nt, Artificial Sequence
  Description of Artificial Sequence: Synthetic oligonucleotide
  Sense strand starting at position 2735 of SEQ ID NO: 1241384
gugauuaacuugcccuaaa

SEQ ID NO: 1268467 - RNA, 19 nt, Artificial Sequence
  Description of Artificial Sequence: Synthetic oligonucleotide
  Antisense strand to SEQ ID NO: 1268466
uuuagggcaaguuaaucac

SEQ ID NO: 1268468 - RNA, 19 nt, Artificial Sequence
  Description of Artificial Sequence: Synthetic oligonucleotide
  Sense strand starting at position 2960 of SEQ ID NO: 1241384
uguauuuauuuguagaguc

SEQ ID NO: 1268469 - RNA, 19 nt, Artificial Sequence
  Description of Artificial Sequence: Synthetic oligonucleotide
  Antisense strand to SEQ ID NO: 1268468
gacucuacaaauaaauaca

SEQ ID NO: 1268470 - RNA, 19 nt, Artificial Sequence
  Description of Artificial Sequence: Synthetic oligonucleotide
  Sense strand starting at position 3012 of SEQ ID NO: 1241384
caguuucuacaugggaauu

SEQ ID NO: 1268471 - RNA, 19 nt, Artificial Sequence
  Description of Artificial Sequence: Synthetic oligonucleotide
  Antisense strand to SEQ ID NO: 1268470
aauucccauguagaaacug

SEQ ID NO: 1268472 - RNA, 19 nt, Artificial Sequence
  Description of Artificial Sequence: Synthetic oligonucleotide
  Sense strand starting at position 3198 of SEQ ID NO: 1241384
aagcuccuugccguguaaa

SEQ ID NO: 1268473 - RNA, 19 nt, Artificial Sequence
  Description of Artificial Sequence: Synthetic oligonucleotide
  Antisense strand to SEQ ID NO: 1268472
uuuacacggcaaggagcuu

SEQ ID NO: 1268474 - RNA, 19 nt, Artificial Sequence
  Description of Artificial Sequence: Synthetic oligonucleotide
  Sense strand starting at position 3200 of SEQ ID NO: 1241384
gcuccuugccguguaaaga

SEQ ID NO: 1268475 - RNA, 19 nt, Artificial Sequence
  Description of Artificial Sequence: Synthetic oligonucleotide
  Antisense strand to SEQ ID NO: 1268474
ucuuuacacggcaaggagc

SEQ ID NO: 1268476 - RNA, 19 nt, Artificial Sequence
  Description of Artificial Sequence: Synthetic oligonucleotide
  Sense strand starting at position 3201 of SEQ ID NO: 1241384
cuccuugccguguaaagaa

SEQ ID NO: 1268477 - RNA, 19 nt, Artificial Sequence
  Description of Artificial Sequence: Synthetic oligonucleotide
  Antisense strand to SEQ ID NO: 1268476
uucuuuacacggcaaggag

SEQ ID NO: 1268478 - RNA, 19 nt, Artificial Sequence
  Description of Artificial Sequence: Synthetic oligonucleotide
  Sense strand starting at position 3237 of SEQ ID NO: 1241384
gcuuccuggucuuuaggga

SEQ ID NO: 1268479 - RNA, 19 nt, Artificial Sequence
  Description of Artificial Sequence: Synthetic oligonucleotide
  Antisense strand to SEQ ID NO: 1268478
ucccuaaagaccaggaagc

SEQ ID NO: 1268480 - RNA, 19 nt, Artificial Sequence
  Description of Artificial Sequence: Synthetic oligonucleotide
  Sense strand starting at position 3238 of SEQ ID NO: 1241384
cuuccuggucuuuagggaa

SEQ ID NO: 1268481 - RNA, 19 nt, Artificial Sequence
  Description of Artificial Sequence: Synthetic oligonucleotide
  Antisense strand to SEQ ID NO: 1268480
uucccuaaagaccaggaag

SEQ ID NO: 1268482 - RNA, 19 nt, Artificial Sequence
  Description of Artificial Sequence: Synthetic oligonucleotide
  Sense strand starting at position 3304 of SEQ ID NO: 1241384
cccuuaagagcgugugaaa

SEQ ID NO: 1268483 - RNA, 19 nt, Artificial Sequence
  Description of Artificial Sequence: Synthetic oligonucleotide
  Antisense strand to SEQ ID NO: 1268482
uuucacacgcucuuaaggg

SEQ ID NO: 1268484 - RNA, 19 nt, Artificial Sequence
  Description of Artificial Sequence: Synthetic oligonucleotide
  Sense strand starting at position 3582 of SEQ ID NO: 1241384
gccuguuuccuuccuguca

SEQ ID NO: 1268485 - RNA, 19 nt, Artificial Sequence
  Description of Artificial Sequence: Synthetic oligonucleotide
  Antisense strand to SEQ ID NO: 1268484
ugacaggaaggaaacaggc

SEQ ID NO: 1268486 - RNA, 19 nt, Artificial Sequence
  Description of Artificial Sequence: Synthetic oligonucleotide
  Sense strand starting at position 2166 of SEQ ID NO: 1241385
cugggagaguucgcucaau

SEQ ID NO: 1268487 - RNA, 19 nt, Artificial Sequence
  Description of Artificial Sequence: Synthetic oligonucleotide
  Antisense strand to SEQ ID NO: 1268486
auugagcgaacucucccag

SEQ ID NO: 1268488 - RNA, 19 nt, Artificial Sequence
  Description of Artificial Sequence: Synthetic oligonucleotide
  Sense strand starting at position 2177 of SEQ ID NO: 1241385
cgcucaauuccugagguuu

SEQ ID NO: 1268489 - RNA, 19 nt, Artificial Sequence
  Description of Artificial Sequence: Synthetic oligonucleotide
  Antisense strand to SEQ ID NO: 1268488
aaaccucaggaauugagcg

SEQ ID NO: 1268490 - RNA, 19 nt, Artificial Sequence
  Description of Artificial Sequence: Synthetic oligonucleotide
  Sense strand starting at position 2261 of SEQ ID NO: 1241385
guugguugcaccgaagaaa

SEQ ID NO: 1268491 - RNA, 19 nt, Artificial Sequence
  Description of Artificial Sequence: Synthetic oligonucleotide
  Antisense strand to SEQ ID NO: 1268490
uuucuucggugcaaccaac

SEQ ID NO: 1268492 - RNA, 19 nt, Artificial Sequence
  Description of Artificial Sequence: Synthetic oligonucleotide
  Sense strand starting at position 2264 of SEQ ID NO: 1241385
gguugcaccgaagaaauaa

SEQ ID NO: 1268493 - RNA, 19 nt, Artificial Sequence
  Description of Artificial Sequence: Synthetic oligonucleotide
  Antisense strand to SEQ ID NO: 1268492
uuauuucuucggugcaacc

SEQ ID NO: 1268494 - RNA, 19 nt, Artificial Sequence
  Description of Artificial Sequence: Synthetic oligonucleotide
  Sense strand starting at position 2455 of SEQ ID NO: 1241385
gugguugugagcgcucgau

SEQ ID NO: 1268495 - RNA, 19 nt, Artificial Sequence
  Description of Artificial Sequence: Synthetic oligonucleotide
  Antisense strand to SEQ ID NO: 1268494
aucgagcgcucacaaccac

SEQ ID NO: 1268496 - RNA, 19 nt, Artificial Sequence
  Description of Artificial Sequence: Synthetic oligonucleotide
  Sense strand starting at position 2456 of SEQ ID NO: 1241385
ugguugugagcgcucgauu

SEQ ID NO: 1268497 - RNA, 19 nt, Artificial Sequence
  Description of Artificial Sequence: Synthetic oligonucleotide
  Antisense strand to SEQ ID NO: 1268496
aaucgagcgcucacaacca

SEQ ID NO: 1268498 - RNA, 19 nt, Artificial Sequence
  Description of Artificial Sequence: Synthetic oligonucleotide
  Sense strand starting at position 2457 of SEQ ID NO: 1241385
gguugugagcgcucgauua

SEQ ID NO: 1268499 - RNA, 19 nt, Artificial Sequence
  Description of Artificial Sequence: Synthetic oligonucleotide
  Antisense strand to SEQ ID NO: 1268498
uaaucgagcgcucacaacc

SEQ ID NO: 1268500 - RNA, 19 nt, Artificial Sequence
  Description of Artificial Sequence: Synthetic oligonucleotide
  Sense strand starting at position 2459 of SEQ ID NO: 1241385
uugugagcgcucgauuaaa

SEQ ID NO: 1268501 - RNA, 19 nt, Artificial Sequence
  Description of Artificial Sequence: Synthetic oligonucleotide
  Antisense strand to SEQ ID NO: 1268500
uuuaaucgagcgcucacaa

SEQ ID NO: 1268502 - RNA, 19 nt, Artificial Sequence
  Description of Artificial Sequence: Synthetic oligonucleotide
  Sense strand starting at position 2547 of SEQ ID NO: 1241385
ggaucacgacguuaagaca

SEQ ID NO: 1268503 - RNA, 19 nt, Artificial Sequence
  Description of Artificial Sequence: Synthetic oligonucleotide
  Antisense strand to SEQ ID NO: 1268502
ugucuuaacgucgugaucc

SEQ ID NO: 1268504 - RNA, 19 nt, Artificial Sequence
  Description of Artificial Sequence: Synthetic oligonucleotide
  Sense strand starting at position 2893 of SEQ ID NO: 1241385
cgacuuguccuccgaggag

SEQ ID NO: 1268505 - RNA, 19 nt, Artificial Sequence
  Description of Artificial Sequence: Synthetic oligonucleotide
  Antisense strand to SEQ ID NO: 1268504
cuccucggaggacaagucg

SEQ ID NO: 1268506 - RNA, 19 nt, Artificial Sequence
  Description of Artificial Sequence: Synthetic oligonucleotide
  Sense strand starting at position 2953 of SEQ ID NO: 1241385
guuuguccugccgcuuuaa

SEQ ID NO: 1268507 - RNA, 19 nt, Artificial Sequence
  Description of Artificial Sequence: Synthetic oligonucleotide
  Antisense strand to SEQ ID NO: 1268506
uuaaagcggcaggacaaac

SEQ ID NO: 1268508 - RNA, 19 nt, Artificial Sequence
  Description of Artificial Sequence: Synthetic oligonucleotide
  Sense strand starting at position 2954 of SEQ ID NO: 1241385
uuuguccugccgcuuuaaa

SEQ ID NO: 1268509 - RNA, 19 nt, Artificial Sequence
  Description of Artificial Sequence: Synthetic oligonucleotide
  Antisense strand to SEQ ID NO: 1268508
uuuaaagcggcaggacaaa

SEQ ID NO: 1268510 - RNA, 19 nt, Artificial Sequence
  Description of Artificial Sequence: Synthetic oligonucleotide
  Sense strand starting at position 2956 of SEQ ID NO: 1241385
uguccugccgcuuuaaacu

SEQ ID NO: 1268511 - RNA, 19 nt, Artificial Sequence
  Description of Artificial Sequence: Synthetic oligonucleotide
  Antisense strand to SEQ ID NO: 1268510
aguuuaaagcggcaggaca

SEQ ID NO: 1268512 - RNA, 19 nt, Artificial Sequence
  Description of Artificial Sequence: Synthetic oligonucleotide
  Sense strand starting at position 3014 of SEQ ID NO: 1241385
gucgcaagugcuuuaucca

SEQ ID NO: 1268513 - RNA, 19 nt, Artificial Sequence
  Description of Artificial Sequence: Synthetic oligonucleotide
  Antisense strand to SEQ ID NO: 1268512
uggauaaagcacuugcgac

SEQ ID NO: 1268514 - RNA, 19 nt, Artificial Sequence
  Description of Artificial Sequence: Synthetic oligonucleotide
  Sense strand starting at position 3136 of SEQ ID NO: 1241385
gguugugaucgugaccuag

SEQ ID NO: 1268515 - RNA, 19 nt, Artificial Sequence
  Description of Artificial Sequence: Synthetic oligonucleotide
  Antisense strand to SEQ ID NO: 1268514
cuaggucacgaucacaacc

SEQ ID NO: 1268516 - RNA, 19 nt, Artificial Sequence
  Description of Artificial Sequence: Synthetic oligonucleotide
  Sense strand starting at position 3140 of SEQ ID NO: 1241385
gugaucgugaccuagucau

SEQ ID NO: 1268517 - RNA, 19 nt, Artificial Sequence
  Description of Artificial Sequence: Synthetic oligonucleotide
  Antisense strand to SEQ ID NO: 1268516
augacuaggucacgaucac

SEQ ID NO: 1268518 - RNA, 19 nt, Artificial Sequence
  Description of Artificial Sequence: Synthetic oligonucleotide
  Sense strand starting at position 3144 of SEQ ID NO: 1241385
ucgugaccuagucauguuu

SEQ ID NO: 1268519 - RNA, 19 nt, Artificial Sequence
  Description of Artificial Sequence: Synthetic oligonucleotide
  Antisense strand to SEQ ID NO: 1268518
aaacaugacuaggucacga

SEQ ID NO: 1268520 - RNA, 19 nt, Artificial Sequence
  Description of Artificial Sequence: Synthetic oligonucleotide
  Sense strand starting at position 3159 of SEQ ID NO: 1241385
guuucugacuccgcucaau

SEQ ID NO: 1268521 - RNA, 19 nt, Artificial Sequence
  Description of Artificial Sequence: Synthetic oligonucleotide
  Antisense strand to SEQ ID NO: 1268520
auugagcggagucagaaac

SEQ ID NO: 1268522 - RNA, 19 nt, Artificial Sequence
  Description of Artificial Sequence: Synthetic oligonucleotide
  Sense strand starting at position 3200 of SEQ ID NO: 1241385
cugugcugagguuaauauu

SEQ ID NO: 1268523 - RNA, 19 nt, Artificial Sequence
  Description of Artificial Sequence: Synthetic oligonucleotide
  Antisense strand to SEQ ID NO: 1268522
aauauuaaccucagcacag

SEQ ID NO: 1268524 - RNA, 19 nt, Artificial Sequence
  Description of Artificial Sequence: Synthetic oligonucleotide
  Sense strand starting at position 3203 of SEQ ID NO: 1241385
ugcugagguuaauauugga

SEQ ID NO: 1268525 - RNA, 19 nt, Artificial Sequence
  Description of Artificial Sequence: Synthetic oligonucleotide
  Antisense strand to SEQ ID NO: 1268524
uccaauauuaaccucagca

SEQ ID NO: 1268526 - RNA, 19 nt, Artificial Sequence
  Description of Artificial Sequence: Synthetic oligonucleotide
  Sense strand starting at position 3207 of SEQ ID NO: 1241385
gagguuaauauuggaggca

SEQ ID NO: 1268527 - RNA, 19 nt, Artificial Sequence
  Description of Artificial Sequence: Synthetic oligonucleotide
  Antisense strand to SEQ ID NO: 1268526
ugccuccaauauuaaccuc

SEQ ID NO: 1268528 - RNA, 19 nt, Artificial Sequence
  Description of Artificial Sequence: Synthetic oligonucleotide
  Sense strand starting at position 3208 of SEQ ID NO: 1241385
agguuaauauuggaggcau

SEQ ID NO: 1268529 - RNA, 19 nt, Artificial Sequence
  Description of Artificial Sequence: Synthetic oligonucleotide
  Antisense strand to SEQ ID NO: 1268528
augccuccaauauuaaccu

SEQ ID NO: 1268530 - RNA, 19 nt, Artificial Sequence
  Description of Artificial Sequence: Synthetic oligonucleotide
  Sense strand starting at position 3210 of SEQ ID NO: 1241385
guuaauauuggaggcauaa

SEQ ID NO: 1268531 - RNA, 19 nt, Artificial Sequence
  Description of Artificial Sequence: Synthetic oligonucleotide
  Antisense strand to SEQ ID NO: 1268530
uuaugccuccaauauuaac

SEQ ID NO: 1268532 - RNA, 19 nt, Artificial Sequence
  Description of Artificial Sequence: Synthetic oligonucleotide
  Sense strand starting at position 3223 of SEQ ID NO: 1241385
gcauaaacccuccgagaag

SEQ ID NO: 1268533 - RNA, 19 nt, Artificial Sequence
  Description of Artificial Sequence: Synthetic oligonucleotide
  Antisense strand to SEQ ID NO: 1268532
cuucucggaggguuuaugc

SEQ ID NO: 1268534 - RNA, 19 nt, Artificial Sequence
  Description of Artificial Sequence: Synthetic oligonucleotide
  Sense strand starting at position 3269 of SEQ ID NO: 1241385
ccuccuguuuaacaggaau

SEQ ID NO: 1268535 - RNA, 19 nt, Artificial Sequence
  Description of Artificial Sequence: Synthetic oligonucleotide
  Antisense strand to SEQ ID NO: 1268534
auuccuguuaaacaggagg

SEQ ID NO: 1268536 - RNA, 19 nt, Artificial Sequence
  Description of Artificial Sequence: Synthetic oligonucleotide
  Sense strand starting at position 3321 of SEQ ID NO: 1241385
gguaauaaucuuuagaagc

SEQ ID NO: 1268537 - RNA, 19 nt, Artificial Sequence
  Description of Artificial Sequence: Synthetic oligonucleotide
  Antisense strand to SEQ ID NO: 1268536
gcuucuaaagauuauuacc

SEQ ID NO: 1268538 - RNA, 19 nt, Artificial Sequence
  Description of Artificial Sequence: Synthetic oligonucleotide
  Sense strand starting at position 3420 of SEQ ID NO: 1241385
uggaucacuugcugucaga

SEQ ID NO: 1268539 - RNA, 19 nt, Artificial Sequence
  Description of Artificial Sequence: Synthetic oligonucleotide
  Antisense strand to SEQ ID NO: 1268538
ucugacagcaagugaucca

SEQ ID NO: 1268540 - RNA, 19 nt, Artificial Sequence
  Description of Artificial Sequence: Synthetic oligonucleotide
  Sense strand starting at position 3423 of SEQ ID NO: 1241385
aucacuugcugucagaagu

SEQ ID NO: 1268541 - RNA, 19 nt, Artificial Sequence
  Description of Artificial Sequence: Synthetic oligonucleotide
  Antisense strand to SEQ ID NO: 1268540
acuucugacagcaagugau

SEQ ID NO: 1268542 - RNA, 19 nt, Artificial Sequence
  Description of Artificial Sequence: Synthetic oligonucleotide
  Sense strand starting at position 3655 of SEQ ID NO: 1241385
gcgaucacuuuacauaaua

SEQ ID NO: 1268543 - RNA, 19 nt, Artificial Sequence
  Description of Artificial Sequence: Synthetic oligonucleotide
  Antisense strand to SEQ ID NO: 1268542
uauuauguaaagugaucgc

SEQ ID NO: 1268544 - RNA, 19 nt, Artificial Sequence
  Description of Artificial Sequence: Synthetic oligonucleotide
  Sense strand starting at position 3745 of SEQ ID NO: 1241385
aaugaaauggccuggucuu

SEQ ID NO: 1268545 - RNA, 19 nt, Artificial Sequence
  Description of Artificial Sequence: Synthetic oligonucleotide
  Antisense strand to SEQ ID NO: 1268544
aagaccaggccauuucauu

SEQ ID NO: 1268546 - RNA, 19 nt, Artificial Sequence
  Description of Artificial Sequence: Synthetic oligonucleotide
  Sense strand starting at position 3770 of SEQ ID NO: 1241385
uggagagucuaauaaacag

SEQ ID NO: 1268547 - RNA, 19 nt, Artificial Sequence
  Description of Artificial Sequence: Synthetic oligonucleotide
  Antisense strand to SEQ ID NO: 1268546
cuguuuauuagacucucca

SEQ ID NO: 1268548 - RNA, 19 nt, Artificial Sequence
  Description of Artificial Sequence: Synthetic oligonucleotide
  Sense strand starting at position 3874 of SEQ ID NO: 1241385
cugagagcuaccuggaaga

SEQ ID NO: 1268549 - RNA, 19 nt, Artificial Sequence
  Description of Artificial Sequence: Synthetic oligonucleotide
  Antisense strand to SEQ ID NO: 1268548
ucuuccagguagcucucag

SEQ ID NO: 1268550 - RNA, 19 nt, Artificial Sequence
  Description of Artificial Sequence: Synthetic oligonucleotide
  Sense strand starting at position 3900 of SEQ ID NO: 1241385
ugccuaauccgggagcuga

SEQ ID NO: 1268551 - RNA, 19 nt, Artificial Sequence
  Description of Artificial Sequence: Synthetic oligonucleotide
  Antisense strand to SEQ ID NO: 1268550
ucagcucccggauuaggca

SEQ ID NO: 1268552 - RNA, 19 nt, Artificial Sequence
  Description of Artificial Sequence: Synthetic oligonucleotide
  Sense strand starting at position 3913 of SEQ ID NO: 1241385
agcugaaguucgccagcaa

SEQ ID NO: 1268553 - RNA, 19 nt, Artificial Sequence
  Description of Artificial Sequence: Synthetic oligonucleotide
  Antisense strand to SEQ ID NO: 1268552
uugcuggcgaacuucagcu

SEQ ID NO: 1268554 - RNA, 19 nt, Artificial Sequence
  Description of Artificial Sequence: Synthetic oligonucleotide
  Sense strand starting at position 3914 of SEQ ID NO: 1241385
gcugaaguucgccagcaaa

SEQ ID NO: 1268555 - RNA, 19 nt, Artificial Sequence
  Description of Artificial Sequence: Synthetic oligonucleotide
  Antisense strand to SEQ ID NO: 1268554
uuugcuggcgaacuucagc

SEQ ID NO: 1268556 - RNA, 19 nt, Artificial Sequence
  Description of Artificial Sequence: Synthetic oligonucleotide
  Sense strand starting at position 3958 of SEQ ID NO: 1241385
gguuguguaugggcgaaga

SEQ ID NO: 1268557 - RNA, 19 nt, Artificial Sequence
  Description of Artificial Sequence: Synthetic oligonucleotide
  Antisense strand to SEQ ID NO: 1268556
ucuucgcccauacacaacc

SEQ ID NO: 1268558 - RNA, 19 nt, Artificial Sequence
  Description of Artificial Sequence: Synthetic oligonucleotide
  Sense strand starting at position 3959 of SEQ ID NO: 1241385
guuguguaugggcgaagau

SEQ ID NO: 1268559 - RNA, 19 nt, Artificial Sequence
  Description of Artificial Sequence: Synthetic oligonucleotide
  Antisense strand to SEQ ID NO: 1268558
aucuucgcccauacacaac

SEQ ID NO: 1268560 - RNA, 19 nt, Artificial Sequence
  Description of Artificial Sequence: Synthetic oligonucleotide
  Sense strand starting at position 3971 of SEQ ID NO: 1241385
cgaagaugagagcaauguu

SEQ ID NO: 1268561 - RNA, 19 nt, Artificial Sequence
  Description of Artificial Sequence: Synthetic oligonucleotide
  Antisense strand to SEQ ID NO: 1268560
aacauugcucucaucuucg

SEQ ID NO: 1268562 - RNA, 19 nt, Artificial Sequence
  Description of Artificial Sequence: Synthetic oligonucleotide
  Sense strand starting at position 3978 of SEQ ID NO: 1241385
gagagcaauguuugcugga

SEQ ID NO: 1268563 - RNA, 19 nt, Artificial Sequence
  Description of Artificial Sequence: Synthetic oligonucleotide
  Antisense strand to SEQ ID NO: 1268562
uccagcaaacauugcucuc

SEQ ID NO: 1268564 - RNA, 19 nt, Artificial Sequence
  Description of Artificial Sequence: Synthetic oligonucleotide
  Sense strand starting at position 3980 of SEQ ID NO: 1241385
gagcaauguuugcuggacu

SEQ ID NO: 1268565 - RNA, 19 nt, Artificial Sequence
  Description of Artificial Sequence: Synthetic oligonucleotide
  Antisense strand to SEQ ID NO: 1268564
aguccagcaaacauugcuc

SEQ ID NO: 1268566 - RNA, 19 nt, Artificial Sequence
  Description of Artificial Sequence: Synthetic oligonucleotide
  Sense strand starting at position 63 of SEQ ID NO: 1241386
ggcucaaacagagguuaga

SEQ ID NO: 1268567 - RNA, 19 nt, Artificial Sequence
  Description of Artificial Sequence: Synthetic oligonucleotide
  Antisense strand to SEQ ID NO: 1268566
ucuaaccucuguuugagcc

SEQ ID NO: 1268568 - RNA, 19 nt, Artificial Sequence
  Description of Artificial Sequence: Synthetic oligonucleotide
  Sense strand starting at position 231 of SEQ ID NO: 1241386
gagcacuugucagcaggua

SEQ ID NO: 1268569 - RNA, 19 nt, Artificial Sequence
  Description of Artificial Sequence: Synthetic oligonucleotide
  Antisense strand to SEQ ID NO: 1268568
uaccugcugacaagugcuc

SEQ ID NO: 1268570 - RNA, 19 nt, Artificial Sequence
  Description of Artificial Sequence: Synthetic oligonucleotide
  Sense strand starting at position 256 of SEQ ID NO: 1241386
aggauuagaugcucaucga

SEQ ID NO: 1268571 - RNA, 19 nt, Artificial Sequence
  Description of Artificial Sequence: Synthetic oligonucleotide
  Antisense strand to SEQ ID NO: 1268570
ucgaugagcaucuaauccu

SEQ ID NO: 1268572 - RNA, 19 nt, Artificial Sequence
  Description of Artificial Sequence: Synthetic oligonucleotide
  Sense strand starting at position 257 of SEQ ID NO: 1241386
ggauuagaugcucaucgaa

SEQ ID NO: 1268573 - RNA, 19 nt, Artificial Sequence
  Description of Artificial Sequence: Synthetic oligonucleotide
  Antisense strand to SEQ ID NO: 1268572
uucgaugagcaucuaaucc

SEQ ID NO: 1268574 - RNA, 19 nt, Artificial Sequence
  Description of Artificial Sequence: Synthetic oligonucleotide
  Sense strand starting at position 259 of SEQ ID NO: 1241386
auuagaugcucaucgaaug

SEQ ID NO: 1268575 - RNA, 19 nt, Artificial Sequence
  Description of Artificial Sequence: Synthetic oligonucleotide
  Antisense strand to SEQ ID NO: 1268574
cauucgaugagcaucuaau

SEQ ID NO: 1268576 - RNA, 19 nt, Artificial Sequence
  Description of Artificial Sequence: Synthetic oligonucleotide
  Sense strand starting at position 260 of SEQ ID NO: 1241386
uuagaugcucaucgaauga

SEQ ID NO: 1268577 - RNA, 19 nt, Artificial Sequence
  Description of Artificial Sequence: Synthetic oligonucleotide
  Antisense strand to SEQ ID NO: 1268576
ucauucgaugagcaucuaa

SEQ ID NO: 1268578 - RNA, 19 nt, Artificial Sequence
  Description of Artificial Sequence: Synthetic oligonucleotide
  Sense strand starting at position 280 of SEQ ID NO: 1241386
acugauggaucucaagaau

SEQ ID NO: 1268579 - RNA, 19 nt, Artificial Sequence
  Description of Artificial Sequence: Synthetic oligonucleotide
  Antisense strand to SEQ ID NO: 1268578
auucuugagauccaucagu

SEQ ID NO: 1268580 - RNA, 19 nt, Artificial Sequence
  Description of Artificial Sequence: Synthetic oligonucleotide
  Sense strand starting at position 294 of SEQ ID NO: 1241386
agaauaugguucucagugu

SEQ ID NO: 1268581 - RNA, 19 nt, Artificial Sequence
  Description of Artificial Sequence: Synthetic oligonucleotide
  Antisense strand to SEQ ID NO: 1268580
acacugagaaccauauucu

SEQ ID NO: 1268582 - RNA, 19 nt, Artificial Sequence
  Description of Artificial Sequence: Synthetic oligonucleotide
  Sense strand starting at position 298 of SEQ ID NO: 1241386
uaugguucucaguguggaa

SEQ ID NO: 1268583 - RNA, 19 nt, Artificial Sequence
  Description of Artificial Sequence: Synthetic oligonucleotide
  Antisense strand to SEQ ID NO: 1268582
uuccacacugagaaccaua

SEQ ID NO: 1268584 - RNA, 19 nt, Artificial Sequence
  Description of Artificial Sequence: Synthetic oligonucleotide
  Sense strand starting at position 560 of SEQ ID NO: 1241386
aucgauacucuggauguga

SEQ ID NO: 1268585 - RNA, 19 nt, Artificial Sequence
  Description of Artificial Sequence: Synthetic oligonucleotide
  Antisense strand to SEQ ID NO: 1268584
ucacauccagaguaucgau

SEQ ID NO: 1268586 - RNA, 19 nt, Artificial Sequence
  Description of Artificial Sequence: Synthetic oligonucleotide
  Sense strand starting at position 562 of SEQ ID NO: 1241386
cgauacucuggaugugaga

SEQ ID NO: 1268587 - RNA, 19 nt, Artificial Sequence
  Description of Artificial Sequence: Synthetic oligonucleotide
  Antisense strand to SEQ ID NO: 1268586
ucucacauccagaguaucg

SEQ ID NO: 1268588 - RNA, 19 nt, Artificial Sequence
  Description of Artificial Sequence: Synthetic oligonucleotide
  Sense strand starting at position 628 of SEQ ID NO: 1241386
augaauucugauggugaau

SEQ ID NO: 1268589 - RNA, 19 nt, Artificial Sequence
  Description of Artificial Sequence: Synthetic oligonucleotide
  Antisense strand to SEQ ID NO: 1268588
auucaccaucagaauucau

SEQ ID NO: 1268590 - RNA, 19 nt, Artificial Sequence
  Description of Artificial Sequence: Synthetic oligonucleotide
  Sense strand starting at position 672 of SEQ ID NO: 1241386
gugggacucagugguagau

SEQ ID NO: 1268591 - RNA, 19 nt, Artificial Sequence
  Description of Artificial Sequence: Synthetic oligonucleotide
  Antisense strand to SEQ ID NO: 1268590
aucuaccacugagucccac

SEQ ID NO: 1268592 - RNA, 19 nt, Artificial Sequence
  Description of Artificial Sequence: Synthetic oligonucleotide
  Sense strand starting at position 1400 of SEQ ID NO: 1241386
uuaucucuccacggagcaa

SEQ ID NO: 1268593 - RNA, 19 nt, Artificial Sequence
  Description of Artificial Sequence: Synthetic oligonucleotide
  Antisense strand to SEQ ID NO: 1268592
uugcuccguggagagauaa

SEQ ID NO: 1268594 - RNA, 19 nt, Artificial Sequence
  Description of Artificial Sequence: Synthetic oligonucleotide
  Sense strand starting at position 1499 of SEQ ID NO: 1241386
guaaucuccucacuaacgu

SEQ ID NO: 1268595 - RNA, 19 nt, Artificial Sequence
  Description of Artificial Sequence: Synthetic oligonucleotide
  Antisense strand to SEQ ID NO: 1268594
acguuagugaggagauuac

SEQ ID NO: 1268596 - RNA, 19 nt, Artificial Sequence
  Description of Artificial Sequence: Synthetic oligonucleotide
  Sense strand starting at position 1562 of SEQ ID NO: 1241386
gcgcgaucuggcucaguga

SEQ ID NO: 1268597 - RNA, 19 nt, Artificial Sequence
  Description of Artificial Sequence: Synthetic oligonucleotide
  Antisense strand to SEQ ID NO: 1268596
ucacugagccagaucgcgc

SEQ ID NO: 1268598 - RNA, 19 nt, Artificial Sequence
  Description of Artificial Sequence: Synthetic oligonucleotide
  Sense strand starting at position 1565 of SEQ ID NO: 1241386
cgaucuggcucagugauuu

SEQ ID NO: 1268599 - RNA, 19 nt, Artificial Sequence
  Description of Artificial Sequence: Synthetic oligonucleotide
  Antisense strand to SEQ ID NO: 1268598
aaaucacugagccagaucg

SEQ ID NO: 1268600 - RNA, 19 nt, Artificial Sequence
  Description of Artificial Sequence: Synthetic oligonucleotide
  Sense strand starting at position 1571 of SEQ ID NO: 1241386
ggcucagugauuugcucca

SEQ ID NO: 1268601 - RNA, 19 nt, Artificial Sequence
  Description of Artificial Sequence: Synthetic oligonucleotide
  Antisense strand to SEQ ID NO: 1268600
uggagcaaaucacugagcc

SEQ ID NO: 1268602 - RNA, 19 nt, Artificial Sequence
  Description of Artificial Sequence: Synthetic oligonucleotide
  Sense strand starting at position 1648 of SEQ ID NO: 1241386
ucgacuugguuccuccuaa

SEQ ID NO: 1268603 - RNA, 19 nt, Artificial Sequence
  Description of Artificial Sequence: Synthetic oligonucleotide
  Antisense strand to SEQ ID NO: 1268602
uuaggaggaaccaagucga

SEQ ID NO: 1268604 - RNA, 19 nt, Artificial Sequence
  Description of Artificial Sequence: Synthetic oligonucleotide
  Sense strand starting at position 2129 of SEQ ID NO: 1241386
augcgcaguccagaagaaa

SEQ ID NO: 1268605 - RNA, 19 nt, Artificial Sequence
  Description of Artificial Sequence: Synthetic oligonucleotide
  Antisense strand to SEQ ID NO: 1268604
uuucuucuggacugcgcau

SEQ ID NO: 1268606 - RNA, 19 nt, Artificial Sequence
  Description of Artificial Sequence: Synthetic oligonucleotide
  Sense strand starting at position 2181 of SEQ ID NO: 1241386
ggcaucagucauugucagu

SEQ ID NO: 1268607 - RNA, 19 nt, Artificial Sequence
  Description of Artificial Sequence: Synthetic oligonucleotide
  Antisense strand to SEQ ID NO: 1268606
acugacaaugacugaugcc

SEQ ID NO: 1268608 - RNA, 19 nt, Artificial Sequence
  Description of Artificial Sequence: Synthetic oligonucleotide
  Sense strand starting at position 2238 of SEQ ID NO: 1241386
gugugcucuacgcagaaug

SEQ ID NO: 1268609 - RNA, 19 nt, Artificial Sequence
  Description of Artificial Sequence: Synthetic oligonucleotide
  Antisense strand to SEQ ID NO: 1268608
cauucugcguagagcacac

SEQ ID NO: 1268610 - RNA, 19 nt, Artificial Sequence
  Description of Artificial Sequence: Synthetic oligonucleotide
  Sense strand starting at position 2240 of SEQ ID NO: 1241386
gugcucuacgcagaaugaa

SEQ ID NO: 1268611 - RNA, 19 nt, Artificial Sequence
  Description of Artificial Sequence: Synthetic oligonucleotide
  Antisense strand to SEQ ID NO: 1268610
uucauucugcguagagcac

SEQ ID NO: 1268612 - RNA, 19 nt, Artificial Sequence
  Description of Artificial Sequence: Synthetic oligonucleotide
  Sense strand starting at position 2336 of SEQ ID NO: 1241386
aauaguaguccuugcgaua

SEQ ID NO: 1268613 - RNA, 19 nt, Artificial Sequence
  Description of Artificial Sequence: Synthetic oligonucleotide
  Antisense strand to SEQ ID NO: 1268612
uaucgcaaggacuacuauu

SEQ ID NO: 1268614 - RNA, 19 nt, Artificial Sequence
  Description of Artificial Sequence: Synthetic oligonucleotide
  Sense strand starting at position 2403 of SEQ ID NO: 1241386
gcuagauacugacuaggca

SEQ ID NO: 1268615 - RNA, 19 nt, Artificial Sequence
  Description of Artificial Sequence: Synthetic oligonucleotide
  Antisense strand to SEQ ID NO: 1268614
ugccuagucaguaucuagc

SEQ ID NO: 1268616 - RNA, 19 nt, Artificial Sequence
  Description of Artificial Sequence: Synthetic oligonucleotide
  Sense strand starting at position 2564 of SEQ ID NO: 1241386
gugaccuaggcagaauuau

SEQ ID NO: 1268617 - RNA, 19 nt, Artificial Sequence
  Description of Artificial Sequence: Synthetic oligonucleotide
  Antisense strand to SEQ ID NO: 1268616
auaauucugccuaggucac

SEQ ID NO: 1268618 - RNA, 19 nt, Artificial Sequence
  Description of Artificial Sequence: Synthetic oligonucleotide
  Sense strand starting at position 2699 of SEQ ID NO: 1241386
cucagaguuuaacagggau

SEQ ID NO: 1268619 - RNA, 19 nt, Artificial Sequence
  Description of Artificial Sequence: Synthetic oligonucleotide
  Antisense strand to SEQ ID NO: 1268618
aucccuguuaaacucugag

SEQ ID NO: 1268620 - RNA, 19 nt, Artificial Sequence
  Description of Artificial Sequence: Synthetic oligonucleotide
  Sense strand starting at position 2752 of SEQ ID NO: 1241386
acuugaucuuguguccuga

SEQ ID NO: 1268621 - RNA, 19 nt, Artificial Sequence
  Description of Artificial Sequence: Synthetic oligonucleotide
  Antisense strand to SEQ ID NO: 1268620
ucaggacacaagaucaagu

SEQ ID NO: 1268622 - RNA, 19 nt, Artificial Sequence
  Description of Artificial Sequence: Synthetic oligonucleotide
  Sense strand starting at position 2815 of SEQ ID NO: 1241386
agaugaagcugagaaauga

SEQ ID NO: 1268623 - RNA, 19 nt, Artificial Sequence
  Description of Artificial Sequence: Synthetic oligonucleotide
  Antisense strand to SEQ ID NO: 1268622
ucauuucucagcuucaucu

SEQ ID NO: 1268624 - RNA, 19 nt, Artificial Sequence
  Description of Artificial Sequence: Synthetic oligonucleotide
  Sense strand starting at position 2922 of SEQ ID NO: 1241386
aguagugugcgaguuguaa

SEQ ID NO: 1268625 - RNA, 19 nt, Artificial Sequence
  Description of Artificial Sequence: Synthetic oligonucleotide
  Antisense strand to SEQ ID NO: 1268624
uuacaacucgcacacuacu

SEQ ID NO: 1268626 - RNA, 19 nt, Artificial Sequence
  Description of Artificial Sequence: Synthetic oligonucleotide
  Sense strand starting at position 2923 of SEQ ID NO: 1241386
guagugugcgaguuguaag

SEQ ID NO: 1268627 - RNA, 19 nt, Artificial Sequence
  Description of Artificial Sequence: Synthetic oligonucleotide
  Antisense strand to SEQ ID NO: 1268626
cuuacaacucgcacacuac

SEQ ID NO: 1268628 - RNA, 19 nt, Artificial Sequence
  Description of Artificial Sequence: Synthetic oligonucleotide
  Sense strand starting at position 3028 of SEQ ID NO: 1241386
ucccguuugccugcuaaca

SEQ ID NO: 1268629 - RNA, 19 nt, Artificial Sequence
  Description of Artificial Sequence: Synthetic oligonucleotide
  Antisense strand to SEQ ID NO: 1268628
uguuagcaggcaaacggga

SEQ ID NO: 1268630 - RNA, 19 nt, Artificial Sequence
  Description of Artificial Sequence: Synthetic oligonucleotide
  Sense strand starting at position 3118 of SEQ ID NO: 1241386
gggagagcgagccaguuau

SEQ ID NO: 1268631 - RNA, 19 nt, Artificial Sequence
  Description of Artificial Sequence: Synthetic oligonucleotide
  Antisense strand to SEQ ID NO: 1268630
auaacuggcucgcucuccc

SEQ ID NO: 1268632 - RNA, 19 nt, Artificial Sequence
  Description of Artificial Sequence: Synthetic oligonucleotide
  Sense strand starting at position 3122 of SEQ ID NO: 1241386
gagcgagccaguuaugcaa

SEQ ID NO: 1268633 - RNA, 19 nt, Artificial Sequence
  Description of Artificial Sequence: Synthetic oligonucleotide
  Antisense strand to SEQ ID NO: 1268632
uugcauaacuggcucgcuc

SEQ ID NO: 1268634 - RNA, 19 nt, Artificial Sequence
  Description of Artificial Sequence: Synthetic oligonucleotide
  Sense strand starting at position 3247 of SEQ ID NO: 1241386
gucagaacucgccaggucu

SEQ ID NO: 1268635 - RNA, 19 nt, Artificial Sequence
  Description of Artificial Sequence: Synthetic oligonucleotide
  Antisense strand to SEQ ID NO: 1268634
agaccuggcgaguucugac

SEQ ID NO: 1268636 - RNA, 19 nt, Artificial Sequence
  Description of Artificial Sequence: Synthetic oligonucleotide
  Sense strand starting at position 3508 of SEQ ID NO: 1241386
gguggagugauucaaguga

SEQ ID NO: 1268637 - RNA, 19 nt, Artificial Sequence
  Description of Artificial Sequence: Synthetic oligonucleotide
  Antisense strand to SEQ ID NO: 1268636
ucacuugaaucacuccacc

SEQ ID NO: 1268638 - RNA, 19 nt, Artificial Sequence
  Description of Artificial Sequence: Synthetic oligonucleotide
  Sense strand starting at position 3878 of SEQ ID NO: 1241386
ccauauuuauguuguggga

SEQ ID NO: 1268639 - RNA, 19 nt, Artificial Sequence
  Description of Artificial Sequence: Synthetic oligonucleotide
  Antisense strand to SEQ ID NO: 1268638
ucccacaacauaaauaugg

SEQ ID NO: 1268640 - RNA, 19 nt, Artificial Sequence
  Description of Artificial Sequence: Synthetic oligonucleotide
  Sense strand starting at position 3880 of SEQ ID NO: 1241386
auauuuauguugugggauu

SEQ ID NO: 1268641 - RNA, 19 nt, Artificial Sequence
  Description of Artificial Sequence: Synthetic oligonucleotide
  Antisense strand to SEQ ID NO: 1268640
aaucccacaacauaaauau

SEQ ID NO: 1268642 - RNA, 19 nt, Artificial Sequence
  Description of Artificial Sequence: Synthetic oligonucleotide
  Sense strand starting at position 3913 of SEQ ID NO: 1241386
uuuguauuauucccaagua

SEQ ID NO: 1268643 - RNA, 19 nt, Artificial Sequence
  Description of Artificial Sequence: Synthetic oligonucleotide
  Antisense strand to SEQ ID NO: 1268642
uacuugggaauaauacaaa

SEQ ID NO: 1268644 - RNA, 19 nt, Artificial Sequence
  Description of Artificial Sequence: Synthetic oligonucleotide
  Sense strand starting at position 3983 of SEQ ID NO: 1241386
uguugacacaagugugaca

SEQ ID NO: 1268645 - RNA, 19 nt, Artificial Sequence
  Description of Artificial Sequence: Synthetic oligonucleotide
  Antisense strand to SEQ ID NO: 1268644
ugucacacuugugucaaca

SEQ ID NO: 1268646 - RNA, 19 nt, Artificial Sequence
  Description of Artificial Sequence: Synthetic oligonucleotide
  Sense strand starting at position 145 of SEQ ID NO: 1241387
ggcucaaacagagguuaga

SEQ ID NO: 1268647 - RNA, 19 nt, Artificial Sequence
  Description of Artificial Sequence: Synthetic oligonucleotide
  Antisense strand to SEQ ID NO: 1268646
ucuaaccucuguuugagcc

SEQ ID NO: 1268648 - RNA, 19 nt, Artificial Sequence
  Description of Artificial Sequence: Synthetic oligonucleotide
  Sense strand starting at position 313 of SEQ ID NO: 1241387
gagcacuugucagcaggua

SEQ ID NO: 1268649 - RNA, 19 nt, Artificial Sequence
  Description of Artificial Sequence: Synthetic oligonucleotide
  Antisense strand to SEQ ID NO: 1268648
uaccugcugacaagugcuc

SEQ ID NO: 1268650 - RNA, 19 nt, Artificial Sequence
  Description of Artificial Sequence: Synthetic oligonucleotide
  Sense strand starting at position 338 of SEQ ID NO: 1241387
aggauuagaugcucaucga

SEQ ID NO: 1268651 - RNA, 19 nt, Artificial Sequence
  Description of Artificial Sequence: Synthetic oligonucleotide
  Antisense strand to SEQ ID NO: 1268650
ucgaugagcaucuaauccu

SEQ ID NO: 1268652 - RNA, 19 nt, Artificial Sequence
  Description of Artificial Sequence: Synthetic oligonucleotide
  Sense strand starting at position 339 of SEQ ID NO: 1241387
ggauuagaugcucaucgaa

SEQ ID NO: 1268653 - RNA, 19 nt, Artificial Sequence
  Description of Artificial Sequence: Synthetic oligonucleotide
  Antisense strand to SEQ ID NO: 1268652
uucgaugagcaucuaaucc

SEQ ID NO: 1268654 - RNA, 19 nt, Artificial Sequence
  Description of Artificial Sequence: Synthetic oligonucleotide
  Sense strand starting at position 341 of SEQ ID NO: 1241387
auuagaugcucaucgaaug

SEQ ID NO: 1268655 - RNA, 19 nt, Artificial Sequence
  Description of Artificial Sequence: Synthetic oligonucleotide
  Antisense strand to SEQ ID NO: 1268654
cauucgaugagcaucuaau

SEQ ID NO: 1268656 - RNA, 19 nt, Artificial Sequence
  Description of Artificial Sequence: Synthetic oligonucleotide
  Sense strand starting at position 342 of SEQ ID NO: 1241387
uuagaugcucaucgaauga

SEQ ID NO: 1268657 - RNA, 19 nt, Artificial Sequence
  Description of Artificial Sequence: Synthetic oligonucleotide
  Antisense strand to SEQ ID NO: 1268656
ucauucgaugagcaucuaa

SEQ ID NO: 1268658 - RNA, 19 nt, Artificial Sequence
  Description of Artificial Sequence: Synthetic oligonucleotide
  Sense strand starting at position 362 of SEQ ID NO: 1241387
acugauggaucucaagaau

SEQ ID NO: 1268659 - RNA, 19 nt, Artificial Sequence
  Description of Artificial Sequence: Synthetic oligonucleotide
  Antisense strand to SEQ ID NO: 1268658
auucuugagauccaucagu

SEQ ID NO: 1268660 - RNA, 19 nt, Artificial Sequence
  Description of Artificial Sequence: Synthetic oligonucleotide
  Sense strand starting at position 376 of SEQ ID NO: 1241387
agaauaugguucucagugu

SEQ ID NO: 1268661 - RNA, 19 nt, Artificial Sequence
  Description of Artificial Sequence: Synthetic oligonucleotide
  Antisense strand to SEQ ID NO: 1268660
acacugagaaccauauucu

SEQ ID NO: 1268662 - RNA, 19 nt, Artificial Sequence
  Description of Artificial Sequence: Synthetic oligonucleotide
  Sense strand starting at position 380 of SEQ ID NO: 1241387
uaugguucucaguguggaa

SEQ ID NO: 1268663 - RNA, 19 nt, Artificial Sequence
  Description of Artificial Sequence: Synthetic oligonucleotide
  Antisense strand to SEQ ID NO: 1268662
uuccacacugagaaccaua

SEQ ID NO: 1268664 - RNA, 19 nt, Artificial Sequence
  Description of Artificial Sequence: Synthetic oligonucleotide
  Sense strand starting at position 642 of SEQ ID NO: 1241387
aucgauacucuggauguga

SEQ ID NO: 1268665 - RNA, 19 nt, Artificial Sequence
  Description of Artificial Sequence: Synthetic oligonucleotide
  Antisense strand to SEQ ID NO: 1268664
ucacauccagaguaucgau

SEQ ID NO: 1268666 - RNA, 19 nt, Artificial Sequence
  Description of Artificial Sequence: Synthetic oligonucleotide
  Sense strand starting at position 644 of SEQ ID NO: 1241387
cgauacucuggaugugaga

SEQ ID NO: 1268667 - RNA, 19 nt, Artificial Sequence
  Description of Artificial Sequence: Synthetic oligonucleotide
  Antisense strand to SEQ ID NO: 1268666
ucucacauccagaguaucg

SEQ ID NO: 1268668 - RNA, 19 nt, Artificial Sequence
  Description of Artificial Sequence: Synthetic oligonucleotide
  Sense strand starting at position 710 of SEQ ID NO: 1241387
augaauucugauggugaau

SEQ ID NO: 1268669 - RNA, 19 nt, Artificial Sequence
  Description of Artificial Sequence: Synthetic oligonucleotide
  Antisense strand to SEQ ID NO: 1268668
auucaccaucagaauucau

SEQ ID NO: 1268670 - RNA, 19 nt, Artificial Sequence
  Description of Artificial Sequence: Synthetic oligonucleotide
  Sense strand starting at position 754 of SEQ ID NO: 1241387
gugggacucagugguagau

SEQ ID NO: 1268671 - RNA, 19 nt, Artificial Sequence
  Description of Artificial Sequence: Synthetic oligonucleotide
  Antisense strand to SEQ ID NO: 1268670
aucuaccacugagucccac

SEQ ID NO: 1268672 - RNA, 19 nt, Artificial Sequence
  Description of Artificial Sequence: Synthetic oligonucleotide
  Sense strand starting at position 1482 of SEQ ID NO: 1241387
uuaucucuccacggagcaa

SEQ ID NO: 1268673 - RNA, 19 nt, Artificial Sequence
  Description of Artificial Sequence: Synthetic oligonucleotide
  Antisense strand to SEQ ID NO: 1268672
uugcuccguggagagauaa

SEQ ID NO: 1268674 - RNA, 19 nt, Artificial Sequence
  Description of Artificial Sequence: Synthetic oligonucleotide
  Sense strand starting at position 1581 of SEQ ID NO: 1241387
guaaucuccucacuaacgu

SEQ ID NO: 1268675 - RNA, 19 nt, Artificial Sequence
  Description of Artificial Sequence: Synthetic oligonucleotide
  Antisense strand to SEQ ID NO: 1268674
acguuagugaggagauuac

SEQ ID NO: 1268676 - RNA, 19 nt, Artificial Sequence
  Description of Artificial Sequence: Synthetic oligonucleotide
  Sense strand starting at position 1644 of SEQ ID NO: 1241387
gcgcgaucuggcucaguga

SEQ ID NO: 1268677 - RNA, 19 nt, Artificial Sequence
  Description of Artificial Sequence: Synthetic oligonucleotide
  Antisense strand to SEQ ID NO: 1268676
ucacugagccagaucgcgc

SEQ ID NO: 1268678 - RNA, 19 nt, Artificial Sequence
  Description of Artificial Sequence: Synthetic oligonucleotide
  Sense strand starting at position 1645 of SEQ ID NO: 1241387
cgcgaucuggcucagugau

SEQ ID NO: 1268679 - RNA, 19 nt, Artificial Sequence
  Description of Artificial Sequence: Synthetic oligonucleotide
  Antisense strand to SEQ ID NO: 1268678
aucacugagccagaucgcg

SEQ ID NO: 1268680 - RNA, 19 nt, Artificial Sequence
  Description of Artificial Sequence: Synthetic oligonucleotide
  Sense strand starting at position 1647 of SEQ ID NO: 1241387
cgaucuggcucagugauuu

SEQ ID NO: 1268681 - RNA, 19 nt, Artificial Sequence
  Description of Artificial Sequence: Synthetic oligonucleotide
  Antisense strand to SEQ ID NO: 1268680
aaaucacugagccagaucg

SEQ ID NO: 1268682 - RNA, 19 nt, Artificial Sequence
  Description of Artificial Sequence: Synthetic oligonucleotide
  Sense strand starting at position 1653 of SEQ ID NO: 1241387
ggcucagugauuugcucca

SEQ ID NO: 1268683 - RNA, 19 nt, Artificial Sequence
  Description of Artificial Sequence: Synthetic oligonucleotide
  Antisense strand to SEQ ID NO: 1268682
uggagcaaaucacugagcc

SEQ ID NO: 1268684 - RNA, 19 nt, Artificial Sequence
  Description of Artificial Sequence: Synthetic oligonucleotide
  Sense strand starting at position 1730 of SEQ ID NO: 1241387
ucgacuugguuccuccuaa

SEQ ID NO: 1268685 - RNA, 19 nt, Artificial Sequence
  Description of Artificial Sequence: Synthetic oligonucleotide
  Antisense strand to SEQ ID NO: 1268684
uuaggaggaaccaagucga

SEQ ID NO: 1268686 - RNA, 19 nt, Artificial Sequence
  Description of Artificial Sequence: Synthetic oligonucleotide
  Sense strand starting at position 2211 of SEQ ID NO: 1241387
augcgcaguccagaagaaa

SEQ ID NO: 1268687 - RNA, 19 nt, Artificial Sequence
  Description of Artificial Sequence: Synthetic oligonucleotide
  Antisense strand to SEQ ID NO: 1268686
uuucuucuggacugcgcau

SEQ ID NO: 1268688 - RNA, 19 nt, Artificial Sequence
  Description of Artificial Sequence: Synthetic oligonucleotide
  Sense strand starting at position 2263 of SEQ ID NO: 1241387
ggcaucagucauugucagu

SEQ ID NO: 1268689 - RNA, 19 nt, Artificial Sequence
  Description of Artificial Sequence: Synthetic oligonucleotide
  Antisense strand to SEQ ID NO: 1268688
acugacaaugacugaugcc

SEQ ID NO: 1268690 - RNA, 19 nt, Artificial Sequence
  Description of Artificial Sequence: Synthetic oligonucleotide
  Sense strand starting at position 2320 of SEQ ID NO: 1241387
gugugcucuacgcagaaug

SEQ ID NO: 1268691 - RNA, 19 nt, Artificial Sequence
  Description of Artificial Sequence: Synthetic oligonucleotide
  Antisense strand to SEQ ID NO: 1268690
cauucugcguagagcacac

SEQ ID NO: 1268692 - RNA, 19 nt, Artificial Sequence
  Description of Artificial Sequence: Synthetic oligonucleotide
  Sense strand starting at position 2322 of SEQ ID NO: 1241387
gugcucuacgcagaaugaa

SEQ ID NO: 1268693 - RNA, 19 nt, Artificial Sequence
  Description of Artificial Sequence: Synthetic oligonucleotide
  Antisense strand to SEQ ID NO: 1268692
uucauucugcguagagcac

SEQ ID NO: 1268694 - RNA, 19 nt, Artificial Sequence
  Description of Artificial Sequence: Synthetic oligonucleotide
  Sense strand starting at position 2418 of SEQ ID NO: 1241387
aauaguaguccuugcgaua

SEQ ID NO: 1268695 - RNA, 19 nt, Artificial Sequence
  Description of Artificial Sequence: Synthetic oligonucleotide
  Antisense strand to SEQ ID NO: 1268694
uaucgcaaggacuacuauu

SEQ ID NO: 1268696 - RNA, 19 nt, Artificial Sequence
  Description of Artificial Sequence: Synthetic oligonucleotide
  Sense strand starting at position 2485 of SEQ ID NO: 1241387
gcuagauacugacuaggca

SEQ ID NO: 1268697 - RNA, 19 nt, Artificial Sequence
  Description of Artificial Sequence: Synthetic oligonucleotide
  Antisense strand to SEQ ID NO: 1268696
ugccuagucaguaucuagc

SEQ ID NO: 1268698 - RNA, 19 nt, Artificial Sequence
  Description of Artificial Sequence: Synthetic oligonucleotide
  Sense strand starting at position 2646 of SEQ ID NO: 1241387
gugaccuaggcagaauuau

SEQ ID NO: 1268699 - RNA, 19 nt, Artificial Sequence
  Description of Artificial Sequence: Synthetic oligonucleotide
  Antisense strand to SEQ ID NO: 1268698
auaauucugccuaggucac

SEQ ID NO: 1268700 - RNA, 19 nt, Artificial Sequence
  Description of Artificial Sequence: Synthetic oligonucleotide
  Sense strand starting at position 2781 of SEQ ID NO: 1241387
cucagaguuuaacagggau

SEQ ID NO: 1268701 - RNA, 19 nt, Artificial Sequence
  Description of Artificial Sequence: Synthetic oligonucleotide
  Antisense strand to SEQ ID NO: 1268700
aucccuguuaaacucugag

SEQ ID NO: 1268702 - RNA, 19 nt, Artificial Sequence
  Description of Artificial Sequence: Synthetic oligonucleotide
  Sense strand starting at position 2834 of SEQ ID NO: 1241387
acuugaucuuguguccuga

SEQ ID NO: 1268703 - RNA, 19 nt, Artificial Sequence
  Description of Artificial Sequence: Synthetic oligonucleotide
  Antisense strand to SEQ ID NO: 1268702
ucaggacacaagaucaagu

SEQ ID NO: 1268704 - RNA, 19 nt, Artificial Sequence
  Description of Artificial Sequence: Synthetic oligonucleotide
  Sense strand starting at position 2897 of SEQ ID NO: 1241387
agaugaagcugagaaauga

SEQ ID NO: 1268705 - RNA, 19 nt, Artificial Sequence
  Description of Artificial Sequence: Synthetic oligonucleotide
  Antisense strand to SEQ ID NO: 1268704
ucauuucucagcuucaucu

SEQ ID NO: 1268706 - RNA, 19 nt, Artificial Sequence
  Description of Artificial Sequence: Synthetic oligonucleotide
  Sense strand starting at position 3004 of SEQ ID NO: 1241387
aguagugugcgaguuguaa

SEQ ID NO: 1268707 - RNA, 19 nt, Artificial Sequence
  Description of Artificial Sequence: Synthetic oligonucleotide
  Antisense strand to SEQ ID NO: 1268706
uuacaacucgcacacuacu

SEQ ID NO: 1268708 - RNA, 19 nt, Artificial Sequence
  Description of Artificial Sequence: Synthetic oligonucleotide
  Sense strand starting at position 3005 of SEQ ID NO: 1241387
guagugugcgaguuguaag

SEQ ID NO: 1268709 - RNA, 19 nt, Artificial Sequence
  Description of Artificial Sequence: Synthetic oligonucleotide
  Antisense strand to SEQ ID NO: 1268708
cuuacaacucgcacacuac

SEQ ID NO: 1268710 - RNA, 19 nt, Artificial Sequence
  Description of Artificial Sequence: Synthetic oligonucleotide
  Sense strand starting at position 3110 of SEQ ID NO: 1241387
ucccguuugccugcuaaca

SEQ ID NO: 1268711 - RNA, 19 nt, Artificial Sequence
  Description of Artificial Sequence: Synthetic oligonucleotide
  Antisense strand to SEQ ID NO: 1268710
uguuagcaggcaaacggga

SEQ ID NO: 1268712 - RNA, 19 nt, Artificial Sequence
  Description of Artificial Sequence: Synthetic oligonucleotide
  Sense strand starting at position 3200 of SEQ ID NO: 1241387
gggagagcgagccaguuau

SEQ ID NO: 1268713 - RNA, 19 nt, Artificial Sequence
  Description of Artificial Sequence: Synthetic oligonucleotide
  Antisense strand to SEQ ID NO: 1268712
auaacuggcucgcucuccc

SEQ ID NO: 1268714 - RNA, 19 nt, Artificial Sequence
  Description of Artificial Sequence: Synthetic oligonucleotide
  Sense strand starting at position 3204 of SEQ ID NO: 1241387
gagcgagccaguuaugcaa

SEQ ID NO: 1268715 - RNA, 19 nt, Artificial Sequence
  Description of Artificial Sequence: Synthetic oligonucleotide
  Antisense strand to SEQ ID NO: 1268714
uugcauaacuggcucgcuc

SEQ ID NO: 1268716 - RNA, 19 nt, Artificial Sequence
  Description of Artificial Sequence: Synthetic oligonucleotide
  Sense strand starting at position 3329 of SEQ ID NO: 1241387
gucagaacucgccaggucu

SEQ ID NO: 1268717 - RNA, 19 nt, Artificial Sequence
  Description of Artificial Sequence: Synthetic oligonucleotide
  Antisense strand to SEQ ID NO: 1268716
agaccuggcgaguucugac

SEQ ID NO: 1268718 - RNA, 19 nt, Artificial Sequence
  Description of Artificial Sequence: Synthetic oligonucleotide
  Sense strand starting at position 3590 of SEQ ID NO: 1241387
gguggagugauucaaguga

SEQ ID NO: 1268719 - RNA, 19 nt, Artificial Sequence
  Description of Artificial Sequence: Synthetic oligonucleotide
  Antisense strand to SEQ ID NO: 1268718
ucacuugaaucacuccacc

SEQ ID NO: 1268720 - RNA, 19 nt, Artificial Sequence
  Description of Artificial Sequence: Synthetic oligonucleotide
  Sense strand starting at position 3960 of SEQ ID NO: 1241387
ccauauuuauguuguggga

SEQ ID NO: 1268721 - RNA, 19 nt, Artificial Sequence
  Description of Artificial Sequence: Synthetic oligonucleotide
  Antisense strand to SEQ ID NO: 1268720
ucccacaacauaaauaugg

SEQ ID NO: 1268722 - RNA, 19 nt, Artificial Sequence
  Description of Artificial Sequence: Synthetic oligonucleotide
  Sense strand starting at position 3962 of SEQ ID NO: 1241387
auauuuauguugugggauu

SEQ ID NO: 1268723 - RNA, 19 nt, Artificial Sequence
  Description of Artificial Sequence: Synthetic oligonucleotide
  Antisense strand to SEQ ID NO: 1268722
aaucccacaacauaaauau

SEQ ID NO: 1268724 - RNA, 19 nt, Artificial Sequence
  Description of Artificial Sequence: Synthetic oligonucleotide
  Sense strand starting at position 3963 of SEQ ID NO: 1241387
uauuuauguugugggauug

SEQ ID NO: 1268725 - RNA, 19 nt, Artificial Sequence
  Description of Artificial Sequence: Synthetic oligonucleotide
  Antisense strand to SEQ ID NO: 1268724
caaucccacaacauaaaua

SEQ ID NO: 1268726 - RNA, 19 nt, Artificial Sequence
  Description of Artificial Sequence: Synthetic oligonucleotide
  Sense strand starting at position 36 of SEQ ID NO: 1241388
caaguuucucacgagauug

SEQ ID NO: 1268727 - RNA, 19 nt, Artificial Sequence
  Description of Artificial Sequence: Synthetic oligonucleotide
  Antisense strand to SEQ ID NO: 1268726
caaucucgugagaaacuug

SEQ ID NO: 1268728 - RNA, 19 nt, Artificial Sequence
  Description of Artificial Sequence: Synthetic oligonucleotide
  Sense strand starting at position 177 of SEQ ID NO: 1241388
ggagucaacuucuuccgaa

SEQ ID NO: 1268729 - RNA, 19 nt, Artificial Sequence
  Description of Artificial Sequence: Synthetic oligonucleotide
  Antisense strand to SEQ ID NO: 1268728
uucggaagaaguugacucc

SEQ ID NO: 1268730 - RNA, 19 nt, Artificial Sequence
  Description of Artificial Sequence: Synthetic oligonucleotide
  Sense strand starting at position 178 of SEQ ID NO: 1241388
gagucaacuucuuccgaac

SEQ ID NO: 1268731 - RNA, 19 nt, Artificial Sequence
  Description of Artificial Sequence: Synthetic oligonucleotide
  Antisense strand to SEQ ID NO: 1268730
guucggaagaaguugacuc

SEQ ID NO: 1268732 - RNA, 19 nt, Artificial Sequence
  Description of Artificial Sequence: Synthetic oligonucleotide
  Sense strand starting at position 343 of SEQ ID NO: 1241388
uacgaaauguaucuuaagu

SEQ ID NO: 1268733 - RNA, 19 nt, Artificial Sequence
  Description of Artificial Sequence: Synthetic oligonucleotide
  Antisense strand to SEQ ID NO: 1268732
acuuaagauacauuucgua

SEQ ID NO: 1268734 - RNA, 19 nt, Artificial Sequence
  Description of Artificial Sequence: Synthetic oligonucleotide
  Sense strand starting at position 500 of SEQ ID NO: 1241388
gcaauaauacuuugagaga

SEQ ID NO: 1268735 - RNA, 19 nt, Artificial Sequence
  Description of Artificial Sequence: Synthetic oligonucleotide
  Antisense strand to SEQ ID NO: 1268734
ucucucaaaguauuauugc

SEQ ID NO: 1268736 - RNA, 19 nt, Artificial Sequence
  Description of Artificial Sequence: Synthetic oligonucleotide
  Sense strand starting at position 631 of SEQ ID NO: 1241388
ggcagauuauauuuagcgu

SEQ ID NO: 1268737 - RNA, 19 nt, Artificial Sequence
  Description of Artificial Sequence: Synthetic oligonucleotide
  Antisense strand to SEQ ID NO: 1268736
acgcuaaauauaaucugcc

SEQ ID NO: 1268738 - RNA, 19 nt, Artificial Sequence
  Description of Artificial Sequence: Synthetic oligonucleotide
  Sense strand starting at position 752 of SEQ ID NO: 1241388
ggccuuugaggccagacau

SEQ ID NO: 1268739 - RNA, 19 nt, Artificial Sequence
  Description of Artificial Sequence: Synthetic oligonucleotide
  Antisense strand to SEQ ID NO: 1268738
augucuggccucaaaggcc

SEQ ID NO: 1268740 - RNA, 19 nt, Artificial Sequence
  Description of Artificial Sequence: Synthetic oligonucleotide
  Sense strand starting at position 871 of SEQ ID NO: 1241388
cgaucuuaccuagaucuug

SEQ ID NO: 1268741 - RNA, 19 nt, Artificial Sequence
  Description of Artificial Sequence: Synthetic oligonucleotide
  Antisense strand to SEQ ID NO: 1268740
caagaucuagguaagaucg

SEQ ID NO: 1268742 - RNA, 19 nt, Artificial Sequence
  Description of Artificial Sequence: Synthetic oligonucleotide
  Sense strand starting at position 1022 of SEQ ID NO: 1241388
cucucucagucaucauaga

SEQ ID NO: 1268743 - RNA, 19 nt, Artificial Sequence
  Description of Artificial Sequence: Synthetic oligonucleotide
  Antisense strand to SEQ ID NO: 1268742
ucuaugaugacugagagag

SEQ ID NO: 1268744 - RNA, 19 nt, Artificial Sequence
  Description of Artificial Sequence: Synthetic oligonucleotide
  Sense strand starting at position 1463 of SEQ ID NO: 1241388
ggaagaacggccugucagu

SEQ ID NO: 1268745 - RNA, 19 nt, Artificial Sequence
  Description of Artificial Sequence: Synthetic oligonucleotide
  Antisense strand to SEQ ID NO: 1268744
acugacaggccguucuucc

SEQ ID NO: 1268746 - RNA, 19 nt, Artificial Sequence
  Description of Artificial Sequence: Synthetic oligonucleotide
  Sense strand starting at position 1479 of SEQ ID NO: 1241388
aguggauuagucugaacac

SEQ ID NO: 1268747 - RNA, 19 nt, Artificial Sequence
  Description of Artificial Sequence: Synthetic oligonucleotide
  Antisense strand to SEQ ID NO: 1268746
guguucagacuaauccacu

SEQ ID NO: 1268748 - RNA, 19 nt, Artificial Sequence
  Description of Artificial Sequence: Synthetic oligonucleotide
  Sense strand starting at position 1613 of SEQ ID NO: 1241388
cccuaugaucuagguacga

SEQ ID NO: 1268749 - RNA, 19 nt, Artificial Sequence
  Description of Artificial Sequence: Synthetic oligonucleotide
  Antisense strand to SEQ ID NO: 1268748
ucguaccuagaucauaggg

SEQ ID NO: 1268750 - RNA, 19 nt, Artificial Sequence
  Description of Artificial Sequence: Synthetic oligonucleotide
  Sense strand starting at position 1629 of SEQ ID NO: 1241388
cgagcauuguaccuaggau

SEQ ID NO: 1268751 - RNA, 19 nt, Artificial Sequence
  Description of Artificial Sequence: Synthetic oligonucleotide
  Antisense strand to SEQ ID NO: 1268750
auccuagguacaaugcucg

SEQ ID NO: 1268752 - RNA, 19 nt, Artificial Sequence
  Description of Artificial Sequence: Synthetic oligonucleotide
  Sense strand starting at position 1648 of SEQ ID NO: 1241388
ggacgcguucguccucuua

SEQ ID NO: 1268753 - RNA, 19 nt, Artificial Sequence
  Description of Artificial Sequence: Synthetic oligonucleotide
  Antisense strand to SEQ ID NO: 1268752
uaagaggacgaacgcgucc

SEQ ID NO: 1268754 - RNA, 19 nt, Artificial Sequence
  Description of Artificial Sequence: Synthetic oligonucleotide
  Sense strand starting at position 1686 of SEQ ID NO: 1241388
cugucuacggaguaaagua

SEQ ID NO: 1268755 - RNA, 19 nt, Artificial Sequence
  Description of Artificial Sequence: Synthetic oligonucleotide
  Antisense strand to SEQ ID NO: 1268754
uacuuuacuccguagacag

SEQ ID NO: 1268756 - RNA, 19 nt, Artificial Sequence
  Description of Artificial Sequence: Synthetic oligonucleotide
  Sense strand starting at position 2346 of SEQ ID NO: 1241388
gcuccuuguccggucauca

SEQ ID NO: 1268757 - RNA, 19 nt, Artificial Sequence
  Description of Artificial Sequence: Synthetic oligonucleotide
  Antisense strand to SEQ ID NO: 1268756
ugaugaccggacaaggagc

SEQ ID NO: 1268758 - RNA, 19 nt, Artificial Sequence
  Description of Artificial Sequence: Synthetic oligonucleotide
  Sense strand starting at position 2742 of SEQ ID NO: 1241388
cauugugcagacugggaaa

SEQ ID NO: 1268759 - RNA, 19 nt, Artificial Sequence
  Description of Artificial Sequence: Synthetic oligonucleotide
  Antisense strand to SEQ ID NO: 1268758
uuucccagucugcacaaug

SEQ ID NO: 1268760 - RNA, 19 nt, Artificial Sequence
  Description of Artificial Sequence: Synthetic oligonucleotide
  Sense strand starting at position 2744 of SEQ ID NO: 1241388
uugugcagacugggaaaua

SEQ ID NO: 1268761 - RNA, 19 nt, Artificial Sequence
  Description of Artificial Sequence: Synthetic oligonucleotide
  Antisense strand to SEQ ID NO: 1268760
uauuucccagucugcacaa

SEQ ID NO: 1268762 - RNA, 19 nt, Artificial Sequence
  Description of Artificial Sequence: Synthetic oligonucleotide
  Sense strand starting at position 2760 of SEQ ID NO: 1241388
auaagagacucagagauua

SEQ ID NO: 1268763 - RNA, 19 nt, Artificial Sequence
  Description of Artificial Sequence: Synthetic oligonucleotide
  Antisense strand to SEQ ID NO: 1268762
uaaucucugagucucuuau

SEQ ID NO: 1268764 - RNA, 19 nt, Artificial Sequence
  Description of Artificial Sequence: Synthetic oligonucleotide
  Sense strand starting at position 2774 of SEQ ID NO: 1241388
gauuaauacguccaccgca

SEQ ID NO: 1268765 - RNA, 19 nt, Artificial Sequence
  Description of Artificial Sequence: Synthetic oligonucleotide
  Antisense strand to SEQ ID NO: 1268764
ugcgguggacguauuaauc

SEQ ID NO: 1268766 - RNA, 19 nt, Artificial Sequence
  Description of Artificial Sequence: Synthetic oligonucleotide
  Sense strand starting at position 2814 of SEQ ID NO: 1241388
ggaucuggauuugaaccaa

SEQ ID NO: 1268767 - RNA, 19 nt, Artificial Sequence
  Description of Artificial Sequence: Synthetic oligonucleotide
  Antisense strand to SEQ ID NO: 1268766
uugguucaaauccagaucc

SEQ ID NO: 1268768 - RNA, 19 nt, Artificial Sequence
  Description of Artificial Sequence: Synthetic oligonucleotide
  Sense strand starting at position 2855 of SEQ ID NO: 1241388
ggaaucuguuaucuuucuu

SEQ ID NO: 1268769 - RNA, 19 nt, Artificial Sequence
  Description of Artificial Sequence: Synthetic oligonucleotide
  Antisense strand to SEQ ID NO: 1268768
aagaaagauaacagauucc

SEQ ID NO: 1268770 - RNA, 19 nt, Artificial Sequence
  Description of Artificial Sequence: Synthetic oligonucleotide
  Sense strand starting at position 2901 of SEQ ID NO: 1241388
ucgaguuccacccaaacga

SEQ ID NO: 1268771 - RNA, 19 nt, Artificial Sequence
  Description of Artificial Sequence: Synthetic oligonucleotide
  Antisense strand to SEQ ID NO: 1268770
ucguuuggguggaacucga

SEQ ID NO: 1268772 - RNA, 19 nt, Artificial Sequence
  Description of Artificial Sequence: Synthetic oligonucleotide
  Sense strand starting at position 2923 of SEQ ID NO: 1241388
gggccuaaauggccauuaa

SEQ ID NO: 1268773 - RNA, 19 nt, Artificial Sequence
  Description of Artificial Sequence: Synthetic oligonucleotide
  Antisense strand to SEQ ID NO: 1268772
uuaauggccauuuaggccc

SEQ ID NO: 1268774 - RNA, 19 nt, Artificial Sequence
  Description of Artificial Sequence: Synthetic oligonucleotide
  Sense strand starting at position 3009 of SEQ ID NO: 1241388
gcaggcauuugcucucuca

SEQ ID NO: 1268775 - RNA, 19 nt, Artificial Sequence
  Description of Artificial Sequence: Synthetic oligonucleotide
  Antisense strand to SEQ ID NO: 1268774
ugagagagcaaaugccugc

SEQ ID NO: 1268776 - RNA, 19 nt, Artificial Sequence
  Description of Artificial Sequence: Synthetic oligonucleotide
  Sense strand starting at position 3153 of SEQ ID NO: 1241388
uccuccgugcuuuacauaa

SEQ ID NO: 1268777 - RNA, 19 nt, Artificial Sequence
  Description of Artificial Sequence: Synthetic oligonucleotide
  Antisense strand to SEQ ID NO: 1268776
uuauguaaagcacggagga

SEQ ID NO: 1268778 - RNA, 19 nt, Artificial Sequence
  Description of Artificial Sequence: Synthetic oligonucleotide
  Sense strand starting at position 3234 of SEQ ID NO: 1241388
agaugagagcacugaaguu

SEQ ID NO: 1268779 - RNA, 19 nt, Artificial Sequence
  Description of Artificial Sequence: Synthetic oligonucleotide
  Antisense strand to SEQ ID NO: 1268778
aacuucagugcucucaucu

SEQ ID NO: 1268780 - RNA, 19 nt, Artificial Sequence
  Description of Artificial Sequence: Synthetic oligonucleotide
  Sense strand starting at position 3268 of SEQ ID NO: 1241388
ggcacuauccaaggucaca

SEQ ID NO: 1268781 - RNA, 19 nt, Artificial Sequence
  Description of Artificial Sequence: Synthetic oligonucleotide
  Antisense strand to SEQ ID NO: 1268780
ugugaccuuggauagugcc

SEQ ID NO: 1268782 - RNA, 19 nt, Artificial Sequence
  Description of Artificial Sequence: Synthetic oligonucleotide
  Sense strand starting at position 3290 of SEQ ID NO: 1241388
gcaguaaguguuggauuug

SEQ ID NO: 1268783 - RNA, 19 nt, Artificial Sequence
  Description of Artificial Sequence: Synthetic oligonucleotide
  Antisense strand to SEQ ID NO: 1268782
caaauccaacacuuacugc

SEQ ID NO: 1268784 - RNA, 19 nt, Artificial Sequence
  Description of Artificial Sequence: Synthetic oligonucleotide
  Sense strand starting at position 3460 of SEQ ID NO: 1241388
gggccuaguugcuuagaaa

SEQ ID NO: 1268785 - RNA, 19 nt, Artificial Sequence
  Description of Artificial Sequence: Synthetic oligonucleotide
  Antisense strand to SEQ ID NO: 1268784
uuucuaagcaacuaggccc

SEQ ID NO: 1268786 - RNA, 19 nt, Artificial Sequence
  Description of Artificial Sequence: Synthetic oligonucleotide
  Sense strand starting at position 3614 of SEQ ID NO: 1241388
gggaaucaaaguuguggga

SEQ ID NO: 1268787 - RNA, 19 nt, Artificial Sequence
  Description of Artificial Sequence: Synthetic oligonucleotide
  Antisense strand to SEQ ID NO: 1268786
ucccacaacuuugauuccc

SEQ ID NO: 1268788 - RNA, 19 nt, Artificial Sequence
  Description of Artificial Sequence: Synthetic oligonucleotide
  Sense strand starting at position 3655 of SEQ ID NO: 1241388
acccaaauauguuugcaga

SEQ ID NO: 1268789 - RNA, 19 nt, Artificial Sequence
  Description of Artificial Sequence: Synthetic oligonucleotide
  Antisense strand to SEQ ID NO: 1268788
ucugcaaacauauuugggu

SEQ ID NO: 1268790 - RNA, 19 nt, Artificial Sequence
  Description of Artificial Sequence: Synthetic oligonucleotide
  Sense strand starting at position 3656 of SEQ ID NO: 1241388
cccaaauauguuugcagau

SEQ ID NO: 1268791 - RNA, 19 nt, Artificial Sequence
  Description of Artificial Sequence: Synthetic oligonucleotide
  Antisense strand to SEQ ID NO: 1268790
aucugcaaacauauuuggg

SEQ ID NO: 1268792 - RNA, 19 nt, Artificial Sequence
  Description of Artificial Sequence: Synthetic oligonucleotide
  Sense strand starting at position 3657 of SEQ ID NO: 1241388
ccaaauauguuugcagaug

SEQ ID NO: 1268793 - RNA, 19 nt, Artificial Sequence
  Description of Artificial Sequence: Synthetic oligonucleotide
  Antisense strand to SEQ ID NO: 1268792
caucugcaaacauauuugg

SEQ ID NO: 1268794 - RNA, 19 nt, Artificial Sequence
  Description of Artificial Sequence: Synthetic oligonucleotide
  Sense strand starting at position 3689 of SEQ ID NO: 1241388
cuuggugugcuuugaggaa

SEQ ID NO: 1268795 - RNA, 19 nt, Artificial Sequence
  Description of Artificial Sequence: Synthetic oligonucleotide
  Antisense strand to SEQ ID NO: 1268794
uuccucaaagcacaccaag

SEQ ID NO: 1268796 - RNA, 19 nt, Artificial Sequence
  Description of Artificial Sequence: Synthetic oligonucleotide
  Sense strand starting at position 3693 of SEQ ID NO: 1241388
gugugcuuugaggaauuga

SEQ ID NO: 1268797 - RNA, 19 nt, Artificial Sequence
  Description of Artificial Sequence: Synthetic oligonucleotide
  Antisense strand to SEQ ID NO: 1268796
ucaauuccucaaagcacac

SEQ ID NO: 1268798 - RNA, 19 nt, Artificial Sequence
  Description of Artificial Sequence: Synthetic oligonucleotide
  Sense strand starting at position 3818 of SEQ ID NO: 1241388
gggaaagucuagcucacca

SEQ ID NO: 1268799 - RNA, 19 nt, Artificial Sequence
  Description of Artificial Sequence: Synthetic oligonucleotide
  Antisense strand to SEQ ID NO: 1268798
uggugagcuagacuuuccc

SEQ ID NO: 1268800 - RNA, 19 nt, Artificial Sequence
  Description of Artificial Sequence: Synthetic oligonucleotide
  Sense strand starting at position 3823 of SEQ ID NO: 1241388
agucuagcucaccaaagaa

SEQ ID NO: 1268801 - RNA, 19 nt, Artificial Sequence
  Description of Artificial Sequence: Synthetic oligonucleotide
  Antisense strand to SEQ ID NO: 1268800
uucuuuggugagcuagacu

SEQ ID NO: 1268802 - RNA, 19 nt, Artificial Sequence
  Description of Artificial Sequence: Synthetic oligonucleotide
  Sense strand starting at position 3939 of SEQ ID NO: 1241388
gaugacaugguuugugaug

SEQ ID NO: 1268803 - RNA, 19 nt, Artificial Sequence
  Description of Artificial Sequence: Synthetic oligonucleotide
  Antisense strand to SEQ ID NO: 1268802
caucacaaaccaugucauc

SEQ ID NO: 1268804 - RNA, 19 nt, Artificial Sequence
  Description of Artificial Sequence: Synthetic oligonucleotide
  Sense strand starting at position 3940 of SEQ ID NO: 1241388
augacaugguuugugauga

SEQ ID NO: 1268805 - RNA, 19 nt, Artificial Sequence
  Description of Artificial Sequence: Synthetic oligonucleotide
  Antisense strand to SEQ ID NO: 1268804
ucaucacaaaccaugucau

SEQ ID NO: 1268806 - RNA, 19 nt, Artificial Sequence
  Description of Artificial Sequence: Synthetic oligonucleotide
  Sense strand starting at position 155 of SEQ ID NO: 1241389
gggagaugcaucugcaugu

SEQ ID NO: 1268807 - RNA, 19 nt, Artificial Sequence
  Description of Artificial Sequence: Synthetic oligonucleotide
  Antisense strand to SEQ ID NO: 1268806
acaugcagaugcaucuccc

SEQ ID NO: 1268808 - RNA, 19 nt, Artificial Sequence
  Description of Artificial Sequence: Synthetic oligonucleotide
  Sense strand starting at position 168 of SEQ ID NO: 1241389
gcaugugaccuuuauuccu

SEQ ID NO: 1268809 - RNA, 19 nt, Artificial Sequence
  Description of Artificial Sequence: Synthetic oligonucleotide
  Antisense strand to SEQ ID NO: 1268808
aggaauaaaggucacaugc

SEQ ID NO: 1268810 - RNA, 19 nt, Artificial Sequence
  Description of Artificial Sequence: Synthetic oligonucleotide
  Sense strand starting at position 183 of SEQ ID NO: 1241389
uccucauguuucucugacu

SEQ ID NO: 1268811 - RNA, 19 nt, Artificial Sequence
  Description of Artificial Sequence: Synthetic oligonucleotide
  Antisense strand to SEQ ID NO: 1268810
agucagagaaacaugagga

SEQ ID NO: 1268812 - RNA, 19 nt, Artificial Sequence
  Description of Artificial Sequence: Synthetic oligonucleotide
  Sense strand starting at position 184 of SEQ ID NO: 1241389
ccucauguuucucugacuu

SEQ ID NO: 1268813 - RNA, 19 nt, Artificial Sequence
  Description of Artificial Sequence: Synthetic oligonucleotide
  Antisense strand to SEQ ID NO: 1268812
aagucagagaaacaugagg

SEQ ID NO: 1268814 - RNA, 19 nt, Artificial Sequence
  Description of Artificial Sequence: Synthetic oligonucleotide
  Sense strand starting at position 188 of SEQ ID NO: 1241389
auguuucucugacuugagu

SEQ ID NO: 1268815 - RNA, 19 nt, Artificial Sequence
  Description of Artificial Sequence: Synthetic oligonucleotide
  Antisense strand to SEQ ID NO: 1268814
acucaagucagagaaacau

SEQ ID NO: 1268816 - RNA, 19 nt, Artificial Sequence
  Description of Artificial Sequence: Synthetic oligonucleotide
  Sense strand starting at position 405 of SEQ ID NO: 1241389
cgggcaguggcccagaaau

SEQ ID NO: 1268817 - RNA, 19 nt, Artificial Sequence
  Description of Artificial Sequence: Synthetic oligonucleotide
  Antisense strand to SEQ ID NO: 1268816
auuucugggccacugcccg

SEQ ID NO: 1268818 - RNA, 19 nt, Artificial Sequence
  Description of Artificial Sequence: Synthetic oligonucleotide
  Sense strand starting at position 462 of SEQ ID NO: 1241389
ggcucugccauggguagaa

SEQ ID NO: 1268819 - RNA, 19 nt, Artificial Sequence
  Description of Artificial Sequence: Synthetic oligonucleotide
  Antisense strand to SEQ ID NO: 1268818
uucuacccauggcagagcc

SEQ ID NO: 1268820 - RNA, 19 nt, Artificial Sequence
  Description of Artificial Sequence: Synthetic oligonucleotide
  Sense strand starting at position 511 of SEQ ID NO: 1241389
gggugaauucacggaaacu

SEQ ID NO: 1268821 - RNA, 19 nt, Artificial Sequence
  Description of Artificial Sequence: Synthetic oligonucleotide
  Antisense strand to SEQ ID NO: 1268820
aguuuccgugaauucaccc

SEQ ID NO: 1268822 - RNA, 19 nt, Artificial Sequence
  Description of Artificial Sequence: Synthetic oligonucleotide
  Sense strand starting at position 870 of SEQ ID NO: 1241389
ggugguccugucuaggaca

SEQ ID NO: 1268823 - RNA, 19 nt, Artificial Sequence
  Description of Artificial Sequence: Synthetic oligonucleotide
  Antisense strand to SEQ ID NO: 1268822
uguccuagacaggaccacc

SEQ ID NO: 1268824 - RNA, 19 nt, Artificial Sequence
  Description of Artificial Sequence: Synthetic oligonucleotide
  Sense strand starting at position 962 of SEQ ID NO: 1241389
gacaucaucuuggcugcua

SEQ ID NO: 1268825 - RNA, 19 nt, Artificial Sequence
  Description of Artificial Sequence: Synthetic oligonucleotide
  Antisense strand to SEQ ID NO: 1268824
uagcagccaagaugauguc

SEQ ID NO: 1268826 - RNA, 19 nt, Artificial Sequence
  Description of Artificial Sequence: Synthetic oligonucleotide
  Sense strand starting at position 1124 of SEQ ID NO: 1241389
uuaggaauuccuugacagu

SEQ ID NO: 1268827 - RNA, 19 nt, Artificial Sequence
  Description of Artificial Sequence: Synthetic oligonucleotide
  Antisense strand to SEQ ID NO: 1268826
acugucaaggaauuccuaa

SEQ ID NO: 1268828 - RNA, 19 nt, Artificial Sequence
  Description of Artificial Sequence: Synthetic oligonucleotide
  Sense strand starting at position 1133 of SEQ ID NO: 1241389
ccuugacaguuuccggaga

SEQ ID NO: 1268829 - RNA, 19 nt, Artificial Sequence
  Description of Artificial Sequence: Synthetic oligonucleotide
  Antisense strand to SEQ ID NO: 1268828
ucuccggaaacugucaagg

SEQ ID NO: 1268830 - RNA, 19 nt, Artificial Sequence
  Description of Artificial Sequence: Synthetic oligonucleotide
  Sense strand starting at position 1150 of SEQ ID NO: 1241389
gacugucagcuugagcaau

SEQ ID NO: 1268831 - RNA, 19 nt, Artificial Sequence
  Description of Artificial Sequence: Synthetic oligonucleotide
  Antisense strand to SEQ ID NO: 1268830
auugcucaagcugacaguc

SEQ ID NO: 1268832 - RNA, 19 nt, Artificial Sequence
  Description of Artificial Sequence: Synthetic oligonucleotide
  Sense strand starting at position 1158 of SEQ ID NO: 1241389
gcuugagcaauacagagau

SEQ ID NO: 1268833 - RNA, 19 nt, Artificial Sequence
  Description of Artificial Sequence: Synthetic oligonucleotide
  Antisense strand to SEQ ID NO: 1268832
aucucuguauugcucaagc

SEQ ID NO: 1268834 - RNA, 19 nt, Artificial Sequence
  Description of Artificial Sequence: Synthetic oligonucleotide
  Sense strand starting at position 1187 of SEQ ID NO: 1241389
uggucuucuggugaagaaa

SEQ ID NO: 1268835 - RNA, 19 nt, Artificial Sequence
  Description of Artificial Sequence: Synthetic oligonucleotide
  Antisense strand to SEQ ID NO: 1268834
uuucuucaccagaagacca

SEQ ID NO: 1268836 - RNA, 19 nt, Artificial Sequence
  Description of Artificial Sequence: Synthetic oligonucleotide
  Sense strand starting at position 1421 of SEQ ID NO: 1241389
cuccuaugcuuauucgaca

SEQ ID NO: 1268837 - RNA, 19 nt, Artificial Sequence
  Description of Artificial Sequence: Synthetic oligonucleotide
  Antisense strand to SEQ ID NO: 1268836
ugucgaauaagcauaggag

SEQ ID NO: 1268838 - RNA, 19 nt, Artificial Sequence
  Description of Artificial Sequence: Synthetic oligonucleotide
  Sense strand starting at position 1422 of SEQ ID NO: 1241389
uccuaugcuuauucgacau

SEQ ID NO: 1268839 - RNA, 19 nt, Artificial Sequence
  Description of Artificial Sequence: Synthetic oligonucleotide
  Antisense strand to SEQ ID NO: 1268838
augucgaauaagcauagga

SEQ ID NO: 1268840 - RNA, 19 nt, Artificial Sequence
  Description of Artificial Sequence: Synthetic oligonucleotide
  Sense strand starting at position 1426 of SEQ ID NO: 1241389
augcuuauucgacauaagg

SEQ ID NO: 1268841 - RNA, 19 nt, Artificial Sequence
  Description of Artificial Sequence: Synthetic oligonucleotide
  Antisense strand to SEQ ID NO: 1268840
ccuuaugucgaauaagcau

SEQ ID NO: 1268842 - RNA, 19 nt, Artificial Sequence
  Description of Artificial Sequence: Synthetic oligonucleotide
  Sense strand starting at position 1428 of SEQ ID NO: 1241389
gcuuauucgacauaaggac

SEQ ID NO: 1268843 - RNA, 19 nt, Artificial Sequence
  Description of Artificial Sequence: Synthetic oligonucleotide
  Antisense strand to SEQ ID NO: 1268842
guccuuaugucgaauaagc

SEQ ID NO: 1268844 - RNA, 19 nt, Artificial Sequence
  Description of Artificial Sequence: Synthetic oligonucleotide
  Sense strand starting at position 1622 of SEQ ID NO: 1241389
aggcgauccggguaacuua

SEQ ID NO: 1268845 - RNA, 19 nt, Artificial Sequence
  Description of Artificial Sequence: Synthetic oligonucleotide
  Antisense strand to SEQ ID NO: 1268844
uaaguuacccggaucgccu

SEQ ID NO: 1268846 - RNA, 19 nt, Artificial Sequence
  Description of Artificial Sequence: Synthetic oligonucleotide
  Sense strand starting at position 1821 of SEQ ID NO: 1241389
aggucagcugguugaugaa

SEQ ID NO: 1268847 - RNA, 19 nt, Artificial Sequence
  Description of Artificial Sequence: Synthetic oligonucleotide
  Antisense strand to SEQ ID NO: 1268846
uucaucaaccagcugaccu

SEQ ID NO: 1268848 - RNA, 19 nt, Artificial Sequence
  Description of Artificial Sequence: Synthetic oligonucleotide
  Sense strand starting at position 1846 of SEQ ID NO: 1241389
gaaugaagcuauucccugu

SEQ ID NO: 1268849 - RNA, 19 nt, Artificial Sequence
  Description of Artificial Sequence: Synthetic oligonucleotide
  Antisense strand to SEQ ID NO: 1268848
acagggaauagcuucauuc

SEQ ID NO: 1268850 - RNA, 19 nt, Artificial Sequence
  Description of Artificial Sequence: Synthetic oligonucleotide
  Sense strand starting at position 1975 of SEQ ID NO: 1241389
aggaaaugacagcguucuu

SEQ ID NO: 1268851 - RNA, 19 nt, Artificial Sequence
  Description of Artificial Sequence: Synthetic oligonucleotide
  Antisense strand to SEQ ID NO: 1268850
aagaacgcugucauuuccu

SEQ ID NO: 1268852 - RNA, 19 nt, Artificial Sequence
  Description of Artificial Sequence: Synthetic oligonucleotide
  Sense strand starting at position 2120 of SEQ ID NO: 1241389
gcuugauggaucuaccgaa

SEQ ID NO: 1268853 - RNA, 19 nt, Artificial Sequence
  Description of Artificial Sequence: Synthetic oligonucleotide
  Antisense strand to SEQ ID NO: 1268852
uucgguagauccaucaagc

SEQ ID NO: 1268854 - RNA, 19 nt, Artificial Sequence
  Description of Artificial Sequence: Synthetic oligonucleotide
  Sense strand starting at position 2543 of SEQ ID NO: 1241389
aguuuauuaagguguaggu

SEQ ID NO: 1268855 - RNA, 19 nt, Artificial Sequence
  Description of Artificial Sequence: Synthetic oligonucleotide
  Antisense strand to SEQ ID NO: 1268854
accuacaccuuaauaaacu

SEQ ID NO: 1268856 - RNA, 19 nt, Artificial Sequence
  Description of Artificial Sequence: Synthetic oligonucleotide
  Sense strand starting at position 2545 of SEQ ID NO: 1241389
uuuauuaagguguagguga

SEQ ID NO: 1268857 - RNA, 19 nt, Artificial Sequence
  Description of Artificial Sequence: Synthetic oligonucleotide
  Antisense strand to SEQ ID NO: 1268856
ucaccuacaccuuaauaaa

SEQ ID NO: 1268858 - RNA, 19 nt, Artificial Sequence
  Description of Artificial Sequence: Synthetic oligonucleotide
  Sense strand starting at position 2547 of SEQ ID NO: 1241389
uauuaagguguaggugauu

SEQ ID NO: 1268859 - RNA, 19 nt, Artificial Sequence
  Description of Artificial Sequence: Synthetic oligonucleotide
  Antisense strand to SEQ ID NO: 1268858
aaucaccuacaccuuaaua

SEQ ID NO: 1268860 - RNA, 19 nt, Artificial Sequence
  Description of Artificial Sequence: Synthetic oligonucleotide
  Sense strand starting at position 2556 of SEQ ID NO: 1241389
guaggugauuuacacaaag

SEQ ID NO: 1268861 - RNA, 19 nt, Artificial Sequence
  Description of Artificial Sequence: Synthetic oligonucleotide
  Antisense strand to SEQ ID NO: 1268860
cuuuguguaaaucaccuac

SEQ ID NO: 1268862 - RNA, 19 nt, Artificial Sequence
  Description of Artificial Sequence: Synthetic oligonucleotide
  Sense strand starting at position 2895 of SEQ ID NO: 1241389
cuguauauuccuggaggug

SEQ ID NO: 1268863 - RNA, 19 nt, Artificial Sequence
  Description of Artificial Sequence: Synthetic oligonucleotide
  Antisense strand to SEQ ID NO: 1268862
caccuccaggaauauacag

SEQ ID NO: 1268864 - RNA, 19 nt, Artificial Sequence
  Description of Artificial Sequence: Synthetic oligonucleotide
  Sense strand starting at position 2960 of SEQ ID NO: 1241389
uguguuguuauguuggcau

SEQ ID NO: 1268865 - RNA, 19 nt, Artificial Sequence
  Description of Artificial Sequence: Synthetic oligonucleotide
  Antisense strand to SEQ ID NO: 1268864
augccaacauaacaacaca

SEQ ID NO: 1268866 - RNA, 19 nt, Artificial Sequence
  Description of Artificial Sequence: Synthetic oligonucleotide
  Sense strand starting at position 3058 of SEQ ID NO: 1241389
uagcuuugucguuaagaaa

SEQ ID NO: 1268867 - RNA, 19 nt, Artificial Sequence
  Description of Artificial Sequence: Synthetic oligonucleotide
  Antisense strand to SEQ ID NO: 1268866
uuucuuaacgacaaagcua

SEQ ID NO: 1268868 - RNA, 19 nt, Artificial Sequence
  Description of Artificial Sequence: Synthetic oligonucleotide
  Sense strand starting at position 3197 of SEQ ID NO: 1241389
ugaguuaucuucucauauu

SEQ ID NO: 1268869 - RNA, 19 nt, Artificial Sequence
  Description of Artificial Sequence: Synthetic oligonucleotide
  Antisense strand to SEQ ID NO: 1268868
aauaugagaagauaacuca

SEQ ID NO: 1268870 - RNA, 19 nt, Artificial Sequence
  Description of Artificial Sequence: Synthetic oligonucleotide
  Sense strand starting at position 3216 of SEQ ID NO: 1241389
cuuggauccuuguucuacu

SEQ ID NO: 1268871 - RNA, 19 nt, Artificial Sequence
  Description of Artificial Sequence: Synthetic oligonucleotide
  Antisense strand to SEQ ID NO: 1268870
aguagaacaaggauccaag

SEQ ID NO: 1268872 - RNA, 19 nt, Artificial Sequence
  Description of Artificial Sequence: Synthetic oligonucleotide
  Sense strand starting at position 3485 of SEQ ID NO: 1241389
ggguuugcuacuuaagauu

SEQ ID NO: 1268873 - RNA, 19 nt, Artificial Sequence
  Description of Artificial Sequence: Synthetic oligonucleotide
  Antisense strand to SEQ ID NO: 1268872
aaucuuaaguagcaaaccc

SEQ ID NO: 1268874 - RNA, 19 nt, Artificial Sequence
  Description of Artificial Sequence: Synthetic oligonucleotide
  Sense strand starting at position 3503 of SEQ ID NO: 1241389
uuacuuuaauccgucugga

SEQ ID NO: 1268875 - RNA, 19 nt, Artificial Sequence
  Description of Artificial Sequence: Synthetic oligonucleotide
  Antisense strand to SEQ ID NO: 1268874
uccagacggauuaaaguaa

SEQ ID NO: 1268876 - RNA, 19 nt, Artificial Sequence
  Description of Artificial Sequence: Synthetic oligonucleotide
  Sense strand starting at position 3558 of SEQ ID NO: 1241389
auaugucuuagccaguugu

SEQ ID NO: 1268877 - RNA, 19 nt, Artificial Sequence
  Description of Artificial Sequence: Synthetic oligonucleotide
  Antisense strand to SEQ ID NO: 1268876
acaacuggcuaagacauau

SEQ ID NO: 1268878 - RNA, 19 nt, Artificial Sequence
  Description of Artificial Sequence: Synthetic oligonucleotide
  Sense strand starting at position 3663 of SEQ ID NO: 1241389
accaguauaucuguuugga

SEQ ID NO: 1268879 - RNA, 19 nt, Artificial Sequence
  Description of Artificial Sequence: Synthetic oligonucleotide
  Antisense strand to SEQ ID NO: 1268878
uccaaacagauauacuggu

SEQ ID NO: 1268880 - RNA, 19 nt, Artificial Sequence
  Description of Artificial Sequence: Synthetic oligonucleotide
  Sense strand starting at position 3665 of SEQ ID NO: 1241389
caguauaucuguuuggaua

SEQ ID NO: 1268881 - RNA, 19 nt, Artificial Sequence
  Description of Artificial Sequence: Synthetic oligonucleotide
  Antisense strand to SEQ ID NO: 1268880
uauccaaacagauauacug

SEQ ID NO: 1268882 - RNA, 19 nt, Artificial Sequence
  Description of Artificial Sequence: Synthetic oligonucleotide
  Sense strand starting at position 3666 of SEQ ID NO: 1241389
aguauaucuguuuggauau

SEQ ID NO: 1268883 - RNA, 19 nt, Artificial Sequence
  Description of Artificial Sequence: Synthetic oligonucleotide
  Antisense strand to SEQ ID NO: 1268882
auauccaaacagauauacu

SEQ ID NO: 1268884 - RNA, 19 nt, Artificial Sequence
  Description of Artificial Sequence: Synthetic oligonucleotide
  Sense strand starting at position 3789 of SEQ ID NO: 1241389
uuguuaauccagggcuaca

SEQ ID NO: 1268885 - RNA, 19 nt, Artificial Sequence
  Description of Artificial Sequence: Synthetic oligonucleotide
  Antisense strand to SEQ ID NO: 1268884
uguagcccuggauuaacaa

SEQ ID NO: 1268886 - RNA, 19 nt, Artificial Sequence
  Description of Artificial Sequence: Synthetic oligonucleotide
  Sense strand starting at position 40 of SEQ ID NO: 1241390
cagacucuugggugcugaa

SEQ ID NO: 1268887 - RNA, 19 nt, Artificial Sequence
  Description of Artificial Sequence: Synthetic oligonucleotide
  Antisense strand to SEQ ID NO: 1268886
uucagcacccaagagucug

SEQ ID NO: 1268888 - RNA, 19 nt, Artificial Sequence
  Description of Artificial Sequence: Synthetic oligonucleotide
  Sense strand starting at position 214 of SEQ ID NO: 1241390
ugaugaaguggcugacaua

SEQ ID NO: 1268889 - RNA, 19 nt, Artificial Sequence
  Description of Artificial Sequence: Synthetic oligonucleotide
  Antisense strand to SEQ ID NO: 1268888
uaugucagccacuucauca

SEQ ID NO: 1268890 - RNA, 19 nt, Artificial Sequence
  Description of Artificial Sequence: Synthetic oligonucleotide
  Sense strand starting at position 400 of SEQ ID NO: 1241390
auuguagugucauuuaggu

SEQ ID NO: 1268891 - RNA, 19 nt, Artificial Sequence
  Description of Artificial Sequence: Synthetic oligonucleotide
  Antisense strand to SEQ ID NO: 1268890
accuaaaugacacuacaau

SEQ ID NO: 1268892 - RNA, 19 nt, Artificial Sequence
  Description of Artificial Sequence: Synthetic oligonucleotide
  Sense strand starting at position 402 of SEQ ID NO: 1241390
uguagugucauuuagguuu

SEQ ID NO: 1268893 - RNA, 19 nt, Artificial Sequence
  Description of Artificial Sequence: Synthetic oligonucleotide
  Antisense strand to SEQ ID NO: 1268892
aaaccuaaaugacacuaca

SEQ ID NO: 1268894 - RNA, 19 nt, Artificial Sequence
  Description of Artificial Sequence: Synthetic oligonucleotide
  Sense strand starting at position 523 of SEQ ID NO: 1241390
agcacugaguaucugaaua

SEQ ID NO: 1268895 - RNA, 19 nt, Artificial Sequence
  Description of Artificial Sequence: Synthetic oligonucleotide
  Antisense strand to SEQ ID NO: 1268894
uauucagauacucagugcu

SEQ ID NO: 1268896 - RNA, 19 nt, Artificial Sequence
  Description of Artificial Sequence: Synthetic oligonucleotide
  Sense strand starting at position 528 of SEQ ID NO: 1241390
ugaguaucugaauacagca

SEQ ID NO: 1268897 - RNA, 19 nt, Artificial Sequence
  Description of Artificial Sequence: Synthetic oligonucleotide
  Antisense strand to SEQ ID NO: 1268896
ugcuguauucagauacuca

SEQ ID NO: 1268898 - RNA, 19 nt, Artificial Sequence
  Description of Artificial Sequence: Synthetic oligonucleotide
  Sense strand starting at position 715 of SEQ ID NO: 1241390
guauguuaaauguagucua

SEQ ID NO: 1268899 - RNA, 19 nt, Artificial Sequence
  Description of Artificial Sequence: Synthetic oligonucleotide
  Antisense strand to SEQ ID NO: 1268898
uagacuacauuuaacauac

SEQ ID NO: 1268900 - RNA, 19 nt, Artificial Sequence
  Description of Artificial Sequence: Synthetic oligonucleotide
  Sense strand starting at position 816 of SEQ ID NO: 1241390
uaggacacugccugauaca

SEQ ID NO: 1268901 - RNA, 19 nt, Artificial Sequence
  Description of Artificial Sequence: Synthetic oligonucleotide
  Antisense strand to SEQ ID NO: 1268900
uguaucaggcaguguccua

SEQ ID NO: 1268902 - RNA, 19 nt, Artificial Sequence
  Description of Artificial Sequence: Synthetic oligonucleotide
  Sense strand starting at position 1100 of SEQ ID NO: 1241390
uaacuauaacgcuggguaa

SEQ ID NO: 1268903 - RNA, 19 nt, Artificial Sequence
  Description of Artificial Sequence: Synthetic oligonucleotide
  Antisense strand to SEQ ID NO: 1268902
uuacccagcguuauaguua

SEQ ID NO: 1268904 - RNA, 19 nt, Artificial Sequence
  Description of Artificial Sequence: Synthetic oligonucleotide
  Sense strand starting at position 1101 of SEQ ID NO: 1241390
aacuauaacgcuggguaaa

SEQ ID NO: 1268905 - RNA, 19 nt, Artificial Sequence
  Description of Artificial Sequence: Synthetic oligonucleotide
  Antisense strand to SEQ ID NO: 1268904
uuuacccagcguuauaguu

SEQ ID NO: 1268906 - RNA, 19 nt, Artificial Sequence
  Description of Artificial Sequence: Synthetic oligonucleotide
  Sense strand starting at position 1156 of SEQ ID NO: 1241390
gaccucuuccgugauaaca

SEQ ID NO: 1268907 - RNA, 19 nt, Artificial Sequence
  Description of Artificial Sequence: Synthetic oligonucleotide
  Antisense strand to SEQ ID NO: 1268906
uguuaucacggaagagguc

SEQ ID NO: 1268908 - RNA, 19 nt, Artificial Sequence
  Description of Artificial Sequence: Synthetic oligonucleotide
  Sense strand starting at position 1236 of SEQ ID NO: 1241390
ccuccauucuaggcauaag

SEQ ID NO: 1268909 - RNA, 19 nt, Artificial Sequence
  Description of Artificial Sequence: Synthetic oligonucleotide
  Antisense strand to SEQ ID NO: 1268908
cuuaugccuagaauggagg

SEQ ID NO: 1268910 - RNA, 19 nt, Artificial Sequence
  Description of Artificial Sequence: Synthetic oligonucleotide
  Sense strand starting at position 1637 of SEQ ID NO: 1241390
cggagaaaggcucggaaau

SEQ ID NO: 1268911 - RNA, 19 nt, Artificial Sequence
  Description of Artificial Sequence: Synthetic oligonucleotide
  Antisense strand to SEQ ID NO: 1268910
auuuccgagccuuucuccg

SEQ ID NO: 1268912 - RNA, 19 nt, Artificial Sequence
  Description of Artificial Sequence: Synthetic oligonucleotide
  Sense strand starting at position 1638 of SEQ ID NO: 1241390
ggagaaaggcucggaaauu

SEQ ID NO: 1268913 - RNA, 19 nt, Artificial Sequence
  Description of Artificial Sequence: Synthetic oligonucleotide
  Antisense strand to SEQ ID NO: 1268912
aauuuccgagccuuucucc

SEQ ID NO: 1268914 - RNA, 19 nt, Artificial Sequence
  Description of Artificial Sequence: Synthetic oligonucleotide
  Sense strand starting at position 2129 of SEQ ID NO: 1241390
gcuugacaucuggaagcaa

SEQ ID NO: 1268915 - RNA, 19 nt, Artificial Sequence
  Description of Artificial Sequence: Synthetic oligonucleotide
  Antisense strand to SEQ ID NO: 1268914
uugcuuccagaugucaagc

SEQ ID NO: 1268916 - RNA, 19 nt, Artificial Sequence
  Description of Artificial Sequence: Synthetic oligonucleotide
  Sense strand starting at position 2144 of SEQ ID NO: 1241390
gcaaccuccgguuauuaaa

SEQ ID NO: 1268917 - RNA, 19 nt, Artificial Sequence
  Description of Artificial Sequence: Synthetic oligonucleotide
  Antisense strand to SEQ ID NO: 1268916
uuuaauaaccggagguugc

SEQ ID NO: 1268918 - RNA, 19 nt, Artificial Sequence
  Description of Artificial Sequence: Synthetic oligonucleotide
  Sense strand starting at position 2222 of SEQ ID NO: 1241390
auuuguagcucuguuuaaa

SEQ ID NO: 1268919 - RNA, 19 nt, Artificial Sequence
  Description of Artificial Sequence: Synthetic oligonucleotide
  Antisense strand to SEQ ID NO: 1268918
uuuaaacagagcuacaaau

SEQ ID NO: 1268920 - RNA, 19 nt, Artificial Sequence
  Description of Artificial Sequence: Synthetic oligonucleotide
  Sense strand starting at position 2225 of SEQ ID NO: 1241390
uguagcucuguuuaaauau

SEQ ID NO: 1268921 - RNA, 19 nt, Artificial Sequence
  Description of Artificial Sequence: Synthetic oligonucleotide
  Antisense strand to SEQ ID NO: 1268920
auauuuaaacagagcuaca

SEQ ID NO: 1268922 - RNA, 19 nt, Artificial Sequence
  Description of Artificial Sequence: Synthetic oligonucleotide
  Sense strand starting at position 2365 of SEQ ID NO: 1241390
uugugugggaagcaagaua

SEQ ID NO: 1268923 - RNA, 19 nt, Artificial Sequence
  Description of Artificial Sequence: Synthetic oligonucleotide
  Antisense strand to SEQ ID NO: 1268922
uaucuugcuucccacacaa

SEQ ID NO: 1268924 - RNA, 19 nt, Artificial Sequence
  Description of Artificial Sequence: Synthetic oligonucleotide
  Sense strand starting at position 2373 of SEQ ID NO: 1241390
gaagcaagauaagugguau

SEQ ID NO: 1268925 - RNA, 19 nt, Artificial Sequence
  Description of Artificial Sequence: Synthetic oligonucleotide
  Antisense strand to SEQ ID NO: 1268924
auaccacuuaucuugcuuc

SEQ ID NO: 1268926 - RNA, 19 nt, Artificial Sequence
  Description of Artificial Sequence: Synthetic oligonucleotide
  Sense strand starting at position 2385 of SEQ ID NO: 1241390
gugguauuguuuccauuug

SEQ ID NO: 1268927 - RNA, 19 nt, Artificial Sequence
  Description of Artificial Sequence: Synthetic oligonucleotide
  Antisense strand to SEQ ID NO: 1268926
caaauggaaacaauaccac

SEQ ID NO: 1268928 - RNA, 19 nt, Artificial Sequence
  Description of Artificial Sequence: Synthetic oligonucleotide
  Sense strand starting at position 2426 of SEQ ID NO: 1241390
agguguaauaaaugguuua

SEQ ID NO: 1268929 - RNA, 19 nt, Artificial Sequence
  Description of Artificial Sequence: Synthetic oligonucleotide
  Antisense strand to SEQ ID NO: 1268928
uaaaccauuuauuacaccu

SEQ ID NO: 1268930 - RNA, 19 nt, Artificial Sequence
  Description of Artificial Sequence: Synthetic oligonucleotide
  Sense strand starting at position 2427 of SEQ ID NO: 1241390
gguguaauaaaugguuuac

SEQ ID NO: 1268931 - RNA, 19 nt, Artificial Sequence
  Description of Artificial Sequence: Synthetic oligonucleotide
  Antisense strand to SEQ ID NO: 1268930
guaaaccauuuauuacacc

SEQ ID NO: 1268932 - RNA, 19 nt, Artificial Sequence
  Description of Artificial Sequence: Synthetic oligonucleotide
  Sense strand starting at position 2518 of SEQ ID NO: 1241390
ucaaauagcugaguaguaa

SEQ ID NO: 1268933 - RNA, 19 nt, Artificial Sequence
  Description of Artificial Sequence: Synthetic oligonucleotide
  Antisense strand to SEQ ID NO: 1268932
uuacuacucagcuauuuga

SEQ ID NO: 1268934 - RNA, 19 nt, Artificial Sequence
  Description of Artificial Sequence: Synthetic oligonucleotide
  Sense strand starting at position 2519 of SEQ ID NO: 1241390
caaauagcugaguaguaau

SEQ ID NO: 1268935 - RNA, 19 nt, Artificial Sequence
  Description of Artificial Sequence: Synthetic oligonucleotide
  Antisense strand to SEQ ID NO: 1268934
auuacuacucagcuauuug

SEQ ID NO: 1268936 - RNA, 19 nt, Artificial Sequence
  Description of Artificial Sequence: Synthetic oligonucleotide
  Sense strand starting at position 2577 of SEQ ID NO: 1241390
ccaauaaucccgcaaagug

SEQ ID NO: 1268937 - RNA, 19 nt, Artificial Sequence
  Description of Artificial Sequence: Synthetic oligonucleotide
  Antisense strand to SEQ ID NO: 1268936
cacuuugcgggauuauugg

SEQ ID NO: 1268938 - RNA, 19 nt, Artificial Sequence
  Description of Artificial Sequence: Synthetic oligonucleotide
  Sense strand starting at position 2877 of SEQ ID NO: 1241390
gacacugguuggcugagau

SEQ ID NO: 1268939 - RNA, 19 nt, Artificial Sequence
  Description of Artificial Sequence: Synthetic oligonucleotide
  Antisense strand to SEQ ID NO: 1268938
aucucagccaaccaguguc

SEQ ID NO: 1268940 - RNA, 19 nt, Artificial Sequence
  Description of Artificial Sequence: Synthetic oligonucleotide
  Sense strand starting at position 2909 of SEQ ID NO: 1241390
gcugauagcccugaaagca

SEQ ID NO: 1268941 - RNA, 19 nt, Artificial Sequence
  Description of Artificial Sequence: Synthetic oligonucleotide
  Antisense strand to SEQ ID NO: 1268940
ugcuuucagggcuaucagc

SEQ ID NO: 1268942 - RNA, 19 nt, Artificial Sequence
  Description of Artificial Sequence: Synthetic oligonucleotide
  Sense strand starting at position 3010 of SEQ ID NO: 1241390
ccugaaaccucauugcaag

SEQ ID NO: 1268943 - RNA, 19 nt, Artificial Sequence
  Description of Artificial Sequence: Synthetic oligonucleotide
  Antisense strand to SEQ ID NO: 1268942
cuugcaaugagguuucagg

SEQ ID NO: 1268944 - RNA, 19 nt, Artificial Sequence
  Description of Artificial Sequence: Synthetic oligonucleotide
  Sense strand starting at position 3064 of SEQ ID NO: 1241390
ucacacauguuacuggaua

SEQ ID NO: 1268945 - RNA, 19 nt, Artificial Sequence
  Description of Artificial Sequence: Synthetic oligonucleotide
  Antisense strand to SEQ ID NO: 1268944
uauccaguaacauguguga

SEQ ID NO: 1268946 - RNA, 19 nt, Artificial Sequence
  Description of Artificial Sequence: Synthetic oligonucleotide
  Sense strand starting at position 3077 of SEQ ID NO: 1241390
uggauaggacuguguguua

SEQ ID NO: 1268947 - RNA, 19 nt, Artificial Sequence
  Description of Artificial Sequence: Synthetic oligonucleotide
  Antisense strand to SEQ ID NO: 1268946
uaacacacaguccuaucca

SEQ ID NO: 1268948 - RNA, 19 nt, Artificial Sequence
  Description of Artificial Sequence: Synthetic oligonucleotide
  Sense strand starting at position 3089 of SEQ ID NO: 1241390
uguguuagcaugccuguga

SEQ ID NO: 1268949 - RNA, 19 nt, Artificial Sequence
  Description of Artificial Sequence: Synthetic oligonucleotide
  Antisense strand to SEQ ID NO: 1268948
ucacaggcaugcuaacaca

SEQ ID NO: 1268950 - RNA, 19 nt, Artificial Sequence
  Description of Artificial Sequence: Synthetic oligonucleotide
  Sense strand starting at position 3113 of SEQ ID NO: 1241390
agagcacuggccuggauau

SEQ ID NO: 1268951 - RNA, 19 nt, Artificial Sequence
  Description of Artificial Sequence: Synthetic oligonucleotide
  Antisense strand to SEQ ID NO: 1268950
auauccaggccagugcucu

SEQ ID NO: 1268952 - RNA, 19 nt, Artificial Sequence
  Description of Artificial Sequence: Synthetic oligonucleotide
  Sense strand starting at position 3215 of SEQ ID NO: 1241390
ccuuguaauuacuuuagag

SEQ ID NO: 1268953 - RNA, 19 nt, Artificial Sequence
  Description of Artificial Sequence: Synthetic oligonucleotide
  Antisense strand to SEQ ID NO: 1268952
cucuaaaguaauuacaagg

SEQ ID NO: 1268954 - RNA, 19 nt, Artificial Sequence
  Description of Artificial Sequence: Synthetic oligonucleotide
  Sense strand starting at position 3257 of SEQ ID NO: 1241390
acuugcuucucagugagaa

SEQ ID NO: 1268955 - RNA, 19 nt, Artificial Sequence
  Description of Artificial Sequence: Synthetic oligonucleotide
  Antisense strand to SEQ ID NO: 1268954
uucucacugagaagcaagu

SEQ ID NO: 1268956 - RNA, 19 nt, Artificial Sequence
  Description of Artificial Sequence: Synthetic oligonucleotide
  Sense strand starting at position 3267 of SEQ ID NO: 1241390
cagugagaauacuuuguua

SEQ ID NO: 1268957 - RNA, 19 nt, Artificial Sequence
  Description of Artificial Sequence: Synthetic oligonucleotide
  Antisense strand to SEQ ID NO: 1268956
uaacaaaguauucucacug

SEQ ID NO: 1268958 - RNA, 19 nt, Artificial Sequence
  Description of Artificial Sequence: Synthetic oligonucleotide
  Sense strand starting at position 3269 of SEQ ID NO: 1241390
gugagaauacuuuguuaga

SEQ ID NO: 1268959 - RNA, 19 nt, Artificial Sequence
  Description of Artificial Sequence: Synthetic oligonucleotide
  Antisense strand to SEQ ID NO: 1268958
ucuaacaaaguauucucac

SEQ ID NO: 1268960 - RNA, 19 nt, Artificial Sequence
  Description of Artificial Sequence: Synthetic oligonucleotide
  Sense strand starting at position 3270 of SEQ ID NO: 1241390
ugagaauacuuuguuagau

SEQ ID NO: 1268961 - RNA, 19 nt, Artificial Sequence
  Description of Artificial Sequence: Synthetic oligonucleotide
  Antisense strand to SEQ ID NO: 1268960
aucuaacaaaguauucuca

SEQ ID NO: 1268962 - RNA, 19 nt, Artificial Sequence
  Description of Artificial Sequence: Synthetic oligonucleotide
  Sense strand starting at position 3271 of SEQ ID NO: 1241390
gagaauacuuuguuagauu

SEQ ID NO: 1268963 - RNA, 19 nt, Artificial Sequence
  Description of Artificial Sequence: Synthetic oligonucleotide
  Antisense strand to SEQ ID NO: 1268962
aaucuaacaaaguauucuc

SEQ ID NO: 1268964 - RNA, 19 nt, Artificial Sequence
  Description of Artificial Sequence: Synthetic oligonucleotide
  Sense strand starting at position 3446 of SEQ ID NO: 1241390
accuuauagucaguuucca

SEQ ID NO: 1268965 - RNA, 19 nt, Artificial Sequence
  Description of Artificial Sequence: Synthetic oligonucleotide
  Antisense strand to SEQ ID NO: 1268964
uggaaacugacuauaaggu

SEQ ID NO: 1268966 - RNA, 19 nt, Artificial Sequence
  Description of Artificial Sequence: Synthetic oligonucleotide
  Sense strand starting at position 37 of SEQ ID NO: 1241391
gacgcugugcaagcuuaua

SEQ ID NO: 1268967 - RNA, 19 nt, Artificial Sequence
  Description of Artificial Sequence: Synthetic oligonucleotide
  Antisense strand to SEQ ID NO: 1268966
uauaagcuugcacagcguc

SEQ ID NO: 1268968 - RNA, 19 nt, Artificial Sequence
  Description of Artificial Sequence: Synthetic oligonucleotide
  Sense strand starting at position 39 of SEQ ID NO: 1241391
cgcugugcaagcuuauauu

SEQ ID NO: 1268969 - RNA, 19 nt, Artificial Sequence
  Description of Artificial Sequence: Synthetic oligonucleotide
  Antisense strand to SEQ ID NO: 1268968
aauauaagcuugcacagcg

SEQ ID NO: 1268970 - RNA, 19 nt, Artificial Sequence
  Description of Artificial Sequence: Synthetic oligonucleotide
  Sense strand starting at position 284 of SEQ ID NO: 1241391
caaaguggguucccuaaua

SEQ ID NO: 1268971 - RNA, 19 nt, Artificial Sequence
  Description of Artificial Sequence: Synthetic oligonucleotide
  Antisense strand to SEQ ID NO: 1268970
uauuagggaacccacuuug

SEQ ID NO: 1268972 - RNA, 19 nt, Artificial Sequence
  Description of Artificial Sequence: Synthetic oligonucleotide
  Sense strand starting at position 354 of SEQ ID NO: 1241391
acgguuuacuuucuacaga

SEQ ID NO: 1268973 - RNA, 19 nt, Artificial Sequence
  Description of Artificial Sequence: Synthetic oligonucleotide
  Antisense strand to SEQ ID NO: 1268972
ucuguagaaaguaaaccgu

SEQ ID NO: 1268974 - RNA, 19 nt, Artificial Sequence
  Description of Artificial Sequence: Synthetic oligonucleotide
  Sense strand starting at position 357 of SEQ ID NO: 1241391
guuuacuuucuacagacuu

SEQ ID NO: 1268975 - RNA, 19 nt, Artificial Sequence
  Description of Artificial Sequence: Synthetic oligonucleotide
  Antisense strand to SEQ ID NO: 1268974
aagucuguagaaaguaaac

SEQ ID NO: 1268976 - RNA, 19 nt, Artificial Sequence
  Description of Artificial Sequence: Synthetic oligonucleotide
  Sense strand starting at position 370 of SEQ ID NO: 1241391
agacuucuugcagacuuua

SEQ ID NO: 1268977 - RNA, 19 nt, Artificial Sequence
  Description of Artificial Sequence: Synthetic oligonucleotide
  Antisense strand to SEQ ID NO: 1268976
uaaagucugcaagaagucu

SEQ ID NO: 1268978 - RNA, 19 nt, Artificial Sequence
  Description of Artificial Sequence: Synthetic oligonucleotide
  Sense strand starting at position 375 of SEQ ID NO: 1241391
ucuugcagacuuuaaugua

SEQ ID NO: 1268979 - RNA, 19 nt, Artificial Sequence
  Description of Artificial Sequence: Synthetic oligonucleotide
  Antisense strand to SEQ ID NO: 1268978
uacauuaaagucugcaaga

SEQ ID NO: 1268980 - RNA, 19 nt, Artificial Sequence
  Description of Artificial Sequence: Synthetic oligonucleotide
  Sense strand starting at position 385 of SEQ ID NO: 1241391
uuuaauguacaaugacagu

SEQ ID NO: 1268981 - RNA, 19 nt, Artificial Sequence
  Description of Artificial Sequence: Synthetic oligonucleotide
  Antisense strand to SEQ ID NO: 1268980
acugucauuguacauuaaa

SEQ ID NO: 1268982 - RNA, 19 nt, Artificial Sequence
  Description of Artificial Sequence: Synthetic oligonucleotide
  Sense strand starting at position 441 of SEQ ID NO: 1241391
ccaaguuuaccuggcauca

SEQ ID NO: 1268983 - RNA, 19 nt, Artificial Sequence
  Description of Artificial Sequence: Synthetic oligonucleotide
  Antisense strand to SEQ ID NO: 1268982
ugaugccagguaaacuugg

SEQ ID NO: 1268984 - RNA, 19 nt, Artificial Sequence
  Description of Artificial Sequence: Synthetic oligonucleotide
  Sense strand starting at position 486 of SEQ ID NO: 1241391
augagcauugcacagaaca

SEQ ID NO: 1268985 - RNA, 19 nt, Artificial Sequence
  Description of Artificial Sequence: Synthetic oligonucleotide
  Antisense strand to SEQ ID NO: 1268984
uguucugugcaaugcucau

SEQ ID NO: 1268986 - RNA, 19 nt, Artificial Sequence
  Description of Artificial Sequence: Synthetic oligonucleotide
  Sense strand starting at position 562 of SEQ ID NO: 1241391
cuggaagacagcugaguua

SEQ ID NO: 1268987 - RNA, 19 nt, Artificial Sequence
  Description of Artificial Sequence: Synthetic oligonucleotide
  Antisense strand to SEQ ID NO: 1268986
uaacucagcugucuuccag

SEQ ID NO: 1268988 - RNA, 19 nt, Artificial Sequence
  Description of Artificial Sequence: Synthetic oligonucleotide
  Sense strand starting at position 664 of SEQ ID NO: 1241391
agagucaugaccuguagug

SEQ ID NO: 1268989 - RNA, 19 nt, Artificial Sequence
  Description of Artificial Sequence: Synthetic oligonucleotide
  Antisense strand to SEQ ID NO: 1268988
cacuacaggucaugacucu

SEQ ID NO: 1268990 - RNA, 19 nt, Artificial Sequence
  Description of Artificial Sequence: Synthetic oligonucleotide
  Sense strand starting at position 673 of SEQ ID NO: 1241391
accuguaguguccacacua

SEQ ID NO: 1268991 - RNA, 19 nt, Artificial Sequence
  Description of Artificial Sequence: Synthetic oligonucleotide
  Antisense strand to SEQ ID NO: 1268990
uaguguggacacuacaggu

SEQ ID NO: 1268992 - RNA, 19 nt, Artificial Sequence
  Description of Artificial Sequence: Synthetic oligonucleotide
  Sense strand starting at position 787 of SEQ ID NO: 1241391
gaaaucacaugucuggaau

SEQ ID NO: 1268993 - RNA, 19 nt, Artificial Sequence
  Description of Artificial Sequence: Synthetic oligonucleotide
  Antisense strand to SEQ ID NO: 1268992
auuccagacaugugauuuc

SEQ ID NO: 1268994 - RNA, 19 nt, Artificial Sequence
  Description of Artificial Sequence: Synthetic oligonucleotide
  Sense strand starting at position 1047 of SEQ ID NO: 1241391
ggcaguaucaauugguauu

SEQ ID NO: 1268995 - RNA, 19 nt, Artificial Sequence
  Description of Artificial Sequence: Synthetic oligonucleotide
  Antisense strand to SEQ ID NO: 1268994
aauaccaauugauacugcc

SEQ ID NO: 1268996 - RNA, 19 nt, Artificial Sequence
  Description of Artificial Sequence: Synthetic oligonucleotide
  Sense strand starting at position 1048 of SEQ ID NO: 1241391
gcaguaucaauugguauug

SEQ ID NO: 1268997 - RNA, 19 nt, Artificial Sequence
  Description of Artificial Sequence: Synthetic oligonucleotide
  Antisense strand to SEQ ID NO: 1268996
caauaccaauugauacugc

SEQ ID NO: 1268998 - RNA, 19 nt, Artificial Sequence
  Description of Artificial Sequence: Synthetic oligonucleotide
  Sense strand starting at position 1058 of SEQ ID NO: 1241391
uugguauugggaugcuuca

SEQ ID NO: 1268999 - RNA, 19 nt, Artificial Sequence
  Description of Artificial Sequence: Synthetic oligonucleotide
  Antisense strand to SEQ ID NO: 1268998
ugaagcaucccaauaccaa

SEQ ID NO: 1269000 - RNA, 19 nt, Artificial Sequence
  Description of Artificial Sequence: Synthetic oligonucleotide
  Sense strand starting at position 1126 of SEQ ID NO: 1241391
ggccauuauagggauguuu

SEQ ID NO: 1269001 - RNA, 19 nt, Artificial Sequence
  Description of Artificial Sequence: Synthetic oligonucleotide
  Antisense strand to SEQ ID NO: 1269000
aaacaucccuauaauggcc

SEQ ID NO: 1269002 - RNA, 19 nt, Artificial Sequence
  Description of Artificial Sequence: Synthetic oligonucleotide
  Sense strand starting at position 1377 of SEQ ID NO: 1241391
gggaaaguaagcuggaauu

SEQ ID NO: 1269003 - RNA, 19 nt, Artificial Sequence
  Description of Artificial Sequence: Synthetic oligonucleotide
  Antisense strand to SEQ ID NO: 1269002
aauuccagcuuacuuuccc

SEQ ID NO: 1269004 - RNA, 19 nt, Artificial Sequence
  Description of Artificial Sequence: Synthetic oligonucleotide
  Sense strand starting at position 1453 of SEQ ID NO: 1241391
gcagcagacucacucauau

SEQ ID NO: 1269005 - RNA, 19 nt, Artificial Sequence
  Description of Artificial Sequence: Synthetic oligonucleotide
  Antisense strand to SEQ ID NO: 1269004
auaugagugagucugcugc

SEQ ID NO: 1269006 - RNA, 19 nt, Artificial Sequence
  Description of Artificial Sequence: Synthetic oligonucleotide
  Sense strand starting at position 2038 of SEQ ID NO: 1241391
uagggagugacuugagguu

SEQ ID NO: 1269007 - RNA, 19 nt, Artificial Sequence
  Description of Artificial Sequence: Synthetic oligonucleotide
  Antisense strand to SEQ ID NO: 1269006
aaccucaagucacucccua

SEQ ID NO: 1269008 - RNA, 19 nt, Artificial Sequence
  Description of Artificial Sequence: Synthetic oligonucleotide
  Sense strand starting at position 2040 of SEQ ID NO: 1241391
gggagugacuugagguuaa

SEQ ID NO: 1269009 - RNA, 19 nt, Artificial Sequence
  Description of Artificial Sequence: Synthetic oligonucleotide
  Antisense strand to SEQ ID NO: 1269008
uuaaccucaagucacuccc

SEQ ID NO: 1269010 - RNA, 19 nt, Artificial Sequence
  Description of Artificial Sequence: Synthetic oligonucleotide
  Sense strand starting at position 2108 of SEQ ID NO: 1241391
ugcaauacucauggaaguu

SEQ ID NO: 1269011 - RNA, 19 nt, Artificial Sequence
  Description of Artificial Sequence: Synthetic oligonucleotide
  Antisense strand to SEQ ID NO: 1269010
aacuuccaugaguauugca

SEQ ID NO: 1269012 - RNA, 19 nt, Artificial Sequence
  Description of Artificial Sequence: Synthetic oligonucleotide
  Sense strand starting at position 2109 of SEQ ID NO: 1241391
gcaauacucauggaaguug

SEQ ID NO: 1269013 - RNA, 19 nt, Artificial Sequence
  Description of Artificial Sequence: Synthetic oligonucleotide
  Antisense strand to SEQ ID NO: 1269012
caacuuccaugaguauugc

SEQ ID NO: 1269014 - RNA, 19 nt, Artificial Sequence
  Description of Artificial Sequence: Synthetic oligonucleotide
  Sense strand starting at position 2120 of SEQ ID NO: 1241391
ggaaguugugaugaccauc

SEQ ID NO: 1269015 - RNA, 19 nt, Artificial Sequence
  Description of Artificial Sequence: Synthetic oligonucleotide
  Antisense strand to SEQ ID NO: 1269014
gauggucaucacaacuucc

SEQ ID NO: 1269016 - RNA, 19 nt, Artificial Sequence
  Description of Artificial Sequence: Synthetic oligonucleotide
  Sense strand starting at position 2123 of SEQ ID NO: 1241391
aguugugaugaccaucauu

SEQ ID NO: 1269017 - RNA, 19 nt, Artificial Sequence
  Description of Artificial Sequence: Synthetic oligonucleotide
  Antisense strand to SEQ ID NO: 1269016
aaugauggucaucacaacu

SEQ ID NO: 1269018 - RNA, 19 nt, Artificial Sequence
  Description of Artificial Sequence: Synthetic oligonucleotide
  Sense strand starting at position 2151 of SEQ ID NO: 1241391
guagcugauuggguaaacu

SEQ ID NO: 1269019 - RNA, 19 nt, Artificial Sequence
  Description of Artificial Sequence: Synthetic oligonucleotide
  Antisense strand to SEQ ID NO: 1269018
aguuuacccaaucagcuac

SEQ ID NO: 1269020 - RNA, 19 nt, Artificial Sequence
  Description of Artificial Sequence: Synthetic oligonucleotide
  Sense strand starting at position 2162 of SEQ ID NO: 1241391
gguaaacuuugcucuuuga

SEQ ID NO: 1269021 - RNA, 19 nt, Artificial Sequence
  Description of Artificial Sequence: Synthetic oligonucleotide
  Antisense strand to SEQ ID NO: 1269020
ucaaagagcaaaguuuacc

SEQ ID NO: 1269022 - RNA, 19 nt, Artificial Sequence
  Description of Artificial Sequence: Synthetic oligonucleotide
  Sense strand starting at position 2196 of SEQ ID NO: 1241391
gggucaaagcaauaacagu

SEQ ID NO: 1269023 - RNA, 19 nt, Artificial Sequence
  Description of Artificial Sequence: Synthetic oligonucleotide
  Antisense strand to SEQ ID NO: 1269022
acuguuauugcuuugaccc

SEQ ID NO: 1269024 - RNA, 19 nt, Artificial Sequence
  Description of Artificial Sequence: Synthetic oligonucleotide
  Sense strand starting at position 2248 of SEQ ID NO: 1241391
cgggauuucccugguuggu

SEQ ID NO: 1269025 - RNA, 19 nt, Artificial Sequence
  Description of Artificial Sequence: Synthetic oligonucleotide
  Antisense strand to SEQ ID NO: 1269024
accaaccagggaaaucccg

SEQ ID NO: 1269026 - RNA, 19 nt, Artificial Sequence
  Description of Artificial Sequence: Synthetic oligonucleotide
  Sense strand starting at position 2250 of SEQ ID NO: 1241391
ggauuucccugguugguuu

SEQ ID NO: 1269027 - RNA, 19 nt, Artificial Sequence
  Description of Artificial Sequence: Synthetic oligonucleotide
  Antisense strand to SEQ ID NO: 1269026
aaaccaaccagggaaaucc

SEQ ID NO: 1269028 - RNA, 19 nt, Artificial Sequence
  Description of Artificial Sequence: Synthetic oligonucleotide
  Sense strand starting at position 2389 of SEQ ID NO: 1241391
ucauccaccuucgugauua

SEQ ID NO: 1269029 - RNA, 19 nt, Artificial Sequence
  Description of Artificial Sequence: Synthetic oligonucleotide
  Antisense strand to SEQ ID NO: 1269028
uaaucacgaagguggauga

SEQ ID NO: 1269030 - RNA, 19 nt, Artificial Sequence
  Description of Artificial Sequence: Synthetic oligonucleotide
  Sense strand starting at position 2391 of SEQ ID NO: 1241391
auccaccuucgugauuauu

SEQ ID NO: 1269031 - RNA, 19 nt, Artificial Sequence
  Description of Artificial Sequence: Synthetic oligonucleotide
  Antisense strand to SEQ ID NO: 1269030
aauaaucacgaagguggau

SEQ ID NO: 1269032 - RNA, 19 nt, Artificial Sequence
  Description of Artificial Sequence: Synthetic oligonucleotide
  Sense strand starting at position 2393 of SEQ ID NO: 1241391
ccaccuucgugauuauuuc

SEQ ID NO: 1269033 - RNA, 19 nt, Artificial Sequence
  Description of Artificial Sequence: Synthetic oligonucleotide
  Antisense strand to SEQ ID NO: 1269032
gaaauaaucacgaaggugg

SEQ ID NO: 1269034 - RNA, 19 nt, Artificial Sequence
  Description of Artificial Sequence: Synthetic oligonucleotide
  Sense strand starting at position 2397 of SEQ ID NO: 1241391
cuucgugauuauuuccuuu

SEQ ID NO: 1269035 - RNA, 19 nt, Artificial Sequence
  Description of Artificial Sequence: Synthetic oligonucleotide
  Antisense strand to SEQ ID NO: 1269034
aaaggaaauaaucacgaag

SEQ ID NO: 1269036 - RNA, 19 nt, Artificial Sequence
  Description of Artificial Sequence: Synthetic oligonucleotide
  Sense strand starting at position 2609 of SEQ ID NO: 1241391
ggaagacccugacuuccua

SEQ ID NO: 1269037 - RNA, 19 nt, Artificial Sequence
  Description of Artificial Sequence: Synthetic oligonucleotide
  Antisense strand to SEQ ID NO: 1269036
uaggaagucagggucuucc

SEQ ID NO: 1269038 - RNA, 19 nt, Artificial Sequence
  Description of Artificial Sequence: Synthetic oligonucleotide
  Sense strand starting at position 2867 of SEQ ID NO: 1241391
ucagcagguccagaaacau

SEQ ID NO: 1269039 - RNA, 19 nt, Artificial Sequence
  Description of Artificial Sequence: Synthetic oligonucleotide
  Antisense strand to SEQ ID NO: 1269038
auguuucuggaccugcuga

SEQ ID NO: 1269040 - RNA, 19 nt, Artificial Sequence
  Description of Artificial Sequence: Synthetic oligonucleotide
  Sense strand starting at position 2919 of SEQ ID NO: 1241391
cccagaaaggcuuacaguu

SEQ ID NO: 1269041 - RNA, 19 nt, Artificial Sequence
  Description of Artificial Sequence: Synthetic oligonucleotide
  Antisense strand to SEQ ID NO: 1269040
aacuguaagccuuucuggg

SEQ ID NO: 1269042 - RNA, 19 nt, Artificial Sequence
  Description of Artificial Sequence: Synthetic oligonucleotide
  Sense strand starting at position 3118 of SEQ ID NO: 1241391
gcuugauuugcaugugcuu

SEQ ID NO: 1269043 - RNA, 19 nt, Artificial Sequence
  Description of Artificial Sequence: Synthetic oligonucleotide
  Antisense strand to SEQ ID NO: 1269042
aagcacaugcaaaucaagc

SEQ ID NO: 1269044 - RNA, 19 nt, Artificial Sequence
  Description of Artificial Sequence: Synthetic oligonucleotide
  Sense strand starting at position 3404 of SEQ ID NO: 1241391
ugaugaggccaguaucaug

SEQ ID NO: 1269045 - RNA, 19 nt, Artificial Sequence
  Description of Artificial Sequence: Synthetic oligonucleotide
  Antisense strand to SEQ ID NO: 1269044
caugauacuggccucauca

SEQ ID NO: 1269046 - RNA, 19 nt, Artificial Sequence
  Description of Artificial Sequence: Synthetic oligonucleotide
  Sense strand starting at position 232 of SEQ ID NO: 1241392
caaaguggguucccuaaua

SEQ ID NO: 1269047 - RNA, 19 nt, Artificial Sequence
  Description of Artificial Sequence: Synthetic oligonucleotide
  Antisense strand to SEQ ID NO: 1269046
uauuagggaacccacuuug

SEQ ID NO: 1269048 - RNA, 19 nt, Artificial Sequence
  Description of Artificial Sequence: Synthetic oligonucleotide
  Sense strand starting at position 302 of SEQ ID NO: 1241392
acgguuuacuuucuacaga

SEQ ID NO: 1269049 - RNA, 19 nt, Artificial Sequence
  Description of Artificial Sequence: Synthetic oligonucleotide
  Antisense strand to SEQ ID NO: 1269048
ucuguagaaaguaaaccgu

SEQ ID NO: 1269050 - RNA, 19 nt, Artificial Sequence
  Description of Artificial Sequence: Synthetic oligonucleotide
  Sense strand starting at position 305 of SEQ ID NO: 1241392
guuuacuuucuacagacuu

SEQ ID NO: 1269051 - RNA, 19 nt, Artificial Sequence
  Description of Artificial Sequence: Synthetic oligonucleotide
  Antisense strand to SEQ ID NO: 1269050
aagucuguagaaaguaaac

SEQ ID NO: 1269052 - RNA, 19 nt, Artificial Sequence
  Description of Artificial Sequence: Synthetic oligonucleotide
  Sense strand starting at position 318 of SEQ ID NO: 1241392
agacuucuugcagacuuua

SEQ ID NO: 1269053 - RNA, 19 nt, Artificial Sequence
  Description of Artificial Sequence: Synthetic oligonucleotide
  Antisense strand to SEQ ID NO: 1269052
uaaagucugcaagaagucu

SEQ ID NO: 1269054 - RNA, 19 nt, Artificial Sequence
  Description of Artificial Sequence: Synthetic oligonucleotide
  Sense strand starting at position 323 of SEQ ID NO: 1241392
ucuugcagacuuuaaugua

SEQ ID NO: 1269055 - RNA, 19 nt, Artificial Sequence
  Description of Artificial Sequence: Synthetic oligonucleotide
  Antisense strand to SEQ ID NO: 1269054
uacauuaaagucugcaaga

SEQ ID NO: 1269056 - RNA, 19 nt, Artificial Sequence
  Description of Artificial Sequence: Synthetic oligonucleotide
  Sense strand starting at position 333 of SEQ ID NO: 1241392
uuuaauguacaaugacagu

SEQ ID NO: 1269057 - RNA, 19 nt, Artificial Sequence
  Description of Artificial Sequence: Synthetic oligonucleotide
  Antisense strand to SEQ ID NO: 1269056
acugucauuguacauuaaa

SEQ ID NO: 1269058 - RNA, 19 nt, Artificial Sequence
  Description of Artificial Sequence: Synthetic oligonucleotide
  Sense strand starting at position 389 of SEQ ID NO: 1241392
ccaaguuuaccuggcauca

SEQ ID NO: 1269059 - RNA, 19 nt, Artificial Sequence
  Description of Artificial Sequence: Synthetic oligonucleotide
  Antisense strand to SEQ ID NO: 1269058
ugaugccagguaaacuugg

SEQ ID NO: 1269060 - RNA, 19 nt, Artificial Sequence
  Description of Artificial Sequence: Synthetic oligonucleotide
  Sense strand starting at position 434 of SEQ ID NO: 1241392
augagcauugcacagaaca

SEQ ID NO: 1269061 - RNA, 19 nt, Artificial Sequence
  Description of Artificial Sequence: Synthetic oligonucleotide
  Antisense strand to SEQ ID NO: 1269060
uguucugugcaaugcucau

SEQ ID NO: 1269062 - RNA, 19 nt, Artificial Sequence
  Description of Artificial Sequence: Synthetic oligonucleotide
  Sense strand starting at position 510 of SEQ ID NO: 1241392
cuggaagacagcugaguua

SEQ ID NO: 1269063 - RNA, 19 nt, Artificial Sequence
  Description of Artificial Sequence: Synthetic oligonucleotide
  Antisense strand to SEQ ID NO: 1269062
uaacucagcugucuuccag

SEQ ID NO: 1269064 - RNA, 19 nt, Artificial Sequence
  Description of Artificial Sequence: Synthetic oligonucleotide
  Sense strand starting at position 612 of SEQ ID NO: 1241392
agagucaugaccuguagug

SEQ ID NO: 1269065 - RNA, 19 nt, Artificial Sequence
  Description of Artificial Sequence: Synthetic oligonucleotide
  Antisense strand to SEQ ID NO: 1269064
cacuacaggucaugacucu

SEQ ID NO: 1269066 - RNA, 19 nt, Artificial Sequence
  Description of Artificial Sequence: Synthetic oligonucleotide
  Sense strand starting at position 621 of SEQ ID NO: 1241392
accuguaguguccacacua

SEQ ID NO: 1269067 - RNA, 19 nt, Artificial Sequence
  Description of Artificial Sequence: Synthetic oligonucleotide
  Antisense strand to SEQ ID NO: 1269066
uaguguggacacuacaggu

SEQ ID NO: 1269068 - RNA, 19 nt, Artificial Sequence
  Description of Artificial Sequence: Synthetic oligonucleotide
  Sense strand starting at position 735 of SEQ ID NO: 1241392
gaaaucacaugucuggaau

SEQ ID NO: 1269069 - RNA, 19 nt, Artificial Sequence
  Description of Artificial Sequence: Synthetic oligonucleotide
  Antisense strand to SEQ ID NO: 1269068
auuccagacaugugauuuc

SEQ ID NO: 1269070 - RNA, 19 nt, Artificial Sequence
  Description of Artificial Sequence: Synthetic oligonucleotide
  Sense strand starting at position 995 of SEQ ID NO: 1241392
ggcaguaucaauugguauu

SEQ ID NO: 1269071 - RNA, 19 nt, Artificial Sequence
  Description of Artificial Sequence: Synthetic oligonucleotide
  Antisense strand to SEQ ID NO: 1269070
aauaccaauugauacugcc

SEQ ID NO: 1269072 - RNA, 19 nt, Artificial Sequence
  Description of Artificial Sequence: Synthetic oligonucleotide
  Sense strand starting at position 996 of SEQ ID NO: 1241392
gcaguaucaauugguauug

SEQ ID NO: 1269073 - RNA, 19 nt, Artificial Sequence
  Description of Artificial Sequence: Synthetic oligonucleotide
  Antisense strand to SEQ ID NO: 1269072
caauaccaauugauacugc

SEQ ID NO: 1269074 - RNA, 19 nt, Artificial Sequence
  Description of Artificial Sequence: Synthetic oligonucleotide
  Sense strand starting at position 1006 of SEQ ID NO: 1241392
uugguauugggaugcuuca

SEQ ID NO: 1269075 - RNA, 19 nt, Artificial Sequence
  Description of Artificial Sequence: Synthetic oligonucleotide
  Antisense strand to SEQ ID NO: 1269074
ugaagcaucccaauaccaa

SEQ ID NO: 1269076 - RNA, 19 nt, Artificial Sequence
  Description of Artificial Sequence: Synthetic oligonucleotide
  Sense strand starting at position 1074 of SEQ ID NO: 1241392
ggccauuauagggauguuu

SEQ ID NO: 1269077 - RNA, 19 nt, Artificial Sequence
  Description of Artificial Sequence: Synthetic oligonucleotide
  Antisense strand to SEQ ID NO: 1269076
aaacaucccuauaauggcc

SEQ ID NO: 1269078 - RNA, 19 nt, Artificial Sequence
  Description of Artificial Sequence: Synthetic oligonucleotide
  Sense strand starting at position 1325 of SEQ ID NO: 1241392
gggaaaguaagcuggaauu

SEQ ID NO: 1269079 - RNA, 19 nt, Artificial Sequence
  Description of Artificial Sequence: Synthetic oligonucleotide
  Antisense strand to SEQ ID NO: 1269078
aauuccagcuuacuuuccc

SEQ ID NO: 1269080 - RNA, 19 nt, Artificial Sequence
  Description of Artificial Sequence: Synthetic oligonucleotide
  Sense strand starting at position 1401 of SEQ ID NO: 1241392
gcagcagacucacucauau

SEQ ID NO: 1269081 - RNA, 19 nt, Artificial Sequence
  Description of Artificial Sequence: Synthetic oligonucleotide
  Antisense strand to SEQ ID NO: 1269080
auaugagugagucugcugc

SEQ ID NO: 1269082 - RNA, 19 nt, Artificial Sequence
  Description of Artificial Sequence: Synthetic oligonucleotide
  Sense strand starting at position 1986 of SEQ ID NO: 1241392
uagggagugacuugagguu

SEQ ID NO: 1269083 - RNA, 19 nt, Artificial Sequence
  Description of Artificial Sequence: Synthetic oligonucleotide
  Antisense strand to SEQ ID NO: 1269082
aaccucaagucacucccua

SEQ ID NO: 1269084 - RNA, 19 nt, Artificial Sequence
  Description of Artificial Sequence: Synthetic oligonucleotide
  Sense strand starting at position 1988 of SEQ ID NO: 1241392
gggagugacuugagguuaa

SEQ ID NO: 1269085 - RNA, 19 nt, Artificial Sequence
  Description of Artificial Sequence: Synthetic oligonucleotide
  Antisense strand to SEQ ID NO: 1269084
uuaaccucaagucacuccc

SEQ ID NO: 1269086 - RNA, 19 nt, Artificial Sequence
  Description of Artificial Sequence: Synthetic oligonucleotide
  Sense strand starting at position 2056 of SEQ ID NO: 1241392
ugcaauacucauggaaguu

SEQ ID NO: 1269087 - RNA, 19 nt, Artificial Sequence
  Description of Artificial Sequence: Synthetic oligonucleotide
  Antisense strand to SEQ ID NO: 1269086
aacuuccaugaguauugca

SEQ ID NO: 1269088 - RNA, 19 nt, Artificial Sequence
  Description of Artificial Sequence: Synthetic oligonucleotide
  Sense strand starting at position 2057 of SEQ ID NO: 1241392
gcaauacucauggaaguug

SEQ ID NO: 1269089 - RNA, 19 nt, Artificial Sequence
  Description of Artificial Sequence: Synthetic oligonucleotide
  Antisense strand to SEQ ID NO: 1269088
caacuuccaugaguauugc

SEQ ID NO: 1269090 - RNA, 19 nt, Artificial Sequence
  Description of Artificial Sequence: Synthetic oligonucleotide
  Sense strand starting at position 2068 of SEQ ID NO: 1241392
ggaaguugugaugaccauc

SEQ ID NO: 1269091 - RNA, 19 nt, Artificial Sequence
  Description of Artificial Sequence: Synthetic oligonucleotide
  Antisense strand to SEQ ID NO: 1269090
gauggucaucacaacuucc

SEQ ID NO: 1269092 - RNA, 19 nt, Artificial Sequence
  Description of Artificial Sequence: Synthetic oligonucleotide
  Sense strand starting at position 2071 of SEQ ID NO: 1241392
aguugugaugaccaucauu

SEQ ID NO: 1269093 - RNA, 19 nt, Artificial Sequence
  Description of Artificial Sequence: Synthetic oligonucleotide
  Antisense strand to SEQ ID NO: 1269092
aaugauggucaucacaacu

SEQ ID NO: 1269094 - RNA, 19 nt, Artificial Sequence
  Description of Artificial Sequence: Synthetic oligonucleotide
  Sense strand starting at position 2099 of SEQ ID NO: 1241392
guagcugauuggguaaacu

SEQ ID NO: 1269095 - RNA, 19 nt, Artificial Sequence
  Description of Artificial Sequence: Synthetic oligonucleotide
  Antisense strand to SEQ ID NO: 1269094
aguuuacccaaucagcuac

SEQ ID NO: 1269096 - RNA, 19 nt, Artificial Sequence
  Description of Artificial Sequence: Synthetic oligonucleotide
  Sense strand starting at position 2110 of SEQ ID NO: 1241392
gguaaacuuugcucuuuga

SEQ ID NO: 1269097 - RNA, 19 nt, Artificial Sequence
  Description of Artificial Sequence: Synthetic oligonucleotide
  Antisense strand to SEQ ID NO: 1269096
ucaaagagcaaaguuuacc

SEQ ID NO: 1269098 - RNA, 19 nt, Artificial Sequence
  Description of Artificial Sequence: Synthetic oligonucleotide
  Sense strand starting at position 2144 of SEQ ID NO: 1241392
gggucaaagcaauaacagu

SEQ ID NO: 1269099 - RNA, 19 nt, Artificial Sequence
  Description of Artificial Sequence: Synthetic oligonucleotide
  Antisense strand to SEQ ID NO: 1269098
acuguuauugcuuugaccc

SEQ ID NO: 1269100 - RNA, 19 nt, Artificial Sequence
  Description of Artificial Sequence: Synthetic oligonucleotide
  Sense strand starting at position 2196 of SEQ ID NO: 1241392
cgggauuucccugguuggu

SEQ ID NO: 1269101 - RNA, 19 nt, Artificial Sequence
  Description of Artificial Sequence: Synthetic oligonucleotide
  Antisense strand to SEQ ID NO: 1269100
accaaccagggaaaucccg

SEQ ID NO: 1269102 - RNA, 19 nt, Artificial Sequence
  Description of Artificial Sequence: Synthetic oligonucleotide
  Sense strand starting at position 2198 of SEQ ID NO: 1241392
ggauuucccugguugguuu

SEQ ID NO: 1269103 - RNA, 19 nt, Artificial Sequence
  Description of Artificial Sequence: Synthetic oligonucleotide
  Antisense strand to SEQ ID NO: 1269102
aaaccaaccagggaaaucc

SEQ ID NO: 1269104 - RNA, 19 nt, Artificial Sequence
  Description of Artificial Sequence: Synthetic oligonucleotide
  Sense strand starting at position 2337 of SEQ ID NO: 1241392
ucauccaccuucgugauua

SEQ ID NO: 1269105 - RNA, 19 nt, Artificial Sequence
  Description of Artificial Sequence: Synthetic oligonucleotide
  Antisense strand to SEQ ID NO: 1269104
uaaucacgaagguggauga

SEQ ID NO: 1269106 - RNA, 19 nt, Artificial Sequence
  Description of Artificial Sequence: Synthetic oligonucleotide
  Sense strand starting at position 2339 of SEQ ID NO: 1241392
auccaccuucgugauuauu

SEQ ID NO: 1269107 - RNA, 19 nt, Artificial Sequence
  Description of Artificial Sequence: Synthetic oligonucleotide
  Antisense strand to SEQ ID NO: 1269106
aauaaucacgaagguggau

SEQ ID NO: 1269108 - RNA, 19 nt, Artificial Sequence
  Description of Artificial Sequence: Synthetic oligonucleotide
  Sense strand starting at position 2341 of SEQ ID NO: 1241392
ccaccuucgugauuauuuc

SEQ ID NO: 1269109 - RNA, 19 nt, Artificial Sequence
  Description of Artificial Sequence: Synthetic oligonucleotide
  Antisense strand to SEQ ID NO: 1269108
gaaauaaucacgaaggugg

SEQ ID NO: 1269110 - RNA, 19 nt, Artificial Sequence
  Description of Artificial Sequence: Synthetic oligonucleotide
  Sense strand starting at position 2345 of SEQ ID NO: 1241392
cuucgugauuauuuccuuu

SEQ ID NO: 1269111 - RNA, 19 nt, Artificial Sequence
  Description of Artificial Sequence: Synthetic oligonucleotide
  Antisense strand to SEQ ID NO: 1269110
aaaggaaauaaucacgaag

SEQ ID NO: 1269112 - RNA, 19 nt, Artificial Sequence
  Description of Artificial Sequence: Synthetic oligonucleotide
  Sense strand starting at position 2557 of SEQ ID NO: 1241392
ggaagacccugacuuccua

SEQ ID NO: 1269113 - RNA, 19 nt, Artificial Sequence
  Description of Artificial Sequence: Synthetic oligonucleotide
  Antisense strand to SEQ ID NO: 1269112
uaggaagucagggucuucc

SEQ ID NO: 1269114 - RNA, 19 nt, Artificial Sequence
  Description of Artificial Sequence: Synthetic oligonucleotide
  Sense strand starting at position 2815 of SEQ ID NO: 1241392
ucagcagguccagaaacau

SEQ ID NO: 1269115 - RNA, 19 nt, Artificial Sequence
  Description of Artificial Sequence: Synthetic oligonucleotide
  Antisense strand to SEQ ID NO: 1269114
auguuucuggaccugcuga

SEQ ID NO: 1269116 - RNA, 19 nt, Artificial Sequence
  Description of Artificial Sequence: Synthetic oligonucleotide
  Sense strand starting at position 2867 of SEQ ID NO: 1241392
cccagaaaggcuuacaguu

SEQ ID NO: 1269117 - RNA, 19 nt, Artificial Sequence
  Description of Artificial Sequence: Synthetic oligonucleotide
  Antisense strand to SEQ ID NO: 1269116
aacuguaagccuuucuggg

SEQ ID NO: 1269118 - RNA, 19 nt, Artificial Sequence
  Description of Artificial Sequence: Synthetic oligonucleotide
  Sense strand starting at position 3066 of SEQ ID NO: 1241392
gcuugauuugcaugugcuu

SEQ ID NO: 1269119 - RNA, 19 nt, Artificial Sequence
  Description of Artificial Sequence: Synthetic oligonucleotide
  Antisense strand to SEQ ID NO: 1269118
aagcacaugcaaaucaagc

SEQ ID NO: 1269120 - RNA, 19 nt, Artificial Sequence
  Description of Artificial Sequence: Synthetic oligonucleotide
  Sense strand starting at position 3352 of SEQ ID NO: 1241392
ugaugaggccaguaucaug

SEQ ID NO: 1269121 - RNA, 19 nt, Artificial Sequence
  Description of Artificial Sequence: Synthetic oligonucleotide
  Antisense strand to SEQ ID NO: 1269120
caugauacuggccucauca

SEQ ID NO: 1269122 - RNA, 19 nt, Artificial Sequence
  Description of Artificial Sequence: Synthetic oligonucleotide
  Sense strand starting at position 3489 of SEQ ID NO: 1241392
gggcaugcaucaucucauu

SEQ ID NO: 1269123 - RNA, 19 nt, Artificial Sequence
  Description of Artificial Sequence: Synthetic oligonucleotide
  Antisense strand to SEQ ID NO: 1269122
aaugagaugaugcaugccc

SEQ ID NO: 1269124 - RNA, 19 nt, Artificial Sequence
  Description of Artificial Sequence: Synthetic oligonucleotide
  Sense strand starting at position 3966 of SEQ ID NO: 1241392
gcuggauaccuaugggucu

SEQ ID NO: 1269125 - RNA, 19 nt, Artificial Sequence
  Description of Artificial Sequence: Synthetic oligonucleotide
  Antisense strand to SEQ ID NO: 1269124
agacccauagguauccagc

SEQ ID NO: 1269126 - RNA, 19 nt, Artificial Sequence
  Description of Artificial Sequence: Synthetic oligonucleotide
  Sense strand starting at position 40 of SEQ ID NO: 1241393
gggugugccuucuccaaug

SEQ ID NO: 1269127 - RNA, 19 nt, Artificial Sequence
  Description of Artificial Sequence: Synthetic oligonucleotide
  Antisense strand to SEQ ID NO: 1269126
cauuggagaaggcacaccc

SEQ ID NO: 1269128 - RNA, 19 nt, Artificial Sequence
  Description of Artificial Sequence: Synthetic oligonucleotide
  Sense strand starting at position 42 of SEQ ID NO: 1241393
gugugccuucuccaaugua

SEQ ID NO: 1269129 - RNA, 19 nt, Artificial Sequence
  Description of Artificial Sequence: Synthetic oligonucleotide
  Antisense strand to SEQ ID NO: 1269128
uacauuggagaaggcacac

SEQ ID NO: 1269130 - RNA, 19 nt, Artificial Sequence
  Description of Artificial Sequence: Synthetic oligonucleotide
  Sense strand starting at position 45 of SEQ ID NO: 1241393
ugccuucuccaauguaaug

SEQ ID NO: 1269131 - RNA, 19 nt, Artificial Sequence
  Description of Artificial Sequence: Synthetic oligonucleotide
  Antisense strand to SEQ ID NO: 1269130
cauuacauuggagaaggca

SEQ ID NO: 1269132 - RNA, 19 nt, Artificial Sequence
  Description of Artificial Sequence: Synthetic oligonucleotide
  Sense strand starting at position 97 of SEQ ID NO: 1241393
acaccugcuguuugcaaga

SEQ ID NO: 1269133 - RNA, 19 nt, Artificial Sequence
  Description of Artificial Sequence: Synthetic oligonucleotide
  Antisense strand to SEQ ID NO: 1269132
ucuugcaaacagcaggugu

SEQ ID NO: 1269134 - RNA, 19 nt, Artificial Sequence
  Description of Artificial Sequence: Synthetic oligonucleotide
  Sense strand starting at position 143 of SEQ ID NO: 1241393
ggagucaggucucauuccu

SEQ ID NO: 1269135 - RNA, 19 nt, Artificial Sequence
  Description of Artificial Sequence: Synthetic oligonucleotide
  Antisense strand to SEQ ID NO: 1269134
aggaaugagaccugacucc

SEQ ID NO: 1269136 - RNA, 19 nt, Artificial Sequence
  Description of Artificial Sequence: Synthetic oligonucleotide
  Sense strand starting at position 150 of SEQ ID NO: 1241393
ggucucauuccugacuaca

SEQ ID NO: 1269137 - RNA, 19 nt, Artificial Sequence
  Description of Artificial Sequence: Synthetic oligonucleotide
  Antisense strand to SEQ ID NO: 1269136
uguagucaggaaugagacc

SEQ ID NO: 1269138 - RNA, 19 nt, Artificial Sequence
  Description of Artificial Sequence: Synthetic oligonucleotide
  Sense strand starting at position 319 of SEQ ID NO: 1241393
gcaugaaccgcauaacuuu

SEQ ID NO: 1269139 - RNA, 19 nt, Artificial Sequence
  Description of Artificial Sequence: Synthetic oligonucleotide
  Antisense strand to SEQ ID NO: 1269138
aaaguuaugcgguucaugc

SEQ ID NO: 1269140 - RNA, 19 nt, Artificial Sequence
  Description of Artificial Sequence: Synthetic oligonucleotide
  Sense strand starting at position 373 of SEQ ID NO: 1241393
cgcagagucuauuucaggu

SEQ ID NO: 1269141 - RNA, 19 nt, Artificial Sequence
  Description of Artificial Sequence: Synthetic oligonucleotide
  Antisense strand to SEQ ID NO: 1269140
accugaaauagacucugcg

SEQ ID NO: 1269142 - RNA, 19 nt, Artificial Sequence
  Description of Artificial Sequence: Synthetic oligonucleotide
  Sense strand starting at position 421 of SEQ ID NO: 1241393
gugugucauucgcuugaca

SEQ ID NO: 1269143 - RNA, 19 nt, Artificial Sequence
  Description of Artificial Sequence: Synthetic oligonucleotide
  Antisense strand to SEQ ID NO: 1269142
ugucaagcgaaugacacac

SEQ ID NO: 1269144 - RNA, 19 nt, Artificial Sequence
  Description of Artificial Sequence: Synthetic oligonucleotide
  Sense strand starting at position 423 of SEQ ID NO: 1241393
gugucauucgcuugacagc

SEQ ID NO: 1269145 - RNA, 19 nt, Artificial Sequence
  Description of Artificial Sequence: Synthetic oligonucleotide
  Antisense strand to SEQ ID NO: 1269144
gcugucaagcgaaugacac

SEQ ID NO: 1269146 - RNA, 19 nt, Artificial Sequence
  Description of Artificial Sequence: Synthetic oligonucleotide
  Sense strand starting at position 898 of SEQ ID NO: 1241393
gggcgaguauccugcucca

SEQ ID NO: 1269147 - RNA, 19 nt, Artificial Sequence
  Description of Artificial Sequence: Synthetic oligonucleotide
  Antisense strand to SEQ ID NO: 1269146
uggagcaggauacucgccc

SEQ ID NO: 1269148 - RNA, 19 nt, Artificial Sequence
  Description of Artificial Sequence: Synthetic oligonucleotide
  Sense strand starting at position 900 of SEQ ID NO: 1241393
gcgaguauccugcuccauu

SEQ ID NO: 1269149 - RNA, 19 nt, Artificial Sequence
  Description of Artificial Sequence: Synthetic oligonucleotide
  Antisense strand to SEQ ID NO: 1269148
aauggagcaggauacucgc

SEQ ID NO: 1269150 - RNA, 19 nt, Artificial Sequence
  Description of Artificial Sequence: Synthetic oligonucleotide
  Sense strand starting at position 901 of SEQ ID NO: 1241393
cgaguauccugcuccauuc

SEQ ID NO: 1269151 - RNA, 19 nt, Artificial Sequence
  Description of Artificial Sequence: Synthetic oligonucleotide
  Antisense strand to SEQ ID NO: 1269150
gaauggagcaggauacucg

SEQ ID NO: 1269152 - RNA, 19 nt, Artificial Sequence
  Description of Artificial Sequence: Synthetic oligonucleotide
  Sense strand starting at position 911 of SEQ ID NO: 1241393
gcuccauuccagugccaga

SEQ ID NO: 1269153 - RNA, 19 nt, Artificial Sequence
  Description of Artificial Sequence: Synthetic oligonucleotide
  Antisense strand to SEQ ID NO: 1269152
ucuggcacuggaauggagc

SEQ ID NO: 1269154 - RNA, 19 nt, Artificial Sequence
  Description of Artificial Sequence: Synthetic oligonucleotide
  Sense strand starting at position 1077 of SEQ ID NO: 1241393
gcaguaaugcuguggucac

SEQ ID NO: 1269155 - RNA, 19 nt, Artificial Sequence
  Description of Artificial Sequence: Synthetic oligonucleotide
  Antisense strand to SEQ ID NO: 1269154
gugaccacagcauuacugc

SEQ ID NO: 1269156 - RNA, 19 nt, Artificial Sequence
  Description of Artificial Sequence: Synthetic oligonucleotide
  Sense strand starting at position 1078 of SEQ ID NO: 1241393
caguaaugcuguggucaca

SEQ ID NO: 1269157 - RNA, 19 nt, Artificial Sequence
  Description of Artificial Sequence: Synthetic oligonucleotide
  Antisense strand to SEQ ID NO: 1269156
ugugaccacagcauuacug

SEQ ID NO: 1269158 - RNA, 19 nt, Artificial Sequence
  Description of Artificial Sequence: Synthetic oligonucleotide
  Sense strand starting at position 1229 of SEQ ID NO: 1241393
cuccuuagucauggucacu

SEQ ID NO: 1269159 - RNA, 19 nt, Artificial Sequence
  Description of Artificial Sequence: Synthetic oligonucleotide
  Antisense strand to SEQ ID NO: 1269158
agugaccaugacuaaggag

SEQ ID NO: 1269160 - RNA, 19 nt, Artificial Sequence
  Description of Artificial Sequence: Synthetic oligonucleotide
  Sense strand starting at position 1521 of SEQ ID NO: 1241393
gcugauucauggucaggau

SEQ ID NO: 1269161 - RNA, 19 nt, Artificial Sequence
  Description of Artificial Sequence: Synthetic oligonucleotide
  Antisense strand to SEQ ID NO: 1269160
auccugaccaugaaucagc

SEQ ID NO: 1269162 - RNA, 19 nt, Artificial Sequence
  Description of Artificial Sequence: Synthetic oligonucleotide
  Sense strand starting at position 1860 of SEQ ID NO: 1241393
ggacuuacccggugaggca

SEQ ID NO: 1269163 - RNA, 19 nt, Artificial Sequence
  Description of Artificial Sequence: Synthetic oligonucleotide
  Antisense strand to SEQ ID NO: 1269162
ugccucaccggguaagucc

SEQ ID NO: 1269164 - RNA, 19 nt, Artificial Sequence
  Description of Artificial Sequence: Synthetic oligonucleotide
  Sense strand starting at position 2658 of SEQ ID NO: 1241393
ccucaucugucuccuagau

SEQ ID NO: 1269165 - RNA, 19 nt, Artificial Sequence
  Description of Artificial Sequence: Synthetic oligonucleotide
  Antisense strand to SEQ ID NO: 1269164
aucuaggagacagaugagg

SEQ ID NO: 1269166 - RNA, 19 nt, Artificial Sequence
  Description of Artificial Sequence: Synthetic oligonucleotide
  Sense strand starting at position 2660 of SEQ ID NO: 1241393
ucaucugucuccuagauug

SEQ ID NO: 1269167 - RNA, 19 nt, Artificial Sequence
  Description of Artificial Sequence: Synthetic oligonucleotide
  Antisense strand to SEQ ID NO: 1269166
caaucuaggagacagauga

SEQ ID NO: 1269168 - RNA, 19 nt, Artificial Sequence
  Description of Artificial Sequence: Synthetic oligonucleotide
  Sense strand starting at position 2662 of SEQ ID NO: 1241393
aucugucuccuagauugag

SEQ ID NO: 1269169 - RNA, 19 nt, Artificial Sequence
  Description of Artificial Sequence: Synthetic oligonucleotide
  Antisense strand to SEQ ID NO: 1269168
cucaaucuaggagacagau

SEQ ID NO: 1269170 - RNA, 19 nt, Artificial Sequence
  Description of Artificial Sequence: Synthetic oligonucleotide
  Sense strand starting at position 2904 of SEQ ID NO: 1241393
ccgugugacaugugacaga

SEQ ID NO: 1269171 - RNA, 19 nt, Artificial Sequence
  Description of Artificial Sequence: Synthetic oligonucleotide
  Antisense strand to SEQ ID NO: 1269170
ucugucacaugucacacgg

SEQ ID NO: 1269172 - RNA, 19 nt, Artificial Sequence
  Description of Artificial Sequence: Synthetic oligonucleotide
  Sense strand starting at position 2981 of SEQ ID NO: 1241393
cggauaugacucuguggag

SEQ ID NO: 1269173 - RNA, 19 nt, Artificial Sequence
  Description of Artificial Sequence: Synthetic oligonucleotide
  Antisense strand to SEQ ID NO: 1269172
cuccacagagucauauccg

SEQ ID NO: 1269174 - RNA, 19 nt, Artificial Sequence
  Description of Artificial Sequence: Synthetic oligonucleotide
  Sense strand starting at position 3033 of SEQ ID NO: 1241393
acccguaagggcuguauga

SEQ ID NO: 1269175 - RNA, 19 nt, Artificial Sequence
  Description of Artificial Sequence: Synthetic oligonucleotide
  Antisense strand to SEQ ID NO: 1269174
ucauacagcccuuacgggu

SEQ ID NO: 1269176 - RNA, 19 nt, Artificial Sequence
  Description of Artificial Sequence: Synthetic oligonucleotide
  Sense strand starting at position 3066 of SEQ ID NO: 1241393
cggauaaagugucuccacu

SEQ ID NO: 1269177 - RNA, 19 nt, Artificial Sequence
  Description of Artificial Sequence: Synthetic oligonucleotide
  Antisense strand to SEQ ID NO: 1269176
aguggagacacuuuauccg

SEQ ID NO: 1269178 - RNA, 19 nt, Artificial Sequence
  Description of Artificial Sequence: Synthetic oligonucleotide
  Sense strand starting at position 3333 of SEQ ID NO: 1241393
ccggaaguuugcuggcuca

SEQ ID NO: 1269179 - RNA, 19 nt, Artificial Sequence
  Description of Artificial Sequence: Synthetic oligonucleotide
  Antisense strand to SEQ ID NO: 1269178
ugagccagcaaacuuccgg

SEQ ID NO: 1269180 - RNA, 19 nt, Artificial Sequence
  Description of Artificial Sequence: Synthetic oligonucleotide
  Sense strand starting at position 3469 of SEQ ID NO: 1241393
cugcaauucuuggaaugca

SEQ ID NO: 1269181 - RNA, 19 nt, Artificial Sequence
  Description of Artificial Sequence: Synthetic oligonucleotide
  Antisense strand to SEQ ID NO: 1269180
ugcauuccaagaauugcag

SEQ ID NO: 1269182 - RNA, 19 nt, Artificial Sequence
  Description of Artificial Sequence: Synthetic oligonucleotide
  Sense strand starting at position 3657 of SEQ ID NO: 1241393
ugacucaucugcguuggga

SEQ ID NO: 1269183 - RNA, 19 nt, Artificial Sequence
  Description of Artificial Sequence: Synthetic oligonucleotide
  Antisense strand to SEQ ID NO: 1269182
ucccaacgcagaugaguca

SEQ ID NO: 1269184 - RNA, 19 nt, Artificial Sequence
  Description of Artificial Sequence: Synthetic oligonucleotide
  Sense strand starting at position 3702 of SEQ ID NO: 1241393
aguggguguguuuguugau

SEQ ID NO: 1269185 - RNA, 19 nt, Artificial Sequence
  Description of Artificial Sequence: Synthetic oligonucleotide
  Antisense strand to SEQ ID NO: 1269184
aucaacaaacacacccacu

SEQ ID NO: 1269186 - RNA, 19 nt, Artificial Sequence
  Description of Artificial Sequence: Synthetic oligonucleotide
  Sense strand starting at position 3703 of SEQ ID NO: 1241393
guggguguguuuguugauc

SEQ ID NO: 1269187 - RNA, 19 nt, Artificial Sequence
  Description of Artificial Sequence: Synthetic oligonucleotide
  Antisense strand to SEQ ID NO: 1269186
gaucaacaaacacacccac

SEQ ID NO: 1269188 - RNA, 19 nt, Artificial Sequence
  Description of Artificial Sequence: Synthetic oligonucleotide
  Sense strand starting at position 3714 of SEQ ID NO: 1241393
uguugauccagugaaugga

SEQ ID NO: 1269189 - RNA, 19 nt, Artificial Sequence
  Description of Artificial Sequence: Synthetic oligonucleotide
  Antisense strand to SEQ ID NO: 1269188
uccauucacuggaucaaca

SEQ ID NO: 1269190 - RNA, 19 nt, Artificial Sequence
  Description of Artificial Sequence: Synthetic oligonucleotide
  Sense strand starting at position 3730 of SEQ ID NO: 1241393
ggaggaaugugaggagguu

SEQ ID NO: 1269191 - RNA, 19 nt, Artificial Sequence
  Description of Artificial Sequence: Synthetic oligonucleotide
  Antisense strand to SEQ ID NO: 1269190
aaccuccucacauuccucc

SEQ ID NO: 1269192 - RNA, 19 nt, Artificial Sequence
  Description of Artificial Sequence: Synthetic oligonucleotide
  Sense strand starting at position 2003 of SEQ ID NO: 1241394
gccgauucacuggaguaga

SEQ ID NO: 1269193 - RNA, 19 nt, Artificial Sequence
  Description of Artificial Sequence: Synthetic oligonucleotide
  Antisense strand to SEQ ID NO: 1269192
ucuacuccagugaaucggc

SEQ ID NO: 1269194 - RNA, 19 nt, Artificial Sequence
  Description of Artificial Sequence: Synthetic oligonucleotide
  Sense strand starting at position 2397 of SEQ ID NO: 1241394
cggguauugagcugaugag

SEQ ID NO: 1269195 - RNA, 19 nt, Artificial Sequence
  Description of Artificial Sequence: Synthetic oligonucleotide
  Antisense strand to SEQ ID NO: 1269194
cucaucagcucaauacccg

SEQ ID NO: 1269196 - RNA, 19 nt, Artificial Sequence
  Description of Artificial Sequence: Synthetic oligonucleotide
  Sense strand starting at position 2623 of SEQ ID NO: 1241394
gggcgucugcgcucuuaag

SEQ ID NO: 1269197 - RNA, 19 nt, Artificial Sequence
  Description of Artificial Sequence: Synthetic oligonucleotide
  Antisense strand to SEQ ID NO: 1269196
cuuaagagcgcagacgccc

SEQ ID NO: 1269198 - RNA, 19 nt, Artificial Sequence
  Description of Artificial Sequence: Synthetic oligonucleotide
  Sense strand starting at position 2624 of SEQ ID NO: 1241394
ggcgucugcgcucuuaagu

SEQ ID NO: 1269199 - RNA, 19 nt, Artificial Sequence
  Description of Artificial Sequence: Synthetic oligonucleotide
  Antisense strand to SEQ ID NO: 1269198
acuuaagagcgcagacgcc

SEQ ID NO: 1269200 - RNA, 19 nt, Artificial Sequence
  Description of Artificial Sequence: Synthetic oligonucleotide
  Sense strand starting at position 2689 of SEQ ID NO: 1241394
uuuccacuguccucgcaua

SEQ ID NO: 1269201 - RNA, 19 nt, Artificial Sequence
  Description of Artificial Sequence: Synthetic oligonucleotide
  Antisense strand to SEQ ID NO: 1269200
uaugcgaggacaguggaaa

SEQ ID NO: 1269202 - RNA, 19 nt, Artificial Sequence
  Description of Artificial Sequence: Synthetic oligonucleotide
  Sense strand starting at position 2690 of SEQ ID NO: 1241394
uuccacuguccucgcauaa

SEQ ID NO: 1269203 - RNA, 19 nt, Artificial Sequence
  Description of Artificial Sequence: Synthetic oligonucleotide
  Antisense strand to SEQ ID NO: 1269202
uuaugcgaggacaguggaa

SEQ ID NO: 1269204 - RNA, 19 nt, Artificial Sequence
  Description of Artificial Sequence: Synthetic oligonucleotide
  Sense strand starting at position 2702 of SEQ ID NO: 1241394
cgcauaaagugguuucucu

SEQ ID NO: 1269205 - RNA, 19 nt, Artificial Sequence
  Description of Artificial Sequence: Synthetic oligonucleotide
  Antisense strand to SEQ ID NO: 1269204
agagaaaccacuuuaugcg

SEQ ID NO: 1269206 - RNA, 19 nt, Artificial Sequence
  Description of Artificial Sequence: Synthetic oligonucleotide
  Sense strand starting at position 2744 of SEQ ID NO: 1241394
cccagaguaugacuuaauu

SEQ ID NO: 1269207 - RNA, 19 nt, Artificial Sequence
  Description of Artificial Sequence: Synthetic oligonucleotide
  Antisense strand to SEQ ID NO: 1269206
aauuaagucauacucuggg

SEQ ID NO: 1269208 - RNA, 19 nt, Artificial Sequence
  Description of Artificial Sequence: Synthetic oligonucleotide
  Sense strand starting at position 2771 of SEQ ID NO: 1241394
gccuguuuagcauggagua

SEQ ID NO: 1269209 - RNA, 19 nt, Artificial Sequence
  Description of Artificial Sequence: Synthetic oligonucleotide
  Antisense strand to SEQ ID NO: 1269208
uacuccaugcuaaacaggc

SEQ ID NO: 1269210 - RNA, 19 nt, Artificial Sequence
  Description of Artificial Sequence: Synthetic oligonucleotide
  Sense strand starting at position 2773 of SEQ ID NO: 1241394
cuguuuagcauggaguaga

SEQ ID NO: 1269211 - RNA, 19 nt, Artificial Sequence
  Description of Artificial Sequence: Synthetic oligonucleotide
  Antisense strand to SEQ ID NO: 1269210
ucuacuccaugcuaaacag

SEQ ID NO: 1269212 - RNA, 19 nt, Artificial Sequence
  Description of Artificial Sequence: Synthetic oligonucleotide
  Sense strand starting at position 2783 of SEQ ID NO: 1241394
uggaguagauugagugaga

SEQ ID NO: 1269213 - RNA, 19 nt, Artificial Sequence
  Description of Artificial Sequence: Synthetic oligonucleotide
  Antisense strand to SEQ ID NO: 1269212
ucucacucaaucuacucca

SEQ ID NO: 1269214 - RNA, 19 nt, Artificial Sequence
  Description of Artificial Sequence: Synthetic oligonucleotide
  Sense strand starting at position 2796 of SEQ ID NO: 1241394
gugagaaaugccggcggaa

SEQ ID NO: 1269215 - RNA, 19 nt, Artificial Sequence
  Description of Artificial Sequence: Synthetic oligonucleotide
  Antisense strand to SEQ ID NO: 1269214
uuccgccggcauuucucac

SEQ ID NO: 1269216 - RNA, 19 nt, Artificial Sequence
  Description of Artificial Sequence: Synthetic oligonucleotide
  Sense strand starting at position 2798 of SEQ ID NO: 1241394
gagaaaugccggcggaauc

SEQ ID NO: 1269217 - RNA, 19 nt, Artificial Sequence
  Description of Artificial Sequence: Synthetic oligonucleotide
  Antisense strand to SEQ ID NO: 1269216
gauuccgccggcauuucuc

SEQ ID NO: 1269218 - RNA, 19 nt, Artificial Sequence
  Description of Artificial Sequence: Synthetic oligonucleotide
  Sense strand starting at position 2861 of SEQ ID NO: 1241394
aaaggugugcuguagagca

SEQ ID NO: 1269219 - RNA, 19 nt, Artificial Sequence
  Description of Artificial Sequence: Synthetic oligonucleotide
  Antisense strand to SEQ ID NO: 1269218
ugcucuacagcacaccuuu

SEQ ID NO: 1269220 - RNA, 19 nt, Artificial Sequence
  Description of Artificial Sequence: Synthetic oligonucleotide
  Sense strand starting at position 2863 of SEQ ID NO: 1241394
aggugugcuguagagcaaa

SEQ ID NO: 1269221 - RNA, 19 nt, Artificial Sequence
  Description of Artificial Sequence: Synthetic oligonucleotide
  Antisense strand to SEQ ID NO: 1269220
uuugcucuacagcacaccu

SEQ ID NO: 1269222 - RNA, 19 nt, Artificial Sequence
  Description of Artificial Sequence: Synthetic oligonucleotide
  Sense strand starting at position 2935 of SEQ ID NO: 1241394
cuagaagagguuugaaagu

SEQ ID NO: 1269223 - RNA, 19 nt, Artificial Sequence
  Description of Artificial Sequence: Synthetic oligonucleotide
  Antisense strand to SEQ ID NO: 1269222
acuuucaaaccucuucuag

SEQ ID NO: 1269224 - RNA, 19 nt, Artificial Sequence
  Description of Artificial Sequence: Synthetic oligonucleotide
  Sense strand starting at position 2941 of SEQ ID NO: 1241394
gagguuugaaaguguuuag

SEQ ID NO: 1269225 - RNA, 19 nt, Artificial Sequence
  Description of Artificial Sequence: Synthetic oligonucleotide
  Antisense strand to SEQ ID NO: 1269224
cuaaacacuuucaaaccuc

SEQ ID NO: 1269226 - RNA, 19 nt, Artificial Sequence
  Description of Artificial Sequence: Synthetic oligonucleotide
  Sense strand starting at position 2944 of SEQ ID NO: 1241394
guuugaaaguguuuaguag

SEQ ID NO: 1269227 - RNA, 19 nt, Artificial Sequence
  Description of Artificial Sequence: Synthetic oligonucleotide
  Antisense strand to SEQ ID NO: 1269226
cuacuaaacacuuucaaac

SEQ ID NO: 1269228 - RNA, 19 nt, Artificial Sequence
  Description of Artificial Sequence: Synthetic oligonucleotide
  Sense strand starting at position 2945 of SEQ ID NO: 1241394
uuugaaaguguuuaguagu

SEQ ID NO: 1269229 - RNA, 19 nt, Artificial Sequence
  Description of Artificial Sequence: Synthetic oligonucleotide
  Antisense strand to SEQ ID NO: 1269228
acuacuaaacacuuucaaa

SEQ ID NO: 1269230 - RNA, 19 nt, Artificial Sequence
  Description of Artificial Sequence: Synthetic oligonucleotide
  Sense strand starting at position 2962 of SEQ ID NO: 1241394
guaauugaacuaggcaaca

SEQ ID NO: 1269231 - RNA, 19 nt, Artificial Sequence
  Description of Artificial Sequence: Synthetic oligonucleotide
  Antisense strand to SEQ ID NO: 1269230
uguugccuaguucaauuac

SEQ ID NO: 1269232 - RNA, 19 nt, Artificial Sequence
  Description of Artificial Sequence: Synthetic oligonucleotide
  Sense strand starting at position 2999 of SEQ ID NO: 1241394
gauauaaagugccaagauc

SEQ ID NO: 1269233 - RNA, 19 nt, Artificial Sequence
  Description of Artificial Sequence: Synthetic oligonucleotide
  Antisense strand to SEQ ID NO: 1269232
gaucuuggcacuuuauauc

SEQ ID NO: 1269234 - RNA, 19 nt, Artificial Sequence
  Description of Artificial Sequence: Synthetic oligonucleotide
  Sense strand starting at position 3026 of SEQ ID NO: 1241394
agguaaauaaagugugaga

SEQ ID NO: 1269235 - RNA, 19 nt, Artificial Sequence
  Description of Artificial Sequence: Synthetic oligonucleotide
  Antisense strand to SEQ ID NO: 1269234
ucucacacuuuauuuaccu

SEQ ID NO: 1269236 - RNA, 19 nt, Artificial Sequence
  Description of Artificial Sequence: Synthetic oligonucleotide
  Sense strand starting at position 3028 of SEQ ID NO: 1241394
guaaauaaagugugagaac

SEQ ID NO: 1269237 - RNA, 19 nt, Artificial Sequence
  Description of Artificial Sequence: Synthetic oligonucleotide
  Antisense strand to SEQ ID NO: 1269236
guucucacacuuuauuuac

SEQ ID NO: 1269238 - RNA, 19 nt, Artificial Sequence
  Description of Artificial Sequence: Synthetic oligonucleotide
  Sense strand starting at position 3029 of SEQ ID NO: 1241394
uaaauaaagugugagaaca

SEQ ID NO: 1269239 - RNA, 19 nt, Artificial Sequence
  Description of Artificial Sequence: Synthetic oligonucleotide
  Antisense strand to SEQ ID NO: 1269238
uguucucacacuuuauuua

SEQ ID NO: 1269240 - RNA, 19 nt, Artificial Sequence
  Description of Artificial Sequence: Synthetic oligonucleotide
  Sense strand starting at position 3058 of SEQ ID NO: 1241394
agacuaugugcacaagucu

SEQ ID NO: 1269241 - RNA, 19 nt, Artificial Sequence
  Description of Artificial Sequence: Synthetic oligonucleotide
  Antisense strand to SEQ ID NO: 1269240
agacuugugcacauagucu

SEQ ID NO: 1269242 - RNA, 19 nt, Artificial Sequence
  Description of Artificial Sequence: Synthetic oligonucleotide
  Sense strand starting at position 3210 of SEQ ID NO: 1241394
ugagaaagauuuggaagua

SEQ ID NO: 1269243 - RNA, 19 nt, Artificial Sequence
  Description of Artificial Sequence: Synthetic oligonucleotide
  Antisense strand to SEQ ID NO: 1269242
uacuuccaaaucuuucuca

SEQ ID NO: 1269244 - RNA, 19 nt, Artificial Sequence
  Description of Artificial Sequence: Synthetic oligonucleotide
  Sense strand starting at position 3256 of SEQ ID NO: 1241394
uaggcauucugcuuaagua

SEQ ID NO: 1269245 - RNA, 19 nt, Artificial Sequence
  Description of Artificial Sequence: Synthetic oligonucleotide
  Antisense strand to SEQ ID NO: 1269244
uacuuaagcagaaugccua

SEQ ID NO: 1269246 - RNA, 19 nt, Artificial Sequence
  Description of Artificial Sequence: Synthetic oligonucleotide
  Sense strand starting at position 3257 of SEQ ID NO: 1241394
aggcauucugcuuaaguaa

SEQ ID NO: 1269247 - RNA, 19 nt, Artificial Sequence
  Description of Artificial Sequence: Synthetic oligonucleotide
  Antisense strand to SEQ ID NO: 1269246
uuacuuaagcagaaugccu

SEQ ID NO: 1269248 - RNA, 19 nt, Artificial Sequence
  Description of Artificial Sequence: Synthetic oligonucleotide
  Sense strand starting at position 3354 of SEQ ID NO: 1241394
uguggugauugagccauuu

SEQ ID NO: 1269249 - RNA, 19 nt, Artificial Sequence
  Description of Artificial Sequence: Synthetic oligonucleotide
  Antisense strand to SEQ ID NO: 1269248
aaauggcucaaucaccaca

SEQ ID NO: 1269250 - RNA, 19 nt, Artificial Sequence
  Description of Artificial Sequence: Synthetic oligonucleotide
  Sense strand starting at position 3366 of SEQ ID NO: 1241394
gccauuuaguuagauaaug

SEQ ID NO: 1269251 - RNA, 19 nt, Artificial Sequence
  Description of Artificial Sequence: Synthetic oligonucleotide
  Antisense strand to SEQ ID NO: 1269250
cauuaucuaacuaaauggc

SEQ ID NO: 1269252 - RNA, 19 nt, Artificial Sequence
  Description of Artificial Sequence: Synthetic oligonucleotide
  Sense strand starting at position 3417 of SEQ ID NO: 1241394
uguucuggcuaauuccaaa

SEQ ID NO: 1269253 - RNA, 19 nt, Artificial Sequence
  Description of Artificial Sequence: Synthetic oligonucleotide
  Antisense strand to SEQ ID NO: 1269252
uuuggaauuagccagaaca

SEQ ID NO: 1269254 - RNA, 19 nt, Artificial Sequence
  Description of Artificial Sequence: Synthetic oligonucleotide
  Sense strand starting at position 3557 of SEQ ID NO: 1241394
auaauacuguggguccuaa

SEQ ID NO: 1269255 - RNA, 19 nt, Artificial Sequence
  Description of Artificial Sequence: Synthetic oligonucleotide
  Antisense strand to SEQ ID NO: 1269254
uuaggacccacaguauuau

SEQ ID NO: 1269256 - RNA, 19 nt, Artificial Sequence
  Description of Artificial Sequence: Synthetic oligonucleotide
  Sense strand starting at position 3613 of SEQ ID NO: 1241394
ugcagugcauucucauauu

SEQ ID NO: 1269257 - RNA, 19 nt, Artificial Sequence
  Description of Artificial Sequence: Synthetic oligonucleotide
  Antisense strand to SEQ ID NO: 1269256
aauaugagaaugcacugca

SEQ ID NO: 1269258 - RNA, 19 nt, Artificial Sequence
  Description of Artificial Sequence: Synthetic oligonucleotide
  Sense strand starting at position 3836 of SEQ ID NO: 1241394
uuagcaguguugguaaacu

SEQ ID NO: 1269259 - RNA, 19 nt, Artificial Sequence
  Description of Artificial Sequence: Synthetic oligonucleotide
  Antisense strand to SEQ ID NO: 1269258
aguuuaccaacacugcuaa

SEQ ID NO: 1269260 - RNA, 19 nt, Artificial Sequence
  Description of Artificial Sequence: Synthetic oligonucleotide
  Sense strand starting at position 3846 of SEQ ID NO: 1241394
ugguaaacuuaguuuccca

SEQ ID NO: 1269261 - RNA, 19 nt, Artificial Sequence
  Description of Artificial Sequence: Synthetic oligonucleotide
  Antisense strand to SEQ ID NO: 1269260
ugggaaacuaaguuuacca

SEQ ID NO: 1269262 - RNA, 19 nt, Artificial Sequence
  Description of Artificial Sequence: Synthetic oligonucleotide
  Sense strand starting at position 3866 of SEQ ID NO: 1241394
auuggucauuucugacaug

SEQ ID NO: 1269263 - RNA, 19 nt, Artificial Sequence
  Description of Artificial Sequence: Synthetic oligonucleotide
  Antisense strand to SEQ ID NO: 1269262
caugucagaaaugaccaau

SEQ ID NO: 1269264 - RNA, 19 nt, Artificial Sequence
  Description of Artificial Sequence: Synthetic oligonucleotide
  Sense strand starting at position 3867 of SEQ ID NO: 1241394
uuggucauuucugacaugu

SEQ ID NO: 1269265 - RNA, 19 nt, Artificial Sequence
  Description of Artificial Sequence: Synthetic oligonucleotide
  Antisense strand to SEQ ID NO: 1269264
acaugucagaaaugaccaa

SEQ ID NO: 1269266 - RNA, 19 nt, Artificial Sequence
  Description of Artificial Sequence: Synthetic oligonucleotide
  Sense strand starting at position 3869 of SEQ ID NO: 1241394
ggucauuucugacauguca

SEQ ID NO: 1269267 - RNA, 19 nt, Artificial Sequence
  Description of Artificial Sequence: Synthetic oligonucleotide
  Antisense strand to SEQ ID NO: 1269266
ugacaugucagaaaugacc

SEQ ID NO: 1269268 - RNA, 19 nt, Artificial Sequence
  Description of Artificial Sequence: Synthetic oligonucleotide
  Sense strand starting at position 3876 of SEQ ID NO: 1241394
ucugacaugucagcuuaua

SEQ ID NO: 1269269 - RNA, 19 nt, Artificial Sequence
  Description of Artificial Sequence: Synthetic oligonucleotide
  Antisense strand to SEQ ID NO: 1269268
uauaagcugacaugucaga

SEQ ID NO: 1269270 - RNA, 19 nt, Artificial Sequence
  Description of Artificial Sequence: Synthetic oligonucleotide
  Sense strand starting at position 3888 of SEQ ID NO: 1241394
gcuuauaugugacuucuaa

SEQ ID NO: 1269271 - RNA, 19 nt, Artificial Sequence
  Description of Artificial Sequence: Synthetic oligonucleotide
  Antisense strand to SEQ ID NO: 1269270
uuagaagucacauauaagc

SEQ ID NO: 1269272 - RNA, 19 nt, Artificial Sequence
  Description of Artificial Sequence: Synthetic oligonucleotide
  Sense strand starting at position 51 of SEQ ID NO: 1241395
caggccuuugccugacaga

SEQ ID NO: 1269273 - RNA, 19 nt, Artificial Sequence
  Description of Artificial Sequence: Synthetic oligonucleotide
  Antisense strand to SEQ ID NO: 1269272
ucugucaggcaaaggccug

SEQ ID NO: 1269274 - RNA, 19 nt, Artificial Sequence
  Description of Artificial Sequence: Synthetic oligonucleotide
  Sense strand starting at position 357 of SEQ ID NO: 1241395
cccucucaauugucaggaa

SEQ ID NO: 1269275 - RNA, 19 nt, Artificial Sequence
  Description of Artificial Sequence: Synthetic oligonucleotide
  Antisense strand to SEQ ID NO: 1269274
uuccugacaauugagaggg

SEQ ID NO: 1269276 - RNA, 19 nt, Artificial Sequence
  Description of Artificial Sequence: Synthetic oligonucleotide
  Sense strand starting at position 505 of SEQ ID NO: 1241395
gagccaugguggucagagu

SEQ ID NO: 1269277 - RNA, 19 nt, Artificial Sequence
  Description of Artificial Sequence: Synthetic oligonucleotide
  Antisense strand to SEQ ID NO: 1269276
acucugaccaccauggcuc

SEQ ID NO: 1269278 - RNA, 19 nt, Artificial Sequence
  Description of Artificial Sequence: Synthetic oligonucleotide
  Sense strand starting at position 687 of SEQ ID NO: 1241395
gcaagcuuacaaggucuau

SEQ ID NO: 1269279 - RNA, 19 nt, Artificial Sequence
  Description of Artificial Sequence: Synthetic oligonucleotide
  Antisense strand to SEQ ID NO: 1269278
auagaccuuguaagcuugc

SEQ ID NO: 1269280 - RNA, 19 nt, Artificial Sequence
  Description of Artificial Sequence: Synthetic oligonucleotide
  Sense strand starting at position 1047 of SEQ ID NO: 1241395
gugggcauguaaucuggua

SEQ ID NO: 1269281 - RNA, 19 nt, Artificial Sequence
  Description of Artificial Sequence: Synthetic oligonucleotide
  Antisense strand to SEQ ID NO: 1269280
uaccagauuacaugcccac

SEQ ID NO: 1269282 - RNA, 19 nt, Artificial Sequence
  Description of Artificial Sequence: Synthetic oligonucleotide
  Sense strand starting at position 1049 of SEQ ID NO: 1241395
gggcauguaaucugguaag

SEQ ID NO: 1269283 - RNA, 19 nt, Artificial Sequence
  Description of Artificial Sequence: Synthetic oligonucleotide
  Antisense strand to SEQ ID NO: 1269282
cuuaccagauuacaugccc

SEQ ID NO: 1269284 - RNA, 19 nt, Artificial Sequence
  Description of Artificial Sequence: Synthetic oligonucleotide
  Sense strand starting at position 1055 of SEQ ID NO: 1241395
guaaucugguaaguucagu

SEQ ID NO: 1269285 - RNA, 19 nt, Artificial Sequence
  Description of Artificial Sequence: Synthetic oligonucleotide
  Antisense strand to SEQ ID NO: 1269284
acugaacuuaccagauuac

SEQ ID NO: 1269286 - RNA, 19 nt, Artificial Sequence
  Description of Artificial Sequence: Synthetic oligonucleotide
  Sense strand starting at position 1071 of SEQ ID NO: 1241395
agucuaacuuagccugaau

SEQ ID NO: 1269287 - RNA, 19 nt, Artificial Sequence
  Description of Artificial Sequence: Synthetic oligonucleotide
  Antisense strand to SEQ ID NO: 1269286
auucaggcuaaguuagacu

SEQ ID NO: 1269288 - RNA, 19 nt, Artificial Sequence
  Description of Artificial Sequence: Synthetic oligonucleotide
  Sense strand starting at position 1110 of SEQ ID NO: 1241395
uuggguuuggcagaucauc

SEQ ID NO: 1269289 - RNA, 19 nt, Artificial Sequence
  Description of Artificial Sequence: Synthetic oligonucleotide
  Antisense strand to SEQ ID NO: 1269288
gaugaucugccaaacccaa

SEQ ID NO: 1269290 - RNA, 19 nt, Artificial Sequence
  Description of Artificial Sequence: Synthetic oligonucleotide
  Sense strand starting at position 1181 of SEQ ID NO: 1241395
ccaccuugcgucuagaacu

SEQ ID NO: 1269291 - RNA, 19 nt, Artificial Sequence
  Description of Artificial Sequence: Synthetic oligonucleotide
  Antisense strand to SEQ ID NO: 1269290
aguucuagacgcaaggugg

SEQ ID NO: 1269292 - RNA, 19 nt, Artificial Sequence
  Description of Artificial Sequence: Synthetic oligonucleotide
  Sense strand starting at position 1253 of SEQ ID NO: 1241395
uagacaaagucgucaagau

SEQ ID NO: 1269293 - RNA, 19 nt, Artificial Sequence
  Description of Artificial Sequence: Synthetic oligonucleotide
  Antisense strand to SEQ ID NO: 1269292
aucuugacgacuuugucua

SEQ ID NO: 1269294 - RNA, 19 nt, Artificial Sequence
  Description of Artificial Sequence: Synthetic oligonucleotide
  Sense strand starting at position 1254 of SEQ ID NO: 1241395
agacaaagucgucaagauc

SEQ ID NO: 1269295 - RNA, 19 nt, Artificial Sequence
  Description of Artificial Sequence: Synthetic oligonucleotide
  Antisense strand to SEQ ID NO: 1269294
gaucuugacgacuuugucu

SEQ ID NO: 1269296 - RNA, 19 nt, Artificial Sequence
  Description of Artificial Sequence: Synthetic oligonucleotide
  Sense strand starting at position 1263 of SEQ ID NO: 1241395
cgucaagaucccgagagaa

SEQ ID NO: 1269297 - RNA, 19 nt, Artificial Sequence
  Description of Artificial Sequence: Synthetic oligonucleotide
  Antisense strand to SEQ ID NO: 1269296
uucucucgggaucuugacg

SEQ ID NO: 1269298 - RNA, 19 nt, Artificial Sequence
  Description of Artificial Sequence: Synthetic oligonucleotide
  Sense strand starting at position 2143 of SEQ ID NO: 1241395
uggccagcucggcuuuaua

SEQ ID NO: 1269299 - RNA, 19 nt, Artificial Sequence
  Description of Artificial Sequence: Synthetic oligonucleotide
  Antisense strand to SEQ ID NO: 1269298
uauaaagccgagcuggcca

SEQ ID NO: 1269300 - RNA, 19 nt, Artificial Sequence
  Description of Artificial Sequence: Synthetic oligonucleotide
  Sense strand starting at position 2146 of SEQ ID NO: 1241395
ccagcucggcuuuauaaag

SEQ ID NO: 1269301 - RNA, 19 nt, Artificial Sequence
  Description of Artificial Sequence: Synthetic oligonucleotide
  Antisense strand to SEQ ID NO: 1269300
cuuuauaaagccgagcugg

SEQ ID NO: 1269302 - RNA, 19 nt, Artificial Sequence
  Description of Artificial Sequence: Synthetic oligonucleotide
  Sense strand starting at position 2477 of SEQ ID NO: 1241395
auaguucugccauacagaa

SEQ ID NO: 1269303 - RNA, 19 nt, Artificial Sequence
  Description of Artificial Sequence: Synthetic oligonucleotide
  Antisense strand to SEQ ID NO: 1269302
uucuguauggcagaacuau

SEQ ID NO: 1269304 - RNA, 19 nt, Artificial Sequence
  Description of Artificial Sequence: Synthetic oligonucleotide
  Sense strand starting at position 2520 of SEQ ID NO: 1241395
agauauaccggaugaacuu

SEQ ID NO: 1269305 - RNA, 19 nt, Artificial Sequence
  Description of Artificial Sequence: Synthetic oligonucleotide
  Antisense strand to SEQ ID NO: 1269304
aaguucauccgguauaucu

SEQ ID NO: 1269306 - RNA, 19 nt, Artificial Sequence
  Description of Artificial Sequence: Synthetic oligonucleotide
  Sense strand starting at position 2529 of SEQ ID NO: 1241395
ggaugaacuuuagggaaga

SEQ ID NO: 1269307 - RNA, 19 nt, Artificial Sequence
  Description of Artificial Sequence: Synthetic oligonucleotide
  Antisense strand to SEQ ID NO: 1269306
ucuucccuaaaguucaucc

SEQ ID NO: 1269308 - RNA, 19 nt, Artificial Sequence
  Description of Artificial Sequence: Synthetic oligonucleotide
  Sense strand starting at position 2530 of SEQ ID NO: 1241395
gaugaacuuuagggaagaa

SEQ ID NO: 1269309 - RNA, 19 nt, Artificial Sequence
  Description of Artificial Sequence: Synthetic oligonucleotide
  Antisense strand to SEQ ID NO: 1269308
uucuucccuaaaguucauc

SEQ ID NO: 1269310 - RNA, 19 nt, Artificial Sequence
  Description of Artificial Sequence: Synthetic oligonucleotide
  Sense strand starting at position 2580 of SEQ ID NO: 1241395
agacauaaccagugaguaa

SEQ ID NO: 1269311 - RNA, 19 nt, Artificial Sequence
  Description of Artificial Sequence: Synthetic oligonucleotide
  Antisense strand to SEQ ID NO: 1269310
uuacucacugguuaugucu

SEQ ID NO: 1269312 - RNA, 19 nt, Artificial Sequence
  Description of Artificial Sequence: Synthetic oligonucleotide
  Sense strand starting at position 2751 of SEQ ID NO: 1241395
ggaaguaggugagugcaau

SEQ ID NO: 1269313 - RNA, 19 nt, Artificial Sequence
  Description of Artificial Sequence: Synthetic oligonucleotide
  Antisense strand to SEQ ID NO: 1269312
auugcacucaccuacuucc

SEQ ID NO: 1269314 - RNA, 19 nt, Artificial Sequence
  Description of Artificial Sequence: Synthetic oligonucleotide
  Sense strand starting at position 2757 of SEQ ID NO: 1241395
aggugagugcaauggagau

SEQ ID NO: 1269315 - RNA, 19 nt, Artificial Sequence
  Description of Artificial Sequence: Synthetic oligonucleotide
  Antisense strand to SEQ ID NO: 1269314
aucuccauugcacucaccu

SEQ ID NO: 1269316 - RNA, 19 nt, Artificial Sequence
  Description of Artificial Sequence: Synthetic oligonucleotide
  Sense strand starting at position 2868 of SEQ ID NO: 1241395
aguacagcuccacagagau

SEQ ID NO: 1269317 - RNA, 19 nt, Artificial Sequence
  Description of Artificial Sequence: Synthetic oligonucleotide
  Antisense strand to SEQ ID NO: 1269316
aucucuguggagcuguacu

SEQ ID NO: 1269318 - RNA, 19 nt, Artificial Sequence
  Description of Artificial Sequence: Synthetic oligonucleotide
  Sense strand starting at position 2880 of SEQ ID NO: 1241395
cagagauggcacugugaag

SEQ ID NO: 1269319 - RNA, 19 nt, Artificial Sequence
  Description of Artificial Sequence: Synthetic oligonucleotide
  Antisense strand to SEQ ID NO: 1269318
cuucacagugccaucucug

SEQ ID NO: 1269320 - RNA, 19 nt, Artificial Sequence
  Description of Artificial Sequence: Synthetic oligonucleotide
  Sense strand starting at position 3136 of SEQ ID NO: 1241395
uuauucuuugccuggcaca

SEQ ID NO: 1269321 - RNA, 19 nt, Artificial Sequence
  Description of Artificial Sequence: Synthetic oligonucleotide
  Antisense strand to SEQ ID NO: 1269320
ugugccaggcaaagaauaa

SEQ ID NO: 1269322 - RNA, 19 nt, Artificial Sequence
  Description of Artificial Sequence: Synthetic oligonucleotide
  Sense strand starting at position 3168 of SEQ ID NO: 1241395
caaaguaaaugggucauca

SEQ ID NO: 1269323 - RNA, 19 nt, Artificial Sequence
  Description of Artificial Sequence: Synthetic oligonucleotide
  Antisense strand to SEQ ID NO: 1269322
ugaugacccauuuacuuug

SEQ ID NO: 1269324 - RNA, 19 nt, Artificial Sequence
  Description of Artificial Sequence: Synthetic oligonucleotide
  Sense strand starting at position 3172 of SEQ ID NO: 1241395
guaaaugggucaucaaaug

SEQ ID NO: 1269325 - RNA, 19 nt, Artificial Sequence
  Description of Artificial Sequence: Synthetic oligonucleotide
  Antisense strand to SEQ ID NO: 1269324
cauuugaugacccauuuac

SEQ ID NO: 1269326 - RNA, 19 nt, Artificial Sequence
  Description of Artificial Sequence: Synthetic oligonucleotide
  Sense strand starting at position 3180 of SEQ ID NO: 1241395
gucaucaaaugggcuuuaa

SEQ ID NO: 1269327 - RNA, 19 nt, Artificial Sequence
  Description of Artificial Sequence: Synthetic oligonucleotide
  Antisense strand to SEQ ID NO: 1269326
uuaaagcccauuugaugac

SEQ ID NO: 1269328 - RNA, 19 nt, Artificial Sequence
  Description of Artificial Sequence: Synthetic oligonucleotide
  Sense strand starting at position 3204 of SEQ ID NO: 1241395
acaugauguccauaggcau

SEQ ID NO: 1269329 - RNA, 19 nt, Artificial Sequence
  Description of Artificial Sequence: Synthetic oligonucleotide
  Antisense strand to SEQ ID NO: 1269328
augccuauggacaucaugu

SEQ ID NO: 1269330 - RNA, 19 nt, Artificial Sequence
  Description of Artificial Sequence: Synthetic oligonucleotide
  Sense strand starting at position 3207 of SEQ ID NO: 1241395
ugauguccauaggcauuaa

SEQ ID NO: 1269331 - RNA, 19 nt, Artificial Sequence
  Description of Artificial Sequence: Synthetic oligonucleotide
  Antisense strand to SEQ ID NO: 1269330
uuaaugccuauggacauca

SEQ ID NO: 1269332 - RNA, 19 nt, Artificial Sequence
  Description of Artificial Sequence: Synthetic oligonucleotide
  Sense strand starting at position 3250 of SEQ ID NO: 1241395
gggaaaugucuccggagag

SEQ ID NO: 1269333 - RNA, 19 nt, Artificial Sequence
  Description of Artificial Sequence: Synthetic oligonucleotide
  Antisense strand to SEQ ID NO: 1269332
cucuccggagacauuuccc

SEQ ID NO: 1269334 - RNA, 19 nt, Artificial Sequence
  Description of Artificial Sequence: Synthetic oligonucleotide
  Sense strand starting at position 3260 of SEQ ID NO: 1241395
uccggagagcuuuauaagu

SEQ ID NO: 1269335 - RNA, 19 nt, Artificial Sequence
  Description of Artificial Sequence: Synthetic oligonucleotide
  Antisense strand to SEQ ID NO: 1269334
acuuauaaagcucuccgga

SEQ ID NO: 1269336 - RNA, 19 nt, Artificial Sequence
  Description of Artificial Sequence: Synthetic oligonucleotide
  Sense strand starting at position 3431 of SEQ ID NO: 1241395
caguaauagccauggaaua

SEQ ID NO: 1269337 - RNA, 19 nt, Artificial Sequence
  Description of Artificial Sequence: Synthetic oligonucleotide
  Antisense strand to SEQ ID NO: 1269336
uauuccauggcuauuacug

SEQ ID NO: 1269338 - RNA, 19 nt, Artificial Sequence
  Description of Artificial Sequence: Synthetic oligonucleotide
  Sense strand starting at position 3469 of SEQ ID NO: 1241395
gcaggaagccuccaacagu

SEQ ID NO: 1269339 - RNA, 19 nt, Artificial Sequence
  Description of Artificial Sequence: Synthetic oligonucleotide
  Antisense strand to SEQ ID NO: 1269338
acuguuggaggcuuccugc

SEQ ID NO: 1269340 - RNA, 19 nt, Artificial Sequence
  Description of Artificial Sequence: Synthetic oligonucleotide
  Sense strand starting at position 3480 of SEQ ID NO: 1241395
ccaacagucauguggauga

SEQ ID NO: 1269341 - RNA, 19 nt, Artificial Sequence
  Description of Artificial Sequence: Synthetic oligonucleotide
  Antisense strand to SEQ ID NO: 1269340
ucauccacaugacuguugg

SEQ ID NO: 1269342 - RNA, 19 nt, Artificial Sequence
  Description of Artificial Sequence: Synthetic oligonucleotide
  Sense strand starting at position 3484 of SEQ ID NO: 1241395
cagucauguggaugacagu

SEQ ID NO: 1269343 - RNA, 19 nt, Artificial Sequence
  Description of Artificial Sequence: Synthetic oligonucleotide
  Antisense strand to SEQ ID NO: 1269342
acugucauccacaugacug

SEQ ID NO: 1269344 - RNA, 19 nt, Artificial Sequence
  Description of Artificial Sequence: Synthetic oligonucleotide
  Sense strand starting at position 3485 of SEQ ID NO: 1241395
agucauguggaugacagua

SEQ ID NO: 1269345 - RNA, 19 nt, Artificial Sequence
  Description of Artificial Sequence: Synthetic oligonucleotide
  Antisense strand to SEQ ID NO: 1269344
uacugucauccacaugacu

SEQ ID NO: 1269346 - RNA, 19 nt, Artificial Sequence
  Description of Artificial Sequence: Synthetic oligonucleotide
  Sense strand starting at position 3490 of SEQ ID NO: 1241395
uguggaugacaguagacuu

SEQ ID NO: 1269347 - RNA, 19 nt, Artificial Sequence
  Description of Artificial Sequence: Synthetic oligonucleotide
  Antisense strand to SEQ ID NO: 1269346
aagucuacugucauccaca

SEQ ID NO: 1269348 - RNA, 19 nt, Artificial Sequence
  Description of Artificial Sequence: Synthetic oligonucleotide
  Sense strand starting at position 3653 of SEQ ID NO: 1241395
gaugguuguggcuggcaga

SEQ ID NO: 1269349 - RNA, 19 nt, Artificial Sequence
  Description of Artificial Sequence: Synthetic oligonucleotide
  Antisense strand to SEQ ID NO: 1269348
ucugccagccacaaccauc

SEQ ID NO: 1269350 - RNA, 19 nt, Artificial Sequence
  Description of Artificial Sequence: Synthetic oligonucleotide
  Sense strand starting at position 3914 of SEQ ID NO: 1241395
ccauuauucuuuguucugu

SEQ ID NO: 1269351 - RNA, 19 nt, Artificial Sequence
  Description of Artificial Sequence: Synthetic oligonucleotide
  Antisense strand to SEQ ID NO: 1269350
acagaacaaagaauaaugg

SEQ ID NO: 1269352 - RNA, 19 nt, Artificial Sequence
  Description of Artificial Sequence: Synthetic oligonucleotide
  Sense strand starting at position 932 of SEQ ID NO: 1241396
cgcugucucgaucacgaau

SEQ ID NO: 1269353 - RNA, 19 nt, Artificial Sequence
  Description of Artificial Sequence: Synthetic oligonucleotide
  Antisense strand to SEQ ID NO: 1269352
auucgugaucgagacagcg

SEQ ID NO: 1269354 - RNA, 19 nt, Artificial Sequence
  Description of Artificial Sequence: Synthetic oligonucleotide
  Sense strand starting at position 943 of SEQ ID NO: 1241396
ucacgaauucgaugcgauc

SEQ ID NO: 1269355 - RNA, 19 nt, Artificial Sequence
  Description of Artificial Sequence: Synthetic oligonucleotide
  Antisense strand to SEQ ID NO: 1269354
gaucgcaucgaauucguga

SEQ ID NO: 1269356 - RNA, 19 nt, Artificial Sequence
  Description of Artificial Sequence: Synthetic oligonucleotide
  Sense strand starting at position 1052 of SEQ ID NO: 1241396
gcaagauugucuccgggac

SEQ ID NO: 1269357 - RNA, 19 nt, Artificial Sequence
  Description of Artificial Sequence: Synthetic oligonucleotide
  Antisense strand to SEQ ID NO: 1269356
gucccggagacaaucuugc

SEQ ID NO: 1269358 - RNA, 19 nt, Artificial Sequence
  Description of Artificial Sequence: Synthetic oligonucleotide
  Sense strand starting at position 1054 of SEQ ID NO: 1241396
aagauugucuccgggacga

SEQ ID NO: 1269359 - RNA, 19 nt, Artificial Sequence
  Description of Artificial Sequence: Synthetic oligonucleotide
  Antisense strand to SEQ ID NO: 1269358
ucgucccggagacaaucuu

SEQ ID NO: 1269360 - RNA, 19 nt, Artificial Sequence
  Description of Artificial Sequence: Synthetic oligonucleotide
  Sense strand starting at position 1604 of SEQ ID NO: 1241396
cggguccaaucuugcugaa

SEQ ID NO: 1269361 - RNA, 19 nt, Artificial Sequence
  Description of Artificial Sequence: Synthetic oligonucleotide
  Antisense strand to SEQ ID NO: 1269360
uucagcaagauuggacccg

SEQ ID NO: 1269362 - RNA, 19 nt, Artificial Sequence
  Description of Artificial Sequence: Synthetic oligonucleotide
  Sense strand starting at position 1936 of SEQ ID NO: 1241396
gguugugauuguuacucua

SEQ ID NO: 1269363 - RNA, 19 nt, Artificial Sequence
  Description of Artificial Sequence: Synthetic oligonucleotide
  Antisense strand to SEQ ID NO: 1269362
uagaguaacaaucacaacc

SEQ ID NO: 1269364 - RNA, 19 nt, Artificial Sequence
  Description of Artificial Sequence: Synthetic oligonucleotide
  Sense strand starting at position 1939 of SEQ ID NO: 1241396
ugugauuguuacucuacgu

SEQ ID NO: 1269365 - RNA, 19 nt, Artificial Sequence
  Description of Artificial Sequence: Synthetic oligonucleotide
  Antisense strand to SEQ ID NO: 1269364
acguagaguaacaaucaca

SEQ ID NO: 1269366 - RNA, 19 nt, Artificial Sequence
  Description of Artificial Sequence: Synthetic oligonucleotide
  Sense strand starting at position 2109 of SEQ ID NO: 1241396
ccacuuguugcucaggcaa

SEQ ID NO: 1269367 - RNA, 19 nt, Artificial Sequence
  Description of Artificial Sequence: Synthetic oligonucleotide
  Antisense strand to SEQ ID NO: 1269366
uugccugagcaacaagugg

SEQ ID NO: 1269368 - RNA, 19 nt, Artificial Sequence
  Description of Artificial Sequence: Synthetic oligonucleotide
  Sense strand starting at position 2232 of SEQ ID NO: 1241396
gcgagcuaaugcuggaagu

SEQ ID NO: 1269369 - RNA, 19 nt, Artificial Sequence
  Description of Artificial Sequence: Synthetic oligonucleotide
  Antisense strand to SEQ ID NO: 1269368
acuuccagcauuagcucgc

SEQ ID NO: 1269370 - RNA, 19 nt, Artificial Sequence
  Description of Artificial Sequence: Synthetic oligonucleotide
  Sense strand starting at position 2375 of SEQ ID NO: 1241396
aagccucggcagugaauuu

SEQ ID NO: 1269371 - RNA, 19 nt, Artificial Sequence
  Description of Artificial Sequence: Synthetic oligonucleotide
  Antisense strand to SEQ ID NO: 1269370
aaauucacugccgaggcuu

SEQ ID NO: 1269372 - RNA, 19 nt, Artificial Sequence
  Description of Artificial Sequence: Synthetic oligonucleotide
  Sense strand starting at position 2417 of SEQ ID NO: 1241396
cgccgugaauuucguauaa

SEQ ID NO: 1269373 - RNA, 19 nt, Artificial Sequence
  Description of Artificial Sequence: Synthetic oligonucleotide
  Antisense strand to SEQ ID NO: 1269372
uuauacgaaauucacggcg

SEQ ID NO: 1269374 - RNA, 19 nt, Artificial Sequence
  Description of Artificial Sequence: Synthetic oligonucleotide
  Sense strand starting at position 2419 of SEQ ID NO: 1241396
ccgugaauuucguauaagg

SEQ ID NO: 1269375 - RNA, 19 nt, Artificial Sequence
  Description of Artificial Sequence: Synthetic oligonucleotide
  Antisense strand to SEQ ID NO: 1269374
ccuuauacgaaauucacgg

SEQ ID NO: 1269376 - RNA, 19 nt, Artificial Sequence
  Description of Artificial Sequence: Synthetic oligonucleotide
  Sense strand starting at position 2429 of SEQ ID NO: 1241396
cguauaagguauuaaccau

SEQ ID NO: 1269377 - RNA, 19 nt, Artificial Sequence
  Description of Artificial Sequence: Synthetic oligonucleotide
  Antisense strand to SEQ ID NO: 1269376
augguuaauaccuuauacg

SEQ ID NO: 1269378 - RNA, 19 nt, Artificial Sequence
  Description of Artificial Sequence: Synthetic oligonucleotide
  Sense strand starting at position 2616 of SEQ ID NO: 1241396
augaauucagagugcgcua

SEQ ID NO: 1269379 - RNA, 19 nt, Artificial Sequence
  Description of Artificial Sequence: Synthetic oligonucleotide
  Antisense strand to SEQ ID NO: 1269378
uagcgcacucugaauucau

SEQ ID NO: 1269380 - RNA, 19 nt, Artificial Sequence
  Description of Artificial Sequence: Synthetic oligonucleotide
  Sense strand starting at position 2666 of SEQ ID NO: 1241396
ggcugaacgucugaagaag

SEQ ID NO: 1269381 - RNA, 19 nt, Artificial Sequence
  Description of Artificial Sequence: Synthetic oligonucleotide
  Antisense strand to SEQ ID NO: 1269380
cuucuucagacguucagcc

SEQ ID NO: 1269382 - RNA, 19 nt, Artificial Sequence
  Description of Artificial Sequence: Synthetic oligonucleotide
  Sense strand starting at position 3247 of SEQ ID NO: 1241396
cgugauuucuucugccuua

SEQ ID NO: 1269383 - RNA, 19 nt, Artificial Sequence
  Description of Artificial Sequence: Synthetic oligonucleotide
  Antisense strand to SEQ ID NO: 1269382
uaaggcagaagaaaucacg

SEQ ID NO: 1269384 - RNA, 19 nt, Artificial Sequence
  Description of Artificial Sequence: Synthetic oligonucleotide
  Sense strand starting at position 3248 of SEQ ID NO: 1241396
gugauuucuucugccuuac

SEQ ID NO: 1269385 - RNA, 19 nt, Artificial Sequence
  Description of Artificial Sequence: Synthetic oligonucleotide
  Antisense strand to SEQ ID NO: 1269384
guaaggcagaagaaaucac

SEQ ID NO: 1269386 - RNA, 19 nt, Artificial Sequence
  Description of Artificial Sequence: Synthetic oligonucleotide
  Sense strand starting at position 3270 of SEQ ID NO: 1241396
aucacugcucaucaguauu

SEQ ID NO: 1269387 - RNA, 19 nt, Artificial Sequence
  Description of Artificial Sequence: Synthetic oligonucleotide
  Antisense strand to SEQ ID NO: 1269386
aauacugaugagcagugau

SEQ ID NO: 1269388 - RNA, 19 nt, Artificial Sequence
  Description of Artificial Sequence: Synthetic oligonucleotide
  Sense strand starting at position 3276 of SEQ ID NO: 1241396
gcucaucaguauugcuuau

SEQ ID NO: 1269389 - RNA, 19 nt, Artificial Sequence
  Description of Artificial Sequence: Synthetic oligonucleotide
  Antisense strand to SEQ ID NO: 1269388
auaagcaauacugaugagc

SEQ ID NO: 1269390 - RNA, 19 nt, Artificial Sequence
  Description of Artificial Sequence: Synthetic oligonucleotide
  Sense strand starting at position 3280 of SEQ ID NO: 1241396
aucaguauugcuuauggca

SEQ ID NO: 1269391 - RNA, 19 nt, Artificial Sequence
  Description of Artificial Sequence: Synthetic oligonucleotide
  Antisense strand to SEQ ID NO: 1269390
ugccauaagcaauacugau

SEQ ID NO: 1269392 - RNA, 19 nt, Artificial Sequence
  Description of Artificial Sequence: Synthetic oligonucleotide
  Sense strand starting at position 3288 of SEQ ID NO: 1241396
ugcuuauggcacgauggau

SEQ ID NO: 1269393 - RNA, 19 nt, Artificial Sequence
  Description of Artificial Sequence: Synthetic oligonucleotide
  Antisense strand to SEQ ID NO: 1269392
auccaucgugccauaagca

SEQ ID NO: 1269394 - RNA, 19 nt, Artificial Sequence
  Description of Artificial Sequence: Synthetic oligonucleotide
  Sense strand starting at position 3300 of SEQ ID NO: 1241396
gauggauauguuggucaua

SEQ ID NO: 1269395 - RNA, 19 nt, Artificial Sequence
  Description of Artificial Sequence: Synthetic oligonucleotide
  Antisense strand to SEQ ID NO: 1269394
uaugaccaacauauccauc

SEQ ID NO: 1269396 - RNA, 19 nt, Artificial Sequence
  Description of Artificial Sequence: Synthetic oligonucleotide
  Sense strand starting at position 3302 of SEQ ID NO: 1241396
uggauauguuggucauagc

SEQ ID NO: 1269397 - RNA, 19 nt, Artificial Sequence
  Description of Artificial Sequence: Synthetic oligonucleotide
  Antisense strand to SEQ ID NO: 1269396
gcuaugaccaacauaucca

SEQ ID NO: 1269398 - RNA, 19 nt, Artificial Sequence
  Description of Artificial Sequence: Synthetic oligonucleotide
  Sense strand starting at position 3303 of SEQ ID NO: 1241396
ggauauguuggucauagcu

SEQ ID NO: 1269399 - RNA, 19 nt, Artificial Sequence
  Description of Artificial Sequence: Synthetic oligonucleotide
  Antisense strand to SEQ ID NO: 1269398
agcuaugaccaacauaucc

SEQ ID NO: 1269400 - RNA, 19 nt, Artificial Sequence
  Description of Artificial Sequence: Synthetic oligonucleotide
  Sense strand starting at position 3305 of SEQ ID NO: 1241396
auauguuggucauagcucu

SEQ ID NO: 1269401 - RNA, 19 nt, Artificial Sequence
  Description of Artificial Sequence: Synthetic oligonucleotide
  Antisense strand to SEQ ID NO: 1269400
agagcuaugaccaacauau

SEQ ID NO: 1269402 - RNA, 19 nt, Artificial Sequence
  Description of Artificial Sequence: Synthetic oligonucleotide
  Sense strand starting at position 3329 of SEQ ID NO: 1241396
gggcauuucuauugauuau

SEQ ID NO: 1269403 - RNA, 19 nt, Artificial Sequence
  Description of Artificial Sequence: Synthetic oligonucleotide
  Antisense strand to SEQ ID NO: 1269402
auaaucaauagaaaugccc

SEQ ID NO: 1269404 - RNA, 19 nt, Artificial Sequence
  Description of Artificial Sequence: Synthetic oligonucleotide
  Sense strand starting at position 3461 of SEQ ID NO: 1241396
ggcccaccagauugaaauu

SEQ ID NO: 1269405 - RNA, 19 nt, Artificial Sequence
  Description of Artificial Sequence: Synthetic oligonucleotide
  Antisense strand to SEQ ID NO: 1269404
aauuucaaucuggugggcc

SEQ ID NO: 1269406 - RNA, 19 nt, Artificial Sequence
  Description of Artificial Sequence: Synthetic oligonucleotide
  Sense strand starting at position 3573 of SEQ ID NO: 1241396
gguuguuaggguuguuuga

SEQ ID NO: 1269407 - RNA, 19 nt, Artificial Sequence
  Description of Artificial Sequence: Synthetic oligonucleotide
  Antisense strand to SEQ ID NO: 1269406
ucaaacaacccuaacaacc

SEQ ID NO: 1269408 - RNA, 19 nt, Artificial Sequence
  Description of Artificial Sequence: Synthetic oligonucleotide
  Sense strand starting at position 3575 of SEQ ID NO: 1241396
uuguuaggguuguuugaga

SEQ ID NO: 1269409 - RNA, 19 nt, Artificial Sequence
  Description of Artificial Sequence: Synthetic oligonucleotide
  Antisense strand to SEQ ID NO: 1269408
ucucaaacaacccuaacaa

SEQ ID NO: 1269410 - RNA, 19 nt, Artificial Sequence
  Description of Artificial Sequence: Synthetic oligonucleotide
  Sense strand starting at position 3580 of SEQ ID NO: 1241396
aggguuguuugagauuuca

SEQ ID NO: 1269411 - RNA, 19 nt, Artificial Sequence
  Description of Artificial Sequence: Synthetic oligonucleotide
  Antisense strand to SEQ ID NO: 1269410
ugaaaucucaaacaacccu

SEQ ID NO: 1269412 - RNA, 19 nt, Artificial Sequence
  Description of Artificial Sequence: Synthetic oligonucleotide
  Sense strand starting at position 3903 of SEQ ID NO: 1241396
cucaauuuguuucuuguca

SEQ ID NO: 1269413 - RNA, 19 nt, Artificial Sequence
  Description of Artificial Sequence: Synthetic oligonucleotide
  Antisense strand to SEQ ID NO: 1269412
ugacaagaaacaaauugag

SEQ ID NO: 1269414 - RNA, 19 nt, Artificial Sequence
  Description of Artificial Sequence: Synthetic oligonucleotide
  Sense strand starting at position 3908 of SEQ ID NO: 1241396
uuuguuucuugucauaaga

SEQ ID NO: 1269415 - RNA, 19 nt, Artificial Sequence
  Description of Artificial Sequence: Synthetic oligonucleotide
  Antisense strand to SEQ ID NO: 1269414
ucuuaugacaagaaacaaa

SEQ ID NO: 1269416 - RNA, 19 nt, Artificial Sequence
  Description of Artificial Sequence: Synthetic oligonucleotide
  Sense strand starting at position 3910 of SEQ ID NO: 1241396
uguuucuugucauaagaag

SEQ ID NO: 1269417 - RNA, 19 nt, Artificial Sequence
  Description of Artificial Sequence: Synthetic oligonucleotide
  Antisense strand to SEQ ID NO: 1269416
cuucuuaugacaagaaaca

SEQ ID NO: 1269418 - RNA, 19 nt, Artificial Sequence
  Description of Artificial Sequence: Synthetic oligonucleotide
  Sense strand starting at position 3927 of SEQ ID NO: 1241396
agagauaacgcuuacuuag

SEQ ID NO: 1269419 - RNA, 19 nt, Artificial Sequence
  Description of Artificial Sequence: Synthetic oligonucleotide
  Antisense strand to SEQ ID NO: 1269418
cuaaguaagcguuaucucu

SEQ ID NO: 1269420 - RNA, 19 nt, Artificial Sequence
  Description of Artificial Sequence: Synthetic oligonucleotide
  Sense strand starting at position 3953 of SEQ ID NO: 1241396
gugggaccuuaguaaacua

SEQ ID NO: 1269421 - RNA, 19 nt, Artificial Sequence
  Description of Artificial Sequence: Synthetic oligonucleotide
  Antisense strand to SEQ ID NO: 1269420
uaguuuacuaaggucccac

SEQ ID NO: 1269422 - RNA, 19 nt, Artificial Sequence
  Description of Artificial Sequence: Synthetic oligonucleotide
  Sense strand starting at position 3972 of SEQ ID NO: 1241396
gguggcuuuacuugcauca

SEQ ID NO: 1269423 - RNA, 19 nt, Artificial Sequence
  Description of Artificial Sequence: Synthetic oligonucleotide
  Antisense strand to SEQ ID NO: 1269422
ugaugcaaguaaagccacc

SEQ ID NO: 1269424 - RNA, 19 nt, Artificial Sequence
  Description of Artificial Sequence: Synthetic oligonucleotide
  Sense strand starting at position 337 of SEQ ID NO: 1241397
ugagcucagaagggauuau

SEQ ID NO: 1269425 - RNA, 19 nt, Artificial Sequence
  Description of Artificial Sequence: Synthetic oligonucleotide
  Antisense strand to SEQ ID NO: 1269424
auaaucccuucugagcuca

SEQ ID NO: 1269426 - RNA, 19 nt, Artificial Sequence
  Description of Artificial Sequence: Synthetic oligonucleotide
  Sense strand starting at position 348 of SEQ ID NO: 1241397
gggauuaugcagggucugu

SEQ ID NO: 1269427 - RNA, 19 nt, Artificial Sequence
  Description of Artificial Sequence: Synthetic oligonucleotide
  Antisense strand to SEQ ID NO: 1269426
acagacccugcauaauccc

SEQ ID NO: 1269428 - RNA, 19 nt, Artificial Sequence
  Description of Artificial Sequence: Synthetic oligonucleotide
  Sense strand starting at position 381 of SEQ ID NO: 1241397
ucuugaaauccuuggaaau

SEQ ID NO: 1269429 - RNA, 19 nt, Artificial Sequence
  Description of Artificial Sequence: Synthetic oligonucleotide
  Antisense strand to SEQ ID NO: 1269428
auuuccaaggauuucaaga

SEQ ID NO: 1269430 - RNA, 19 nt, Artificial Sequence
  Description of Artificial Sequence: Synthetic oligonucleotide
  Sense strand starting at position 383 of SEQ ID NO: 1241397
uugaaauccuuggaaauuu

SEQ ID NO: 1269431 - RNA, 19 nt, Artificial Sequence
  Description of Artificial Sequence: Synthetic oligonucleotide
  Antisense strand to SEQ ID NO: 1269430
aaauuuccaaggauuucaa

SEQ ID NO: 1269432 - RNA, 19 nt, Artificial Sequence
  Description of Artificial Sequence: Synthetic oligonucleotide
  Sense strand starting at position 738 of SEQ ID NO: 1241397
uguacuggacucugcaaau

SEQ ID NO: 1269433 - RNA, 19 nt, Artificial Sequence
  Description of Artificial Sequence: Synthetic oligonucleotide
  Antisense strand to SEQ ID NO: 1269432
auuugcagaguccaguaca

SEQ ID NO: 1269434 - RNA, 19 nt, Artificial Sequence
  Description of Artificial Sequence: Synthetic oligonucleotide
  Sense strand starting at position 744 of SEQ ID NO: 1241397
ggacucugcaaaugaugca

SEQ ID NO: 1269435 - RNA, 19 nt, Artificial Sequence
  Description of Artificial Sequence: Synthetic oligonucleotide
  Antisense strand to SEQ ID NO: 1269434
ugcaucauuugcagagucc

SEQ ID NO: 1269436 - RNA, 19 nt, Artificial Sequence
  Description of Artificial Sequence: Synthetic oligonucleotide
  Sense strand starting at position 819 of SEQ ID NO: 1241397
cgaggaugaguguaccagu

SEQ ID NO: 1269437 - RNA, 19 nt, Artificial Sequence
  Description of Artificial Sequence: Synthetic oligonucleotide
  Antisense strand to SEQ ID NO: 1269436
acugguacacucauccucg

SEQ ID NO: 1269438 - RNA, 19 nt, Artificial Sequence
  Description of Artificial Sequence: Synthetic oligonucleotide
  Sense strand starting at position 1221 of SEQ ID NO: 1241397
gggacagaauuguuuccuu

SEQ ID NO: 1269439 - RNA, 19 nt, Artificial Sequence
  Description of Artificial Sequence: Synthetic oligonucleotide
  Antisense strand to SEQ ID NO: 1269438
aaggaaacaauucuguccc

SEQ ID NO: 1269440 - RNA, 19 nt, Artificial Sequence
  Description of Artificial Sequence: Synthetic oligonucleotide
  Sense strand starting at position 1368 of SEQ ID NO: 1241397
agagauguauuguuuacaa

SEQ ID NO: 1269441 - RNA, 19 nt, Artificial Sequence
  Description of Artificial Sequence: Synthetic oligonucleotide
  Antisense strand to SEQ ID NO: 1269440
uuguaaacaauacaucucu

SEQ ID NO: 1269442 - RNA, 19 nt, Artificial Sequence
  Description of Artificial Sequence: Synthetic oligonucleotide
  Sense strand starting at position 1386 of SEQ ID NO: 1241397
aaagaauuccuuuggugau

SEQ ID NO: 1269443 - RNA, 19 nt, Artificial Sequence
  Description of Artificial Sequence: Synthetic oligonucleotide
  Antisense strand to SEQ ID NO: 1269442
aucaccaaaggaauucuuu

SEQ ID NO: 1269444 - RNA, 19 nt, Artificial Sequence
  Description of Artificial Sequence: Synthetic oligonucleotide
  Sense strand starting at position 1398 of SEQ ID NO: 1241397
uggugaucguuccugguga

SEQ ID NO: 1269445 - RNA, 19 nt, Artificial Sequence
  Description of Artificial Sequence: Synthetic oligonucleotide
  Antisense strand to SEQ ID NO: 1269444
ucaccaggaacgaucacca

SEQ ID NO: 1269446 - RNA, 19 nt, Artificial Sequence
  Description of Artificial Sequence: Synthetic oligonucleotide
  Sense strand starting at position 1400 of SEQ ID NO: 1241397
gugaucguuccuggugaca

SEQ ID NO: 1269447 - RNA, 19 nt, Artificial Sequence
  Description of Artificial Sequence: Synthetic oligonucleotide
  Antisense strand to SEQ ID NO: 1269446
ugucaccaggaacgaucac

SEQ ID NO: 1269448 - RNA, 19 nt, Artificial Sequence
  Description of Artificial Sequence: Synthetic oligonucleotide
  Sense strand starting at position 1766 of SEQ ID NO: 1241397
cugucuaucccucagucua

SEQ ID NO: 1269449 - RNA, 19 nt, Artificial Sequence
  Description of Artificial Sequence: Synthetic oligonucleotide
  Antisense strand to SEQ ID NO: 1269448
uagacugagggauagacag

SEQ ID NO: 1269450 - RNA, 19 nt, Artificial Sequence
  Description of Artificial Sequence: Synthetic oligonucleotide
  Sense strand starting at position 1823 of SEQ ID NO: 1241397
uggacuuucuagcccuaga

SEQ ID NO: 1269451 - RNA, 19 nt, Artificial Sequence
  Description of Artificial Sequence: Synthetic oligonucleotide
  Antisense strand to SEQ ID NO: 1269450
ucuagggcuagaaagucca

SEQ ID NO: 1269452 - RNA, 19 nt, Artificial Sequence
  Description of Artificial Sequence: Synthetic oligonucleotide
  Sense strand starting at position 1856 of SEQ ID NO: 1241397
ccauccuuggcugaucuua

SEQ ID NO: 1269453 - RNA, 19 nt, Artificial Sequence
  Description of Artificial Sequence: Synthetic oligonucleotide
  Antisense strand to SEQ ID NO: 1269452
uaagaucagccaaggaugg

SEQ ID NO: 1269454 - RNA, 19 nt, Artificial Sequence
  Description of Artificial Sequence: Synthetic oligonucleotide
  Sense strand starting at position 1864 of SEQ ID NO: 1241397
ggcugaucuuaccugaguu

SEQ ID NO: 1269455 - RNA, 19 nt, Artificial Sequence
  Description of Artificial Sequence: Synthetic oligonucleotide
  Antisense strand to SEQ ID NO: 1269454
aacucagguaagaucagcc

SEQ ID NO: 1269456 - RNA, 19 nt, Artificial Sequence
  Description of Artificial Sequence: Synthetic oligonucleotide
  Sense strand starting at position 1865 of SEQ ID NO: 1241397
gcugaucuuaccugaguug

SEQ ID NO: 1269457 - RNA, 19 nt, Artificial Sequence
  Description of Artificial Sequence: Synthetic oligonucleotide
  Antisense strand to SEQ ID NO: 1269456
caacucagguaagaucagc

SEQ ID NO: 1269458 - RNA, 19 nt, Artificial Sequence
  Description of Artificial Sequence: Synthetic oligonucleotide
  Sense strand starting at position 2007 of SEQ ID NO: 1241397
ccagaaaucacguggucug

SEQ ID NO: 1269459 - RNA, 19 nt, Artificial Sequence
  Description of Artificial Sequence: Synthetic oligonucleotide
  Antisense strand to SEQ ID NO: 1269458
cagaccacgugauuucugg

SEQ ID NO: 1269460 - RNA, 19 nt, Artificial Sequence
  Description of Artificial Sequence: Synthetic oligonucleotide
  Sense strand starting at position 2008 of SEQ ID NO: 1241397
cagaaaucacguggucuga

SEQ ID NO: 1269461 - RNA, 19 nt, Artificial Sequence
  Description of Artificial Sequence: Synthetic oligonucleotide
  Antisense strand to SEQ ID NO: 1269460
ucagaccacgugauuucug

SEQ ID NO: 1269462 - RNA, 19 nt, Artificial Sequence
  Description of Artificial Sequence: Synthetic oligonucleotide
  Sense strand starting at position 2010 of SEQ ID NO: 1241397
gaaaucacguggucugagu

SEQ ID NO: 1269463 - RNA, 19 nt, Artificial Sequence
  Description of Artificial Sequence: Synthetic oligonucleotide
  Antisense strand to SEQ ID NO: 1269462
acucagaccacgugauuuc

SEQ ID NO: 1269464 - RNA, 19 nt, Artificial Sequence
  Description of Artificial Sequence: Synthetic oligonucleotide
  Sense strand starting at position 2021 of SEQ ID NO: 1241397
gucugaguugcagggaacu

SEQ ID NO: 1269465 - RNA, 19 nt, Artificial Sequence
  Description of Artificial Sequence: Synthetic oligonucleotide
  Antisense strand to SEQ ID NO: 1269464
aguucccugcaacucagac

SEQ ID NO: 1269466 - RNA, 19 nt, Artificial Sequence
  Description of Artificial Sequence: Synthetic oligonucleotide
  Sense strand starting at position 2172 of SEQ ID NO: 1241397
cuaucugaccucuggguga

SEQ ID NO: 1269467 - RNA, 19 nt, Artificial Sequence
  Description of Artificial Sequence: Synthetic oligonucleotide
  Antisense strand to SEQ ID NO: 1269466
ucacccagaggucagauag

SEQ ID NO: 1269468 - RNA, 19 nt, Artificial Sequence
  Description of Artificial Sequence: Synthetic oligonucleotide
  Sense strand starting at position 2174 of SEQ ID NO: 1241397
aucugaccucugggugaca

SEQ ID NO: 1269469 - RNA, 19 nt, Artificial Sequence
  Description of Artificial Sequence: Synthetic oligonucleotide
  Antisense strand to SEQ ID NO: 1269468
ugucacccagaggucagau

SEQ ID NO: 1269470 - RNA, 19 nt, Artificial Sequence
  Description of Artificial Sequence: Synthetic oligonucleotide
  Sense strand starting at position 2212 of SEQ ID NO: 1241397
gccaguuuccuggagucag

SEQ ID NO: 1269471 - RNA, 19 nt, Artificial Sequence
  Description of Artificial Sequence: Synthetic oligonucleotide
  Antisense strand to SEQ ID NO: 1269470
cugacuccaggaaacuggc

SEQ ID NO: 1269472 - RNA, 19 nt, Artificial Sequence
  Description of Artificial Sequence: Synthetic oligonucleotide
  Sense strand starting at position 2293 of SEQ ID NO: 1241397
gauacauauugggugacuu

SEQ ID NO: 1269473 - RNA, 19 nt, Artificial Sequence
  Description of Artificial Sequence: Synthetic oligonucleotide
  Antisense strand to SEQ ID NO: 1269472
aagucacccaauauguauc

SEQ ID NO: 1269474 - RNA, 19 nt, Artificial Sequence
  Description of Artificial Sequence: Synthetic oligonucleotide
  Sense strand starting at position 2321 of SEQ ID NO: 1241397
gucaaauucuaugaaagga

SEQ ID NO: 1269475 - RNA, 19 nt, Artificial Sequence
  Description of Artificial Sequence: Synthetic oligonucleotide
  Antisense strand to SEQ ID NO: 1269474
uccuuucauagaauuugac

SEQ ID NO: 1269476 - RNA, 19 nt, Artificial Sequence
  Description of Artificial Sequence: Synthetic oligonucleotide
  Sense strand starting at position 2545 of SEQ ID NO: 1241397
ccaagaagccuggguggua

SEQ ID NO: 1269477 - RNA, 19 nt, Artificial Sequence
  Description of Artificial Sequence: Synthetic oligonucleotide
  Antisense strand to SEQ ID NO: 1269476
uaccacccaggcuucuugg

SEQ ID NO: 1269478 - RNA, 19 nt, Artificial Sequence
  Description of Artificial Sequence: Synthetic oligonucleotide
  Sense strand starting at position 2796 of SEQ ID NO: 1241397
ggaggcuauaccuguaaca

SEQ ID NO: 1269479 - RNA, 19 nt, Artificial Sequence
  Description of Artificial Sequence: Synthetic oligonucleotide
  Antisense strand to SEQ ID NO: 1269478
uguuacagguauagccucc

SEQ ID NO: 1269480 - RNA, 19 nt, Artificial Sequence
  Description of Artificial Sequence: Synthetic oligonucleotide
  Sense strand starting at position 2798 of SEQ ID NO: 1241397
aggcuauaccuguaacaag

SEQ ID NO: 1269481 - RNA, 19 nt, Artificial Sequence
  Description of Artificial Sequence: Synthetic oligonucleotide
  Antisense strand to SEQ ID NO: 1269480
cuuguuacagguauagccu

SEQ ID NO: 1269482 - RNA, 19 nt, Artificial Sequence
  Description of Artificial Sequence: Synthetic oligonucleotide
  Sense strand starting at position 2991 of SEQ ID NO: 1241397
agcagaauauuuguugugu

SEQ ID NO: 1269483 - RNA, 19 nt, Artificial Sequence
  Description of Artificial Sequence: Synthetic oligonucleotide
  Antisense strand to SEQ ID NO: 1269482
acacaacaaauauucugcu

SEQ ID NO: 1269484 - RNA, 19 nt, Artificial Sequence
  Description of Artificial Sequence: Synthetic oligonucleotide
  Sense strand starting at position 2992 of SEQ ID NO: 1241397
gcagaauauuuguuguguu

SEQ ID NO: 1269485 - RNA, 19 nt, Artificial Sequence
  Description of Artificial Sequence: Synthetic oligonucleotide
  Antisense strand to SEQ ID NO: 1269484
aacacaacaaauauucugc

SEQ ID NO: 1269486 - RNA, 19 nt, Artificial Sequence
  Description of Artificial Sequence: Synthetic oligonucleotide
  Sense strand starting at position 2999 of SEQ ID NO: 1241397
auuuguuguguuggcuaau

SEQ ID NO: 1269487 - RNA, 19 nt, Artificial Sequence
  Description of Artificial Sequence: Synthetic oligonucleotide
  Antisense strand to SEQ ID NO: 1269486
auuagccaacacaacaaau

SEQ ID NO: 1269488 - RNA, 19 nt, Artificial Sequence
  Description of Artificial Sequence: Synthetic oligonucleotide
  Sense strand starting at position 3002 of SEQ ID NO: 1241397
uguuguguuggcuaauauu

SEQ ID NO: 1269489 - RNA, 19 nt, Artificial Sequence
  Description of Artificial Sequence: Synthetic oligonucleotide
  Antisense strand to SEQ ID NO: 1269488
aauauuagccaacacaaca

SEQ ID NO: 1269490 - RNA, 19 nt, Artificial Sequence
  Description of Artificial Sequence: Synthetic oligonucleotide
  Sense strand starting at position 3016 of SEQ ID NO: 1241397
auauuaacugagugugucu

SEQ ID NO: 1269491 - RNA, 19 nt, Artificial Sequence
  Description of Artificial Sequence: Synthetic oligonucleotide
  Antisense strand to SEQ ID NO: 1269490
agacacacucaguuaauau

SEQ ID NO: 1269492 - RNA, 19 nt, Artificial Sequence
  Description of Artificial Sequence: Synthetic oligonucleotide
  Sense strand starting at position 3018 of SEQ ID NO: 1241397
auuaacugagugugucuaa

SEQ ID NO: 1269493 - RNA, 19 nt, Artificial Sequence
  Description of Artificial Sequence: Synthetic oligonucleotide
  Antisense strand to SEQ ID NO: 1269492
uuagacacacucaguuaau

SEQ ID NO: 1269494 - RNA, 19 nt, Artificial Sequence
  Description of Artificial Sequence: Synthetic oligonucleotide
  Sense strand starting at position 3021 of SEQ ID NO: 1241397
aacugagugugucuaacau

SEQ ID NO: 1269495 - RNA, 19 nt, Artificial Sequence
  Description of Artificial Sequence: Synthetic oligonucleotide
  Antisense strand to SEQ ID NO: 1269494
auguuagacacacucaguu

SEQ ID NO: 1269496 - RNA, 19 nt, Artificial Sequence
  Description of Artificial Sequence: Synthetic oligonucleotide
  Sense strand starting at position 3038 of SEQ ID NO: 1241397
auagcuggacucugagaca

SEQ ID NO: 1269497 - RNA, 19 nt, Artificial Sequence
  Description of Artificial Sequence: Synthetic oligonucleotide
  Antisense strand to SEQ ID NO: 1269496
ugucucagaguccagcuau

SEQ ID NO: 1269498 - RNA, 19 nt, Artificial Sequence
  Description of Artificial Sequence: Synthetic oligonucleotide
  Sense strand starting at position 3540 of SEQ ID NO: 1241397
gggaccuugucccuacuuu

SEQ ID NO: 1269499 - RNA, 19 nt, Artificial Sequence
  Description of Artificial Sequence: Synthetic oligonucleotide
  Antisense strand to SEQ ID NO: 1269498
aaaguagggacaagguccc

SEQ ID NO: 1269500 - RNA, 19 nt, Artificial Sequence
  Description of Artificial Sequence: Synthetic oligonucleotide
  Sense strand starting at position 3631 of SEQ ID NO: 1241397
guuguuauuuaucucuuga

SEQ ID NO: 1269501 - RNA, 19 nt, Artificial Sequence
  Description of Artificial Sequence: Synthetic oligonucleotide
  Antisense strand to SEQ ID NO: 1269500
ucaagagauaaauaacaac

SEQ ID NO: 1269502 - RNA, 19 nt, Artificial Sequence
  Description of Artificial Sequence: Synthetic oligonucleotide
  Sense strand starting at position 3638 of SEQ ID NO: 1241397
uuuaucucuugacuaguua

SEQ ID NO: 1269503 - RNA, 19 nt, Artificial Sequence
  Description of Artificial Sequence: Synthetic oligonucleotide
  Antisense strand to SEQ ID NO: 1269502
uaacuagucaagagauaaa

SEQ ID NO: 1269504 - RNA, 19 nt, Artificial Sequence
  Description of Artificial Sequence: Synthetic oligonucleotide
  Sense strand starting at position 19 of SEQ ID NO: 1241398
gucauuaaauugucacaga

SEQ ID NO: 1269505 - RNA, 19 nt, Artificial Sequence
  Description of Artificial Sequence: Synthetic oligonucleotide
  Antisense strand to SEQ ID NO: 1269504
ucugugacaauuuaaugac

SEQ ID NO: 1269506 - RNA, 19 nt, Artificial Sequence
  Description of Artificial Sequence: Synthetic oligonucleotide
  Sense strand starting at position 94 of SEQ ID NO: 1241398
gaggguuugguccaaguuu

SEQ ID NO: 1269507 - RNA, 19 nt, Artificial Sequence
  Description of Artificial Sequence: Synthetic oligonucleotide
  Antisense strand to SEQ ID NO: 1269506
aaacuuggaccaaacccuc

SEQ ID NO: 1269508 - RNA, 19 nt, Artificial Sequence
  Description of Artificial Sequence: Synthetic oligonucleotide
  Sense strand starting at position 914 of SEQ ID NO: 1241398
ggcauuaaggaguaucgca

SEQ ID NO: 1269509 - RNA, 19 nt, Artificial Sequence
  Description of Artificial Sequence: Synthetic oligonucleotide
  Antisense strand to SEQ ID NO: 1269508
ugcgauacuccuuaaugcc

SEQ ID NO: 1269510 - RNA, 19 nt, Artificial Sequence
  Description of Artificial Sequence: Synthetic oligonucleotide
  Sense strand starting at position 1077 of SEQ ID NO: 1241398
gggacuuaagccuggaauc

SEQ ID NO: 1269511 - RNA, 19 nt, Artificial Sequence
  Description of Artificial Sequence: Synthetic oligonucleotide
  Antisense strand to SEQ ID NO: 1269510
gauuccaggcuuaaguccc

SEQ ID NO: 1269512 - RNA, 19 nt, Artificial Sequence
  Description of Artificial Sequence: Synthetic oligonucleotide
  Sense strand starting at position 1078 of SEQ ID NO: 1241398
ggacuuaagccuggaaucu

SEQ ID NO: 1269513 - RNA, 19 nt, Artificial Sequence
  Description of Artificial Sequence: Synthetic oligonucleotide
  Antisense strand to SEQ ID NO: 1269512
agauuccaggcuuaagucc

SEQ ID NO: 1269514 - RNA, 19 nt, Artificial Sequence
  Description of Artificial Sequence: Synthetic oligonucleotide
  Sense strand starting at position 1487 of SEQ ID NO: 1241398
gaguuaaagggcugaguga

SEQ ID NO: 1269515 - RNA, 19 nt, Artificial Sequence
  Description of Artificial Sequence: Synthetic oligonucleotide
  Antisense strand to SEQ ID NO: 1269514
ucacucagcccuuuaacuc

SEQ ID NO: 1269516 - RNA, 19 nt, Artificial Sequence
  Description of Artificial Sequence: Synthetic oligonucleotide
  Sense strand starting at position 1488 of SEQ ID NO: 1241398
aguuaaagggcugagugaa

SEQ ID NO: 1269517 - RNA, 19 nt, Artificial Sequence
  Description of Artificial Sequence: Synthetic oligonucleotide
  Antisense strand to SEQ ID NO: 1269516
uucacucagcccuuuaacu

SEQ ID NO: 1269518 - RNA, 19 nt, Artificial Sequence
  Description of Artificial Sequence: Synthetic oligonucleotide
  Sense strand starting at position 2084 of SEQ ID NO: 1241398
gaaggugucugauuggcua

SEQ ID NO: 1269519 - RNA, 19 nt, Artificial Sequence
  Description of Artificial Sequence: Synthetic oligonucleotide
  Antisense strand to SEQ ID NO: 1269518
uagccaaucagacaccuuc

SEQ ID NO: 1269520 - RNA, 19 nt, Artificial Sequence
  Description of Artificial Sequence: Synthetic oligonucleotide
  Sense strand starting at position 2088 of SEQ ID NO: 1241398
gugucugauuggcuaggaa

SEQ ID NO: 1269521 - RNA, 19 nt, Artificial Sequence
  Description of Artificial Sequence: Synthetic oligonucleotide
  Antisense strand to SEQ ID NO: 1269520
uuccuagccaaucagacac

SEQ ID NO: 1269522 - RNA, 19 nt, Artificial Sequence
  Description of Artificial Sequence: Synthetic oligonucleotide
  Sense strand starting at position 2435 of SEQ ID NO: 1241398
ucguuauccgcgaugcguu

SEQ ID NO: 1269523 - RNA, 19 nt, Artificial Sequence
  Description of Artificial Sequence: Synthetic oligonucleotide
  Antisense strand to SEQ ID NO: 1269522
aacgcaucgcggauaacga

SEQ ID NO: 1269524 - RNA, 19 nt, Artificial Sequence
  Description of Artificial Sequence: Synthetic oligonucleotide
  Sense strand starting at position 2447 of SEQ ID NO: 1241398
augcguuuccuggcagcua

SEQ ID NO: 1269525 - RNA, 19 nt, Artificial Sequence
  Description of Artificial Sequence: Synthetic oligonucleotide
  Antisense strand to SEQ ID NO: 1269524
uagcugccaggaaacgcau

SEQ ID NO: 1269526 - RNA, 19 nt, Artificial Sequence
  Description of Artificial Sequence: Synthetic oligonucleotide
  Sense strand starting at position 2873 of SEQ ID NO: 1241398
uaugcuuuguaucuuggaa

SEQ ID NO: 1269527 - RNA, 19 nt, Artificial Sequence
  Description of Artificial Sequence: Synthetic oligonucleotide
  Antisense strand to SEQ ID NO: 1269526
uuccaagauacaaagcaua

SEQ ID NO: 1269528 - RNA, 19 nt, Artificial Sequence
  Description of Artificial Sequence: Synthetic oligonucleotide
  Sense strand starting at position 3012 of SEQ ID NO: 1241398
ggaaucuugugauucuuaa

SEQ ID NO: 1269529 - RNA, 19 nt, Artificial Sequence
  Description of Artificial Sequence: Synthetic oligonucleotide
  Antisense strand to SEQ ID NO: 1269528
uuaagaaucacaagauucc

SEQ ID NO: 1269530 - RNA, 19 nt, Artificial Sequence
  Description of Artificial Sequence: Synthetic oligonucleotide
  Sense strand starting at position 3019 of SEQ ID NO: 1241398
ugugauucuuaaucaguuu

SEQ ID NO: 1269531 - RNA, 19 nt, Artificial Sequence
  Description of Artificial Sequence: Synthetic oligonucleotide
  Antisense strand to SEQ ID NO: 1269530
aaacugauuaagaaucaca

SEQ ID NO: 1269532 - RNA, 19 nt, Artificial Sequence
  Description of Artificial Sequence: Synthetic oligonucleotide
  Sense strand starting at position 3064 of SEQ ID NO: 1241398
cuaaucacagcuugugaua

SEQ ID NO: 1269533 - RNA, 19 nt, Artificial Sequence
  Description of Artificial Sequence: Synthetic oligonucleotide
  Antisense strand to SEQ ID NO: 1269532
uaucacaagcugugauuag

SEQ ID NO: 1269534 - RNA, 19 nt, Artificial Sequence
  Description of Artificial Sequence: Synthetic oligonucleotide
  Sense strand starting at position 3107 of SEQ ID NO: 1241398
uuggaaucuuuguuggaaa

SEQ ID NO: 1269535 - RNA, 19 nt, Artificial Sequence
  Description of Artificial Sequence: Synthetic oligonucleotide
  Antisense strand to SEQ ID NO: 1269534
uuuccaacaaagauuccaa

SEQ ID NO: 1269536 - RNA, 19 nt, Artificial Sequence
  Description of Artificial Sequence: Synthetic oligonucleotide
  Sense strand starting at position 3139 of SEQ ID NO: 1241398
uagaaauucugagugccuu

SEQ ID NO: 1269537 - RNA, 19 nt, Artificial Sequence
  Description of Artificial Sequence: Synthetic oligonucleotide
  Antisense strand to SEQ ID NO: 1269536
aaggcacucagaauuucua

SEQ ID NO: 1269538 - RNA, 19 nt, Artificial Sequence
  Description of Artificial Sequence: Synthetic oligonucleotide
  Sense strand starting at position 3160 of SEQ ID NO: 1241398
uugagucgagucuauagaa

SEQ ID NO: 1269539 - RNA, 19 nt, Artificial Sequence
  Description of Artificial Sequence: Synthetic oligonucleotide
  Antisense strand to SEQ ID NO: 1269538
uucuauagacucgacucaa

SEQ ID NO: 1269540 - RNA, 19 nt, Artificial Sequence
  Description of Artificial Sequence: Synthetic oligonucleotide
  Sense strand starting at position 3168 of SEQ ID NO: 1241398
agucuauagaauugucgga

SEQ ID NO: 1269541 - RNA, 19 nt, Artificial Sequence
  Description of Artificial Sequence: Synthetic oligonucleotide
  Antisense strand to SEQ ID NO: 1269540
uccgacaauucuauagacu

SEQ ID NO: 1269542 - RNA, 19 nt, Artificial Sequence
  Description of Artificial Sequence: Synthetic oligonucleotide
  Sense strand starting at position 3170 of SEQ ID NO: 1241398
ucuauagaauugucggaac

SEQ ID NO: 1269543 - RNA, 19 nt, Artificial Sequence
  Description of Artificial Sequence: Synthetic oligonucleotide
  Antisense strand to SEQ ID NO: 1269542
guuccgacaauucuauaga

SEQ ID NO: 1269544 - RNA, 19 nt, Artificial Sequence
  Description of Artificial Sequence: Synthetic oligonucleotide
  Sense strand starting at position 3172 of SEQ ID NO: 1241398
uauagaauugucggaacag

SEQ ID NO: 1269545 - RNA, 19 nt, Artificial Sequence
  Description of Artificial Sequence: Synthetic oligonucleotide
  Antisense strand to SEQ ID NO: 1269544
cuguuccgacaauucuaua

SEQ ID NO: 1269546 - RNA, 19 nt, Artificial Sequence
  Description of Artificial Sequence: Synthetic oligonucleotide
  Sense strand starting at position 3188 of SEQ ID NO: 1241398
cagaaacucgagcaauguu

SEQ ID NO: 1269547 - RNA, 19 nt, Artificial Sequence
  Description of Artificial Sequence: Synthetic oligonucleotide
  Antisense strand to SEQ ID NO: 1269546
aacauugcucgaguuucug

SEQ ID NO: 1269548 - RNA, 19 nt, Artificial Sequence
  Description of Artificial Sequence: Synthetic oligonucleotide
  Sense strand starting at position 3198 of SEQ ID NO: 1241398
agcaauguuguucagaggu

SEQ ID NO: 1269549 - RNA, 19 nt, Artificial Sequence
  Description of Artificial Sequence: Synthetic oligonucleotide
  Antisense strand to SEQ ID NO: 1269548
accucugaacaacauugcu

SEQ ID NO: 1269550 - RNA, 19 nt, Artificial Sequence
  Description of Artificial Sequence: Synthetic oligonucleotide
  Sense strand starting at position 3204 of SEQ ID NO: 1241398
guuguucagagguggagau

SEQ ID NO: 1269551 - RNA, 19 nt, Artificial Sequence
  Description of Artificial Sequence: Synthetic oligonucleotide
  Antisense strand to SEQ ID NO: 1269550
aucuccaccucugaacaac

SEQ ID NO: 1269552 - RNA, 19 nt, Artificial Sequence
  Description of Artificial Sequence: Synthetic oligonucleotide
  Sense strand starting at position 3205 of SEQ ID NO: 1241398
uuguucagagguggagaua

SEQ ID NO: 1269553 - RNA, 19 nt, Artificial Sequence
  Description of Artificial Sequence: Synthetic oligonucleotide
  Antisense strand to SEQ ID NO: 1269552
uaucuccaccucugaacaa

SEQ ID NO: 1269554 - RNA, 19 nt, Artificial Sequence
  Description of Artificial Sequence: Synthetic oligonucleotide
  Sense strand starting at position 3250 of SEQ ID NO: 1241398
gcaugaaacugacuuugua

SEQ ID NO: 1269555 - RNA, 19 nt, Artificial Sequence
  Description of Artificial Sequence: Synthetic oligonucleotide
  Antisense strand to SEQ ID NO: 1269554
uacaaagucaguuucaugc

SEQ ID NO: 1269556 - RNA, 19 nt, Artificial Sequence
  Description of Artificial Sequence: Synthetic oligonucleotide
  Sense strand starting at position 3253 of SEQ ID NO: 1241398
ugaaacugacuuuguaaga

SEQ ID NO: 1269557 - RNA, 19 nt, Artificial Sequence
  Description of Artificial Sequence: Synthetic oligonucleotide
  Antisense strand to SEQ ID NO: 1269556
ucuuacaaagucaguuuca

SEQ ID NO: 1269558 - RNA, 19 nt, Artificial Sequence
  Description of Artificial Sequence: Synthetic oligonucleotide
  Sense strand starting at position 3254 of SEQ ID NO: 1241398
gaaacugacuuuguaagau

SEQ ID NO: 1269559 - RNA, 19 nt, Artificial Sequence
  Description of Artificial Sequence: Synthetic oligonucleotide
  Antisense strand to SEQ ID NO: 1269558
aucuuacaaagucaguuuc

SEQ ID NO: 1269560 - RNA, 19 nt, Artificial Sequence
  Description of Artificial Sequence: Synthetic oligonucleotide
  Sense strand starting at position 3295 of SEQ ID NO: 1241398
gagaucguauaaucaauca

SEQ ID NO: 1269561 - RNA, 19 nt, Artificial Sequence
  Description of Artificial Sequence: Synthetic oligonucleotide
  Antisense strand to SEQ ID NO: 1269560
ugauugauuauacgaucuc

SEQ ID NO: 1269562 - RNA, 19 nt, Artificial Sequence
  Description of Artificial Sequence: Synthetic oligonucleotide
  Sense strand starting at position 3312 of SEQ ID NO: 1241398
cauugaauuccagggaugu

SEQ ID NO: 1269563 - RNA, 19 nt, Artificial Sequence
  Description of Artificial Sequence: Synthetic oligonucleotide
  Antisense strand to SEQ ID NO: 1269562
acaucccuggaauucaaug

SEQ ID NO: 1269564 - RNA, 19 nt, Artificial Sequence
  Description of Artificial Sequence: Synthetic oligonucleotide
  Sense strand starting at position 3313 of SEQ ID NO: 1241398
auugaauuccagggauguu

SEQ ID NO: 1269565 - RNA, 19 nt, Artificial Sequence
  Description of Artificial Sequence: Synthetic oligonucleotide
  Antisense strand to SEQ ID NO: 1269564
aacaucccuggaauucaau

SEQ ID NO: 1269566 - RNA, 19 nt, Artificial Sequence
  Description of Artificial Sequence: Synthetic oligonucleotide
  Sense strand starting at position 3437 of SEQ ID NO: 1241398
ugggauuugcaguggcgaa

SEQ ID NO: 1269567 - RNA, 19 nt, Artificial Sequence
  Description of Artificial Sequence: Synthetic oligonucleotide
  Antisense strand to SEQ ID NO: 1269566
uucgccacugcaaauccca

SEQ ID NO: 1269568 - RNA, 19 nt, Artificial Sequence
  Description of Artificial Sequence: Synthetic oligonucleotide
  Sense strand starting at position 3438 of SEQ ID NO: 1241398
gggauuugcaguggcgaaa

SEQ ID NO: 1269569 - RNA, 19 nt, Artificial Sequence
  Description of Artificial Sequence: Synthetic oligonucleotide
  Antisense strand to SEQ ID NO: 1269568
uuucgccacugcaaauccc

SEQ ID NO: 1269570 - RNA, 19 nt, Artificial Sequence
  Description of Artificial Sequence: Synthetic oligonucleotide
  Sense strand starting at position 3562 of SEQ ID NO: 1241398
cggguaugggcuuggaaag

SEQ ID NO: 1269571 - RNA, 19 nt, Artificial Sequence
  Description of Artificial Sequence: Synthetic oligonucleotide
  Antisense strand to SEQ ID NO: 1269570
cuuuccaagcccauacccg

SEQ ID NO: 1269572 - RNA, 19 nt, Artificial Sequence
  Description of Artificial Sequence: Synthetic oligonucleotide
  Sense strand starting at position 3563 of SEQ ID NO: 1241398
ggguaugggcuuggaaagu

SEQ ID NO: 1269573 - RNA, 19 nt, Artificial Sequence
  Description of Artificial Sequence: Synthetic oligonucleotide
  Antisense strand to SEQ ID NO: 1269572
acuuuccaagcccauaccc

SEQ ID NO: 1269574 - RNA, 19 nt, Artificial Sequence
  Description of Artificial Sequence: Synthetic oligonucleotide
  Sense strand starting at position 3660 of SEQ ID NO: 1241398
ugucauuugcugcaucgga

SEQ ID NO: 1269575 - RNA, 19 nt, Artificial Sequence
  Description of Artificial Sequence: Synthetic oligonucleotide
  Antisense strand to SEQ ID NO: 1269574
uccgaugcagcaaaugaca

SEQ ID NO: 1269576 - RNA, 19 nt, Artificial Sequence
  Description of Artificial Sequence: Synthetic oligonucleotide
  Sense strand starting at position 3728 of SEQ ID NO: 1241398
gugauaucauuaccaggag

SEQ ID NO: 1269577 - RNA, 19 nt, Artificial Sequence
  Description of Artificial Sequence: Synthetic oligonucleotide
  Antisense strand to SEQ ID NO: 1269576
cuccugguaaugauaucac

SEQ ID NO: 1269578 - RNA, 19 nt, Artificial Sequence
  Description of Artificial Sequence: Synthetic oligonucleotide
  Sense strand starting at position 3731 of SEQ ID NO: 1241398
auaucauuaccaggagcaa

SEQ ID NO: 1269579 - RNA, 19 nt, Artificial Sequence
  Description of Artificial Sequence: Synthetic oligonucleotide
  Antisense strand to SEQ ID NO: 1269578
uugcuccugguaaugauau

SEQ ID NO: 1269580 - RNA, 19 nt, Artificial Sequence
  Description of Artificial Sequence: Synthetic oligonucleotide
  Sense strand starting at position 3793 of SEQ ID NO: 1241398
cuaaacucguagcuaauuu

SEQ ID NO: 1269581 - RNA, 19 nt, Artificial Sequence
  Description of Artificial Sequence: Synthetic oligonucleotide
  Antisense strand to SEQ ID NO: 1269580
aaauuagcuacgaguuuag

SEQ ID NO: 1269582 - RNA, 19 nt, Artificial Sequence
  Description of Artificial Sequence: Synthetic oligonucleotide
  Sense strand starting at position 3797 of SEQ ID NO: 1241398
acucguagcuaauuuguua

SEQ ID NO: 1269583 - RNA, 19 nt, Artificial Sequence
  Description of Artificial Sequence: Synthetic oligonucleotide
  Antisense strand to SEQ ID NO: 1269582
uaacaaauuagcuacgagu

SEQ ID NO: 1269584 - RNA, 19 nt, Artificial Sequence
  Description of Artificial Sequence: Synthetic oligonucleotide
  Sense strand starting at position 741 of SEQ ID NO: 1241399
cgauugaguccgggagguu

SEQ ID NO: 1269585 - RNA, 19 nt, Artificial Sequence
  Description of Artificial Sequence: Synthetic oligonucleotide
  Antisense strand to SEQ ID NO: 1269584
aaccucccggacucaaucg

SEQ ID NO: 1269586 - RNA, 19 nt, Artificial Sequence
  Description of Artificial Sequence: Synthetic oligonucleotide
  Sense strand starting at position 1109 of SEQ ID NO: 1241399
gaaugaacguccgcugcau

SEQ ID NO: 1269587 - RNA, 19 nt, Artificial Sequence
  Description of Artificial Sequence: Synthetic oligonucleotide
  Antisense strand to SEQ ID NO: 1269586
augcagcggacguucauuc

SEQ ID NO: 1269588 - RNA, 19 nt, Artificial Sequence
  Description of Artificial Sequence: Synthetic oligonucleotide
  Sense strand starting at position 1135 of SEQ ID NO: 1241399
ggcaauaagcuggacugua

SEQ ID NO: 1269589 - RNA, 19 nt, Artificial Sequence
  Description of Artificial Sequence: Synthetic oligonucleotide
  Antisense strand to SEQ ID NO: 1269588
uacaguccagcuuauugcc

SEQ ID NO: 1269590 - RNA, 19 nt, Artificial Sequence
  Description of Artificial Sequence: Synthetic oligonucleotide
  Sense strand starting at position 1195 of SEQ ID NO: 1241399
ggcuucucuccauggccaa

SEQ ID NO: 1269591 - RNA, 19 nt, Artificial Sequence
  Description of Artificial Sequence: Synthetic oligonucleotide
  Antisense strand to SEQ ID NO: 1269590
uuggccauggagagaagcc

SEQ ID NO: 1269592 - RNA, 19 nt, Artificial Sequence
  Description of Artificial Sequence: Synthetic oligonucleotide
  Sense strand starting at position 1423 of SEQ ID NO: 1241399
gggacuccucuccgagcua

SEQ ID NO: 1269593 - RNA, 19 nt, Artificial Sequence
  Description of Artificial Sequence: Synthetic oligonucleotide
  Antisense strand to SEQ ID NO: 1269592
uagcucggagaggaguccc

SEQ ID NO: 1269594 - RNA, 19 nt, Artificial Sequence
  Description of Artificial Sequence: Synthetic oligonucleotide
  Sense strand starting at position 2271 of SEQ ID NO: 1241399
gaauuccuguucgcgggaa

SEQ ID NO: 1269595 - RNA, 19 nt, Artificial Sequence
  Description of Artificial Sequence: Synthetic oligonucleotide
  Antisense strand to SEQ ID NO: 1269594
uucccgcgaacaggaauuc

SEQ ID NO: 1269596 - RNA, 19 nt, Artificial Sequence
  Description of Artificial Sequence: Synthetic oligonucleotide
  Sense strand starting at position 2458 of SEQ ID NO: 1241399
ccgggcagauguuugguua

SEQ ID NO: 1269597 - RNA, 19 nt, Artificial Sequence
  Description of Artificial Sequence: Synthetic oligonucleotide
  Antisense strand to SEQ ID NO: 1269596
uaaccaaacaucugcccgg

SEQ ID NO: 1269598 - RNA, 19 nt, Artificial Sequence
  Description of Artificial Sequence: Synthetic oligonucleotide
  Sense strand starting at position 2459 of SEQ ID NO: 1241399
cgggcagauguuugguuau

SEQ ID NO: 1269599 - RNA, 19 nt, Artificial Sequence
  Description of Artificial Sequence: Synthetic oligonucleotide
  Antisense strand to SEQ ID NO: 1269598
auaaccaaacaucugcccg

SEQ ID NO: 1269600 - RNA, 19 nt, Artificial Sequence
  Description of Artificial Sequence: Synthetic oligonucleotide
  Sense strand starting at position 2470 of SEQ ID NO: 1241399
uugguuaugccucgaggaa

SEQ ID NO: 1269601 - RNA, 19 nt, Artificial Sequence
  Description of Artificial Sequence: Synthetic oligonucleotide
  Antisense strand to SEQ ID NO: 1269600
uuccucgaggcauaaccaa

SEQ ID NO: 1269602 - RNA, 19 nt, Artificial Sequence
  Description of Artificial Sequence: Synthetic oligonucleotide
  Sense strand starting at position 2471 of SEQ ID NO: 1241399
ugguuaugccucgaggaag

SEQ ID NO: 1269603 - RNA, 19 nt, Artificial Sequence
  Description of Artificial Sequence: Synthetic oligonucleotide
  Antisense strand to SEQ ID NO: 1269602
cuuccucgaggcauaacca

SEQ ID NO: 1269604 - RNA, 19 nt, Artificial Sequence
  Description of Artificial Sequence: Synthetic oligonucleotide
  Sense strand starting at position 2472 of SEQ ID NO: 1241399
gguuaugccucgaggaagg

SEQ ID NO: 1269605 - RNA, 19 nt, Artificial Sequence
  Description of Artificial Sequence: Synthetic oligonucleotide
  Antisense strand to SEQ ID NO: 1269604
ccuuccucgaggcauaacc

SEQ ID NO: 1269606 - RNA, 19 nt, Artificial Sequence
  Description of Artificial Sequence: Synthetic oligonucleotide
  Sense strand starting at position 2595 of SEQ ID NO: 1241399
cacccaguguccucggaau

SEQ ID NO: 1269607 - RNA, 19 nt, Artificial Sequence
  Description of Artificial Sequence: Synthetic oligonucleotide
  Antisense strand to SEQ ID NO: 1269606
auuccgaggacacugggug

SEQ ID NO: 1269608 - RNA, 19 nt, Artificial Sequence
  Description of Artificial Sequence: Synthetic oligonucleotide
  Sense strand starting at position 2597 of SEQ ID NO: 1241399
cccaguguccucggaaugu

SEQ ID NO: 1269609 - RNA, 19 nt, Artificial Sequence
  Description of Artificial Sequence: Synthetic oligonucleotide
  Antisense strand to SEQ ID NO: 1269608
acauuccgaggacacuggg

SEQ ID NO: 1269610 - RNA, 19 nt, Artificial Sequence
  Description of Artificial Sequence: Synthetic oligonucleotide
  Sense strand starting at position 2966 of SEQ ID NO: 1241399
aguugagacucagauguga

SEQ ID NO: 1269611 - RNA, 19 nt, Artificial Sequence
  Description of Artificial Sequence: Synthetic oligonucleotide
  Antisense strand to SEQ ID NO: 1269610
ucacaucugagucucaacu

SEQ ID NO: 1269612 - RNA, 19 nt, Artificial Sequence
  Description of Artificial Sequence: Synthetic oligonucleotide
  Sense strand starting at position 2971 of SEQ ID NO: 1241399
agacucagaugugaggaua

SEQ ID NO: 1269613 - RNA, 19 nt, Artificial Sequence
  Description of Artificial Sequence: Synthetic oligonucleotide
  Antisense strand to SEQ ID NO: 1269612
uauccucacaucugagucu

SEQ ID NO: 1269614 - RNA, 19 nt, Artificial Sequence
  Description of Artificial Sequence: Synthetic oligonucleotide
  Sense strand starting at position 3017 of SEQ ID NO: 1241399
ggucgucgccuaguuguau

SEQ ID NO: 1269615 - RNA, 19 nt, Artificial Sequence
  Description of Artificial Sequence: Synthetic oligonucleotide
  Antisense strand to SEQ ID NO: 1269614
auacaacuaggcgacgacc

SEQ ID NO: 1269616 - RNA, 19 nt, Artificial Sequence
  Description of Artificial Sequence: Synthetic oligonucleotide
  Sense strand starting at position 3028 of SEQ ID NO: 1241399
aguuguauccugggugaaa

SEQ ID NO: 1269617 - RNA, 19 nt, Artificial Sequence
  Description of Artificial Sequence: Synthetic oligonucleotide
  Antisense strand to SEQ ID NO: 1269616
uuucacccaggauacaacu

SEQ ID NO: 1269618 - RNA, 19 nt, Artificial Sequence
  Description of Artificial Sequence: Synthetic oligonucleotide
  Sense strand starting at position 3029 of SEQ ID NO: 1241399
guuguauccugggugaaac

SEQ ID NO: 1269619 - RNA, 19 nt, Artificial Sequence
  Description of Artificial Sequence: Synthetic oligonucleotide
  Antisense strand to SEQ ID NO: 1269618
guuucacccaggauacaac

SEQ ID NO: 1269620 - RNA, 19 nt, Artificial Sequence
  Description of Artificial Sequence: Synthetic oligonucleotide
  Sense strand starting at position 3030 of SEQ ID NO: 1241399
uuguauccugggugaaaca

SEQ ID NO: 1269621 - RNA, 19 nt, Artificial Sequence
  Description of Artificial Sequence: Synthetic oligonucleotide
  Antisense strand to SEQ ID NO: 1269620
uguuucacccaggauacaa

SEQ ID NO: 1269622 - RNA, 19 nt, Artificial Sequence
  Description of Artificial Sequence: Synthetic oligonucleotide
  Sense strand starting at position 3415 of SEQ ID NO: 1241399
cugggucugggucaaguua

SEQ ID NO: 1269623 - RNA, 19 nt, Artificial Sequence
  Description of Artificial Sequence: Synthetic oligonucleotide
  Antisense strand to SEQ ID NO: 1269622
uaacuugacccagacccag

SEQ ID NO: 1269624 - RNA, 19 nt, Artificial Sequence
  Description of Artificial Sequence: Synthetic oligonucleotide
  Sense strand starting at position 3417 of SEQ ID NO: 1241399
gggucugggucaaguuaga

SEQ ID NO: 1269625 - RNA, 19 nt, Artificial Sequence
  Description of Artificial Sequence: Synthetic oligonucleotide
  Antisense strand to SEQ ID NO: 1269624
ucuaacuugacccagaccc

SEQ ID NO: 1269626 - RNA, 19 nt, Artificial Sequence
  Description of Artificial Sequence: Synthetic oligonucleotide
  Sense strand starting at position 3586 of SEQ ID NO: 1241399
gugauauuauuggacaaau

SEQ ID NO: 1269627 - RNA, 19 nt, Artificial Sequence
  Description of Artificial Sequence: Synthetic oligonucleotide
  Antisense strand to SEQ ID NO: 1269626
auuuguccaauaauaucac

SEQ ID NO: 1269628 - RNA, 19 nt, Artificial Sequence
  Description of Artificial Sequence: Synthetic oligonucleotide
  Sense strand starting at position 3598 of SEQ ID NO: 1241399
gacaaauuauuugacgucu

SEQ ID NO: 1269629 - RNA, 19 nt, Artificial Sequence
  Description of Artificial Sequence: Synthetic oligonucleotide
  Antisense strand to SEQ ID NO: 1269628
agacgucaaauaauuuguc

SEQ ID NO: 1269630 - RNA, 19 nt, Artificial Sequence
  Description of Artificial Sequence: Synthetic oligonucleotide
  Sense strand starting at position 3613 of SEQ ID NO: 1241399
gucuucgugcucuugucau

SEQ ID NO: 1269631 - RNA, 19 nt, Artificial Sequence
  Description of Artificial Sequence: Synthetic oligonucleotide
  Antisense strand to SEQ ID NO: 1269630
augacaagagcacgaagac

SEQ ID NO: 1269632 - RNA, 19 nt, Artificial Sequence
  Description of Artificial Sequence: Synthetic oligonucleotide
  Sense strand starting at position 3619 of SEQ ID NO: 1241399
gugcucuugucaucuguaa

SEQ ID NO: 1269633 - RNA, 19 nt, Artificial Sequence
  Description of Artificial Sequence: Synthetic oligonucleotide
  Antisense strand to SEQ ID NO: 1269632
uuacagaugacaagagcac

SEQ ID NO: 1269634 - RNA, 19 nt, Artificial Sequence
  Description of Artificial Sequence: Synthetic oligonucleotide
  Sense strand starting at position 3688 of SEQ ID NO: 1241399
aagugugagaagugugagu

SEQ ID NO: 1269635 - RNA, 19 nt, Artificial Sequence
  Description of Artificial Sequence: Synthetic oligonucleotide
  Antisense strand to SEQ ID NO: 1269634
acucacacuucucacacuu

SEQ ID NO: 1269636 - RNA, 19 nt, Artificial Sequence
  Description of Artificial Sequence: Synthetic oligonucleotide
  Sense strand starting at position 3690 of SEQ ID NO: 1241399
gugugagaagugugaguaa

SEQ ID NO: 1269637 - RNA, 19 nt, Artificial Sequence
  Description of Artificial Sequence: Synthetic oligonucleotide
  Antisense strand to SEQ ID NO: 1269636
uuacucacacuucucacac

SEQ ID NO: 1269638 - RNA, 19 nt, Artificial Sequence
  Description of Artificial Sequence: Synthetic oligonucleotide
  Sense strand starting at position 3693 of SEQ ID NO: 1241399
ugagaagugugaguaaaug

SEQ ID NO: 1269639 - RNA, 19 nt, Artificial Sequence
  Description of Artificial Sequence: Synthetic oligonucleotide
  Antisense strand to SEQ ID NO: 1269638
cauuuacucacacuucuca

SEQ ID NO: 1269640 - RNA, 19 nt, Artificial Sequence
  Description of Artificial Sequence: Synthetic oligonucleotide
  Sense strand starting at position 3699 of SEQ ID NO: 1241399
gugugaguaaaugagaagu

SEQ ID NO: 1269641 - RNA, 19 nt, Artificial Sequence
  Description of Artificial Sequence: Synthetic oligonucleotide
  Antisense strand to SEQ ID NO: 1269640
acuucucauuuacucacac

SEQ ID NO: 1269642 - RNA, 19 nt, Artificial Sequence
  Description of Artificial Sequence: Synthetic oligonucleotide
  Sense strand starting at position 3701 of SEQ ID NO: 1241399
gugaguaaaugagaaguaa

SEQ ID NO: 1269643 - RNA, 19 nt, Artificial Sequence
  Description of Artificial Sequence: Synthetic oligonucleotide
  Antisense strand to SEQ ID NO: 1269642
uuacuucucauuuacucac

SEQ ID NO: 1269644 - RNA, 19 nt, Artificial Sequence
  Description of Artificial Sequence: Synthetic oligonucleotide
  Sense strand starting at position 3712 of SEQ ID NO: 1241399
agaaguaaaugugaaguaa

SEQ ID NO: 1269645 - RNA, 19 nt, Artificial Sequence
  Description of Artificial Sequence: Synthetic oligonucleotide
  Antisense strand to SEQ ID NO: 1269644
uuacuucacauuuacuucu

SEQ ID NO: 1269646 - RNA, 19 nt, Artificial Sequence
  Description of Artificial Sequence: Synthetic oligonucleotide
  Sense strand starting at position 3716 of SEQ ID NO: 1241399
guaaaugugaaguaaaugu

SEQ ID NO: 1269647 - RNA, 19 nt, Artificial Sequence
  Description of Artificial Sequence: Synthetic oligonucleotide
  Antisense strand to SEQ ID NO: 1269646
acauuuacuucacauuuac

SEQ ID NO: 1269648 - RNA, 19 nt, Artificial Sequence
  Description of Artificial Sequence: Synthetic oligonucleotide
  Sense strand starting at position 3720 of SEQ ID NO: 1241399
augugaaguaaaugugagu

SEQ ID NO: 1269649 - RNA, 19 nt, Artificial Sequence
  Description of Artificial Sequence: Synthetic oligonucleotide
  Antisense strand to SEQ ID NO: 1269648
acucacauuuacuucacau

SEQ ID NO: 1269650 - RNA, 19 nt, Artificial Sequence
  Description of Artificial Sequence: Synthetic oligonucleotide
  Sense strand starting at position 3723 of SEQ ID NO: 1241399
ugaaguaaaugugaguaaa

SEQ ID NO: 1269651 - RNA, 19 nt, Artificial Sequence
  Description of Artificial Sequence: Synthetic oligonucleotide
  Antisense strand to SEQ ID NO: 1269650
uuuacucacauuuacuuca

SEQ ID NO: 1269652 - RNA, 19 nt, Artificial Sequence
  Description of Artificial Sequence: Synthetic oligonucleotide
  Sense strand starting at position 3725 of SEQ ID NO: 1241399
aaguaaaugugaguaaaug

SEQ ID NO: 1269653 - RNA, 19 nt, Artificial Sequence
  Description of Artificial Sequence: Synthetic oligonucleotide
  Antisense strand to SEQ ID NO: 1269652
cauuuacucacauuuacuu

SEQ ID NO: 1269654 - RNA, 19 nt, Artificial Sequence
  Description of Artificial Sequence: Synthetic oligonucleotide
  Sense strand starting at position 3744 of SEQ ID NO: 1241399
agaaguaaaugugaguaaa

SEQ ID NO: 1269655 - RNA, 19 nt, Artificial Sequence
  Description of Artificial Sequence: Synthetic oligonucleotide
  Antisense strand to SEQ ID NO: 1269654
uuuacucacauuuacuucu

SEQ ID NO: 1269656 - RNA, 19 nt, Artificial Sequence
  Description of Artificial Sequence: Synthetic oligonucleotide
  Sense strand starting at position 3773 of SEQ ID NO: 1241399
gguuuccauguugagaauu

SEQ ID NO: 1269657 - RNA, 19 nt, Artificial Sequence
  Description of Artificial Sequence: Synthetic oligonucleotide
  Antisense strand to SEQ ID NO: 1269656
aauucucaacauggaaacc

SEQ ID NO: 1269658 - RNA, 19 nt, Artificial Sequence
  Description of Artificial Sequence: Synthetic oligonucleotide
  Sense strand starting at position 3785 of SEQ ID NO: 1241399
gagaauuuguauuagaaug

SEQ ID NO: 1269659 - RNA, 19 nt, Artificial Sequence
  Description of Artificial Sequence: Synthetic oligonucleotide
  Antisense strand to SEQ ID NO: 1269658
cauucuaauacaaauucuc

SEQ ID NO: 1269660 - RNA, 19 nt, Artificial Sequence
  Description of Artificial Sequence: Synthetic oligonucleotide
  Sense strand starting at position 3837 of SEQ ID NO: 1241399
gucgaauauuggcaauuuc

SEQ ID NO: 1269661 - RNA, 19 nt, Artificial Sequence
  Description of Artificial Sequence: Synthetic oligonucleotide
  Antisense strand to SEQ ID NO: 1269660
gaaauugccaauauucgac

SEQ ID NO: 1269662 - RNA, 19 nt, Artificial Sequence
  Description of Artificial Sequence: Synthetic oligonucleotide
  Sense strand starting at position 3897 of SEQ ID NO: 1241399
cucaaauguuagccuaaag

SEQ ID NO: 1269663 - RNA, 19 nt, Artificial Sequence
  Description of Artificial Sequence: Synthetic oligonucleotide
  Antisense strand to SEQ ID NO: 1269662
cuuuaggcuaacauuugag

SEQ ID NO: 1269664 - RNA, 19 nt, Artificial Sequence
  Description of Artificial Sequence: Synthetic oligonucleotide
  Sense strand starting at position 104 of SEQ ID NO: 1241400
ucaauucuccaagaugugu

SEQ ID NO: 1269665 - RNA, 19 nt, Artificial Sequence
  Description of Artificial Sequence: Synthetic oligonucleotide
  Antisense strand to SEQ ID NO: 1269664
acacaucuuggagaauuga

SEQ ID NO: 1269666 - RNA, 19 nt, Artificial Sequence
  Description of Artificial Sequence: Synthetic oligonucleotide
  Sense strand starting at position 195 of SEQ ID NO: 1241400
agguuuccaccuggaguuu

SEQ ID NO: 1269667 - RNA, 19 nt, Artificial Sequence
  Description of Artificial Sequence: Synthetic oligonucleotide
  Antisense strand to SEQ ID NO: 1269666
aaacuccagguggaaaccu

SEQ ID NO: 1269668 - RNA, 19 nt, Artificial Sequence
  Description of Artificial Sequence: Synthetic oligonucleotide
  Sense strand starting at position 230 of SEQ ID NO: 1241400
gcuagauucucuuaggcuu

SEQ ID NO: 1269669 - RNA, 19 nt, Artificial Sequence
  Description of Artificial Sequence: Synthetic oligonucleotide
  Antisense strand to SEQ ID NO: 1269668
aagccuaagagaaucuagc

SEQ ID NO: 1269670 - RNA, 19 nt, Artificial Sequence
  Description of Artificial Sequence: Synthetic oligonucleotide
  Sense strand starting at position 241 of SEQ ID NO: 1241400
uuaggcuugcauugagaaa

SEQ ID NO: 1269671 - RNA, 19 nt, Artificial Sequence
  Description of Artificial Sequence: Synthetic oligonucleotide
  Antisense strand to SEQ ID NO: 1269670
uuucucaaugcaagccuaa

SEQ ID NO: 1269672 - RNA, 19 nt, Artificial Sequence
  Description of Artificial Sequence: Synthetic oligonucleotide
  Sense strand starting at position 324 of SEQ ID NO: 1241400
aagacucaguaguucugua

SEQ ID NO: 1269673 - RNA, 19 nt, Artificial Sequence
  Description of Artificial Sequence: Synthetic oligonucleotide
  Antisense strand to SEQ ID NO: 1269672
uacagaacuacugagucuu

SEQ ID NO: 1269674 - RNA, 19 nt, Artificial Sequence
  Description of Artificial Sequence: Synthetic oligonucleotide
  Sense strand starting at position 328 of SEQ ID NO: 1241400
cucaguaguucuguaauuu

SEQ ID NO: 1269675 - RNA, 19 nt, Artificial Sequence
  Description of Artificial Sequence: Synthetic oligonucleotide
  Antisense strand to SEQ ID NO: 1269674
aaauuacagaacuacugag

SEQ ID NO: 1269676 - RNA, 19 nt, Artificial Sequence
  Description of Artificial Sequence: Synthetic oligonucleotide
  Sense strand starting at position 345 of SEQ ID NO: 1241400
uuauuaagaacgugaucug

SEQ ID NO: 1269677 - RNA, 19 nt, Artificial Sequence
  Description of Artificial Sequence: Synthetic oligonucleotide
  Antisense strand to SEQ ID NO: 1269676
cagaucacguucuuaauaa

SEQ ID NO: 1269678 - RNA, 19 nt, Artificial Sequence
  Description of Artificial Sequence: Synthetic oligonucleotide
  Sense strand starting at position 346 of SEQ ID NO: 1241400
uauuaagaacgugaucugu

SEQ ID NO: 1269679 - RNA, 19 nt, Artificial Sequence
  Description of Artificial Sequence: Synthetic oligonucleotide
  Antisense strand to SEQ ID NO: 1269678
acagaucacguucuuaaua

SEQ ID NO: 1269680 - RNA, 19 nt, Artificial Sequence
  Description of Artificial Sequence: Synthetic oligonucleotide
  Sense strand starting at position 348 of SEQ ID NO: 1241400
uuaagaacgugaucuguua

SEQ ID NO: 1269681 - RNA, 19 nt, Artificial Sequence
  Description of Artificial Sequence: Synthetic oligonucleotide
  Antisense strand to SEQ ID NO: 1269680
uaacagaucacguucuuaa

SEQ ID NO: 1269682 - RNA, 19 nt, Artificial Sequence
  Description of Artificial Sequence: Synthetic oligonucleotide
  Sense strand starting at position 361 of SEQ ID NO: 1241400
cuguuaaacaccggagacu

SEQ ID NO: 1269683 - RNA, 19 nt, Artificial Sequence
  Description of Artificial Sequence: Synthetic oligonucleotide
  Antisense strand to SEQ ID NO: 1269682
agucuccgguguuuaacag

SEQ ID NO: 1269684 - RNA, 19 nt, Artificial Sequence
  Description of Artificial Sequence: Synthetic oligonucleotide
  Sense strand starting at position 656 of SEQ ID NO: 1241400
ugggcuuaaccucaugaua

SEQ ID NO: 1269685 - RNA, 19 nt, Artificial Sequence
  Description of Artificial Sequence: Synthetic oligonucleotide
  Antisense strand to SEQ ID NO: 1269684
uaucaugagguuaagccca

SEQ ID NO: 1269686 - RNA, 19 nt, Artificial Sequence
  Description of Artificial Sequence: Synthetic oligonucleotide
  Sense strand starting at position 658 of SEQ ID NO: 1241400
ggcuuaaccucaugauaug

SEQ ID NO: 1269687 - RNA, 19 nt, Artificial Sequence
  Description of Artificial Sequence: Synthetic oligonucleotide
  Antisense strand to SEQ ID NO: 1269686
cauaucaugagguuaagcc

SEQ ID NO: 1269688 - RNA, 19 nt, Artificial Sequence
  Description of Artificial Sequence: Synthetic oligonucleotide
  Sense strand starting at position 664 of SEQ ID NO: 1241400
accucaugauaugcaauga

SEQ ID NO: 1269689 - RNA, 19 nt, Artificial Sequence
  Description of Artificial Sequence: Synthetic oligonucleotide
  Antisense strand to SEQ ID NO: 1269688
ucauugcauaucaugaggu

SEQ ID NO: 1269690 - RNA, 19 nt, Artificial Sequence
  Description of Artificial Sequence: Synthetic oligonucleotide
  Sense strand starting at position 1161 of SEQ ID NO: 1241400
cggcgaaggccuggaaauu

SEQ ID NO: 1269691 - RNA, 19 nt, Artificial Sequence
  Description of Artificial Sequence: Synthetic oligonucleotide
  Antisense strand to SEQ ID NO: 1269690
aauuuccaggccuucgccg

SEQ ID NO: 1269692 - RNA, 19 nt, Artificial Sequence
  Description of Artificial Sequence: Synthetic oligonucleotide
  Sense strand starting at position 1230 of SEQ ID NO: 1241400
ucagaaaggucugcaucuu

SEQ ID NO: 1269693 - RNA, 19 nt, Artificial Sequence
  Description of Artificial Sequence: Synthetic oligonucleotide
  Antisense strand to SEQ ID NO: 1269692
aagaugcagaccuuucuga

SEQ ID NO: 1269694 - RNA, 19 nt, Artificial Sequence
  Description of Artificial Sequence: Synthetic oligonucleotide
  Sense strand starting at position 2151 of SEQ ID NO: 1241400
gucuuacuucgggaaggga

SEQ ID NO: 1269695 - RNA, 19 nt, Artificial Sequence
  Description of Artificial Sequence: Synthetic oligonucleotide
  Antisense strand to SEQ ID NO: 1269694
ucccuucccgaaguaagac

SEQ ID NO: 1269696 - RNA, 19 nt, Artificial Sequence
  Description of Artificial Sequence: Synthetic oligonucleotide
  Sense strand starting at position 2218 of SEQ ID NO: 1241400
cgcugaguuucggaaacgu

SEQ ID NO: 1269697 - RNA, 19 nt, Artificial Sequence
  Description of Artificial Sequence: Synthetic oligonucleotide
  Antisense strand to SEQ ID NO: 1269696
acguuuccgaaacucagcg

SEQ ID NO: 1269698 - RNA, 19 nt, Artificial Sequence
  Description of Artificial Sequence: Synthetic oligonucleotide
  Sense strand starting at position 2596 of SEQ ID NO: 1241400
ccucaauggucucuggguu

SEQ ID NO: 1269699 - RNA, 19 nt, Artificial Sequence
  Description of Artificial Sequence: Synthetic oligonucleotide
  Antisense strand to SEQ ID NO: 1269698
aacccagagaccauugagg

SEQ ID NO: 1269700 - RNA, 19 nt, Artificial Sequence
  Description of Artificial Sequence: Synthetic oligonucleotide
  Sense strand starting at position 2597 of SEQ ID NO: 1241400
cucaauggucucuggguuu

SEQ ID NO: 1269701 - RNA, 19 nt, Artificial Sequence
  Description of Artificial Sequence: Synthetic oligonucleotide
  Antisense strand to SEQ ID NO: 1269700
aaacccagagaccauugag

SEQ ID NO: 1269702 - RNA, 19 nt, Artificial Sequence
  Description of Artificial Sequence: Synthetic oligonucleotide
  Sense strand starting at position 2763 of SEQ ID NO: 1241400
uugaauugaggcugggaga

SEQ ID NO: 1269703 - RNA, 19 nt, Artificial Sequence
  Description of Artificial Sequence: Synthetic oligonucleotide
  Antisense strand to SEQ ID NO: 1269702
ucucccagccucaauucaa

SEQ ID NO: 1269704 - RNA, 19 nt, Artificial Sequence
  Description of Artificial Sequence: Synthetic oligonucleotide
  Sense strand starting at position 2835 of SEQ ID NO: 1241400
gagucaggcuccuccgaga

SEQ ID NO: 1269705 - RNA, 19 nt, Artificial Sequence
  Description of Artificial Sequence: Synthetic oligonucleotide
  Antisense strand to SEQ ID NO: 1269704
ucucggaggagccugacuc

SEQ ID NO: 1269706 - RNA, 19 nt, Artificial Sequence
  Description of Artificial Sequence: Synthetic oligonucleotide
  Sense strand starting at position 2915 of SEQ ID NO: 1241400
ccagaauccugcugucaag

SEQ ID NO: 1269707 - RNA, 19 nt, Artificial Sequence
  Description of Artificial Sequence: Synthetic oligonucleotide
  Antisense strand to SEQ ID NO: 1269706
cuugacagcaggauucugg

SEQ ID NO: 1269708 - RNA, 19 nt, Artificial Sequence
  Description of Artificial Sequence: Synthetic oligonucleotide
  Sense strand starting at position 2921 of SEQ ID NO: 1241400
uccugcugucaagaauauc

SEQ ID NO: 1269709 - RNA, 19 nt, Artificial Sequence
  Description of Artificial Sequence: Synthetic oligonucleotide
  Antisense strand to SEQ ID NO: 1269708
gauauucuugacagcagga

SEQ ID NO: 1269710 - RNA, 19 nt, Artificial Sequence
  Description of Artificial Sequence: Synthetic oligonucleotide
  Sense strand starting at position 2929 of SEQ ID NO: 1241400
ucaagaauaucuccacgcu

SEQ ID NO: 1269711 - RNA, 19 nt, Artificial Sequence
  Description of Artificial Sequence: Synthetic oligonucleotide
  Antisense strand to SEQ ID NO: 1269710
agcguggagauauucuuga

SEQ ID NO: 1269712 - RNA, 19 nt, Artificial Sequence
  Description of Artificial Sequence: Synthetic oligonucleotide
  Sense strand starting at position 2966 of SEQ ID NO: 1241400
gccggccuacauuaagaaa

SEQ ID NO: 1269713 - RNA, 19 nt, Artificial Sequence
  Description of Artificial Sequence: Synthetic oligonucleotide
  Antisense strand to SEQ ID NO: 1269712
uuucuuaauguaggccggc

SEQ ID NO: 1269714 - RNA, 19 nt, Artificial Sequence
  Description of Artificial Sequence: Synthetic oligonucleotide
  Sense strand starting at position 2977 of SEQ ID NO: 1241400
uuaagaaacuccgucucaa

SEQ ID NO: 1269715 - RNA, 19 nt, Artificial Sequence
  Description of Artificial Sequence: Synthetic oligonucleotide
  Antisense strand to SEQ ID NO: 1269714
uugagacggaguuucuuaa

SEQ ID NO: 1269716 - RNA, 19 nt, Artificial Sequence
  Description of Artificial Sequence: Synthetic oligonucleotide
  Sense strand starting at position 3237 of SEQ ID NO: 1241400
ugccaucuuuaacgagaau

SEQ ID NO: 1269717 - RNA, 19 nt, Artificial Sequence
  Description of Artificial Sequence: Synthetic oligonucleotide
  Antisense strand to SEQ ID NO: 1269716
auucucguuaaagauggca

SEQ ID NO: 1269718 - RNA, 19 nt, Artificial Sequence
  Description of Artificial Sequence: Synthetic oligonucleotide
  Sense strand starting at position 3246 of SEQ ID NO: 1241400
uaacgagaaucugauuagu

SEQ ID NO: 1269719 - RNA, 19 nt, Artificial Sequence
  Description of Artificial Sequence: Synthetic oligonucleotide
  Antisense strand to SEQ ID NO: 1269718
acuaaucagauucucguua

SEQ ID NO: 1269720 - RNA, 19 nt, Artificial Sequence
  Description of Artificial Sequence: Synthetic oligonucleotide
  Sense strand starting at position 3248 of SEQ ID NO: 1241400
acgagaaucugauuaguuu

SEQ ID NO: 1269721 - RNA, 19 nt, Artificial Sequence
  Description of Artificial Sequence: Synthetic oligonucleotide
  Antisense strand to SEQ ID NO: 1269720
aaacuaaucagauucucgu

SEQ ID NO: 1269722 - RNA, 19 nt, Artificial Sequence
  Description of Artificial Sequence: Synthetic oligonucleotide
  Sense strand starting at position 3386 of SEQ ID NO: 1241400
cugcgaguuucauaggcca

SEQ ID NO: 1269723 - RNA, 19 nt, Artificial Sequence
  Description of Artificial Sequence: Synthetic oligonucleotide
  Antisense strand to SEQ ID NO: 1269722
uggccuaugaaacucgcag

SEQ ID NO: 1269724 - RNA, 19 nt, Artificial Sequence
  Description of Artificial Sequence: Synthetic oligonucleotide
  Sense strand starting at position 3439 of SEQ ID NO: 1241400
gggucagcucuguggcuua

SEQ ID NO: 1269725 - RNA, 19 nt, Artificial Sequence
  Description of Artificial Sequence: Synthetic oligonucleotide
  Antisense strand to SEQ ID NO: 1269724
uaagccacagagcugaccc

SEQ ID NO: 1269726 - RNA, 19 nt, Artificial Sequence
  Description of Artificial Sequence: Synthetic oligonucleotide
  Sense strand starting at position 3442 of SEQ ID NO: 1241400
ucagcucuguggcuuagaa

SEQ ID NO: 1269727 - RNA, 19 nt, Artificial Sequence
  Description of Artificial Sequence: Synthetic oligonucleotide
  Antisense strand to SEQ ID NO: 1269726
uucuaagccacagagcuga

SEQ ID NO: 1269728 - RNA, 19 nt, Artificial Sequence
  Description of Artificial Sequence: Synthetic oligonucleotide
  Sense strand starting at position 3444 of SEQ ID NO: 1241400
agcucuguggcuuagaaug

SEQ ID NO: 1269729 - RNA, 19 nt, Artificial Sequence
  Description of Artificial Sequence: Synthetic oligonucleotide
  Antisense strand to SEQ ID NO: 1269728
cauucuaagccacagagcu

SEQ ID NO: 1269730 - RNA, 19 nt, Artificial Sequence
  Description of Artificial Sequence: Synthetic oligonucleotide
  Sense strand starting at position 3944 of SEQ ID NO: 1241400
aggcaucgacuuuaaaugu

SEQ ID NO: 1269731 - RNA, 19 nt, Artificial Sequence
  Description of Artificial Sequence: Synthetic oligonucleotide
  Antisense strand to SEQ ID NO: 1269730
acauuuaaagucgaugccu

SEQ ID NO: 1269732 - RNA, 19 nt, Artificial Sequence
  Description of Artificial Sequence: Synthetic oligonucleotide
  Sense strand starting at position 3965 of SEQ ID NO: 1241400
ugcuguucuuaggaacuga

SEQ ID NO: 1269733 - RNA, 19 nt, Artificial Sequence
  Description of Artificial Sequence: Synthetic oligonucleotide
  Antisense strand to SEQ ID NO: 1269732
ucaguuccuaagaacagca

SEQ ID NO: 1269734 - RNA, 19 nt, Artificial Sequence
  Description of Artificial Sequence: Synthetic oligonucleotide
  Sense strand starting at position 5 of SEQ ID NO: 1241401
ucugcauggugcucucauu

SEQ ID NO: 1269735 - RNA, 19 nt, Artificial Sequence
  Description of Artificial Sequence: Synthetic oligonucleotide
  Antisense strand to SEQ ID NO: 1269734
aaugagagcaccaugcaga

SEQ ID NO: 1269736 - RNA, 19 nt, Artificial Sequence
  Description of Artificial Sequence: Synthetic oligonucleotide
  Sense strand starting at position 183 of SEQ ID NO: 1241401
ccuguuucccagugacacu

SEQ ID NO: 1269737 - RNA, 19 nt, Artificial Sequence
  Description of Artificial Sequence: Synthetic oligonucleotide
  Antisense strand to SEQ ID NO: 1269736
agugucacugggaaacagg

SEQ ID NO: 1269738 - RNA, 19 nt, Artificial Sequence
  Description of Artificial Sequence: Synthetic oligonucleotide
  Sense strand starting at position 375 of SEQ ID NO: 1241401
uaucucugucucugaacga

SEQ ID NO: 1269739 - RNA, 19 nt, Artificial Sequence
  Description of Artificial Sequence: Synthetic oligonucleotide
  Antisense strand to SEQ ID NO: 1269738
ucguucagagacagagaua

SEQ ID NO: 1269740 - RNA, 19 nt, Artificial Sequence
  Description of Artificial Sequence: Synthetic oligonucleotide
  Sense strand starting at position 376 of SEQ ID NO: 1241401
aucucugucucugaacgau

SEQ ID NO: 1269741 - RNA, 19 nt, Artificial Sequence
  Description of Artificial Sequence: Synthetic oligonucleotide
  Antisense strand to SEQ ID NO: 1269740
aucguucagagacagagau

SEQ ID NO: 1269742 - RNA, 19 nt, Artificial Sequence
  Description of Artificial Sequence: Synthetic oligonucleotide
  Sense strand starting at position 388 of SEQ ID NO: 1241401
gaacgaucuugggucacca

SEQ ID NO: 1269743 - RNA, 19 nt, Artificial Sequence
  Description of Artificial Sequence: Synthetic oligonucleotide
  Antisense strand to SEQ ID NO: 1269742
uggugacccaagaucguuc

SEQ ID NO: 1269744 - RNA, 19 nt, Artificial Sequence
  Description of Artificial Sequence: Synthetic oligonucleotide
  Sense strand starting at position 1112 of SEQ ID NO: 1241401
ccugguacuccuuaaggca

SEQ ID NO: 1269745 - RNA, 19 nt, Artificial Sequence
  Description of Artificial Sequence: Synthetic oligonucleotide
  Antisense strand to SEQ ID NO: 1269744
ugccuuaaggaguaccagg

SEQ ID NO: 1269746 - RNA, 19 nt, Artificial Sequence
  Description of Artificial Sequence: Synthetic oligonucleotide
  Sense strand starting at position 1247 of SEQ ID NO: 1241401
ucagcugcagcucgaaaua

SEQ ID NO: 1269747 - RNA, 19 nt, Artificial Sequence
  Description of Artificial Sequence: Synthetic oligonucleotide
  Antisense strand to SEQ ID NO: 1269746
uauuucgagcugcagcuga

SEQ ID NO: 1269748 - RNA, 19 nt, Artificial Sequence
  Description of Artificial Sequence: Synthetic oligonucleotide
  Sense strand starting at position 2621 of SEQ ID NO: 1241401
aggccaugcccucaggaaa

SEQ ID NO: 1269749 - RNA, 19 nt, Artificial Sequence
  Description of Artificial Sequence: Synthetic oligonucleotide
  Antisense strand to SEQ ID NO: 1269748
uuuccugagggcauggccu

SEQ ID NO: 1269750 - RNA, 19 nt, Artificial Sequence
  Description of Artificial Sequence: Synthetic oligonucleotide
  Sense strand starting at position 2634 of SEQ ID NO: 1241401
aggaaaugcucaggccaca

SEQ ID NO: 1269751 - RNA, 19 nt, Artificial Sequence
  Description of Artificial Sequence: Synthetic oligonucleotide
  Antisense strand to SEQ ID NO: 1269750
uguggccugagcauuuccu

SEQ ID NO: 1269752 - RNA, 19 nt, Artificial Sequence
  Description of Artificial Sequence: Synthetic oligonucleotide
  Sense strand starting at position 2923 of SEQ ID NO: 1241401
gggucaccuuggugguuaa

SEQ ID NO: 1269753 - RNA, 19 nt, Artificial Sequence
  Description of Artificial Sequence: Synthetic oligonucleotide
  Antisense strand to SEQ ID NO: 1269752
uuaaccaccaaggugaccc

SEQ ID NO: 1269754 - RNA, 19 nt, Artificial Sequence
  Description of Artificial Sequence: Synthetic oligonucleotide
  Sense strand starting at position 2924 of SEQ ID NO: 1241401
ggucaccuuggugguuaaa

SEQ ID NO: 1269755 - RNA, 19 nt, Artificial Sequence
  Description of Artificial Sequence: Synthetic oligonucleotide
  Antisense strand to SEQ ID NO: 1269754
uuuaaccaccaaggugacc

SEQ ID NO: 1269756 - RNA, 19 nt, Artificial Sequence
  Description of Artificial Sequence: Synthetic oligonucleotide
  Sense strand starting at position 2926 of SEQ ID NO: 1241401
ucaccuuggugguuaaaga

SEQ ID NO: 1269757 - RNA, 19 nt, Artificial Sequence
  Description of Artificial Sequence: Synthetic oligonucleotide
  Antisense strand to SEQ ID NO: 1269756
ucuuuaaccaccaagguga

SEQ ID NO: 1269758 - RNA, 19 nt, Artificial Sequence
  Description of Artificial Sequence: Synthetic oligonucleotide
  Sense strand starting at position 2927 of SEQ ID NO: 1241401
caccuuggugguuaaagau

SEQ ID NO: 1269759 - RNA, 19 nt, Artificial Sequence
  Description of Artificial Sequence: Synthetic oligonucleotide
  Antisense strand to SEQ ID NO: 1269758
aucuuuaaccaccaaggug

SEQ ID NO: 1269760 - RNA, 19 nt, Artificial Sequence
  Description of Artificial Sequence: Synthetic oligonucleotide
  Sense strand starting at position 3008 of SEQ ID NO: 1241401
ccuagcuccucucgcaaau

SEQ ID NO: 1269761 - RNA, 19 nt, Artificial Sequence
  Description of Artificial Sequence: Synthetic oligonucleotide
  Antisense strand to SEQ ID NO: 1269760
auuugcgagaggagcuagg

SEQ ID NO: 1269762 - RNA, 19 nt, Artificial Sequence
  Description of Artificial Sequence: Synthetic oligonucleotide
  Sense strand starting at position 3415 of SEQ ID NO: 1241401
ggugugugggcggugauua

SEQ ID NO: 1269763 - RNA, 19 nt, Artificial Sequence
  Description of Artificial Sequence: Synthetic oligonucleotide
  Antisense strand to SEQ ID NO: 1269762
uaaucaccgcccacacacc

SEQ ID NO: 1269764 - RNA, 19 nt, Artificial Sequence
  Description of Artificial Sequence: Synthetic oligonucleotide
  Sense strand starting at position 3716 of SEQ ID NO: 1241401
uuagacaagucauacagaa

SEQ ID NO: 1269765 - RNA, 19 nt, Artificial Sequence
  Description of Artificial Sequence: Synthetic oligonucleotide
  Antisense strand to SEQ ID NO: 1269764
uucuguaugacuugucuaa

SEQ ID NO: 1269766 - RNA, 19 nt, Artificial Sequence
  Description of Artificial Sequence: Synthetic oligonucleotide
  Sense strand starting at position 3873 of SEQ ID NO: 1241401
gucccuucccugcaggaau

SEQ ID NO: 1269767 - RNA, 19 nt, Artificial Sequence
  Description of Artificial Sequence: Synthetic oligonucleotide
  Antisense strand to SEQ ID NO: 1269766
auuccugcagggaagggac

SEQ ID NO: 1269768 - RNA, 19 nt, Artificial Sequence
  Description of Artificial Sequence: Synthetic oligonucleotide
  Sense strand starting at position 3933 of SEQ ID NO: 1241401
ugguuugaguuuccagaag

SEQ ID NO: 1269769 - RNA, 19 nt, Artificial Sequence
  Description of Artificial Sequence: Synthetic oligonucleotide
  Antisense strand to SEQ ID NO: 1269768
cuucuggaaacucaaacca

SEQ ID NO: 1269770 - RNA, 19 nt, Artificial Sequence
  Description of Artificial Sequence: Synthetic oligonucleotide
  Sense strand starting at position 10 of SEQ ID NO: 1241402
agaagagucuuugagaaau

SEQ ID NO: 1269771 - RNA, 19 nt, Artificial Sequence
  Description of Artificial Sequence: Synthetic oligonucleotide
  Antisense strand to SEQ ID NO: 1269770
auuucucaaagacucuucu

SEQ ID NO: 1269772 - RNA, 19 nt, Artificial Sequence
  Description of Artificial Sequence: Synthetic oligonucleotide
  Sense strand starting at position 65 of SEQ ID NO: 1241402
cacccagaggugugagaau

SEQ ID NO: 1269773 - RNA, 19 nt, Artificial Sequence
  Description of Artificial Sequence: Synthetic oligonucleotide
  Antisense strand to SEQ ID NO: 1269772
auucucacaccucugggug

SEQ ID NO: 1269774 - RNA, 19 nt, Artificial Sequence
  Description of Artificial Sequence: Synthetic oligonucleotide
  Sense strand starting at position 142 of SEQ ID NO: 1241402
ccugauaccugguuaaacu

SEQ ID NO: 1269775 - RNA, 19 nt, Artificial Sequence
  Description of Artificial Sequence: Synthetic oligonucleotide
  Antisense strand to SEQ ID NO: 1269774
aguuuaaccagguaucagg

SEQ ID NO: 1269776 - RNA, 19 nt, Artificial Sequence
  Description of Artificial Sequence: Synthetic oligonucleotide
  Sense strand starting at position 322 of SEQ ID NO: 1241402
aaggacguuuggguacaaa

SEQ ID NO: 1269777 - RNA, 19 nt, Artificial Sequence
  Description of Artificial Sequence: Synthetic oligonucleotide
  Antisense strand to SEQ ID NO: 1269776
uuuguacccaaacguccuu

SEQ ID NO: 1269778 - RNA, 19 nt, Artificial Sequence
  Description of Artificial Sequence: Synthetic oligonucleotide
  Sense strand starting at position 325 of SEQ ID NO: 1241402
gacguuuggguacaaaugu

SEQ ID NO: 1269779 - RNA, 19 nt, Artificial Sequence
  Description of Artificial Sequence: Synthetic oligonucleotide
  Antisense strand to SEQ ID NO: 1269778
acauuuguacccaaacguc

SEQ ID NO: 1269780 - RNA, 19 nt, Artificial Sequence
  Description of Artificial Sequence: Synthetic oligonucleotide
  Sense strand starting at position 334 of SEQ ID NO: 1241402
guacaaauguacccaaaca

SEQ ID NO: 1269781 - RNA, 19 nt, Artificial Sequence
  Description of Artificial Sequence: Synthetic oligonucleotide
  Antisense strand to SEQ ID NO: 1269780
uguuuggguacauuuguac

SEQ ID NO: 1269782 - RNA, 19 nt, Artificial Sequence
  Description of Artificial Sequence: Synthetic oligonucleotide
  Sense strand starting at position 477 of SEQ ID NO: 1241402
gcacauuugcccugagcac

SEQ ID NO: 1269783 - RNA, 19 nt, Artificial Sequence
  Description of Artificial Sequence: Synthetic oligonucleotide
  Antisense strand to SEQ ID NO: 1269782
gugcucagggcaaaugugc

SEQ ID NO: 1269784 - RNA, 19 nt, Artificial Sequence
  Description of Artificial Sequence: Synthetic oligonucleotide
  Sense strand starting at position 796 of SEQ ID NO: 1241402
ucgacaaccuccuuugaag

SEQ ID NO: 1269785 - RNA, 19 nt, Artificial Sequence
  Description of Artificial Sequence: Synthetic oligonucleotide
  Antisense strand to SEQ ID NO: 1269784
cuucaaaggagguugucga

SEQ ID NO: 1269786 - RNA, 19 nt, Artificial Sequence
  Description of Artificial Sequence: Synthetic oligonucleotide
  Sense strand starting at position 854 of SEQ ID NO: 1241402
gggagaggcugguuaccua

SEQ ID NO: 1269787 - RNA, 19 nt, Artificial Sequence
  Description of Artificial Sequence: Synthetic oligonucleotide
  Antisense strand to SEQ ID NO: 1269786
uagguaaccagccucuccc

SEQ ID NO: 1269788 - RNA, 19 nt, Artificial Sequence
  Description of Artificial Sequence: Synthetic oligonucleotide
  Sense strand starting at position 878 of SEQ ID NO: 1241402
gccugcuugccuccuuaua

SEQ ID NO: 1269789 - RNA, 19 nt, Artificial Sequence
  Description of Artificial Sequence: Synthetic oligonucleotide
  Antisense strand to SEQ ID NO: 1269788
uauaaggaggcaagcaggc

SEQ ID NO: 1269790 - RNA, 19 nt, Artificial Sequence
  Description of Artificial Sequence: Synthetic oligonucleotide
  Sense strand starting at position 971 of SEQ ID NO: 1241402
cgaagcaauggccaugaga

SEQ ID NO: 1269791 - RNA, 19 nt, Artificial Sequence
  Description of Artificial Sequence: Synthetic oligonucleotide
  Antisense strand to SEQ ID NO: 1269790
ucucauggccauugcuucg

SEQ ID NO: 1269792 - RNA, 19 nt, Artificial Sequence
  Description of Artificial Sequence: Synthetic oligonucleotide
  Sense strand starting at position 973 of SEQ ID NO: 1241402
aagcaauggccaugagaga

SEQ ID NO: 1269793 - RNA, 19 nt, Artificial Sequence
  Description of Artificial Sequence: Synthetic oligonucleotide
  Antisense strand to SEQ ID NO: 1269792
ucucucauggccauugcuu

SEQ ID NO: 1269794 - RNA, 19 nt, Artificial Sequence
  Description of Artificial Sequence: Synthetic oligonucleotide
  Sense strand starting at position 1078 of SEQ ID NO: 1241402
ccaggagguccuugucauc

SEQ ID NO: 1269795 - RNA, 19 nt, Artificial Sequence
  Description of Artificial Sequence: Synthetic oligonucleotide
  Antisense strand to SEQ ID NO: 1269794
gaugacaaggaccuccugg

SEQ ID NO: 1269796 - RNA, 19 nt, Artificial Sequence
  Description of Artificial Sequence: Synthetic oligonucleotide
  Sense strand starting at position 2728 of SEQ ID NO: 1241402
cauggugcccuccaguaua

SEQ ID NO: 1269797 - RNA, 19 nt, Artificial Sequence
  Description of Artificial Sequence: Synthetic oligonucleotide
  Antisense strand to SEQ ID NO: 1269796
uauacuggagggcaccaug

SEQ ID NO: 1269798 - RNA, 19 nt, Artificial Sequence
  Description of Artificial Sequence: Synthetic oligonucleotide
  Sense strand starting at position 2731 of SEQ ID NO: 1241402
ggugcccuccaguauacaa

SEQ ID NO: 1269799 - RNA, 19 nt, Artificial Sequence
  Description of Artificial Sequence: Synthetic oligonucleotide
  Antisense strand to SEQ ID NO: 1269798
uuguauacuggagggcacc

SEQ ID NO: 1269800 - RNA, 19 nt, Artificial Sequence
  Description of Artificial Sequence: Synthetic oligonucleotide
  Sense strand starting at position 2844 of SEQ ID NO: 1241402
cugccuaagccagauagga

SEQ ID NO: 1269801 - RNA, 19 nt, Artificial Sequence
  Description of Artificial Sequence: Synthetic oligonucleotide
  Antisense strand to SEQ ID NO: 1269800
uccuaucuggcuuaggcag

SEQ ID NO: 1269802 - RNA, 19 nt, Artificial Sequence
  Description of Artificial Sequence: Synthetic oligonucleotide
  Sense strand starting at position 2846 of SEQ ID NO: 1241402
gccuaagccagauaggagu

SEQ ID NO: 1269803 - RNA, 19 nt, Artificial Sequence
  Description of Artificial Sequence: Synthetic oligonucleotide
  Antisense strand to SEQ ID NO: 1269802
acuccuaucuggcuuaggc

SEQ ID NO: 1269804 - RNA, 19 nt, Artificial Sequence
  Description of Artificial Sequence: Synthetic oligonucleotide
  Sense strand starting at position 2852 of SEQ ID NO: 1241402
gccagauaggagugacgau

SEQ ID NO: 1269805 - RNA, 19 nt, Artificial Sequence
  Description of Artificial Sequence: Synthetic oligonucleotide
  Antisense strand to SEQ ID NO: 1269804
aucgucacuccuaucuggc

SEQ ID NO: 1269806 - RNA, 19 nt, Artificial Sequence
  Description of Artificial Sequence: Synthetic oligonucleotide
  Sense strand starting at position 2896 of SEQ ID NO: 1241402
ccuucugagagugauguca

SEQ ID NO: 1269807 - RNA, 19 nt, Artificial Sequence
  Description of Artificial Sequence: Synthetic oligonucleotide
  Antisense strand to SEQ ID NO: 1269806
ugacaucacucucagaagg

SEQ ID NO: 1269808 - RNA, 19 nt, Artificial Sequence
  Description of Artificial Sequence: Synthetic oligonucleotide
  Sense strand starting at position 2973 of SEQ ID NO: 1241402
agaugcucagagugaaaga

SEQ ID NO: 1269809 - RNA, 19 nt, Artificial Sequence
  Description of Artificial Sequence: Synthetic oligonucleotide
  Antisense strand to SEQ ID NO: 1269808
ucuuucacucugagcaucu

SEQ ID NO: 1269810 - RNA, 19 nt, Artificial Sequence
  Description of Artificial Sequence: Synthetic oligonucleotide
  Sense strand starting at position 3005 of SEQ ID NO: 1241402
gagacagaugggugccauu

SEQ ID NO: 1269811 - RNA, 19 nt, Artificial Sequence
  Description of Artificial Sequence: Synthetic oligonucleotide
  Antisense strand to SEQ ID NO: 1269810
aauggcacccaucugucuc

SEQ ID NO: 1269812 - RNA, 19 nt, Artificial Sequence
  Description of Artificial Sequence: Synthetic oligonucleotide
  Sense strand starting at position 3012 of SEQ ID NO: 1241402
augggugccauugagcaaa

SEQ ID NO: 1269813 - RNA, 19 nt, Artificial Sequence
  Description of Artificial Sequence: Synthetic oligonucleotide
  Antisense strand to SEQ ID NO: 1269812
uuugcucaauggcacccau

SEQ ID NO: 1269814 - RNA, 19 nt, Artificial Sequence
  Description of Artificial Sequence: Synthetic oligonucleotide
  Sense strand starting at position 3057 of SEQ ID NO: 1241402
gagugagugcaugagacuu

SEQ ID NO: 1269815 - RNA, 19 nt, Artificial Sequence
  Description of Artificial Sequence: Synthetic oligonucleotide
  Antisense strand to SEQ ID NO: 1269814
aagucucaugcacucacuc

SEQ ID NO: 1269816 - RNA, 19 nt, Artificial Sequence
  Description of Artificial Sequence: Synthetic oligonucleotide
  Sense strand starting at position 3099 of SEQ ID NO: 1241402
agugaaaucuuucuggaua

SEQ ID NO: 1269817 - RNA, 19 nt, Artificial Sequence
  Description of Artificial Sequence: Synthetic oligonucleotide
  Antisense strand to SEQ ID NO: 1269816
uauccagaaagauuucacu

SEQ ID NO: 1269818 - RNA, 19 nt, Artificial Sequence
  Description of Artificial Sequence: Synthetic oligonucleotide
  Sense strand starting at position 3159 of SEQ ID NO: 1241402
augacauugccugaccauu

SEQ ID NO: 1269819 - RNA, 19 nt, Artificial Sequence
  Description of Artificial Sequence: Synthetic oligonucleotide
  Antisense strand to SEQ ID NO: 1269818
aauggucaggcaaugucau

SEQ ID NO: 1269820 - RNA, 19 nt, Artificial Sequence
  Description of Artificial Sequence: Synthetic oligonucleotide
  Sense strand starting at position 3276 of SEQ ID NO: 1241402
auuugauacucuuguggaa

SEQ ID NO: 1269821 - RNA, 19 nt, Artificial Sequence
  Description of Artificial Sequence: Synthetic oligonucleotide
  Antisense strand to SEQ ID NO: 1269820
uuccacaagaguaucaaau

SEQ ID NO: 1269822 - RNA, 19 nt, Artificial Sequence
  Description of Artificial Sequence: Synthetic oligonucleotide
  Sense strand starting at position 3332 of SEQ ID NO: 1241402
uuuacuacagcguaaagau

SEQ ID NO: 1269823 - RNA, 19 nt, Artificial Sequence
  Description of Artificial Sequence: Synthetic oligonucleotide
  Antisense strand to SEQ ID NO: 1269822
aucuuuacgcuguaguaaa

SEQ ID NO: 1269824 - RNA, 19 nt, Artificial Sequence
  Description of Artificial Sequence: Synthetic oligonucleotide
  Sense strand starting at position 3363 of SEQ ID NO: 1241402
cugugaaacugccucauga

SEQ ID NO: 1269825 - RNA, 19 nt, Artificial Sequence
  Description of Artificial Sequence: Synthetic oligonucleotide
  Antisense strand to SEQ ID NO: 1269824
ucaugaggcaguuucacag

SEQ ID NO: 1269826 - RNA, 19 nt, Artificial Sequence
  Description of Artificial Sequence: Synthetic oligonucleotide
  Sense strand starting at position 3376 of SEQ ID NO: 1241402
ucaugauguuucucccaug

SEQ ID NO: 1269827 - RNA, 19 nt, Artificial Sequence
  Description of Artificial Sequence: Synthetic oligonucleotide
  Antisense strand to SEQ ID NO: 1269826
caugggagaaacaucauga

SEQ ID NO: 1269828 - RNA, 19 nt, Artificial Sequence
  Description of Artificial Sequence: Synthetic oligonucleotide
  Sense strand starting at position 3381 of SEQ ID NO: 1241402
auguuucucccaugagacc

SEQ ID NO: 1269829 - RNA, 19 nt, Artificial Sequence
  Description of Artificial Sequence: Synthetic oligonucleotide
  Antisense strand to SEQ ID NO: 1269828
ggucucaugggagaaacau

SEQ ID NO: 1269830 - RNA, 19 nt, Artificial Sequence
  Description of Artificial Sequence: Synthetic oligonucleotide
  Sense strand starting at position 3438 of SEQ ID NO: 1241402
aggcaauaguacuugaugu

SEQ ID NO: 1269831 - RNA, 19 nt, Artificial Sequence
  Description of Artificial Sequence: Synthetic oligonucleotide
  Antisense strand to SEQ ID NO: 1269830
acaucaaguacuauugccu

SEQ ID NO: 1269832 - RNA, 19 nt, Artificial Sequence
  Description of Artificial Sequence: Synthetic oligonucleotide
  Sense strand starting at position 3440 of SEQ ID NO: 1241402
gcaauaguacuugaugugu

SEQ ID NO: 1269833 - RNA, 19 nt, Artificial Sequence
  Description of Artificial Sequence: Synthetic oligonucleotide
  Antisense strand to SEQ ID NO: 1269832
acacaucaaguacuauugc

SEQ ID NO: 1269834 - RNA, 19 nt, Artificial Sequence
  Description of Artificial Sequence: Synthetic oligonucleotide
  Sense strand starting at position 3509 of SEQ ID NO: 1241402
uaauuagggugugugguua

SEQ ID NO: 1269835 - RNA, 19 nt, Artificial Sequence
  Description of Artificial Sequence: Synthetic oligonucleotide
  Antisense strand to SEQ ID NO: 1269834
uaaccacacacccuaauua

SEQ ID NO: 1269836 - RNA, 19 nt, Artificial Sequence
  Description of Artificial Sequence: Synthetic oligonucleotide
  Sense strand starting at position 3680 of SEQ ID NO: 1241402
uccauuagaucuucucugu

SEQ ID NO: 1269837 - RNA, 19 nt, Artificial Sequence
  Description of Artificial Sequence: Synthetic oligonucleotide
  Antisense strand to SEQ ID NO: 1269836
acagagaagaucuaaugga

SEQ ID NO: 1269838 - RNA, 19 nt, Artificial Sequence
  Description of Artificial Sequence: Synthetic oligonucleotide
  Sense strand starting at position 3683 of SEQ ID NO: 1241402
auuagaucuucucuguuau

SEQ ID NO: 1269839 - RNA, 19 nt, Artificial Sequence
  Description of Artificial Sequence: Synthetic oligonucleotide
  Antisense strand to SEQ ID NO: 1269838
auaacagagaagaucuaau

SEQ ID NO: 1269840 - RNA, 19 nt, Artificial Sequence
  Description of Artificial Sequence: Synthetic oligonucleotide
  Sense strand starting at position 3684 of SEQ ID NO: 1241402
uuagaucuucucuguuauu

SEQ ID NO: 1269841 - RNA, 19 nt, Artificial Sequence
  Description of Artificial Sequence: Synthetic oligonucleotide
  Antisense strand to SEQ ID NO: 1269840
aauaacagagaagaucuaa

SEQ ID NO: 1269842 - RNA, 19 nt, Artificial Sequence
  Description of Artificial Sequence: Synthetic oligonucleotide
  Sense strand starting at position 3693 of SEQ ID NO: 1241402
cucuguuauuugcuauuga

SEQ ID NO: 1269843 - RNA, 19 nt, Artificial Sequence
  Description of Artificial Sequence: Synthetic oligonucleotide
  Antisense strand to SEQ ID NO: 1269842
ucaauagcaaauaacagag

SEQ ID NO: 1269844 - RNA, 19 nt, Artificial Sequence
  Description of Artificial Sequence: Synthetic oligonucleotide
  Sense strand starting at position 3832 of SEQ ID NO: 1241402
gccauaaacuggguccuuu

SEQ ID NO: 1269845 - RNA, 19 nt, Artificial Sequence
  Description of Artificial Sequence: Synthetic oligonucleotide
  Antisense strand to SEQ ID NO: 1269844
aaaggacccaguuuauggc

SEQ ID NO: 1269846 - RNA, 19 nt, Artificial Sequence
  Description of Artificial Sequence: Synthetic oligonucleotide
  Sense strand starting at position 3842 of SEQ ID NO: 1241402
ggguccuuuaugcagacau

SEQ ID NO: 1269847 - RNA, 19 nt, Artificial Sequence
  Description of Artificial Sequence: Synthetic oligonucleotide
  Antisense strand to SEQ ID NO: 1269846
augucugcauaaaggaccc

SEQ ID NO: 1269848 - RNA, 19 nt, Artificial Sequence
  Description of Artificial Sequence: Synthetic oligonucleotide
  Sense strand starting at position 3844 of SEQ ID NO: 1241402
guccuuuaugcagacauug

SEQ ID NO: 1269849 - RNA, 19 nt, Artificial Sequence
  Description of Artificial Sequence: Synthetic oligonucleotide
  Antisense strand to SEQ ID NO: 1269848
caaugucugcauaaaggac

SEQ ID NO: 1269850 - RNA, 19 nt, Artificial Sequence
  Description of Artificial Sequence: Synthetic oligonucleotide
  Sense strand starting at position 115 of SEQ ID NO: 1241403
ggaggagcauucccuggua

SEQ ID NO: 1269851 - RNA, 19 nt, Artificial Sequence
  Description of Artificial Sequence: Synthetic oligonucleotide
  Antisense strand to SEQ ID NO: 1269850
uaccagggaaugcuccucc

SEQ ID NO: 1269852 - RNA, 19 nt, Artificial Sequence
  Description of Artificial Sequence: Synthetic oligonucleotide
  Sense strand starting at position 118 of SEQ ID NO: 1241403
ggagcauucccugguagcu

SEQ ID NO: 1269853 - RNA, 19 nt, Artificial Sequence
  Description of Artificial Sequence: Synthetic oligonucleotide
  Antisense strand to SEQ ID NO: 1269852
agcuaccagggaaugcucc

SEQ ID NO: 1269854 - RNA, 19 nt, Artificial Sequence
  Description of Artificial Sequence: Synthetic oligonucleotide
  Sense strand starting at position 140 of SEQ ID NO: 1241403
aaaguuaggcaguggauga

SEQ ID NO: 1269855 - RNA, 19 nt, Artificial Sequence
  Description of Artificial Sequence: Synthetic oligonucleotide
  Antisense strand to SEQ ID NO: 1269854
ucauccacugccuaacuuu

SEQ ID NO: 1269856 - RNA, 19 nt, Artificial Sequence
  Description of Artificial Sequence: Synthetic oligonucleotide
  Sense strand starting at position 211 of SEQ ID NO: 1241403
aacacaucuccuuggaggu

SEQ ID NO: 1269857 - RNA, 19 nt, Artificial Sequence
  Description of Artificial Sequence: Synthetic oligonucleotide
  Antisense strand to SEQ ID NO: 1269856
accuccaaggagauguguu

SEQ ID NO: 1269858 - RNA, 19 nt, Artificial Sequence
  Description of Artificial Sequence: Synthetic oligonucleotide
  Sense strand starting at position 421 of SEQ ID NO: 1241403
agaagagucuuugagaaau

SEQ ID NO: 1269859 - RNA, 19 nt, Artificial Sequence
  Description of Artificial Sequence: Synthetic oligonucleotide
  Antisense strand to SEQ ID NO: 1269858
auuucucaaagacucuucu

SEQ ID NO: 1269860 - RNA, 19 nt, Artificial Sequence
  Description of Artificial Sequence: Synthetic oligonucleotide
  Sense strand starting at position 476 of SEQ ID NO: 1241403
cacccagaggugugagaau

SEQ ID NO: 1269861 - RNA, 19 nt, Artificial Sequence
  Description of Artificial Sequence: Synthetic oligonucleotide
  Antisense strand to SEQ ID NO: 1269860
auucucacaccucugggug

SEQ ID NO: 1269862 - RNA, 19 nt, Artificial Sequence
  Description of Artificial Sequence: Synthetic oligonucleotide
  Sense strand starting at position 553 of SEQ ID NO: 1241403
ccugauaccugguuaaacu

SEQ ID NO: 1269863 - RNA, 19 nt, Artificial Sequence
  Description of Artificial Sequence: Synthetic oligonucleotide
  Antisense strand to SEQ ID NO: 1269862
aguuuaaccagguaucagg

SEQ ID NO: 1269864 - RNA, 19 nt, Artificial Sequence
  Description of Artificial Sequence: Synthetic oligonucleotide
  Sense strand starting at position 733 of SEQ ID NO: 1241403
aaggacguuuggguacaaa

SEQ ID NO: 1269865 - RNA, 19 nt, Artificial Sequence
  Description of Artificial Sequence: Synthetic oligonucleotide
  Antisense strand to SEQ ID NO: 1269864
uuuguacccaaacguccuu

SEQ ID NO: 1269866 - RNA, 19 nt, Artificial Sequence
  Description of Artificial Sequence: Synthetic oligonucleotide
  Sense strand starting at position 736 of SEQ ID NO: 1241403
gacguuuggguacaaaugu

SEQ ID NO: 1269867 - RNA, 19 nt, Artificial Sequence
  Description of Artificial Sequence: Synthetic oligonucleotide
  Antisense strand to SEQ ID NO: 1269866
acauuuguacccaaacguc

SEQ ID NO: 1269868 - RNA, 19 nt, Artificial Sequence
  Description of Artificial Sequence: Synthetic oligonucleotide
  Sense strand starting at position 745 of SEQ ID NO: 1241403
guacaaauguacccaaaca

SEQ ID NO: 1269869 - RNA, 19 nt, Artificial Sequence
  Description of Artificial Sequence: Synthetic oligonucleotide
  Antisense strand to SEQ ID NO: 1269868
uguuuggguacauuuguac

SEQ ID NO: 1269870 - RNA, 19 nt, Artificial Sequence
  Description of Artificial Sequence: Synthetic oligonucleotide
  Sense strand starting at position 888 of SEQ ID NO: 1241403
gcacauuugcccugagcac

SEQ ID NO: 1269871 - RNA, 19 nt, Artificial Sequence
  Description of Artificial Sequence: Synthetic oligonucleotide
  Antisense strand to SEQ ID NO: 1269870
gugcucagggcaaaugugc

SEQ ID NO: 1269872 - RNA, 19 nt, Artificial Sequence
  Description of Artificial Sequence: Synthetic oligonucleotide
  Sense strand starting at position 1207 of SEQ ID NO: 1241403
ucgacaaccuccuuugaag

SEQ ID NO: 1269873 - RNA, 19 nt, Artificial Sequence
  Description of Artificial Sequence: Synthetic oligonucleotide
  Antisense strand to SEQ ID NO: 1269872
cuucaaaggagguugucga

SEQ ID NO: 1269874 - RNA, 19 nt, Artificial Sequence
  Description of Artificial Sequence: Synthetic oligonucleotide
  Sense strand starting at position 1265 of SEQ ID NO: 1241403
gggagaggcugguuaccua

SEQ ID NO: 1269875 - RNA, 19 nt, Artificial Sequence
  Description of Artificial Sequence: Synthetic oligonucleotide
  Antisense strand to SEQ ID NO: 1269874
uagguaaccagccucuccc

SEQ ID NO: 1269876 - RNA, 19 nt, Artificial Sequence
  Description of Artificial Sequence: Synthetic oligonucleotide
  Sense strand starting at position 1289 of SEQ ID NO: 1241403
gccugcuugccuccuuaua

SEQ ID NO: 1269877 - RNA, 19 nt, Artificial Sequence
  Description of Artificial Sequence: Synthetic oligonucleotide
  Antisense strand to SEQ ID NO: 1269876
uauaaggaggcaagcaggc

SEQ ID NO: 1269878 - RNA, 19 nt, Artificial Sequence
  Description of Artificial Sequence: Synthetic oligonucleotide
  Sense strand starting at position 1382 of SEQ ID NO: 1241403
cgaagcaauggccaugaga

SEQ ID NO: 1269879 - RNA, 19 nt, Artificial Sequence
  Description of Artificial Sequence: Synthetic oligonucleotide
  Antisense strand to SEQ ID NO: 1269878
ucucauggccauugcuucg

SEQ ID NO: 1269880 - RNA, 19 nt, Artificial Sequence
  Description of Artificial Sequence: Synthetic oligonucleotide
  Sense strand starting at position 1384 of SEQ ID NO: 1241403
aagcaauggccaugagaga

SEQ ID NO: 1269881 - RNA, 19 nt, Artificial Sequence
  Description of Artificial Sequence: Synthetic oligonucleotide
  Antisense strand to SEQ ID NO: 1269880
ucucucauggccauugcuu

SEQ ID NO: 1269882 - RNA, 19 nt, Artificial Sequence
  Description of Artificial Sequence: Synthetic oligonucleotide
  Sense strand starting at position 1489 of SEQ ID NO: 1241403
ccaggagguccuugucauc

SEQ ID NO: 1269883 - RNA, 19 nt, Artificial Sequence
  Description of Artificial Sequence: Synthetic oligonucleotide
  Antisense strand to SEQ ID NO: 1269882
gaugacaaggaccuccugg

SEQ ID NO: 1269884 - RNA, 19 nt, Artificial Sequence
  Description of Artificial Sequence: Synthetic oligonucleotide
  Sense strand starting at position 2645 of SEQ ID NO: 1241403
cuguguuaaccauguaccu

SEQ ID NO: 1269885 - RNA, 19 nt, Artificial Sequence
  Description of Artificial Sequence: Synthetic oligonucleotide
  Antisense strand to SEQ ID NO: 1269884
agguacaugguuaacacag

SEQ ID NO: 1269886 - RNA, 19 nt, Artificial Sequence
  Description of Artificial Sequence: Synthetic oligonucleotide
  Sense strand starting at position 3139 of SEQ ID NO: 1241403
cauggugcccuccaguaua

SEQ ID NO: 1269887 - RNA, 19 nt, Artificial Sequence
  Description of Artificial Sequence: Synthetic oligonucleotide
  Antisense strand to SEQ ID NO: 1269886
uauacuggagggcaccaug

SEQ ID NO: 1269888 - RNA, 19 nt, Artificial Sequence
  Description of Artificial Sequence: Synthetic oligonucleotide
  Sense strand starting at position 3142 of SEQ ID NO: 1241403
ggugcccuccaguauacaa

SEQ ID NO: 1269889 - RNA, 19 nt, Artificial Sequence
  Description of Artificial Sequence: Synthetic oligonucleotide
  Antisense strand to SEQ ID NO: 1269888
uuguauacuggagggcacc

SEQ ID NO: 1269890 - RNA, 19 nt, Artificial Sequence
  Description of Artificial Sequence: Synthetic oligonucleotide
  Sense strand starting at position 3255 of SEQ ID NO: 1241403
cugccuaagccagauagga

SEQ ID NO: 1269891 - RNA, 19 nt, Artificial Sequence
  Description of Artificial Sequence: Synthetic oligonucleotide
  Antisense strand to SEQ ID NO: 1269890
uccuaucuggcuuaggcag

SEQ ID NO: 1269892 - RNA, 19 nt, Artificial Sequence
  Description of Artificial Sequence: Synthetic oligonucleotide
  Sense strand starting at position 3257 of SEQ ID NO: 1241403
gccuaagccagauaggagu

SEQ ID NO: 1269893 - RNA, 19 nt, Artificial Sequence
  Description of Artificial Sequence: Synthetic oligonucleotide
  Antisense strand to SEQ ID NO: 1269892
acuccuaucuggcuuaggc

SEQ ID NO: 1269894 - RNA, 19 nt, Artificial Sequence
  Description of Artificial Sequence: Synthetic oligonucleotide
  Sense strand starting at position 3263 of SEQ ID NO: 1241403
gccagauaggagugacgau

SEQ ID NO: 1269895 - RNA, 19 nt, Artificial Sequence
  Description of Artificial Sequence: Synthetic oligonucleotide
  Antisense strand to SEQ ID NO: 1269894
aucgucacuccuaucuggc

SEQ ID NO: 1269896 - RNA, 19 nt, Artificial Sequence
  Description of Artificial Sequence: Synthetic oligonucleotide
  Sense strand starting at position 3307 of SEQ ID NO: 1241403
ccuucugagagugauguca

SEQ ID NO: 1269897 - RNA, 19 nt, Artificial Sequence
  Description of Artificial Sequence: Synthetic oligonucleotide
  Antisense strand to SEQ ID NO: 1269896
ugacaucacucucagaagg

SEQ ID NO: 1269898 - RNA, 19 nt, Artificial Sequence
  Description of Artificial Sequence: Synthetic oligonucleotide
  Sense strand starting at position 3384 of SEQ ID NO: 1241403
agaugcucagagugaaaga

SEQ ID NO: 1269899 - RNA, 19 nt, Artificial Sequence
  Description of Artificial Sequence: Synthetic oligonucleotide
  Antisense strand to SEQ ID NO: 1269898
ucuuucacucugagcaucu

SEQ ID NO: 1269900 - RNA, 19 nt, Artificial Sequence
  Description of Artificial Sequence: Synthetic oligonucleotide
  Sense strand starting at position 3416 of SEQ ID NO: 1241403
gagacagaugggugccauu

SEQ ID NO: 1269901 - RNA, 19 nt, Artificial Sequence
  Description of Artificial Sequence: Synthetic oligonucleotide
  Antisense strand to SEQ ID NO: 1269900
aauggcacccaucugucuc

SEQ ID NO: 1269902 - RNA, 19 nt, Artificial Sequence
  Description of Artificial Sequence: Synthetic oligonucleotide
  Sense strand starting at position 3423 of SEQ ID NO: 1241403
augggugccauugagcaaa

SEQ ID NO: 1269903 - RNA, 19 nt, Artificial Sequence
  Description of Artificial Sequence: Synthetic oligonucleotide
  Antisense strand to SEQ ID NO: 1269902
uuugcucaauggcacccau

SEQ ID NO: 1269904 - RNA, 19 nt, Artificial Sequence
  Description of Artificial Sequence: Synthetic oligonucleotide
  Sense strand starting at position 3468 of SEQ ID NO: 1241403
gagugagugcaugagacuu

SEQ ID NO: 1269905 - RNA, 19 nt, Artificial Sequence
  Description of Artificial Sequence: Synthetic oligonucleotide
  Antisense strand to SEQ ID NO: 1269904
aagucucaugcacucacuc

SEQ ID NO: 1269906 - RNA, 19 nt, Artificial Sequence
  Description of Artificial Sequence: Synthetic oligonucleotide
  Sense strand starting at position 3510 of SEQ ID NO: 1241403
agugaaaucuuucuggaua

SEQ ID NO: 1269907 - RNA, 19 nt, Artificial Sequence
  Description of Artificial Sequence: Synthetic oligonucleotide
  Antisense strand to SEQ ID NO: 1269906
uauccagaaagauuucacu

SEQ ID NO: 1269908 - RNA, 19 nt, Artificial Sequence
  Description of Artificial Sequence: Synthetic oligonucleotide
  Sense strand starting at position 3570 of SEQ ID NO: 1241403
augacauugccugaccauu

SEQ ID NO: 1269909 - RNA, 19 nt, Artificial Sequence
  Description of Artificial Sequence: Synthetic oligonucleotide
  Antisense strand to SEQ ID NO: 1269908
aauggucaggcaaugucau

SEQ ID NO: 1269910 - RNA, 19 nt, Artificial Sequence
  Description of Artificial Sequence: Synthetic oligonucleotide
  Sense strand starting at position 3681 of SEQ ID NO: 1241403
gcaguaauuugauacucuu

SEQ ID NO: 1269911 - RNA, 19 nt, Artificial Sequence
  Description of Artificial Sequence: Synthetic oligonucleotide
  Antisense strand to SEQ ID NO: 1269910
aagaguaucaaauuacugc

SEQ ID NO: 1269912 - RNA, 19 nt, Artificial Sequence
  Description of Artificial Sequence: Synthetic oligonucleotide
  Sense strand starting at position 3687 of SEQ ID NO: 1241403
auuugauacucuuguggaa

SEQ ID NO: 1269913 - RNA, 19 nt, Artificial Sequence
  Description of Artificial Sequence: Synthetic oligonucleotide
  Antisense strand to SEQ ID NO: 1269912
uuccacaagaguaucaaau

SEQ ID NO: 1269914 - RNA, 19 nt, Artificial Sequence
  Description of Artificial Sequence: Synthetic oligonucleotide
  Sense strand starting at position 3743 of SEQ ID NO: 1241403
uuuacuacagcguaaagau

SEQ ID NO: 1269915 - RNA, 19 nt, Artificial Sequence
  Description of Artificial Sequence: Synthetic oligonucleotide
  Antisense strand to SEQ ID NO: 1269914
aucuuuacgcuguaguaaa

SEQ ID NO: 1269916 - RNA, 19 nt, Artificial Sequence
  Description of Artificial Sequence: Synthetic oligonucleotide
  Sense strand starting at position 3774 of SEQ ID NO: 1241403
cugugaaacugccucauga

SEQ ID NO: 1269917 - RNA, 19 nt, Artificial Sequence
  Description of Artificial Sequence: Synthetic oligonucleotide
  Antisense strand to SEQ ID NO: 1269916
ucaugaggcaguuucacag

SEQ ID NO: 1269918 - RNA, 19 nt, Artificial Sequence
  Description of Artificial Sequence: Synthetic oligonucleotide
  Sense strand starting at position 3787 of SEQ ID NO: 1241403
ucaugauguuucucccaug

SEQ ID NO: 1269919 - RNA, 19 nt, Artificial Sequence
  Description of Artificial Sequence: Synthetic oligonucleotide
  Antisense strand to SEQ ID NO: 1269918
caugggagaaacaucauga

SEQ ID NO: 1269920 - RNA, 19 nt, Artificial Sequence
  Description of Artificial Sequence: Synthetic oligonucleotide
  Sense strand starting at position 3792 of SEQ ID NO: 1241403
auguuucucccaugagacc

SEQ ID NO: 1269921 - RNA, 19 nt, Artificial Sequence
  Description of Artificial Sequence: Synthetic oligonucleotide
  Antisense strand to SEQ ID NO: 1269920
ggucucaugggagaaacau

SEQ ID NO: 1269922 - RNA, 19 nt, Artificial Sequence
  Description of Artificial Sequence: Synthetic oligonucleotide
  Sense strand starting at position 3815 of SEQ ID NO: 1241403
ucuggauguuuauauggaa

SEQ ID NO: 1269923 - RNA, 19 nt, Artificial Sequence
  Description of Artificial Sequence: Synthetic oligonucleotide
  Antisense strand to SEQ ID NO: 1269922
uuccauauaaacauccaga

SEQ ID NO: 1269924 - RNA, 19 nt, Artificial Sequence
  Description of Artificial Sequence: Synthetic oligonucleotide
  Sense strand starting at position 3849 of SEQ ID NO: 1241403
aggcaauaguacuugaugu

SEQ ID NO: 1269925 - RNA, 19 nt, Artificial Sequence
  Description of Artificial Sequence: Synthetic oligonucleotide
  Antisense strand to SEQ ID NO: 1269924
acaucaaguacuauugccu

SEQ ID NO: 1269926 - RNA, 19 nt, Artificial Sequence
  Description of Artificial Sequence: Synthetic oligonucleotide
  Sense strand starting at position 3851 of SEQ ID NO: 1241403
gcaauaguacuugaugugu

SEQ ID NO: 1269927 - RNA, 19 nt, Artificial Sequence
  Description of Artificial Sequence: Synthetic oligonucleotide
  Antisense strand to SEQ ID NO: 1269926
acacaucaaguacuauugc

SEQ ID NO: 1269928 - RNA, 19 nt, Artificial Sequence
  Description of Artificial Sequence: Synthetic oligonucleotide
  Sense strand starting at position 3920 of SEQ ID NO: 1241403
uaauuagggugugugguua

SEQ ID NO: 1269929 - RNA, 19 nt, Artificial Sequence
  Description of Artificial Sequence: Synthetic oligonucleotide
  Antisense strand to SEQ ID NO: 1269928
uaaccacacacccuaauua

SEQ ID NO: 1269930 - RNA, 19 nt, Artificial Sequence
  Description of Artificial Sequence: Synthetic oligonucleotide
  Sense strand starting at position 92 of SEQ ID NO: 1241404
ccacacugguuguuccaua

SEQ ID NO: 1269931 - RNA, 19 nt, Artificial Sequence
  Description of Artificial Sequence: Synthetic oligonucleotide
  Antisense strand to SEQ ID NO: 1269930
uauggaacaaccagugugg

SEQ ID NO: 1269932 - RNA, 19 nt, Artificial Sequence
  Description of Artificial Sequence: Synthetic oligonucleotide
  Sense strand starting at position 97 of SEQ ID NO: 1241404
cugguuguuccauacggaa

SEQ ID NO: 1269933 - RNA, 19 nt, Artificial Sequence
  Description of Artificial Sequence: Synthetic oligonucleotide
  Antisense strand to SEQ ID NO: 1269932
uuccguauggaacaaccag

SEQ ID NO: 1269934 - RNA, 19 nt, Artificial Sequence
  Description of Artificial Sequence: Synthetic oligonucleotide
  Sense strand starting at position 99 of SEQ ID NO: 1241404
gguuguuccauacggaaac

SEQ ID NO: 1269935 - RNA, 19 nt, Artificial Sequence
  Description of Artificial Sequence: Synthetic oligonucleotide
  Antisense strand to SEQ ID NO: 1269934
guuuccguauggaacaacc

SEQ ID NO: 1269936 - RNA, 19 nt, Artificial Sequence
  Description of Artificial Sequence: Synthetic oligonucleotide
  Sense strand starting at position 206 of SEQ ID NO: 1241404
agauaaacauccucagugu

SEQ ID NO: 1269937 - RNA, 19 nt, Artificial Sequence
  Description of Artificial Sequence: Synthetic oligonucleotide
  Antisense strand to SEQ ID NO: 1269936
acacugaggauguuuaucu

SEQ ID NO: 1269938 - RNA, 19 nt, Artificial Sequence
  Description of Artificial Sequence: Synthetic oligonucleotide
  Sense strand starting at position 219 of SEQ ID NO: 1241404
cagugucuccaugaguaac

SEQ ID NO: 1269939 - RNA, 19 nt, Artificial Sequence
  Description of Artificial Sequence: Synthetic oligonucleotide
  Antisense strand to SEQ ID NO: 1269938
guuacucauggagacacug

SEQ ID NO: 1269940 - RNA, 19 nt, Artificial Sequence
  Description of Artificial Sequence: Synthetic oligonucleotide
  Sense strand starting at position 221 of SEQ ID NO: 1241404
gugucuccaugaguaacua

SEQ ID NO: 1269941 - RNA, 19 nt, Artificial Sequence
  Description of Artificial Sequence: Synthetic oligonucleotide
  Antisense strand to SEQ ID NO: 1269940
uaguuacucauggagacac

SEQ ID NO: 1269942 - RNA, 19 nt, Artificial Sequence
  Description of Artificial Sequence: Synthetic oligonucleotide
  Sense strand starting at position 260 of SEQ ID NO: 1241404
aguucuauccauuggcaga

SEQ ID NO: 1269943 - RNA, 19 nt, Artificial Sequence
  Description of Artificial Sequence: Synthetic oligonucleotide
  Antisense strand to SEQ ID NO: 1269942
ucugccaauggauagaacu

SEQ ID NO: 1269944 - RNA, 19 nt, Artificial Sequence
  Description of Artificial Sequence: Synthetic oligonucleotide
  Sense strand starting at position 605 of SEQ ID NO: 1241404
cccuacucuuccucaguga

SEQ ID NO: 1269945 - RNA, 19 nt, Artificial Sequence
  Description of Artificial Sequence: Synthetic oligonucleotide
  Antisense strand to SEQ ID NO: 1269944
ucacugaggaagaguaggg

SEQ ID NO: 1269946 - RNA, 19 nt, Artificial Sequence
  Description of Artificial Sequence: Synthetic oligonucleotide
  Sense strand starting at position 641 of SEQ ID NO: 1241404
aggacacugcauuguacaa

SEQ ID NO: 1269947 - RNA, 19 nt, Artificial Sequence
  Description of Artificial Sequence: Synthetic oligonucleotide
  Antisense strand to SEQ ID NO: 1269946
uuguacaaugcaguguccu

SEQ ID NO: 1269948 - RNA, 19 nt, Artificial Sequence
  Description of Artificial Sequence: Synthetic oligonucleotide
  Sense strand starting at position 709 of SEQ ID NO: 1241404
gggagauacuaacaugaag

SEQ ID NO: 1269949 - RNA, 19 nt, Artificial Sequence
  Description of Artificial Sequence: Synthetic oligonucleotide
  Antisense strand to SEQ ID NO: 1269948
cuucauguuaguaucuccc

SEQ ID NO: 1269950 - RNA, 19 nt, Artificial Sequence
  Description of Artificial Sequence: Synthetic oligonucleotide
  Sense strand starting at position 749 of SEQ ID NO: 1241404
agcuaaagguaacuuauua

SEQ ID NO: 1269951 - RNA, 19 nt, Artificial Sequence
  Description of Artificial Sequence: Synthetic oligonucleotide
  Antisense strand to SEQ ID NO: 1269950
uaauaaguuaccuuuagcu

SEQ ID NO: 1269952 - RNA, 19 nt, Artificial Sequence
  Description of Artificial Sequence: Synthetic oligonucleotide
  Sense strand starting at position 1296 of SEQ ID NO: 1241404
cuagaaagugcccaacgau

SEQ ID NO: 1269953 - RNA, 19 nt, Artificial Sequence
  Description of Artificial Sequence: Synthetic oligonucleotide
  Antisense strand to SEQ ID NO: 1269952
aucguugggcacuuucuag

SEQ ID NO: 1269954 - RNA, 19 nt, Artificial Sequence
  Description of Artificial Sequence: Synthetic oligonucleotide
  Sense strand starting at position 1386 of SEQ ID NO: 1241404
ugaacuuucuguccauaga

SEQ ID NO: 1269955 - RNA, 19 nt, Artificial Sequence
  Description of Artificial Sequence: Synthetic oligonucleotide
  Antisense strand to SEQ ID NO: 1269954
ucuauggacagaaaguuca

SEQ ID NO: 1269956 - RNA, 19 nt, Artificial Sequence
  Description of Artificial Sequence: Synthetic oligonucleotide
  Sense strand starting at position 1410 of SEQ ID NO: 1241404
agguuucaaggaggcuaua

SEQ ID NO: 1269957 - RNA, 19 nt, Artificial Sequence
  Description of Artificial Sequence: Synthetic oligonucleotide
  Antisense strand to SEQ ID NO: 1269956
uauagccuccuugaaaccu

SEQ ID NO: 1269958 - RNA, 19 nt, Artificial Sequence
  Description of Artificial Sequence: Synthetic oligonucleotide
  Sense strand starting at position 1538 of SEQ ID NO: 1241404
agguuuggugcugggagaa

SEQ ID NO: 1269959 - RNA, 19 nt, Artificial Sequence
  Description of Artificial Sequence: Synthetic oligonucleotide
  Antisense strand to SEQ ID NO: 1269958
uucucccagcaccaaaccu

SEQ ID NO: 1269960 - RNA, 19 nt, Artificial Sequence
  Description of Artificial Sequence: Synthetic oligonucleotide
  Sense strand starting at position 1539 of SEQ ID NO: 1241404
gguuuggugcugggagaau

SEQ ID NO: 1269961 - RNA, 19 nt, Artificial Sequence
  Description of Artificial Sequence: Synthetic oligonucleotide
  Antisense strand to SEQ ID NO: 1269960
auucucccagcaccaaacc

SEQ ID NO: 1269962 - RNA, 19 nt, Artificial Sequence
  Description of Artificial Sequence: Synthetic oligonucleotide
  Sense strand starting at position 1705 of SEQ ID NO: 1241404
ugggaagauucccaggaca

SEQ ID NO: 1269963 - RNA, 19 nt, Artificial Sequence
  Description of Artificial Sequence: Synthetic oligonucleotide
  Antisense strand to SEQ ID NO: 1269962
uguccugggaaucuuccca

SEQ ID NO: 1269964 - RNA, 19 nt, Artificial Sequence
  Description of Artificial Sequence: Synthetic oligonucleotide
  Sense strand starting at position 1751 of SEQ ID NO: 1241404
cagagaaggucagaaaggu

SEQ ID NO: 1269965 - RNA, 19 nt, Artificial Sequence
  Description of Artificial Sequence: Synthetic oligonucleotide
  Antisense strand to SEQ ID NO: 1269964
accuuucugaccuucucug

SEQ ID NO: 1269966 - RNA, 19 nt, Artificial Sequence
  Description of Artificial Sequence: Synthetic oligonucleotide
  Sense strand starting at position 2064 of SEQ ID NO: 1241404
cagaucaccugagugugaa

SEQ ID NO: 1269967 - RNA, 19 nt, Artificial Sequence
  Description of Artificial Sequence: Synthetic oligonucleotide
  Antisense strand to SEQ ID NO: 1269966
uucacacucaggugaucug

SEQ ID NO: 1269968 - RNA, 19 nt, Artificial Sequence
  Description of Artificial Sequence: Synthetic oligonucleotide
  Sense strand starting at position 2065 of SEQ ID NO: 1241404
agaucaccugagugugaau

SEQ ID NO: 1269969 - RNA, 19 nt, Artificial Sequence
  Description of Artificial Sequence: Synthetic oligonucleotide
  Antisense strand to SEQ ID NO: 1269968
auucacacucaggugaucu

SEQ ID NO: 1269970 - RNA, 19 nt, Artificial Sequence
  Description of Artificial Sequence: Synthetic oligonucleotide
  Sense strand starting at position 2190 of SEQ ID NO: 1241404
uauggcugucaagaggauu

SEQ ID NO: 1269971 - RNA, 19 nt, Artificial Sequence
  Description of Artificial Sequence: Synthetic oligonucleotide
  Antisense strand to SEQ ID NO: 1269970
aauccucuugacagccaua

SEQ ID NO: 1269972 - RNA, 19 nt, Artificial Sequence
  Description of Artificial Sequence: Synthetic oligonucleotide
  Sense strand starting at position 2213 of SEQ ID NO: 1241404
uaguuaauacuuggaaagu

SEQ ID NO: 1269973 - RNA, 19 nt, Artificial Sequence
  Description of Artificial Sequence: Synthetic oligonucleotide
  Antisense strand to SEQ ID NO: 1269972
acuuuccaaguauuaacua

SEQ ID NO: 1269974 - RNA, 19 nt, Artificial Sequence
  Description of Artificial Sequence: Synthetic oligonucleotide
  Sense strand starting at position 2337 of SEQ ID NO: 1241404
ggacuagucucuguuuccu

SEQ ID NO: 1269975 - RNA, 19 nt, Artificial Sequence
  Description of Artificial Sequence: Synthetic oligonucleotide
  Antisense strand to SEQ ID NO: 1269974
aggaaacagagacuagucc

SEQ ID NO: 1269976 - RNA, 19 nt, Artificial Sequence
  Description of Artificial Sequence: Synthetic oligonucleotide
  Sense strand starting at position 2345 of SEQ ID NO: 1241404
cucuguuuccugcagccau

SEQ ID NO: 1269977 - RNA, 19 nt, Artificial Sequence
  Description of Artificial Sequence: Synthetic oligonucleotide
  Antisense strand to SEQ ID NO: 1269976
auggcugcaggaaacagag

SEQ ID NO: 1269978 - RNA, 19 nt, Artificial Sequence
  Description of Artificial Sequence: Synthetic oligonucleotide
  Sense strand starting at position 2446 of SEQ ID NO: 1241404
ggcaguugacugcagaaca

SEQ ID NO: 1269979 - RNA, 19 nt, Artificial Sequence
  Description of Artificial Sequence: Synthetic oligonucleotide
  Antisense strand to SEQ ID NO: 1269978
uguucugcagucaacugcc

SEQ ID NO: 1269980 - RNA, 19 nt, Artificial Sequence
  Description of Artificial Sequence: Synthetic oligonucleotide
  Sense strand starting at position 2705 of SEQ ID NO: 1241404
gguagcuggguucaagaga

SEQ ID NO: 1269981 - RNA, 19 nt, Artificial Sequence
  Description of Artificial Sequence: Synthetic oligonucleotide
  Antisense strand to SEQ ID NO: 1269980
ucucuugaacccagcuacc

SEQ ID NO: 1269982 - RNA, 19 nt, Artificial Sequence
  Description of Artificial Sequence: Synthetic oligonucleotide
  Sense strand starting at position 2839 of SEQ ID NO: 1241404
aggccuugccuauaacauc

SEQ ID NO: 1269983 - RNA, 19 nt, Artificial Sequence
  Description of Artificial Sequence: Synthetic oligonucleotide
  Antisense strand to SEQ ID NO: 1269982
gauguuauaggcaaggccu

SEQ ID NO: 1269984 - RNA, 19 nt, Artificial Sequence
  Description of Artificial Sequence: Synthetic oligonucleotide
  Sense strand starting at position 2861 of SEQ ID NO: 1241404
uuguccucugccuaaugua

SEQ ID NO: 1269985 - RNA, 19 nt, Artificial Sequence
  Description of Artificial Sequence: Synthetic oligonucleotide
  Antisense strand to SEQ ID NO: 1269984
uacauuaggcagaggacaa

SEQ ID NO: 1269986 - RNA, 19 nt, Artificial Sequence
  Description of Artificial Sequence: Synthetic oligonucleotide
  Sense strand starting at position 2874 of SEQ ID NO: 1241404
aauguaggcgcucaauaaa

SEQ ID NO: 1269987 - RNA, 19 nt, Artificial Sequence
  Description of Artificial Sequence: Synthetic oligonucleotide
  Antisense strand to SEQ ID NO: 1269986
uuuauugagcgccuacauu

SEQ ID NO: 1269988 - RNA, 19 nt, Artificial Sequence
  Description of Artificial Sequence: Synthetic oligonucleotide
  Sense strand starting at position 2900 of SEQ ID NO: 1241404
gaaguuaucucugccagga

SEQ ID NO: 1269989 - RNA, 19 nt, Artificial Sequence
  Description of Artificial Sequence: Synthetic oligonucleotide
  Antisense strand to SEQ ID NO: 1269988
uccuggcagagauaacuuc

SEQ ID NO: 1269990 - RNA, 19 nt, Artificial Sequence
  Description of Artificial Sequence: Synthetic oligonucleotide
  Sense strand starting at position 2904 of SEQ ID NO: 1241404
uuaucucugccaggaaucu

SEQ ID NO: 1269991 - RNA, 19 nt, Artificial Sequence
  Description of Artificial Sequence: Synthetic oligonucleotide
  Antisense strand to SEQ ID NO: 1269990
agauuccuggcagagauaa

SEQ ID NO: 1269992 - RNA, 19 nt, Artificial Sequence
  Description of Artificial Sequence: Synthetic oligonucleotide
  Sense strand starting at position 2952 of SEQ ID NO: 1241404
gcguacaaccauuggacaa

SEQ ID NO: 1269993 - RNA, 19 nt, Artificial Sequence
  Description of Artificial Sequence: Synthetic oligonucleotide
  Antisense strand to SEQ ID NO: 1269992
uuguccaaugguuguacgc

SEQ ID NO: 1269994 - RNA, 19 nt, Artificial Sequence
  Description of Artificial Sequence: Synthetic oligonucleotide
  Sense strand starting at position 3056 of SEQ ID NO: 1241404
acacacaaggugugauaau

SEQ ID NO: 1269995 - RNA, 19 nt, Artificial Sequence
  Description of Artificial Sequence: Synthetic oligonucleotide
  Antisense strand to SEQ ID NO: 1269994
auuaucacaccuugugugu

SEQ ID NO: 1269996 - RNA, 19 nt, Artificial Sequence
  Description of Artificial Sequence: Synthetic oligonucleotide
  Sense strand starting at position 3110 of SEQ ID NO: 1241404
agcugaagcuuugcaaaug

SEQ ID NO: 1269997 - RNA, 19 nt, Artificial Sequence
  Description of Artificial Sequence: Synthetic oligonucleotide
  Antisense strand to SEQ ID NO: 1269996
cauuugcaaagcuucagcu

SEQ ID NO: 1269998 - RNA, 19 nt, Artificial Sequence
  Description of Artificial Sequence: Synthetic oligonucleotide
  Sense strand starting at position 3275 of SEQ ID NO: 1241404
aggcauuugucucugcuga

SEQ ID NO: 1269999 - RNA, 19 nt, Artificial Sequence
  Description of Artificial Sequence: Synthetic oligonucleotide
  Antisense strand to SEQ ID NO: 1269998
ucagcagagacaaaugccu

SEQ ID NO: 1270000 - RNA, 19 nt, Artificial Sequence
  Description of Artificial Sequence: Synthetic oligonucleotide
  Sense strand starting at position 3276 of SEQ ID NO: 1241404
ggcauuugucucugcugag

SEQ ID NO: 1270001 - RNA, 19 nt, Artificial Sequence
  Description of Artificial Sequence: Synthetic oligonucleotide
  Antisense strand to SEQ ID NO: 1270000
cucagcagagacaaaugcc

SEQ ID NO: 1270002 - RNA, 19 nt, Artificial Sequence
  Description of Artificial Sequence: Synthetic oligonucleotide
  Sense strand starting at position 3277 of SEQ ID NO: 1241404
gcauuugucucugcugagu

SEQ ID NO: 1270003 - RNA, 19 nt, Artificial Sequence
  Description of Artificial Sequence: Synthetic oligonucleotide
  Antisense strand to SEQ ID NO: 1270002
acucagcagagacaaaugc

SEQ ID NO: 1270004 - RNA, 19 nt, Artificial Sequence
  Description of Artificial Sequence: Synthetic oligonucleotide
  Sense strand starting at position 3394 of SEQ ID NO: 1241404
aguuccagagcugguaaua

SEQ ID NO: 1270005 - RNA, 19 nt, Artificial Sequence
  Description of Artificial Sequence: Synthetic oligonucleotide
  Antisense strand to SEQ ID NO: 1270004
uauuaccagcucuggaacu

SEQ ID NO: 1270006 - RNA, 19 nt, Artificial Sequence
  Description of Artificial Sequence: Synthetic oligonucleotide
  Sense strand starting at position 3756 of SEQ ID NO: 1241404
gaauguagcuugcccucaa

SEQ ID NO: 1270007 - RNA, 19 nt, Artificial Sequence
  Description of Artificial Sequence: Synthetic oligonucleotide
  Antisense strand to SEQ ID NO: 1270006
uugagggcaagcuacauuc

SEQ ID NO: 1270008 - RNA, 19 nt, Artificial Sequence
  Description of Artificial Sequence: Synthetic oligonucleotide
  Sense strand starting at position 3850 of SEQ ID NO: 1241404
ccuuucuuuccagagugga

SEQ ID NO: 1270009 - RNA, 19 nt, Artificial Sequence
  Description of Artificial Sequence: Synthetic oligonucleotide
  Antisense strand to SEQ ID NO: 1270008
uccacucuggaaagaaagg

SEQ ID NO: 1270010 - RNA, 19 nt, Artificial Sequence
  Description of Artificial Sequence: Synthetic oligonucleotide
  Sense strand starting at position 2 of SEQ ID NO: 1241405
ggcucugauugcucaaguu

SEQ ID NO: 1270011 - RNA, 19 nt, Artificial Sequence
  Description of Artificial Sequence: Synthetic oligonucleotide
  Antisense strand to SEQ ID NO: 1270010
aacuugagcaaucagagcc

SEQ ID NO: 1270012 - RNA, 19 nt, Artificial Sequence
  Description of Artificial Sequence: Synthetic oligonucleotide
  Sense strand starting at position 73 of SEQ ID NO: 1241405
ccuuucuuuccagagugga

SEQ ID NO: 1270013 - RNA, 19 nt, Artificial Sequence
  Description of Artificial Sequence: Synthetic oligonucleotide
  Antisense strand to SEQ ID NO: 1270012
uccacucuggaaagaaagg

SEQ ID NO: 1270014 - RNA, 19 nt, Artificial Sequence
  Description of Artificial Sequence: Synthetic oligonucleotide
  Sense strand starting at position 255 of SEQ ID NO: 1241405
ggaggagcauucccuggua

SEQ ID NO: 1270015 - RNA, 19 nt, Artificial Sequence
  Description of Artificial Sequence: Synthetic oligonucleotide
  Antisense strand to SEQ ID NO: 1270014
uaccagggaaugcuccucc

SEQ ID NO: 1270016 - RNA, 19 nt, Artificial Sequence
  Description of Artificial Sequence: Synthetic oligonucleotide
  Sense strand starting at position 258 of SEQ ID NO: 1241405
ggagcauucccugguagcu

SEQ ID NO: 1270017 - RNA, 19 nt, Artificial Sequence
  Description of Artificial Sequence: Synthetic oligonucleotide
  Antisense strand to SEQ ID NO: 1270016
agcuaccagggaaugcucc

SEQ ID NO: 1270018 - RNA, 19 nt, Artificial Sequence
  Description of Artificial Sequence: Synthetic oligonucleotide
  Sense strand starting at position 280 of SEQ ID NO: 1241405
aaaguuaggcaguggauga

SEQ ID NO: 1270019 - RNA, 19 nt, Artificial Sequence
  Description of Artificial Sequence: Synthetic oligonucleotide
  Antisense strand to SEQ ID NO: 1270018
ucauccacugccuaacuuu

SEQ ID NO: 1270020 - RNA, 19 nt, Artificial Sequence
  Description of Artificial Sequence: Synthetic oligonucleotide
  Sense strand starting at position 351 of SEQ ID NO: 1241405
aacacaucuccuuggaggu

SEQ ID NO: 1270021 - RNA, 19 nt, Artificial Sequence
  Description of Artificial Sequence: Synthetic oligonucleotide
  Antisense strand to SEQ ID NO: 1270020
accuccaaggagauguguu

SEQ ID NO: 1270022 - RNA, 19 nt, Artificial Sequence
  Description of Artificial Sequence: Synthetic oligonucleotide
  Sense strand starting at position 561 of SEQ ID NO: 1241405
agaagagucuuugagaaau

SEQ ID NO: 1270023 - RNA, 19 nt, Artificial Sequence
  Description of Artificial Sequence: Synthetic oligonucleotide
  Antisense strand to SEQ ID NO: 1270022
auuucucaaagacucuucu

SEQ ID NO: 1270024 - RNA, 19 nt, Artificial Sequence
  Description of Artificial Sequence: Synthetic oligonucleotide
  Sense strand starting at position 616 of SEQ ID NO: 1241405
cacccagaggugugagaau

SEQ ID NO: 1270025 - RNA, 19 nt, Artificial Sequence
  Description of Artificial Sequence: Synthetic oligonucleotide
  Antisense strand to SEQ ID NO: 1270024
auucucacaccucugggug

SEQ ID NO: 1270026 - RNA, 19 nt, Artificial Sequence
  Description of Artificial Sequence: Synthetic oligonucleotide
  Sense strand starting at position 693 of SEQ ID NO: 1241405
ccugauaccugguuaaacu

SEQ ID NO: 1270027 - RNA, 19 nt, Artificial Sequence
  Description of Artificial Sequence: Synthetic oligonucleotide
  Antisense strand to SEQ ID NO: 1270026
aguuuaaccagguaucagg

SEQ ID NO: 1270028 - RNA, 19 nt, Artificial Sequence
  Description of Artificial Sequence: Synthetic oligonucleotide
  Sense strand starting at position 873 of SEQ ID NO: 1241405
aaggacguuuggguacaaa

SEQ ID NO: 1270029 - RNA, 19 nt, Artificial Sequence
  Description of Artificial Sequence: Synthetic oligonucleotide
  Antisense strand to SEQ ID NO: 1270028
uuuguacccaaacguccuu

SEQ ID NO: 1270030 - RNA, 19 nt, Artificial Sequence
  Description of Artificial Sequence: Synthetic oligonucleotide
  Sense strand starting at position 876 of SEQ ID NO: 1241405
gacguuuggguacaaaugu

SEQ ID NO: 1270031 - RNA, 19 nt, Artificial Sequence
  Description of Artificial Sequence: Synthetic oligonucleotide
  Antisense strand to SEQ ID NO: 1270030
acauuuguacccaaacguc

SEQ ID NO: 1270032 - RNA, 19 nt, Artificial Sequence
  Description of Artificial Sequence: Synthetic oligonucleotide
  Sense strand starting at position 885 of SEQ ID NO: 1241405
guacaaauguacccaaaca

SEQ ID NO: 1270033 - RNA, 19 nt, Artificial Sequence
  Description of Artificial Sequence: Synthetic oligonucleotide
  Antisense strand to SEQ ID NO: 1270032
uguuuggguacauuuguac

SEQ ID NO: 1270034 - RNA, 19 nt, Artificial Sequence
  Description of Artificial Sequence: Synthetic oligonucleotide
  Sense strand starting at position 1028 of SEQ ID NO: 1241405
gcacauuugcccugagcac

SEQ ID NO: 1270035 - RNA, 19 nt, Artificial Sequence
  Description of Artificial Sequence: Synthetic oligonucleotide
  Antisense strand to SEQ ID NO: 1270034
gugcucagggcaaaugugc

SEQ ID NO: 1270036 - RNA, 19 nt, Artificial Sequence
  Description of Artificial Sequence: Synthetic oligonucleotide
  Sense strand starting at position 1347 of SEQ ID NO: 1241405
ucgacaaccuccuuugaag

SEQ ID NO: 1270037 - RNA, 19 nt, Artificial Sequence
  Description of Artificial Sequence: Synthetic oligonucleotide
  Antisense strand to SEQ ID NO: 1270036
cuucaaaggagguugucga

SEQ ID NO: 1270038 - RNA, 19 nt, Artificial Sequence
  Description of Artificial Sequence: Synthetic oligonucleotide
  Sense strand starting at position 1405 of SEQ ID NO: 1241405
gggagaggcugguuaccua

SEQ ID NO: 1270039 - RNA, 19 nt, Artificial Sequence
  Description of Artificial Sequence: Synthetic oligonucleotide
  Antisense strand to SEQ ID NO: 1270038
uagguaaccagccucuccc

SEQ ID NO: 1270040 - RNA, 19 nt, Artificial Sequence
  Description of Artificial Sequence: Synthetic oligonucleotide
  Sense strand starting at position 1429 of SEQ ID NO: 1241405
gccugcuugccuccuuaua

SEQ ID NO: 1270041 - RNA, 19 nt, Artificial Sequence
  Description of Artificial Sequence: Synthetic oligonucleotide
  Antisense strand to SEQ ID NO: 1270040
uauaaggaggcaagcaggc

SEQ ID NO: 1270042 - RNA, 19 nt, Artificial Sequence
  Description of Artificial Sequence: Synthetic oligonucleotide
  Sense strand starting at position 1522 of SEQ ID NO: 1241405
cgaagcaauggccaugaga

SEQ ID NO: 1270043 - RNA, 19 nt, Artificial Sequence
  Description of Artificial Sequence: Synthetic oligonucleotide
  Antisense strand to SEQ ID NO: 1270042
ucucauggccauugcuucg

SEQ ID NO: 1270044 - RNA, 19 nt, Artificial Sequence
  Description of Artificial Sequence: Synthetic oligonucleotide
  Sense strand starting at position 1524 of SEQ ID NO: 1241405
aagcaauggccaugagaga

SEQ ID NO: 1270045 - RNA, 19 nt, Artificial Sequence
  Description of Artificial Sequence: Synthetic oligonucleotide
  Antisense strand to SEQ ID NO: 1270044
ucucucauggccauugcuu

SEQ ID NO: 1270046 - RNA, 19 nt, Artificial Sequence
  Description of Artificial Sequence: Synthetic oligonucleotide
  Sense strand starting at position 1629 of SEQ ID NO: 1241405
ccaggagguccuugucauc

SEQ ID NO: 1270047 - RNA, 19 nt, Artificial Sequence
  Description of Artificial Sequence: Synthetic oligonucleotide
  Antisense strand to SEQ ID NO: 1270046
gaugacaaggaccuccugg

SEQ ID NO: 1270048 - RNA, 19 nt, Artificial Sequence
  Description of Artificial Sequence: Synthetic oligonucleotide
  Sense strand starting at position 2785 of SEQ ID NO: 1241405
cuguguuaaccauguaccu

SEQ ID NO: 1270049 - RNA, 19 nt, Artificial Sequence
  Description of Artificial Sequence: Synthetic oligonucleotide
  Antisense strand to SEQ ID NO: 1270048
agguacaugguuaacacag

SEQ ID NO: 1270050 - RNA, 19 nt, Artificial Sequence
  Description of Artificial Sequence: Synthetic oligonucleotide
  Sense strand starting at position 3279 of SEQ ID NO: 1241405
cauggugcccuccaguaua

SEQ ID NO: 1270051 - RNA, 19 nt, Artificial Sequence
  Description of Artificial Sequence: Synthetic oligonucleotide
  Antisense strand to SEQ ID NO: 1270050
uauacuggagggcaccaug

SEQ ID NO: 1270052 - RNA, 19 nt, Artificial Sequence
  Description of Artificial Sequence: Synthetic oligonucleotide
  Sense strand starting at position 3282 of SEQ ID NO: 1241405
ggugcccuccaguauacaa

SEQ ID NO: 1270053 - RNA, 19 nt, Artificial Sequence
  Description of Artificial Sequence: Synthetic oligonucleotide
  Antisense strand to SEQ ID NO: 1270052
uuguauacuggagggcacc

SEQ ID NO: 1270054 - RNA, 19 nt, Artificial Sequence
  Description of Artificial Sequence: Synthetic oligonucleotide
  Sense strand starting at position 3395 of SEQ ID NO: 1241405
cugccuaagccagauagga

SEQ ID NO: 1270055 - RNA, 19 nt, Artificial Sequence
  Description of Artificial Sequence: Synthetic oligonucleotide
  Antisense strand to SEQ ID NO: 1270054
uccuaucuggcuuaggcag

SEQ ID NO: 1270056 - RNA, 19 nt, Artificial Sequence
  Description of Artificial Sequence: Synthetic oligonucleotide
  Sense strand starting at position 3397 of SEQ ID NO: 1241405
gccuaagccagauaggagu

SEQ ID NO: 1270057 - RNA, 19 nt, Artificial Sequence
  Description of Artificial Sequence: Synthetic oligonucleotide
  Antisense strand to SEQ ID NO: 1270056
acuccuaucuggcuuaggc

SEQ ID NO: 1270058 - RNA, 19 nt, Artificial Sequence
  Description of Artificial Sequence: Synthetic oligonucleotide
  Sense strand starting at position 3403 of SEQ ID NO: 1241405
gccagauaggagugacgau

SEQ ID NO: 1270059 - RNA, 19 nt, Artificial Sequence
  Description of Artificial Sequence: Synthetic oligonucleotide
  Antisense strand to SEQ ID NO: 1270058
aucgucacuccuaucuggc

SEQ ID NO: 1270060 - RNA, 19 nt, Artificial Sequence
  Description of Artificial Sequence: Synthetic oligonucleotide
  Sense strand starting at position 3447 of SEQ ID NO: 1241405
ccuucugagagugauguca

SEQ ID NO: 1270061 - RNA, 19 nt, Artificial Sequence
  Description of Artificial Sequence: Synthetic oligonucleotide
  Antisense strand to SEQ ID NO: 1270060
ugacaucacucucagaagg

SEQ ID NO: 1270062 - RNA, 19 nt, Artificial Sequence
  Description of Artificial Sequence: Synthetic oligonucleotide
  Sense strand starting at position 3524 of SEQ ID NO: 1241405
agaugcucagagugaaaga

SEQ ID NO: 1270063 - RNA, 19 nt, Artificial Sequence
  Description of Artificial Sequence: Synthetic oligonucleotide
  Antisense strand to SEQ ID NO: 1270062
ucuuucacucugagcaucu

SEQ ID NO: 1270064 - RNA, 19 nt, Artificial Sequence
  Description of Artificial Sequence: Synthetic oligonucleotide
  Sense strand starting at position 3556 of SEQ ID NO: 1241405
gagacagaugggugccauu

SEQ ID NO: 1270065 - RNA, 19 nt, Artificial Sequence
  Description of Artificial Sequence: Synthetic oligonucleotide
  Antisense strand to SEQ ID NO: 1270064
aauggcacccaucugucuc

SEQ ID NO: 1270066 - RNA, 19 nt, Artificial Sequence
  Description of Artificial Sequence: Synthetic oligonucleotide
  Sense strand starting at position 3563 of SEQ ID NO: 1241405
augggugccauugagcaaa

SEQ ID NO: 1270067 - RNA, 19 nt, Artificial Sequence
  Description of Artificial Sequence: Synthetic oligonucleotide
  Antisense strand to SEQ ID NO: 1270066
uuugcucaauggcacccau

SEQ ID NO: 1270068 - RNA, 19 nt, Artificial Sequence
  Description of Artificial Sequence: Synthetic oligonucleotide
  Sense strand starting at position 3608 of SEQ ID NO: 1241405
gagugagugcaugagacuu

SEQ ID NO: 1270069 - RNA, 19 nt, Artificial Sequence
  Description of Artificial Sequence: Synthetic oligonucleotide
  Antisense strand to SEQ ID NO: 1270068
aagucucaugcacucacuc

SEQ ID NO: 1270070 - RNA, 19 nt, Artificial Sequence
  Description of Artificial Sequence: Synthetic oligonucleotide
  Sense strand starting at position 3650 of SEQ ID NO: 1241405
agugaaaucuuucuggaua

SEQ ID NO: 1270071 - RNA, 19 nt, Artificial Sequence
  Description of Artificial Sequence: Synthetic oligonucleotide
  Antisense strand to SEQ ID NO: 1270070
uauccagaaagauuucacu

SEQ ID NO: 1270072 - RNA, 19 nt, Artificial Sequence
  Description of Artificial Sequence: Synthetic oligonucleotide
  Sense strand starting at position 3652 of SEQ ID NO: 1241405
ugaaaucuuucuggauaaa

SEQ ID NO: 1270073 - RNA, 19 nt, Artificial Sequence
  Description of Artificial Sequence: Synthetic oligonucleotide
  Antisense strand to SEQ ID NO: 1270072
uuuauccagaaagauuuca

SEQ ID NO: 1270074 - RNA, 19 nt, Artificial Sequence
  Description of Artificial Sequence: Synthetic oligonucleotide
  Sense strand starting at position 3710 of SEQ ID NO: 1241405
augacauugccugaccauu

SEQ ID NO: 1270075 - RNA, 19 nt, Artificial Sequence
  Description of Artificial Sequence: Synthetic oligonucleotide
  Antisense strand to SEQ ID NO: 1270074
aauggucaggcaaugucau

SEQ ID NO: 1270076 - RNA, 19 nt, Artificial Sequence
  Description of Artificial Sequence: Synthetic oligonucleotide
  Sense strand starting at position 3821 of SEQ ID NO: 1241405
gcaguaauuugauacucuu

SEQ ID NO: 1270077 - RNA, 19 nt, Artificial Sequence
  Description of Artificial Sequence: Synthetic oligonucleotide
  Antisense strand to SEQ ID NO: 1270076
aagaguaucaaauuacugc

SEQ ID NO: 1270078 - RNA, 19 nt, Artificial Sequence
  Description of Artificial Sequence: Synthetic oligonucleotide
  Sense strand starting at position 3827 of SEQ ID NO: 1241405
auuugauacucuuguggaa

SEQ ID NO: 1270079 - RNA, 19 nt, Artificial Sequence
  Description of Artificial Sequence: Synthetic oligonucleotide
  Antisense strand to SEQ ID NO: 1270078
uuccacaagaguaucaaau

SEQ ID NO: 1270080 - RNA, 19 nt, Artificial Sequence
  Description of Artificial Sequence: Synthetic oligonucleotide
  Sense strand starting at position 3883 of SEQ ID NO: 1241405
uuuacuacagcguaaagau

SEQ ID NO: 1270081 - RNA, 19 nt, Artificial Sequence
  Description of Artificial Sequence: Synthetic oligonucleotide
  Antisense strand to SEQ ID NO: 1270080
aucuuuacgcuguaguaaa

SEQ ID NO: 1270082 - RNA, 19 nt, Artificial Sequence
  Description of Artificial Sequence: Synthetic oligonucleotide
  Sense strand starting at position 3914 of SEQ ID NO: 1241405
cugugaaacugccucauga

SEQ ID NO: 1270083 - RNA, 19 nt, Artificial Sequence
  Description of Artificial Sequence: Synthetic oligonucleotide
  Antisense strand to SEQ ID NO: 1270082
ucaugaggcaguuucacag

SEQ ID NO: 1270084 - RNA, 19 nt, Artificial Sequence
  Description of Artificial Sequence: Synthetic oligonucleotide
  Sense strand starting at position 3927 of SEQ ID NO: 1241405
ucaugauguuucucccaug

SEQ ID NO: 1270085 - RNA, 19 nt, Artificial Sequence
  Description of Artificial Sequence: Synthetic oligonucleotide
  Antisense strand to SEQ ID NO: 1270084
caugggagaaacaucauga

SEQ ID NO: 1270086 - RNA, 19 nt, Artificial Sequence
  Description of Artificial Sequence: Synthetic oligonucleotide
  Sense strand starting at position 3932 of SEQ ID NO: 1241405
auguuucucccaugagacc

SEQ ID NO: 1270087 - RNA, 19 nt, Artificial Sequence
  Description of Artificial Sequence: Synthetic oligonucleotide
  Antisense strand to SEQ ID NO: 1270086
ggucucaugggagaaacau

SEQ ID NO: 1270088 - RNA, 19 nt, Artificial Sequence
  Description of Artificial Sequence: Synthetic oligonucleotide
  Sense strand starting at position 3955 of SEQ ID NO: 1241405
ucuggauguuuauauggaa

SEQ ID NO: 1270089 - RNA, 19 nt, Artificial Sequence
  Description of Artificial Sequence: Synthetic oligonucleotide
  Antisense strand to SEQ ID NO: 1270088
uuccauauaaacauccaga

SEQ ID NO: 1270090 - RNA, 19 nt, Artificial Sequence
  Description of Artificial Sequence: Synthetic oligonucleotide
  Sense strand starting at position 19 of SEQ ID NO: 1241406
ggauacuucugaguuuaac

SEQ ID NO: 1270091 - RNA, 19 nt, Artificial Sequence
  Description of Artificial Sequence: Synthetic oligonucleotide
  Antisense strand to SEQ ID NO: 1270090
guuaaacucagaaguaucc

SEQ ID NO: 1270092 - RNA, 19 nt, Artificial Sequence
  Description of Artificial Sequence: Synthetic oligonucleotide
  Sense strand starting at position 218 of SEQ ID NO: 1241406
auaacagagguaugcaaau

SEQ ID NO: 1270093 - RNA, 19 nt, Artificial Sequence
  Description of Artificial Sequence: Synthetic oligonucleotide
  Antisense strand to SEQ ID NO: 1270092
auuugcauaccucuguuau

SEQ ID NO: 1270094 - RNA, 19 nt, Artificial Sequence
  Description of Artificial Sequence: Synthetic oligonucleotide
  Sense strand starting at position 313 of SEQ ID NO: 1241406
cugucacugggccaauauu

SEQ ID NO: 1270095 - RNA, 19 nt, Artificial Sequence
  Description of Artificial Sequence: Synthetic oligonucleotide
  Antisense strand to SEQ ID NO: 1270094
aauauuggcccagugacag

SEQ ID NO: 1270096 - RNA, 19 nt, Artificial Sequence
  Description of Artificial Sequence: Synthetic oligonucleotide
  Sense strand starting at position 480 of SEQ ID NO: 1241406
agugacaucugauucccuu

SEQ ID NO: 1270097 - RNA, 19 nt, Artificial Sequence
  Description of Artificial Sequence: Synthetic oligonucleotide
  Antisense strand to SEQ ID NO: 1270096
aagggaaucagaugucacu

SEQ ID NO: 1270098 - RNA, 19 nt, Artificial Sequence
  Description of Artificial Sequence: Synthetic oligonucleotide
  Sense strand starting at position 973 of SEQ ID NO: 1241406
ccuuaugcugcugagagaa

SEQ ID NO: 1270099 - RNA, 19 nt, Artificial Sequence
  Description of Artificial Sequence: Synthetic oligonucleotide
  Antisense strand to SEQ ID NO: 1270098
uucucucagcagcauaagg

SEQ ID NO: 1270100 - RNA, 19 nt, Artificial Sequence
  Description of Artificial Sequence: Synthetic oligonucleotide
  Sense strand starting at position 1041 of SEQ ID NO: 1241406
uuaacaaauuucggacuua

SEQ ID NO: 1270101 - RNA, 19 nt, Artificial Sequence
  Description of Artificial Sequence: Synthetic oligonucleotide
  Antisense strand to SEQ ID NO: 1270100
uaaguccgaaauuuguuaa

SEQ ID NO: 1270102 - RNA, 19 nt, Artificial Sequence
  Description of Artificial Sequence: Synthetic oligonucleotide
  Sense strand starting at position 1113 of SEQ ID NO: 1241406
uuguaaucacaauguucua

SEQ ID NO: 1270103 - RNA, 19 nt, Artificial Sequence
  Description of Artificial Sequence: Synthetic oligonucleotide
  Antisense strand to SEQ ID NO: 1270102
uagaacauugugauuacaa

SEQ ID NO: 1270104 - RNA, 19 nt, Artificial Sequence
  Description of Artificial Sequence: Synthetic oligonucleotide
  Sense strand starting at position 1191 of SEQ ID NO: 1241406
gaaacuucuguaugggcuu

SEQ ID NO: 1270105 - RNA, 19 nt, Artificial Sequence
  Description of Artificial Sequence: Synthetic oligonucleotide
  Antisense strand to SEQ ID NO: 1270104
aagcccauacagaaguuuc

SEQ ID NO: 1270106 - RNA, 19 nt, Artificial Sequence
  Description of Artificial Sequence: Synthetic oligonucleotide
  Sense strand starting at position 1204 of SEQ ID NO: 1241406
gggcuuuacaucuaguaga

SEQ ID NO: 1270107 - RNA, 19 nt, Artificial Sequence
  Description of Artificial Sequence: Synthetic oligonucleotide
  Antisense strand to SEQ ID NO: 1270106
ucuacuagauguaaagccc

SEQ ID NO: 1270108 - RNA, 19 nt, Artificial Sequence
  Description of Artificial Sequence: Synthetic oligonucleotide
  Sense strand starting at position 2796 of SEQ ID NO: 1241406
ugcguauuuggugcgugua

SEQ ID NO: 1270109 - RNA, 19 nt, Artificial Sequence
  Description of Artificial Sequence: Synthetic oligonucleotide
  Antisense strand to SEQ ID NO: 1270108
uacacgcaccaaauacgca

SEQ ID NO: 1270110 - RNA, 19 nt, Artificial Sequence
  Description of Artificial Sequence: Synthetic oligonucleotide
  Sense strand starting at position 2799 of SEQ ID NO: 1241406
guauuuggugcguguaauu

SEQ ID NO: 1270111 - RNA, 19 nt, Artificial Sequence
  Description of Artificial Sequence: Synthetic oligonucleotide
  Antisense strand to SEQ ID NO: 1270110
aauuacacgcaccaaauac

SEQ ID NO: 1270112 - RNA, 19 nt, Artificial Sequence
  Description of Artificial Sequence: Synthetic oligonucleotide
  Sense strand starting at position 2804 of SEQ ID NO: 1241406
uggugcguguaauuucgau

SEQ ID NO: 1270113 - RNA, 19 nt, Artificial Sequence
  Description of Artificial Sequence: Synthetic oligonucleotide
  Antisense strand to SEQ ID NO: 1270112
aucgaaauuacacgcacca

SEQ ID NO: 1270114 - RNA, 19 nt, Artificial Sequence
  Description of Artificial Sequence: Synthetic oligonucleotide
  Sense strand starting at position 3013 of SEQ ID NO: 1241406
cugagaauaugcuugguag

SEQ ID NO: 1270115 - RNA, 19 nt, Artificial Sequence
  Description of Artificial Sequence: Synthetic oligonucleotide
  Antisense strand to SEQ ID NO: 1270114
cuaccaagcauauucucag

SEQ ID NO: 1270116 - RNA, 19 nt, Artificial Sequence
  Description of Artificial Sequence: Synthetic oligonucleotide
  Sense strand starting at position 3014 of SEQ ID NO: 1241406
ugagaauaugcuugguaga

SEQ ID NO: 1270117 - RNA, 19 nt, Artificial Sequence
  Description of Artificial Sequence: Synthetic oligonucleotide
  Antisense strand to SEQ ID NO: 1270116
ucuaccaagcauauucuca

SEQ ID NO: 1270118 - RNA, 19 nt, Artificial Sequence
  Description of Artificial Sequence: Synthetic oligonucleotide
  Sense strand starting at position 3015 of SEQ ID NO: 1241406
gagaauaugcuugguagac

SEQ ID NO: 1270119 - RNA, 19 nt, Artificial Sequence
  Description of Artificial Sequence: Synthetic oligonucleotide
  Antisense strand to SEQ ID NO: 1270118
gucuaccaagcauauucuc

SEQ ID NO: 1270120 - RNA, 19 nt, Artificial Sequence
  Description of Artificial Sequence: Synthetic oligonucleotide
  Sense strand starting at position 3016 of SEQ ID NO: 1241406
agaauaugcuugguagaca

SEQ ID NO: 1270121 - RNA, 19 nt, Artificial Sequence
  Description of Artificial Sequence: Synthetic oligonucleotide
  Antisense strand to SEQ ID NO: 1270120
ugucuaccaagcauauucu

SEQ ID NO: 1270122 - RNA, 19 nt, Artificial Sequence
  Description of Artificial Sequence: Synthetic oligonucleotide
  Sense strand starting at position 3292 of SEQ ID NO: 1241406
aggauuaaaugagaguaug

SEQ ID NO: 1270123 - RNA, 19 nt, Artificial Sequence
  Description of Artificial Sequence: Synthetic oligonucleotide
  Antisense strand to SEQ ID NO: 1270122
cauacucucauuuaauccu

SEQ ID NO: 1270124 - RNA, 19 nt, Artificial Sequence
  Description of Artificial Sequence: Synthetic oligonucleotide
  Sense strand starting at position 3298 of SEQ ID NO: 1241406
aaaugagaguaugcaagau

SEQ ID NO: 1270125 - RNA, 19 nt, Artificial Sequence
  Description of Artificial Sequence: Synthetic oligonucleotide
  Antisense strand to SEQ ID NO: 1270124
aucuugcauacucucauuu

SEQ ID NO: 1270126 - RNA, 19 nt, Artificial Sequence
  Description of Artificial Sequence: Synthetic oligonucleotide
  Sense strand starting at position 3314 of SEQ ID NO: 1241406
gauacuguauuccuggaga

SEQ ID NO: 1270127 - RNA, 19 nt, Artificial Sequence
  Description of Artificial Sequence: Synthetic oligonucleotide
  Antisense strand to SEQ ID NO: 1270126
ucuccaggaauacaguauc

SEQ ID NO: 1270128 - RNA, 19 nt, Artificial Sequence
  Description of Artificial Sequence: Synthetic oligonucleotide
  Sense strand starting at position 3316 of SEQ ID NO: 1241406
uacuguauuccuggagaua

SEQ ID NO: 1270129 - RNA, 19 nt, Artificial Sequence
  Description of Artificial Sequence: Synthetic oligonucleotide
  Antisense strand to SEQ ID NO: 1270128
uaucuccaggaauacagua

SEQ ID NO: 1270130 - RNA, 19 nt, Artificial Sequence
  Description of Artificial Sequence: Synthetic oligonucleotide
  Sense strand starting at position 3331 of SEQ ID NO: 1241406
gauagauugcaagguuuau

SEQ ID NO: 1270131 - RNA, 19 nt, Artificial Sequence
  Description of Artificial Sequence: Synthetic oligonucleotide
  Antisense strand to SEQ ID NO: 1270130
auaaaccuugcaaucuauc

SEQ ID NO: 1270132 - RNA, 19 nt, Artificial Sequence
  Description of Artificial Sequence: Synthetic oligonucleotide
  Sense strand starting at position 3335 of SEQ ID NO: 1241406
gauugcaagguuuauauga

SEQ ID NO: 1270133 - RNA, 19 nt, Artificial Sequence
  Description of Artificial Sequence: Synthetic oligonucleotide
  Antisense strand to SEQ ID NO: 1270132
ucauauaaaccuugcaauc

SEQ ID NO: 1270134 - RNA, 19 nt, Artificial Sequence
  Description of Artificial Sequence: Synthetic oligonucleotide
  Sense strand starting at position 3342 of SEQ ID NO: 1241406
agguuuauaugaucgcuaa

SEQ ID NO: 1270135 - RNA, 19 nt, Artificial Sequence
  Description of Artificial Sequence: Synthetic oligonucleotide
  Antisense strand to SEQ ID NO: 1270134
uuagcgaucauauaaaccu

SEQ ID NO: 1270136 - RNA, 19 nt, Artificial Sequence
  Description of Artificial Sequence: Synthetic oligonucleotide
  Sense strand starting at position 3343 of SEQ ID NO: 1241406
gguuuauaugaucgcuaaa

SEQ ID NO: 1270137 - RNA, 19 nt, Artificial Sequence
  Description of Artificial Sequence: Synthetic oligonucleotide
  Antisense strand to SEQ ID NO: 1270136
uuuagcgaucauauaaacc

SEQ ID NO: 1270138 - RNA, 19 nt, Artificial Sequence
  Description of Artificial Sequence: Synthetic oligonucleotide
  Sense strand starting at position 3345 of SEQ ID NO: 1241406
uuuauaugaucgcuaaagu

SEQ ID NO: 1270139 - RNA, 19 nt, Artificial Sequence
  Description of Artificial Sequence: Synthetic oligonucleotide
  Antisense strand to SEQ ID NO: 1270138
acuuuagcgaucauauaaa

SEQ ID NO: 1270140 - RNA, 19 nt, Artificial Sequence
  Description of Artificial Sequence: Synthetic oligonucleotide
  Sense strand starting at position 3346 of SEQ ID NO: 1241406
uuauaugaucgcuaaaguu

SEQ ID NO: 1270141 - RNA, 19 nt, Artificial Sequence
  Description of Artificial Sequence: Synthetic oligonucleotide
  Antisense strand to SEQ ID NO: 1270140
aacuuuagcgaucauauaa

SEQ ID NO: 1270142 - RNA, 19 nt, Artificial Sequence
  Description of Artificial Sequence: Synthetic oligonucleotide
  Sense strand starting at position 3393 of SEQ ID NO: 1241406
uuugcuggauucucuagua

SEQ ID NO: 1270143 - RNA, 19 nt, Artificial Sequence
  Description of Artificial Sequence: Synthetic oligonucleotide
  Antisense strand to SEQ ID NO: 1270142
uacuagagaauccagcaaa

SEQ ID NO: 1270144 - RNA, 19 nt, Artificial Sequence
  Description of Artificial Sequence: Synthetic oligonucleotide
  Sense strand starting at position 3408 of SEQ ID NO: 1241406
aguacagauccuuguacag

SEQ ID NO: 1270145 - RNA, 19 nt, Artificial Sequence
  Description of Artificial Sequence: Synthetic oligonucleotide
  Antisense strand to SEQ ID NO: 1270144
cuguacaaggaucuguacu

SEQ ID NO: 1270146 - RNA, 19 nt, Artificial Sequence
  Description of Artificial Sequence: Synthetic oligonucleotide
  Sense strand starting at position 3442 of SEQ ID NO: 1241406
agggcaucucuauaaccau

SEQ ID NO: 1270147 - RNA, 19 nt, Artificial Sequence
  Description of Artificial Sequence: Synthetic oligonucleotide
  Antisense strand to SEQ ID NO: 1270146
augguuauagagaugcccu

SEQ ID NO: 1270148 - RNA, 19 nt, Artificial Sequence
  Description of Artificial Sequence: Synthetic oligonucleotide
  Sense strand starting at position 3496 of SEQ ID NO: 1241406
ucugguuucucaucagacu

SEQ ID NO: 1270149 - RNA, 19 nt, Artificial Sequence
  Description of Artificial Sequence: Synthetic oligonucleotide
  Antisense strand to SEQ ID NO: 1270148
agucugaugagaaaccaga

SEQ ID NO: 1270150 - RNA, 19 nt, Artificial Sequence
  Description of Artificial Sequence: Synthetic oligonucleotide
  Sense strand starting at position 3541 of SEQ ID NO: 1241406
caguaagaaugcuuuaguc

SEQ ID NO: 1270151 - RNA, 19 nt, Artificial Sequence
  Description of Artificial Sequence: Synthetic oligonucleotide
  Antisense strand to SEQ ID NO: 1270150
gacuaaagcauucuuacug

SEQ ID NO: 1270152 - RNA, 19 nt, Artificial Sequence
  Description of Artificial Sequence: Synthetic oligonucleotide
  Sense strand starting at position 3543 of SEQ ID NO: 1241406
guaagaaugcuuuagucau

SEQ ID NO: 1270153 - RNA, 19 nt, Artificial Sequence
  Description of Artificial Sequence: Synthetic oligonucleotide
  Antisense strand to SEQ ID NO: 1270152
augacuaaagcauucuuac

SEQ ID NO: 1270154 - RNA, 19 nt, Artificial Sequence
  Description of Artificial Sequence: Synthetic oligonucleotide
  Sense strand starting at position 3555 of SEQ ID NO: 1241406
uagucauugugacuggaag

SEQ ID NO: 1270155 - RNA, 19 nt, Artificial Sequence
  Description of Artificial Sequence: Synthetic oligonucleotide
  Antisense strand to SEQ ID NO: 1270154
cuuccagucacaaugacua

SEQ ID NO: 1270156 - RNA, 19 nt, Artificial Sequence
  Description of Artificial Sequence: Synthetic oligonucleotide
  Sense strand starting at position 3556 of SEQ ID NO: 1241406
agucauugugacuggaagu

SEQ ID NO: 1270157 - RNA, 19 nt, Artificial Sequence
  Description of Artificial Sequence: Synthetic oligonucleotide
  Antisense strand to SEQ ID NO: 1270156
acuuccagucacaaugacu

SEQ ID NO: 1270158 - RNA, 19 nt, Artificial Sequence
  Description of Artificial Sequence: Synthetic oligonucleotide
  Sense strand starting at position 3584 of SEQ ID NO: 1241406
gccaguuuaccaggaauag

SEQ ID NO: 1270159 - RNA, 19 nt, Artificial Sequence
  Description of Artificial Sequence: Synthetic oligonucleotide
  Antisense strand to SEQ ID NO: 1270158
cuauuccugguaaacuggc

SEQ ID NO: 1270160 - RNA, 19 nt, Artificial Sequence
  Description of Artificial Sequence: Synthetic oligonucleotide
  Sense strand starting at position 3634 of SEQ ID NO: 1241406
ugcaaaucaucuguuagaa

SEQ ID NO: 1270161 - RNA, 19 nt, Artificial Sequence
  Description of Artificial Sequence: Synthetic oligonucleotide
  Antisense strand to SEQ ID NO: 1270160
uucuaacagaugauuugca

SEQ ID NO: 1270162 - RNA, 19 nt, Artificial Sequence
  Description of Artificial Sequence: Synthetic oligonucleotide
  Sense strand starting at position 3687 of SEQ ID NO: 1241406
ucagauuagccugauuaug

SEQ ID NO: 1270163 - RNA, 19 nt, Artificial Sequence
  Description of Artificial Sequence: Synthetic oligonucleotide
  Antisense strand to SEQ ID NO: 1270162
cauaaucaggcuaaucuga

SEQ ID NO: 1270164 - RNA, 19 nt, Artificial Sequence
  Description of Artificial Sequence: Synthetic oligonucleotide
  Sense strand starting at position 3689 of SEQ ID NO: 1241406
agauuagccugauuaugaa

SEQ ID NO: 1270165 - RNA, 19 nt, Artificial Sequence
  Description of Artificial Sequence: Synthetic oligonucleotide
  Antisense strand to SEQ ID NO: 1270164
uucauaaucaggcuaaucu

SEQ ID NO: 1270166 - RNA, 19 nt, Artificial Sequence
  Description of Artificial Sequence: Synthetic oligonucleotide
  Sense strand starting at position 3758 of SEQ ID NO: 1241406
ccacgaguuaacgaagaau

SEQ ID NO: 1270167 - RNA, 19 nt, Artificial Sequence
  Description of Artificial Sequence: Synthetic oligonucleotide
  Antisense strand to SEQ ID NO: 1270166
auucuucguuaacucgugg

SEQ ID NO: 1270168 - RNA, 19 nt, Artificial Sequence
  Description of Artificial Sequence: Synthetic oligonucleotide
  Sense strand starting at position 3953 of SEQ ID NO: 1241406
uagacuucuguaggaaaug

SEQ ID NO: 1270169 - RNA, 19 nt, Artificial Sequence
  Description of Artificial Sequence: Synthetic oligonucleotide
  Antisense strand to SEQ ID NO: 1270168
cauuuccuacagaagucua

SEQ ID NO: 1270170 - RNA, 19 nt, Artificial Sequence
  Description of Artificial Sequence: Synthetic oligonucleotide
  Sense strand starting at position 101 of SEQ ID NO: 1241407
aagcauaaucaugguggga

SEQ ID NO: 1270171 - RNA, 19 nt, Artificial Sequence
  Description of Artificial Sequence: Synthetic oligonucleotide
  Antisense strand to SEQ ID NO: 1270170
ucccaccaugauuaugcuu

SEQ ID NO: 1270172 - RNA, 19 nt, Artificial Sequence
  Description of Artificial Sequence: Synthetic oligonucleotide
  Sense strand starting at position 103 of SEQ ID NO: 1241407
gcauaaucauggugggaga

SEQ ID NO: 1270173 - RNA, 19 nt, Artificial Sequence
  Description of Artificial Sequence: Synthetic oligonucleotide
  Antisense strand to SEQ ID NO: 1270172
ucucccaccaugauuaugc

SEQ ID NO: 1270174 - RNA, 19 nt, Artificial Sequence
  Description of Artificial Sequence: Synthetic oligonucleotide
  Sense strand starting at position 297 of SEQ ID NO: 1241407
gccguagccguccuggaaa

SEQ ID NO: 1270175 - RNA, 19 nt, Artificial Sequence
  Description of Artificial Sequence: Synthetic oligonucleotide
  Antisense strand to SEQ ID NO: 1270174
uuuccaggacggcuacggc

SEQ ID NO: 1270176 - RNA, 19 nt, Artificial Sequence
  Description of Artificial Sequence: Synthetic oligonucleotide
  Sense strand starting at position 310 of SEQ ID NO: 1241407
uggaaaccguccuuccaga

SEQ ID NO: 1270177 - RNA, 19 nt, Artificial Sequence
  Description of Artificial Sequence: Synthetic oligonucleotide
  Antisense strand to SEQ ID NO: 1270176
ucuggaaggacgguuucca

SEQ ID NO: 1270178 - RNA, 19 nt, Artificial Sequence
  Description of Artificial Sequence: Synthetic oligonucleotide
  Sense strand starting at position 992 of SEQ ID NO: 1241407
ccauuucugucuuugugga

SEQ ID NO: 1270179 - RNA, 19 nt, Artificial Sequence
  Description of Artificial Sequence: Synthetic oligonucleotide
  Antisense strand to SEQ ID NO: 1270178
uccacaaagacagaaaugg

SEQ ID NO: 1270180 - RNA, 19 nt, Artificial Sequence
  Description of Artificial Sequence: Synthetic oligonucleotide
  Sense strand starting at position 1078 of SEQ ID NO: 1241407
cgaagugucgaguguggau

SEQ ID NO: 1270181 - RNA, 19 nt, Artificial Sequence
  Description of Artificial Sequence: Synthetic oligonucleotide
  Antisense strand to SEQ ID NO: 1270180
auccacacucgacacuucg

SEQ ID NO: 1270182 - RNA, 19 nt, Artificial Sequence
  Description of Artificial Sequence: Synthetic oligonucleotide
  Sense strand starting at position 1619 of SEQ ID NO: 1241407
ucugccuuggauggagaua

SEQ ID NO: 1270183 - RNA, 19 nt, Artificial Sequence
  Description of Artificial Sequence: Synthetic oligonucleotide
  Antisense strand to SEQ ID NO: 1270182
uaucuccauccaaggcaga

SEQ ID NO: 1270184 - RNA, 19 nt, Artificial Sequence
  Description of Artificial Sequence: Synthetic oligonucleotide
  Sense strand starting at position 1709 of SEQ ID NO: 1241407
ucuucuuaugguugggaga

SEQ ID NO: 1270185 - RNA, 19 nt, Artificial Sequence
  Description of Artificial Sequence: Synthetic oligonucleotide
  Antisense strand to SEQ ID NO: 1270184
ucucccaaccauaagaaga

SEQ ID NO: 1270186 - RNA, 19 nt, Artificial Sequence
  Description of Artificial Sequence: Synthetic oligonucleotide
  Sense strand starting at position 2006 of SEQ ID NO: 1241407
gagagaaauccuggcaugc

SEQ ID NO: 1270187 - RNA, 19 nt, Artificial Sequence
  Description of Artificial Sequence: Synthetic oligonucleotide
  Antisense strand to SEQ ID NO: 1270186
gcaugccaggauuucucuc

SEQ ID NO: 1270188 - RNA, 19 nt, Artificial Sequence
  Description of Artificial Sequence: Synthetic oligonucleotide
  Sense strand starting at position 2204 of SEQ ID NO: 1241407
ggagaugcagccugagaga

SEQ ID NO: 1270189 - RNA, 19 nt, Artificial Sequence
  Description of Artificial Sequence: Synthetic oligonucleotide
  Antisense strand to SEQ ID NO: 1270188
ucucucaggcugcaucucc

SEQ ID NO: 1270190 - RNA, 19 nt, Artificial Sequence
  Description of Artificial Sequence: Synthetic oligonucleotide
  Sense strand starting at position 2534 of SEQ ID NO: 1241407
uccacuauccuccggaaga

SEQ ID NO: 1270191 - RNA, 19 nt, Artificial Sequence
  Description of Artificial Sequence: Synthetic oligonucleotide
  Antisense strand to SEQ ID NO: 1270190
ucuuccggaggauagugga

SEQ ID NO: 1270192 - RNA, 19 nt, Artificial Sequence
  Description of Artificial Sequence: Synthetic oligonucleotide
  Sense strand starting at position 2535 of SEQ ID NO: 1241407
ccacuauccuccggaagaa

SEQ ID NO: 1270193 - RNA, 19 nt, Artificial Sequence
  Description of Artificial Sequence: Synthetic oligonucleotide
  Antisense strand to SEQ ID NO: 1270192
uucuuccggaggauagugg

SEQ ID NO: 1270194 - RNA, 19 nt, Artificial Sequence
  Description of Artificial Sequence: Synthetic oligonucleotide
  Sense strand starting at position 2585 of SEQ ID NO: 1241407
cuugcacuuucugaagaug

SEQ ID NO: 1270195 - RNA, 19 nt, Artificial Sequence
  Description of Artificial Sequence: Synthetic oligonucleotide
  Antisense strand to SEQ ID NO: 1270194
caucuucagaaagugcaag

SEQ ID NO: 1270196 - RNA, 19 nt, Artificial Sequence
  Description of Artificial Sequence: Synthetic oligonucleotide
  Sense strand starting at position 2593 of SEQ ID NO: 1241407
uucugaagaugccugaaau

SEQ ID NO: 1270197 - RNA, 19 nt, Artificial Sequence
  Description of Artificial Sequence: Synthetic oligonucleotide
  Antisense strand to SEQ ID NO: 1270196
auuucaggcaucuucagaa

SEQ ID NO: 1270198 - RNA, 19 nt, Artificial Sequence
  Description of Artificial Sequence: Synthetic oligonucleotide
  Sense strand starting at position 2594 of SEQ ID NO: 1241407
ucugaagaugccugaaaug

SEQ ID NO: 1270199 - RNA, 19 nt, Artificial Sequence
  Description of Artificial Sequence: Synthetic oligonucleotide
  Antisense strand to SEQ ID NO: 1270198
cauuucaggcaucuucaga

SEQ ID NO: 1270200 - RNA, 19 nt, Artificial Sequence
  Description of Artificial Sequence: Synthetic oligonucleotide
  Sense strand starting at position 2743 of SEQ ID NO: 1241407
gggcaucaugcuuggugau

SEQ ID NO: 1270201 - RNA, 19 nt, Artificial Sequence
  Description of Artificial Sequence: Synthetic oligonucleotide
  Antisense strand to SEQ ID NO: 1270200
aucaccaagcaugaugccc

SEQ ID NO: 1270202 - RNA, 19 nt, Artificial Sequence
  Description of Artificial Sequence: Synthetic oligonucleotide
  Sense strand starting at position 2755 of SEQ ID NO: 1241407
uggugauggcaugaagauc

SEQ ID NO: 1270203 - RNA, 19 nt, Artificial Sequence
  Description of Artificial Sequence: Synthetic oligonucleotide
  Antisense strand to SEQ ID NO: 1270202
gaucuucaugccaucacca

SEQ ID NO: 1270204 - RNA, 19 nt, Artificial Sequence
  Description of Artificial Sequence: Synthetic oligonucleotide
  Sense strand starting at position 2918 of SEQ ID NO: 1241407
ugaccuugcuguuuacaga

SEQ ID NO: 1270205 - RNA, 19 nt, Artificial Sequence
  Description of Artificial Sequence: Synthetic oligonucleotide
  Antisense strand to SEQ ID NO: 1270204
ucuguaaacagcaagguca

SEQ ID NO: 1270206 - RNA, 19 nt, Artificial Sequence
  Description of Artificial Sequence: Synthetic oligonucleotide
  Sense strand starting at position 2967 of SEQ ID NO: 1241407
cccuuaguuuacuuagacu

SEQ ID NO: 1270207 - RNA, 19 nt, Artificial Sequence
  Description of Artificial Sequence: Synthetic oligonucleotide
  Antisense strand to SEQ ID NO: 1270206
agucuaaguaaacuaaggg

SEQ ID NO: 1270208 - RNA, 19 nt, Artificial Sequence
  Description of Artificial Sequence: Synthetic oligonucleotide
  Sense strand starting at position 3027 of SEQ ID NO: 1241407
ggaggacacuguguccaau

SEQ ID NO: 1270209 - RNA, 19 nt, Artificial Sequence
  Description of Artificial Sequence: Synthetic oligonucleotide
  Antisense strand to SEQ ID NO: 1270208
auuggacacaguguccucc

SEQ ID NO: 1270210 - RNA, 19 nt, Artificial Sequence
  Description of Artificial Sequence: Synthetic oligonucleotide
  Sense strand starting at position 3029 of SEQ ID NO: 1241407
aggacacuguguccaauua

SEQ ID NO: 1270211 - RNA, 19 nt, Artificial Sequence
  Description of Artificial Sequence: Synthetic oligonucleotide
  Antisense strand to SEQ ID NO: 1270210
uaauuggacacaguguccu

SEQ ID NO: 1270212 - RNA, 19 nt, Artificial Sequence
  Description of Artificial Sequence: Synthetic oligonucleotide
  Sense strand starting at position 3055 of SEQ ID NO: 1241407
cagaguacauagucaaaug

SEQ ID NO: 1270213 - RNA, 19 nt, Artificial Sequence
  Description of Artificial Sequence: Synthetic oligonucleotide
  Antisense strand to SEQ ID NO: 1270212
cauuugacuauguacucug

SEQ ID NO: 1270214 - RNA, 19 nt, Artificial Sequence
  Description of Artificial Sequence: Synthetic oligonucleotide
  Sense strand starting at position 3214 of SEQ ID NO: 1241407
gcaguagaacacuagacuu

SEQ ID NO: 1270215 - RNA, 19 nt, Artificial Sequence
  Description of Artificial Sequence: Synthetic oligonucleotide
  Antisense strand to SEQ ID NO: 1270214
aagucuaguguucuacugc

SEQ ID NO: 1270216 - RNA, 19 nt, Artificial Sequence
  Description of Artificial Sequence: Synthetic oligonucleotide
  Sense strand starting at position 3237 of SEQ ID NO: 1241407
ccauuugagcccuguaauu

SEQ ID NO: 1270217 - RNA, 19 nt, Artificial Sequence
  Description of Artificial Sequence: Synthetic oligonucleotide
  Antisense strand to SEQ ID NO: 1270216
aauuacagggcucaaaugg

SEQ ID NO: 1270218 - RNA, 19 nt, Artificial Sequence
  Description of Artificial Sequence: Synthetic oligonucleotide
  Sense strand starting at position 3325 of SEQ ID NO: 1241407
aaauaaagagcaugagguu

SEQ ID NO: 1270219 - RNA, 19 nt, Artificial Sequence
  Description of Artificial Sequence: Synthetic oligonucleotide
  Antisense strand to SEQ ID NO: 1270218
aaccucaugcucuuuauuu

SEQ ID NO: 1270220 - RNA, 19 nt, Artificial Sequence
  Description of Artificial Sequence: Synthetic oligonucleotide
  Sense strand starting at position 3332 of SEQ ID NO: 1241407
gagcaugagguuuggaaua

SEQ ID NO: 1270221 - RNA, 19 nt, Artificial Sequence
  Description of Artificial Sequence: Synthetic oligonucleotide
  Antisense strand to SEQ ID NO: 1270220
uauuccaaaccucaugcuc

SEQ ID NO: 1270222 - RNA, 19 nt, Artificial Sequence
  Description of Artificial Sequence: Synthetic oligonucleotide
  Sense strand starting at position 3334 of SEQ ID NO: 1241407
gcaugagguuuggaauaaa

SEQ ID NO: 1270223 - RNA, 19 nt, Artificial Sequence
  Description of Artificial Sequence: Synthetic oligonucleotide
  Antisense strand to SEQ ID NO: 1270222
uuuauuccaaaccucaugc

SEQ ID NO: 1270224 - RNA, 19 nt, Artificial Sequence
  Description of Artificial Sequence: Synthetic oligonucleotide
  Sense strand starting at position 3430 of SEQ ID NO: 1241407
gggaccacaucuucuaagu

SEQ ID NO: 1270225 - RNA, 19 nt, Artificial Sequence
  Description of Artificial Sequence: Synthetic oligonucleotide
  Antisense strand to SEQ ID NO: 1270224
acuuagaagaugugguccc

SEQ ID NO: 1270226 - RNA, 19 nt, Artificial Sequence
  Description of Artificial Sequence: Synthetic oligonucleotide
  Sense strand starting at position 3439 of SEQ ID NO: 1241407
ucuucuaagugcuuagcau

SEQ ID NO: 1270227 - RNA, 19 nt, Artificial Sequence
  Description of Artificial Sequence: Synthetic oligonucleotide
  Antisense strand to SEQ ID NO: 1270226
augcuaagcacuuagaaga

SEQ ID NO: 1270228 - RNA, 19 nt, Artificial Sequence
  Description of Artificial Sequence: Synthetic oligonucleotide
  Sense strand starting at position 3440 of SEQ ID NO: 1241407
cuucuaagugcuuagcaua

SEQ ID NO: 1270229 - RNA, 19 nt, Artificial Sequence
  Description of Artificial Sequence: Synthetic oligonucleotide
  Antisense strand to SEQ ID NO: 1270228
uaugcuaagcacuuagaag

SEQ ID NO: 1270230 - RNA, 19 nt, Artificial Sequence
  Description of Artificial Sequence: Synthetic oligonucleotide
  Sense strand starting at position 3443 of SEQ ID NO: 1241407
cuaagugcuuagcauagaa

SEQ ID NO: 1270231 - RNA, 19 nt, Artificial Sequence
  Description of Artificial Sequence: Synthetic oligonucleotide
  Antisense strand to SEQ ID NO: 1270230
uucuaugcuaagcacuuag

SEQ ID NO: 1270232 - RNA, 19 nt, Artificial Sequence
  Description of Artificial Sequence: Synthetic oligonucleotide
  Sense strand starting at position 3445 of SEQ ID NO: 1241407
aagugcuuagcauagaaca

SEQ ID NO: 1270233 - RNA, 19 nt, Artificial Sequence
  Description of Artificial Sequence: Synthetic oligonucleotide
  Antisense strand to SEQ ID NO: 1270232
uguucuaugcuaagcacuu

SEQ ID NO: 1270234 - RNA, 19 nt, Artificial Sequence
  Description of Artificial Sequence: Synthetic oligonucleotide
  Sense strand starting at position 3485 of SEQ ID NO: 1241407
gggcaugacuguugaugga

SEQ ID NO: 1270235 - RNA, 19 nt, Artificial Sequence
  Description of Artificial Sequence: Synthetic oligonucleotide
  Antisense strand to SEQ ID NO: 1270234
uccaucaacagucaugccc

SEQ ID NO: 1270236 - RNA, 19 nt, Artificial Sequence
  Description of Artificial Sequence: Synthetic oligonucleotide
  Sense strand starting at position 3489 of SEQ ID NO: 1241407
augacuguugauggagagu

SEQ ID NO: 1270237 - RNA, 19 nt, Artificial Sequence
  Description of Artificial Sequence: Synthetic oligonucleotide
  Antisense strand to SEQ ID NO: 1270236
acucuccaucaacagucau

SEQ ID NO: 1270238 - RNA, 19 nt, Artificial Sequence
  Description of Artificial Sequence: Synthetic oligonucleotide
  Sense strand starting at position 3492 of SEQ ID NO: 1241407
acuguugauggagaguuua

SEQ ID NO: 1270239 - RNA, 19 nt, Artificial Sequence
  Description of Artificial Sequence: Synthetic oligonucleotide
  Antisense strand to SEQ ID NO: 1270238
uaaacucuccaucaacagu

SEQ ID NO: 1270240 - RNA, 19 nt, Artificial Sequence
  Description of Artificial Sequence: Synthetic oligonucleotide
  Sense strand starting at position 3551 of SEQ ID NO: 1241407
cuacauaguuuacugugua

SEQ ID NO: 1270241 - RNA, 19 nt, Artificial Sequence
  Description of Artificial Sequence: Synthetic oligonucleotide
  Antisense strand to SEQ ID NO: 1270240
uacacaguaaacuauguag

SEQ ID NO: 1270242 - RNA, 19 nt, Artificial Sequence
  Description of Artificial Sequence: Synthetic oligonucleotide
  Sense strand starting at position 3554 of SEQ ID NO: 1241407
cauaguuuacuguguacca

SEQ ID NO: 1270243 - RNA, 19 nt, Artificial Sequence
  Description of Artificial Sequence: Synthetic oligonucleotide
  Antisense strand to SEQ ID NO: 1270242
ugguacacaguaaacuaug

SEQ ID NO: 1270244 - RNA, 19 nt, Artificial Sequence
  Description of Artificial Sequence: Synthetic oligonucleotide
  Sense strand starting at position 3626 of SEQ ID NO: 1241407
cauggaguuuacuacuguu

SEQ ID NO: 1270245 - RNA, 19 nt, Artificial Sequence
  Description of Artificial Sequence: Synthetic oligonucleotide
  Antisense strand to SEQ ID NO: 1270244
aacaguaguaaacuccaug

SEQ ID NO: 1270246 - RNA, 19 nt, Artificial Sequence
  Description of Artificial Sequence: Synthetic oligonucleotide
  Sense strand starting at position 3639 of SEQ ID NO: 1241407
acuguugagaggugacaga

SEQ ID NO: 1270247 - RNA, 19 nt, Artificial Sequence
  Description of Artificial Sequence: Synthetic oligonucleotide
  Antisense strand to SEQ ID NO: 1270246
ucugucaccucucaacagu

SEQ ID NO: 1270248 - RNA, 19 nt, Artificial Sequence
  Description of Artificial Sequence: Synthetic oligonucleotide
  Sense strand starting at position 3971 of SEQ ID NO: 1241407
ccaacaguuucggcuuacu

SEQ ID NO: 1270249 - RNA, 19 nt, Artificial Sequence
  Description of Artificial Sequence: Synthetic oligonucleotide
  Antisense strand to SEQ ID NO: 1270248
aguaagccgaaacuguugg

SEQ ID NO: 1270250 - RNA, 19 nt, Artificial Sequence
  Description of Artificial Sequence: Synthetic oligonucleotide
  Sense strand starting at position 3 of SEQ ID NO: 1241408
aaguuuagucaagggauuc

SEQ ID NO: 1270251 - RNA, 19 nt, Artificial Sequence
  Description of Artificial Sequence: Synthetic oligonucleotide
  Antisense strand to SEQ ID NO: 1270250
gaaucccuugacuaaacuu

SEQ ID NO: 1270252 - RNA, 19 nt, Artificial Sequence
  Description of Artificial Sequence: Synthetic oligonucleotide
  Sense strand starting at position 4 of SEQ ID NO: 1241408
aguuuagucaagggauucu

SEQ ID NO: 1270253 - RNA, 19 nt, Artificial Sequence
  Description of Artificial Sequence: Synthetic oligonucleotide
  Antisense strand to SEQ ID NO: 1270252
agaaucccuugacuaaacu

SEQ ID NO: 1270254 - RNA, 19 nt, Artificial Sequence
  Description of Artificial Sequence: Synthetic oligonucleotide
  Sense strand starting at position 35 of SEQ ID NO: 1241408
cuuuauaaagcagagcaau

SEQ ID NO: 1270255 - RNA, 19 nt, Artificial Sequence
  Description of Artificial Sequence: Synthetic oligonucleotide
  Antisense strand to SEQ ID NO: 1270254
auugcucugcuuuauaaag

SEQ ID NO: 1270256 - RNA, 19 nt, Artificial Sequence
  Description of Artificial Sequence: Synthetic oligonucleotide
  Sense strand starting at position 106 of SEQ ID NO: 1241408
agaccaaauugcgugaagu

SEQ ID NO: 1270257 - RNA, 19 nt, Artificial Sequence
  Description of Artificial Sequence: Synthetic oligonucleotide
  Antisense strand to SEQ ID NO: 1270256
acuucacgcaauuuggucu

SEQ ID NO: 1270258 - RNA, 19 nt, Artificial Sequence
  Description of Artificial Sequence: Synthetic oligonucleotide
  Sense strand starting at position 107 of SEQ ID NO: 1241408
gaccaaauugcgugaaguu

SEQ ID NO: 1270259 - RNA, 19 nt, Artificial Sequence
  Description of Artificial Sequence: Synthetic oligonucleotide
  Antisense strand to SEQ ID NO: 1270258
aacuucacgcaauuugguc

SEQ ID NO: 1270260 - RNA, 19 nt, Artificial Sequence
  Description of Artificial Sequence: Synthetic oligonucleotide
  Sense strand starting at position 108 of SEQ ID NO: 1241408
accaaauugcgugaaguug

SEQ ID NO: 1270261 - RNA, 19 nt, Artificial Sequence
  Description of Artificial Sequence: Synthetic oligonucleotide
  Antisense strand to SEQ ID NO: 1270260
caacuucacgcaauuuggu

SEQ ID NO: 1270262 - RNA, 19 nt, Artificial Sequence
  Description of Artificial Sequence: Synthetic oligonucleotide
  Sense strand starting at position 114 of SEQ ID NO: 1241408
uugcgugaaguugaaauaa

SEQ ID NO: 1270263 - RNA, 19 nt, Artificial Sequence
  Description of Artificial Sequence: Synthetic oligonucleotide
  Antisense strand to SEQ ID NO: 1270262
uuauuucaacuucacgcaa

SEQ ID NO: 1270264 - RNA, 19 nt, Artificial Sequence
  Description of Artificial Sequence: Synthetic oligonucleotide
  Sense strand starting at position 228 of SEQ ID NO: 1241408
cuuguauuauagguuuagu

SEQ ID NO: 1270265 - RNA, 19 nt, Artificial Sequence
  Description of Artificial Sequence: Synthetic oligonucleotide
  Antisense strand to SEQ ID NO: 1270264
acuaaaccuauaauacaag

SEQ ID NO: 1270266 - RNA, 19 nt, Artificial Sequence
  Description of Artificial Sequence: Synthetic oligonucleotide
  Sense strand starting at position 530 of SEQ ID NO: 1241408
aggaaauauuuacaagccu

SEQ ID NO: 1270267 - RNA, 19 nt, Artificial Sequence
  Description of Artificial Sequence: Synthetic oligonucleotide
  Antisense strand to SEQ ID NO: 1270266
aggcuuguaaauauuuccu

SEQ ID NO: 1270268 - RNA, 19 nt, Artificial Sequence
  Description of Artificial Sequence: Synthetic oligonucleotide
  Sense strand starting at position 673 of SEQ ID NO: 1241408
caaggagccucuuaagaag

SEQ ID NO: 1270269 - RNA, 19 nt, Artificial Sequence
  Description of Artificial Sequence: Synthetic oligonucleotide
  Antisense strand to SEQ ID NO: 1270268
cuucuuaagaggcuccuug

SEQ ID NO: 1270270 - RNA, 19 nt, Artificial Sequence
  Description of Artificial Sequence: Synthetic oligonucleotide
  Sense strand starting at position 733 of SEQ ID NO: 1241408
cacagaguaucugugguau

SEQ ID NO: 1270271 - RNA, 19 nt, Artificial Sequence
  Description of Artificial Sequence: Synthetic oligonucleotide
  Antisense strand to SEQ ID NO: 1270270
auaccacagauacucugug

SEQ ID NO: 1270272 - RNA, 19 nt, Artificial Sequence
  Description of Artificial Sequence: Synthetic oligonucleotide
  Sense strand starting at position 739 of SEQ ID NO: 1241408
guaucugugguauaaggca

SEQ ID NO: 1270273 - RNA, 19 nt, Artificial Sequence
  Description of Artificial Sequence: Synthetic oligonucleotide
  Antisense strand to SEQ ID NO: 1270272
ugccuuauaccacagauac

SEQ ID NO: 1270274 - RNA, 19 nt, Artificial Sequence
  Description of Artificial Sequence: Synthetic oligonucleotide
  Sense strand starting at position 813 of SEQ ID NO: 1241408
gaguauuuccauugcuuug

SEQ ID NO: 1270275 - RNA, 19 nt, Artificial Sequence
  Description of Artificial Sequence: Synthetic oligonucleotide
  Antisense strand to SEQ ID NO: 1270274
caaagcaauggaaauacuc

SEQ ID NO: 1270276 - RNA, 19 nt, Artificial Sequence
  Description of Artificial Sequence: Synthetic oligonucleotide
  Sense strand starting at position 838 of SEQ ID NO: 1241408
gcucuacuguacuccauau

SEQ ID NO: 1270277 - RNA, 19 nt, Artificial Sequence
  Description of Artificial Sequence: Synthetic oligonucleotide
  Antisense strand to SEQ ID NO: 1270276
auauggaguacaguagagc

SEQ ID NO: 1270278 - RNA, 19 nt, Artificial Sequence
  Description of Artificial Sequence: Synthetic oligonucleotide
  Sense strand starting at position 1066 of SEQ ID NO: 1241408
aauaucuuguaggaaauga

SEQ ID NO: 1270279 - RNA, 19 nt, Artificial Sequence
  Description of Artificial Sequence: Synthetic oligonucleotide
  Antisense strand to SEQ ID NO: 1270278
ucauuuccuacaagauauu

SEQ ID NO: 1270280 - RNA, 19 nt, Artificial Sequence
  Description of Artificial Sequence: Synthetic oligonucleotide
  Sense strand starting at position 1070 of SEQ ID NO: 1241408
ucuuguaggaaaugaaugu

SEQ ID NO: 1270281 - RNA, 19 nt, Artificial Sequence
  Description of Artificial Sequence: Synthetic oligonucleotide
  Antisense strand to SEQ ID NO: 1270280
acauucauuuccuacaaga

SEQ ID NO: 1270282 - RNA, 19 nt, Artificial Sequence
  Description of Artificial Sequence: Synthetic oligonucleotide
  Sense strand starting at position 1218 of SEQ ID NO: 1241408
guuucucauguuuaaguca

SEQ ID NO: 1270283 - RNA, 19 nt, Artificial Sequence
  Description of Artificial Sequence: Synthetic oligonucleotide
  Antisense strand to SEQ ID NO: 1270282
ugacuuaaacaugagaaac

SEQ ID NO: 1270284 - RNA, 19 nt, Artificial Sequence
  Description of Artificial Sequence: Synthetic oligonucleotide
  Sense strand starting at position 1291 of SEQ ID NO: 1241408
gcaccaauuuguccacagu

SEQ ID NO: 1270285 - RNA, 19 nt, Artificial Sequence
  Description of Artificial Sequence: Synthetic oligonucleotide
  Antisense strand to SEQ ID NO: 1270284
acuguggacaaauuggugc

SEQ ID NO: 1270286 - RNA, 19 nt, Artificial Sequence
  Description of Artificial Sequence: Synthetic oligonucleotide
  Sense strand starting at position 1493 of SEQ ID NO: 1241408
aacucagaauuuggucagu

SEQ ID NO: 1270287 - RNA, 19 nt, Artificial Sequence
  Description of Artificial Sequence: Synthetic oligonucleotide
  Antisense strand to SEQ ID NO: 1270286
acugaccaaauucugaguu

SEQ ID NO: 1270288 - RNA, 19 nt, Artificial Sequence
  Description of Artificial Sequence: Synthetic oligonucleotide
  Sense strand starting at position 1579 of SEQ ID NO: 1241408
cucuauguuccagauguac

SEQ ID NO: 1270289 - RNA, 19 nt, Artificial Sequence
  Description of Artificial Sequence: Synthetic oligonucleotide
  Antisense strand to SEQ ID NO: 1270288
guacaucuggaacauagag

SEQ ID NO: 1270290 - RNA, 19 nt, Artificial Sequence
  Description of Artificial Sequence: Synthetic oligonucleotide
  Sense strand starting at position 1656 of SEQ ID NO: 1241408
gggugagucugucugguag

SEQ ID NO: 1270291 - RNA, 19 nt, Artificial Sequence
  Description of Artificial Sequence: Synthetic oligonucleotide
  Antisense strand to SEQ ID NO: 1270290
cuaccagacagacucaccc

SEQ ID NO: 1270292 - RNA, 19 nt, Artificial Sequence
  Description of Artificial Sequence: Synthetic oligonucleotide
  Sense strand starting at position 1885 of SEQ ID NO: 1241408
gccugacgauguucuccaa

SEQ ID NO: 1270293 - RNA, 19 nt, Artificial Sequence
  Description of Artificial Sequence: Synthetic oligonucleotide
  Antisense strand to SEQ ID NO: 1270292
uuggagaacaucgucaggc

SEQ ID NO: 1270294 - RNA, 19 nt, Artificial Sequence
  Description of Artificial Sequence: Synthetic oligonucleotide
  Sense strand starting at position 2547 of SEQ ID NO: 1241408
aagcgaucgcuguccaauc

SEQ ID NO: 1270295 - RNA, 19 nt, Artificial Sequence
  Description of Artificial Sequence: Synthetic oligonucleotide
  Antisense strand to SEQ ID NO: 1270294
gauuggacagcgaucgcuu

SEQ ID NO: 1270296 - RNA, 19 nt, Artificial Sequence
  Description of Artificial Sequence: Synthetic oligonucleotide
  Sense strand starting at position 3116 of SEQ ID NO: 1241408
ggcaguguuagcgauggaa

SEQ ID NO: 1270297 - RNA, 19 nt, Artificial Sequence
  Description of Artificial Sequence: Synthetic oligonucleotide
  Antisense strand to SEQ ID NO: 1270296
uuccaucgcuaacacugcc

SEQ ID NO: 1270298 - RNA, 19 nt, Artificial Sequence
  Description of Artificial Sequence: Synthetic oligonucleotide
  Sense strand starting at position 3346 of SEQ ID NO: 1241408
aggcaccuuccuugaucua

SEQ ID NO: 1270299 - RNA, 19 nt, Artificial Sequence
  Description of Artificial Sequence: Synthetic oligonucleotide
  Antisense strand to SEQ ID NO: 1270298
uagaucaaggaaggugccu

SEQ ID NO: 1270300 - RNA, 19 nt, Artificial Sequence
  Description of Artificial Sequence: Synthetic oligonucleotide
  Sense strand starting at position 3347 of SEQ ID NO: 1241408
ggcaccuuccuugaucuaa

SEQ ID NO: 1270301 - RNA, 19 nt, Artificial Sequence
  Description of Artificial Sequence: Synthetic oligonucleotide
  Antisense strand to SEQ ID NO: 1270300
uuagaucaaggaaggugcc

SEQ ID NO: 1270302 - RNA, 19 nt, Artificial Sequence
  Description of Artificial Sequence: Synthetic oligonucleotide
  Sense strand starting at position 3435 of SEQ ID NO: 1241408
ugcaaauuaguggauucua

SEQ ID NO: 1270303 - RNA, 19 nt, Artificial Sequence
  Description of Artificial Sequence: Synthetic oligonucleotide
  Antisense strand to SEQ ID NO: 1270302
uagaauccacuaauuugca

SEQ ID NO: 1270304 - RNA, 19 nt, Artificial Sequence
  Description of Artificial Sequence: Synthetic oligonucleotide
  Sense strand starting at position 3480 of SEQ ID NO: 1241408
ugaggauuggguugacuca

SEQ ID NO: 1270305 - RNA, 19 nt, Artificial Sequence
  Description of Artificial Sequence: Synthetic oligonucleotide
  Antisense strand to SEQ ID NO: 1270304
ugagucaacccaauccuca

SEQ ID NO: 1270306 - RNA, 19 nt, Artificial Sequence
  Description of Artificial Sequence: Synthetic oligonucleotide
  Sense strand starting at position 3487 of SEQ ID NO: 1241408
uggguugacucaucuguuu

SEQ ID NO: 1270307 - RNA, 19 nt, Artificial Sequence
  Description of Artificial Sequence: Synthetic oligonucleotide
  Antisense strand to SEQ ID NO: 1270306
aaacagaugagucaaccca

SEQ ID NO: 1270308 - RNA, 19 nt, Artificial Sequence
  Description of Artificial Sequence: Synthetic oligonucleotide
  Sense strand starting at position 3490 of SEQ ID NO: 1241408
guugacucaucuguuuaaa

SEQ ID NO: 1270309 - RNA, 19 nt, Artificial Sequence
  Description of Artificial Sequence: Synthetic oligonucleotide
  Antisense strand to SEQ ID NO: 1270308
uuuaaacagaugagucaac

SEQ ID NO: 1270310 - RNA, 19 nt, Artificial Sequence
  Description of Artificial Sequence: Synthetic oligonucleotide
  Sense strand starting at position 3508 of SEQ ID NO: 1241408
acaagcccuccagguaaau

SEQ ID NO: 1270311 - RNA, 19 nt, Artificial Sequence
  Description of Artificial Sequence: Synthetic oligonucleotide
  Antisense strand to SEQ ID NO: 1270310
auuuaccuggagggcuugu

SEQ ID NO: 1270312 - RNA, 19 nt, Artificial Sequence
  Description of Artificial Sequence: Synthetic oligonucleotide
  Sense strand starting at position 3517 of SEQ ID NO: 1241408
ccagguaaauaugauacau

SEQ ID NO: 1270313 - RNA, 19 nt, Artificial Sequence
  Description of Artificial Sequence: Synthetic oligonucleotide
  Antisense strand to SEQ ID NO: 1270312
auguaucauauuuaccugg

SEQ ID NO: 1270314 - RNA, 19 nt, Artificial Sequence
  Description of Artificial Sequence: Synthetic oligonucleotide
  Sense strand starting at position 3519 of SEQ ID NO: 1241408
agguaaauaugauacaugu

SEQ ID NO: 1270315 - RNA, 19 nt, Artificial Sequence
  Description of Artificial Sequence: Synthetic oligonucleotide
  Antisense strand to SEQ ID NO: 1270314
acauguaucauauuuaccu

SEQ ID NO: 1270316 - RNA, 19 nt, Artificial Sequence
  Description of Artificial Sequence: Synthetic oligonucleotide
  Sense strand starting at position 3658 of SEQ ID NO: 1241408
gagcgaagucuucaguguu

SEQ ID NO: 1270317 - RNA, 19 nt, Artificial Sequence
  Description of Artificial Sequence: Synthetic oligonucleotide
  Antisense strand to SEQ ID NO: 1270316
aacacugaagacuucgcuc

SEQ ID NO: 1270318 - RNA, 19 nt, Artificial Sequence
  Description of Artificial Sequence: Synthetic oligonucleotide
  Sense strand starting at position 3661 of SEQ ID NO: 1241408
cgaagucuucaguguugaa

SEQ ID NO: 1270319 - RNA, 19 nt, Artificial Sequence
  Description of Artificial Sequence: Synthetic oligonucleotide
  Antisense strand to SEQ ID NO: 1270318
uucaacacugaagacuucg

SEQ ID NO: 1270320 - RNA, 19 nt, Artificial Sequence
  Description of Artificial Sequence: Synthetic oligonucleotide
  Sense strand starting at position 3668 of SEQ ID NO: 1241408
uucaguguugaaggcgaaa

SEQ ID NO: 1270321 - RNA, 19 nt, Artificial Sequence
  Description of Artificial Sequence: Synthetic oligonucleotide
  Antisense strand to SEQ ID NO: 1270320
uuucgccuucaacacugaa

SEQ ID NO: 1270322 - RNA, 19 nt, Artificial Sequence
  Description of Artificial Sequence: Synthetic oligonucleotide
  Sense strand starting at position 3736 of SEQ ID NO: 1241408
aggagagguaauugcguua

SEQ ID NO: 1270323 - RNA, 19 nt, Artificial Sequence
  Description of Artificial Sequence: Synthetic oligonucleotide
  Antisense strand to SEQ ID NO: 1270322
uaacgcaauuaccucuccu

SEQ ID NO: 1270324 - RNA, 19 nt, Artificial Sequence
  Description of Artificial Sequence: Synthetic oligonucleotide
  Sense strand starting at position 3739 of SEQ ID NO: 1241408
agagguaauugcguuagaa

SEQ ID NO: 1270325 - RNA, 19 nt, Artificial Sequence
  Description of Artificial Sequence: Synthetic oligonucleotide
  Antisense strand to SEQ ID NO: 1270324
uucuaacgcaauuaccucu

SEQ ID NO: 1270326 - RNA, 19 nt, Artificial Sequence
  Description of Artificial Sequence: Synthetic oligonucleotide
  Sense strand starting at position 3741 of SEQ ID NO: 1241408
agguaauugcguuagaaau

SEQ ID NO: 1270327 - RNA, 19 nt, Artificial Sequence
  Description of Artificial Sequence: Synthetic oligonucleotide
  Antisense strand to SEQ ID NO: 1270326
auuucuaacgcaauuaccu

SEQ ID NO: 1270328 - RNA, 19 nt, Artificial Sequence
  Description of Artificial Sequence: Synthetic oligonucleotide
  Sense strand starting at position 3748 of SEQ ID NO: 1241408
ugcguuagaaauuaucaag

SEQ ID NO: 1270329 - RNA, 19 nt, Artificial Sequence
  Description of Artificial Sequence: Synthetic oligonucleotide
  Antisense strand to SEQ ID NO: 1270328
cuugauaauuucuaacgca

SEQ ID NO: 1270330 - RNA, 19 nt, Artificial Sequence
  Description of Artificial Sequence: Synthetic oligonucleotide
  Sense strand starting at position 19 of SEQ ID NO: 1241409
agcccugaauucucugcaa

SEQ ID NO: 1270331 - RNA, 19 nt, Artificial Sequence
  Description of Artificial Sequence: Synthetic oligonucleotide
  Antisense strand to SEQ ID NO: 1270330
uugcagagaauucagggcu

SEQ ID NO: 1270332 - RNA, 19 nt, Artificial Sequence
  Description of Artificial Sequence: Synthetic oligonucleotide
  Sense strand starting at position 59 of SEQ ID NO: 1241409
uaccaaucugauggugcua

SEQ ID NO: 1270333 - RNA, 19 nt, Artificial Sequence
  Description of Artificial Sequence: Synthetic oligonucleotide
  Antisense strand to SEQ ID NO: 1270332
uagcaccaucagauuggua

SEQ ID NO: 1270334 - RNA, 19 nt, Artificial Sequence
  Description of Artificial Sequence: Synthetic oligonucleotide
  Sense strand starting at position 240 of SEQ ID NO: 1241409
gacaccaguguguauguaa

SEQ ID NO: 1270335 - RNA, 19 nt, Artificial Sequence
  Description of Artificial Sequence: Synthetic oligonucleotide
  Antisense strand to SEQ ID NO: 1270334
uuacauacacacugguguc

SEQ ID NO: 1270336 - RNA, 19 nt, Artificial Sequence
  Description of Artificial Sequence: Synthetic oligonucleotide
  Sense strand starting at position 243 of SEQ ID NO: 1241409
accaguguguauguaaauu

SEQ ID NO: 1270337 - RNA, 19 nt, Artificial Sequence
  Description of Artificial Sequence: Synthetic oligonucleotide
  Antisense strand to SEQ ID NO: 1270336
aauuuacauacacacuggu

SEQ ID NO: 1270338 - RNA, 19 nt, Artificial Sequence
  Description of Artificial Sequence: Synthetic oligonucleotide
  Sense strand starting at position 254 of SEQ ID NO: 1241409
uguaaauucuguucucaag

SEQ ID NO: 1270339 - RNA, 19 nt, Artificial Sequence
  Description of Artificial Sequence: Synthetic oligonucleotide
  Antisense strand to SEQ ID NO: 1270338
cuugagaacagaauuuaca

SEQ ID NO: 1270340 - RNA, 19 nt, Artificial Sequence
  Description of Artificial Sequence: Synthetic oligonucleotide
  Sense strand starting at position 724 of SEQ ID NO: 1241409
ggguucguuuggguaauga

SEQ ID NO: 1270341 - RNA, 19 nt, Artificial Sequence
  Description of Artificial Sequence: Synthetic oligonucleotide
  Antisense strand to SEQ ID NO: 1270340
ucauuacccaaacgaaccc

SEQ ID NO: 1270342 - RNA, 19 nt, Artificial Sequence
  Description of Artificial Sequence: Synthetic oligonucleotide
  Sense strand starting at position 732 of SEQ ID NO: 1241409
uuggguaaugaaggucuaa

SEQ ID NO: 1270343 - RNA, 19 nt, Artificial Sequence
  Description of Artificial Sequence: Synthetic oligonucleotide
  Antisense strand to SEQ ID NO: 1270342
uuagaccuucauuacccaa

SEQ ID NO: 1270344 - RNA, 19 nt, Artificial Sequence
  Description of Artificial Sequence: Synthetic oligonucleotide
  Sense strand starting at position 743 of SEQ ID NO: 1241409
aggucuaaauacgauauuu

SEQ ID NO: 1270345 - RNA, 19 nt, Artificial Sequence
  Description of Artificial Sequence: Synthetic oligonucleotide
  Antisense strand to SEQ ID NO: 1270344
aaauaucguauuuagaccu

SEQ ID NO: 1270346 - RNA, 19 nt, Artificial Sequence
  Description of Artificial Sequence: Synthetic oligonucleotide
  Sense strand starting at position 891 of SEQ ID NO: 1241409
acaucauucggccaaucaa

SEQ ID NO: 1270347 - RNA, 19 nt, Artificial Sequence
  Description of Artificial Sequence: Synthetic oligonucleotide
  Antisense strand to SEQ ID NO: 1270346
uugauuggccgaaugaugu

SEQ ID NO: 1270348 - RNA, 19 nt, Artificial Sequence
  Description of Artificial Sequence: Synthetic oligonucleotide
  Sense strand starting at position 924 of SEQ ID NO: 1241409
gcaucacuuguguacaaga

SEQ ID NO: 1270349 - RNA, 19 nt, Artificial Sequence
  Description of Artificial Sequence: Synthetic oligonucleotide
  Antisense strand to SEQ ID NO: 1270348
ucuuguacacaagugaugc

SEQ ID NO: 1270350 - RNA, 19 nt, Artificial Sequence
  Description of Artificial Sequence: Synthetic oligonucleotide
  Sense strand starting at position 1075 of SEQ ID NO: 1241409
ggagcaggaucagugucua

SEQ ID NO: 1270351 - RNA, 19 nt, Artificial Sequence
  Description of Artificial Sequence: Synthetic oligonucleotide
  Antisense strand to SEQ ID NO: 1270350
uagacacugauccugcucc

SEQ ID NO: 1270352 - RNA, 19 nt, Artificial Sequence
  Description of Artificial Sequence: Synthetic oligonucleotide
  Sense strand starting at position 1099 of SEQ ID NO: 1241409
ccuggucugccuugaagac

SEQ ID NO: 1270353 - RNA, 19 nt, Artificial Sequence
  Description of Artificial Sequence: Synthetic oligonucleotide
  Antisense strand to SEQ ID NO: 1270352
gucuucaaggcagaccagg

SEQ ID NO: 1270354 - RNA, 19 nt, Artificial Sequence
  Description of Artificial Sequence: Synthetic oligonucleotide
  Sense strand starting at position 1100 of SEQ ID NO: 1241409
cuggucugccuugaagacu

SEQ ID NO: 1270355 - RNA, 19 nt, Artificial Sequence
  Description of Artificial Sequence: Synthetic oligonucleotide
  Antisense strand to SEQ ID NO: 1270354
agucuucaaggcagaccag

SEQ ID NO: 1270356 - RNA, 19 nt, Artificial Sequence
  Description of Artificial Sequence: Synthetic oligonucleotide
  Sense strand starting at position 1112 of SEQ ID NO: 1241409
gaagacuugcacuagucau

SEQ ID NO: 1270357 - RNA, 19 nt, Artificial Sequence
  Description of Artificial Sequence: Synthetic oligonucleotide
  Antisense strand to SEQ ID NO: 1270356
augacuagugcaagucuuc

SEQ ID NO: 1270358 - RNA, 19 nt, Artificial Sequence
  Description of Artificial Sequence: Synthetic oligonucleotide
  Sense strand starting at position 1140 of SEQ ID NO: 1241409
ggaugaucucucugcuuaa

SEQ ID NO: 1270359 - RNA, 19 nt, Artificial Sequence
  Description of Artificial Sequence: Synthetic oligonucleotide
  Antisense strand to SEQ ID NO: 1270358
uuaagcagagagaucaucc

SEQ ID NO: 1270360 - RNA, 19 nt, Artificial Sequence
  Description of Artificial Sequence: Synthetic oligonucleotide
  Sense strand starting at position 1466 of SEQ ID NO: 1241409
gguucuacccuuugguuau

SEQ ID NO: 1270361 - RNA, 19 nt, Artificial Sequence
  Description of Artificial Sequence: Synthetic oligonucleotide
  Antisense strand to SEQ ID NO: 1270360
auaaccaaaggguagaacc

SEQ ID NO: 1270362 - RNA, 19 nt, Artificial Sequence
  Description of Artificial Sequence: Synthetic oligonucleotide
  Sense strand starting at position 1514 of SEQ ID NO: 1241409
aagaaagaagucuguguag

SEQ ID NO: 1270363 - RNA, 19 nt, Artificial Sequence
  Description of Artificial Sequence: Synthetic oligonucleotide
  Antisense strand to SEQ ID NO: 1270362
cuacacagacuucuuucuu

SEQ ID NO: 1270364 - RNA, 19 nt, Artificial Sequence
  Description of Artificial Sequence: Synthetic oligonucleotide
  Sense strand starting at position 1516 of SEQ ID NO: 1241409
gaaagaagucuguguagag

SEQ ID NO: 1270365 - RNA, 19 nt, Artificial Sequence
  Description of Artificial Sequence: Synthetic oligonucleotide
  Antisense strand to SEQ ID NO: 1270364
cucuacacagacuucuuuc

SEQ ID NO: 1270366 - RNA, 19 nt, Artificial Sequence
  Description of Artificial Sequence: Synthetic oligonucleotide
  Sense strand starting at position 1517 of SEQ ID NO: 1241409
aaagaagucuguguagaga

SEQ ID NO: 1270367 - RNA, 19 nt, Artificial Sequence
  Description of Artificial Sequence: Synthetic oligonucleotide
  Antisense strand to SEQ ID NO: 1270366
ucucuacacagacuucuuu

SEQ ID NO: 1270368 - RNA, 19 nt, Artificial Sequence
  Description of Artificial Sequence: Synthetic oligonucleotide
  Sense strand starting at position 1890 of SEQ ID NO: 1241409
cccagucaucucuggcaac

SEQ ID NO: 1270369 - RNA, 19 nt, Artificial Sequence
  Description of Artificial Sequence: Synthetic oligonucleotide
  Antisense strand to SEQ ID NO: 1270368
guugccagagaugacuggg

SEQ ID NO: 1270370 - RNA, 19 nt, Artificial Sequence
  Description of Artificial Sequence: Synthetic oligonucleotide
  Sense strand starting at position 2073 of SEQ ID NO: 1241409
aggagaauuuccugggaca

SEQ ID NO: 1270371 - RNA, 19 nt, Artificial Sequence
  Description of Artificial Sequence: Synthetic oligonucleotide
  Antisense strand to SEQ ID NO: 1270370
ugucccaggaaauucuccu

SEQ ID NO: 1270372 - RNA, 19 nt, Artificial Sequence
  Description of Artificial Sequence: Synthetic oligonucleotide
  Sense strand starting at position 2136 of SEQ ID NO: 1241409
gugccaguucugcaaacag

SEQ ID NO: 1270373 - RNA, 19 nt, Artificial Sequence
  Description of Artificial Sequence: Synthetic oligonucleotide
  Antisense strand to SEQ ID NO: 1270372
cuguuugcagaacuggcac

SEQ ID NO: 1270374 - RNA, 19 nt, Artificial Sequence
  Description of Artificial Sequence: Synthetic oligonucleotide
  Sense strand starting at position 2214 of SEQ ID NO: 1241409
ucauuaaucugccuuggau

SEQ ID NO: 1270375 - RNA, 19 nt, Artificial Sequence
  Description of Artificial Sequence: Synthetic oligonucleotide
  Antisense strand to SEQ ID NO: 1270374
auccaaggcagauuaauga

SEQ ID NO: 1270376 - RNA, 19 nt, Artificial Sequence
  Description of Artificial Sequence: Synthetic oligonucleotide
  Sense strand starting at position 2228 of SEQ ID NO: 1241409
uggauuguuucccuuuggu

SEQ ID NO: 1270377 - RNA, 19 nt, Artificial Sequence
  Description of Artificial Sequence: Synthetic oligonucleotide
  Antisense strand to SEQ ID NO: 1270376
accaaagggaaacaaucca

SEQ ID NO: 1270378 - RNA, 19 nt, Artificial Sequence
  Description of Artificial Sequence: Synthetic oligonucleotide
  Sense strand starting at position 2463 of SEQ ID NO: 1241409
aauugauagcguuauacau

SEQ ID NO: 1270379 - RNA, 19 nt, Artificial Sequence
  Description of Artificial Sequence: Synthetic oligonucleotide
  Antisense strand to SEQ ID NO: 1270378
auguauaacgcuaucaauu

SEQ ID NO: 1270380 - RNA, 19 nt, Artificial Sequence
  Description of Artificial Sequence: Synthetic oligonucleotide
  Sense strand starting at position 2552 of SEQ ID NO: 1241409
uggucucagcguuuaagca

SEQ ID NO: 1270381 - RNA, 19 nt, Artificial Sequence
  Description of Artificial Sequence: Synthetic oligonucleotide
  Antisense strand to SEQ ID NO: 1270380
ugcuuaaacgcugagacca

SEQ ID NO: 1270382 - RNA, 19 nt, Artificial Sequence
  Description of Artificial Sequence: Synthetic oligonucleotide
  Sense strand starting at position 2560 of SEQ ID NO: 1241409
gcguuuaagcaugccuaca

SEQ ID NO: 1270383 - RNA, 19 nt, Artificial Sequence
  Description of Artificial Sequence: Synthetic oligonucleotide
  Antisense strand to SEQ ID NO: 1270382
uguaggcaugcuuaaacgc

SEQ ID NO: 1270384 - RNA, 19 nt, Artificial Sequence
  Description of Artificial Sequence: Synthetic oligonucleotide
  Sense strand starting at position 2690 of SEQ ID NO: 1241409
aaggacagagggugucaua

SEQ ID NO: 1270385 - RNA, 19 nt, Artificial Sequence
  Description of Artificial Sequence: Synthetic oligonucleotide
  Antisense strand to SEQ ID NO: 1270384
uaugacacccucuguccuu

SEQ ID NO: 1270386 - RNA, 19 nt, Artificial Sequence
  Description of Artificial Sequence: Synthetic oligonucleotide
  Sense strand starting at position 2697 of SEQ ID NO: 1241409
gagggugucauaugucaua

SEQ ID NO: 1270387 - RNA, 19 nt, Artificial Sequence
  Description of Artificial Sequence: Synthetic oligonucleotide
  Antisense strand to SEQ ID NO: 1270386
uaugacauaugacacccuc

SEQ ID NO: 1270388 - RNA, 19 nt, Artificial Sequence
  Description of Artificial Sequence: Synthetic oligonucleotide
  Sense strand starting at position 2761 of SEQ ID NO: 1241409
guguaaguccugcagauuu

SEQ ID NO: 1270389 - RNA, 19 nt, Artificial Sequence
  Description of Artificial Sequence: Synthetic oligonucleotide
  Antisense strand to SEQ ID NO: 1270388
aaaucugcaggacuuacac

SEQ ID NO: 1270390 - RNA, 19 nt, Artificial Sequence
  Description of Artificial Sequence: Synthetic oligonucleotide
  Sense strand starting at position 3158 of SEQ ID NO: 1241409
aaguuacaguuguuuggua

SEQ ID NO: 1270391 - RNA, 19 nt, Artificial Sequence
  Description of Artificial Sequence: Synthetic oligonucleotide
  Antisense strand to SEQ ID NO: 1270390
uaccaaacaacuguaacuu

SEQ ID NO: 1270392 - RNA, 19 nt, Artificial Sequence
  Description of Artificial Sequence: Synthetic oligonucleotide
  Sense strand starting at position 3159 of SEQ ID NO: 1241409
aguuacaguuguuugguaa

SEQ ID NO: 1270393 - RNA, 19 nt, Artificial Sequence
  Description of Artificial Sequence: Synthetic oligonucleotide
  Antisense strand to SEQ ID NO: 1270392
uuaccaaacaacuguaacu

SEQ ID NO: 1270394 - RNA, 19 nt, Artificial Sequence
  Description of Artificial Sequence: Synthetic oligonucleotide
  Sense strand starting at position 3194 of SEQ ID NO: 1241409
uugaauguguuucucuaaa

SEQ ID NO: 1270395 - RNA, 19 nt, Artificial Sequence
  Description of Artificial Sequence: Synthetic oligonucleotide
  Antisense strand to SEQ ID NO: 1270394
uuuagagaaacacauucaa

SEQ ID NO: 1270396 - RNA, 19 nt, Artificial Sequence
  Description of Artificial Sequence: Synthetic oligonucleotide
  Sense strand starting at position 3335 of SEQ ID NO: 1241409
gaaugagcuugucucuuau

SEQ ID NO: 1270397 - RNA, 19 nt, Artificial Sequence
  Description of Artificial Sequence: Synthetic oligonucleotide
  Antisense strand to SEQ ID NO: 1270396
auaagagacaagcucauuc

SEQ ID NO: 1270398 - RNA, 19 nt, Artificial Sequence
  Description of Artificial Sequence: Synthetic oligonucleotide
  Sense strand starting at position 3382 of SEQ ID NO: 1241409
aggagaugcuaucucggaa

SEQ ID NO: 1270399 - RNA, 19 nt, Artificial Sequence
  Description of Artificial Sequence: Synthetic oligonucleotide
  Antisense strand to SEQ ID NO: 1270398
uuccgagauagcaucuccu

SEQ ID NO: 1270400 - RNA, 19 nt, Artificial Sequence
  Description of Artificial Sequence: Synthetic oligonucleotide
  Sense strand starting at position 3385 of SEQ ID NO: 1241409
agaugcuaucucggaagca

SEQ ID NO: 1270401 - RNA, 19 nt, Artificial Sequence
  Description of Artificial Sequence: Synthetic oligonucleotide
  Antisense strand to SEQ ID NO: 1270400
ugcuuccgagauagcaucu

SEQ ID NO: 1270402 - RNA, 19 nt, Artificial Sequence
  Description of Artificial Sequence: Synthetic oligonucleotide
  Sense strand starting at position 3521 of SEQ ID NO: 1241409
gcauuugcuuguucuguuu

SEQ ID NO: 1270403 - RNA, 19 nt, Artificial Sequence
  Description of Artificial Sequence: Synthetic oligonucleotide
  Antisense strand to SEQ ID NO: 1270402
aaacagaacaagcaaaugc

SEQ ID NO: 1270404 - RNA, 19 nt, Artificial Sequence
  Description of Artificial Sequence: Synthetic oligonucleotide
  Sense strand starting at position 3640 of SEQ ID NO: 1241409
gccugacguagcuaaagau

SEQ ID NO: 1270405 - RNA, 19 nt, Artificial Sequence
  Description of Artificial Sequence: Synthetic oligonucleotide
  Antisense strand to SEQ ID NO: 1270404
aucuuuagcuacgucaggc

SEQ ID NO: 1270406 - RNA, 19 nt, Artificial Sequence
  Description of Artificial Sequence: Synthetic oligonucleotide
  Sense strand starting at position 3683 of SEQ ID NO: 1241409
auuuccuggucauaguaga

SEQ ID NO: 1270407 - RNA, 19 nt, Artificial Sequence
  Description of Artificial Sequence: Synthetic oligonucleotide
  Antisense strand to SEQ ID NO: 1270406
ucuacuaugaccaggaaau

SEQ ID NO: 1270408 - RNA, 19 nt, Artificial Sequence
  Description of Artificial Sequence: Synthetic oligonucleotide
  Sense strand starting at position 3846 of SEQ ID NO: 1241409
uuguuucaggaauggauga

SEQ ID NO: 1270409 - RNA, 19 nt, Artificial Sequence
  Description of Artificial Sequence: Synthetic oligonucleotide
  Antisense strand to SEQ ID NO: 1270408
ucauccauuccugaaacaa

SEQ ID NO: 1270410 - RNA, 19 nt, Artificial Sequence
  Description of Artificial Sequence: Synthetic oligonucleotide
  Sense strand starting at position 102 of SEQ ID NO: 1241410
augcucucccuggagcaua

SEQ ID NO: 1270411 - RNA, 19 nt, Artificial Sequence
  Description of Artificial Sequence: Synthetic oligonucleotide
  Antisense strand to SEQ ID NO: 1270410
uaugcuccagggagagcau

SEQ ID NO: 1270412 - RNA, 19 nt, Artificial Sequence
  Description of Artificial Sequence: Synthetic oligonucleotide
  Sense strand starting at position 137 of SEQ ID NO: 1241410
ugcauuccuccauggaauu

SEQ ID NO: 1270413 - RNA, 19 nt, Artificial Sequence
  Description of Artificial Sequence: Synthetic oligonucleotide
  Antisense strand to SEQ ID NO: 1270412
aauuccauggaggaaugca

SEQ ID NO: 1270414 - RNA, 19 nt, Artificial Sequence
  Description of Artificial Sequence: Synthetic oligonucleotide
  Sense strand starting at position 217 of SEQ ID NO: 1241410
acuguaucuccagagcuua

SEQ ID NO: 1270415 - RNA, 19 nt, Artificial Sequence
  Description of Artificial Sequence: Synthetic oligonucleotide
  Antisense strand to SEQ ID NO: 1270414
uaagcucuggagauacagu

SEQ ID NO: 1270416 - RNA, 19 nt, Artificial Sequence
  Description of Artificial Sequence: Synthetic oligonucleotide
  Sense strand starting at position 233 of SEQ ID NO: 1241410
uuaggacaguguuuagcau

SEQ ID NO: 1270417 - RNA, 19 nt, Artificial Sequence
  Description of Artificial Sequence: Synthetic oligonucleotide
  Antisense strand to SEQ ID NO: 1270416
augcuaaacacuguccuaa

SEQ ID NO: 1270418 - RNA, 19 nt, Artificial Sequence
  Description of Artificial Sequence: Synthetic oligonucleotide
  Sense strand starting at position 241 of SEQ ID NO: 1241410
guguuuagcauguaauagg

SEQ ID NO: 1270419 - RNA, 19 nt, Artificial Sequence
  Description of Artificial Sequence: Synthetic oligonucleotide
  Antisense strand to SEQ ID NO: 1270418
ccuauuacaugcuaaacac

SEQ ID NO: 1270420 - RNA, 19 nt, Artificial Sequence
  Description of Artificial Sequence: Synthetic oligonucleotide
  Sense strand starting at position 373 of SEQ ID NO: 1241410
auguaacagccucaguguu

SEQ ID NO: 1270421 - RNA, 19 nt, Artificial Sequence
  Description of Artificial Sequence: Synthetic oligonucleotide
  Antisense strand to SEQ ID NO: 1270420
aacacugaggcuguuacau

SEQ ID NO: 1270422 - RNA, 19 nt, Artificial Sequence
  Description of Artificial Sequence: Synthetic oligonucleotide
  Sense strand starting at position 460 of SEQ ID NO: 1241410
auaagaugguuucuucuuu

SEQ ID NO: 1270423 - RNA, 19 nt, Artificial Sequence
  Description of Artificial Sequence: Synthetic oligonucleotide
  Antisense strand to SEQ ID NO: 1270422
aaagaagaaaccaucuuau

SEQ ID NO: 1270424 - RNA, 19 nt, Artificial Sequence
  Description of Artificial Sequence: Synthetic oligonucleotide
  Sense strand starting at position 473 of SEQ ID NO: 1241410
uucuuuccagucuggagaa

SEQ ID NO: 1270425 - RNA, 19 nt, Artificial Sequence
  Description of Artificial Sequence: Synthetic oligonucleotide
  Antisense strand to SEQ ID NO: 1270424
uucuccagacuggaaagaa

SEQ ID NO: 1270426 - RNA, 19 nt, Artificial Sequence
  Description of Artificial Sequence: Synthetic oligonucleotide
  Sense strand starting at position 496 of SEQ ID NO: 1241410
aagaaaugcgcucauaaag

SEQ ID NO: 1270427 - RNA, 19 nt, Artificial Sequence
  Description of Artificial Sequence: Synthetic oligonucleotide
  Antisense strand to SEQ ID NO: 1270426
cuuuaugagcgcauuucuu

SEQ ID NO: 1270428 - RNA, 19 nt, Artificial Sequence
  Description of Artificial Sequence: Synthetic oligonucleotide
  Sense strand starting at position 584 of SEQ ID NO: 1241410
cugacacagucgucagaug

SEQ ID NO: 1270429 - RNA, 19 nt, Artificial Sequence
  Description of Artificial Sequence: Synthetic oligonucleotide
  Antisense strand to SEQ ID NO: 1270428
caucugacgacugugucag

SEQ ID NO: 1270430 - RNA, 19 nt, Artificial Sequence
  Description of Artificial Sequence: Synthetic oligonucleotide
  Sense strand starting at position 585 of SEQ ID NO: 1241410
ugacacagucgucagauga

SEQ ID NO: 1270431 - RNA, 19 nt, Artificial Sequence
  Description of Artificial Sequence: Synthetic oligonucleotide
  Antisense strand to SEQ ID NO: 1270430
ucaucugacgacuguguca

SEQ ID NO: 1270432 - RNA, 19 nt, Artificial Sequence
  Description of Artificial Sequence: Synthetic oligonucleotide
  Sense strand starting at position 621 of SEQ ID NO: 1241410
agagcauucuugucacaac

SEQ ID NO: 1270433 - RNA, 19 nt, Artificial Sequence
  Description of Artificial Sequence: Synthetic oligonucleotide
  Antisense strand to SEQ ID NO: 1270432
guugugacaagaaugcucu

SEQ ID NO: 1270434 - RNA, 19 nt, Artificial Sequence
  Description of Artificial Sequence: Synthetic oligonucleotide
  Sense strand starting at position 700 of SEQ ID NO: 1241410
ucuguaugcuaauuacaga

SEQ ID NO: 1270435 - RNA, 19 nt, Artificial Sequence
  Description of Artificial Sequence: Synthetic oligonucleotide
  Antisense strand to SEQ ID NO: 1270434
ucuguaauuagcauacaga

SEQ ID NO: 1270436 - RNA, 19 nt, Artificial Sequence
  Description of Artificial Sequence: Synthetic oligonucleotide
  Sense strand starting at position 775 of SEQ ID NO: 1241410
gaugaaaccugguccaaca

SEQ ID NO: 1270437 - RNA, 19 nt, Artificial Sequence
  Description of Artificial Sequence: Synthetic oligonucleotide
  Antisense strand to SEQ ID NO: 1270436
uguuggaccagguuucauc

SEQ ID NO: 1270438 - RNA, 19 nt, Artificial Sequence
  Description of Artificial Sequence: Synthetic oligonucleotide
  Sense strand starting at position 926 of SEQ ID NO: 1241410
cugcuagguuugguaauaa

SEQ ID NO: 1270439 - RNA, 19 nt, Artificial Sequence
  Description of Artificial Sequence: Synthetic oligonucleotide
  Antisense strand to SEQ ID NO: 1270438
uuauuaccaaaccuagcag

SEQ ID NO: 1270440 - RNA, 19 nt, Artificial Sequence
  Description of Artificial Sequence: Synthetic oligonucleotide
  Sense strand starting at position 936 of SEQ ID NO: 1241410
ugguaauaagauugaacga

SEQ ID NO: 1270441 - RNA, 19 nt, Artificial Sequence
  Description of Artificial Sequence: Synthetic oligonucleotide
  Antisense strand to SEQ ID NO: 1270440
ucguucaaucuuauuacca

SEQ ID NO: 1270442 - RNA, 19 nt, Artificial Sequence
  Description of Artificial Sequence: Synthetic oligonucleotide
  Sense strand starting at position 967 of SEQ ID NO: 1241410
cccugugggcuccauuauu

SEQ ID NO: 1270443 - RNA, 19 nt, Artificial Sequence
  Description of Artificial Sequence: Synthetic oligonucleotide
  Antisense strand to SEQ ID NO: 1270442
aauaauggagcccacaggg

SEQ ID NO: 1270444 - RNA, 19 nt, Artificial Sequence
  Description of Artificial Sequence: Synthetic oligonucleotide
  Sense strand starting at position 1290 of SEQ ID NO: 1241410
gacaaugauuaugugguaa

SEQ ID NO: 1270445 - RNA, 19 nt, Artificial Sequence
  Description of Artificial Sequence: Synthetic oligonucleotide
  Antisense strand to SEQ ID NO: 1270444
uuaccacauaaucauuguc

SEQ ID NO: 1270446 - RNA, 19 nt, Artificial Sequence
  Description of Artificial Sequence: Synthetic oligonucleotide
  Sense strand starting at position 1302 of SEQ ID NO: 1241410
gugguaaugacaggcacua

SEQ ID NO: 1270447 - RNA, 19 nt, Artificial Sequence
  Description of Artificial Sequence: Synthetic oligonucleotide
  Antisense strand to SEQ ID NO: 1270446
uagugccugucauuaccac

SEQ ID NO: 1270448 - RNA, 19 nt, Artificial Sequence
  Description of Artificial Sequence: Synthetic oligonucleotide
  Sense strand starting at position 1524 of SEQ ID NO: 1241410
cuuggcgucucgauuggaa

SEQ ID NO: 1270449 - RNA, 19 nt, Artificial Sequence
  Description of Artificial Sequence: Synthetic oligonucleotide
  Antisense strand to SEQ ID NO: 1270448
uuccaaucgagacgccaag

SEQ ID NO: 1270450 - RNA, 19 nt, Artificial Sequence
  Description of Artificial Sequence: Synthetic oligonucleotide
  Sense strand starting at position 1624 of SEQ ID NO: 1241410
gguuuagcaguccaacaaa

SEQ ID NO: 1270451 - RNA, 19 nt, Artificial Sequence
  Description of Artificial Sequence: Synthetic oligonucleotide
  Antisense strand to SEQ ID NO: 1270450
uuuguuggacugcuaaacc

SEQ ID NO: 1270452 - RNA, 19 nt, Artificial Sequence
  Description of Artificial Sequence: Synthetic oligonucleotide
  Sense strand starting at position 2118 of SEQ ID NO: 1241410
ccgaaagccauuggaugua

SEQ ID NO: 1270453 - RNA, 19 nt, Artificial Sequence
  Description of Artificial Sequence: Synthetic oligonucleotide
  Antisense strand to SEQ ID NO: 1270452
uacauccaauggcuuucgg

SEQ ID NO: 1270454 - RNA, 19 nt, Artificial Sequence
  Description of Artificial Sequence: Synthetic oligonucleotide
  Sense strand starting at position 2804 of SEQ ID NO: 1241410
ggucguuggcuggaaagga

SEQ ID NO: 1270455 - RNA, 19 nt, Artificial Sequence
  Description of Artificial Sequence: Synthetic oligonucleotide
  Antisense strand to SEQ ID NO: 1270454
uccuuuccagccaacgacc

SEQ ID NO: 1270456 - RNA, 19 nt, Artificial Sequence
  Description of Artificial Sequence: Synthetic oligonucleotide
  Sense strand starting at position 2936 of SEQ ID NO: 1241410
ccagaccuguucccggaaa

SEQ ID NO: 1270457 - RNA, 19 nt, Artificial Sequence
  Description of Artificial Sequence: Synthetic oligonucleotide
  Antisense strand to SEQ ID NO: 1270456
uuuccgggaacaggucugg

SEQ ID NO: 1270458 - RNA, 19 nt, Artificial Sequence
  Description of Artificial Sequence: Synthetic oligonucleotide
  Sense strand starting at position 2956 of SEQ ID NO: 1241410
gggcuaaaccuggagcauu

SEQ ID NO: 1270459 - RNA, 19 nt, Artificial Sequence
  Description of Artificial Sequence: Synthetic oligonucleotide
  Antisense strand to SEQ ID NO: 1270458
aaugcuccagguuuagccc

SEQ ID NO: 1270460 - RNA, 19 nt, Artificial Sequence
  Description of Artificial Sequence: Synthetic oligonucleotide
  Sense strand starting at position 3077 of SEQ ID NO: 1241410
ggucacuccgaguaucaac

SEQ ID NO: 1270461 - RNA, 19 nt, Artificial Sequence
  Description of Artificial Sequence: Synthetic oligonucleotide
  Antisense strand to SEQ ID NO: 1270460
guugauacucggagugacc

SEQ ID NO: 1270462 - RNA, 19 nt, Artificial Sequence
  Description of Artificial Sequence: Synthetic oligonucleotide
  Sense strand starting at position 3085 of SEQ ID NO: 1241410
cgaguaucaacaugaauga

SEQ ID NO: 1270463 - RNA, 19 nt, Artificial Sequence
  Description of Artificial Sequence: Synthetic oligonucleotide
  Antisense strand to SEQ ID NO: 1270462
ucauucauguugauacucg

SEQ ID NO: 1270464 - RNA, 19 nt, Artificial Sequence
  Description of Artificial Sequence: Synthetic oligonucleotide
  Sense strand starting at position 3106 of SEQ ID NO: 1241410
cugacaaauugcuucggau

SEQ ID NO: 1270465 - RNA, 19 nt, Artificial Sequence
  Description of Artificial Sequence: Synthetic oligonucleotide
  Antisense strand to SEQ ID NO: 1270464
auccgaagcaauuugucag

SEQ ID NO: 1270466 - RNA, 19 nt, Artificial Sequence
  Description of Artificial Sequence: Synthetic oligonucleotide
  Sense strand starting at position 3199 of SEQ ID NO: 1241410
caguguuggauaggaagua

SEQ ID NO: 1270467 - RNA, 19 nt, Artificial Sequence
  Description of Artificial Sequence: Synthetic oligonucleotide
  Antisense strand to SEQ ID NO: 1270466
uacuuccuauccaacacug

SEQ ID NO: 1270468 - RNA, 19 nt, Artificial Sequence
  Description of Artificial Sequence: Synthetic oligonucleotide
  Sense strand starting at position 3233 of SEQ ID NO: 1241410
cuggcuuccagauaagguu

SEQ ID NO: 1270469 - RNA, 19 nt, Artificial Sequence
  Description of Artificial Sequence: Synthetic oligonucleotide
  Antisense strand to SEQ ID NO: 1270468
aaccuuaucuggaagccag

SEQ ID NO: 1270470 - RNA, 19 nt, Artificial Sequence
  Description of Artificial Sequence: Synthetic oligonucleotide
  Sense strand starting at position 3310 of SEQ ID NO: 1241410
ugcuaugugcuggccauau

SEQ ID NO: 1270471 - RNA, 19 nt, Artificial Sequence
  Description of Artificial Sequence: Synthetic oligonucleotide
  Antisense strand to SEQ ID NO: 1270470
auauggccagcacauagca

SEQ ID NO: 1270472 - RNA, 19 nt, Artificial Sequence
  Description of Artificial Sequence: Synthetic oligonucleotide
  Sense strand starting at position 3408 of SEQ ID NO: 1241410
uuuacuuacgcauagaaau

SEQ ID NO: 1270473 - RNA, 19 nt, Artificial Sequence
  Description of Artificial Sequence: Synthetic oligonucleotide
  Antisense strand to SEQ ID NO: 1270472
auuucuaugcguaaguaaa

SEQ ID NO: 1270474 - RNA, 19 nt, Artificial Sequence
  Description of Artificial Sequence: Synthetic oligonucleotide
  Sense strand starting at position 3419 of SEQ ID NO: 1241410
auagaaauugcccagcuca

SEQ ID NO: 1270475 - RNA, 19 nt, Artificial Sequence
  Description of Artificial Sequence: Synthetic oligonucleotide
  Antisense strand to SEQ ID NO: 1270474
ugagcugggcaauuucuau

SEQ ID NO: 1270476 - RNA, 19 nt, Artificial Sequence
  Description of Artificial Sequence: Synthetic oligonucleotide
  Sense strand starting at position 3474 of SEQ ID NO: 1241410
acuagcagcugaucucuaa

SEQ ID NO: 1270477 - RNA, 19 nt, Artificial Sequence
  Description of Artificial Sequence: Synthetic oligonucleotide
  Antisense strand to SEQ ID NO: 1270476
uuagagaucagcugcuagu

SEQ ID NO: 1270478 - RNA, 19 nt, Artificial Sequence
  Description of Artificial Sequence: Synthetic oligonucleotide
  Sense strand starting at position 3478 of SEQ ID NO: 1241410
gcagcugaucucuaaguug

SEQ ID NO: 1270479 - RNA, 19 nt, Artificial Sequence
  Description of Artificial Sequence: Synthetic oligonucleotide
  Antisense strand to SEQ ID NO: 1270478
caacuuagagaucagcugc

SEQ ID NO: 1270480 - RNA, 19 nt, Artificial Sequence
  Description of Artificial Sequence: Synthetic oligonucleotide
  Sense strand starting at position 3581 of SEQ ID NO: 1241410
caagguuucugaguccaag

SEQ ID NO: 1270481 - RNA, 19 nt, Artificial Sequence
  Description of Artificial Sequence: Synthetic oligonucleotide
  Antisense strand to SEQ ID NO: 1270480
cuuggacucagaaaccuug

SEQ ID NO: 1270482 - RNA, 19 nt, Artificial Sequence
  Description of Artificial Sequence: Synthetic oligonucleotide
  Sense strand starting at position 3682 of SEQ ID NO: 1241410
agcccugaauucucugcaa

SEQ ID NO: 1270483 - RNA, 19 nt, Artificial Sequence
  Description of Artificial Sequence: Synthetic oligonucleotide
  Antisense strand to SEQ ID NO: 1270482
uugcagagaauucagggcu

SEQ ID NO: 1270484 - RNA, 19 nt, Artificial Sequence
  Description of Artificial Sequence: Synthetic oligonucleotide
  Sense strand starting at position 3722 of SEQ ID NO: 1241410
uaccaaucugauggugcua

SEQ ID NO: 1270485 - RNA, 19 nt, Artificial Sequence
  Description of Artificial Sequence: Synthetic oligonucleotide
  Antisense strand to SEQ ID NO: 1270484
uagcaccaucagauuggua

SEQ ID NO: 1270486 - RNA, 19 nt, Artificial Sequence
  Description of Artificial Sequence: Synthetic oligonucleotide
  Sense strand starting at position 3903 of SEQ ID NO: 1241410
gacaccaguguguauguaa

SEQ ID NO: 1270487 - RNA, 19 nt, Artificial Sequence
  Description of Artificial Sequence: Synthetic oligonucleotide
  Antisense strand to SEQ ID NO: 1270486
uuacauacacacugguguc

SEQ ID NO: 1270488 - RNA, 19 nt, Artificial Sequence
  Description of Artificial Sequence: Synthetic oligonucleotide
  Sense strand starting at position 3917 of SEQ ID NO: 1241410
uguaaauucuguucucaag

SEQ ID NO: 1270489 - RNA, 19 nt, Artificial Sequence
  Description of Artificial Sequence: Synthetic oligonucleotide
  Antisense strand to SEQ ID NO: 1270488
cuugagaacagaauuuaca

SEQ ID NO: 1270490 - RNA, 19 nt, Artificial Sequence
  Description of Artificial Sequence: Synthetic oligonucleotide
  Sense strand starting at position 259 of SEQ ID NO: 1241411
caccuaaaugugggugaua

SEQ ID NO: 1270491 - RNA, 19 nt, Artificial Sequence
  Description of Artificial Sequence: Synthetic oligonucleotide
  Antisense strand to SEQ ID NO: 1270490
uaucacccacauuuaggug

SEQ ID NO: 1270492 - RNA, 19 nt, Artificial Sequence
  Description of Artificial Sequence: Synthetic oligonucleotide
  Sense strand starting at position 260 of SEQ ID NO: 1241411
accuaaaugugggugauau

SEQ ID NO: 1270493 - RNA, 19 nt, Artificial Sequence
  Description of Artificial Sequence: Synthetic oligonucleotide
  Antisense strand to SEQ ID NO: 1270492
auaucacccacauuuaggu

SEQ ID NO: 1270494 - RNA, 19 nt, Artificial Sequence
  Description of Artificial Sequence: Synthetic oligonucleotide
  Sense strand starting at position 261 of SEQ ID NO: 1241411
ccuaaaugugggugauaug

SEQ ID NO: 1270495 - RNA, 19 nt, Artificial Sequence
  Description of Artificial Sequence: Synthetic oligonucleotide
  Antisense strand to SEQ ID NO: 1270494
cauaucacccacauuuagg

SEQ ID NO: 1270496 - RNA, 19 nt, Artificial Sequence
  Description of Artificial Sequence: Synthetic oligonucleotide
  Sense strand starting at position 320 of SEQ ID NO: 1241411
agcucuuaauaaguugaca

SEQ ID NO: 1270497 - RNA, 19 nt, Artificial Sequence
  Description of Artificial Sequence: Synthetic oligonucleotide
  Antisense strand to SEQ ID NO: 1270496
ugucaacuuauuaagagcu

SEQ ID NO: 1270498 - RNA, 19 nt, Artificial Sequence
  Description of Artificial Sequence: Synthetic oligonucleotide
  Sense strand starting at position 426 of SEQ ID NO: 1241411
gcauuuggcacuggagcua

SEQ ID NO: 1270499 - RNA, 19 nt, Artificial Sequence
  Description of Artificial Sequence: Synthetic oligonucleotide
  Antisense strand to SEQ ID NO: 1270498
uagcuccagugccaaaugc

SEQ ID NO: 1270500 - RNA, 19 nt, Artificial Sequence
  Description of Artificial Sequence: Synthetic oligonucleotide
  Sense strand starting at position 497 of SEQ ID NO: 1241411
agaucuuacacgugcauga

SEQ ID NO: 1270501 - RNA, 19 nt, Artificial Sequence
  Description of Artificial Sequence: Synthetic oligonucleotide
  Antisense strand to SEQ ID NO: 1270500
ucaugcacguguaagaucu

SEQ ID NO: 1270502 - RNA, 19 nt, Artificial Sequence
  Description of Artificial Sequence: Synthetic oligonucleotide
  Sense strand starting at position 612 of SEQ ID NO: 1241411
gaauuccuggcuugagcua

SEQ ID NO: 1270503 - RNA, 19 nt, Artificial Sequence
  Description of Artificial Sequence: Synthetic oligonucleotide
  Antisense strand to SEQ ID NO: 1270502
uagcucaagccaggaauuc

SEQ ID NO: 1270504 - RNA, 19 nt, Artificial Sequence
  Description of Artificial Sequence: Synthetic oligonucleotide
  Sense strand starting at position 847 of SEQ ID NO: 1241411
gccaaaccuucuguguaag

SEQ ID NO: 1270505 - RNA, 19 nt, Artificial Sequence
  Description of Artificial Sequence: Synthetic oligonucleotide
  Antisense strand to SEQ ID NO: 1270504
cuuacacagaagguuuggc

SEQ ID NO: 1270506 - RNA, 19 nt, Artificial Sequence
  Description of Artificial Sequence: Synthetic oligonucleotide
  Sense strand starting at position 855 of SEQ ID NO: 1241411
uucuguguaaggugaugau

SEQ ID NO: 1270507 - RNA, 19 nt, Artificial Sequence
  Description of Artificial Sequence: Synthetic oligonucleotide
  Antisense strand to SEQ ID NO: 1270506
aucaucaccuuacacagaa

SEQ ID NO: 1270508 - RNA, 19 nt, Artificial Sequence
  Description of Artificial Sequence: Synthetic oligonucleotide
  Sense strand starting at position 859 of SEQ ID NO: 1241411
guguaaggugaugauuauu

SEQ ID NO: 1270509 - RNA, 19 nt, Artificial Sequence
  Description of Artificial Sequence: Synthetic oligonucleotide
  Antisense strand to SEQ ID NO: 1270508
aauaaucaucaccuuacac

SEQ ID NO: 1270510 - RNA, 19 nt, Artificial Sequence
  Description of Artificial Sequence: Synthetic oligonucleotide
  Sense strand starting at position 1038 of SEQ ID NO: 1241411
gguucagagucucuuggaa

SEQ ID NO: 1270511 - RNA, 19 nt, Artificial Sequence
  Description of Artificial Sequence: Synthetic oligonucleotide
  Antisense strand to SEQ ID NO: 1270510
uuccaagagacucugaacc

SEQ ID NO: 1270512 - RNA, 19 nt, Artificial Sequence
  Description of Artificial Sequence: Synthetic oligonucleotide
  Sense strand starting at position 1266 of SEQ ID NO: 1241411
caaagagucccagguuaca

SEQ ID NO: 1270513 - RNA, 19 nt, Artificial Sequence
  Description of Artificial Sequence: Synthetic oligonucleotide
  Antisense strand to SEQ ID NO: 1270512
uguaaccugggacucuuug

SEQ ID NO: 1270514 - RNA, 19 nt, Artificial Sequence
  Description of Artificial Sequence: Synthetic oligonucleotide
  Sense strand starting at position 1521 of SEQ ID NO: 1241411
agcugaucccaguaagaau

SEQ ID NO: 1270515 - RNA, 19 nt, Artificial Sequence
  Description of Artificial Sequence: Synthetic oligonucleotide
  Antisense strand to SEQ ID NO: 1270514
auucuuacugggaucagcu

SEQ ID NO: 1270516 - RNA, 19 nt, Artificial Sequence
  Description of Artificial Sequence: Synthetic oligonucleotide
  Sense strand starting at position 1528 of SEQ ID NO: 1241411
cccaguaagaauggcagua

SEQ ID NO: 1270517 - RNA, 19 nt, Artificial Sequence
  Description of Artificial Sequence: Synthetic oligonucleotide
  Antisense strand to SEQ ID NO: 1270516
uacugccauucuuacuggg

SEQ ID NO: 1270518 - RNA, 19 nt, Artificial Sequence
  Description of Artificial Sequence: Synthetic oligonucleotide
  Sense strand starting at position 1550 of SEQ ID NO: 1241411
cuaagucuguaugcacuaa

SEQ ID NO: 1270519 - RNA, 19 nt, Artificial Sequence
  Description of Artificial Sequence: Synthetic oligonucleotide
  Antisense strand to SEQ ID NO: 1270518
uuagugcauacagacuuag

SEQ ID NO: 1270520 - RNA, 19 nt, Artificial Sequence
  Description of Artificial Sequence: Synthetic oligonucleotide
  Sense strand starting at position 1554 of SEQ ID NO: 1241411
gucuguaugcacuaagaga

SEQ ID NO: 1270521 - RNA, 19 nt, Artificial Sequence
  Description of Artificial Sequence: Synthetic oligonucleotide
  Antisense strand to SEQ ID NO: 1270520
ucucuuagugcauacagac

SEQ ID NO: 1270522 - RNA, 19 nt, Artificial Sequence
  Description of Artificial Sequence: Synthetic oligonucleotide
  Sense strand starting at position 1606 of SEQ ID NO: 1241411
cucccuuugggugaagcau

SEQ ID NO: 1270523 - RNA, 19 nt, Artificial Sequence
  Description of Artificial Sequence: Synthetic oligonucleotide
  Antisense strand to SEQ ID NO: 1270522
augcuucacccaaagggag

SEQ ID NO: 1270524 - RNA, 19 nt, Artificial Sequence
  Description of Artificial Sequence: Synthetic oligonucleotide
  Sense strand starting at position 1652 of SEQ ID NO: 1241411
gcugcacuuccagauggaa

SEQ ID NO: 1270525 - RNA, 19 nt, Artificial Sequence
  Description of Artificial Sequence: Synthetic oligonucleotide
  Antisense strand to SEQ ID NO: 1270524
uuccaucuggaagugcagc

SEQ ID NO: 1270526 - RNA, 19 nt, Artificial Sequence
  Description of Artificial Sequence: Synthetic oligonucleotide
  Sense strand starting at position 1654 of SEQ ID NO: 1241411
ugcacuuccagauggaaga

SEQ ID NO: 1270527 - RNA, 19 nt, Artificial Sequence
  Description of Artificial Sequence: Synthetic oligonucleotide
  Antisense strand to SEQ ID NO: 1270526
ucuuccaucuggaagugca

SEQ ID NO: 1270528 - RNA, 19 nt, Artificial Sequence
  Description of Artificial Sequence: Synthetic oligonucleotide
  Sense strand starting at position 1686 of SEQ ID NO: 1241411
ugaaaugacugagacccua

SEQ ID NO: 1270529 - RNA, 19 nt, Artificial Sequence
  Description of Artificial Sequence: Synthetic oligonucleotide
  Antisense strand to SEQ ID NO: 1270528
uagggucucagucauuuca

SEQ ID NO: 1270530 - RNA, 19 nt, Artificial Sequence
  Description of Artificial Sequence: Synthetic oligonucleotide
  Sense strand starting at position 2139 of SEQ ID NO: 1241411
ucucgcuucccagauucuu

SEQ ID NO: 1270531 - RNA, 19 nt, Artificial Sequence
  Description of Artificial Sequence: Synthetic oligonucleotide
  Antisense strand to SEQ ID NO: 1270530
aagaaucugggaagcgaga

SEQ ID NO: 1270532 - RNA, 19 nt, Artificial Sequence
  Description of Artificial Sequence: Synthetic oligonucleotide
  Sense strand starting at position 2287 of SEQ ID NO: 1241411
auaugaaguuuagcagaga

SEQ ID NO: 1270533 - RNA, 19 nt, Artificial Sequence
  Description of Artificial Sequence: Synthetic oligonucleotide
  Antisense strand to SEQ ID NO: 1270532
ucucugcuaaacuucauau

SEQ ID NO: 1270534 - RNA, 19 nt, Artificial Sequence
  Description of Artificial Sequence: Synthetic oligonucleotide
  Sense strand starting at position 2388 of SEQ ID NO: 1241411
cagcauuuaugguaucaag

SEQ ID NO: 1270535 - RNA, 19 nt, Artificial Sequence
  Description of Artificial Sequence: Synthetic oligonucleotide
  Antisense strand to SEQ ID NO: 1270534
cuugauaccauaaaugcug

SEQ ID NO: 1270536 - RNA, 19 nt, Artificial Sequence
  Description of Artificial Sequence: Synthetic oligonucleotide
  Sense strand starting at position 2427 of SEQ ID NO: 1241411
aaacuuugacugcagaguu

SEQ ID NO: 1270537 - RNA, 19 nt, Artificial Sequence
  Description of Artificial Sequence: Synthetic oligonucleotide
  Antisense strand to SEQ ID NO: 1270536
aacucugcagucaaaguuu

SEQ ID NO: 1270538 - RNA, 19 nt, Artificial Sequence
  Description of Artificial Sequence: Synthetic oligonucleotide
  Sense strand starting at position 2443 of SEQ ID NO: 1241411
guuaauccugcauauggaa

SEQ ID NO: 1270539 - RNA, 19 nt, Artificial Sequence
  Description of Artificial Sequence: Synthetic oligonucleotide
  Antisense strand to SEQ ID NO: 1270538
uuccauaugcaggauuaac

SEQ ID NO: 1270540 - RNA, 19 nt, Artificial Sequence
  Description of Artificial Sequence: Synthetic oligonucleotide
  Sense strand starting at position 2721 of SEQ ID NO: 1241411
uauugaauggcaugaguca

SEQ ID NO: 1270541 - RNA, 19 nt, Artificial Sequence
  Description of Artificial Sequence: Synthetic oligonucleotide
  Antisense strand to SEQ ID NO: 1270540
ugacucaugccauucaaua

SEQ ID NO: 1270542 - RNA, 19 nt, Artificial Sequence
  Description of Artificial Sequence: Synthetic oligonucleotide
  Sense strand starting at position 2944 of SEQ ID NO: 1241411
acuuguaagcucgacaguu

SEQ ID NO: 1270543 - RNA, 19 nt, Artificial Sequence
  Description of Artificial Sequence: Synthetic oligonucleotide
  Antisense strand to SEQ ID NO: 1270542
aacugucgagcuuacaagu

SEQ ID NO: 1270544 - RNA, 19 nt, Artificial Sequence
  Description of Artificial Sequence: Synthetic oligonucleotide
  Sense strand starting at position 3069 of SEQ ID NO: 1241411
caagguuaucaggguuaga

SEQ ID NO: 1270545 - RNA, 19 nt, Artificial Sequence
  Description of Artificial Sequence: Synthetic oligonucleotide
  Antisense strand to SEQ ID NO: 1270544
ucuaacccugauaaccuug

SEQ ID NO: 1270546 - RNA, 19 nt, Artificial Sequence
  Description of Artificial Sequence: Synthetic oligonucleotide
  Sense strand starting at position 3329 of SEQ ID NO: 1241411
acgugagcuguccacauua

SEQ ID NO: 1270547 - RNA, 19 nt, Artificial Sequence
  Description of Artificial Sequence: Synthetic oligonucleotide
  Antisense strand to SEQ ID NO: 1270546
uaauguggacagcucacgu

SEQ ID NO: 1270548 - RNA, 19 nt, Artificial Sequence
  Description of Artificial Sequence: Synthetic oligonucleotide
  Sense strand starting at position 3331 of SEQ ID NO: 1241411
gugagcuguccacauuauu

SEQ ID NO: 1270549 - RNA, 19 nt, Artificial Sequence
  Description of Artificial Sequence: Synthetic oligonucleotide
  Antisense strand to SEQ ID NO: 1270548
aauaauguggacagcucac

SEQ ID NO: 1270550 - RNA, 19 nt, Artificial Sequence
  Description of Artificial Sequence: Synthetic oligonucleotide
  Sense strand starting at position 3402 of SEQ ID NO: 1241411
agaugcuguguuugacaga

SEQ ID NO: 1270551 - RNA, 19 nt, Artificial Sequence
  Description of Artificial Sequence: Synthetic oligonucleotide
  Antisense strand to SEQ ID NO: 1270550
ucugucaaacacagcaucu

SEQ ID NO: 1270552 - RNA, 19 nt, Artificial Sequence
  Description of Artificial Sequence: Synthetic oligonucleotide
  Sense strand starting at position 3407 of SEQ ID NO: 1241411
cuguguuugacagaggugu

SEQ ID NO: 1270553 - RNA, 19 nt, Artificial Sequence
  Description of Artificial Sequence: Synthetic oligonucleotide
  Antisense strand to SEQ ID NO: 1270552
acaccucugucaaacacag

SEQ ID NO: 1270554 - RNA, 19 nt, Artificial Sequence
  Description of Artificial Sequence: Synthetic oligonucleotide
  Sense strand starting at position 3729 of SEQ ID NO: 1241411
cuuauuaaugagcguggga

SEQ ID NO: 1270555 - RNA, 19 nt, Artificial Sequence
  Description of Artificial Sequence: Synthetic oligonucleotide
  Antisense strand to SEQ ID NO: 1270554
ucccacgcucauuaauaag

SEQ ID NO: 1270556 - RNA, 19 nt, Artificial Sequence
  Description of Artificial Sequence: Synthetic oligonucleotide
  Sense strand starting at position 3731 of SEQ ID NO: 1241411
uauuaaugagcgugggaag

SEQ ID NO: 1270557 - RNA, 19 nt, Artificial Sequence
  Description of Artificial Sequence: Synthetic oligonucleotide
  Antisense strand to SEQ ID NO: 1270556
cuucccacgcucauuaaua

SEQ ID NO: 1270558 - RNA, 19 nt, Artificial Sequence
  Description of Artificial Sequence: Synthetic oligonucleotide
  Sense strand starting at position 3874 of SEQ ID NO: 1241411
aguuuacuggaauguauua

SEQ ID NO: 1270559 - RNA, 19 nt, Artificial Sequence
  Description of Artificial Sequence: Synthetic oligonucleotide
  Antisense strand to SEQ ID NO: 1270558
uaauacauuccaguaaacu

SEQ ID NO: 1270560 - RNA, 19 nt, Artificial Sequence
  Description of Artificial Sequence: Synthetic oligonucleotide
  Sense strand starting at position 3936 of SEQ ID NO: 1241411
aggcguguuaaggaaguaa

SEQ ID NO: 1270561 - RNA, 19 nt, Artificial Sequence
  Description of Artificial Sequence: Synthetic oligonucleotide
  Antisense strand to SEQ ID NO: 1270560
uuacuuccuuaacacgccu

SEQ ID NO: 1270562 - RNA, 19 nt, Artificial Sequence
  Description of Artificial Sequence: Synthetic oligonucleotide
  Sense strand starting at position 3960 of SEQ ID NO: 1241411
gcggguccuagugauggau

SEQ ID NO: 1270563 - RNA, 19 nt, Artificial Sequence
  Description of Artificial Sequence: Synthetic oligonucleotide
  Antisense strand to SEQ ID NO: 1270562
auccaucacuaggacccgc

SEQ ID NO: 1270564 - RNA, 19 nt, Artificial Sequence
  Description of Artificial Sequence: Synthetic oligonucleotide
  Sense strand starting at position 3963 of SEQ ID NO: 1241411
gguccuagugauggaugca

SEQ ID NO: 1270565 - RNA, 19 nt, Artificial Sequence
  Description of Artificial Sequence: Synthetic oligonucleotide
  Antisense strand to SEQ ID NO: 1270564
ugcauccaucacuaggacc

SEQ ID NO: 1270566 - RNA, 19 nt, Artificial Sequence
  Description of Artificial Sequence: Synthetic oligonucleotide
  Sense strand starting at position 3964 of SEQ ID NO: 1241411
guccuagugauggaugcaa

SEQ ID NO: 1270567 - RNA, 19 nt, Artificial Sequence
  Description of Artificial Sequence: Synthetic oligonucleotide
  Antisense strand to SEQ ID NO: 1270566
uugcauccaucacuaggac

SEQ ID NO: 1270568 - RNA, 19 nt, Artificial Sequence
  Description of Artificial Sequence: Synthetic oligonucleotide
  Sense strand starting at position 3966 of SEQ ID NO: 1241411
ccuagugauggaugcaaag

SEQ ID NO: 1270569 - RNA, 19 nt, Artificial Sequence
  Description of Artificial Sequence: Synthetic oligonucleotide
  Antisense strand to SEQ ID NO: 1270568
cuuugcauccaucacuagg

SEQ ID NO: 1270570 - RNA, 19 nt, Artificial Sequence
  Description of Artificial Sequence: Synthetic oligonucleotide
  Sense strand starting at position 21 of SEQ ID NO: 1241412
cuggcagaaugucuaugua

SEQ ID NO: 1270571 - RNA, 19 nt, Artificial Sequence
  Description of Artificial Sequence: Synthetic oligonucleotide
  Antisense strand to SEQ ID NO: 1270570
uacauagacauucugccag

SEQ ID NO: 1270572 - RNA, 19 nt, Artificial Sequence
  Description of Artificial Sequence: Synthetic oligonucleotide
  Sense strand starting at position 24 of SEQ ID NO: 1241412
gcagaaugucuauguagca

SEQ ID NO: 1270573 - RNA, 19 nt, Artificial Sequence
  Description of Artificial Sequence: Synthetic oligonucleotide
  Antisense strand to SEQ ID NO: 1270572
ugcuacauagacauucugc

SEQ ID NO: 1270574 - RNA, 19 nt, Artificial Sequence
  Description of Artificial Sequence: Synthetic oligonucleotide
  Sense strand starting at position 363 of SEQ ID NO: 1241412
uuuccuucugcugggaaau

SEQ ID NO: 1270575 - RNA, 19 nt, Artificial Sequence
  Description of Artificial Sequence: Synthetic oligonucleotide
  Antisense strand to SEQ ID NO: 1270574
auuucccagcagaaggaaa

SEQ ID NO: 1270576 - RNA, 19 nt, Artificial Sequence
  Description of Artificial Sequence: Synthetic oligonucleotide
  Sense strand starting at position 365 of SEQ ID NO: 1241412
uccuucugcugggaaauaa

SEQ ID NO: 1270577 - RNA, 19 nt, Artificial Sequence
  Description of Artificial Sequence: Synthetic oligonucleotide
  Antisense strand to SEQ ID NO: 1270576
uuauuucccagcagaagga

SEQ ID NO: 1270578 - RNA, 19 nt, Artificial Sequence
  Description of Artificial Sequence: Synthetic oligonucleotide
  Sense strand starting at position 389 of SEQ ID NO: 1241412
gcugauuguagcugugcua

SEQ ID NO: 1270579 - RNA, 19 nt, Artificial Sequence
  Description of Artificial Sequence: Synthetic oligonucleotide
  Antisense strand to SEQ ID NO: 1270578
uagcacagcuacaaucagc

SEQ ID NO: 1270580 - RNA, 19 nt, Artificial Sequence
  Description of Artificial Sequence: Synthetic oligonucleotide
  Sense strand starting at position 392 of SEQ ID NO: 1241412
gauuguagcugugcuacau

SEQ ID NO: 1270581 - RNA, 19 nt, Artificial Sequence
  Description of Artificial Sequence: Synthetic oligonucleotide
  Antisense strand to SEQ ID NO: 1270580
auguagcacagcuacaauc

SEQ ID NO: 1270582 - RNA, 19 nt, Artificial Sequence
  Description of Artificial Sequence: Synthetic oligonucleotide
  Sense strand starting at position 401 of SEQ ID NO: 1241412
ugugcuacaucuuugcuaa

SEQ ID NO: 1270583 - RNA, 19 nt, Artificial Sequence
  Description of Artificial Sequence: Synthetic oligonucleotide
  Antisense strand to SEQ ID NO: 1270582
uuagcaaagauguagcaca

SEQ ID NO: 1270584 - RNA, 19 nt, Artificial Sequence
  Description of Artificial Sequence: Synthetic oligonucleotide
  Sense strand starting at position 402 of SEQ ID NO: 1241412
gugcuacaucuuugcuaaa

SEQ ID NO: 1270585 - RNA, 19 nt, Artificial Sequence
  Description of Artificial Sequence: Synthetic oligonucleotide
  Antisense strand to SEQ ID NO: 1270584
uuuagcaaagauguagcac

SEQ ID NO: 1270586 - RNA, 19 nt, Artificial Sequence
  Description of Artificial Sequence: Synthetic oligonucleotide
  Sense strand starting at position 439 of SEQ ID NO: 1241412
aggugccucuagguaaauu

SEQ ID NO: 1270587 - RNA, 19 nt, Artificial Sequence
  Description of Artificial Sequence: Synthetic oligonucleotide
  Antisense strand to SEQ ID NO: 1270586
aauuuaccuagaggcaccu

SEQ ID NO: 1270588 - RNA, 19 nt, Artificial Sequence
  Description of Artificial Sequence: Synthetic oligonucleotide
  Sense strand starting at position 463 of SEQ ID NO: 1241412
uccucagucugucagugaa

SEQ ID NO: 1270589 - RNA, 19 nt, Artificial Sequence
  Description of Artificial Sequence: Synthetic oligonucleotide
  Antisense strand to SEQ ID NO: 1270588
uucacugacagacugagga

SEQ ID NO: 1270590 - RNA, 19 nt, Artificial Sequence
  Description of Artificial Sequence: Synthetic oligonucleotide
  Sense strand starting at position 466 of SEQ ID NO: 1241412
ucagucugucagugaaggu

SEQ ID NO: 1270591 - RNA, 19 nt, Artificial Sequence
  Description of Artificial Sequence: Synthetic oligonucleotide
  Antisense strand to SEQ ID NO: 1270590
accuucacugacagacuga

SEQ ID NO: 1270592 - RNA, 19 nt, Artificial Sequence
  Description of Artificial Sequence: Synthetic oligonucleotide
  Sense strand starting at position 567 of SEQ ID NO: 1241412
gugcgauucucuccuacuc

SEQ ID NO: 1270593 - RNA, 19 nt, Artificial Sequence
  Description of Artificial Sequence: Synthetic oligonucleotide
  Antisense strand to SEQ ID NO: 1270592
gaguaggagagaaucgcac

SEQ ID NO: 1270594 - RNA, 19 nt, Artificial Sequence
  Description of Artificial Sequence: Synthetic oligonucleotide
  Sense strand starting at position 569 of SEQ ID NO: 1241412
gcgauucucuccuacucua

SEQ ID NO: 1270595 - RNA, 19 nt, Artificial Sequence
  Description of Artificial Sequence: Synthetic oligonucleotide
  Antisense strand to SEQ ID NO: 1270594
uagaguaggagagaaucgc

SEQ ID NO: 1270596 - RNA, 19 nt, Artificial Sequence
  Description of Artificial Sequence: Synthetic oligonucleotide
  Sense strand starting at position 620 of SEQ ID NO: 1241412
aguuaugccuaacacgaau

SEQ ID NO: 1270597 - RNA, 19 nt, Artificial Sequence
  Description of Artificial Sequence: Synthetic oligonucleotide
  Antisense strand to SEQ ID NO: 1270596
auucguguuaggcauaacu

SEQ ID NO: 1270598 - RNA, 19 nt, Artificial Sequence
  Description of Artificial Sequence: Synthetic oligonucleotide
  Sense strand starting at position 663 of SEQ ID NO: 1241412
cugguucuuccugguggaa

SEQ ID NO: 1270599 - RNA, 19 nt, Artificial Sequence
  Description of Artificial Sequence: Synthetic oligonucleotide
  Antisense strand to SEQ ID NO: 1270598
uuccaccaggaagaaccag

SEQ ID NO: 1270600 - RNA, 19 nt, Artificial Sequence
  Description of Artificial Sequence: Synthetic oligonucleotide
  Sense strand starting at position 729 of SEQ ID NO: 1241412
ucagucugcuguucugauu

SEQ ID NO: 1270601 - RNA, 19 nt, Artificial Sequence
  Description of Artificial Sequence: Synthetic oligonucleotide
  Antisense strand to SEQ ID NO: 1270600
aaucagaacagcagacuga

SEQ ID NO: 1270602 - RNA, 19 nt, Artificial Sequence
  Description of Artificial Sequence: Synthetic oligonucleotide
  Sense strand starting at position 760 of SEQ ID NO: 1241412
gugugaagucgagggcaga

SEQ ID NO: 1270603 - RNA, 19 nt, Artificial Sequence
  Description of Artificial Sequence: Synthetic oligonucleotide
  Antisense strand to SEQ ID NO: 1270602
ucugcccucgacuucacac

SEQ ID NO: 1270604 - RNA, 19 nt, Artificial Sequence
  Description of Artificial Sequence: Synthetic oligonucleotide
  Sense strand starting at position 804 of SEQ ID NO: 1241412
cugacugacucaguaaaug

SEQ ID NO: 1270605 - RNA, 19 nt, Artificial Sequence
  Description of Artificial Sequence: Synthetic oligonucleotide
  Antisense strand to SEQ ID NO: 1270604
cauuuacugagucagucag

SEQ ID NO: 1270606 - RNA, 19 nt, Artificial Sequence
  Description of Artificial Sequence: Synthetic oligonucleotide
  Sense strand starting at position 812 of SEQ ID NO: 1241412
cucaguaaauguuuaguuu

SEQ ID NO: 1270607 - RNA, 19 nt, Artificial Sequence
  Description of Artificial Sequence: Synthetic oligonucleotide
  Antisense strand to SEQ ID NO: 1270606
aaacuaaacauuuacugag

SEQ ID NO: 1270608 - RNA, 19 nt, Artificial Sequence
  Description of Artificial Sequence: Synthetic oligonucleotide
  Sense strand starting at position 830 of SEQ ID NO: 1241412
uccugucccuaucuguaaa

SEQ ID NO: 1270609 - RNA, 19 nt, Artificial Sequence
  Description of Artificial Sequence: Synthetic oligonucleotide
  Antisense strand to SEQ ID NO: 1270608
uuuacagauagggacagga

SEQ ID NO: 1270610 - RNA, 19 nt, Artificial Sequence
  Description of Artificial Sequence: Synthetic oligonucleotide
  Sense strand starting at position 907 of SEQ ID NO: 1241412
agcagagcgucuccaauuu

SEQ ID NO: 1270611 - RNA, 19 nt, Artificial Sequence
  Description of Artificial Sequence: Synthetic oligonucleotide
  Antisense strand to SEQ ID NO: 1270610
aaauuggagacgcucugcu

SEQ ID NO: 1270612 - RNA, 19 nt, Artificial Sequence
  Description of Artificial Sequence: Synthetic oligonucleotide
  Sense strand starting at position 1081 of SEQ ID NO: 1241412
accuguugaucaggcgaca

SEQ ID NO: 1270613 - RNA, 19 nt, Artificial Sequence
  Description of Artificial Sequence: Synthetic oligonucleotide
  Antisense strand to SEQ ID NO: 1270612
ugucgccugaucaacaggu

SEQ ID NO: 1270614 - RNA, 19 nt, Artificial Sequence
  Description of Artificial Sequence: Synthetic oligonucleotide
  Sense strand starting at position 1093 of SEQ ID NO: 1241412
ggcgacagcucaugucagu

SEQ ID NO: 1270615 - RNA, 19 nt, Artificial Sequence
  Description of Artificial Sequence: Synthetic oligonucleotide
  Antisense strand to SEQ ID NO: 1270614
acugacaugagcugucgcc

SEQ ID NO: 1270616 - RNA, 19 nt, Artificial Sequence
  Description of Artificial Sequence: Synthetic oligonucleotide
  Sense strand starting at position 1219 of SEQ ID NO: 1241412
acacuuaccuaugguggaa

SEQ ID NO: 1270617 - RNA, 19 nt, Artificial Sequence
  Description of Artificial Sequence: Synthetic oligonucleotide
  Antisense strand to SEQ ID NO: 1270616
uuccaccauagguaagugu

SEQ ID NO: 1270618 - RNA, 19 nt, Artificial Sequence
  Description of Artificial Sequence: Synthetic oligonucleotide
  Sense strand starting at position 1988 of SEQ ID NO: 1241412
acucgaguuucccgcaaag

SEQ ID NO: 1270619 - RNA, 19 nt, Artificial Sequence
  Description of Artificial Sequence: Synthetic oligonucleotide
  Antisense strand to SEQ ID NO: 1270618
cuuugcgggaaacucgagu

SEQ ID NO: 1270620 - RNA, 19 nt, Artificial Sequence
  Description of Artificial Sequence: Synthetic oligonucleotide
  Sense strand starting at position 1990 of SEQ ID NO: 1241412
ucgaguuucccgcaaagag

SEQ ID NO: 1270621 - RNA, 19 nt, Artificial Sequence
  Description of Artificial Sequence: Synthetic oligonucleotide
  Antisense strand to SEQ ID NO: 1270620
cucuuugcgggaaacucga

SEQ ID NO: 1270622 - RNA, 19 nt, Artificial Sequence
  Description of Artificial Sequence: Synthetic oligonucleotide
  Sense strand starting at position 2151 of SEQ ID NO: 1241412
gugucagucugcuggcuuu

SEQ ID NO: 1270623 - RNA, 19 nt, Artificial Sequence
  Description of Artificial Sequence: Synthetic oligonucleotide
  Antisense strand to SEQ ID NO: 1270622
aaagccagcagacugacac

SEQ ID NO: 1270624 - RNA, 19 nt, Artificial Sequence
  Description of Artificial Sequence: Synthetic oligonucleotide
  Sense strand starting at position 2692 of SEQ ID NO: 1241412
ccuagugcguuccagaguu

SEQ ID NO: 1270625 - RNA, 19 nt, Artificial Sequence
  Description of Artificial Sequence: Synthetic oligonucleotide
  Antisense strand to SEQ ID NO: 1270624
aacucuggaacgcacuagg

SEQ ID NO: 1270626 - RNA, 19 nt, Artificial Sequence
  Description of Artificial Sequence: Synthetic oligonucleotide
  Sense strand starting at position 3150 of SEQ ID NO: 1241412
cgcagaucuggguagugga

SEQ ID NO: 1270627 - RNA, 19 nt, Artificial Sequence
  Description of Artificial Sequence: Synthetic oligonucleotide
  Antisense strand to SEQ ID NO: 1270626
uccacuacccagaucugcg

SEQ ID NO: 1270628 - RNA, 19 nt, Artificial Sequence
  Description of Artificial Sequence: Synthetic oligonucleotide
  Sense strand starting at position 3459 of SEQ ID NO: 1241412
ccgugugauuucgaauaaa

SEQ ID NO: 1270629 - RNA, 19 nt, Artificial Sequence
  Description of Artificial Sequence: Synthetic oligonucleotide
  Antisense strand to SEQ ID NO: 1270628
uuuauucgaaaucacacgg

SEQ ID NO: 1270630 - RNA, 19 nt, Artificial Sequence
  Description of Artificial Sequence: Synthetic oligonucleotide
  Sense strand starting at position 3530 of SEQ ID NO: 1241412
aguccucucggcucuguua

SEQ ID NO: 1270631 - RNA, 19 nt, Artificial Sequence
  Description of Artificial Sequence: Synthetic oligonucleotide
  Antisense strand to SEQ ID NO: 1270630
uaacagagccgagaggacu

SEQ ID NO: 1270632 - RNA, 19 nt, Artificial Sequence
  Description of Artificial Sequence: Synthetic oligonucleotide
  Sense strand starting at position 3637 of SEQ ID NO: 1241412
cagggugaguacugcaauu

SEQ ID NO: 1270633 - RNA, 19 nt, Artificial Sequence
  Description of Artificial Sequence: Synthetic oligonucleotide
  Antisense strand to SEQ ID NO: 1270632
aauugcaguacucacccug

SEQ ID NO: 1270634 - RNA, 19 nt, Artificial Sequence
  Description of Artificial Sequence: Synthetic oligonucleotide
  Sense strand starting at position 3639 of SEQ ID NO: 1241412
gggugaguacugcaauuac

SEQ ID NO: 1270635 - RNA, 19 nt, Artificial Sequence
  Description of Artificial Sequence: Synthetic oligonucleotide
  Antisense strand to SEQ ID NO: 1270634
guaauugcaguacucaccc

SEQ ID NO: 1270636 - RNA, 19 nt, Artificial Sequence
  Description of Artificial Sequence: Synthetic oligonucleotide
  Sense strand starting at position 3813 of SEQ ID NO: 1241412
ccaucuuguuuggaugcau

SEQ ID NO: 1270637 - RNA, 19 nt, Artificial Sequence
  Description of Artificial Sequence: Synthetic oligonucleotide
  Antisense strand to SEQ ID NO: 1270636
augcauccaaacaagaugg

SEQ ID NO: 1270638 - RNA, 19 nt, Artificial Sequence
  Description of Artificial Sequence: Synthetic oligonucleotide
  Sense strand starting at position 3877 of SEQ ID NO: 1241412
aguacuucugccugcauau

SEQ ID NO: 1270639 - RNA, 19 nt, Artificial Sequence
  Description of Artificial Sequence: Synthetic oligonucleotide
  Antisense strand to SEQ ID NO: 1270638
auaugcaggcagaaguacu

SEQ ID NO: 1270640 - RNA, 19 nt, Artificial Sequence
  Description of Artificial Sequence: Synthetic oligonucleotide
  Sense strand starting at position 3886 of SEQ ID NO: 1241412
gccugcauaucacuacgua

SEQ ID NO: 1270641 - RNA, 19 nt, Artificial Sequence
  Description of Artificial Sequence: Synthetic oligonucleotide
  Antisense strand to SEQ ID NO: 1270640
uacguagugauaugcaggc

SEQ ID NO: 1270642 - RNA, 19 nt, Artificial Sequence
  Description of Artificial Sequence: Synthetic oligonucleotide
  Sense strand starting at position 3979 of SEQ ID NO: 1241412
aguguaucauuaggugagu

SEQ ID NO: 1270643 - RNA, 19 nt, Artificial Sequence
  Description of Artificial Sequence: Synthetic oligonucleotide
  Antisense strand to SEQ ID NO: 1270642
acucaccuaaugauacacu

SEQ ID NO: 1270644 - RNA, 19 nt, Artificial Sequence
  Description of Artificial Sequence: Synthetic oligonucleotide
  Sense strand starting at position 3980 of SEQ ID NO: 1241412
guguaucauuaggugaguu

SEQ ID NO: 1270645 - RNA, 19 nt, Artificial Sequence
  Description of Artificial Sequence: Synthetic oligonucleotide
  Antisense strand to SEQ ID NO: 1270644
aacucaccuaaugauacac

SEQ ID NO: 1270646 - RNA, 19 nt, Artificial Sequence
  Description of Artificial Sequence: Synthetic oligonucleotide
  Sense strand starting at position 3982 of SEQ ID NO: 1241412
guaucauuaggugaguucu

SEQ ID NO: 1270647 - RNA, 19 nt, Artificial Sequence
  Description of Artificial Sequence: Synthetic oligonucleotide
  Antisense strand to SEQ ID NO: 1270646
agaacucaccuaaugauac

SEQ ID NO: 1270648 - RNA, 19 nt, Artificial Sequence
  Description of Artificial Sequence: Synthetic oligonucleotide
  Sense strand starting at position 215 of SEQ ID NO: 1241413
ugagguugccagugagaca

SEQ ID NO: 1270649 - RNA, 19 nt, Artificial Sequence
  Description of Artificial Sequence: Synthetic oligonucleotide
  Antisense strand to SEQ ID NO: 1270648
ugucucacuggcaaccuca

SEQ ID NO: 1270650 - RNA, 19 nt, Artificial Sequence
  Description of Artificial Sequence: Synthetic oligonucleotide
  Sense strand starting at position 591 of SEQ ID NO: 1241413
agcucagagccucauugua

SEQ ID NO: 1270651 - RNA, 19 nt, Artificial Sequence
  Description of Artificial Sequence: Synthetic oligonucleotide
  Antisense strand to SEQ ID NO: 1270650
uacaaugaggcucugagcu

SEQ ID NO: 1270652 - RNA, 19 nt, Artificial Sequence
  Description of Artificial Sequence: Synthetic oligonucleotide
  Sense strand starting at position 624 of SEQ ID NO: 1241413
ccugguuccugggacuaca

SEQ ID NO: 1270653 - RNA, 19 nt, Artificial Sequence
  Description of Artificial Sequence: Synthetic oligonucleotide
  Antisense strand to SEQ ID NO: 1270652
uguagucccaggaaccagg

SEQ ID NO: 1270654 - RNA, 19 nt, Artificial Sequence
  Description of Artificial Sequence: Synthetic oligonucleotide
  Sense strand starting at position 653 of SEQ ID NO: 1241413
acaggucgcaccuaguuaa

SEQ ID NO: 1270655 - RNA, 19 nt, Artificial Sequence
  Description of Artificial Sequence: Synthetic oligonucleotide
  Antisense strand to SEQ ID NO: 1270654
uuaacuaggugcgaccugu

SEQ ID NO: 1270656 - RNA, 19 nt, Artificial Sequence
  Description of Artificial Sequence: Synthetic oligonucleotide
  Sense strand starting at position 665 of SEQ ID NO: 1241413
uaguuaaggcucugguaaa

SEQ ID NO: 1270657 - RNA, 19 nt, Artificial Sequence
  Description of Artificial Sequence: Synthetic oligonucleotide
  Antisense strand to SEQ ID NO: 1270656
uuuaccagagccuuaacua

SEQ ID NO: 1270658 - RNA, 19 nt, Artificial Sequence
  Description of Artificial Sequence: Synthetic oligonucleotide
  Sense strand starting at position 666 of SEQ ID NO: 1241413
aguuaaggcucugguaaac

SEQ ID NO: 1270659 - RNA, 19 nt, Artificial Sequence
  Description of Artificial Sequence: Synthetic oligonucleotide
  Antisense strand to SEQ ID NO: 1270658
guuuaccagagccuuaacu

SEQ ID NO: 1270660 - RNA, 19 nt, Artificial Sequence
  Description of Artificial Sequence: Synthetic oligonucleotide
  Sense strand starting at position 768 of SEQ ID NO: 1241413
gguaaacaaggcugucuau

SEQ ID NO: 1270661 - RNA, 19 nt, Artificial Sequence
  Description of Artificial Sequence: Synthetic oligonucleotide
  Antisense strand to SEQ ID NO: 1270660
auagacagccuuguuuacc

SEQ ID NO: 1270662 - RNA, 19 nt, Artificial Sequence
  Description of Artificial Sequence: Synthetic oligonucleotide
  Sense strand starting at position 775 of SEQ ID NO: 1241413
aaggcugucuaucgagagu

SEQ ID NO: 1270663 - RNA, 19 nt, Artificial Sequence
  Description of Artificial Sequence: Synthetic oligonucleotide
  Antisense strand to SEQ ID NO: 1270662
acucucgauagacagccuu

SEQ ID NO: 1270664 - RNA, 19 nt, Artificial Sequence
  Description of Artificial Sequence: Synthetic oligonucleotide
  Sense strand starting at position 892 of SEQ ID NO: 1241413
cucugaagcuucuuaagga

SEQ ID NO: 1270665 - RNA, 19 nt, Artificial Sequence
  Description of Artificial Sequence: Synthetic oligonucleotide
  Antisense strand to SEQ ID NO: 1270664
uccuuaagaagcuucagag

SEQ ID NO: 1270666 - RNA, 19 nt, Artificial Sequence
  Description of Artificial Sequence: Synthetic oligonucleotide
  Sense strand starting at position 896 of SEQ ID NO: 1241413
gaagcuucuuaaggacgaa

SEQ ID NO: 1270667 - RNA, 19 nt, Artificial Sequence
  Description of Artificial Sequence: Synthetic oligonucleotide
  Antisense strand to SEQ ID NO: 1270666
uucguccuuaagaagcuuc

SEQ ID NO: 1270668 - RNA, 19 nt, Artificial Sequence
  Description of Artificial Sequence: Synthetic oligonucleotide
  Sense strand starting at position 1527 of SEQ ID NO: 1241413
cgcgcauucugcgcaguua

SEQ ID NO: 1270669 - RNA, 19 nt, Artificial Sequence
  Description of Artificial Sequence: Synthetic oligonucleotide
  Antisense strand to SEQ ID NO: 1270668
uaacugcgcagaaugcgcg

SEQ ID NO: 1270670 - RNA, 19 nt, Artificial Sequence
  Description of Artificial Sequence: Synthetic oligonucleotide
  Sense strand starting at position 1530 of SEQ ID NO: 1241413
gcauucugcgcaguuacuu

SEQ ID NO: 1270671 - RNA, 19 nt, Artificial Sequence
  Description of Artificial Sequence: Synthetic oligonucleotide
  Antisense strand to SEQ ID NO: 1270670
aaguaacugcgcagaaugc

SEQ ID NO: 1270672 - RNA, 19 nt, Artificial Sequence
  Description of Artificial Sequence: Synthetic oligonucleotide
  Sense strand starting at position 1538 of SEQ ID NO: 1241413
cgcaguuacuucucggaaa

SEQ ID NO: 1270673 - RNA, 19 nt, Artificial Sequence
  Description of Artificial Sequence: Synthetic oligonucleotide
  Antisense strand to SEQ ID NO: 1270672
uuuccgagaaguaacugcg

SEQ ID NO: 1270674 - RNA, 19 nt, Artificial Sequence
  Description of Artificial Sequence: Synthetic oligonucleotide
  Sense strand starting at position 1539 of SEQ ID NO: 1241413
gcaguuacuucucggaaag

SEQ ID NO: 1270675 - RNA, 19 nt, Artificial Sequence
  Description of Artificial Sequence: Synthetic oligonucleotide
  Antisense strand to SEQ ID NO: 1270674
cuuuccgagaaguaacugc

SEQ ID NO: 1270676 - RNA, 19 nt, Artificial Sequence
  Description of Artificial Sequence: Synthetic oligonucleotide
  Sense strand starting at position 1540 of SEQ ID NO: 1241413
caguuacuucucggaaagg

SEQ ID NO: 1270677 - RNA, 19 nt, Artificial Sequence
  Description of Artificial Sequence: Synthetic oligonucleotide
  Antisense strand to SEQ ID NO: 1270676
ccuuuccgagaaguaacug

SEQ ID NO: 1270678 - RNA, 19 nt, Artificial Sequence
  Description of Artificial Sequence: Synthetic oligonucleotide
  Sense strand starting at position 1559 of SEQ ID NO: 1241413
ggaaccaugcguugaaagu

SEQ ID NO: 1270679 - RNA, 19 nt, Artificial Sequence
  Description of Artificial Sequence: Synthetic oligonucleotide
  Antisense strand to SEQ ID NO: 1270678
acuuucaacgcaugguucc

SEQ ID NO: 1270680 - RNA, 19 nt, Artificial Sequence
  Description of Artificial Sequence: Synthetic oligonucleotide
  Sense strand starting at position 1560 of SEQ ID NO: 1241413
gaaccaugcguugaaaguu

SEQ ID NO: 1270681 - RNA, 19 nt, Artificial Sequence
  Description of Artificial Sequence: Synthetic oligonucleotide
  Antisense strand to SEQ ID NO: 1270680
aacuuucaacgcaugguuc

SEQ ID NO: 1270682 - RNA, 19 nt, Artificial Sequence
  Description of Artificial Sequence: Synthetic oligonucleotide
  Sense strand starting at position 1572 of SEQ ID NO: 1241413
gaaaguuguuucccgcgaa

SEQ ID NO: 1270683 - RNA, 19 nt, Artificial Sequence
  Description of Artificial Sequence: Synthetic oligonucleotide
  Antisense strand to SEQ ID NO: 1270682
uucgcgggaaacaacuuuc

SEQ ID NO: 1270684 - RNA, 19 nt, Artificial Sequence
  Description of Artificial Sequence: Synthetic oligonucleotide
  Sense strand starting at position 1573 of SEQ ID NO: 1241413
aaaguuguuucccgcgaau

SEQ ID NO: 1270685 - RNA, 19 nt, Artificial Sequence
  Description of Artificial Sequence: Synthetic oligonucleotide
  Antisense strand to SEQ ID NO: 1270684
auucgcgggaaacaacuuu

SEQ ID NO: 1270686 - RNA, 19 nt, Artificial Sequence
  Description of Artificial Sequence: Synthetic oligonucleotide
  Sense strand starting at position 1575 of SEQ ID NO: 1241413
aguuguuucccgcgaauaa

SEQ ID NO: 1270687 - RNA, 19 nt, Artificial Sequence
  Description of Artificial Sequence: Synthetic oligonucleotide
  Antisense strand to SEQ ID NO: 1270686
uuauucgcgggaaacaacu

SEQ ID NO: 1270688 - RNA, 19 nt, Artificial Sequence
  Description of Artificial Sequence: Synthetic oligonucleotide
  Sense strand starting at position 1576 of SEQ ID NO: 1241413
guuguuucccgcgaauaaa

SEQ ID NO: 1270689 - RNA, 19 nt, Artificial Sequence
  Description of Artificial Sequence: Synthetic oligonucleotide
  Antisense strand to SEQ ID NO: 1270688
uuuauucgcgggaaacaac

SEQ ID NO: 1270690 - RNA, 19 nt, Artificial Sequence
  Description of Artificial Sequence: Synthetic oligonucleotide
  Sense strand starting at position 1579 of SEQ ID NO: 1241413
guuucccgcgaauaaagau

SEQ ID NO: 1270691 - RNA, 19 nt, Artificial Sequence
  Description of Artificial Sequence: Synthetic oligonucleotide
  Antisense strand to SEQ ID NO: 1270690
aucuuuauucgcgggaaac

SEQ ID NO: 1270692 - RNA, 19 nt, Artificial Sequence
  Description of Artificial Sequence: Synthetic oligonucleotide
  Sense strand starting at position 1591 of SEQ ID NO: 1241413
uaaagauguggccgaccaa

SEQ ID NO: 1270693 - RNA, 19 nt, Artificial Sequence
  Description of Artificial Sequence: Synthetic oligonucleotide
  Antisense strand to SEQ ID NO: 1270692
uuggucggccacaucuuua

SEQ ID NO: 1270694 - RNA, 19 nt, Artificial Sequence
  Description of Artificial Sequence: Synthetic oligonucleotide
  Sense strand starting at position 1592 of SEQ ID NO: 1241413
aaagauguggccgaccaaa

SEQ ID NO: 1270695 - RNA, 19 nt, Artificial Sequence
  Description of Artificial Sequence: Synthetic oligonucleotide
  Antisense strand to SEQ ID NO: 1270694
uuuggucggccacaucuuu

SEQ ID NO: 1270696 - RNA, 19 nt, Artificial Sequence
  Description of Artificial Sequence: Synthetic oligonucleotide
  Sense strand starting at position 2152 of SEQ ID NO: 1241413
cggugagaauccagggaga

SEQ ID NO: 1270697 - RNA, 19 nt, Artificial Sequence
  Description of Artificial Sequence: Synthetic oligonucleotide
  Antisense strand to SEQ ID NO: 1270696
ucucccuggauucucaccg

SEQ ID NO: 1270698 - RNA, 19 nt, Artificial Sequence
  Description of Artificial Sequence: Synthetic oligonucleotide
  Sense strand starting at position 2608 of SEQ ID NO: 1241413
ugcugucucugaggcuuua

SEQ ID NO: 1270699 - RNA, 19 nt, Artificial Sequence
  Description of Artificial Sequence: Synthetic oligonucleotide
  Antisense strand to SEQ ID NO: 1270698
uaaagccucagagacagca

SEQ ID NO: 1270700 - RNA, 19 nt, Artificial Sequence
  Description of Artificial Sequence: Synthetic oligonucleotide
  Sense strand starting at position 2649 of SEQ ID NO: 1241413
ucacuaaucuggccuauug

SEQ ID NO: 1270701 - RNA, 19 nt, Artificial Sequence
  Description of Artificial Sequence: Synthetic oligonucleotide
  Antisense strand to SEQ ID NO: 1270700
caauaggccagauuaguga

SEQ ID NO: 1270702 - RNA, 19 nt, Artificial Sequence
  Description of Artificial Sequence: Synthetic oligonucleotide
  Sense strand starting at position 2958 of SEQ ID NO: 1241413
uccgguuccauguggugaa

SEQ ID NO: 1270703 - RNA, 19 nt, Artificial Sequence
  Description of Artificial Sequence: Synthetic oligonucleotide
  Antisense strand to SEQ ID NO: 1270702
uucaccacauggaaccgga

SEQ ID NO: 1270704 - RNA, 19 nt, Artificial Sequence
  Description of Artificial Sequence: Synthetic oligonucleotide
  Sense strand starting at position 3139 of SEQ ID NO: 1241413
ugcauugaguguggaggau

SEQ ID NO: 1270705 - RNA, 19 nt, Artificial Sequence
  Description of Artificial Sequence: Synthetic oligonucleotide
  Antisense strand to SEQ ID NO: 1270704
auccuccacacucaaugca

SEQ ID NO: 1270706 - RNA, 19 nt, Artificial Sequence
  Description of Artificial Sequence: Synthetic oligonucleotide
  Sense strand starting at position 3224 of SEQ ID NO: 1241413
agaggaagcuccugggaaa

SEQ ID NO: 1270707 - RNA, 19 nt, Artificial Sequence
  Description of Artificial Sequence: Synthetic oligonucleotide
  Antisense strand to SEQ ID NO: 1270706
uuucccaggagcuuccucu

SEQ ID NO: 1270708 - RNA, 19 nt, Artificial Sequence
  Description of Artificial Sequence: Synthetic oligonucleotide
  Sense strand starting at position 3343 of SEQ ID NO: 1241413
gccaaugauccugacguga

SEQ ID NO: 1270709 - RNA, 19 nt, Artificial Sequence
  Description of Artificial Sequence: Synthetic oligonucleotide
  Antisense strand to SEQ ID NO: 1270708
ucacgucaggaucauuggc

SEQ ID NO: 1270710 - RNA, 19 nt, Artificial Sequence
  Description of Artificial Sequence: Synthetic oligonucleotide
  Sense strand starting at position 3638 of SEQ ID NO: 1241413
acccaaguuuaagagaaga

SEQ ID NO: 1270711 - RNA, 19 nt, Artificial Sequence
  Description of Artificial Sequence: Synthetic oligonucleotide
  Antisense strand to SEQ ID NO: 1270710
ucuucucuuaaacuugggu

SEQ ID NO: 1270712 - RNA, 19 nt, Artificial Sequence
  Description of Artificial Sequence: Synthetic oligonucleotide
  Sense strand starting at position 3759 of SEQ ID NO: 1241413
gggcaagguuuggcaagaa

SEQ ID NO: 1270713 - RNA, 19 nt, Artificial Sequence
  Description of Artificial Sequence: Synthetic oligonucleotide
  Antisense strand to SEQ ID NO: 1270712
uucuugccaaaccuugccc

SEQ ID NO: 1270714 - RNA, 19 nt, Artificial Sequence
  Description of Artificial Sequence: Synthetic oligonucleotide
  Sense strand starting at position 3836 of SEQ ID NO: 1241413
gcucaaugcugaucaggga

SEQ ID NO: 1270715 - RNA, 19 nt, Artificial Sequence
  Description of Artificial Sequence: Synthetic oligonucleotide
  Antisense strand to SEQ ID NO: 1270714
ucccugaucagcauugagc

SEQ ID NO: 1270716 - RNA, 19 nt, Artificial Sequence
  Description of Artificial Sequence: Synthetic oligonucleotide
  Sense strand starting at position 3924 of SEQ ID NO: 1241413
ggcuucuuccugugaggaa

SEQ ID NO: 1270717 - RNA, 19 nt, Artificial Sequence
  Description of Artificial Sequence: Synthetic oligonucleotide
  Antisense strand to SEQ ID NO: 1270716
uuccucacaggaagaagcc

SEQ ID NO: 1270718 - RNA, 19 nt, Artificial Sequence
  Description of Artificial Sequence: Synthetic oligonucleotide
  Sense strand starting at position 3925 of SEQ ID NO: 1241413
gcuucuuccugugaggaaa

SEQ ID NO: 1270719 - RNA, 19 nt, Artificial Sequence
  Description of Artificial Sequence: Synthetic oligonucleotide
  Antisense strand to SEQ ID NO: 1270718
uuuccucacaggaagaagc

SEQ ID NO: 1270720 - RNA, 19 nt, Artificial Sequence
  Description of Artificial Sequence: Synthetic oligonucleotide
  Sense strand starting at position 557 of SEQ ID NO: 1241414
ccaggaugucuggaguauc

SEQ ID NO: 1270721 - RNA, 19 nt, Artificial Sequence
  Description of Artificial Sequence: Synthetic oligonucleotide
  Antisense strand to SEQ ID NO: 1270720
gauacuccagacauccugg

SEQ ID NO: 1270722 - RNA, 19 nt, Artificial Sequence
  Description of Artificial Sequence: Synthetic oligonucleotide
  Sense strand starting at position 568 of SEQ ID NO: 1241414
ggaguauccacaugauguu

SEQ ID NO: 1270723 - RNA, 19 nt, Artificial Sequence
  Description of Artificial Sequence: Synthetic oligonucleotide
  Antisense strand to SEQ ID NO: 1270722
aacaucauguggauacucc

SEQ ID NO: 1270724 - RNA, 19 nt, Artificial Sequence
  Description of Artificial Sequence: Synthetic oligonucleotide
  Sense strand starting at position 569 of SEQ ID NO: 1241414
gaguauccacaugauguua

SEQ ID NO: 1270725 - RNA, 19 nt, Artificial Sequence
  Description of Artificial Sequence: Synthetic oligonucleotide
  Antisense strand to SEQ ID NO: 1270724
uaacaucauguggauacuc

SEQ ID NO: 1270726 - RNA, 19 nt, Artificial Sequence
  Description of Artificial Sequence: Synthetic oligonucleotide
  Sense strand starting at position 571 of SEQ ID NO: 1241414
guauccacaugauguuauu

SEQ ID NO: 1270727 - RNA, 19 nt, Artificial Sequence
  Description of Artificial Sequence: Synthetic oligonucleotide
  Antisense strand to SEQ ID NO: 1270726
aauaacaucauguggauac

SEQ ID NO: 1270728 - RNA, 19 nt, Artificial Sequence
  Description of Artificial Sequence: Synthetic oligonucleotide
  Sense strand starting at position 577 of SEQ ID NO: 1241414
acaugauguuauucccauu

SEQ ID NO: 1270729 - RNA, 19 nt, Artificial Sequence
  Description of Artificial Sequence: Synthetic oligonucleotide
  Antisense strand to SEQ ID NO: 1270728
aaugggaauaacaucaugu

SEQ ID NO: 1270730 - RNA, 19 nt, Artificial Sequence
  Description of Artificial Sequence: Synthetic oligonucleotide
  Sense strand starting at position 864 of SEQ ID NO: 1241414
ugagguugccagugagaca

SEQ ID NO: 1270731 - RNA, 19 nt, Artificial Sequence
  Description of Artificial Sequence: Synthetic oligonucleotide
  Antisense strand to SEQ ID NO: 1270730
ugucucacuggcaaccuca

SEQ ID NO: 1270732 - RNA, 19 nt, Artificial Sequence
  Description of Artificial Sequence: Synthetic oligonucleotide
  Sense strand starting at position 1240 of SEQ ID NO: 1241414
agcucagagccucauugua

SEQ ID NO: 1270733 - RNA, 19 nt, Artificial Sequence
  Description of Artificial Sequence: Synthetic oligonucleotide
  Antisense strand to SEQ ID NO: 1270732
uacaaugaggcucugagcu

SEQ ID NO: 1270734 - RNA, 19 nt, Artificial Sequence
  Description of Artificial Sequence: Synthetic oligonucleotide
  Sense strand starting at position 1273 of SEQ ID NO: 1241414
ccugguuccugggacuaca

SEQ ID NO: 1270735 - RNA, 19 nt, Artificial Sequence
  Description of Artificial Sequence: Synthetic oligonucleotide
  Antisense strand to SEQ ID NO: 1270734
uguagucccaggaaccagg

SEQ ID NO: 1270736 - RNA, 19 nt, Artificial Sequence
  Description of Artificial Sequence: Synthetic oligonucleotide
  Sense strand starting at position 1302 of SEQ ID NO: 1241414
acaggucgcaccuaguuaa

SEQ ID NO: 1270737 - RNA, 19 nt, Artificial Sequence
  Description of Artificial Sequence: Synthetic oligonucleotide
  Antisense strand to SEQ ID NO: 1270736
uuaacuaggugcgaccugu

SEQ ID NO: 1270738 - RNA, 19 nt, Artificial Sequence
  Description of Artificial Sequence: Synthetic oligonucleotide
  Sense strand starting at position 1314 of SEQ ID NO: 1241414
uaguuaaggcucugguaaa

SEQ ID NO: 1270739 - RNA, 19 nt, Artificial Sequence
  Description of Artificial Sequence: Synthetic oligonucleotide
  Antisense strand to SEQ ID NO: 1270738
uuuaccagagccuuaacua

SEQ ID NO: 1270740 - RNA, 19 nt, Artificial Sequence
  Description of Artificial Sequence: Synthetic oligonucleotide
  Sense strand starting at position 1315 of SEQ ID NO: 1241414
aguuaaggcucugguaaac

SEQ ID NO: 1270741 - RNA, 19 nt, Artificial Sequence
  Description of Artificial Sequence: Synthetic oligonucleotide
  Antisense strand to SEQ ID NO: 1270740
guuuaccagagccuuaacu

SEQ ID NO: 1270742 - RNA, 19 nt, Artificial Sequence
  Description of Artificial Sequence: Synthetic oligonucleotide
  Sense strand starting at position 1417 of SEQ ID NO: 1241414
gguaaacaaggcugucuau

SEQ ID NO: 1270743 - RNA, 19 nt, Artificial Sequence
  Description of Artificial Sequence: Synthetic oligonucleotide
  Antisense strand to SEQ ID NO: 1270742
auagacagccuuguuuacc

SEQ ID NO: 1270744 - RNA, 19 nt, Artificial Sequence
  Description of Artificial Sequence: Synthetic oligonucleotide
  Sense strand starting at position 1424 of SEQ ID NO: 1241414
aaggcugucuaucgagagu

SEQ ID NO: 1270745 - RNA, 19 nt, Artificial Sequence
  Description of Artificial Sequence: Synthetic oligonucleotide
  Antisense strand to SEQ ID NO: 1270744
acucucgauagacagccuu

SEQ ID NO: 1270746 - RNA, 19 nt, Artificial Sequence
  Description of Artificial Sequence: Synthetic oligonucleotide
  Sense strand starting at position 1541 of SEQ ID NO: 1241414
cucugaagcuucuuaagga

SEQ ID NO: 1270747 - RNA, 19 nt, Artificial Sequence
  Description of Artificial Sequence: Synthetic oligonucleotide
  Antisense strand to SEQ ID NO: 1270746
uccuuaagaagcuucagag

SEQ ID NO: 1270748 - RNA, 19 nt, Artificial Sequence
  Description of Artificial Sequence: Synthetic oligonucleotide
  Sense strand starting at position 1545 of SEQ ID NO: 1241414
gaagcuucuuaaggacgaa

SEQ ID NO: 1270749 - RNA, 19 nt, Artificial Sequence
  Description of Artificial Sequence: Synthetic oligonucleotide
  Antisense strand to SEQ ID NO: 1270748
uucguccuuaagaagcuuc

SEQ ID NO: 1270750 - RNA, 19 nt, Artificial Sequence
  Description of Artificial Sequence: Synthetic oligonucleotide
  Sense strand starting at position 2176 of SEQ ID NO: 1241414
cgcgcauucugcgcaguua

SEQ ID NO: 1270751 - RNA, 19 nt, Artificial Sequence
  Description of Artificial Sequence: Synthetic oligonucleotide
  Antisense strand to SEQ ID NO: 1270750
uaacugcgcagaaugcgcg

SEQ ID NO: 1270752 - RNA, 19 nt, Artificial Sequence
  Description of Artificial Sequence: Synthetic oligonucleotide
  Sense strand starting at position 2179 of SEQ ID NO: 1241414
gcauucugcgcaguuacuu

SEQ ID NO: 1270753 - RNA, 19 nt, Artificial Sequence
  Description of Artificial Sequence: Synthetic oligonucleotide
  Antisense strand to SEQ ID NO: 1270752
aaguaacugcgcagaaugc

SEQ ID NO: 1270754 - RNA, 19 nt, Artificial Sequence
  Description of Artificial Sequence: Synthetic oligonucleotide
  Sense strand starting at position 2187 of SEQ ID NO: 1241414
cgcaguuacuucucggaaa

SEQ ID NO: 1270755 - RNA, 19 nt, Artificial Sequence
  Description of Artificial Sequence: Synthetic oligonucleotide
  Antisense strand to SEQ ID NO: 1270754
uuuccgagaaguaacugcg

SEQ ID NO: 1270756 - RNA, 19 nt, Artificial Sequence
  Description of Artificial Sequence: Synthetic oligonucleotide
  Sense strand starting at position 2188 of SEQ ID NO: 1241414
gcaguuacuucucggaaag

SEQ ID NO: 1270757 - RNA, 19 nt, Artificial Sequence
  Description of Artificial Sequence: Synthetic oligonucleotide
  Antisense strand to SEQ ID NO: 1270756
cuuuccgagaaguaacugc

SEQ ID NO: 1270758 - RNA, 19 nt, Artificial Sequence
  Description of Artificial Sequence: Synthetic oligonucleotide
  Sense strand starting at position 2189 of SEQ ID NO: 1241414
caguuacuucucggaaagg

SEQ ID NO: 1270759 - RNA, 19 nt, Artificial Sequence
  Description of Artificial Sequence: Synthetic oligonucleotide
  Antisense strand to SEQ ID NO: 1270758
ccuuuccgagaaguaacug

SEQ ID NO: 1270760 - RNA, 19 nt, Artificial Sequence
  Description of Artificial Sequence: Synthetic oligonucleotide
  Sense strand starting at position 2208 of SEQ ID NO: 1241414
ggaaccaugcguugaaagu

SEQ ID NO: 1270761 - RNA, 19 nt, Artificial Sequence
  Description of Artificial Sequence: Synthetic oligonucleotide
  Antisense strand to SEQ ID NO: 1270760
acuuucaacgcaugguucc

SEQ ID NO: 1270762 - RNA, 19 nt, Artificial Sequence
  Description of Artificial Sequence: Synthetic oligonucleotide
  Sense strand starting at position 2209 of SEQ ID NO: 1241414
gaaccaugcguugaaaguu

SEQ ID NO: 1270763 - RNA, 19 nt, Artificial Sequence
  Description of Artificial Sequence: Synthetic oligonucleotide
  Antisense strand to SEQ ID NO: 1270762
aacuuucaacgcaugguuc

SEQ ID NO: 1270764 - RNA, 19 nt, Artificial Sequence
  Description of Artificial Sequence: Synthetic oligonucleotide
  Sense strand starting at position 2221 of SEQ ID NO: 1241414
gaaaguuguuucccgcgaa

SEQ ID NO: 1270765 - RNA, 19 nt, Artificial Sequence
  Description of Artificial Sequence: Synthetic oligonucleotide
  Antisense strand to SEQ ID NO: 1270764
uucgcgggaaacaacuuuc

SEQ ID NO: 1270766 - RNA, 19 nt, Artificial Sequence
  Description of Artificial Sequence: Synthetic oligonucleotide
  Sense strand starting at position 2222 of SEQ ID NO: 1241414
aaaguuguuucccgcgaau

SEQ ID NO: 1270767 - RNA, 19 nt, Artificial Sequence
  Description of Artificial Sequence: Synthetic oligonucleotide
  Antisense strand to SEQ ID NO: 1270766
auucgcgggaaacaacuuu

SEQ ID NO: 1270768 - RNA, 19 nt, Artificial Sequence
  Description of Artificial Sequence: Synthetic oligonucleotide
  Sense strand starting at position 2224 of SEQ ID NO: 1241414
aguuguuucccgcgaauaa

SEQ ID NO: 1270769 - RNA, 19 nt, Artificial Sequence
  Description of Artificial Sequence: Synthetic oligonucleotide
  Antisense strand to SEQ ID NO: 1270768
uuauucgcgggaaacaacu

SEQ ID NO: 1270770 - RNA, 19 nt, Artificial Sequence
  Description of Artificial Sequence: Synthetic oligonucleotide
  Sense strand starting at position 2225 of SEQ ID NO: 1241414
guuguuucccgcgaauaaa

SEQ ID NO: 1270771 - RNA, 19 nt, Artificial Sequence
  Description of Artificial Sequence: Synthetic oligonucleotide
  Antisense strand to SEQ ID NO: 1270770
uuuauucgcgggaaacaac

SEQ ID NO: 1270772 - RNA, 19 nt, Artificial Sequence
  Description of Artificial Sequence: Synthetic oligonucleotide
  Sense strand starting at position 2228 of SEQ ID NO: 1241414
guuucccgcgaauaaagau

SEQ ID NO: 1270773 - RNA, 19 nt, Artificial Sequence
  Description of Artificial Sequence: Synthetic oligonucleotide
  Antisense strand to SEQ ID NO: 1270772
aucuuuauucgcgggaaac

SEQ ID NO: 1270774 - RNA, 19 nt, Artificial Sequence
  Description of Artificial Sequence: Synthetic oligonucleotide
  Sense strand starting at position 2240 of SEQ ID NO: 1241414
uaaagauguggccgaccaa

SEQ ID NO: 1270775 - RNA, 19 nt, Artificial Sequence
  Description of Artificial Sequence: Synthetic oligonucleotide
  Antisense strand to SEQ ID NO: 1270774
uuggucggccacaucuuua

SEQ ID NO: 1270776 - RNA, 19 nt, Artificial Sequence
  Description of Artificial Sequence: Synthetic oligonucleotide
  Sense strand starting at position 2241 of SEQ ID NO: 1241414
aaagauguggccgaccaaa

SEQ ID NO: 1270777 - RNA, 19 nt, Artificial Sequence
  Description of Artificial Sequence: Synthetic oligonucleotide
  Antisense strand to SEQ ID NO: 1270776
uuuggucggccacaucuuu

SEQ ID NO: 1270778 - RNA, 19 nt, Artificial Sequence
  Description of Artificial Sequence: Synthetic oligonucleotide
  Sense strand starting at position 2801 of SEQ ID NO: 1241414
cggugagaauccagggaga

SEQ ID NO: 1270779 - RNA, 19 nt, Artificial Sequence
  Description of Artificial Sequence: Synthetic oligonucleotide
  Antisense strand to SEQ ID NO: 1270778
ucucccuggauucucaccg

SEQ ID NO: 1270780 - RNA, 19 nt, Artificial Sequence
  Description of Artificial Sequence: Synthetic oligonucleotide
  Sense strand starting at position 3257 of SEQ ID NO: 1241414
ugcugucucugaggcuuua

SEQ ID NO: 1270781 - RNA, 19 nt, Artificial Sequence
  Description of Artificial Sequence: Synthetic oligonucleotide
  Antisense strand to SEQ ID NO: 1270780
uaaagccucagagacagca

SEQ ID NO: 1270782 - RNA, 19 nt, Artificial Sequence
  Description of Artificial Sequence: Synthetic oligonucleotide
  Sense strand starting at position 3298 of SEQ ID NO: 1241414
ucacuaaucuggccuauug

SEQ ID NO: 1270783 - RNA, 19 nt, Artificial Sequence
  Description of Artificial Sequence: Synthetic oligonucleotide
  Antisense strand to SEQ ID NO: 1270782
caauaggccagauuaguga

SEQ ID NO: 1270784 - RNA, 19 nt, Artificial Sequence
  Description of Artificial Sequence: Synthetic oligonucleotide
  Sense strand starting at position 3607 of SEQ ID NO: 1241414
uccgguuccauguggugaa

SEQ ID NO: 1270785 - RNA, 19 nt, Artificial Sequence
  Description of Artificial Sequence: Synthetic oligonucleotide
  Antisense strand to SEQ ID NO: 1270784
uucaccacauggaaccgga

SEQ ID NO: 1270786 - RNA, 19 nt, Artificial Sequence
  Description of Artificial Sequence: Synthetic oligonucleotide
  Sense strand starting at position 3788 of SEQ ID NO: 1241414
ugcauugaguguggaggau

SEQ ID NO: 1270787 - RNA, 19 nt, Artificial Sequence
  Description of Artificial Sequence: Synthetic oligonucleotide
  Antisense strand to SEQ ID NO: 1270786
auccuccacacucaaugca

SEQ ID NO: 1270788 - RNA, 19 nt, Artificial Sequence
  Description of Artificial Sequence: Synthetic oligonucleotide
  Sense strand starting at position 3873 of SEQ ID NO: 1241414
agaggaagcuccugggaaa

SEQ ID NO: 1270789 - RNA, 19 nt, Artificial Sequence
  Description of Artificial Sequence: Synthetic oligonucleotide
  Antisense strand to SEQ ID NO: 1270788
uuucccaggagcuuccucu

SEQ ID NO: 1270790 - RNA, 19 nt, Artificial Sequence
  Description of Artificial Sequence: Synthetic oligonucleotide
  Sense strand starting at position 2071 of SEQ ID NO: 1241415
ggcuuaucguggccuuuaa

SEQ ID NO: 1270791 - RNA, 19 nt, Artificial Sequence
  Description of Artificial Sequence: Synthetic oligonucleotide
  Antisense strand to SEQ ID NO: 1270790
uuaaaggccacgauaagcc

SEQ ID NO: 1270792 - RNA, 19 nt, Artificial Sequence
  Description of Artificial Sequence: Synthetic oligonucleotide
  Sense strand starting at position 2176 of SEQ ID NO: 1241415
cgguauucuccgcggcagu

SEQ ID NO: 1270793 - RNA, 19 nt, Artificial Sequence
  Description of Artificial Sequence: Synthetic oligonucleotide
  Antisense strand to SEQ ID NO: 1270792
acugccgcggagaauaccg

SEQ ID NO: 1270794 - RNA, 19 nt, Artificial Sequence
  Description of Artificial Sequence: Synthetic oligonucleotide
  Sense strand starting at position 2178 of SEQ ID NO: 1241415
guauucuccgcggcaguga

SEQ ID NO: 1270795 - RNA, 19 nt, Artificial Sequence
  Description of Artificial Sequence: Synthetic oligonucleotide
  Antisense strand to SEQ ID NO: 1270794
ucacugccgcggagaauac

SEQ ID NO: 1270796 - RNA, 19 nt, Artificial Sequence
  Description of Artificial Sequence: Synthetic oligonucleotide
  Sense strand starting at position 2186 of SEQ ID NO: 1241415
cgcggcagugacaguaauu

SEQ ID NO: 1270797 - RNA, 19 nt, Artificial Sequence
  Description of Artificial Sequence: Synthetic oligonucleotide
  Antisense strand to SEQ ID NO: 1270796
aauuacugucacugccgcg

SEQ ID NO: 1270798 - RNA, 19 nt, Artificial Sequence
  Description of Artificial Sequence: Synthetic oligonucleotide
  Sense strand starting at position 2410 of SEQ ID NO: 1241415
cuguccaaacagugaguuu

SEQ ID NO: 1270799 - RNA, 19 nt, Artificial Sequence
  Description of Artificial Sequence: Synthetic oligonucleotide
  Antisense strand to SEQ ID NO: 1270798
aaacucacuguuuggacag

SEQ ID NO: 1270800 - RNA, 19 nt, Artificial Sequence
  Description of Artificial Sequence: Synthetic oligonucleotide
  Sense strand starting at position 2458 of SEQ ID NO: 1241415
gcccuaaacuccuagaggu

SEQ ID NO: 1270801 - RNA, 19 nt, Artificial Sequence
  Description of Artificial Sequence: Synthetic oligonucleotide
  Antisense strand to SEQ ID NO: 1270800
accucuaggaguuuagggc

SEQ ID NO: 1270802 - RNA, 19 nt, Artificial Sequence
  Description of Artificial Sequence: Synthetic oligonucleotide
  Sense strand starting at position 2526 of SEQ ID NO: 1241415
ugugaaaccucccgacaaa

SEQ ID NO: 1270803 - RNA, 19 nt, Artificial Sequence
  Description of Artificial Sequence: Synthetic oligonucleotide
  Antisense strand to SEQ ID NO: 1270802
uuugucgggagguuucaca

SEQ ID NO: 1270804 - RNA, 19 nt, Artificial Sequence
  Description of Artificial Sequence: Synthetic oligonucleotide
  Sense strand starting at position 2550 of SEQ ID NO: 1241415
cggaguggaaugugguuua

SEQ ID NO: 1270805 - RNA, 19 nt, Artificial Sequence
  Description of Artificial Sequence: Synthetic oligonucleotide
  Antisense strand to SEQ ID NO: 1270804
uaaaccacauuccacuccg

SEQ ID NO: 1270806 - RNA, 19 nt, Artificial Sequence
  Description of Artificial Sequence: Synthetic oligonucleotide
  Sense strand starting at position 2567 of SEQ ID NO: 1241415
uaaggaucccgauagguuu

SEQ ID NO: 1270807 - RNA, 19 nt, Artificial Sequence
  Description of Artificial Sequence: Synthetic oligonucleotide
  Antisense strand to SEQ ID NO: 1270806
aaaccuaucgggauccuua

SEQ ID NO: 1270808 - RNA, 19 nt, Artificial Sequence
  Description of Artificial Sequence: Synthetic oligonucleotide
  Sense strand starting at position 2573 of SEQ ID NO: 1241415
ucccgauagguuugaccca

SEQ ID NO: 1270809 - RNA, 19 nt, Artificial Sequence
  Description of Artificial Sequence: Synthetic oligonucleotide
  Antisense strand to SEQ ID NO: 1270808
ugggucaaaccuaucggga

SEQ ID NO: 1270810 - RNA, 19 nt, Artificial Sequence
  Description of Artificial Sequence: Synthetic oligonucleotide
  Sense strand starting at position 2574 of SEQ ID NO: 1241415
cccgauagguuugacccaa

SEQ ID NO: 1270811 - RNA, 19 nt, Artificial Sequence
  Description of Artificial Sequence: Synthetic oligonucleotide
  Antisense strand to SEQ ID NO: 1270810
uugggucaaaccuaucggg

SEQ ID NO: 1270812 - RNA, 19 nt, Artificial Sequence
  Description of Artificial Sequence: Synthetic oligonucleotide
  Sense strand starting at position 2640 of SEQ ID NO: 1241415
acugacuuccauggucuua

SEQ ID NO: 1270813 - RNA, 19 nt, Artificial Sequence
  Description of Artificial Sequence: Synthetic oligonucleotide
  Antisense strand to SEQ ID NO: 1270812
uaagaccauggaagucagu

SEQ ID NO: 1270814 - RNA, 19 nt, Artificial Sequence
  Description of Artificial Sequence: Synthetic oligonucleotide
  Sense strand starting at position 2642 of SEQ ID NO: 1241415
ugacuuccauggucuuaau

SEQ ID NO: 1270815 - RNA, 19 nt, Artificial Sequence
  Description of Artificial Sequence: Synthetic oligonucleotide
  Antisense strand to SEQ ID NO: 1270814
auuaagaccauggaaguca

SEQ ID NO: 1270816 - RNA, 19 nt, Artificial Sequence
  Description of Artificial Sequence: Synthetic oligonucleotide
  Sense strand starting at position 2659 of SEQ ID NO: 1241415
aucuaaacuugugaagaau

SEQ ID NO: 1270817 - RNA, 19 nt, Artificial Sequence
  Description of Artificial Sequence: Synthetic oligonucleotide
  Antisense strand to SEQ ID NO: 1270816
auucuucacaaguuuagau

SEQ ID NO: 1270818 - RNA, 19 nt, Artificial Sequence
  Description of Artificial Sequence: Synthetic oligonucleotide
  Sense strand starting at position 2759 of SEQ ID NO: 1241415
uugcuucccucguaaucca

SEQ ID NO: 1270819 - RNA, 19 nt, Artificial Sequence
  Description of Artificial Sequence: Synthetic oligonucleotide
  Antisense strand to SEQ ID NO: 1270818
uggauuacgagggaagcaa

SEQ ID NO: 1270820 - RNA, 19 nt, Artificial Sequence
  Description of Artificial Sequence: Synthetic oligonucleotide
  Sense strand starting at position 2871 of SEQ ID NO: 1241415
cgcacuaagggcuguugaa

SEQ ID NO: 1270821 - RNA, 19 nt, Artificial Sequence
  Description of Artificial Sequence: Synthetic oligonucleotide
  Antisense strand to SEQ ID NO: 1270820
uucaacagcccuuagugcg

SEQ ID NO: 1270822 - RNA, 19 nt, Artificial Sequence
  Description of Artificial Sequence: Synthetic oligonucleotide
  Sense strand starting at position 2884 of SEQ ID NO: 1241415
guugaaaguggcuggagaa

SEQ ID NO: 1270823 - RNA, 19 nt, Artificial Sequence
  Description of Artificial Sequence: Synthetic oligonucleotide
  Antisense strand to SEQ ID NO: 1270822
uucuccagccacuuucaac

SEQ ID NO: 1270824 - RNA, 19 nt, Artificial Sequence
  Description of Artificial Sequence: Synthetic oligonucleotide
  Sense strand starting at position 2885 of SEQ ID NO: 1241415
uugaaaguggcuggagaaa

SEQ ID NO: 1270825 - RNA, 19 nt, Artificial Sequence
  Description of Artificial Sequence: Synthetic oligonucleotide
  Antisense strand to SEQ ID NO: 1270824
uuucuccagccacuuucaa

SEQ ID NO: 1270826 - RNA, 19 nt, Artificial Sequence
  Description of Artificial Sequence: Synthetic oligonucleotide
  Sense strand starting at position 2904 of SEQ ID NO: 1241415
aacagaaccuuggugaguu

SEQ ID NO: 1270827 - RNA, 19 nt, Artificial Sequence
  Description of Artificial Sequence: Synthetic oligonucleotide
  Antisense strand to SEQ ID NO: 1270826
aacucaccaagguucuguu

SEQ ID NO: 1270828 - RNA, 19 nt, Artificial Sequence
  Description of Artificial Sequence: Synthetic oligonucleotide
  Sense strand starting at position 2912 of SEQ ID NO: 1241415
cuuggugaguugucucacu

SEQ ID NO: 1270829 - RNA, 19 nt, Artificial Sequence
  Description of Artificial Sequence: Synthetic oligonucleotide
  Antisense strand to SEQ ID NO: 1270828
agugagacaacucaccaag

SEQ ID NO: 1270830 - RNA, 19 nt, Artificial Sequence
  Description of Artificial Sequence: Synthetic oligonucleotide
  Sense strand starting at position 3275 of SEQ ID NO: 1241415
ggucaugucuaccguguuu

SEQ ID NO: 1270831 - RNA, 19 nt, Artificial Sequence
  Description of Artificial Sequence: Synthetic oligonucleotide
  Antisense strand to SEQ ID NO: 1270830
aaacacgguagacaugacc

SEQ ID NO: 1270832 - RNA, 19 nt, Artificial Sequence
  Description of Artificial Sequence: Synthetic oligonucleotide
  Sense strand starting at position 3422 of SEQ ID NO: 1241415
agugaaguauugcugcaac

SEQ ID NO: 1270833 - RNA, 19 nt, Artificial Sequence
  Description of Artificial Sequence: Synthetic oligonucleotide
  Antisense strand to SEQ ID NO: 1270832
guugcagcaauacuucacu

SEQ ID NO: 1270834 - RNA, 19 nt, Artificial Sequence
  Description of Artificial Sequence: Synthetic oligonucleotide
  Sense strand starting at position 3425 of SEQ ID NO: 1241415
gaaguauugcugcaaccuc

SEQ ID NO: 1270835 - RNA, 19 nt, Artificial Sequence
  Description of Artificial Sequence: Synthetic oligonucleotide
  Antisense strand to SEQ ID NO: 1270834
gagguugcagcaauacuuc

SEQ ID NO: 1270836 - RNA, 19 nt, Artificial Sequence
  Description of Artificial Sequence: Synthetic oligonucleotide
  Sense strand starting at position 3619 of SEQ ID NO: 1241415
aaguguugcuauuacagac

SEQ ID NO: 1270837 - RNA, 19 nt, Artificial Sequence
  Description of Artificial Sequence: Synthetic oligonucleotide
  Antisense strand to SEQ ID NO: 1270836
gucuguaauagcaacacuu

SEQ ID NO: 1270838 - RNA, 19 nt, Artificial Sequence
  Description of Artificial Sequence: Synthetic oligonucleotide
  Sense strand starting at position 3623 of SEQ ID NO: 1241415
guugcuauuacagacguga

SEQ ID NO: 1270839 - RNA, 19 nt, Artificial Sequence
  Description of Artificial Sequence: Synthetic oligonucleotide
  Antisense strand to SEQ ID NO: 1270838
ucacgucuguaauagcaac

SEQ ID NO: 1270840 - RNA, 19 nt, Artificial Sequence
  Description of Artificial Sequence: Synthetic oligonucleotide
  Sense strand starting at position 3719 of SEQ ID NO: 1241415
acuuuaagcugaugaacuu

SEQ ID NO: 1270841 - RNA, 19 nt, Artificial Sequence
  Description of Artificial Sequence: Synthetic oligonucleotide
  Antisense strand to SEQ ID NO: 1270840
aaguucaucagcuuaaagu

SEQ ID NO: 1270842 - RNA, 19 nt, Artificial Sequence
  Description of Artificial Sequence: Synthetic oligonucleotide
  Sense strand starting at position 3750 of SEQ ID NO: 1241415
auaucucauuaagaaagga

SEQ ID NO: 1270843 - RNA, 19 nt, Artificial Sequence
  Description of Artificial Sequence: Synthetic oligonucleotide
  Antisense strand to SEQ ID NO: 1270842
uccuuucuuaaugagauau

SEQ ID NO: 1270844 - RNA, 19 nt, Artificial Sequence
  Description of Artificial Sequence: Synthetic oligonucleotide
  Sense strand starting at position 3788 of SEQ ID NO: 1241415
ggucgcucaguccuguaau

SEQ ID NO: 1270845 - RNA, 19 nt, Artificial Sequence
  Description of Artificial Sequence: Synthetic oligonucleotide
  Antisense strand to SEQ ID NO: 1270844
auuacaggacugagcgacc

SEQ ID NO: 1270846 - RNA, 19 nt, Artificial Sequence
  Description of Artificial Sequence: Synthetic oligonucleotide
  Sense strand starting at position 3789 of SEQ ID NO: 1241415
gucgcucaguccuguaauc

SEQ ID NO: 1270847 - RNA, 19 nt, Artificial Sequence
  Description of Artificial Sequence: Synthetic oligonucleotide
  Antisense strand to SEQ ID NO: 1270846
gauuacaggacugagcgac

SEQ ID NO: 1270848 - RNA, 19 nt, Artificial Sequence
  Description of Artificial Sequence: Synthetic oligonucleotide
  Sense strand starting at position 32 of SEQ ID NO: 1241416
aaaguauaaucagaagagu

SEQ ID NO: 1270849 - RNA, 19 nt, Artificial Sequence
  Description of Artificial Sequence: Synthetic oligonucleotide
  Antisense strand to SEQ ID NO: 1270848
acucuucugauuauacuuu

SEQ ID NO: 1270850 - RNA, 19 nt, Artificial Sequence
  Description of Artificial Sequence: Synthetic oligonucleotide
  Sense strand starting at position 38 of SEQ ID NO: 1241416
uaaucagaagagugauucu

SEQ ID NO: 1270851 - RNA, 19 nt, Artificial Sequence
  Description of Artificial Sequence: Synthetic oligonucleotide
  Antisense strand to SEQ ID NO: 1270850
agaaucacucuucugauua

SEQ ID NO: 1270852 - RNA, 19 nt, Artificial Sequence
  Description of Artificial Sequence: Synthetic oligonucleotide
  Sense strand starting at position 45 of SEQ ID NO: 1241416
aagagugauucucagcaac

SEQ ID NO: 1270853 - RNA, 19 nt, Artificial Sequence
  Description of Artificial Sequence: Synthetic oligonucleotide
  Antisense strand to SEQ ID NO: 1270852
guugcugagaaucacucuu

SEQ ID NO: 1270854 - RNA, 19 nt, Artificial Sequence
  Description of Artificial Sequence: Synthetic oligonucleotide
  Sense strand starting at position 47 of SEQ ID NO: 1241416
gagugauucucagcaacua

SEQ ID NO: 1270855 - RNA, 19 nt, Artificial Sequence
  Description of Artificial Sequence: Synthetic oligonucleotide
  Antisense strand to SEQ ID NO: 1270854
uaguugcugagaaucacuc

SEQ ID NO: 1270856 - RNA, 19 nt, Artificial Sequence
  Description of Artificial Sequence: Synthetic oligonucleotide
  Sense strand starting at position 48 of SEQ ID NO: 1241416
agugauucucagcaacuaa

SEQ ID NO: 1270857 - RNA, 19 nt, Artificial Sequence
  Description of Artificial Sequence: Synthetic oligonucleotide
  Antisense strand to SEQ ID NO: 1270856
uuaguugcugagaaucacu

SEQ ID NO: 1270858 - RNA, 19 nt, Artificial Sequence
  Description of Artificial Sequence: Synthetic oligonucleotide
  Sense strand starting at position 80 of SEQ ID NO: 1241416
uggcuacuuugagguuuaa

SEQ ID NO: 1270859 - RNA, 19 nt, Artificial Sequence
  Description of Artificial Sequence: Synthetic oligonucleotide
  Antisense strand to SEQ ID NO: 1270858
uuaaaccucaaaguagcca

SEQ ID NO: 1270860 - RNA, 19 nt, Artificial Sequence
  Description of Artificial Sequence: Synthetic oligonucleotide
  Sense strand starting at position 84 of SEQ ID NO: 1241416
uacuuugagguuuaaaguu

SEQ ID NO: 1270861 - RNA, 19 nt, Artificial Sequence
  Description of Artificial Sequence: Synthetic oligonucleotide
  Antisense strand to SEQ ID NO: 1270860
aacuuuaaaccucaaagua

SEQ ID NO: 1270862 - RNA, 19 nt, Artificial Sequence
  Description of Artificial Sequence: Synthetic oligonucleotide
  Sense strand starting at position 2302 of SEQ ID NO: 1241416
ggcuuaucguggccuuuaa

SEQ ID NO: 1270863 - RNA, 19 nt, Artificial Sequence
  Description of Artificial Sequence: Synthetic oligonucleotide
  Antisense strand to SEQ ID NO: 1270862
uuaaaggccacgauaagcc

SEQ ID NO: 1270864 - RNA, 19 nt, Artificial Sequence
  Description of Artificial Sequence: Synthetic oligonucleotide
  Sense strand starting at position 2407 of SEQ ID NO: 1241416
cgguauucuccgcggcagu

SEQ ID NO: 1270865 - RNA, 19 nt, Artificial Sequence
  Description of Artificial Sequence: Synthetic oligonucleotide
  Antisense strand to SEQ ID NO: 1270864
acugccgcggagaauaccg

SEQ ID NO: 1270866 - RNA, 19 nt, Artificial Sequence
  Description of Artificial Sequence: Synthetic oligonucleotide
  Sense strand starting at position 2409 of SEQ ID NO: 1241416
guauucuccgcggcaguga

SEQ ID NO: 1270867 - RNA, 19 nt, Artificial Sequence
  Description of Artificial Sequence: Synthetic oligonucleotide
  Antisense strand to SEQ ID NO: 1270866
ucacugccgcggagaauac

SEQ ID NO: 1270868 - RNA, 19 nt, Artificial Sequence
  Description of Artificial Sequence: Synthetic oligonucleotide
  Sense strand starting at position 2417 of SEQ ID NO: 1241416
cgcggcagugacaguaauu

SEQ ID NO: 1270869 - RNA, 19 nt, Artificial Sequence
  Description of Artificial Sequence: Synthetic oligonucleotide
  Antisense strand to SEQ ID NO: 1270868
aauuacugucacugccgcg

SEQ ID NO: 1270870 - RNA, 19 nt, Artificial Sequence
  Description of Artificial Sequence: Synthetic oligonucleotide
  Sense strand starting at position 2641 of SEQ ID NO: 1241416
cuguccaaacagugaguuu

SEQ ID NO: 1270871 - RNA, 19 nt, Artificial Sequence
  Description of Artificial Sequence: Synthetic oligonucleotide
  Antisense strand to SEQ ID NO: 1270870
aaacucacuguuuggacag

SEQ ID NO: 1270872 - RNA, 19 nt, Artificial Sequence
  Description of Artificial Sequence: Synthetic oligonucleotide
  Sense strand starting at position 2689 of SEQ ID NO: 1241416
gcccuaaacuccuagaggu

SEQ ID NO: 1270873 - RNA, 19 nt, Artificial Sequence
  Description of Artificial Sequence: Synthetic oligonucleotide
  Antisense strand to SEQ ID NO: 1270872
accucuaggaguuuagggc

SEQ ID NO: 1270874 - RNA, 19 nt, Artificial Sequence
  Description of Artificial Sequence: Synthetic oligonucleotide
  Sense strand starting at position 2757 of SEQ ID NO: 1241416
ugugaaaccucccgacaaa

SEQ ID NO: 1270875 - RNA, 19 nt, Artificial Sequence
  Description of Artificial Sequence: Synthetic oligonucleotide
  Antisense strand to SEQ ID NO: 1270874
uuugucgggagguuucaca

SEQ ID NO: 1270876 - RNA, 19 nt, Artificial Sequence
  Description of Artificial Sequence: Synthetic oligonucleotide
  Sense strand starting at position 2781 of SEQ ID NO: 1241416
cggaguggaaugugguuua

SEQ ID NO: 1270877 - RNA, 19 nt, Artificial Sequence
  Description of Artificial Sequence: Synthetic oligonucleotide
  Antisense strand to SEQ ID NO: 1270876
uaaaccacauuccacuccg

SEQ ID NO: 1270878 - RNA, 19 nt, Artificial Sequence
  Description of Artificial Sequence: Synthetic oligonucleotide
  Sense strand starting at position 2798 of SEQ ID NO: 1241416
uaaggaucccgauagguuu

SEQ ID NO: 1270879 - RNA, 19 nt, Artificial Sequence
  Description of Artificial Sequence: Synthetic oligonucleotide
  Antisense strand to SEQ ID NO: 1270878
aaaccuaucgggauccuua

SEQ ID NO: 1270880 - RNA, 19 nt, Artificial Sequence
  Description of Artificial Sequence: Synthetic oligonucleotide
  Sense strand starting at position 2804 of SEQ ID NO: 1241416
ucccgauagguuugaccca

SEQ ID NO: 1270881 - RNA, 19 nt, Artificial Sequence
  Description of Artificial Sequence: Synthetic oligonucleotide
  Antisense strand to SEQ ID NO: 1270880
ugggucaaaccuaucggga

SEQ ID NO: 1270882 - RNA, 19 nt, Artificial Sequence
  Description of Artificial Sequence: Synthetic oligonucleotide
  Sense strand starting at position 2805 of SEQ ID NO: 1241416
cccgauagguuugacccaa

SEQ ID NO: 1270883 - RNA, 19 nt, Artificial Sequence
  Description of Artificial Sequence: Synthetic oligonucleotide
  Antisense strand to SEQ ID NO: 1270882
uugggucaaaccuaucggg

SEQ ID NO: 1270884 - RNA, 19 nt, Artificial Sequence
  Description of Artificial Sequence: Synthetic oligonucleotide
  Sense strand starting at position 2871 of SEQ ID NO: 1241416
acugacuuccauggucuua

SEQ ID NO: 1270885 - RNA, 19 nt, Artificial Sequence
  Description of Artificial Sequence: Synthetic oligonucleotide
  Antisense strand to SEQ ID NO: 1270884
uaagaccauggaagucagu

SEQ ID NO: 1270886 - RNA, 19 nt, Artificial Sequence
  Description of Artificial Sequence: Synthetic oligonucleotide
  Sense strand starting at position 2873 of SEQ ID NO: 1241416
ugacuuccauggucuuaau

SEQ ID NO: 1270887 - RNA, 19 nt, Artificial Sequence
  Description of Artificial Sequence: Synthetic oligonucleotide
  Antisense strand to SEQ ID NO: 1270886
auuaagaccauggaaguca

SEQ ID NO: 1270888 - RNA, 19 nt, Artificial Sequence
  Description of Artificial Sequence: Synthetic oligonucleotide
  Sense strand starting at position 2890 of SEQ ID NO: 1241416
aucuaaacuugugaagaau

SEQ ID NO: 1270889 - RNA, 19 nt, Artificial Sequence
  Description of Artificial Sequence: Synthetic oligonucleotide
  Antisense strand to SEQ ID NO: 1270888
auucuucacaaguuuagau

SEQ ID NO: 1270890 - RNA, 19 nt, Artificial Sequence
  Description of Artificial Sequence: Synthetic oligonucleotide
  Sense strand starting at position 2990 of SEQ ID NO: 1241416
uugcuucccucguaaucca

SEQ ID NO: 1270891 - RNA, 19 nt, Artificial Sequence
  Description of Artificial Sequence: Synthetic oligonucleotide
  Antisense strand to SEQ ID NO: 1270890
uggauuacgagggaagcaa

SEQ ID NO: 1270892 - RNA, 19 nt, Artificial Sequence
  Description of Artificial Sequence: Synthetic oligonucleotide
  Sense strand starting at position 3102 of SEQ ID NO: 1241416
cgcacuaagggcuguugaa

SEQ ID NO: 1270893 - RNA, 19 nt, Artificial Sequence
  Description of Artificial Sequence: Synthetic oligonucleotide
  Antisense strand to SEQ ID NO: 1270892
uucaacagcccuuagugcg

SEQ ID NO: 1270894 - RNA, 19 nt, Artificial Sequence
  Description of Artificial Sequence: Synthetic oligonucleotide
  Sense strand starting at position 3115 of SEQ ID NO: 1241416
guugaaaguggcuggagaa

SEQ ID NO: 1270895 - RNA, 19 nt, Artificial Sequence
  Description of Artificial Sequence: Synthetic oligonucleotide
  Antisense strand to SEQ ID NO: 1270894
uucuccagccacuuucaac

SEQ ID NO: 1270896 - RNA, 19 nt, Artificial Sequence
  Description of Artificial Sequence: Synthetic oligonucleotide
  Sense strand starting at position 3116 of SEQ ID NO: 1241416
uugaaaguggcuggagaaa

SEQ ID NO: 1270897 - RNA, 19 nt, Artificial Sequence
  Description of Artificial Sequence: Synthetic oligonucleotide
  Antisense strand to SEQ ID NO: 1270896
uuucuccagccacuuucaa

SEQ ID NO: 1270898 - RNA, 19 nt, Artificial Sequence
  Description of Artificial Sequence: Synthetic oligonucleotide
  Sense strand starting at position 3135 of SEQ ID NO: 1241416
aacagaaccuuggugaguu

SEQ ID NO: 1270899 - RNA, 19 nt, Artificial Sequence
  Description of Artificial Sequence: Synthetic oligonucleotide
  Antisense strand to SEQ ID NO: 1270898
aacucaccaagguucuguu

SEQ ID NO: 1270900 - RNA, 19 nt, Artificial Sequence
  Description of Artificial Sequence: Synthetic oligonucleotide
  Sense strand starting at position 3143 of SEQ ID NO: 1241416
cuuggugaguugucucacu

SEQ ID NO: 1270901 - RNA, 19 nt, Artificial Sequence
  Description of Artificial Sequence: Synthetic oligonucleotide
  Antisense strand to SEQ ID NO: 1270900
agugagacaacucaccaag

SEQ ID NO: 1270902 - RNA, 19 nt, Artificial Sequence
  Description of Artificial Sequence: Synthetic oligonucleotide
  Sense strand starting at position 3506 of SEQ ID NO: 1241416
ggucaugucuaccguguuu

SEQ ID NO: 1270903 - RNA, 19 nt, Artificial Sequence
  Description of Artificial Sequence: Synthetic oligonucleotide
  Antisense strand to SEQ ID NO: 1270902
aaacacgguagacaugacc

SEQ ID NO: 1270904 - RNA, 19 nt, Artificial Sequence
  Description of Artificial Sequence: Synthetic oligonucleotide
  Sense strand starting at position 3653 of SEQ ID NO: 1241416
agugaaguauugcugcaac

SEQ ID NO: 1270905 - RNA, 19 nt, Artificial Sequence
  Description of Artificial Sequence: Synthetic oligonucleotide
  Antisense strand to SEQ ID NO: 1270904
guugcagcaauacuucacu

SEQ ID NO: 1270906 - RNA, 19 nt, Artificial Sequence
  Description of Artificial Sequence: Synthetic oligonucleotide
  Sense strand starting at position 3656 of SEQ ID NO: 1241416
gaaguauugcugcaaccuc

SEQ ID NO: 1270907 - RNA, 19 nt, Artificial Sequence
  Description of Artificial Sequence: Synthetic oligonucleotide
  Antisense strand to SEQ ID NO: 1270906
gagguugcagcaauacuuc

SEQ ID NO: 1270908 - RNA, 19 nt, Artificial Sequence
  Description of Artificial Sequence: Synthetic oligonucleotide
  Sense strand starting at position 3850 of SEQ ID NO: 1241416
aaguguugcuauuacagac

SEQ ID NO: 1270909 - RNA, 19 nt, Artificial Sequence
  Description of Artificial Sequence: Synthetic oligonucleotide
  Antisense strand to SEQ ID NO: 1270908
gucuguaauagcaacacuu

SEQ ID NO: 1270910 - RNA, 19 nt, Artificial Sequence
  Description of Artificial Sequence: Synthetic oligonucleotide
  Sense strand starting at position 3854 of SEQ ID NO: 1241416
guugcuauuacagacguga

SEQ ID NO: 1270911 - RNA, 19 nt, Artificial Sequence
  Description of Artificial Sequence: Synthetic oligonucleotide
  Antisense strand to SEQ ID NO: 1270910
ucacgucuguaauagcaac

SEQ ID NO: 1270912 - RNA, 19 nt, Artificial Sequence
  Description of Artificial Sequence: Synthetic oligonucleotide
  Sense strand starting at position 3950 of SEQ ID NO: 1241416
acuuuaagcugaugaacuu

SEQ ID NO: 1270913 - RNA, 19 nt, Artificial Sequence
  Description of Artificial Sequence: Synthetic oligonucleotide
  Antisense strand to SEQ ID NO: 1270912
aaguucaucagcuuaaagu

SEQ ID NO: 1270914 - RNA, 19 nt, Artificial Sequence
  Description of Artificial Sequence: Synthetic oligonucleotide
  Sense strand starting at position 3981 of SEQ ID NO: 1241416
auaucucauuaagaaagga

SEQ ID NO: 1270915 - RNA, 19 nt, Artificial Sequence
  Description of Artificial Sequence: Synthetic oligonucleotide
  Antisense strand to SEQ ID NO: 1270914
uccuuucuuaaugagauau

SEQ ID NO: 1270916 - RNA, 19 nt, Artificial Sequence
  Description of Artificial Sequence: Synthetic oligonucleotide
  Sense strand starting at position 62 of SEQ ID NO: 1241417
ucagauccuuagcuuuaga

SEQ ID NO: 1270917 - RNA, 19 nt, Artificial Sequence
  Description of Artificial Sequence: Synthetic oligonucleotide
  Antisense strand to SEQ ID NO: 1270916
ucuaaagcuaaggaucuga

SEQ ID NO: 1270918 - RNA, 19 nt, Artificial Sequence
  Description of Artificial Sequence: Synthetic oligonucleotide
  Sense strand starting at position 76 of SEQ ID NO: 1241417
uuagaaacuguauaugcau

SEQ ID NO: 1270919 - RNA, 19 nt, Artificial Sequence
  Description of Artificial Sequence: Synthetic oligonucleotide
  Antisense strand to SEQ ID NO: 1270918
augcauauacaguuucuaa

SEQ ID NO: 1270920 - RNA, 19 nt, Artificial Sequence
  Description of Artificial Sequence: Synthetic oligonucleotide
  Sense strand starting at position 79 of SEQ ID NO: 1241417
gaaacuguauaugcaugau

SEQ ID NO: 1270921 - RNA, 19 nt, Artificial Sequence
  Description of Artificial Sequence: Synthetic oligonucleotide
  Antisense strand to SEQ ID NO: 1270920
aucaugcauauacaguuuc

SEQ ID NO: 1270922 - RNA, 19 nt, Artificial Sequence
  Description of Artificial Sequence: Synthetic oligonucleotide
  Sense strand starting at position 216 of SEQ ID NO: 1241417
aaauaagguucgguacuga

SEQ ID NO: 1270923 - RNA, 19 nt, Artificial Sequence
  Description of Artificial Sequence: Synthetic oligonucleotide
  Antisense strand to SEQ ID NO: 1270922
ucaguaccgaaccuuauuu

SEQ ID NO: 1270924 - RNA, 19 nt, Artificial Sequence
  Description of Artificial Sequence: Synthetic oligonucleotide
  Sense strand starting at position 221 of SEQ ID NO: 1241417
agguucgguacugacaaua

SEQ ID NO: 1270925 - RNA, 19 nt, Artificial Sequence
  Description of Artificial Sequence: Synthetic oligonucleotide
  Antisense strand to SEQ ID NO: 1270924
uauugucaguaccgaaccu

SEQ ID NO: 1270926 - RNA, 19 nt, Artificial Sequence
  Description of Artificial Sequence: Synthetic oligonucleotide
  Sense strand starting at position 240 of SEQ ID NO: 1241417
aagugagauuaagcacgaa

SEQ ID NO: 1270927 - RNA, 19 nt, Artificial Sequence
  Description of Artificial Sequence: Synthetic oligonucleotide
  Antisense strand to SEQ ID NO: 1270926
uucgugcuuaaucucacuu

SEQ ID NO: 1270928 - RNA, 19 nt, Artificial Sequence
  Description of Artificial Sequence: Synthetic oligonucleotide
  Sense strand starting at position 243 of SEQ ID NO: 1241417
ugagauuaagcacgaaaca

SEQ ID NO: 1270929 - RNA, 19 nt, Artificial Sequence
  Description of Artificial Sequence: Synthetic oligonucleotide
  Antisense strand to SEQ ID NO: 1270928
uguuucgugcuuaaucuca

SEQ ID NO: 1270930 - RNA, 19 nt, Artificial Sequence
  Description of Artificial Sequence: Synthetic oligonucleotide
  Sense strand starting at position 303 of SEQ ID NO: 1241417
uggguagaaauauguauac

SEQ ID NO: 1270931 - RNA, 19 nt, Artificial Sequence
  Description of Artificial Sequence: Synthetic oligonucleotide
  Antisense strand to SEQ ID NO: 1270930
guauacauauuucuaccca

SEQ ID NO: 1270932 - RNA, 19 nt, Artificial Sequence
  Description of Artificial Sequence: Synthetic oligonucleotide
  Sense strand starting at position 312 of SEQ ID NO: 1241417
auauguauacgauguaaag

SEQ ID NO: 1270933 - RNA, 19 nt, Artificial Sequence
  Description of Artificial Sequence: Synthetic oligonucleotide
  Antisense strand to SEQ ID NO: 1270932
cuuuacaucguauacauau

SEQ ID NO: 1270934 - RNA, 19 nt, Artificial Sequence
  Description of Artificial Sequence: Synthetic oligonucleotide
  Sense strand starting at position 314 of SEQ ID NO: 1241417
auguauacgauguaaaggu

SEQ ID NO: 1270935 - RNA, 19 nt, Artificial Sequence
  Description of Artificial Sequence: Synthetic oligonucleotide
  Antisense strand to SEQ ID NO: 1270934
accuuuacaucguauacau

SEQ ID NO: 1270936 - RNA, 19 nt, Artificial Sequence
  Description of Artificial Sequence: Synthetic oligonucleotide
  Sense strand starting at position 318 of SEQ ID NO: 1241417
auacgauguaaaggucuaa

SEQ ID NO: 1270937 - RNA, 19 nt, Artificial Sequence
  Description of Artificial Sequence: Synthetic oligonucleotide
  Antisense strand to SEQ ID NO: 1270936
uuagaccuuuacaucguau

SEQ ID NO: 1270938 - RNA, 19 nt, Artificial Sequence
  Description of Artificial Sequence: Synthetic oligonucleotide
  Sense strand starting at position 343 of SEQ ID NO: 1241417
agcaguacuauuugagugu

SEQ ID NO: 1270939 - RNA, 19 nt, Artificial Sequence
  Description of Artificial Sequence: Synthetic oligonucleotide
  Antisense strand to SEQ ID NO: 1270938
acacucaaauaguacugcu

SEQ ID NO: 1270940 - RNA, 19 nt, Artificial Sequence
  Description of Artificial Sequence: Synthetic oligonucleotide
  Sense strand starting at position 347 of SEQ ID NO: 1241417
guacuauuugagugucacc

SEQ ID NO: 1270941 - RNA, 19 nt, Artificial Sequence
  Description of Artificial Sequence: Synthetic oligonucleotide
  Antisense strand to SEQ ID NO: 1270940
ggugacacucaaauaguac

SEQ ID NO: 1270942 - RNA, 19 nt, Artificial Sequence
  Description of Artificial Sequence: Synthetic oligonucleotide
  Sense strand starting at position 354 of SEQ ID NO: 1241417
uugagugucaccgcuguau

SEQ ID NO: 1270943 - RNA, 19 nt, Artificial Sequence
  Description of Artificial Sequence: Synthetic oligonucleotide
  Antisense strand to SEQ ID NO: 1270942
auacagcggugacacucaa

SEQ ID NO: 1270944 - RNA, 19 nt, Artificial Sequence
  Description of Artificial Sequence: Synthetic oligonucleotide
  Sense strand starting at position 455 of SEQ ID NO: 1241417
guggguaaagcauauguua

SEQ ID NO: 1270945 - RNA, 19 nt, Artificial Sequence
  Description of Artificial Sequence: Synthetic oligonucleotide
  Antisense strand to SEQ ID NO: 1270944
uaacauaugcuuuacccac

SEQ ID NO: 1270946 - RNA, 19 nt, Artificial Sequence
  Description of Artificial Sequence: Synthetic oligonucleotide
  Sense strand starting at position 457 of SEQ ID NO: 1241417
ggguaaagcauauguuauc

SEQ ID NO: 1270947 - RNA, 19 nt, Artificial Sequence
  Description of Artificial Sequence: Synthetic oligonucleotide
  Antisense strand to SEQ ID NO: 1270946
gauaacauaugcuuuaccc

SEQ ID NO: 1270948 - RNA, 19 nt, Artificial Sequence
  Description of Artificial Sequence: Synthetic oligonucleotide
  Sense strand starting at position 650 of SEQ ID NO: 1241417
aguuaaguguauccaccau

SEQ ID NO: 1270949 - RNA, 19 nt, Artificial Sequence
  Description of Artificial Sequence: Synthetic oligonucleotide
  Antisense strand to SEQ ID NO: 1270948
augguggauacacuuaacu

SEQ ID NO: 1270950 - RNA, 19 nt, Artificial Sequence
  Description of Artificial Sequence: Synthetic oligonucleotide
  Sense strand starting at position 656 of SEQ ID NO: 1241417
guguauccaccauaaauau

SEQ ID NO: 1270951 - RNA, 19 nt, Artificial Sequence
  Description of Artificial Sequence: Synthetic oligonucleotide
  Antisense strand to SEQ ID NO: 1270950
auauuuaugguggauacac

SEQ ID NO: 1270952 - RNA, 19 nt, Artificial Sequence
  Description of Artificial Sequence: Synthetic oligonucleotide
  Sense strand starting at position 837 of SEQ ID NO: 1241417
auaucuuacguuugggaau

SEQ ID NO: 1270953 - RNA, 19 nt, Artificial Sequence
  Description of Artificial Sequence: Synthetic oligonucleotide
  Antisense strand to SEQ ID NO: 1270952
auucccaaacguaagauau

SEQ ID NO: 1270954 - RNA, 19 nt, Artificial Sequence
  Description of Artificial Sequence: Synthetic oligonucleotide
  Sense strand starting at position 1646 of SEQ ID NO: 1241417
guggguguaaucugacaac

SEQ ID NO: 1270955 - RNA, 19 nt, Artificial Sequence
  Description of Artificial Sequence: Synthetic oligonucleotide
  Antisense strand to SEQ ID NO: 1270954
guugucagauuacacccac

SEQ ID NO: 1270956 - RNA, 19 nt, Artificial Sequence
  Description of Artificial Sequence: Synthetic oligonucleotide
  Sense strand starting at position 2021 of SEQ ID NO: 1241417
acagauucgggucauuauu

SEQ ID NO: 1270957 - RNA, 19 nt, Artificial Sequence
  Description of Artificial Sequence: Synthetic oligonucleotide
  Antisense strand to SEQ ID NO: 1270956
aauaaugacccgaaucugu

SEQ ID NO: 1270958 - RNA, 19 nt, Artificial Sequence
  Description of Artificial Sequence: Synthetic oligonucleotide
  Sense strand starting at position 2086 of SEQ ID NO: 1241417
cgaaguuaauccuuaggag

SEQ ID NO: 1270959 - RNA, 19 nt, Artificial Sequence
  Description of Artificial Sequence: Synthetic oligonucleotide
  Antisense strand to SEQ ID NO: 1270958
cuccuaaggauuaacuucg

SEQ ID NO: 1270960 - RNA, 19 nt, Artificial Sequence
  Description of Artificial Sequence: Synthetic oligonucleotide
  Sense strand starting at position 2090 of SEQ ID NO: 1241417
guuaauccuuaggagauuu

SEQ ID NO: 1270961 - RNA, 19 nt, Artificial Sequence
  Description of Artificial Sequence: Synthetic oligonucleotide
  Antisense strand to SEQ ID NO: 1270960
aaaucuccuaaggauuaac

SEQ ID NO: 1270962 - RNA, 19 nt, Artificial Sequence
  Description of Artificial Sequence: Synthetic oligonucleotide
  Sense strand starting at position 2108 of SEQ ID NO: 1241417
uuagaauucgcugauggua

SEQ ID NO: 1270963 - RNA, 19 nt, Artificial Sequence
  Description of Artificial Sequence: Synthetic oligonucleotide
  Antisense strand to SEQ ID NO: 1270962
uaccaucagcgaauucuaa

SEQ ID NO: 1270964 - RNA, 19 nt, Artificial Sequence
  Description of Artificial Sequence: Synthetic oligonucleotide
  Sense strand starting at position 2139 of SEQ ID NO: 1241417
ucuagauuuccucgcguua

SEQ ID NO: 1270965 - RNA, 19 nt, Artificial Sequence
  Description of Artificial Sequence: Synthetic oligonucleotide
  Antisense strand to SEQ ID NO: 1270964
uaacgcgaggaaaucuaga

SEQ ID NO: 1270966 - RNA, 19 nt, Artificial Sequence
  Description of Artificial Sequence: Synthetic oligonucleotide
  Sense strand starting at position 2178 of SEQ ID NO: 1241417
guuuaagugucacuugaca

SEQ ID NO: 1270967 - RNA, 19 nt, Artificial Sequence
  Description of Artificial Sequence: Synthetic oligonucleotide
  Antisense strand to SEQ ID NO: 1270966
ugucaagugacacuuaaac

SEQ ID NO: 1270968 - RNA, 19 nt, Artificial Sequence
  Description of Artificial Sequence: Synthetic oligonucleotide
  Sense strand starting at position 2313 of SEQ ID NO: 1241417
augcgagagccugugcuua

SEQ ID NO: 1270969 - RNA, 19 nt, Artificial Sequence
  Description of Artificial Sequence: Synthetic oligonucleotide
  Antisense strand to SEQ ID NO: 1270968
uaagcacaggcucucgcau

SEQ ID NO: 1270970 - RNA, 19 nt, Artificial Sequence
  Description of Artificial Sequence: Synthetic oligonucleotide
  Sense strand starting at position 2609 of SEQ ID NO: 1241417
guauuuacgaugugaccuu

SEQ ID NO: 1270971 - RNA, 19 nt, Artificial Sequence
  Description of Artificial Sequence: Synthetic oligonucleotide
  Antisense strand to SEQ ID NO: 1270970
aaggucacaucguaaauac

SEQ ID NO: 1270972 - RNA, 19 nt, Artificial Sequence
  Description of Artificial Sequence: Synthetic oligonucleotide
  Sense strand starting at position 2762 of SEQ ID NO: 1241417
gcuuuagaauaaucaaagc

SEQ ID NO: 1270973 - RNA, 19 nt, Artificial Sequence
  Description of Artificial Sequence: Synthetic oligonucleotide
  Antisense strand to SEQ ID NO: 1270972
gcuuugauuauucuaaagc

SEQ ID NO: 1270974 - RNA, 19 nt, Artificial Sequence
  Description of Artificial Sequence: Synthetic oligonucleotide
  Sense strand starting at position 3234 of SEQ ID NO: 1241417
ugcugaguuucucuaauga

SEQ ID NO: 1270975 - RNA, 19 nt, Artificial Sequence
  Description of Artificial Sequence: Synthetic oligonucleotide
  Antisense strand to SEQ ID NO: 1270974
ucauuagagaaacucagca

SEQ ID NO: 1270976 - RNA, 19 nt, Artificial Sequence
  Description of Artificial Sequence: Synthetic oligonucleotide
  Sense strand starting at position 3473 of SEQ ID NO: 1241417
ucgaacuccugacuugauu

SEQ ID NO: 1270977 - RNA, 19 nt, Artificial Sequence
  Description of Artificial Sequence: Synthetic oligonucleotide
  Antisense strand to SEQ ID NO: 1270976
aaucaagucaggaguucga

SEQ ID NO: 1270978 - RNA, 19 nt, Artificial Sequence
  Description of Artificial Sequence: Synthetic oligonucleotide
  Sense strand starting at position 3581 of SEQ ID NO: 1241417
cguaauugggcucauaggu

SEQ ID NO: 1270979 - RNA, 19 nt, Artificial Sequence
  Description of Artificial Sequence: Synthetic oligonucleotide
  Antisense strand to SEQ ID NO: 1270978
accuaugagcccaauuacg

SEQ ID NO: 1270980 - RNA, 19 nt, Artificial Sequence
  Description of Artificial Sequence: Synthetic oligonucleotide
  Sense strand starting at position 3624 of SEQ ID NO: 1241417
uguauauuaugaguguacu

SEQ ID NO: 1270981 - RNA, 19 nt, Artificial Sequence
  Description of Artificial Sequence: Synthetic oligonucleotide
  Antisense strand to SEQ ID NO: 1270980
aguacacucauaauauaca

SEQ ID NO: 1270982 - RNA, 19 nt, Artificial Sequence
  Description of Artificial Sequence: Synthetic oligonucleotide
  Sense strand starting at position 3625 of SEQ ID NO: 1241417
guauauuaugaguguacug

SEQ ID NO: 1270983 - RNA, 19 nt, Artificial Sequence
  Description of Artificial Sequence: Synthetic oligonucleotide
  Antisense strand to SEQ ID NO: 1270982
caguacacucauaauauac

SEQ ID NO: 1270984 - RNA, 19 nt, Artificial Sequence
  Description of Artificial Sequence: Synthetic oligonucleotide
  Sense strand starting at position 3666 of SEQ ID NO: 1241417
gccagagaccuuggagaua

SEQ ID NO: 1270985 - RNA, 19 nt, Artificial Sequence
  Description of Artificial Sequence: Synthetic oligonucleotide
  Antisense strand to SEQ ID NO: 1270984
uaucuccaaggucucuggc

SEQ ID NO: 1270986 - RNA, 19 nt, Artificial Sequence
  Description of Artificial Sequence: Synthetic oligonucleotide
  Sense strand starting at position 3692 of SEQ ID NO: 1241417
ucuuaccuucuaggugaaa

SEQ ID NO: 1270987 - RNA, 19 nt, Artificial Sequence
  Description of Artificial Sequence: Synthetic oligonucleotide
  Antisense strand to SEQ ID NO: 1270986
uuucaccuagaagguaaga

SEQ ID NO: 1270988 - RNA, 19 nt, Artificial Sequence
  Description of Artificial Sequence: Synthetic oligonucleotide
  Sense strand starting at position 3704 of SEQ ID NO: 1241417
ggugaaacuuaugugaaag

SEQ ID NO: 1270989 - RNA, 19 nt, Artificial Sequence
  Description of Artificial Sequence: Synthetic oligonucleotide
  Antisense strand to SEQ ID NO: 1270988
cuuucacauaaguuucacc

SEQ ID NO: 1270990 - RNA, 19 nt, Artificial Sequence
  Description of Artificial Sequence: Synthetic oligonucleotide
  Sense strand starting at position 3705 of SEQ ID NO: 1241417
gugaaacuuaugugaaaga

SEQ ID NO: 1270991 - RNA, 19 nt, Artificial Sequence
  Description of Artificial Sequence: Synthetic oligonucleotide
  Antisense strand to SEQ ID NO: 1270990
ucuuucacauaaguuucac

SEQ ID NO: 1270992 - RNA, 19 nt, Artificial Sequence
  Description of Artificial Sequence: Synthetic oligonucleotide
  Sense strand starting at position 3729 of SEQ ID NO: 1241417
ugaccuaagaucugagugu

SEQ ID NO: 1270993 - RNA, 19 nt, Artificial Sequence
  Description of Artificial Sequence: Synthetic oligonucleotide
  Antisense strand to SEQ ID NO: 1270992
acacucagaucuuagguca

SEQ ID NO: 1270994 - RNA, 19 nt, Artificial Sequence
  Description of Artificial Sequence: Synthetic oligonucleotide
  Sense strand starting at position 3856 of SEQ ID NO: 1241417
uugcucugucaugaucaua

SEQ ID NO: 1270995 - RNA, 19 nt, Artificial Sequence
  Description of Artificial Sequence: Synthetic oligonucleotide
  Antisense strand to SEQ ID NO: 1270994
uaugaucaugacagagcaa

SEQ ID NO: 1270996 - RNA, 19 nt, Artificial Sequence
  Description of Artificial Sequence: Synthetic oligonucleotide
  Sense strand starting at position 52 of SEQ ID NO: 1241418
aaaguuuggucuguaacug

SEQ ID NO: 1270997 - RNA, 19 nt, Artificial Sequence
  Description of Artificial Sequence: Synthetic oligonucleotide
  Antisense strand to SEQ ID NO: 1270996
caguuacagaccaaacuuu

SEQ ID NO: 1270998 - RNA, 19 nt, Artificial Sequence
  Description of Artificial Sequence: Synthetic oligonucleotide
  Sense strand starting at position 454 of SEQ ID NO: 1241418
gugagacacugucccagaa

SEQ ID NO: 1270999 - RNA, 19 nt, Artificial Sequence
  Description of Artificial Sequence: Synthetic oligonucleotide
  Antisense strand to SEQ ID NO: 1270998
uucugggacagugucucac

SEQ ID NO: 1271000 - RNA, 19 nt, Artificial Sequence
  Description of Artificial Sequence: Synthetic oligonucleotide
  Sense strand starting at position 516 of SEQ ID NO: 1241418
ugauguacacuuugugacu

SEQ ID NO: 1271001 - RNA, 19 nt, Artificial Sequence
  Description of Artificial Sequence: Synthetic oligonucleotide
  Antisense strand to SEQ ID NO: 1271000
agucacaaaguguacauca

SEQ ID NO: 1271002 - RNA, 19 nt, Artificial Sequence
  Description of Artificial Sequence: Synthetic oligonucleotide
  Sense strand starting at position 517 of SEQ ID NO: 1241418
gauguacacuuugugacua

SEQ ID NO: 1271003 - RNA, 19 nt, Artificial Sequence
  Description of Artificial Sequence: Synthetic oligonucleotide
  Antisense strand to SEQ ID NO: 1271002
uagucacaaaguguacauc

SEQ ID NO: 1271004 - RNA, 19 nt, Artificial Sequence
  Description of Artificial Sequence: Synthetic oligonucleotide
  Sense strand starting at position 621 of SEQ ID NO: 1241418
aaacgauuauagucaagcu

SEQ ID NO: 1271005 - RNA, 19 nt, Artificial Sequence
  Description of Artificial Sequence: Synthetic oligonucleotide
  Antisense strand to SEQ ID NO: 1271004
agcuugacuauaaucguuu

SEQ ID NO: 1271006 - RNA, 19 nt, Artificial Sequence
  Description of Artificial Sequence: Synthetic oligonucleotide
  Sense strand starting at position 746 of SEQ ID NO: 1241418
aguuacaugcuguacaaua

SEQ ID NO: 1271007 - RNA, 19 nt, Artificial Sequence
  Description of Artificial Sequence: Synthetic oligonucleotide
  Antisense strand to SEQ ID NO: 1271006
uauuguacagcauguaacu

SEQ ID NO: 1271008 - RNA, 19 nt, Artificial Sequence
  Description of Artificial Sequence: Synthetic oligonucleotide
  Sense strand starting at position 764 of SEQ ID NO: 1241418
agaucucuagaauguauua

SEQ ID NO: 1271009 - RNA, 19 nt, Artificial Sequence
  Description of Artificial Sequence: Synthetic oligonucleotide
  Antisense strand to SEQ ID NO: 1271008
uaauacauucuagagaucu

SEQ ID NO: 1271010 - RNA, 19 nt, Artificial Sequence
  Description of Artificial Sequence: Synthetic oligonucleotide
  Sense strand starting at position 775 of SEQ ID NO: 1241418
auguauuaacccugucuaa

SEQ ID NO: 1271011 - RNA, 19 nt, Artificial Sequence
  Description of Artificial Sequence: Synthetic oligonucleotide
  Antisense strand to SEQ ID NO: 1271010
uuagacaggguuaauacau

SEQ ID NO: 1271012 - RNA, 19 nt, Artificial Sequence
  Description of Artificial Sequence: Synthetic oligonucleotide
  Sense strand starting at position 1443 of SEQ ID NO: 1241418
gaaggucacucaguuuauu

SEQ ID NO: 1271013 - RNA, 19 nt, Artificial Sequence
  Description of Artificial Sequence: Synthetic oligonucleotide
  Antisense strand to SEQ ID NO: 1271012
aauaaacugagugaccuuc

SEQ ID NO: 1271014 - RNA, 19 nt, Artificial Sequence
  Description of Artificial Sequence: Synthetic oligonucleotide
  Sense strand starting at position 1446 of SEQ ID NO: 1241418
ggucacucaguuuauuaaa

SEQ ID NO: 1271015 - RNA, 19 nt, Artificial Sequence
  Description of Artificial Sequence: Synthetic oligonucleotide
  Antisense strand to SEQ ID NO: 1271014
uuuaauaaacugagugacc

SEQ ID NO: 1271016 - RNA, 19 nt, Artificial Sequence
  Description of Artificial Sequence: Synthetic oligonucleotide
  Sense strand starting at position 1492 of SEQ ID NO: 1241418
ccugaauuaggugggugua

SEQ ID NO: 1271017 - RNA, 19 nt, Artificial Sequence
  Description of Artificial Sequence: Synthetic oligonucleotide
  Antisense strand to SEQ ID NO: 1271016
uacacccaccuaauucagg

SEQ ID NO: 1271018 - RNA, 19 nt, Artificial Sequence
  Description of Artificial Sequence: Synthetic oligonucleotide
  Sense strand starting at position 1733 of SEQ ID NO: 1241418
uagccaauuugcucgguau

SEQ ID NO: 1271019 - RNA, 19 nt, Artificial Sequence
  Description of Artificial Sequence: Synthetic oligonucleotide
  Antisense strand to SEQ ID NO: 1271018
auaccgagcaaauuggcua

SEQ ID NO: 1271020 - RNA, 19 nt, Artificial Sequence
  Description of Artificial Sequence: Synthetic oligonucleotide
  Sense strand starting at position 1734 of SEQ ID NO: 1241418
agccaauuugcucgguauu

SEQ ID NO: 1271021 - RNA, 19 nt, Artificial Sequence
  Description of Artificial Sequence: Synthetic oligonucleotide
  Antisense strand to SEQ ID NO: 1271020
aauaccgagcaaauuggcu

SEQ ID NO: 1271022 - RNA, 19 nt, Artificial Sequence
  Description of Artificial Sequence: Synthetic oligonucleotide
  Sense strand starting at position 1744 of SEQ ID NO: 1241418
cucgguauuuggccucaaa

SEQ ID NO: 1271023 - RNA, 19 nt, Artificial Sequence
  Description of Artificial Sequence: Synthetic oligonucleotide
  Antisense strand to SEQ ID NO: 1271022
uuugaggccaaauaccgag

SEQ ID NO: 1271024 - RNA, 19 nt, Artificial Sequence
  Description of Artificial Sequence: Synthetic oligonucleotide
  Sense strand starting at position 2038 of SEQ ID NO: 1241418
ucacaauugcaugaagagu

SEQ ID NO: 1271025 - RNA, 19 nt, Artificial Sequence
  Description of Artificial Sequence: Synthetic oligonucleotide
  Antisense strand to SEQ ID NO: 1271024
acucuucaugcaauuguga

SEQ ID NO: 1271026 - RNA, 19 nt, Artificial Sequence
  Description of Artificial Sequence: Synthetic oligonucleotide
  Sense strand starting at position 2044 of SEQ ID NO: 1241418
uugcaugaagagugucaua

SEQ ID NO: 1271027 - RNA, 19 nt, Artificial Sequence
  Description of Artificial Sequence: Synthetic oligonucleotide
  Antisense strand to SEQ ID NO: 1271026
uaugacacucuucaugcaa

SEQ ID NO: 1271028 - RNA, 19 nt, Artificial Sequence
  Description of Artificial Sequence: Synthetic oligonucleotide
  Sense strand starting at position 2076 of SEQ ID NO: 1241418
gagagaaacuuauaggaca

SEQ ID NO: 1271029 - RNA, 19 nt, Artificial Sequence
  Description of Artificial Sequence: Synthetic oligonucleotide
  Antisense strand to SEQ ID NO: 1271028
uguccuauaaguuucucuc

SEQ ID NO: 1271030 - RNA, 19 nt, Artificial Sequence
  Description of Artificial Sequence: Synthetic oligonucleotide
  Sense strand starting at position 2145 of SEQ ID NO: 1241418
gucacaggauauccuaauu

SEQ ID NO: 1271031 - RNA, 19 nt, Artificial Sequence
  Description of Artificial Sequence: Synthetic oligonucleotide
  Antisense strand to SEQ ID NO: 1271030
aauuaggauauccugugac

SEQ ID NO: 1271032 - RNA, 19 nt, Artificial Sequence
  Description of Artificial Sequence: Synthetic oligonucleotide
  Sense strand starting at position 2527 of SEQ ID NO: 1241418
uuuacuugaucacugucau

SEQ ID NO: 1271033 - RNA, 19 nt, Artificial Sequence
  Description of Artificial Sequence: Synthetic oligonucleotide
  Antisense strand to SEQ ID NO: 1271032
augacagugaucaaguaaa

SEQ ID NO: 1271034 - RNA, 19 nt, Artificial Sequence
  Description of Artificial Sequence: Synthetic oligonucleotide
  Sense strand starting at position 2528 of SEQ ID NO: 1241418
uuacuugaucacugucaua

SEQ ID NO: 1271035 - RNA, 19 nt, Artificial Sequence
  Description of Artificial Sequence: Synthetic oligonucleotide
  Antisense strand to SEQ ID NO: 1271034
uaugacagugaucaaguaa

SEQ ID NO: 1271036 - RNA, 19 nt, Artificial Sequence
  Description of Artificial Sequence: Synthetic oligonucleotide
  Sense strand starting at position 2575 of SEQ ID NO: 1241418
gcccaauucccagaggucu

SEQ ID NO: 1271037 - RNA, 19 nt, Artificial Sequence
  Description of Artificial Sequence: Synthetic oligonucleotide
  Antisense strand to SEQ ID NO: 1271036
agaccucugggaauugggc

SEQ ID NO: 1271038 - RNA, 19 nt, Artificial Sequence
  Description of Artificial Sequence: Synthetic oligonucleotide
  Sense strand starting at position 2649 of SEQ ID NO: 1241418
cucucucaaccguaagguu

SEQ ID NO: 1271039 - RNA, 19 nt, Artificial Sequence
  Description of Artificial Sequence: Synthetic oligonucleotide
  Antisense strand to SEQ ID NO: 1271038
aaccuuacgguugagagag

SEQ ID NO: 1271040 - RNA, 19 nt, Artificial Sequence
  Description of Artificial Sequence: Synthetic oligonucleotide
  Sense strand starting at position 2700 of SEQ ID NO: 1241418
aguuucuacuugcuuagaa

SEQ ID NO: 1271041 - RNA, 19 nt, Artificial Sequence
  Description of Artificial Sequence: Synthetic oligonucleotide
  Antisense strand to SEQ ID NO: 1271040
uucuaagcaaguagaaacu

SEQ ID NO: 1271042 - RNA, 19 nt, Artificial Sequence
  Description of Artificial Sequence: Synthetic oligonucleotide
  Sense strand starting at position 2701 of SEQ ID NO: 1241418
guuucuacuugcuuagaaa

SEQ ID NO: 1271043 - RNA, 19 nt, Artificial Sequence
  Description of Artificial Sequence: Synthetic oligonucleotide
  Antisense strand to SEQ ID NO: 1271042
uuucuaagcaaguagaaac

SEQ ID NO: 1271044 - RNA, 19 nt, Artificial Sequence
  Description of Artificial Sequence: Synthetic oligonucleotide
  Sense strand starting at position 2765 of SEQ ID NO: 1241418
acaacugaauuggcuaauu

SEQ ID NO: 1271045 - RNA, 19 nt, Artificial Sequence
  Description of Artificial Sequence: Synthetic oligonucleotide
  Antisense strand to SEQ ID NO: 1271044
aauuagccaauucaguugu

SEQ ID NO: 1271046 - RNA, 19 nt, Artificial Sequence
  Description of Artificial Sequence: Synthetic oligonucleotide
  Sense strand starting at position 2775 of SEQ ID NO: 1241418
uggcuaauuuccucuguuu

SEQ ID NO: 1271047 - RNA, 19 nt, Artificial Sequence
  Description of Artificial Sequence: Synthetic oligonucleotide
  Antisense strand to SEQ ID NO: 1271046
aaacagaggaaauuagcca

SEQ ID NO: 1271048 - RNA, 19 nt, Artificial Sequence
  Description of Artificial Sequence: Synthetic oligonucleotide
  Sense strand starting at position 3042 of SEQ ID NO: 1241418
uagccaucccaggguuuaa

SEQ ID NO: 1271049 - RNA, 19 nt, Artificial Sequence
  Description of Artificial Sequence: Synthetic oligonucleotide
  Antisense strand to SEQ ID NO: 1271048
uuaaacccugggauggcua

SEQ ID NO: 1271050 - RNA, 19 nt, Artificial Sequence
  Description of Artificial Sequence: Synthetic oligonucleotide
  Sense strand starting at position 3053 of SEQ ID NO: 1241418
ggguuuaaauaucuguaug

SEQ ID NO: 1271051 - RNA, 19 nt, Artificial Sequence
  Description of Artificial Sequence: Synthetic oligonucleotide
  Antisense strand to SEQ ID NO: 1271050
cauacagauauuuaaaccc

SEQ ID NO: 1271052 - RNA, 19 nt, Artificial Sequence
  Description of Artificial Sequence: Synthetic oligonucleotide
  Sense strand starting at position 3058 of SEQ ID NO: 1241418
uaaauaucuguaugggaca

SEQ ID NO: 1271053 - RNA, 19 nt, Artificial Sequence
  Description of Artificial Sequence: Synthetic oligonucleotide
  Antisense strand to SEQ ID NO: 1271052
ugucccauacagauauuua

SEQ ID NO: 1271054 - RNA, 19 nt, Artificial Sequence
  Description of Artificial Sequence: Synthetic oligonucleotide
  Sense strand starting at position 3139 of SEQ ID NO: 1241418
ccaauuaagcuguaagcaa

SEQ ID NO: 1271055 - RNA, 19 nt, Artificial Sequence
  Description of Artificial Sequence: Synthetic oligonucleotide
  Antisense strand to SEQ ID NO: 1271054
uugcuuacagcuuaauugg

SEQ ID NO: 1271056 - RNA, 19 nt, Artificial Sequence
  Description of Artificial Sequence: Synthetic oligonucleotide
  Sense strand starting at position 3205 of SEQ ID NO: 1241418
guaacaaaggguuagguau

SEQ ID NO: 1271057 - RNA, 19 nt, Artificial Sequence
  Description of Artificial Sequence: Synthetic oligonucleotide
  Antisense strand to SEQ ID NO: 1271056
auaccuaacccuuuguuac

SEQ ID NO: 1271058 - RNA, 19 nt, Artificial Sequence
  Description of Artificial Sequence: Synthetic oligonucleotide
  Sense strand starting at position 3211 of SEQ ID NO: 1241418
aaggguuagguauguagua

SEQ ID NO: 1271059 - RNA, 19 nt, Artificial Sequence
  Description of Artificial Sequence: Synthetic oligonucleotide
  Antisense strand to SEQ ID NO: 1271058
uacuacauaccuaacccuu

SEQ ID NO: 1271060 - RNA, 19 nt, Artificial Sequence
  Description of Artificial Sequence: Synthetic oligonucleotide
  Sense strand starting at position 3212 of SEQ ID NO: 1241418
aggguuagguauguaguaa

SEQ ID NO: 1271061 - RNA, 19 nt, Artificial Sequence
  Description of Artificial Sequence: Synthetic oligonucleotide
  Antisense strand to SEQ ID NO: 1271060
uuacuacauaccuaacccu

SEQ ID NO: 1271062 - RNA, 19 nt, Artificial Sequence
  Description of Artificial Sequence: Synthetic oligonucleotide
  Sense strand starting at position 3213 of SEQ ID NO: 1241418
ggguuagguauguaguaag

SEQ ID NO: 1271063 - RNA, 19 nt, Artificial Sequence
  Description of Artificial Sequence: Synthetic oligonucleotide
  Antisense strand to SEQ ID NO: 1271062
cuuacuacauaccuaaccc

SEQ ID NO: 1271064 - RNA, 19 nt, Artificial Sequence
  Description of Artificial Sequence: Synthetic oligonucleotide
  Sense strand starting at position 3224 of SEQ ID NO: 1241418
guaguaagugcucaauaua

SEQ ID NO: 1271065 - RNA, 19 nt, Artificial Sequence
  Description of Artificial Sequence: Synthetic oligonucleotide
  Antisense strand to SEQ ID NO: 1271064
uauauugagcacuuacuac

SEQ ID NO: 1271066 - RNA, 19 nt, Artificial Sequence
  Description of Artificial Sequence: Synthetic oligonucleotide
  Sense strand starting at position 3303 of SEQ ID NO: 1241418
agguuucugccugaagucu

SEQ ID NO: 1271067 - RNA, 19 nt, Artificial Sequence
  Description of Artificial Sequence: Synthetic oligonucleotide
  Antisense strand to SEQ ID NO: 1271066
agacuucaggcagaaaccu

SEQ ID NO: 1271068 - RNA, 19 nt, Artificial Sequence
  Description of Artificial Sequence: Synthetic oligonucleotide
  Sense strand starting at position 3418 of SEQ ID NO: 1241418
uuaauaaaugcucaaugug

SEQ ID NO: 1271069 - RNA, 19 nt, Artificial Sequence
  Description of Artificial Sequence: Synthetic oligonucleotide
  Antisense strand to SEQ ID NO: 1271068
cacauugagcauuuauuaa

SEQ ID NO: 1271070 - RNA, 19 nt, Artificial Sequence
  Description of Artificial Sequence: Synthetic oligonucleotide
  Sense strand starting at position 3442 of SEQ ID NO: 1241418
uguaaagagcuacgacaua

SEQ ID NO: 1271071 - RNA, 19 nt, Artificial Sequence
  Description of Artificial Sequence: Synthetic oligonucleotide
  Antisense strand to SEQ ID NO: 1271070
uaugucguagcucuuuaca

SEQ ID NO: 1271072 - RNA, 19 nt, Artificial Sequence
  Description of Artificial Sequence: Synthetic oligonucleotide
  Sense strand starting at position 3558 of SEQ ID NO: 1241418
ugaacaucccaaugcuaug

SEQ ID NO: 1271073 - RNA, 19 nt, Artificial Sequence
  Description of Artificial Sequence: Synthetic oligonucleotide
  Antisense strand to SEQ ID NO: 1271072
cauagcauugggauguuca

SEQ ID NO: 1271074 - RNA, 19 nt, Artificial Sequence
  Description of Artificial Sequence: Synthetic oligonucleotide
  Sense strand starting at position 3900 of SEQ ID NO: 1241418
ugaugacuucugcaucuua

SEQ ID NO: 1271075 - RNA, 19 nt, Artificial Sequence
  Description of Artificial Sequence: Synthetic oligonucleotide
  Antisense strand to SEQ ID NO: 1271074
uaagaugcagaagucauca

SEQ ID NO: 1271076 - RNA, 19 nt, Artificial Sequence
  Description of Artificial Sequence: Synthetic oligonucleotide
  Sense strand starting at position 34 of SEQ ID NO: 1241419
augauuagccgucaaaguc

SEQ ID NO: 1271077 - RNA, 19 nt, Artificial Sequence
  Description of Artificial Sequence: Synthetic oligonucleotide
  Antisense strand to SEQ ID NO: 1271076
gacuuugacggcuaaucau

SEQ ID NO: 1271078 - RNA, 19 nt, Artificial Sequence
  Description of Artificial Sequence: Synthetic oligonucleotide
  Sense strand starting at position 44 of SEQ ID NO: 1241419
gucaaagucugauuagauc

SEQ ID NO: 1271079 - RNA, 19 nt, Artificial Sequence
  Description of Artificial Sequence: Synthetic oligonucleotide
  Antisense strand to SEQ ID NO: 1271078
gaucuaaucagacuuugac

SEQ ID NO: 1271080 - RNA, 19 nt, Artificial Sequence
  Description of Artificial Sequence: Synthetic oligonucleotide
  Sense strand starting at position 261 of SEQ ID NO: 1241419
uuaagucucugggcaagaa

SEQ ID NO: 1271081 - RNA, 19 nt, Artificial Sequence
  Description of Artificial Sequence: Synthetic oligonucleotide
  Antisense strand to SEQ ID NO: 1271080
uucuugcccagagacuuaa

SEQ ID NO: 1271082 - RNA, 19 nt, Artificial Sequence
  Description of Artificial Sequence: Synthetic oligonucleotide
  Sense strand starting at position 381 of SEQ ID NO: 1241419
uuuguuuaaugucucaaac

SEQ ID NO: 1271083 - RNA, 19 nt, Artificial Sequence
  Description of Artificial Sequence: Synthetic oligonucleotide
  Antisense strand to SEQ ID NO: 1271082
guuugagacauuaaacaaa

SEQ ID NO: 1271084 - RNA, 19 nt, Artificial Sequence
  Description of Artificial Sequence: Synthetic oligonucleotide
  Sense strand starting at position 528 of SEQ ID NO: 1241419
acgugagcauaauuaagaa

SEQ ID NO: 1271085 - RNA, 19 nt, Artificial Sequence
  Description of Artificial Sequence: Synthetic oligonucleotide
  Antisense strand to SEQ ID NO: 1271084
uucuuaauuaugcucacgu

SEQ ID NO: 1271086 - RNA, 19 nt, Artificial Sequence
  Description of Artificial Sequence: Synthetic oligonucleotide
  Sense strand starting at position 669 of SEQ ID NO: 1241419
ucagauccuuagcuuuaga

SEQ ID NO: 1271087 - RNA, 19 nt, Artificial Sequence
  Description of Artificial Sequence: Synthetic oligonucleotide
  Antisense strand to SEQ ID NO: 1271086
ucuaaagcuaaggaucuga

SEQ ID NO: 1271088 - RNA, 19 nt, Artificial Sequence
  Description of Artificial Sequence: Synthetic oligonucleotide
  Sense strand starting at position 683 of SEQ ID NO: 1241419
uuagaaacuguauaugcau

SEQ ID NO: 1271089 - RNA, 19 nt, Artificial Sequence
  Description of Artificial Sequence: Synthetic oligonucleotide
  Antisense strand to SEQ ID NO: 1271088
augcauauacaguuucuaa

SEQ ID NO: 1271090 - RNA, 19 nt, Artificial Sequence
  Description of Artificial Sequence: Synthetic oligonucleotide
  Sense strand starting at position 686 of SEQ ID NO: 1241419
gaaacuguauaugcaugau

SEQ ID NO: 1271091 - RNA, 19 nt, Artificial Sequence
  Description of Artificial Sequence: Synthetic oligonucleotide
  Antisense strand to SEQ ID NO: 1271090
aucaugcauauacaguuuc

SEQ ID NO: 1271092 - RNA, 19 nt, Artificial Sequence
  Description of Artificial Sequence: Synthetic oligonucleotide
  Sense strand starting at position 823 of SEQ ID NO: 1241419
aaauaagguucgguacuga

SEQ ID NO: 1271093 - RNA, 19 nt, Artificial Sequence
  Description of Artificial Sequence: Synthetic oligonucleotide
  Antisense strand to SEQ ID NO: 1271092
ucaguaccgaaccuuauuu

SEQ ID NO: 1271094 - RNA, 19 nt, Artificial Sequence
  Description of Artificial Sequence: Synthetic oligonucleotide
  Sense strand starting at position 828 of SEQ ID NO: 1241419
agguucgguacugacaaua

SEQ ID NO: 1271095 - RNA, 19 nt, Artificial Sequence
  Description of Artificial Sequence: Synthetic oligonucleotide
  Antisense strand to SEQ ID NO: 1271094
uauugucaguaccgaaccu

SEQ ID NO: 1271096 - RNA, 19 nt, Artificial Sequence
  Description of Artificial Sequence: Synthetic oligonucleotide
  Sense strand starting at position 841 of SEQ ID NO: 1241419
acaauaaagugagauuaag

SEQ ID NO: 1271097 - RNA, 19 nt, Artificial Sequence
  Description of Artificial Sequence: Synthetic oligonucleotide
  Antisense strand to SEQ ID NO: 1271096
cuuaaucucacuuuauugu

SEQ ID NO: 1271098 - RNA, 19 nt, Artificial Sequence
  Description of Artificial Sequence: Synthetic oligonucleotide
  Sense strand starting at position 847 of SEQ ID NO: 1241419
aagugagauuaagcacgaa

SEQ ID NO: 1271099 - RNA, 19 nt, Artificial Sequence
  Description of Artificial Sequence: Synthetic oligonucleotide
  Antisense strand to SEQ ID NO: 1271098
uucgugcuuaaucucacuu

SEQ ID NO: 1271100 - RNA, 19 nt, Artificial Sequence
  Description of Artificial Sequence: Synthetic oligonucleotide
  Sense strand starting at position 850 of SEQ ID NO: 1241419
ugagauuaagcacgaaaca

SEQ ID NO: 1271101 - RNA, 19 nt, Artificial Sequence
  Description of Artificial Sequence: Synthetic oligonucleotide
  Antisense strand to SEQ ID NO: 1271100
uguuucgugcuuaaucuca

SEQ ID NO: 1271102 - RNA, 19 nt, Artificial Sequence
  Description of Artificial Sequence: Synthetic oligonucleotide
  Sense strand starting at position 910 of SEQ ID NO: 1241419
uggguagaaauauguauac

SEQ ID NO: 1271103 - RNA, 19 nt, Artificial Sequence
  Description of Artificial Sequence: Synthetic oligonucleotide
  Antisense strand to SEQ ID NO: 1271102
guauacauauuucuaccca

SEQ ID NO: 1271104 - RNA, 19 nt, Artificial Sequence
  Description of Artificial Sequence: Synthetic oligonucleotide
  Sense strand starting at position 919 of SEQ ID NO: 1241419
auauguauacgauguaaag

SEQ ID NO: 1271105 - RNA, 19 nt, Artificial Sequence
  Description of Artificial Sequence: Synthetic oligonucleotide
  Antisense strand to SEQ ID NO: 1271104
cuuuacaucguauacauau

SEQ ID NO: 1271106 - RNA, 19 nt, Artificial Sequence
  Description of Artificial Sequence: Synthetic oligonucleotide
  Sense strand starting at position 921 of SEQ ID NO: 1241419
auguauacgauguaaaggu

SEQ ID NO: 1271107 - RNA, 19 nt, Artificial Sequence
  Description of Artificial Sequence: Synthetic oligonucleotide
  Antisense strand to SEQ ID NO: 1271106
accuuuacaucguauacau

SEQ ID NO: 1271108 - RNA, 19 nt, Artificial Sequence
  Description of Artificial Sequence: Synthetic oligonucleotide
  Sense strand starting at position 925 of SEQ ID NO: 1241419
auacgauguaaaggucuaa

SEQ ID NO: 1271109 - RNA, 19 nt, Artificial Sequence
  Description of Artificial Sequence: Synthetic oligonucleotide
  Antisense strand to SEQ ID NO: 1271108
uuagaccuuuacaucguau

SEQ ID NO: 1271110 - RNA, 19 nt, Artificial Sequence
  Description of Artificial Sequence: Synthetic oligonucleotide
  Sense strand starting at position 950 of SEQ ID NO: 1241419
agcaguacuauuugagugu

SEQ ID NO: 1271111 - RNA, 19 nt, Artificial Sequence
  Description of Artificial Sequence: Synthetic oligonucleotide
  Antisense strand to SEQ ID NO: 1271110
acacucaaauaguacugcu

SEQ ID NO: 1271112 - RNA, 19 nt, Artificial Sequence
  Description of Artificial Sequence: Synthetic oligonucleotide
  Sense strand starting at position 954 of SEQ ID NO: 1241419
guacuauuugagugucacc

SEQ ID NO: 1271113 - RNA, 19 nt, Artificial Sequence
  Description of Artificial Sequence: Synthetic oligonucleotide
  Antisense strand to SEQ ID NO: 1271112
ggugacacucaaauaguac

SEQ ID NO: 1271114 - RNA, 19 nt, Artificial Sequence
  Description of Artificial Sequence: Synthetic oligonucleotide
  Sense strand starting at position 961 of SEQ ID NO: 1241419
uugagugucaccgcuguau

SEQ ID NO: 1271115 - RNA, 19 nt, Artificial Sequence
  Description of Artificial Sequence: Synthetic oligonucleotide
  Antisense strand to SEQ ID NO: 1271114
auacagcggugacacucaa

SEQ ID NO: 1271116 - RNA, 19 nt, Artificial Sequence
  Description of Artificial Sequence: Synthetic oligonucleotide
  Sense strand starting at position 1062 of SEQ ID NO: 1241419
guggguaaagcauauguua

SEQ ID NO: 1271117 - RNA, 19 nt, Artificial Sequence
  Description of Artificial Sequence: Synthetic oligonucleotide
  Antisense strand to SEQ ID NO: 1271116
uaacauaugcuuuacccac

SEQ ID NO: 1271118 - RNA, 19 nt, Artificial Sequence
  Description of Artificial Sequence: Synthetic oligonucleotide
  Sense strand starting at position 1064 of SEQ ID NO: 1241419
ggguaaagcauauguuauc

SEQ ID NO: 1271119 - RNA, 19 nt, Artificial Sequence
  Description of Artificial Sequence: Synthetic oligonucleotide
  Antisense strand to SEQ ID NO: 1271118
gauaacauaugcuuuaccc

SEQ ID NO: 1271120 - RNA, 19 nt, Artificial Sequence
  Description of Artificial Sequence: Synthetic oligonucleotide
  Sense strand starting at position 1070 of SEQ ID NO: 1241419
agcauauguuauccuuauu

SEQ ID NO: 1271121 - RNA, 19 nt, Artificial Sequence
  Description of Artificial Sequence: Synthetic oligonucleotide
  Antisense strand to SEQ ID NO: 1271120
aauaaggauaacauaugcu

SEQ ID NO: 1271122 - RNA, 19 nt, Artificial Sequence
  Description of Artificial Sequence: Synthetic oligonucleotide
  Sense strand starting at position 1257 of SEQ ID NO: 1241419
aguuaaguguauccaccau

SEQ ID NO: 1271123 - RNA, 19 nt, Artificial Sequence
  Description of Artificial Sequence: Synthetic oligonucleotide
  Antisense strand to SEQ ID NO: 1271122
augguggauacacuuaacu

SEQ ID NO: 1271124 - RNA, 19 nt, Artificial Sequence
  Description of Artificial Sequence: Synthetic oligonucleotide
  Sense strand starting at position 1263 of SEQ ID NO: 1241419
guguauccaccauaaauau

SEQ ID NO: 1271125 - RNA, 19 nt, Artificial Sequence
  Description of Artificial Sequence: Synthetic oligonucleotide
  Antisense strand to SEQ ID NO: 1271124
auauuuaugguggauacac

SEQ ID NO: 1271126 - RNA, 19 nt, Artificial Sequence
  Description of Artificial Sequence: Synthetic oligonucleotide
  Sense strand starting at position 1444 of SEQ ID NO: 1241419
auaucuuacguuugggaau

SEQ ID NO: 1271127 - RNA, 19 nt, Artificial Sequence
  Description of Artificial Sequence: Synthetic oligonucleotide
  Antisense strand to SEQ ID NO: 1271126
auucccaaacguaagauau

SEQ ID NO: 1271128 - RNA, 19 nt, Artificial Sequence
  Description of Artificial Sequence: Synthetic oligonucleotide
  Sense strand starting at position 2187 of SEQ ID NO: 1241419
gaugcaaucgucggaaaca

SEQ ID NO: 1271129 - RNA, 19 nt, Artificial Sequence
  Description of Artificial Sequence: Synthetic oligonucleotide
  Antisense strand to SEQ ID NO: 1271128
uguuuccgacgauugcauc

SEQ ID NO: 1271130 - RNA, 19 nt, Artificial Sequence
  Description of Artificial Sequence: Synthetic oligonucleotide
  Sense strand starting at position 2253 of SEQ ID NO: 1241419
guggguguaaucugacaac

SEQ ID NO: 1271131 - RNA, 19 nt, Artificial Sequence
  Description of Artificial Sequence: Synthetic oligonucleotide
  Antisense strand to SEQ ID NO: 1271130
guugucagauuacacccac

SEQ ID NO: 1271132 - RNA, 19 nt, Artificial Sequence
  Description of Artificial Sequence: Synthetic oligonucleotide
  Sense strand starting at position 2628 of SEQ ID NO: 1241419
acagauucgggucauuauu

SEQ ID NO: 1271133 - RNA, 19 nt, Artificial Sequence
  Description of Artificial Sequence: Synthetic oligonucleotide
  Antisense strand to SEQ ID NO: 1271132
aauaaugacccgaaucugu

SEQ ID NO: 1271134 - RNA, 19 nt, Artificial Sequence
  Description of Artificial Sequence: Synthetic oligonucleotide
  Sense strand starting at position 2662 of SEQ ID NO: 1241419
aauagaaagcguugucuaa

SEQ ID NO: 1271135 - RNA, 19 nt, Artificial Sequence
  Description of Artificial Sequence: Synthetic oligonucleotide
  Antisense strand to SEQ ID NO: 1271134
uuagacaacgcuuucuauu

SEQ ID NO: 1271136 - RNA, 19 nt, Artificial Sequence
  Description of Artificial Sequence: Synthetic oligonucleotide
  Sense strand starting at position 2693 of SEQ ID NO: 1241419
cgaaguuaauccuuaggag

SEQ ID NO: 1271137 - RNA, 19 nt, Artificial Sequence
  Description of Artificial Sequence: Synthetic oligonucleotide
  Antisense strand to SEQ ID NO: 1271136
cuccuaaggauuaacuucg

SEQ ID NO: 1271138 - RNA, 19 nt, Artificial Sequence
  Description of Artificial Sequence: Synthetic oligonucleotide
  Sense strand starting at position 2697 of SEQ ID NO: 1241419
guuaauccuuaggagauuu

SEQ ID NO: 1271139 - RNA, 19 nt, Artificial Sequence
  Description of Artificial Sequence: Synthetic oligonucleotide
  Antisense strand to SEQ ID NO: 1271138
aaaucuccuaaggauuaac

SEQ ID NO: 1271140 - RNA, 19 nt, Artificial Sequence
  Description of Artificial Sequence: Synthetic oligonucleotide
  Sense strand starting at position 2715 of SEQ ID NO: 1241419
uuagaauucgcugauggua

SEQ ID NO: 1271141 - RNA, 19 nt, Artificial Sequence
  Description of Artificial Sequence: Synthetic oligonucleotide
  Antisense strand to SEQ ID NO: 1271140
uaccaucagcgaauucuaa

SEQ ID NO: 1271142 - RNA, 19 nt, Artificial Sequence
  Description of Artificial Sequence: Synthetic oligonucleotide
  Sense strand starting at position 2746 of SEQ ID NO: 1241419
ucuagauuuccucgcguua

SEQ ID NO: 1271143 - RNA, 19 nt, Artificial Sequence
  Description of Artificial Sequence: Synthetic oligonucleotide
  Antisense strand to SEQ ID NO: 1271142
uaacgcgaggaaaucuaga

SEQ ID NO: 1271144 - RNA, 19 nt, Artificial Sequence
  Description of Artificial Sequence: Synthetic oligonucleotide
  Sense strand starting at position 2785 of SEQ ID NO: 1241419
guuuaagugucacuugaca

SEQ ID NO: 1271145 - RNA, 19 nt, Artificial Sequence
  Description of Artificial Sequence: Synthetic oligonucleotide
  Antisense strand to SEQ ID NO: 1271144
ugucaagugacacuuaaac

SEQ ID NO: 1271146 - RNA, 19 nt, Artificial Sequence
  Description of Artificial Sequence: Synthetic oligonucleotide
  Sense strand starting at position 2920 of SEQ ID NO: 1241419
augcgagagccugugcuua

SEQ ID NO: 1271147 - RNA, 19 nt, Artificial Sequence
  Description of Artificial Sequence: Synthetic oligonucleotide
  Antisense strand to SEQ ID NO: 1271146
uaagcacaggcucucgcau

SEQ ID NO: 1271148 - RNA, 19 nt, Artificial Sequence
  Description of Artificial Sequence: Synthetic oligonucleotide
  Sense strand starting at position 3216 of SEQ ID NO: 1241419
guauuuacgaugugaccuu

SEQ ID NO: 1271149 - RNA, 19 nt, Artificial Sequence
  Description of Artificial Sequence: Synthetic oligonucleotide
  Antisense strand to SEQ ID NO: 1271148
aaggucacaucguaaauac

SEQ ID NO: 1271150 - RNA, 19 nt, Artificial Sequence
  Description of Artificial Sequence: Synthetic oligonucleotide
  Sense strand starting at position 3369 of SEQ ID NO: 1241419
gcuuuagaauaaucaaagc

SEQ ID NO: 1271151 - RNA, 19 nt, Artificial Sequence
  Description of Artificial Sequence: Synthetic oligonucleotide
  Antisense strand to SEQ ID NO: 1271150
gcuuugauuauucuaaagc

SEQ ID NO: 1271152 - RNA, 19 nt, Artificial Sequence
  Description of Artificial Sequence: Synthetic oligonucleotide
  Sense strand starting at position 3434 of SEQ ID NO: 1241419
uuuacaucucggcagucua

SEQ ID NO: 1271153 - RNA, 19 nt, Artificial Sequence
  Description of Artificial Sequence: Synthetic oligonucleotide
  Antisense strand to SEQ ID NO: 1271152
uagacugccgagauguaaa

SEQ ID NO: 1271154 - RNA, 19 nt, Artificial Sequence
  Description of Artificial Sequence: Synthetic oligonucleotide
  Sense strand starting at position 3841 of SEQ ID NO: 1241419
ugcugaguuucucuaauga

SEQ ID NO: 1271155 - RNA, 19 nt, Artificial Sequence
  Description of Artificial Sequence: Synthetic oligonucleotide
  Antisense strand to SEQ ID NO: 1271154
ucauuagagaaacucagca

SEQ ID NO: 1271156 - RNA, 19 nt, Artificial Sequence
  Description of Artificial Sequence: Synthetic oligonucleotide
  Sense strand starting at position 713 of SEQ ID NO: 1241420
gcaaacuuccagcaugcau

SEQ ID NO: 1271157 - RNA, 19 nt, Artificial Sequence
  Description of Artificial Sequence: Synthetic oligonucleotide
  Antisense strand to SEQ ID NO: 1271156
augcaugcuggaaguuugc

SEQ ID NO: 1271158 - RNA, 19 nt, Artificial Sequence
  Description of Artificial Sequence: Synthetic oligonucleotide
  Sense strand starting at position 725 of SEQ ID NO: 1241420
caugcauuguuccuggaac

SEQ ID NO: 1271159 - RNA, 19 nt, Artificial Sequence
  Description of Artificial Sequence: Synthetic oligonucleotide
  Antisense strand to SEQ ID NO: 1271158
guuccaggaacaaugcaug

SEQ ID NO: 1271160 - RNA, 19 nt, Artificial Sequence
  Description of Artificial Sequence: Synthetic oligonucleotide
  Sense strand starting at position 727 of SEQ ID NO: 1241420
ugcauuguuccuggaacaa

SEQ ID NO: 1271161 - RNA, 19 nt, Artificial Sequence
  Description of Artificial Sequence: Synthetic oligonucleotide
  Antisense strand to SEQ ID NO: 1271160
uuguuccaggaacaaugca

SEQ ID NO: 1271162 - RNA, 19 nt, Artificial Sequence
  Description of Artificial Sequence: Synthetic oligonucleotide
  Sense strand starting at position 888 of SEQ ID NO: 1241420
cagucuaucccaggaggua

SEQ ID NO: 1271163 - RNA, 19 nt, Artificial Sequence
  Description of Artificial Sequence: Synthetic oligonucleotide
  Antisense strand to SEQ ID NO: 1271162
uaccuccugggauagacug

SEQ ID NO: 1271164 - RNA, 19 nt, Artificial Sequence
  Description of Artificial Sequence: Synthetic oligonucleotide
  Sense strand starting at position 889 of SEQ ID NO: 1241420
agucuaucccaggagguau

SEQ ID NO: 1271165 - RNA, 19 nt, Artificial Sequence
  Description of Artificial Sequence: Synthetic oligonucleotide
  Antisense strand to SEQ ID NO: 1271164
auaccuccugggauagacu

SEQ ID NO: 1271166 - RNA, 19 nt, Artificial Sequence
  Description of Artificial Sequence: Synthetic oligonucleotide
  Sense strand starting at position 909 of SEQ ID NO: 1241420
ggacaacaguucuuauccu

SEQ ID NO: 1271167 - RNA, 19 nt, Artificial Sequence
  Description of Artificial Sequence: Synthetic oligonucleotide
  Antisense strand to SEQ ID NO: 1271166
aggauaagaacuguugucc

SEQ ID NO: 1271168 - RNA, 19 nt, Artificial Sequence
  Description of Artificial Sequence: Synthetic oligonucleotide
  Sense strand starting at position 916 of SEQ ID NO: 1241420
aguucuuauccuugaggcu

SEQ ID NO: 1271169 - RNA, 19 nt, Artificial Sequence
  Description of Artificial Sequence: Synthetic oligonucleotide
  Antisense strand to SEQ ID NO: 1271168
agccucaaggauaagaacu

SEQ ID NO: 1271170 - RNA, 19 nt, Artificial Sequence
  Description of Artificial Sequence: Synthetic oligonucleotide
  Sense strand starting at position 1007 of SEQ ID NO: 1241420
guauguaauuuccagacac

SEQ ID NO: 1271171 - RNA, 19 nt, Artificial Sequence
  Description of Artificial Sequence: Synthetic oligonucleotide
  Antisense strand to SEQ ID NO: 1271170
gugucuggaaauuacauac

SEQ ID NO: 1271172 - RNA, 19 nt, Artificial Sequence
  Description of Artificial Sequence: Synthetic oligonucleotide
  Sense strand starting at position 1254 of SEQ ID NO: 1241420
gcucacacaugguguuaca

SEQ ID NO: 1271173 - RNA, 19 nt, Artificial Sequence
  Description of Artificial Sequence: Synthetic oligonucleotide
  Antisense strand to SEQ ID NO: 1271172
uguaacaccaugugugagc

SEQ ID NO: 1271174 - RNA, 19 nt, Artificial Sequence
  Description of Artificial Sequence: Synthetic oligonucleotide
  Sense strand starting at position 1264 of SEQ ID NO: 1241420
gguguuacagaccgggaaa

SEQ ID NO: 1271175 - RNA, 19 nt, Artificial Sequence
  Description of Artificial Sequence: Synthetic oligonucleotide
  Antisense strand to SEQ ID NO: 1271174
uuucccggucuguaacacc

SEQ ID NO: 1271176 - RNA, 19 nt, Artificial Sequence
  Description of Artificial Sequence: Synthetic oligonucleotide
  Sense strand starting at position 1296 of SEQ ID NO: 1241420
aagggaaguccuggcugau

SEQ ID NO: 1271177 - RNA, 19 nt, Artificial Sequence
  Description of Artificial Sequence: Synthetic oligonucleotide
  Antisense strand to SEQ ID NO: 1271176
aucagccaggacuucccuu

SEQ ID NO: 1271178 - RNA, 19 nt, Artificial Sequence
  Description of Artificial Sequence: Synthetic oligonucleotide
  Sense strand starting at position 1299 of SEQ ID NO: 1241420
ggaaguccuggcugauaac

SEQ ID NO: 1271179 - RNA, 19 nt, Artificial Sequence
  Description of Artificial Sequence: Synthetic oligonucleotide
  Antisense strand to SEQ ID NO: 1271178
guuaucagccaggacuucc

SEQ ID NO: 1271180 - RNA, 19 nt, Artificial Sequence
  Description of Artificial Sequence: Synthetic oligonucleotide
  Sense strand starting at position 1300 of SEQ ID NO: 1241420
gaaguccuggcugauaacu

SEQ ID NO: 1271181 - RNA, 19 nt, Artificial Sequence
  Description of Artificial Sequence: Synthetic oligonucleotide
  Antisense strand to SEQ ID NO: 1271180
aguuaucagccaggacuuc

SEQ ID NO: 1271182 - RNA, 19 nt, Artificial Sequence
  Description of Artificial Sequence: Synthetic oligonucleotide
  Sense strand starting at position 1309 of SEQ ID NO: 1241420
gcugauaacucuuugugga

SEQ ID NO: 1271183 - RNA, 19 nt, Artificial Sequence
  Description of Artificial Sequence: Synthetic oligonucleotide
  Antisense strand to SEQ ID NO: 1271182
uccacaaagaguuaucagc

SEQ ID NO: 1271184 - RNA, 19 nt, Artificial Sequence
  Description of Artificial Sequence: Synthetic oligonucleotide
  Sense strand starting at position 1310 of SEQ ID NO: 1241420
cugauaacucuuuguggaa

SEQ ID NO: 1271185 - RNA, 19 nt, Artificial Sequence
  Description of Artificial Sequence: Synthetic oligonucleotide
  Antisense strand to SEQ ID NO: 1271184
uuccacaaagaguuaucag

SEQ ID NO: 1271186 - RNA, 19 nt, Artificial Sequence
  Description of Artificial Sequence: Synthetic oligonucleotide
  Sense strand starting at position 1311 of SEQ ID NO: 1241420
ugauaacucuuuguggaaa

SEQ ID NO: 1271187 - RNA, 19 nt, Artificial Sequence
  Description of Artificial Sequence: Synthetic oligonucleotide
  Antisense strand to SEQ ID NO: 1271186
uuuccacaaagaguuauca

SEQ ID NO: 1271188 - RNA, 19 nt, Artificial Sequence
  Description of Artificial Sequence: Synthetic oligonucleotide
  Sense strand starting at position 1312 of SEQ ID NO: 1241420
gauaacucuuuguggaaac

SEQ ID NO: 1271189 - RNA, 19 nt, Artificial Sequence
  Description of Artificial Sequence: Synthetic oligonucleotide
  Antisense strand to SEQ ID NO: 1271188
guuuccacaaagaguuauc

SEQ ID NO: 1271190 - RNA, 19 nt, Artificial Sequence
  Description of Artificial Sequence: Synthetic oligonucleotide
  Sense strand starting at position 1313 of SEQ ID NO: 1241420
auaacucuuuguggaaaca

SEQ ID NO: 1271191 - RNA, 19 nt, Artificial Sequence
  Description of Artificial Sequence: Synthetic oligonucleotide
  Antisense strand to SEQ ID NO: 1271190
uguuuccacaaagaguuau

SEQ ID NO: 1271192 - RNA, 19 nt, Artificial Sequence
  Description of Artificial Sequence: Synthetic oligonucleotide
  Sense strand starting at position 1414 of SEQ ID NO: 1241420
ggccuaaggaagugucacu

SEQ ID NO: 1271193 - RNA, 19 nt, Artificial Sequence
  Description of Artificial Sequence: Synthetic oligonucleotide
  Antisense strand to SEQ ID NO: 1271192
agugacacuuccuuaggcc

SEQ ID NO: 1271194 - RNA, 19 nt, Artificial Sequence
  Description of Artificial Sequence: Synthetic oligonucleotide
  Sense strand starting at position 1759 of SEQ ID NO: 1241420
gcgugacgcucuugccaaa

SEQ ID NO: 1271195 - RNA, 19 nt, Artificial Sequence
  Description of Artificial Sequence: Synthetic oligonucleotide
  Antisense strand to SEQ ID NO: 1271194
uuuggcaagagcgucacgc

SEQ ID NO: 1271196 - RNA, 19 nt, Artificial Sequence
  Description of Artificial Sequence: Synthetic oligonucleotide
  Sense strand starting at position 1762 of SEQ ID NO: 1241420
ugacgcucuugccaaaguu

SEQ ID NO: 1271197 - RNA, 19 nt, Artificial Sequence
  Description of Artificial Sequence: Synthetic oligonucleotide
  Antisense strand to SEQ ID NO: 1271196
aacuuuggcaagagcguca

SEQ ID NO: 1271198 - RNA, 19 nt, Artificial Sequence
  Description of Artificial Sequence: Synthetic oligonucleotide
  Sense strand starting at position 2623 of SEQ ID NO: 1241420
ccacuuuaggucuaacugu

SEQ ID NO: 1271199 - RNA, 19 nt, Artificial Sequence
  Description of Artificial Sequence: Synthetic oligonucleotide
  Antisense strand to SEQ ID NO: 1271198
acaguuagaccuaaagugg

SEQ ID NO: 1271200 - RNA, 19 nt, Artificial Sequence
  Description of Artificial Sequence: Synthetic oligonucleotide
  Sense strand starting at position 2847 of SEQ ID NO: 1241420
ggaacucagcuccggaauu

SEQ ID NO: 1271201 - RNA, 19 nt, Artificial Sequence
  Description of Artificial Sequence: Synthetic oligonucleotide
  Antisense strand to SEQ ID NO: 1271200
aauuccggagcugaguucc

SEQ ID NO: 1271202 - RNA, 19 nt, Artificial Sequence
  Description of Artificial Sequence: Synthetic oligonucleotide
  Sense strand starting at position 2848 of SEQ ID NO: 1241420
gaacucagcuccggaauua

SEQ ID NO: 1271203 - RNA, 19 nt, Artificial Sequence
  Description of Artificial Sequence: Synthetic oligonucleotide
  Antisense strand to SEQ ID NO: 1271202
uaauuccggagcugaguuc

SEQ ID NO: 1271204 - RNA, 19 nt, Artificial Sequence
  Description of Artificial Sequence: Synthetic oligonucleotide
  Sense strand starting at position 2859 of SEQ ID NO: 1241420
cggaauuaauugcuuguuu

SEQ ID NO: 1271205 - RNA, 19 nt, Artificial Sequence
  Description of Artificial Sequence: Synthetic oligonucleotide
  Antisense strand to SEQ ID NO: 1271204
aaacaagcaauuaauuccg

SEQ ID NO: 1271206 - RNA, 19 nt, Artificial Sequence
  Description of Artificial Sequence: Synthetic oligonucleotide
  Sense strand starting at position 2861 of SEQ ID NO: 1241420
gaauuaauugcuuguuugu

SEQ ID NO: 1271207 - RNA, 19 nt, Artificial Sequence
  Description of Artificial Sequence: Synthetic oligonucleotide
  Antisense strand to SEQ ID NO: 1271206
acaaacaagcaauuaauuc

SEQ ID NO: 1271208 - RNA, 19 nt, Artificial Sequence
  Description of Artificial Sequence: Synthetic oligonucleotide
  Sense strand starting at position 3396 of SEQ ID NO: 1241420
cacucuuucugagauccgu

SEQ ID NO: 1271209 - RNA, 19 nt, Artificial Sequence
  Description of Artificial Sequence: Synthetic oligonucleotide
  Antisense strand to SEQ ID NO: 1271208
acggaucucagaaagagug

SEQ ID NO: 1271210 - RNA, 19 nt, Artificial Sequence
  Description of Artificial Sequence: Synthetic oligonucleotide
  Sense strand starting at position 3402 of SEQ ID NO: 1241420
uucugagauccguaagccu

SEQ ID NO: 1271211 - RNA, 19 nt, Artificial Sequence
  Description of Artificial Sequence: Synthetic oligonucleotide
  Antisense strand to SEQ ID NO: 1271210
aggcuuacggaucucagaa

SEQ ID NO: 1271212 - RNA, 19 nt, Artificial Sequence
  Description of Artificial Sequence: Synthetic oligonucleotide
  Sense strand starting at position 3750 of SEQ ID NO: 1241420
aucccauauccgcagaaca

SEQ ID NO: 1271213 - RNA, 19 nt, Artificial Sequence
  Description of Artificial Sequence: Synthetic oligonucleotide
  Antisense strand to SEQ ID NO: 1271212
uguucugcggauaugggau

SEQ ID NO: 1271214 - RNA, 19 nt, Artificial Sequence
  Description of Artificial Sequence: Synthetic oligonucleotide
  Sense strand starting at position 120 of SEQ ID NO: 1241421
gacugcaguuauuugcuau

SEQ ID NO: 1271215 - RNA, 19 nt, Artificial Sequence
  Description of Artificial Sequence: Synthetic oligonucleotide
  Antisense strand to SEQ ID NO: 1271214
auagcaaauaacugcaguc

SEQ ID NO: 1271216 - RNA, 19 nt, Artificial Sequence
  Description of Artificial Sequence: Synthetic oligonucleotide
  Sense strand starting at position 123 of SEQ ID NO: 1241421
ugcaguuauuugcuaugaa

SEQ ID NO: 1271217 - RNA, 19 nt, Artificial Sequence
  Description of Artificial Sequence: Synthetic oligonucleotide
  Antisense strand to SEQ ID NO: 1271216
uucauagcaaauaacugca

SEQ ID NO: 1271218 - RNA, 19 nt, Artificial Sequence
  Description of Artificial Sequence: Synthetic oligonucleotide
  Sense strand starting at position 124 of SEQ ID NO: 1241421
gcaguuauuugcuaugaaa

SEQ ID NO: 1271219 - RNA, 19 nt, Artificial Sequence
  Description of Artificial Sequence: Synthetic oligonucleotide
  Antisense strand to SEQ ID NO: 1271218
uuucauagcaaauaacugc

SEQ ID NO: 1271220 - RNA, 19 nt, Artificial Sequence
  Description of Artificial Sequence: Synthetic oligonucleotide
  Sense strand starting at position 127 of SEQ ID NO: 1241421
guuauuugcuaugaaauac

SEQ ID NO: 1271221 - RNA, 19 nt, Artificial Sequence
  Description of Artificial Sequence: Synthetic oligonucleotide
  Antisense strand to SEQ ID NO: 1271220
guauuucauagcaaauaac

SEQ ID NO: 1271222 - RNA, 19 nt, Artificial Sequence
  Description of Artificial Sequence: Synthetic oligonucleotide
  Sense strand starting at position 197 of SEQ ID NO: 1241421
gauaaacgcuguccagagu

SEQ ID NO: 1271223 - RNA, 19 nt, Artificial Sequence
  Description of Artificial Sequence: Synthetic oligonucleotide
  Antisense strand to SEQ ID NO: 1271222
acucuggacagcguuuauc

SEQ ID NO: 1271224 - RNA, 19 nt, Artificial Sequence
  Description of Artificial Sequence: Synthetic oligonucleotide
  Sense strand starting at position 208 of SEQ ID NO: 1241421
uccagaguccugugcaugu

SEQ ID NO: 1271225 - RNA, 19 nt, Artificial Sequence
  Description of Artificial Sequence: Synthetic oligonucleotide
  Antisense strand to SEQ ID NO: 1271224
acaugcacaggacucugga

SEQ ID NO: 1271226 - RNA, 19 nt, Artificial Sequence
  Description of Artificial Sequence: Synthetic oligonucleotide
  Sense strand starting at position 363 of SEQ ID NO: 1241421
gagagacacuggcucuuua

SEQ ID NO: 1271227 - RNA, 19 nt, Artificial Sequence
  Description of Artificial Sequence: Synthetic oligonucleotide
  Antisense strand to SEQ ID NO: 1271226
uaaagagccagugucucuc

SEQ ID NO: 1271228 - RNA, 19 nt, Artificial Sequence
  Description of Artificial Sequence: Synthetic oligonucleotide
  Sense strand starting at position 367 of SEQ ID NO: 1241421
gacacuggcucuuuagagu

SEQ ID NO: 1271229 - RNA, 19 nt, Artificial Sequence
  Description of Artificial Sequence: Synthetic oligonucleotide
  Antisense strand to SEQ ID NO: 1271228
acucuaaagagccaguguc

SEQ ID NO: 1271230 - RNA, 19 nt, Artificial Sequence
  Description of Artificial Sequence: Synthetic oligonucleotide
  Sense strand starting at position 438 of SEQ ID NO: 1241421
guaucauuguauuccuaca

SEQ ID NO: 1271231 - RNA, 19 nt, Artificial Sequence
  Description of Artificial Sequence: Synthetic oligonucleotide
  Antisense strand to SEQ ID NO: 1271230
uguaggaauacaaugauac

SEQ ID NO: 1271232 - RNA, 19 nt, Artificial Sequence
  Description of Artificial Sequence: Synthetic oligonucleotide
  Sense strand starting at position 507 of SEQ ID NO: 1241421
gcugacaaucccugaaaga

SEQ ID NO: 1271233 - RNA, 19 nt, Artificial Sequence
  Description of Artificial Sequence: Synthetic oligonucleotide
  Antisense strand to SEQ ID NO: 1271232
ucuuucagggauugucagc

SEQ ID NO: 1271234 - RNA, 19 nt, Artificial Sequence
  Description of Artificial Sequence: Synthetic oligonucleotide
  Sense strand starting at position 528 of SEQ ID NO: 1241421
caaggccaugucuguaaua

SEQ ID NO: 1271235 - RNA, 19 nt, Artificial Sequence
  Description of Artificial Sequence: Synthetic oligonucleotide
  Antisense strand to SEQ ID NO: 1271234
uauuacagacauggccuug

SEQ ID NO: 1271236 - RNA, 19 nt, Artificial Sequence
  Description of Artificial Sequence: Synthetic oligonucleotide
  Sense strand starting at position 529 of SEQ ID NO: 1241421
aaggccaugucuguaauau

SEQ ID NO: 1271237 - RNA, 19 nt, Artificial Sequence
  Description of Artificial Sequence: Synthetic oligonucleotide
  Antisense strand to SEQ ID NO: 1271236
auauuacagacauggccuu

SEQ ID NO: 1271238 - RNA, 19 nt, Artificial Sequence
  Description of Artificial Sequence: Synthetic oligonucleotide
  Sense strand starting at position 530 of SEQ ID NO: 1241421
aggccaugucuguaauaua

SEQ ID NO: 1271239 - RNA, 19 nt, Artificial Sequence
  Description of Artificial Sequence: Synthetic oligonucleotide
  Antisense strand to SEQ ID NO: 1271238
uauauuacagacauggccu

SEQ ID NO: 1271240 - RNA, 19 nt, Artificial Sequence
  Description of Artificial Sequence: Synthetic oligonucleotide
  Sense strand starting at position 533 of SEQ ID NO: 1241421
ccaugucuguaauauaacu

SEQ ID NO: 1271241 - RNA, 19 nt, Artificial Sequence
  Description of Artificial Sequence: Synthetic oligonucleotide
  Antisense strand to SEQ ID NO: 1271240
aguuauauuacagacaugg

SEQ ID NO: 1271242 - RNA, 19 nt, Artificial Sequence
  Description of Artificial Sequence: Synthetic oligonucleotide
  Sense strand starting at position 552 of SEQ ID NO: 1241421
ucaggagguucuuccaguu

SEQ ID NO: 1271243 - RNA, 19 nt, Artificial Sequence
  Description of Artificial Sequence: Synthetic oligonucleotide
  Antisense strand to SEQ ID NO: 1271242
aacuggaagaaccuccuga

SEQ ID NO: 1271244 - RNA, 19 nt, Artificial Sequence
  Description of Artificial Sequence: Synthetic oligonucleotide
  Sense strand starting at position 596 of SEQ ID NO: 1241421
gugcaauguauuccgagcu

SEQ ID NO: 1271245 - RNA, 19 nt, Artificial Sequence
  Description of Artificial Sequence: Synthetic oligonucleotide
  Antisense strand to SEQ ID NO: 1271244
agcucggaauacauugcac

SEQ ID NO: 1271246 - RNA, 19 nt, Artificial Sequence
  Description of Artificial Sequence: Synthetic oligonucleotide
  Sense strand starting at position 609 of SEQ ID NO: 1241421
cgagcugauucugaucaau

SEQ ID NO: 1271247 - RNA, 19 nt, Artificial Sequence
  Description of Artificial Sequence: Synthetic oligonucleotide
  Antisense strand to SEQ ID NO: 1271246
auugaucagaaucagcucg

SEQ ID NO: 1271248 - RNA, 19 nt, Artificial Sequence
  Description of Artificial Sequence: Synthetic oligonucleotide
  Sense strand starting at position 620 of SEQ ID NO: 1241421
ugaucaauggcuuagucau

SEQ ID NO: 1271249 - RNA, 19 nt, Artificial Sequence
  Description of Artificial Sequence: Synthetic oligonucleotide
  Antisense strand to SEQ ID NO: 1271248
augacuaagccauugauca

SEQ ID NO: 1271250 - RNA, 19 nt, Artificial Sequence
  Description of Artificial Sequence: Synthetic oligonucleotide
  Sense strand starting at position 631 of SEQ ID NO: 1241421
uuagucaugccguaccaaa

SEQ ID NO: 1271251 - RNA, 19 nt, Artificial Sequence
  Description of Artificial Sequence: Synthetic oligonucleotide
  Antisense strand to SEQ ID NO: 1271250
uuugguacggcaugacuaa

SEQ ID NO: 1271252 - RNA, 19 nt, Artificial Sequence
  Description of Artificial Sequence: Synthetic oligonucleotide
  Sense strand starting at position 663 of SEQ ID NO: 1241421
ggauuuaacuaaugcaaag

SEQ ID NO: 1271253 - RNA, 19 nt, Artificial Sequence
  Description of Artificial Sequence: Synthetic oligonucleotide
  Antisense strand to SEQ ID NO: 1271252
cuuugcauuaguuaaaucc

SEQ ID NO: 1271254 - RNA, 19 nt, Artificial Sequence
  Description of Artificial Sequence: Synthetic oligonucleotide
  Sense strand starting at position 875 of SEQ ID NO: 1241421
accuacaaauguuaaguua

SEQ ID NO: 1271255 - RNA, 19 nt, Artificial Sequence
  Description of Artificial Sequence: Synthetic oligonucleotide
  Antisense strand to SEQ ID NO: 1271254
uaacuuaacauuuguaggu

SEQ ID NO: 1271256 - RNA, 19 nt, Artificial Sequence
  Description of Artificial Sequence: Synthetic oligonucleotide
  Sense strand starting at position 1013 of SEQ ID NO: 1241421
ucaaguuuaguuggagcaa

SEQ ID NO: 1271257 - RNA, 19 nt, Artificial Sequence
  Description of Artificial Sequence: Synthetic oligonucleotide
  Antisense strand to SEQ ID NO: 1271256
uugcuccaacuaaacuuga

SEQ ID NO: 1271258 - RNA, 19 nt, Artificial Sequence
  Description of Artificial Sequence: Synthetic oligonucleotide
  Sense strand starting at position 1055 of SEQ ID NO: 1241421
gccugaaacguuucgcauc

SEQ ID NO: 1271259 - RNA, 19 nt, Artificial Sequence
  Description of Artificial Sequence: Synthetic oligonucleotide
  Antisense strand to SEQ ID NO: 1271258
gaugcgaaacguuucaggc

SEQ ID NO: 1271260 - RNA, 19 nt, Artificial Sequence
  Description of Artificial Sequence: Synthetic oligonucleotide
  Sense strand starting at position 1060 of SEQ ID NO: 1241421
aaacguuucgcaucugguu

SEQ ID NO: 1271261 - RNA, 19 nt, Artificial Sequence
  Description of Artificial Sequence: Synthetic oligonucleotide
  Antisense strand to SEQ ID NO: 1271260
aaccagaugcgaaacguuu

SEQ ID NO: 1271262 - RNA, 19 nt, Artificial Sequence
  Description of Artificial Sequence: Synthetic oligonucleotide
  Sense strand starting at position 1061 of SEQ ID NO: 1241421
aacguuucgcaucugguua

SEQ ID NO: 1271263 - RNA, 19 nt, Artificial Sequence
  Description of Artificial Sequence: Synthetic oligonucleotide
  Antisense strand to SEQ ID NO: 1271262
uaaccagaugcgaaacguu

SEQ ID NO: 1271264 - RNA, 19 nt, Artificial Sequence
  Description of Artificial Sequence: Synthetic oligonucleotide
  Sense strand starting at position 1065 of SEQ ID NO: 1241421
uuucgcaucugguuacuga

SEQ ID NO: 1271265 - RNA, 19 nt, Artificial Sequence
  Description of Artificial Sequence: Synthetic oligonucleotide
  Antisense strand to SEQ ID NO: 1271264
ucaguaaccagaugcgaaa

SEQ ID NO: 1271266 - RNA, 19 nt, Artificial Sequence
  Description of Artificial Sequence: Synthetic oligonucleotide
  Sense strand starting at position 1066 of SEQ ID NO: 1241421
uucgcaucugguuacugaa

SEQ ID NO: 1271267 - RNA, 19 nt, Artificial Sequence
  Description of Artificial Sequence: Synthetic oligonucleotide
  Antisense strand to SEQ ID NO: 1271266
uucaguaaccagaugcgaa

SEQ ID NO: 1271268 - RNA, 19 nt, Artificial Sequence
  Description of Artificial Sequence: Synthetic oligonucleotide
  Sense strand starting at position 2134 of SEQ ID NO: 1241421
gcgagaaaguuguuugggu

SEQ ID NO: 1271269 - RNA, 19 nt, Artificial Sequence
  Description of Artificial Sequence: Synthetic oligonucleotide
  Antisense strand to SEQ ID NO: 1271268
acccaaacaacuuucucgc

SEQ ID NO: 1271270 - RNA, 19 nt, Artificial Sequence
  Description of Artificial Sequence: Synthetic oligonucleotide
  Sense strand starting at position 2135 of SEQ ID NO: 1241421
cgagaaaguuguuugggua

SEQ ID NO: 1271271 - RNA, 19 nt, Artificial Sequence
  Description of Artificial Sequence: Synthetic oligonucleotide
  Antisense strand to SEQ ID NO: 1271270
uacccaaacaacuuucucg

SEQ ID NO: 1271272 - RNA, 19 nt, Artificial Sequence
  Description of Artificial Sequence: Synthetic oligonucleotide
  Sense strand starting at position 2136 of SEQ ID NO: 1241421
gagaaaguuguuuggguau

SEQ ID NO: 1271273 - RNA, 19 nt, Artificial Sequence
  Description of Artificial Sequence: Synthetic oligonucleotide
  Antisense strand to SEQ ID NO: 1271272
auacccaaacaacuuucuc

SEQ ID NO: 1271274 - RNA, 19 nt, Artificial Sequence
  Description of Artificial Sequence: Synthetic oligonucleotide
  Sense strand starting at position 2622 of SEQ ID NO: 1241421
cucguaucuguacgaggaa

SEQ ID NO: 1271275 - RNA, 19 nt, Artificial Sequence
  Description of Artificial Sequence: Synthetic oligonucleotide
  Antisense strand to SEQ ID NO: 1271274
uuccucguacagauacgag

SEQ ID NO: 1271276 - RNA, 19 nt, Artificial Sequence
  Description of Artificial Sequence: Synthetic oligonucleotide
  Sense strand starting at position 2625 of SEQ ID NO: 1241421
guaucuguacgaggaaacu

SEQ ID NO: 1271277 - RNA, 19 nt, Artificial Sequence
  Description of Artificial Sequence: Synthetic oligonucleotide
  Antisense strand to SEQ ID NO: 1271276
aguuuccucguacagauac

SEQ ID NO: 1271278 - RNA, 19 nt, Artificial Sequence
  Description of Artificial Sequence: Synthetic oligonucleotide
  Sense strand starting at position 3038 of SEQ ID NO: 1241421
guuccuuuccgauguuauc

SEQ ID NO: 1271279 - RNA, 19 nt, Artificial Sequence
  Description of Artificial Sequence: Synthetic oligonucleotide
  Antisense strand to SEQ ID NO: 1271278
gauaacaucggaaaggaac

SEQ ID NO: 1271280 - RNA, 19 nt, Artificial Sequence
  Description of Artificial Sequence: Synthetic oligonucleotide
  Sense strand starting at position 3074 of SEQ ID NO: 1241421
cuuugugaacccugcaguu

SEQ ID NO: 1271281 - RNA, 19 nt, Artificial Sequence
  Description of Artificial Sequence: Synthetic oligonucleotide
  Antisense strand to SEQ ID NO: 1271280
aacugcaggguucacaaag

SEQ ID NO: 1271282 - RNA, 19 nt, Artificial Sequence
  Description of Artificial Sequence: Synthetic oligonucleotide
  Sense strand starting at position 3289 of SEQ ID NO: 1241421
cuuggaugucacuaaguuc

SEQ ID NO: 1271283 - RNA, 19 nt, Artificial Sequence
  Description of Artificial Sequence: Synthetic oligonucleotide
  Antisense strand to SEQ ID NO: 1271282
gaacuuagugacauccaag

SEQ ID NO: 1271284 - RNA, 19 nt, Artificial Sequence
  Description of Artificial Sequence: Synthetic oligonucleotide
  Sense strand starting at position 3809 of SEQ ID NO: 1241421
gcuuuauuaccuuguucuu

SEQ ID NO: 1271285 - RNA, 19 nt, Artificial Sequence
  Description of Artificial Sequence: Synthetic oligonucleotide
  Antisense strand to SEQ ID NO: 1271284
aagaacaagguaauaaagc

SEQ ID NO: 1271286 - RNA, 19 nt, Artificial Sequence
  Description of Artificial Sequence: Synthetic oligonucleotide
  Sense strand starting at position 3845 of SEQ ID NO: 1241421
auuuguugcucucccauga

SEQ ID NO: 1271287 - RNA, 19 nt, Artificial Sequence
  Description of Artificial Sequence: Synthetic oligonucleotide
  Antisense strand to SEQ ID NO: 1271286
ucaugggagagcaacaaau

SEQ ID NO: 1271288 - RNA, 19 nt, Artificial Sequence
  Description of Artificial Sequence: Synthetic oligonucleotide
  Sense strand starting at position 3926 of SEQ ID NO: 1241421
uuuacauuccagugaggag

SEQ ID NO: 1271289 - RNA, 19 nt, Artificial Sequence
  Description of Artificial Sequence: Synthetic oligonucleotide
  Antisense strand to SEQ ID NO: 1271288
cuccucacuggaauguaaa

SEQ ID NO: 1271290 - RNA, 19 nt, Artificial Sequence
  Description of Artificial Sequence: Synthetic oligonucleotide
  Sense strand starting at position 3973 of SEQ ID NO: 1241421
ccggaucuugccgagauga

SEQ ID NO: 1271291 - RNA, 19 nt, Artificial Sequence
  Description of Artificial Sequence: Synthetic oligonucleotide
  Antisense strand to SEQ ID NO: 1271290
ucaucucggcaagauccgg

SEQ ID NO: 1271292 - RNA, 19 nt, Artificial Sequence
  Description of Artificial Sequence: Synthetic oligonucleotide
  Sense strand starting at position 3975 of SEQ ID NO: 1241421
ggaucuugccgagaugaug

SEQ ID NO: 1271293 - RNA, 19 nt, Artificial Sequence
  Description of Artificial Sequence: Synthetic oligonucleotide
  Antisense strand to SEQ ID NO: 1271292
caucaucucggcaagaucc

SEQ ID NO: 1271294 - RNA, 19 nt, Artificial Sequence
  Description of Artificial Sequence: Synthetic oligonucleotide
  Sense strand starting at position 215 of SEQ ID NO: 1241422
ugaaauuagguauguacag

SEQ ID NO: 1271295 - RNA, 19 nt, Artificial Sequence
  Description of Artificial Sequence: Synthetic oligonucleotide
  Antisense strand to SEQ ID NO: 1271294
cuguacauaccuaauuuca

SEQ ID NO: 1271296 - RNA, 19 nt, Artificial Sequence
  Description of Artificial Sequence: Synthetic oligonucleotide
  Sense strand starting at position 216 of SEQ ID NO: 1241422
gaaauuagguauguacagu

SEQ ID NO: 1271297 - RNA, 19 nt, Artificial Sequence
  Description of Artificial Sequence: Synthetic oligonucleotide
  Antisense strand to SEQ ID NO: 1271296
acuguacauaccuaauuuc

SEQ ID NO: 1271298 - RNA, 19 nt, Artificial Sequence
  Description of Artificial Sequence: Synthetic oligonucleotide
  Sense strand starting at position 661 of SEQ ID NO: 1241422
cgaaguauucugcaauacu

SEQ ID NO: 1271299 - RNA, 19 nt, Artificial Sequence
  Description of Artificial Sequence: Synthetic oligonucleotide
  Antisense strand to SEQ ID NO: 1271298
aguauugcagaauacuucg

SEQ ID NO: 1271300 - RNA, 19 nt, Artificial Sequence
  Description of Artificial Sequence: Synthetic oligonucleotide
  Sense strand starting at position 689 of SEQ ID NO: 1241422
gccuguauguuggucauuu

SEQ ID NO: 1271301 - RNA, 19 nt, Artificial Sequence
  Description of Artificial Sequence: Synthetic oligonucleotide
  Antisense strand to SEQ ID NO: 1271300
aaaugaccaacauacaggc

SEQ ID NO: 1271302 - RNA, 19 nt, Artificial Sequence
  Description of Artificial Sequence: Synthetic oligonucleotide
  Sense strand starting at position 730 of SEQ ID NO: 1241422
aggucugucacauaauggu

SEQ ID NO: 1271303 - RNA, 19 nt, Artificial Sequence
  Description of Artificial Sequence: Synthetic oligonucleotide
  Antisense strand to SEQ ID NO: 1271302
accauuaugugacagaccu

SEQ ID NO: 1271304 - RNA, 19 nt, Artificial Sequence
  Description of Artificial Sequence: Synthetic oligonucleotide
  Sense strand starting at position 755 of SEQ ID NO: 1241422
acagaagauguagguucua

SEQ ID NO: 1271305 - RNA, 19 nt, Artificial Sequence
  Description of Artificial Sequence: Synthetic oligonucleotide
  Antisense strand to SEQ ID NO: 1271304
uagaaccuacaucuucugu

SEQ ID NO: 1271306 - RNA, 19 nt, Artificial Sequence
  Description of Artificial Sequence: Synthetic oligonucleotide
  Sense strand starting at position 768 of SEQ ID NO: 1241422
guucuacuaucaguagaac

SEQ ID NO: 1271307 - RNA, 19 nt, Artificial Sequence
  Description of Artificial Sequence: Synthetic oligonucleotide
  Antisense strand to SEQ ID NO: 1271306
guucuacugauaguagaac

SEQ ID NO: 1271308 - RNA, 19 nt, Artificial Sequence
  Description of Artificial Sequence: Synthetic oligonucleotide
  Sense strand starting at position 780 of SEQ ID NO: 1241422
guagaacuuccagauggcu

SEQ ID NO: 1271309 - RNA, 19 nt, Artificial Sequence
  Description of Artificial Sequence: Synthetic oligonucleotide
  Antisense strand to SEQ ID NO: 1271308
agccaucuggaaguucuac

SEQ ID NO: 1271310 - RNA, 19 nt, Artificial Sequence
  Description of Artificial Sequence: Synthetic oligonucleotide
  Sense strand starting at position 817 of SEQ ID NO: 1241422
aacuaagaggguuggcaua

SEQ ID NO: 1271311 - RNA, 19 nt, Artificial Sequence
  Description of Artificial Sequence: Synthetic oligonucleotide
  Antisense strand to SEQ ID NO: 1271310
uaugccaacccucuuaguu

SEQ ID NO: 1271312 - RNA, 19 nt, Artificial Sequence
  Description of Artificial Sequence: Synthetic oligonucleotide
  Sense strand starting at position 819 of SEQ ID NO: 1241422
cuaagaggguuggcauaua

SEQ ID NO: 1271313 - RNA, 19 nt, Artificial Sequence
  Description of Artificial Sequence: Synthetic oligonucleotide
  Antisense strand to SEQ ID NO: 1271312
uauaugccaacccucuuag

SEQ ID NO: 1271314 - RNA, 19 nt, Artificial Sequence
  Description of Artificial Sequence: Synthetic oligonucleotide
  Sense strand starting at position 824 of SEQ ID NO: 1241422
aggguuggcauauaguauu

SEQ ID NO: 1271315 - RNA, 19 nt, Artificial Sequence
  Description of Artificial Sequence: Synthetic oligonucleotide
  Antisense strand to SEQ ID NO: 1271314
aauacuauaugccaacccu

SEQ ID NO: 1271316 - RNA, 19 nt, Artificial Sequence
  Description of Artificial Sequence: Synthetic oligonucleotide
  Sense strand starting at position 874 of SEQ ID NO: 1241422
auaauucugugauuaugga

SEQ ID NO: 1271317 - RNA, 19 nt, Artificial Sequence
  Description of Artificial Sequence: Synthetic oligonucleotide
  Antisense strand to SEQ ID NO: 1271316
uccauaaucacagaauuau

SEQ ID NO: 1271318 - RNA, 19 nt, Artificial Sequence
  Description of Artificial Sequence: Synthetic oligonucleotide
  Sense strand starting at position 913 of SEQ ID NO: 1241422
ucaaaccuccauuguagua

SEQ ID NO: 1271319 - RNA, 19 nt, Artificial Sequence
  Description of Artificial Sequence: Synthetic oligonucleotide
  Antisense strand to SEQ ID NO: 1271318
uacuacaauggagguuuga

SEQ ID NO: 1271320 - RNA, 19 nt, Artificial Sequence
  Description of Artificial Sequence: Synthetic oligonucleotide
  Sense strand starting at position 1517 of SEQ ID NO: 1241422
gcuguaacugccuuugcau

SEQ ID NO: 1271321 - RNA, 19 nt, Artificial Sequence
  Description of Artificial Sequence: Synthetic oligonucleotide
  Antisense strand to SEQ ID NO: 1271320
augcaaaggcaguuacagc

SEQ ID NO: 1271322 - RNA, 19 nt, Artificial Sequence
  Description of Artificial Sequence: Synthetic oligonucleotide
  Sense strand starting at position 1551 of SEQ ID NO: 1241422
uacugaauugcuggcaaag

SEQ ID NO: 1271323 - RNA, 19 nt, Artificial Sequence
  Description of Artificial Sequence: Synthetic oligonucleotide
  Antisense strand to SEQ ID NO: 1271322
cuuugccagcaauucagua

SEQ ID NO: 1271324 - RNA, 19 nt, Artificial Sequence
  Description of Artificial Sequence: Synthetic oligonucleotide
  Sense strand starting at position 2198 of SEQ ID NO: 1241422
cucauuuaguagucagucu

SEQ ID NO: 1271325 - RNA, 19 nt, Artificial Sequence
  Description of Artificial Sequence: Synthetic oligonucleotide
  Antisense strand to SEQ ID NO: 1271324
agacugacuacuaaaugag

SEQ ID NO: 1271326 - RNA, 19 nt, Artificial Sequence
  Description of Artificial Sequence: Synthetic oligonucleotide
  Sense strand starting at position 2217 of SEQ ID NO: 1241422
guagucagauuccuugauu

SEQ ID NO: 1271327 - RNA, 19 nt, Artificial Sequence
  Description of Artificial Sequence: Synthetic oligonucleotide
  Antisense strand to SEQ ID NO: 1271326
aaucaaggaaucugacuac

SEQ ID NO: 1271328 - RNA, 19 nt, Artificial Sequence
  Description of Artificial Sequence: Synthetic oligonucleotide
  Sense strand starting at position 2274 of SEQ ID NO: 1241422
ccguaauucguuguuaacg

SEQ ID NO: 1271329 - RNA, 19 nt, Artificial Sequence
  Description of Artificial Sequence: Synthetic oligonucleotide
  Antisense strand to SEQ ID NO: 1271328
cguuaacaacgaauuacgg

SEQ ID NO: 1271330 - RNA, 19 nt, Artificial Sequence
  Description of Artificial Sequence: Synthetic oligonucleotide
  Sense strand starting at position 2282 of SEQ ID NO: 1241422
cguuguuaacgccucuuaa

SEQ ID NO: 1271331 - RNA, 19 nt, Artificial Sequence
  Description of Artificial Sequence: Synthetic oligonucleotide
  Antisense strand to SEQ ID NO: 1271330
uuaagaggcguuaacaacg

SEQ ID NO: 1271332 - RNA, 19 nt, Artificial Sequence
  Description of Artificial Sequence: Synthetic oligonucleotide
  Sense strand starting at position 2347 of SEQ ID NO: 1241422
uugugccauuuguuuguua

SEQ ID NO: 1271333 - RNA, 19 nt, Artificial Sequence
  Description of Artificial Sequence: Synthetic oligonucleotide
  Antisense strand to SEQ ID NO: 1271332
uaacaaacaaauggcacaa

SEQ ID NO: 1271334 - RNA, 19 nt, Artificial Sequence
  Description of Artificial Sequence: Synthetic oligonucleotide
  Sense strand starting at position 2348 of SEQ ID NO: 1241422
ugugccauuuguuuguuau

SEQ ID NO: 1271335 - RNA, 19 nt, Artificial Sequence
  Description of Artificial Sequence: Synthetic oligonucleotide
  Antisense strand to SEQ ID NO: 1271334
auaacaaacaaauggcaca

SEQ ID NO: 1271336 - RNA, 19 nt, Artificial Sequence
  Description of Artificial Sequence: Synthetic oligonucleotide
  Sense strand starting at position 2349 of SEQ ID NO: 1241422
gugccauuuguuuguuaua

SEQ ID NO: 1271337 - RNA, 19 nt, Artificial Sequence
  Description of Artificial Sequence: Synthetic oligonucleotide
  Antisense strand to SEQ ID NO: 1271336
uauaacaaacaaauggcac

SEQ ID NO: 1271338 - RNA, 19 nt, Artificial Sequence
  Description of Artificial Sequence: Synthetic oligonucleotide
  Sense strand starting at position 2350 of SEQ ID NO: 1241422
ugccauuuguuuguuauau

SEQ ID NO: 1271339 - RNA, 19 nt, Artificial Sequence
  Description of Artificial Sequence: Synthetic oligonucleotide
  Antisense strand to SEQ ID NO: 1271338
auauaacaaacaaauggca

SEQ ID NO: 1271340 - RNA, 19 nt, Artificial Sequence
  Description of Artificial Sequence: Synthetic oligonucleotide
  Sense strand starting at position 2358 of SEQ ID NO: 1241422
guuuguuauauggauuagu

SEQ ID NO: 1271341 - RNA, 19 nt, Artificial Sequence
  Description of Artificial Sequence: Synthetic oligonucleotide
  Antisense strand to SEQ ID NO: 1271340
acuaauccauauaacaaac

SEQ ID NO: 1271342 - RNA, 19 nt, Artificial Sequence
  Description of Artificial Sequence: Synthetic oligonucleotide
  Sense strand starting at position 2565 of SEQ ID NO: 1241422
ucuggugcacuuuaaugau

SEQ ID NO: 1271343 - RNA, 19 nt, Artificial Sequence
  Description of Artificial Sequence: Synthetic oligonucleotide
  Antisense strand to SEQ ID NO: 1271342
aucauuaaagugcaccaga

SEQ ID NO: 1271344 - RNA, 19 nt, Artificial Sequence
  Description of Artificial Sequence: Synthetic oligonucleotide
  Sense strand starting at position 2786 of SEQ ID NO: 1241422
auucuuauugauggacaua

SEQ ID NO: 1271345 - RNA, 19 nt, Artificial Sequence
  Description of Artificial Sequence: Synthetic oligonucleotide
  Antisense strand to SEQ ID NO: 1271344
uauguccaucaauaagaau

SEQ ID NO: 1271346 - RNA, 19 nt, Artificial Sequence
  Description of Artificial Sequence: Synthetic oligonucleotide
  Sense strand starting at position 2852 of SEQ ID NO: 1241422
aaacguuaugcauauguua

SEQ ID NO: 1271347 - RNA, 19 nt, Artificial Sequence
  Description of Artificial Sequence: Synthetic oligonucleotide
  Antisense strand to SEQ ID NO: 1271346
uaacauaugcauaacguuu

SEQ ID NO: 1271348 - RNA, 19 nt, Artificial Sequence
  Description of Artificial Sequence: Synthetic oligonucleotide
  Sense strand starting at position 2884 of SEQ ID NO: 1241422
caagccuaucuuuggagua

SEQ ID NO: 1271349 - RNA, 19 nt, Artificial Sequence
  Description of Artificial Sequence: Synthetic oligonucleotide
  Antisense strand to SEQ ID NO: 1271348
uacuccaaagauaggcuug

SEQ ID NO: 1271350 - RNA, 19 nt, Artificial Sequence
  Description of Artificial Sequence: Synthetic oligonucleotide
  Sense strand starting at position 2889 of SEQ ID NO: 1241422
cuaucuuuggaguagaguu

SEQ ID NO: 1271351 - RNA, 19 nt, Artificial Sequence
  Description of Artificial Sequence: Synthetic oligonucleotide
  Antisense strand to SEQ ID NO: 1271350
aacucuacuccaaagauag

SEQ ID NO: 1271352 - RNA, 19 nt, Artificial Sequence
  Description of Artificial Sequence: Synthetic oligonucleotide
  Sense strand starting at position 2901 of SEQ ID NO: 1241422
uagaguucuagauguggaa

SEQ ID NO: 1271353 - RNA, 19 nt, Artificial Sequence
  Description of Artificial Sequence: Synthetic oligonucleotide
  Antisense strand to SEQ ID NO: 1271352
uuccacaucuagaacucua

SEQ ID NO: 1271354 - RNA, 19 nt, Artificial Sequence
  Description of Artificial Sequence: Synthetic oligonucleotide
  Sense strand starting at position 2903 of SEQ ID NO: 1241422
gaguucuagauguggaauu

SEQ ID NO: 1271355 - RNA, 19 nt, Artificial Sequence
  Description of Artificial Sequence: Synthetic oligonucleotide
  Antisense strand to SEQ ID NO: 1271354
aauuccacaucuagaacuc

SEQ ID NO: 1271356 - RNA, 19 nt, Artificial Sequence
  Description of Artificial Sequence: Synthetic oligonucleotide
  Sense strand starting at position 3218 of SEQ ID NO: 1241422
agagcaagguuccuuagaa

SEQ ID NO: 1271357 - RNA, 19 nt, Artificial Sequence
  Description of Artificial Sequence: Synthetic oligonucleotide
  Antisense strand to SEQ ID NO: 1271356
uucuaaggaaccuugcucu

SEQ ID NO: 1271358 - RNA, 19 nt, Artificial Sequence
  Description of Artificial Sequence: Synthetic oligonucleotide
  Sense strand starting at position 3219 of SEQ ID NO: 1241422
gagcaagguuccuuagaaa

SEQ ID NO: 1271359 - RNA, 19 nt, Artificial Sequence
  Description of Artificial Sequence: Synthetic oligonucleotide
  Antisense strand to SEQ ID NO: 1271358
uuucuaaggaaccuugcuc

SEQ ID NO: 1271360 - RNA, 19 nt, Artificial Sequence
  Description of Artificial Sequence: Synthetic oligonucleotide
  Sense strand starting at position 3441 of SEQ ID NO: 1241422
ggaaguguucuggagugau

SEQ ID NO: 1271361 - RNA, 19 nt, Artificial Sequence
  Description of Artificial Sequence: Synthetic oligonucleotide
  Antisense strand to SEQ ID NO: 1271360
aucacuccagaacacuucc

SEQ ID NO: 1271362 - RNA, 19 nt, Artificial Sequence
  Description of Artificial Sequence: Synthetic oligonucleotide
  Sense strand starting at position 3444 of SEQ ID NO: 1241422
aguguucuggagugauuaa

SEQ ID NO: 1271363 - RNA, 19 nt, Artificial Sequence
  Description of Artificial Sequence: Synthetic oligonucleotide
  Antisense strand to SEQ ID NO: 1271362
uuaaucacuccagaacacu

SEQ ID NO: 1271364 - RNA, 19 nt, Artificial Sequence
  Description of Artificial Sequence: Synthetic oligonucleotide
  Sense strand starting at position 3445 of SEQ ID NO: 1241422
guguucuggagugauuaaa

SEQ ID NO: 1271365 - RNA, 19 nt, Artificial Sequence
  Description of Artificial Sequence: Synthetic oligonucleotide
  Antisense strand to SEQ ID NO: 1271364
uuuaaucacuccagaacac

SEQ ID NO: 1271366 - RNA, 19 nt, Artificial Sequence
  Description of Artificial Sequence: Synthetic oligonucleotide
  Sense strand starting at position 3805 of SEQ ID NO: 1241422
aguaaagucuaaguuaaga

SEQ ID NO: 1271367 - RNA, 19 nt, Artificial Sequence
  Description of Artificial Sequence: Synthetic oligonucleotide
  Antisense strand to SEQ ID NO: 1271366
ucuuaacuuagacuuuacu

SEQ ID NO: 1271368 - RNA, 19 nt, Artificial Sequence
  Description of Artificial Sequence: Synthetic oligonucleotide
  Sense strand starting at position 3836 of SEQ ID NO: 1241422
acggaaguuguucaaggaa

SEQ ID NO: 1271369 - RNA, 19 nt, Artificial Sequence
  Description of Artificial Sequence: Synthetic oligonucleotide
  Antisense strand to SEQ ID NO: 1271368
uuccuugaacaacuuccgu

SEQ ID NO: 1271370 - RNA, 19 nt, Artificial Sequence
  Description of Artificial Sequence: Synthetic oligonucleotide
  Sense strand starting at position 3879 of SEQ ID NO: 1241422
caaggauaugccuaguuua

SEQ ID NO: 1271371 - RNA, 19 nt, Artificial Sequence
  Description of Artificial Sequence: Synthetic oligonucleotide
  Antisense strand to SEQ ID NO: 1271370
uaaacuaggcauauccuug

SEQ ID NO: 1271372 - RNA, 19 nt, Artificial Sequence
  Description of Artificial Sequence: Synthetic oligonucleotide
  Sense strand starting at position 3882 of SEQ ID NO: 1241422
ggauaugccuaguuuacca

SEQ ID NO: 1271373 - RNA, 19 nt, Artificial Sequence
  Description of Artificial Sequence: Synthetic oligonucleotide
  Antisense strand to SEQ ID NO: 1271372
ugguaaacuaggcauaucc

SEQ ID NO: 1271374 - RNA, 19 nt, Artificial Sequence
  Description of Artificial Sequence: Synthetic oligonucleotide
  Sense strand starting at position 10 of SEQ ID NO: 1241423
uuagaagugucauugacag

SEQ ID NO: 1271375 - RNA, 19 nt, Artificial Sequence
  Description of Artificial Sequence: Synthetic oligonucleotide
  Antisense strand to SEQ ID NO: 1271374
cugucaaugacacuucuaa

SEQ ID NO: 1271376 - RNA, 19 nt, Artificial Sequence
  Description of Artificial Sequence: Synthetic oligonucleotide
  Sense strand starting at position 12 of SEQ ID NO: 1241423
agaagugucauugacaggu

SEQ ID NO: 1271377 - RNA, 19 nt, Artificial Sequence
  Description of Artificial Sequence: Synthetic oligonucleotide
  Antisense strand to SEQ ID NO: 1271376
accugucaaugacacuucu

SEQ ID NO: 1271378 - RNA, 19 nt, Artificial Sequence
  Description of Artificial Sequence: Synthetic oligonucleotide
  Sense strand starting at position 16 of SEQ ID NO: 1241423
gugucauugacagguuucu

SEQ ID NO: 1271379 - RNA, 19 nt, Artificial Sequence
  Description of Artificial Sequence: Synthetic oligonucleotide
  Antisense strand to SEQ ID NO: 1271378
agaaaccugucaaugacac

SEQ ID NO: 1271380 - RNA, 19 nt, Artificial Sequence
  Description of Artificial Sequence: Synthetic oligonucleotide
  Sense strand starting at position 128 of SEQ ID NO: 1241423
uugagacaguuuccuucuu

SEQ ID NO: 1271381 - RNA, 19 nt, Artificial Sequence
  Description of Artificial Sequence: Synthetic oligonucleotide
  Antisense strand to SEQ ID NO: 1271380
aagaaggaaacugucucaa

SEQ ID NO: 1271382 - RNA, 19 nt, Artificial Sequence
  Description of Artificial Sequence: Synthetic oligonucleotide
  Sense strand starting at position 130 of SEQ ID NO: 1241423
gagacaguuuccuucuugu

SEQ ID NO: 1271383 - RNA, 19 nt, Artificial Sequence
  Description of Artificial Sequence: Synthetic oligonucleotide
  Antisense strand to SEQ ID NO: 1271382
acaagaaggaaacugucuc

SEQ ID NO: 1271384 - RNA, 19 nt, Artificial Sequence
  Description of Artificial Sequence: Synthetic oligonucleotide
  Sense strand starting at position 555 of SEQ ID NO: 1241423
gucaacuaugaucaaguca

SEQ ID NO: 1271385 - RNA, 19 nt, Artificial Sequence
  Description of Artificial Sequence: Synthetic oligonucleotide
  Antisense strand to SEQ ID NO: 1271384
ugacuugaucauaguugac

SEQ ID NO: 1271386 - RNA, 19 nt, Artificial Sequence
  Description of Artificial Sequence: Synthetic oligonucleotide
  Sense strand starting at position 566 of SEQ ID NO: 1241423
ucaagucagcuguaccaua

SEQ ID NO: 1271387 - RNA, 19 nt, Artificial Sequence
  Description of Artificial Sequence: Synthetic oligonucleotide
  Antisense strand to SEQ ID NO: 1271386
uaugguacagcugacuuga

SEQ ID NO: 1271388 - RNA, 19 nt, Artificial Sequence
  Description of Artificial Sequence: Synthetic oligonucleotide
  Sense strand starting at position 571 of SEQ ID NO: 1241423
ucagcuguaccauaagcua

SEQ ID NO: 1271389 - RNA, 19 nt, Artificial Sequence
  Description of Artificial Sequence: Synthetic oligonucleotide
  Antisense strand to SEQ ID NO: 1271388
uagcuuaugguacagcuga

SEQ ID NO: 1271390 - RNA, 19 nt, Artificial Sequence
  Description of Artificial Sequence: Synthetic oligonucleotide
  Sense strand starting at position 709 of SEQ ID NO: 1241423
cuagauuuccgagguuagc

SEQ ID NO: 1271391 - RNA, 19 nt, Artificial Sequence
  Description of Artificial Sequence: Synthetic oligonucleotide
  Antisense strand to SEQ ID NO: 1271390
gcuaaccucggaaaucuag

SEQ ID NO: 1271392 - RNA, 19 nt, Artificial Sequence
  Description of Artificial Sequence: Synthetic oligonucleotide
  Sense strand starting at position 763 of SEQ ID NO: 1241423
cuaaucacguuguuuauaa

SEQ ID NO: 1271393 - RNA, 19 nt, Artificial Sequence
  Description of Artificial Sequence: Synthetic oligonucleotide
  Antisense strand to SEQ ID NO: 1271392
uuauaaacaacgugauuag

SEQ ID NO: 1271394 - RNA, 19 nt, Artificial Sequence
  Description of Artificial Sequence: Synthetic oligonucleotide
  Sense strand starting at position 1068 of SEQ ID NO: 1241423
ccucauaacgcgucugagu

SEQ ID NO: 1271395 - RNA, 19 nt, Artificial Sequence
  Description of Artificial Sequence: Synthetic oligonucleotide
  Antisense strand to SEQ ID NO: 1271394
acucagacgcguuaugagg

SEQ ID NO: 1271396 - RNA, 19 nt, Artificial Sequence
  Description of Artificial Sequence: Synthetic oligonucleotide
  Sense strand starting at position 1075 of SEQ ID NO: 1241423
acgcgucugagugauauca

SEQ ID NO: 1271397 - RNA, 19 nt, Artificial Sequence
  Description of Artificial Sequence: Synthetic oligonucleotide
  Antisense strand to SEQ ID NO: 1271396
ugauaucacucagacgcgu

SEQ ID NO: 1271398 - RNA, 19 nt, Artificial Sequence
  Description of Artificial Sequence: Synthetic oligonucleotide
  Sense strand starting at position 1278 of SEQ ID NO: 1241423
gaagauucccgcgcgcaaa

SEQ ID NO: 1271399 - RNA, 19 nt, Artificial Sequence
  Description of Artificial Sequence: Synthetic oligonucleotide
  Antisense strand to SEQ ID NO: 1271398
uuugcgcgcgggaaucuuc

SEQ ID NO: 1271400 - RNA, 19 nt, Artificial Sequence
  Description of Artificial Sequence: Synthetic oligonucleotide
  Sense strand starting at position 2163 of SEQ ID NO: 1241423
cagggauaauguccugaau

SEQ ID NO: 1271401 - RNA, 19 nt, Artificial Sequence
  Description of Artificial Sequence: Synthetic oligonucleotide
  Antisense strand to SEQ ID NO: 1271400
auucaggacauuaucccug

SEQ ID NO: 1271402 - RNA, 19 nt, Artificial Sequence
  Description of Artificial Sequence: Synthetic oligonucleotide
  Sense strand starting at position 2176 of SEQ ID NO: 1241423
cugaaucggucccugaaag

SEQ ID NO: 1271403 - RNA, 19 nt, Artificial Sequence
  Description of Artificial Sequence: Synthetic oligonucleotide
  Antisense strand to SEQ ID NO: 1271402
cuuucagggaccgauucag

SEQ ID NO: 1271404 - RNA, 19 nt, Artificial Sequence
  Description of Artificial Sequence: Synthetic oligonucleotide
  Sense strand starting at position 2242 of SEQ ID NO: 1241423
gauuucuauucguuugauu

SEQ ID NO: 1271405 - RNA, 19 nt, Artificial Sequence
  Description of Artificial Sequence: Synthetic oligonucleotide
  Antisense strand to SEQ ID NO: 1271404
aaucaaacgaauagaaauc

SEQ ID NO: 1271406 - RNA, 19 nt, Artificial Sequence
  Description of Artificial Sequence: Synthetic oligonucleotide
  Sense strand starting at position 2244 of SEQ ID NO: 1241423
uuucuauucguuugauuga

SEQ ID NO: 1271407 - RNA, 19 nt, Artificial Sequence
  Description of Artificial Sequence: Synthetic oligonucleotide
  Antisense strand to SEQ ID NO: 1271406
ucaaucaaacgaauagaaa

SEQ ID NO: 1271408 - RNA, 19 nt, Artificial Sequence
  Description of Artificial Sequence: Synthetic oligonucleotide
  Sense strand starting at position 2249 of SEQ ID NO: 1241423
auucguuugauugagggau

SEQ ID NO: 1271409 - RNA, 19 nt, Artificial Sequence
  Description of Artificial Sequence: Synthetic oligonucleotide
  Antisense strand to SEQ ID NO: 1271408
aucccucaaucaaacgaau

SEQ ID NO: 1271410 - RNA, 19 nt, Artificial Sequence
  Description of Artificial Sequence: Synthetic oligonucleotide
  Sense strand starting at position 2250 of SEQ ID NO: 1241423
uucguuugauugagggaug

SEQ ID NO: 1271411 - RNA, 19 nt, Artificial Sequence
  Description of Artificial Sequence: Synthetic oligonucleotide
  Antisense strand to SEQ ID NO: 1271410
caucccucaaucaaacgaa

SEQ ID NO: 1271412 - RNA, 19 nt, Artificial Sequence
  Description of Artificial Sequence: Synthetic oligonucleotide
  Sense strand starting at position 2642 of SEQ ID NO: 1241423
gaguuacugugcuugauac

SEQ ID NO: 1271413 - RNA, 19 nt, Artificial Sequence
  Description of Artificial Sequence: Synthetic oligonucleotide
  Antisense strand to SEQ ID NO: 1271412
guaucaagcacaguaacuc

SEQ ID NO: 1271414 - RNA, 19 nt, Artificial Sequence
  Description of Artificial Sequence: Synthetic oligonucleotide
  Sense strand starting at position 2707 of SEQ ID NO: 1241423
ucuuacagugccuguagaa

SEQ ID NO: 1271415 - RNA, 19 nt, Artificial Sequence
  Description of Artificial Sequence: Synthetic oligonucleotide
  Antisense strand to SEQ ID NO: 1271414
uucuacaggcacuguaaga

SEQ ID NO: 1271416 - RNA, 19 nt, Artificial Sequence
  Description of Artificial Sequence: Synthetic oligonucleotide
  Sense strand starting at position 2724 of SEQ ID NO: 1241423
aauuuaucguguuugguag

SEQ ID NO: 1271417 - RNA, 19 nt, Artificial Sequence
  Description of Artificial Sequence: Synthetic oligonucleotide
  Antisense strand to SEQ ID NO: 1271416
cuaccaaacacgauaaauu

SEQ ID NO: 1271418 - RNA, 19 nt, Artificial Sequence
  Description of Artificial Sequence: Synthetic oligonucleotide
  Sense strand starting at position 2730 of SEQ ID NO: 1241423
ucguguuugguaggaggga

SEQ ID NO: 1271419 - RNA, 19 nt, Artificial Sequence
  Description of Artificial Sequence: Synthetic oligonucleotide
  Antisense strand to SEQ ID NO: 1271418
ucccuccuaccaaacacga

SEQ ID NO: 1271420 - RNA, 19 nt, Artificial Sequence
  Description of Artificial Sequence: Synthetic oligonucleotide
  Sense strand starting at position 2876 of SEQ ID NO: 1241423
uagugugccaguguguuua

SEQ ID NO: 1271421 - RNA, 19 nt, Artificial Sequence
  Description of Artificial Sequence: Synthetic oligonucleotide
  Antisense strand to SEQ ID NO: 1271420
uaaacacacuggcacacua

SEQ ID NO: 1271422 - RNA, 19 nt, Artificial Sequence
  Description of Artificial Sequence: Synthetic oligonucleotide
  Sense strand starting at position 2884 of SEQ ID NO: 1241423
caguguguuuacuugaacu

SEQ ID NO: 1271423 - RNA, 19 nt, Artificial Sequence
  Description of Artificial Sequence: Synthetic oligonucleotide
  Antisense strand to SEQ ID NO: 1271422
aguucaaguaaacacacug

SEQ ID NO: 1271424 - RNA, 19 nt, Artificial Sequence
  Description of Artificial Sequence: Synthetic oligonucleotide
  Sense strand starting at position 2886 of SEQ ID NO: 1241423
guguguuuacuugaacuca

SEQ ID NO: 1271425 - RNA, 19 nt, Artificial Sequence
  Description of Artificial Sequence: Synthetic oligonucleotide
  Antisense strand to SEQ ID NO: 1271424
ugaguucaaguaaacacac

SEQ ID NO: 1271426 - RNA, 19 nt, Artificial Sequence
  Description of Artificial Sequence: Synthetic oligonucleotide
  Sense strand starting at position 2909 of SEQ ID NO: 1241423
cuugaaaguuacuuaagag

SEQ ID NO: 1271427 - RNA, 19 nt, Artificial Sequence
  Description of Artificial Sequence: Synthetic oligonucleotide
  Antisense strand to SEQ ID NO: 1271426
cucuuaaguaacuuucaag

SEQ ID NO: 1271428 - RNA, 19 nt, Artificial Sequence
  Description of Artificial Sequence: Synthetic oligonucleotide
  Sense strand starting at position 2913 of SEQ ID NO: 1241423
aaaguuacuuaagaggauu

SEQ ID NO: 1271429 - RNA, 19 nt, Artificial Sequence
  Description of Artificial Sequence: Synthetic oligonucleotide
  Antisense strand to SEQ ID NO: 1271428
aauccucuuaaguaacuuu

SEQ ID NO: 1271430 - RNA, 19 nt, Artificial Sequence
  Description of Artificial Sequence: Synthetic oligonucleotide
  Sense strand starting at position 2996 of SEQ ID NO: 1241423
ccugguuggugcccucaaa

SEQ ID NO: 1271431 - RNA, 19 nt, Artificial Sequence
  Description of Artificial Sequence: Synthetic oligonucleotide
  Antisense strand to SEQ ID NO: 1271430
uuugagggcaccaaccagg

SEQ ID NO: 1271432 - RNA, 19 nt, Artificial Sequence
  Description of Artificial Sequence: Synthetic oligonucleotide
  Sense strand starting at position 3058 of SEQ ID NO: 1241423
gucgaauuaugcucacuag

SEQ ID NO: 1271433 - RNA, 19 nt, Artificial Sequence
  Description of Artificial Sequence: Synthetic oligonucleotide
  Antisense strand to SEQ ID NO: 1271432
cuagugagcauaauucgac

SEQ ID NO: 1271434 - RNA, 19 nt, Artificial Sequence
  Description of Artificial Sequence: Synthetic oligonucleotide
  Sense strand starting at position 3059 of SEQ ID NO: 1241423
ucgaauuaugcucacuaga

SEQ ID NO: 1271435 - RNA, 19 nt, Artificial Sequence
  Description of Artificial Sequence: Synthetic oligonucleotide
  Antisense strand to SEQ ID NO: 1271434
ucuagugagcauaauucga

SEQ ID NO: 1271436 - RNA, 19 nt, Artificial Sequence
  Description of Artificial Sequence: Synthetic oligonucleotide
  Sense strand starting at position 3087 of SEQ ID NO: 1241423
uaucgaaguuccuugugaa

SEQ ID NO: 1271437 - RNA, 19 nt, Artificial Sequence
  Description of Artificial Sequence: Synthetic oligonucleotide
  Antisense strand to SEQ ID NO: 1271436
uucacaaggaacuucgaua

SEQ ID NO: 1271438 - RNA, 19 nt, Artificial Sequence
  Description of Artificial Sequence: Synthetic oligonucleotide
  Sense strand starting at position 3088 of SEQ ID NO: 1241423
aucgaaguuccuugugaac

SEQ ID NO: 1271439 - RNA, 19 nt, Artificial Sequence
  Description of Artificial Sequence: Synthetic oligonucleotide
  Antisense strand to SEQ ID NO: 1271438
guucacaaggaacuucgau

SEQ ID NO: 1271440 - RNA, 19 nt, Artificial Sequence
  Description of Artificial Sequence: Synthetic oligonucleotide
  Sense strand starting at position 3101 of SEQ ID NO: 1241423
gugaaccaaccucgugaau

SEQ ID NO: 1271441 - RNA, 19 nt, Artificial Sequence
  Description of Artificial Sequence: Synthetic oligonucleotide
  Antisense strand to SEQ ID NO: 1271440
auucacgagguugguucac

SEQ ID NO: 1271442 - RNA, 19 nt, Artificial Sequence
  Description of Artificial Sequence: Synthetic oligonucleotide
  Sense strand starting at position 3112 of SEQ ID NO: 1241423
ucgugaaucugaucgaguc

SEQ ID NO: 1271443 - RNA, 19 nt, Artificial Sequence
  Description of Artificial Sequence: Synthetic oligonucleotide
  Antisense strand to SEQ ID NO: 1271442
gacucgaucagauucacga

SEQ ID NO: 1271444 - RNA, 19 nt, Artificial Sequence
  Description of Artificial Sequence: Synthetic oligonucleotide
  Sense strand starting at position 3113 of SEQ ID NO: 1241423
cgugaaucugaucgaguca

SEQ ID NO: 1271445 - RNA, 19 nt, Artificial Sequence
  Description of Artificial Sequence: Synthetic oligonucleotide
  Antisense strand to SEQ ID NO: 1271444
ugacucgaucagauucacg

SEQ ID NO: 1271446 - RNA, 19 nt, Artificial Sequence
  Description of Artificial Sequence: Synthetic oligonucleotide
  Sense strand starting at position 3506 of SEQ ID NO: 1241423
aucacagugcugugcaaga

SEQ ID NO: 1271447 - RNA, 19 nt, Artificial Sequence
  Description of Artificial Sequence: Synthetic oligonucleotide
  Antisense strand to SEQ ID NO: 1271446
ucuugcacagcacugugau

SEQ ID NO: 1271448 - RNA, 19 nt, Artificial Sequence
  Description of Artificial Sequence: Synthetic oligonucleotide
  Sense strand starting at position 3624 of SEQ ID NO: 1241423
uuguuuguucgagagaagu

SEQ ID NO: 1271449 - RNA, 19 nt, Artificial Sequence
  Description of Artificial Sequence: Synthetic oligonucleotide
  Antisense strand to SEQ ID NO: 1271448
acuucucucgaacaaacaa

SEQ ID NO: 1271450 - RNA, 19 nt, Artificial Sequence
  Description of Artificial Sequence: Synthetic oligonucleotide
  Sense strand starting at position 3626 of SEQ ID NO: 1241423
guuuguucgagagaagucu

SEQ ID NO: 1271451 - RNA, 19 nt, Artificial Sequence
  Description of Artificial Sequence: Synthetic oligonucleotide
  Antisense strand to SEQ ID NO: 1271450
agacuucucucgaacaaac

SEQ ID NO: 1271452 - RNA, 19 nt, Artificial Sequence
  Description of Artificial Sequence: Synthetic oligonucleotide
  Sense strand starting at position 3916 of SEQ ID NO: 1241423
agccuauauuucguauaua

SEQ ID NO: 1271453 - RNA, 19 nt, Artificial Sequence
  Description of Artificial Sequence: Synthetic oligonucleotide
  Antisense strand to SEQ ID NO: 1271452
uauauacgaaauauaggcu

SEQ ID NO: 1271454 - RNA, 19 nt, Artificial Sequence
  Description of Artificial Sequence: Synthetic oligonucleotide
  Sense strand starting at position 24 of SEQ ID NO: 1241424
aucaguaagacgugaugcu

SEQ ID NO: 1271455 - RNA, 19 nt, Artificial Sequence
  Description of Artificial Sequence: Synthetic oligonucleotide
  Antisense strand to SEQ ID NO: 1271454
agcaucacgucuuacugau

SEQ ID NO: 1271456 - RNA, 19 nt, Artificial Sequence
  Description of Artificial Sequence: Synthetic oligonucleotide
  Sense strand starting at position 142 of SEQ ID NO: 1241424
aucuguaauguauagugau

SEQ ID NO: 1271457 - RNA, 19 nt, Artificial Sequence
  Description of Artificial Sequence: Synthetic oligonucleotide
  Antisense strand to SEQ ID NO: 1271456
aucacuauacauuacagau

SEQ ID NO: 1271458 - RNA, 19 nt, Artificial Sequence
  Description of Artificial Sequence: Synthetic oligonucleotide
  Sense strand starting at position 155 of SEQ ID NO: 1241424
agugauccacagggaucua

SEQ ID NO: 1271459 - RNA, 19 nt, Artificial Sequence
  Description of Artificial Sequence: Synthetic oligonucleotide
  Antisense strand to SEQ ID NO: 1271458
uagaucccuguggaucacu

SEQ ID NO: 1271460 - RNA, 19 nt, Artificial Sequence
  Description of Artificial Sequence: Synthetic oligonucleotide
  Sense strand starting at position 195 of SEQ ID NO: 1241424
agacucaucuugcuuuguu

SEQ ID NO: 1271461 - RNA, 19 nt, Artificial Sequence
  Description of Artificial Sequence: Synthetic oligonucleotide
  Antisense strand to SEQ ID NO: 1271460
aacaaagcaagaugagucu

SEQ ID NO: 1271462 - RNA, 19 nt, Artificial Sequence
  Description of Artificial Sequence: Synthetic oligonucleotide
  Sense strand starting at position 203 of SEQ ID NO: 1241424
cuugcuuuguucccaggaa

SEQ ID NO: 1271463 - RNA, 19 nt, Artificial Sequence
  Description of Artificial Sequence: Synthetic oligonucleotide
  Antisense strand to SEQ ID NO: 1271462
uuccugggaacaaagcaag

SEQ ID NO: 1271464 - RNA, 19 nt, Artificial Sequence
  Description of Artificial Sequence: Synthetic oligonucleotide
  Sense strand starting at position 228 of SEQ ID NO: 1241424
augauaacugcuuaaguau

SEQ ID NO: 1271465 - RNA, 19 nt, Artificial Sequence
  Description of Artificial Sequence: Synthetic oligonucleotide
  Antisense strand to SEQ ID NO: 1271464
auacuuaagcaguuaucau

SEQ ID NO: 1271466 - RNA, 19 nt, Artificial Sequence
  Description of Artificial Sequence: Synthetic oligonucleotide
  Sense strand starting at position 283 of SEQ ID NO: 1241424
cugugauuccaugauuacc

SEQ ID NO: 1271467 - RNA, 19 nt, Artificial Sequence
  Description of Artificial Sequence: Synthetic oligonucleotide
  Antisense strand to SEQ ID NO: 1271466
gguaaucauggaaucacag

SEQ ID NO: 1271468 - RNA, 19 nt, Artificial Sequence
  Description of Artificial Sequence: Synthetic oligonucleotide
  Sense strand starting at position 327 of SEQ ID NO: 1241424
cuucccaaguucuuggaua

SEQ ID NO: 1271469 - RNA, 19 nt, Artificial Sequence
  Description of Artificial Sequence: Synthetic oligonucleotide
  Antisense strand to SEQ ID NO: 1271468
uauccaagaacuugggaag

SEQ ID NO: 1271470 - RNA, 19 nt, Artificial Sequence
  Description of Artificial Sequence: Synthetic oligonucleotide
  Sense strand starting at position 329 of SEQ ID NO: 1241424
ucccaaguucuuggauaca

SEQ ID NO: 1271471 - RNA, 19 nt, Artificial Sequence
  Description of Artificial Sequence: Synthetic oligonucleotide
  Antisense strand to SEQ ID NO: 1271470
uguauccaagaacuuggga

SEQ ID NO: 1271472 - RNA, 19 nt, Artificial Sequence
  Description of Artificial Sequence: Synthetic oligonucleotide
  Sense strand starting at position 399 of SEQ ID NO: 1241424
ggcacuguaauguguacau

SEQ ID NO: 1271473 - RNA, 19 nt, Artificial Sequence
  Description of Artificial Sequence: Synthetic oligonucleotide
  Antisense strand to SEQ ID NO: 1271472
auguacacauuacagugcc

SEQ ID NO: 1271474 - RNA, 19 nt, Artificial Sequence
  Description of Artificial Sequence: Synthetic oligonucleotide
  Sense strand starting at position 403 of SEQ ID NO: 1241424
cuguaauguguacaucauu

SEQ ID NO: 1271475 - RNA, 19 nt, Artificial Sequence
  Description of Artificial Sequence: Synthetic oligonucleotide
  Antisense strand to SEQ ID NO: 1271474
aaugauguacacauuacag

SEQ ID NO: 1271476 - RNA, 19 nt, Artificial Sequence
  Description of Artificial Sequence: Synthetic oligonucleotide
  Sense strand starting at position 408 of SEQ ID NO: 1241424
auguguacaucauugucua

SEQ ID NO: 1271477 - RNA, 19 nt, Artificial Sequence
  Description of Artificial Sequence: Synthetic oligonucleotide
  Antisense strand to SEQ ID NO: 1271476
uagacaaugauguacacau

SEQ ID NO: 1271478 - RNA, 19 nt, Artificial Sequence
  Description of Artificial Sequence: Synthetic oligonucleotide
  Sense strand starting at position 412 of SEQ ID NO: 1241424
guacaucauugucuagguu

SEQ ID NO: 1271479 - RNA, 19 nt, Artificial Sequence
  Description of Artificial Sequence: Synthetic oligonucleotide
  Antisense strand to SEQ ID NO: 1271478
aaccuagacaaugauguac

SEQ ID NO: 1271480 - RNA, 19 nt, Artificial Sequence
  Description of Artificial Sequence: Synthetic oligonucleotide
  Sense strand starting at position 415 of SEQ ID NO: 1241424
caucauugucuagguuagu

SEQ ID NO: 1271481 - RNA, 19 nt, Artificial Sequence
  Description of Artificial Sequence: Synthetic oligonucleotide
  Antisense strand to SEQ ID NO: 1271480
acuaaccuagacaaugaug

SEQ ID NO: 1271482 - RNA, 19 nt, Artificial Sequence
  Description of Artificial Sequence: Synthetic oligonucleotide
  Sense strand starting at position 416 of SEQ ID NO: 1241424
aucauugucuagguuaguu

SEQ ID NO: 1271483 - RNA, 19 nt, Artificial Sequence
  Description of Artificial Sequence: Synthetic oligonucleotide
  Antisense strand to SEQ ID NO: 1271482
aacuaaccuagacaaugau

SEQ ID NO: 1271484 - RNA, 19 nt, Artificial Sequence
  Description of Artificial Sequence: Synthetic oligonucleotide
  Sense strand starting at position 420 of SEQ ID NO: 1241424
uugucuagguuaguuugaa

SEQ ID NO: 1271485 - RNA, 19 nt, Artificial Sequence
  Description of Artificial Sequence: Synthetic oligonucleotide
  Antisense strand to SEQ ID NO: 1271484
uucaaacuaaccuagacaa

SEQ ID NO: 1271486 - RNA, 19 nt, Artificial Sequence
  Description of Artificial Sequence: Synthetic oligonucleotide
  Sense strand starting at position 445 of SEQ ID NO: 1241424
uccucaagucugggcaaua

SEQ ID NO: 1271487 - RNA, 19 nt, Artificial Sequence
  Description of Artificial Sequence: Synthetic oligonucleotide
  Antisense strand to SEQ ID NO: 1271486
uauugcccagacuugagga

SEQ ID NO: 1271488 - RNA, 19 nt, Artificial Sequence
  Description of Artificial Sequence: Synthetic oligonucleotide
  Sense strand starting at position 486 of SEQ ID NO: 1241424
ugagcuucuuagguuggaa

SEQ ID NO: 1271489 - RNA, 19 nt, Artificial Sequence
  Description of Artificial Sequence: Synthetic oligonucleotide
  Antisense strand to SEQ ID NO: 1271488
uuccaaccuaagaagcuca

SEQ ID NO: 1271490 - RNA, 19 nt, Artificial Sequence
  Description of Artificial Sequence: Synthetic oligonucleotide
  Sense strand starting at position 494 of SEQ ID NO: 1241424
uuagguuggaacugugaga

SEQ ID NO: 1271491 - RNA, 19 nt, Artificial Sequence
  Description of Artificial Sequence: Synthetic oligonucleotide
  Antisense strand to SEQ ID NO: 1271490
ucucacaguuccaaccuaa

SEQ ID NO: 1271492 - RNA, 19 nt, Artificial Sequence
  Description of Artificial Sequence: Synthetic oligonucleotide
  Sense strand starting at position 841 of SEQ ID NO: 1241424
uuauaaagcuguuuggcau

SEQ ID NO: 1271493 - RNA, 19 nt, Artificial Sequence
  Description of Artificial Sequence: Synthetic oligonucleotide
  Antisense strand to SEQ ID NO: 1271492
augccaaacagcuuuauaa

SEQ ID NO: 1271494 - RNA, 19 nt, Artificial Sequence
  Description of Artificial Sequence: Synthetic oligonucleotide
  Sense strand starting at position 842 of SEQ ID NO: 1241424
uauaaagcuguuuggcaua

SEQ ID NO: 1271495 - RNA, 19 nt, Artificial Sequence
  Description of Artificial Sequence: Synthetic oligonucleotide
  Antisense strand to SEQ ID NO: 1271494
uaugccaaacagcuuuaua

SEQ ID NO: 1271496 - RNA, 19 nt, Artificial Sequence
  Description of Artificial Sequence: Synthetic oligonucleotide
  Sense strand starting at position 847 of SEQ ID NO: 1241424
agcuguuuggcauauguga

SEQ ID NO: 1271497 - RNA, 19 nt, Artificial Sequence
  Description of Artificial Sequence: Synthetic oligonucleotide
  Antisense strand to SEQ ID NO: 1271496
ucacauaugccaaacagcu

SEQ ID NO: 1271498 - RNA, 19 nt, Artificial Sequence
  Description of Artificial Sequence: Synthetic oligonucleotide
  Sense strand starting at position 849 of SEQ ID NO: 1241424
cuguuuggcauaugugacu

SEQ ID NO: 1271499 - RNA, 19 nt, Artificial Sequence
  Description of Artificial Sequence: Synthetic oligonucleotide
  Antisense strand to SEQ ID NO: 1271498
agucacauaugccaaacag

SEQ ID NO: 1271500 - RNA, 19 nt, Artificial Sequence
  Description of Artificial Sequence: Synthetic oligonucleotide
  Sense strand starting at position 1100 of SEQ ID NO: 1241424
guuuaaguaucacuuauga

SEQ ID NO: 1271501 - RNA, 19 nt, Artificial Sequence
  Description of Artificial Sequence: Synthetic oligonucleotide
  Antisense strand to SEQ ID NO: 1271500
ucauaagugauacuuaaac

SEQ ID NO: 1271502 - RNA, 19 nt, Artificial Sequence
  Description of Artificial Sequence: Synthetic oligonucleotide
  Sense strand starting at position 1105 of SEQ ID NO: 1241424
aguaucacuuaugaggaga

SEQ ID NO: 1271503 - RNA, 19 nt, Artificial Sequence
  Description of Artificial Sequence: Synthetic oligonucleotide
  Antisense strand to SEQ ID NO: 1271502
ucuccucauaagugauacu

SEQ ID NO: 1271504 - RNA, 19 nt, Artificial Sequence
  Description of Artificial Sequence: Synthetic oligonucleotide
  Sense strand starting at position 1234 of SEQ ID NO: 1241424
aagugaaauugucuucgca

SEQ ID NO: 1271505 - RNA, 19 nt, Artificial Sequence
  Description of Artificial Sequence: Synthetic oligonucleotide
  Antisense strand to SEQ ID NO: 1271504
ugcgaagacaauuucacuu

SEQ ID NO: 1271506 - RNA, 19 nt, Artificial Sequence
  Description of Artificial Sequence: Synthetic oligonucleotide
  Sense strand starting at position 1236 of SEQ ID NO: 1241424
gugaaauugucuucgcaau

SEQ ID NO: 1271507 - RNA, 19 nt, Artificial Sequence
  Description of Artificial Sequence: Synthetic oligonucleotide
  Antisense strand to SEQ ID NO: 1271506
auugcgaagacaauuucac

SEQ ID NO: 1271508 - RNA, 19 nt, Artificial Sequence
  Description of Artificial Sequence: Synthetic oligonucleotide
  Sense strand starting at position 1237 of SEQ ID NO: 1241424
ugaaauugucuucgcaauc

SEQ ID NO: 1271509 - RNA, 19 nt, Artificial Sequence
  Description of Artificial Sequence: Synthetic oligonucleotide
  Antisense strand to SEQ ID NO: 1271508
gauugcgaagacaauuuca

SEQ ID NO: 1271510 - RNA, 19 nt, Artificial Sequence
  Description of Artificial Sequence: Synthetic oligonucleotide
  Sense strand starting at position 1238 of SEQ ID NO: 1241424
gaaauugucuucgcaaucu

SEQ ID NO: 1271511 - RNA, 19 nt, Artificial Sequence
  Description of Artificial Sequence: Synthetic oligonucleotide
  Antisense strand to SEQ ID NO: 1271510
agauugcgaagacaauuuc

SEQ ID NO: 1271512 - RNA, 19 nt, Artificial Sequence
  Description of Artificial Sequence: Synthetic oligonucleotide
  Sense strand starting at position 1280 of SEQ ID NO: 1241424
ugcagagacgcuugaggau

SEQ ID NO: 1271513 - RNA, 19 nt, Artificial Sequence
  Description of Artificial Sequence: Synthetic oligonucleotide
  Antisense strand to SEQ ID NO: 1271512
auccucaagcgucucugca

SEQ ID NO: 1271514 - RNA, 19 nt, Artificial Sequence
  Description of Artificial Sequence: Synthetic oligonucleotide
  Sense strand starting at position 1440 of SEQ ID NO: 1241424
ccauauuauguacguugua

SEQ ID NO: 1271515 - RNA, 19 nt, Artificial Sequence
  Description of Artificial Sequence: Synthetic oligonucleotide
  Antisense strand to SEQ ID NO: 1271514
uacaacguacauaauaugg

SEQ ID NO: 1271516 - RNA, 19 nt, Artificial Sequence
  Description of Artificial Sequence: Synthetic oligonucleotide
  Sense strand starting at position 1441 of SEQ ID NO: 1241424
cauauuauguacguuguaa

SEQ ID NO: 1271517 - RNA, 19 nt, Artificial Sequence
  Description of Artificial Sequence: Synthetic oligonucleotide
  Antisense strand to SEQ ID NO: 1271516
uuacaacguacauaauaug

SEQ ID NO: 1271518 - RNA, 19 nt, Artificial Sequence
  Description of Artificial Sequence: Synthetic oligonucleotide
  Sense strand starting at position 1443 of SEQ ID NO: 1241424
uauuauguacguuguaaag

SEQ ID NO: 1271519 - RNA, 19 nt, Artificial Sequence
  Description of Artificial Sequence: Synthetic oligonucleotide
  Antisense strand to SEQ ID NO: 1271518
cuuuacaacguacauaaua

SEQ ID NO: 1271520 - RNA, 19 nt, Artificial Sequence
  Description of Artificial Sequence: Synthetic oligonucleotide
  Sense strand starting at position 1644 of SEQ ID NO: 1241424
uccagaucuucuguccuga

SEQ ID NO: 1271521 - RNA, 19 nt, Artificial Sequence
  Description of Artificial Sequence: Synthetic oligonucleotide
  Antisense strand to SEQ ID NO: 1271520
ucaggacagaagaucugga

SEQ ID NO: 1271522 - RNA, 19 nt, Artificial Sequence
  Description of Artificial Sequence: Synthetic oligonucleotide
  Sense strand starting at position 1689 of SEQ ID NO: 1241424
gcaguuacucaggguggua

SEQ ID NO: 1271523 - RNA, 19 nt, Artificial Sequence
  Description of Artificial Sequence: Synthetic oligonucleotide
  Antisense strand to SEQ ID NO: 1271522
uaccacccugaguaacugc

SEQ ID NO: 1271524 - RNA, 19 nt, Artificial Sequence
  Description of Artificial Sequence: Synthetic oligonucleotide
  Sense strand starting at position 1868 of SEQ ID NO: 1241424
accugagucucaguaauca

SEQ ID NO: 1271525 - RNA, 19 nt, Artificial Sequence
  Description of Artificial Sequence: Synthetic oligonucleotide
  Antisense strand to SEQ ID NO: 1271524
ugauuacugagacucaggu

SEQ ID NO: 1271526 - RNA, 19 nt, Artificial Sequence
  Description of Artificial Sequence: Synthetic oligonucleotide
  Sense strand starting at position 2050 of SEQ ID NO: 1241424
gcuguagcugcguuuacaa

SEQ ID NO: 1271527 - RNA, 19 nt, Artificial Sequence
  Description of Artificial Sequence: Synthetic oligonucleotide
  Antisense strand to SEQ ID NO: 1271526
uuguaaacgcagcuacagc

SEQ ID NO: 1271528 - RNA, 19 nt, Artificial Sequence
  Description of Artificial Sequence: Synthetic oligonucleotide
  Sense strand starting at position 2058 of SEQ ID NO: 1241424
ugcguuuacaacguucuga

SEQ ID NO: 1271529 - RNA, 19 nt, Artificial Sequence
  Description of Artificial Sequence: Synthetic oligonucleotide
  Antisense strand to SEQ ID NO: 1271528
ucagaacguuguaaacgca

SEQ ID NO: 1271530 - RNA, 19 nt, Artificial Sequence
  Description of Artificial Sequence: Synthetic oligonucleotide
  Sense strand starting at position 2077 of SEQ ID NO: 1241424
cuuccucuuccaggagacu

SEQ ID NO: 1271531 - RNA, 19 nt, Artificial Sequence
  Description of Artificial Sequence: Synthetic oligonucleotide
  Antisense strand to SEQ ID NO: 1271530
agucuccuggaagaggaag

SEQ ID NO: 1271532 - RNA, 19 nt, Artificial Sequence
  Description of Artificial Sequence: Synthetic oligonucleotide
  Sense strand starting at position 2078 of SEQ ID NO: 1241424
uuccucuuccaggagacuu

SEQ ID NO: 1271533 - RNA, 19 nt, Artificial Sequence
  Description of Artificial Sequence: Synthetic oligonucleotide
  Antisense strand to SEQ ID NO: 1271532
aagucuccuggaagaggaa

SEQ ID NO: 1271534 - RNA, 19 nt, Artificial Sequence
  Description of Artificial Sequence: Synthetic oligonucleotide
  Sense strand starting at position 53 of SEQ ID NO: 1241425
cagugauaugaguaugcuu

SEQ ID NO: 1271535 - RNA, 19 nt, Artificial Sequence
  Description of Artificial Sequence: Synthetic oligonucleotide
  Antisense strand to SEQ ID NO: 1271534
aagcauacucauaucacug

SEQ ID NO: 1271536 - RNA, 19 nt, Artificial Sequence
  Description of Artificial Sequence: Synthetic oligonucleotide
  Sense strand starting at position 55 of SEQ ID NO: 1241425
gugauaugaguaugcuuaa

SEQ ID NO: 1271537 - RNA, 19 nt, Artificial Sequence
  Description of Artificial Sequence: Synthetic oligonucleotide
  Antisense strand to SEQ ID NO: 1271536
uuaagcauacucauaucac

SEQ ID NO: 1271538 - RNA, 19 nt, Artificial Sequence
  Description of Artificial Sequence: Synthetic oligonucleotide
  Sense strand starting at position 56 of SEQ ID NO: 1241425
ugauaugaguaugcuuaaa

SEQ ID NO: 1271539 - RNA, 19 nt, Artificial Sequence
  Description of Artificial Sequence: Synthetic oligonucleotide
  Antisense strand to SEQ ID NO: 1271538
uuuaagcauacucauauca

SEQ ID NO: 1271540 - RNA, 19 nt, Artificial Sequence
  Description of Artificial Sequence: Synthetic oligonucleotide
  Sense strand starting at position 240 of SEQ ID NO: 1241425
uggacaagucuuggauucu

SEQ ID NO: 1271541 - RNA, 19 nt, Artificial Sequence
  Description of Artificial Sequence: Synthetic oligonucleotide
  Antisense strand to SEQ ID NO: 1271540
agaauccaagacuugucca

SEQ ID NO: 1271542 - RNA, 19 nt, Artificial Sequence
  Description of Artificial Sequence: Synthetic oligonucleotide
  Sense strand starting at position 365 of SEQ ID NO: 1241425
ggacuagugauguaggcuu

SEQ ID NO: 1271543 - RNA, 19 nt, Artificial Sequence
  Description of Artificial Sequence: Synthetic oligonucleotide
  Antisense strand to SEQ ID NO: 1271542
aagccuacaucacuagucc

SEQ ID NO: 1271544 - RNA, 19 nt, Artificial Sequence
  Description of Artificial Sequence: Synthetic oligonucleotide
  Sense strand starting at position 534 of SEQ ID NO: 1241425
guuaguagacuccgaauaa

SEQ ID NO: 1271545 - RNA, 19 nt, Artificial Sequence
  Description of Artificial Sequence: Synthetic oligonucleotide
  Antisense strand to SEQ ID NO: 1271544
uuauucggagucuacuaac

SEQ ID NO: 1271546 - RNA, 19 nt, Artificial Sequence
  Description of Artificial Sequence: Synthetic oligonucleotide
  Sense strand starting at position 538 of SEQ ID NO: 1241425
guagacuccgaauaauacu

SEQ ID NO: 1271547 - RNA, 19 nt, Artificial Sequence
  Description of Artificial Sequence: Synthetic oligonucleotide
  Antisense strand to SEQ ID NO: 1271546
aguauuauucggagucuac

SEQ ID NO: 1271548 - RNA, 19 nt, Artificial Sequence
  Description of Artificial Sequence: Synthetic oligonucleotide
  Sense strand starting at position 574 of SEQ ID NO: 1241425
cuuagcuuuccuggugaug

SEQ ID NO: 1271549 - RNA, 19 nt, Artificial Sequence
  Description of Artificial Sequence: Synthetic oligonucleotide
  Antisense strand to SEQ ID NO: 1271548
caucaccaggaaagcuaag

SEQ ID NO: 1271550 - RNA, 19 nt, Artificial Sequence
  Description of Artificial Sequence: Synthetic oligonucleotide
  Sense strand starting at position 656 of SEQ ID NO: 1241425
gcaugagacagguggauca

SEQ ID NO: 1271551 - RNA, 19 nt, Artificial Sequence
  Description of Artificial Sequence: Synthetic oligonucleotide
  Antisense strand to SEQ ID NO: 1271550
ugauccaccugucucaugc

SEQ ID NO: 1271552 - RNA, 19 nt, Artificial Sequence
  Description of Artificial Sequence: Synthetic oligonucleotide
  Sense strand starting at position 1007 of SEQ ID NO: 1241425
gaaagcacacauugaguuu

SEQ ID NO: 1271553 - RNA, 19 nt, Artificial Sequence
  Description of Artificial Sequence: Synthetic oligonucleotide
  Antisense strand to SEQ ID NO: 1271552
aaacucaaugugugcuuuc

SEQ ID NO: 1271554 - RNA, 19 nt, Artificial Sequence
  Description of Artificial Sequence: Synthetic oligonucleotide
  Sense strand starting at position 1049 of SEQ ID NO: 1241425
cuguguccugaauggagga

SEQ ID NO: 1271555 - RNA, 19 nt, Artificial Sequence
  Description of Artificial Sequence: Synthetic oligonucleotide
  Antisense strand to SEQ ID NO: 1271554
uccuccauucaggacacag

SEQ ID NO: 1271556 - RNA, 19 nt, Artificial Sequence
  Description of Artificial Sequence: Synthetic oligonucleotide
  Sense strand starting at position 1084 of SEQ ID NO: 1241425
uuguuaauuucugcuugag

SEQ ID NO: 1271557 - RNA, 19 nt, Artificial Sequence
  Description of Artificial Sequence: Synthetic oligonucleotide
  Antisense strand to SEQ ID NO: 1271556
cucaagcagaaauuaacaa

SEQ ID NO: 1271558 - RNA, 19 nt, Artificial Sequence
  Description of Artificial Sequence: Synthetic oligonucleotide
  Sense strand starting at position 1086 of SEQ ID NO: 1241425
guuaauuucugcuugaguc

SEQ ID NO: 1271559 - RNA, 19 nt, Artificial Sequence
  Description of Artificial Sequence: Synthetic oligonucleotide
  Antisense strand to SEQ ID NO: 1271558
gacucaagcagaaauuaac

SEQ ID NO: 1271560 - RNA, 19 nt, Artificial Sequence
  Description of Artificial Sequence: Synthetic oligonucleotide
  Sense strand starting at position 1087 of SEQ ID NO: 1241425
uuaauuucugcuugaguca

SEQ ID NO: 1271561 - RNA, 19 nt, Artificial Sequence
  Description of Artificial Sequence: Synthetic oligonucleotide
  Antisense strand to SEQ ID NO: 1271560
ugacucaagcagaaauuaa

SEQ ID NO: 1271562 - RNA, 19 nt, Artificial Sequence
  Description of Artificial Sequence: Synthetic oligonucleotide
  Sense strand starting at position 1121 of SEQ ID NO: 1241425
guucuacugccauggauug

SEQ ID NO: 1271563 - RNA, 19 nt, Artificial Sequence
  Description of Artificial Sequence: Synthetic oligonucleotide
  Antisense strand to SEQ ID NO: 1271562
caauccauggcaguagaac

SEQ ID NO: 1271564 - RNA, 19 nt, Artificial Sequence
  Description of Artificial Sequence: Synthetic oligonucleotide
  Sense strand starting at position 1162 of SEQ ID NO: 1241425
gcuggagauuccuuguuac

SEQ ID NO: 1271565 - RNA, 19 nt, Artificial Sequence
  Description of Artificial Sequence: Synthetic oligonucleotide
  Antisense strand to SEQ ID NO: 1271564
guaacaaggaaucuccagc

SEQ ID NO: 1271566 - RNA, 19 nt, Artificial Sequence
  Description of Artificial Sequence: Synthetic oligonucleotide
  Sense strand starting at position 1168 of SEQ ID NO: 1241425
gauuccuuguuacuggaca

SEQ ID NO: 1271567 - RNA, 19 nt, Artificial Sequence
  Description of Artificial Sequence: Synthetic oligonucleotide
  Antisense strand to SEQ ID NO: 1271566
uguccaguaacaaggaauc

SEQ ID NO: 1271568 - RNA, 19 nt, Artificial Sequence
  Description of Artificial Sequence: Synthetic oligonucleotide
  Sense strand starting at position 1199 of SEQ ID NO: 1241425
gacagagggucaguuuaaa

SEQ ID NO: 1271569 - RNA, 19 nt, Artificial Sequence
  Description of Artificial Sequence: Synthetic oligonucleotide
  Antisense strand to SEQ ID NO: 1271568
uuuaaacugacccucuguc

SEQ ID NO: 1271570 - RNA, 19 nt, Artificial Sequence
  Description of Artificial Sequence: Synthetic oligonucleotide
  Sense strand starting at position 1209 of SEQ ID NO: 1241425
caguuuaaaucugucagag

SEQ ID NO: 1271571 - RNA, 19 nt, Artificial Sequence
  Description of Artificial Sequence: Synthetic oligonucleotide
  Antisense strand to SEQ ID NO: 1271570
cucugacagauuuaaacug

SEQ ID NO: 1271572 - RNA, 19 nt, Artificial Sequence
  Description of Artificial Sequence: Synthetic oligonucleotide
  Sense strand starting at position 1366 of SEQ ID NO: 1241425
acaccauuccguuagcaua

SEQ ID NO: 1271573 - RNA, 19 nt, Artificial Sequence
  Description of Artificial Sequence: Synthetic oligonucleotide
  Antisense strand to SEQ ID NO: 1271572
uaugcuaacggaauggugu

SEQ ID NO: 1271574 - RNA, 19 nt, Artificial Sequence
  Description of Artificial Sequence: Synthetic oligonucleotide
  Sense strand starting at position 1485 of SEQ ID NO: 1241425
gcucgauuccgcgcagguu

SEQ ID NO: 1271575 - RNA, 19 nt, Artificial Sequence
  Description of Artificial Sequence: Synthetic oligonucleotide
  Antisense strand to SEQ ID NO: 1271574
aaccugcgcggaaucgagc

SEQ ID NO: 1271576 - RNA, 19 nt, Artificial Sequence
  Description of Artificial Sequence: Synthetic oligonucleotide
  Sense strand starting at position 1944 of SEQ ID NO: 1241425
cuucuuccucuagggacaa

SEQ ID NO: 1271577 - RNA, 19 nt, Artificial Sequence
  Description of Artificial Sequence: Synthetic oligonucleotide
  Antisense strand to SEQ ID NO: 1271576
uugucccuagaggaagaag

SEQ ID NO: 1271578 - RNA, 19 nt, Artificial Sequence
  Description of Artificial Sequence: Synthetic oligonucleotide
  Sense strand starting at position 2172 of SEQ ID NO: 1241425
cgagguuugcuggauagcu

SEQ ID NO: 1271579 - RNA, 19 nt, Artificial Sequence
  Description of Artificial Sequence: Synthetic oligonucleotide
  Antisense strand to SEQ ID NO: 1271578
agcuauccagcaaaccucg

SEQ ID NO: 1271580 - RNA, 19 nt, Artificial Sequence
  Description of Artificial Sequence: Synthetic oligonucleotide
  Sense strand starting at position 2373 of SEQ ID NO: 1241425
ugcagugaaacaugcaaga

SEQ ID NO: 1271581 - RNA, 19 nt, Artificial Sequence
  Description of Artificial Sequence: Synthetic oligonucleotide
  Antisense strand to SEQ ID NO: 1271580
ucuugcauguuucacugca

SEQ ID NO: 1271582 - RNA, 19 nt, Artificial Sequence
  Description of Artificial Sequence: Synthetic oligonucleotide
  Sense strand starting at position 2395 of SEQ ID NO: 1241425
ccuguaaagauccgguaac

SEQ ID NO: 1271583 - RNA, 19 nt, Artificial Sequence
  Description of Artificial Sequence: Synthetic oligonucleotide
  Antisense strand to SEQ ID NO: 1271582
guuaccggaucuuuacagg

SEQ ID NO: 1271584 - RNA, 19 nt, Artificial Sequence
  Description of Artificial Sequence: Synthetic oligonucleotide
  Sense strand starting at position 2701 of SEQ ID NO: 1241425
ugcugagcuaggcaaauua

SEQ ID NO: 1271585 - RNA, 19 nt, Artificial Sequence
  Description of Artificial Sequence: Synthetic oligonucleotide
  Antisense strand to SEQ ID NO: 1271584
uaauuugccuagcucagca

SEQ ID NO: 1271586 - RNA, 19 nt, Artificial Sequence
  Description of Artificial Sequence: Synthetic oligonucleotide
  Sense strand starting at position 3023 of SEQ ID NO: 1241425
gucucaugccuguagucau

SEQ ID NO: 1271587 - RNA, 19 nt, Artificial Sequence
  Description of Artificial Sequence: Synthetic oligonucleotide
  Antisense strand to SEQ ID NO: 1271586
augacuacaggcaugagac

SEQ ID NO: 1271588 - RNA, 19 nt, Artificial Sequence
  Description of Artificial Sequence: Synthetic oligonucleotide
  Sense strand starting at position 3035 of SEQ ID NO: 1241425
uagucauagcacuguggga

SEQ ID NO: 1271589 - RNA, 19 nt, Artificial Sequence
  Description of Artificial Sequence: Synthetic oligonucleotide
  Antisense strand to SEQ ID NO: 1271588
ucccacagugcuaugacua

SEQ ID NO: 1271590 - RNA, 19 nt, Artificial Sequence
  Description of Artificial Sequence: Synthetic oligonucleotide
  Sense strand starting at position 3319 of SEQ ID NO: 1241425
gcgaauauagcccagcuuu

SEQ ID NO: 1271591 - RNA, 19 nt, Artificial Sequence
  Description of Artificial Sequence: Synthetic oligonucleotide
  Antisense strand to SEQ ID NO: 1271590
aaagcugggcuauauucgc

SEQ ID NO: 1271592 - RNA, 19 nt, Artificial Sequence
  Description of Artificial Sequence: Synthetic oligonucleotide
  Sense strand starting at position 3415 of SEQ ID NO: 1241425
agggauuacuaucugucca

SEQ ID NO: 1271593 - RNA, 19 nt, Artificial Sequence
  Description of Artificial Sequence: Synthetic oligonucleotide
  Antisense strand to SEQ ID NO: 1271592
uggacagauaguaaucccu

SEQ ID NO: 1271594 - RNA, 19 nt, Artificial Sequence
  Description of Artificial Sequence: Synthetic oligonucleotide
  Sense strand starting at position 3416 of SEQ ID NO: 1241425
gggauuacuaucuguccag

SEQ ID NO: 1271595 - RNA, 19 nt, Artificial Sequence
  Description of Artificial Sequence: Synthetic oligonucleotide
  Antisense strand to SEQ ID NO: 1271594
cuggacagauaguaauccc

SEQ ID NO: 1271596 - RNA, 19 nt, Artificial Sequence
  Description of Artificial Sequence: Synthetic oligonucleotide
  Sense strand starting at position 3417 of SEQ ID NO: 1241425
ggauuacuaucuguccaga

SEQ ID NO: 1271597 - RNA, 19 nt, Artificial Sequence
  Description of Artificial Sequence: Synthetic oligonucleotide
  Antisense strand to SEQ ID NO: 1271596
ucuggacagauaguaaucc

SEQ ID NO: 1271598 - RNA, 19 nt, Artificial Sequence
  Description of Artificial Sequence: Synthetic oligonucleotide
  Sense strand starting at position 3420 of SEQ ID NO: 1241425
uuacuaucuguccagaggu

SEQ ID NO: 1271599 - RNA, 19 nt, Artificial Sequence
  Description of Artificial Sequence: Synthetic oligonucleotide
  Antisense strand to SEQ ID NO: 1271598
accucuggacagauaguaa

SEQ ID NO: 1271600 - RNA, 19 nt, Artificial Sequence
  Description of Artificial Sequence: Synthetic oligonucleotide
  Sense strand starting at position 3446 of SEQ ID NO: 1241425
aggguaagagccugaaauc

SEQ ID NO: 1271601 - RNA, 19 nt, Artificial Sequence
  Description of Artificial Sequence: Synthetic oligonucleotide
  Antisense strand to SEQ ID NO: 1271600
gauuucaggcucuuacccu

SEQ ID NO: 1271602 - RNA, 19 nt, Artificial Sequence
  Description of Artificial Sequence: Synthetic oligonucleotide
  Sense strand starting at position 3505 of SEQ ID NO: 1241425
ucaucuuggcacugggaua

SEQ ID NO: 1271603 - RNA, 19 nt, Artificial Sequence
  Description of Artificial Sequence: Synthetic oligonucleotide
  Antisense strand to SEQ ID NO: 1271602
uaucccagugccaagauga

SEQ ID NO: 1271604 - RNA, 19 nt, Artificial Sequence
  Description of Artificial Sequence: Synthetic oligonucleotide
  Sense strand starting at position 3534 of SEQ ID NO: 1241425
aguggaaggugugcuugau

SEQ ID NO: 1271605 - RNA, 19 nt, Artificial Sequence
  Description of Artificial Sequence: Synthetic oligonucleotide
  Antisense strand to SEQ ID NO: 1271604
aucaagcacaccuuccacu

SEQ ID NO: 1271606 - RNA, 19 nt, Artificial Sequence
  Description of Artificial Sequence: Synthetic oligonucleotide
  Sense strand starting at position 3588 of SEQ ID NO: 1241425
gggcuauggacaugcaagu

SEQ ID NO: 1271607 - RNA, 19 nt, Artificial Sequence
  Description of Artificial Sequence: Synthetic oligonucleotide
  Antisense strand to SEQ ID NO: 1271606
acuugcauguccauagccc

SEQ ID NO: 1271608 - RNA, 19 nt, Artificial Sequence
  Description of Artificial Sequence: Synthetic oligonucleotide
  Sense strand starting at position 3599 of SEQ ID NO: 1241425
augcaaguauuccauuuga

SEQ ID NO: 1271609 - RNA, 19 nt, Artificial Sequence
  Description of Artificial Sequence: Synthetic oligonucleotide
  Antisense strand to SEQ ID NO: 1271608
ucaaauggaauacuugcau

SEQ ID NO: 1271610 - RNA, 19 nt, Artificial Sequence
  Description of Artificial Sequence: Synthetic oligonucleotide
  Sense strand starting at position 3677 of SEQ ID NO: 1241425
ggccaagugcuagacuaaa

SEQ ID NO: 1271611 - RNA, 19 nt, Artificial Sequence
  Description of Artificial Sequence: Synthetic oligonucleotide
  Antisense strand to SEQ ID NO: 1271610
uuuagucuagcacuuggcc

SEQ ID NO: 1271612 - RNA, 19 nt, Artificial Sequence
  Description of Artificial Sequence: Synthetic oligonucleotide
  Sense strand starting at position 3902 of SEQ ID NO: 1241425
aacgauugcuccuugugau

SEQ ID NO: 1271613 - RNA, 19 nt, Artificial Sequence
  Description of Artificial Sequence: Synthetic oligonucleotide
  Antisense strand to SEQ ID NO: 1271612
aucacaaggagcaaucguu

SEQ ID NO: 1271614 - RNA, 19 nt, Artificial Sequence
  Description of Artificial Sequence: Synthetic oligonucleotide
  Sense strand starting at position 11 of SEQ ID NO: 1241426
uaaugcugacgcugaauca

SEQ ID NO: 1271615 - RNA, 19 nt, Artificial Sequence
  Description of Artificial Sequence: Synthetic oligonucleotide
  Antisense strand to SEQ ID NO: 1271614
ugauucagcgucagcauua

SEQ ID NO: 1271616 - RNA, 19 nt, Artificial Sequence
  Description of Artificial Sequence: Synthetic oligonucleotide
  Sense strand starting at position 18 of SEQ ID NO: 1241426
gacgcugaaucauuaagag

SEQ ID NO: 1271617 - RNA, 19 nt, Artificial Sequence
  Description of Artificial Sequence: Synthetic oligonucleotide
  Antisense strand to SEQ ID NO: 1271616
cucuuaaugauucagcguc

SEQ ID NO: 1271618 - RNA, 19 nt, Artificial Sequence
  Description of Artificial Sequence: Synthetic oligonucleotide
  Sense strand starting at position 169 of SEQ ID NO: 1241426
agguauuguuaugucugau

SEQ ID NO: 1271619 - RNA, 19 nt, Artificial Sequence
  Description of Artificial Sequence: Synthetic oligonucleotide
  Antisense strand to SEQ ID NO: 1271618
aucagacauaacaauaccu

SEQ ID NO: 1271620 - RNA, 19 nt, Artificial Sequence
  Description of Artificial Sequence: Synthetic oligonucleotide
  Sense strand starting at position 172 of SEQ ID NO: 1241426
uauuguuaugucugaugaa

SEQ ID NO: 1271621 - RNA, 19 nt, Artificial Sequence
  Description of Artificial Sequence: Synthetic oligonucleotide
  Antisense strand to SEQ ID NO: 1271620
uucaucagacauaacaaua

SEQ ID NO: 1271622 - RNA, 19 nt, Artificial Sequence
  Description of Artificial Sequence: Synthetic oligonucleotide
  Sense strand starting at position 395 of SEQ ID NO: 1241426
aguguuauucuugggauca

SEQ ID NO: 1271623 - RNA, 19 nt, Artificial Sequence
  Description of Artificial Sequence: Synthetic oligonucleotide
  Antisense strand to SEQ ID NO: 1271622
ugaucccaagaauaacacu

SEQ ID NO: 1271624 - RNA, 19 nt, Artificial Sequence
  Description of Artificial Sequence: Synthetic oligonucleotide
  Sense strand starting at position 429 of SEQ ID NO: 1241426
ccagcuugggaucauuauc

SEQ ID NO: 1271625 - RNA, 19 nt, Artificial Sequence
  Description of Artificial Sequence: Synthetic oligonucleotide
  Antisense strand to SEQ ID NO: 1271624
gauaaugaucccaagcugg

SEQ ID NO: 1271626 - RNA, 19 nt, Artificial Sequence
  Description of Artificial Sequence: Synthetic oligonucleotide
  Sense strand starting at position 435 of SEQ ID NO: 1241426
ugggaucauuaucccaagu

SEQ ID NO: 1271627 - RNA, 19 nt, Artificial Sequence
  Description of Artificial Sequence: Synthetic oligonucleotide
  Antisense strand to SEQ ID NO: 1271626
acuugggauaaugauccca

SEQ ID NO: 1271628 - RNA, 19 nt, Artificial Sequence
  Description of Artificial Sequence: Synthetic oligonucleotide
  Sense strand starting at position 595 of SEQ ID NO: 1241426
accgaagaugcuuaucuuu

SEQ ID NO: 1271629 - RNA, 19 nt, Artificial Sequence
  Description of Artificial Sequence: Synthetic oligonucleotide
  Antisense strand to SEQ ID NO: 1271628
aaagauaagcaucuucggu

SEQ ID NO: 1271630 - RNA, 19 nt, Artificial Sequence
  Description of Artificial Sequence: Synthetic oligonucleotide
  Sense strand starting at position 597 of SEQ ID NO: 1241426
cgaagaugcuuaucuuuag

SEQ ID NO: 1271631 - RNA, 19 nt, Artificial Sequence
  Description of Artificial Sequence: Synthetic oligonucleotide
  Antisense strand to SEQ ID NO: 1271630
cuaaagauaagcaucuucg

SEQ ID NO: 1271632 - RNA, 19 nt, Artificial Sequence
  Description of Artificial Sequence: Synthetic oligonucleotide
  Sense strand starting at position 698 of SEQ ID NO: 1241426
accguagcucuuuacucaa

SEQ ID NO: 1271633 - RNA, 19 nt, Artificial Sequence
  Description of Artificial Sequence: Synthetic oligonucleotide
  Antisense strand to SEQ ID NO: 1271632
uugaguaaagagcuacggu

SEQ ID NO: 1271634 - RNA, 19 nt, Artificial Sequence
  Description of Artificial Sequence: Synthetic oligonucleotide
  Sense strand starting at position 822 of SEQ ID NO: 1241426
aaggaauccguuugccaac

SEQ ID NO: 1271635 - RNA, 19 nt, Artificial Sequence
  Description of Artificial Sequence: Synthetic oligonucleotide
  Antisense strand to SEQ ID NO: 1271634
guuggcaaacggauuccuu

SEQ ID NO: 1271636 - RNA, 19 nt, Artificial Sequence
  Description of Artificial Sequence: Synthetic oligonucleotide
  Sense strand starting at position 1052 of SEQ ID NO: 1241426
agacgacuucucuagacuu

SEQ ID NO: 1271637 - RNA, 19 nt, Artificial Sequence
  Description of Artificial Sequence: Synthetic oligonucleotide
  Antisense strand to SEQ ID NO: 1271636
aagucuagagaagucgucu

SEQ ID NO: 1271638 - RNA, 19 nt, Artificial Sequence
  Description of Artificial Sequence: Synthetic oligonucleotide
  Sense strand starting at position 1062 of SEQ ID NO: 1241426
ucuagacuucccgcguagu

SEQ ID NO: 1271639 - RNA, 19 nt, Artificial Sequence
  Description of Artificial Sequence: Synthetic oligonucleotide
  Antisense strand to SEQ ID NO: 1271638
acuacgcgggaagucuaga

SEQ ID NO: 1271640 - RNA, 19 nt, Artificial Sequence
  Description of Artificial Sequence: Synthetic oligonucleotide
  Sense strand starting at position 1064 of SEQ ID NO: 1241426
uagacuucccgcguaguuu

SEQ ID NO: 1271641 - RNA, 19 nt, Artificial Sequence
  Description of Artificial Sequence: Synthetic oligonucleotide
  Antisense strand to SEQ ID NO: 1271640
aaacuacgcgggaagucua

SEQ ID NO: 1271642 - RNA, 19 nt, Artificial Sequence
  Description of Artificial Sequence: Synthetic oligonucleotide
  Sense strand starting at position 1191 of SEQ ID NO: 1241426
ucgagagugguccauggau

SEQ ID NO: 1271643 - RNA, 19 nt, Artificial Sequence
  Description of Artificial Sequence: Synthetic oligonucleotide
  Antisense strand to SEQ ID NO: 1271642
auccauggaccacucucga

SEQ ID NO: 1271644 - RNA, 19 nt, Artificial Sequence
  Description of Artificial Sequence: Synthetic oligonucleotide
  Sense strand starting at position 2435 of SEQ ID NO: 1241426
ugaaaucuccuucgggcaa

SEQ ID NO: 1271645 - RNA, 19 nt, Artificial Sequence
  Description of Artificial Sequence: Synthetic oligonucleotide
  Antisense strand to SEQ ID NO: 1271644
uugcccgaaggagauuuca

SEQ ID NO: 1271646 - RNA, 19 nt, Artificial Sequence
  Description of Artificial Sequence: Synthetic oligonucleotide
  Sense strand starting at position 2833 of SEQ ID NO: 1241426
aaaugaguugugugcaaac

SEQ ID NO: 1271647 - RNA, 19 nt, Artificial Sequence
  Description of Artificial Sequence: Synthetic oligonucleotide
  Antisense strand to SEQ ID NO: 1271646
guuugcacacaacucauuu

SEQ ID NO: 1271648 - RNA, 19 nt, Artificial Sequence
  Description of Artificial Sequence: Synthetic oligonucleotide
  Sense strand starting at position 2835 of SEQ ID NO: 1241426
augaguugugugcaaacau

SEQ ID NO: 1271649 - RNA, 19 nt, Artificial Sequence
  Description of Artificial Sequence: Synthetic oligonucleotide
  Antisense strand to SEQ ID NO: 1271648
auguuugcacacaacucau

SEQ ID NO: 1271650 - RNA, 19 nt, Artificial Sequence
  Description of Artificial Sequence: Synthetic oligonucleotide
  Sense strand starting at position 2842 of SEQ ID NO: 1241426
gugugcaaacauuaugaaa

SEQ ID NO: 1271651 - RNA, 19 nt, Artificial Sequence
  Description of Artificial Sequence: Synthetic oligonucleotide
  Antisense strand to SEQ ID NO: 1271650
uuucauaauguuugcacac

SEQ ID NO: 1271652 - RNA, 19 nt, Artificial Sequence
  Description of Artificial Sequence: Synthetic oligonucleotide
  Sense strand starting at position 2959 of SEQ ID NO: 1241426
uugcucuuugcugaaagga

SEQ ID NO: 1271653 - RNA, 19 nt, Artificial Sequence
  Description of Artificial Sequence: Synthetic oligonucleotide
  Antisense strand to SEQ ID NO: 1271652
uccuuucagcaaagagcaa

SEQ ID NO: 1271654 - RNA, 19 nt, Artificial Sequence
  Description of Artificial Sequence: Synthetic oligonucleotide
  Sense strand starting at position 3018 of SEQ ID NO: 1241426
guggauuguuuaccgauga

SEQ ID NO: 1271655 - RNA, 19 nt, Artificial Sequence
  Description of Artificial Sequence: Synthetic oligonucleotide
  Antisense strand to SEQ ID NO: 1271654
ucaucgguaaacaauccac

SEQ ID NO: 1271656 - RNA, 19 nt, Artificial Sequence
  Description of Artificial Sequence: Synthetic oligonucleotide
  Sense strand starting at position 3022 of SEQ ID NO: 1241426
auuguuuaccgaugaucaa

SEQ ID NO: 1271657 - RNA, 19 nt, Artificial Sequence
  Description of Artificial Sequence: Synthetic oligonucleotide
  Antisense strand to SEQ ID NO: 1271656
uugaucaucgguaaacaau

SEQ ID NO: 1271658 - RNA, 19 nt, Artificial Sequence
  Description of Artificial Sequence: Synthetic oligonucleotide
  Sense strand starting at position 3023 of SEQ ID NO: 1241426
uuguuuaccgaugaucaau

SEQ ID NO: 1271659 - RNA, 19 nt, Artificial Sequence
  Description of Artificial Sequence: Synthetic oligonucleotide
  Antisense strand to SEQ ID NO: 1271658
auugaucaucgguaaacaa

SEQ ID NO: 1271660 - RNA, 19 nt, Artificial Sequence
  Description of Artificial Sequence: Synthetic oligonucleotide
  Sense strand starting at position 3264 of SEQ ID NO: 1241426
uguacaugggcugguuaaa

SEQ ID NO: 1271661 - RNA, 19 nt, Artificial Sequence
  Description of Artificial Sequence: Synthetic oligonucleotide
  Antisense strand to SEQ ID NO: 1271660
uuuaaccagcccauguaca

SEQ ID NO: 1271662 - RNA, 19 nt, Artificial Sequence
  Description of Artificial Sequence: Synthetic oligonucleotide
  Sense strand starting at position 3356 of SEQ ID NO: 1241426
aguguauaguggccugaga

SEQ ID NO: 1271663 - RNA, 19 nt, Artificial Sequence
  Description of Artificial Sequence: Synthetic oligonucleotide
  Antisense strand to SEQ ID NO: 1271662
ucucaggccacuauacacu

SEQ ID NO: 1271664 - RNA, 19 nt, Artificial Sequence
  Description of Artificial Sequence: Synthetic oligonucleotide
  Sense strand starting at position 3358 of SEQ ID NO: 1241426
uguauaguggccugagaua

SEQ ID NO: 1271665 - RNA, 19 nt, Artificial Sequence
  Description of Artificial Sequence: Synthetic oligonucleotide
  Antisense strand to SEQ ID NO: 1271664
uaucucaggccacuauaca

SEQ ID NO: 1271666 - RNA, 19 nt, Artificial Sequence
  Description of Artificial Sequence: Synthetic oligonucleotide
  Sense strand starting at position 3414 of SEQ ID NO: 1241426
acagaugcauugucuuauu

SEQ ID NO: 1271667 - RNA, 19 nt, Artificial Sequence
  Description of Artificial Sequence: Synthetic oligonucleotide
  Antisense strand to SEQ ID NO: 1271666
aauaagacaaugcaucugu

SEQ ID NO: 1271668 - RNA, 19 nt, Artificial Sequence
  Description of Artificial Sequence: Synthetic oligonucleotide
  Sense strand starting at position 3507 of SEQ ID NO: 1241426
agcaaucugucucugaagu

SEQ ID NO: 1271669 - RNA, 19 nt, Artificial Sequence
  Description of Artificial Sequence: Synthetic oligonucleotide
  Antisense strand to SEQ ID NO: 1271668
acuucagagacagauugcu

SEQ ID NO: 1271670 - RNA, 19 nt, Artificial Sequence
  Description of Artificial Sequence: Synthetic oligonucleotide
  Sense strand starting at position 3540 of SEQ ID NO: 1241426
gagcgugugccagaagauc

SEQ ID NO: 1271671 - RNA, 19 nt, Artificial Sequence
  Description of Artificial Sequence: Synthetic oligonucleotide
  Antisense strand to SEQ ID NO: 1271670
gaucuucuggcacacgcuc

SEQ ID NO: 1271672 - RNA, 19 nt, Artificial Sequence
  Description of Artificial Sequence: Synthetic oligonucleotide
  Sense strand starting at position 3553 of SEQ ID NO: 1241426
aagauccagcuuuguugaa

SEQ ID NO: 1271673 - RNA, 19 nt, Artificial Sequence
  Description of Artificial Sequence: Synthetic oligonucleotide
  Antisense strand to SEQ ID NO: 1271672
uucaacaaagcuggaucuu

SEQ ID NO: 1271674 - RNA, 19 nt, Artificial Sequence
  Description of Artificial Sequence: Synthetic oligonucleotide
  Sense strand starting at position 3554 of SEQ ID NO: 1241426
agauccagcuuuguugaaa

SEQ ID NO: 1271675 - RNA, 19 nt, Artificial Sequence
  Description of Artificial Sequence: Synthetic oligonucleotide
  Antisense strand to SEQ ID NO: 1271674
uuucaacaaagcuggaucu

SEQ ID NO: 1271676 - RNA, 19 nt, Artificial Sequence
  Description of Artificial Sequence: Synthetic oligonucleotide
  Sense strand starting at position 3580 of SEQ ID NO: 1241426
ccguuagucccuuaauaca

SEQ ID NO: 1271677 - RNA, 19 nt, Artificial Sequence
  Description of Artificial Sequence: Synthetic oligonucleotide
  Antisense strand to SEQ ID NO: 1271676
uguauuaagggacuaacgg

SEQ ID NO: 1271678 - RNA, 19 nt, Artificial Sequence
  Description of Artificial Sequence: Synthetic oligonucleotide
  Sense strand starting at position 3603 of SEQ ID NO: 1241426
guaaguguaucauuuaugu

SEQ ID NO: 1271679 - RNA, 19 nt, Artificial Sequence
  Description of Artificial Sequence: Synthetic oligonucleotide
  Antisense strand to SEQ ID NO: 1271678
acauaaaugauacacuuac

SEQ ID NO: 1271680 - RNA, 19 nt, Artificial Sequence
  Description of Artificial Sequence: Synthetic oligonucleotide
  Sense strand starting at position 3633 of SEQ ID NO: 1241426
agggcucuugauuagcuua

SEQ ID NO: 1271681 - RNA, 19 nt, Artificial Sequence
  Description of Artificial Sequence: Synthetic oligonucleotide
  Antisense strand to SEQ ID NO: 1271680
uaagcuaaucaagagcccu

SEQ ID NO: 1271682 - RNA, 19 nt, Artificial Sequence
  Description of Artificial Sequence: Synthetic oligonucleotide
  Sense strand starting at position 3635 of SEQ ID NO: 1241426
ggcucuugauuagcuuaca

SEQ ID NO: 1271683 - RNA, 19 nt, Artificial Sequence
  Description of Artificial Sequence: Synthetic oligonucleotide
  Antisense strand to SEQ ID NO: 1271682
uguaagcuaaucaagagcc

SEQ ID NO: 1271684 - RNA, 19 nt, Artificial Sequence
  Description of Artificial Sequence: Synthetic oligonucleotide
  Sense strand starting at position 3636 of SEQ ID NO: 1241426
gcucuugauuagcuuacaa

SEQ ID NO: 1271685 - RNA, 19 nt, Artificial Sequence
  Description of Artificial Sequence: Synthetic oligonucleotide
  Antisense strand to SEQ ID NO: 1271684
uuguaagcuaaucaagagc

SEQ ID NO: 1271686 - RNA, 19 nt, Artificial Sequence
  Description of Artificial Sequence: Synthetic oligonucleotide
  Sense strand starting at position 3659 of SEQ ID NO: 1241426
ccauguuauuuccucaggu

SEQ ID NO: 1271687 - RNA, 19 nt, Artificial Sequence
  Description of Artificial Sequence: Synthetic oligonucleotide
  Antisense strand to SEQ ID NO: 1271686
accugaggaaauaacaugg

SEQ ID NO: 1271688 - RNA, 19 nt, Artificial Sequence
  Description of Artificial Sequence: Synthetic oligonucleotide
  Sense strand starting at position 3765 of SEQ ID NO: 1241426
auaauauuucggugcacuu

SEQ ID NO: 1271689 - RNA, 19 nt, Artificial Sequence
  Description of Artificial Sequence: Synthetic oligonucleotide
  Antisense strand to SEQ ID NO: 1271688
aagugcaccgaaauauuau

SEQ ID NO: 1271690 - RNA, 19 nt, Artificial Sequence
  Description of Artificial Sequence: Synthetic oligonucleotide
  Sense strand starting at position 3842 of SEQ ID NO: 1241426
aaaggaugacuuuguauca

SEQ ID NO: 1271691 - RNA, 19 nt, Artificial Sequence
  Description of Artificial Sequence: Synthetic oligonucleotide
  Antisense strand to SEQ ID NO: 1271690
ugauacaaagucauccuuu

SEQ ID NO: 1271692 - RNA, 19 nt, Artificial Sequence
  Description of Artificial Sequence: Synthetic oligonucleotide
  Sense strand starting at position 3908 of SEQ ID NO: 1241426
gugguugaaugcuuuauuu

SEQ ID NO: 1271693 - RNA, 19 nt, Artificial Sequence
  Description of Artificial Sequence: Synthetic oligonucleotide
  Antisense strand to SEQ ID NO: 1271692
aaauaaagcauucaaccac

SEQ ID NO: 1271694 - RNA, 19 nt, Artificial Sequence
  Description of Artificial Sequence: Synthetic oligonucleotide
  Sense strand starting at position 286 of SEQ ID NO: 1241427
ugggcaacgucucuacaaa

SEQ ID NO: 1271695 - RNA, 19 nt, Artificial Sequence
  Description of Artificial Sequence: Synthetic oligonucleotide
  Antisense strand to SEQ ID NO: 1271694
uuuguagagacguugccca

SEQ ID NO: 1271696 - RNA, 19 nt, Artificial Sequence
  Description of Artificial Sequence: Synthetic oligonucleotide
  Sense strand starting at position 1029 of SEQ ID NO: 1241427
aaagucaacgugugguuaa

SEQ ID NO: 1271697 - RNA, 19 nt, Artificial Sequence
  Description of Artificial Sequence: Synthetic oligonucleotide
  Antisense strand to SEQ ID NO: 1271696
uuaaccacacguugacuuu

SEQ ID NO: 1271698 - RNA, 19 nt, Artificial Sequence
  Description of Artificial Sequence: Synthetic oligonucleotide
  Sense strand starting at position 1073 of SEQ ID NO: 1241427
guaguccuucugggucauu

SEQ ID NO: 1271699 - RNA, 19 nt, Artificial Sequence
  Description of Artificial Sequence: Synthetic oligonucleotide
  Antisense strand to SEQ ID NO: 1271698
aaugacccagaaggacuac

SEQ ID NO: 1271700 - RNA, 19 nt, Artificial Sequence
  Description of Artificial Sequence: Synthetic oligonucleotide
  Sense strand starting at position 1083 of SEQ ID NO: 1241427
ugggucauuccacaccaua

SEQ ID NO: 1271701 - RNA, 19 nt, Artificial Sequence
  Description of Artificial Sequence: Synthetic oligonucleotide
  Antisense strand to SEQ ID NO: 1271700
uaugguguggaaugaccca

SEQ ID NO: 1271702 - RNA, 19 nt, Artificial Sequence
  Description of Artificial Sequence: Synthetic oligonucleotide
  Sense strand starting at position 1196 of SEQ ID NO: 1241427
cuguuucuucuacagagga

SEQ ID NO: 1271703 - RNA, 19 nt, Artificial Sequence
  Description of Artificial Sequence: Synthetic oligonucleotide
  Antisense strand to SEQ ID NO: 1271702
uccucuguagaagaaacag

SEQ ID NO: 1271704 - RNA, 19 nt, Artificial Sequence
  Description of Artificial Sequence: Synthetic oligonucleotide
  Sense strand starting at position 1219 of SEQ ID NO: 1241427
gaaagacaaugguuucgaa

SEQ ID NO: 1271705 - RNA, 19 nt, Artificial Sequence
  Description of Artificial Sequence: Synthetic oligonucleotide
  Antisense strand to SEQ ID NO: 1271704
uucgaaaccauugucuuuc

SEQ ID NO: 1271706 - RNA, 19 nt, Artificial Sequence
  Description of Artificial Sequence: Synthetic oligonucleotide
  Sense strand starting at position 1235 of SEQ ID NO: 1241427
gaaugugacguccaaacua

SEQ ID NO: 1271707 - RNA, 19 nt, Artificial Sequence
  Description of Artificial Sequence: Synthetic oligonucleotide
  Antisense strand to SEQ ID NO: 1271706
uaguuuggacgucacauuc

SEQ ID NO: 1271708 - RNA, 19 nt, Artificial Sequence
  Description of Artificial Sequence: Synthetic oligonucleotide
  Sense strand starting at position 1400 of SEQ ID NO: 1241427
agcauauuugauugcuuau

SEQ ID NO: 1271709 - RNA, 19 nt, Artificial Sequence
  Description of Artificial Sequence: Synthetic oligonucleotide
  Antisense strand to SEQ ID NO: 1271708
auaagcaaucaaauaugcu

SEQ ID NO: 1271710 - RNA, 19 nt, Artificial Sequence
  Description of Artificial Sequence: Synthetic oligonucleotide
  Sense strand starting at position 1505 of SEQ ID NO: 1241427
aaguaacuagcccagaguu

SEQ ID NO: 1271711 - RNA, 19 nt, Artificial Sequence
  Description of Artificial Sequence: Synthetic oligonucleotide
  Antisense strand to SEQ ID NO: 1271710
aacucugggcuaguuacuu

SEQ ID NO: 1271712 - RNA, 19 nt, Artificial Sequence
  Description of Artificial Sequence: Synthetic oligonucleotide
  Sense strand starting at position 2872 of SEQ ID NO: 1241427
ugggcuguguaaucucuaa

SEQ ID NO: 1271713 - RNA, 19 nt, Artificial Sequence
  Description of Artificial Sequence: Synthetic oligonucleotide
  Antisense strand to SEQ ID NO: 1271712
uuagagauuacacagccca

SEQ ID NO: 1271714 - RNA, 19 nt, Artificial Sequence
  Description of Artificial Sequence: Synthetic oligonucleotide
  Sense strand starting at position 2876 of SEQ ID NO: 1241427
cuguguaaucucuaaagga

SEQ ID NO: 1271715 - RNA, 19 nt, Artificial Sequence
  Description of Artificial Sequence: Synthetic oligonucleotide
  Antisense strand to SEQ ID NO: 1271714
uccuuuagagauuacacag

SEQ ID NO: 1271716 - RNA, 19 nt, Artificial Sequence
  Description of Artificial Sequence: Synthetic oligonucleotide
  Sense strand starting at position 2936 of SEQ ID NO: 1241427
acacucauucuguaugcuu

SEQ ID NO: 1271717 - RNA, 19 nt, Artificial Sequence
  Description of Artificial Sequence: Synthetic oligonucleotide
  Antisense strand to SEQ ID NO: 1271716
aagcauacagaaugagugu

SEQ ID NO: 1271718 - RNA, 19 nt, Artificial Sequence
  Description of Artificial Sequence: Synthetic oligonucleotide
  Sense strand starting at position 2938 of SEQ ID NO: 1241427
acucauucuguaugcuuga

SEQ ID NO: 1271719 - RNA, 19 nt, Artificial Sequence
  Description of Artificial Sequence: Synthetic oligonucleotide
  Antisense strand to SEQ ID NO: 1271718
ucaagcauacagaaugagu

SEQ ID NO: 1271720 - RNA, 19 nt, Artificial Sequence
  Description of Artificial Sequence: Synthetic oligonucleotide
  Sense strand starting at position 2943 of SEQ ID NO: 1241427
uucuguaugcuugauggca

SEQ ID NO: 1271721 - RNA, 19 nt, Artificial Sequence
  Description of Artificial Sequence: Synthetic oligonucleotide
  Antisense strand to SEQ ID NO: 1271720
ugccaucaagcauacagaa

SEQ ID NO: 1271722 - RNA, 19 nt, Artificial Sequence
  Description of Artificial Sequence: Synthetic oligonucleotide
  Sense strand starting at position 3044 of SEQ ID NO: 1241427
cuaagaaucuugguuccag

SEQ ID NO: 1271723 - RNA, 19 nt, Artificial Sequence
  Description of Artificial Sequence: Synthetic oligonucleotide
  Antisense strand to SEQ ID NO: 1271722
cuggaaccaagauucuuag

SEQ ID NO: 1271724 - RNA, 19 nt, Artificial Sequence
  Description of Artificial Sequence: Synthetic oligonucleotide
  Sense strand starting at position 3045 of SEQ ID NO: 1241427
uaagaaucuugguuccagu

SEQ ID NO: 1271725 - RNA, 19 nt, Artificial Sequence
  Description of Artificial Sequence: Synthetic oligonucleotide
  Antisense strand to SEQ ID NO: 1271724
acuggaaccaagauucuua

SEQ ID NO: 1271726 - RNA, 19 nt, Artificial Sequence
  Description of Artificial Sequence: Synthetic oligonucleotide
  Sense strand starting at position 3058 of SEQ ID NO: 1241427
uccagucuuuggucaggua

SEQ ID NO: 1271727 - RNA, 19 nt, Artificial Sequence
  Description of Artificial Sequence: Synthetic oligonucleotide
  Antisense strand to SEQ ID NO: 1271726
uaccugaccaaagacugga

SEQ ID NO: 1271728 - RNA, 19 nt, Artificial Sequence
  Description of Artificial Sequence: Synthetic oligonucleotide
  Sense strand starting at position 3071 of SEQ ID NO: 1241427
cagguagcuccaggaaauc

SEQ ID NO: 1271729 - RNA, 19 nt, Artificial Sequence
  Description of Artificial Sequence: Synthetic oligonucleotide
  Antisense strand to SEQ ID NO: 1271728
gauuuccuggagcuaccug

SEQ ID NO: 1271730 - RNA, 19 nt, Artificial Sequence
  Description of Artificial Sequence: Synthetic oligonucleotide
  Sense strand starting at position 3158 of SEQ ID NO: 1241427
ggccguugagcggauuaca

SEQ ID NO: 1271731 - RNA, 19 nt, Artificial Sequence
  Description of Artificial Sequence: Synthetic oligonucleotide
  Antisense strand to SEQ ID NO: 1271730
uguaauccgcucaacggcc

SEQ ID NO: 1271732 - RNA, 19 nt, Artificial Sequence
  Description of Artificial Sequence: Synthetic oligonucleotide
  Sense strand starting at position 3166 of SEQ ID NO: 1241427
agcggauuacacgagauaa

SEQ ID NO: 1271733 - RNA, 19 nt, Artificial Sequence
  Description of Artificial Sequence: Synthetic oligonucleotide
  Antisense strand to SEQ ID NO: 1271732
uuaucucguguaauccgcu

SEQ ID NO: 1271734 - RNA, 19 nt, Artificial Sequence
  Description of Artificial Sequence: Synthetic oligonucleotide
  Sense strand starting at position 3192 of SEQ ID NO: 1241427
agguguuuagcacagugaa

SEQ ID NO: 1271735 - RNA, 19 nt, Artificial Sequence
  Description of Artificial Sequence: Synthetic oligonucleotide
  Antisense strand to SEQ ID NO: 1271734
uucacugugcuaaacaccu

SEQ ID NO: 1271736 - RNA, 19 nt, Artificial Sequence
  Description of Artificial Sequence: Synthetic oligonucleotide
  Sense strand starting at position 3209 of SEQ ID NO: 1241427
aagcauuugcuacgugaug

SEQ ID NO: 1271737 - RNA, 19 nt, Artificial Sequence
  Description of Artificial Sequence: Synthetic oligonucleotide
  Antisense strand to SEQ ID NO: 1271736
caucacguagcaaaugcuu

SEQ ID NO: 1271738 - RNA, 19 nt, Artificial Sequence
  Description of Artificial Sequence: Synthetic oligonucleotide
  Sense strand starting at position 3210 of SEQ ID NO: 1241427
agcauuugcuacgugauga

SEQ ID NO: 1271739 - RNA, 19 nt, Artificial Sequence
  Description of Artificial Sequence: Synthetic oligonucleotide
  Antisense strand to SEQ ID NO: 1271738
ucaucacguagcaaaugcu

SEQ ID NO: 1271740 - RNA, 19 nt, Artificial Sequence
  Description of Artificial Sequence: Synthetic oligonucleotide
  Sense strand starting at position 3211 of SEQ ID NO: 1241427
gcauuugcuacgugaugac

SEQ ID NO: 1271741 - RNA, 19 nt, Artificial Sequence
  Description of Artificial Sequence: Synthetic oligonucleotide
  Antisense strand to SEQ ID NO: 1271740
gucaucacguagcaaaugc

SEQ ID NO: 1271742 - RNA, 19 nt, Artificial Sequence
  Description of Artificial Sequence: Synthetic oligonucleotide
  Sense strand starting at position 3224 of SEQ ID NO: 1241427
gaugacauuuauuaugguu

SEQ ID NO: 1271743 - RNA, 19 nt, Artificial Sequence
  Description of Artificial Sequence: Synthetic oligonucleotide
  Antisense strand to SEQ ID NO: 1271742
aaccauaauaaaugucauc

SEQ ID NO: 1271744 - RNA, 19 nt, Artificial Sequence
  Description of Artificial Sequence: Synthetic oligonucleotide
  Sense strand starting at position 3266 of SEQ ID NO: 1241427
ugguacauaguuugcuuua

SEQ ID NO: 1271745 - RNA, 19 nt, Artificial Sequence
  Description of Artificial Sequence: Synthetic oligonucleotide
  Antisense strand to SEQ ID NO: 1271744
uaaagcaaacuauguacca

SEQ ID NO: 1271746 - RNA, 19 nt, Artificial Sequence
  Description of Artificial Sequence: Synthetic oligonucleotide
  Sense strand starting at position 3267 of SEQ ID NO: 1241427
gguacauaguuugcuuuau

SEQ ID NO: 1271747 - RNA, 19 nt, Artificial Sequence
  Description of Artificial Sequence: Synthetic oligonucleotide
  Antisense strand to SEQ ID NO: 1271746
auaaagcaaacuauguacc

SEQ ID NO: 1271748 - RNA, 19 nt, Artificial Sequence
  Description of Artificial Sequence: Synthetic oligonucleotide
  Sense strand starting at position 3268 of SEQ ID NO: 1241427
guacauaguuugcuuuauu

SEQ ID NO: 1271749 - RNA, 19 nt, Artificial Sequence
  Description of Artificial Sequence: Synthetic oligonucleotide
  Antisense strand to SEQ ID NO: 1271748
aauaaagcaaacuauguac

SEQ ID NO: 1271750 - RNA, 19 nt, Artificial Sequence
  Description of Artificial Sequence: Synthetic oligonucleotide
  Sense strand starting at position 3356 of SEQ ID NO: 1241427
uugugagguaauuguggau

SEQ ID NO: 1271751 - RNA, 19 nt, Artificial Sequence
  Description of Artificial Sequence: Synthetic oligonucleotide
  Antisense strand to SEQ ID NO: 1271750
auccacaauuaccucacaa

SEQ ID NO: 1271752 - RNA, 19 nt, Artificial Sequence
  Description of Artificial Sequence: Synthetic oligonucleotide
  Sense strand starting at position 3524 of SEQ ID NO: 1241427
guguucucuguguauauuu

SEQ ID NO: 1271753 - RNA, 19 nt, Artificial Sequence
  Description of Artificial Sequence: Synthetic oligonucleotide
  Antisense strand to SEQ ID NO: 1271752
aaauauacacagagaacac

SEQ ID NO: 1271754 - RNA, 19 nt, Artificial Sequence
  Description of Artificial Sequence: Synthetic oligonucleotide
  Sense strand starting at position 3551 of SEQ ID NO: 1241427
augguuaucagguguguag

SEQ ID NO: 1271755 - RNA, 19 nt, Artificial Sequence
  Description of Artificial Sequence: Synthetic oligonucleotide
  Antisense strand to SEQ ID NO: 1271754
cuacacaccugauaaccau

SEQ ID NO: 1271756 - RNA, 19 nt, Artificial Sequence
  Description of Artificial Sequence: Synthetic oligonucleotide
  Sense strand starting at position 3553 of SEQ ID NO: 1241427
gguuaucagguguguagau

SEQ ID NO: 1271757 - RNA, 19 nt, Artificial Sequence
  Description of Artificial Sequence: Synthetic oligonucleotide
  Antisense strand to SEQ ID NO: 1271756
aucuacacaccugauaacc

SEQ ID NO: 1271758 - RNA, 19 nt, Artificial Sequence
  Description of Artificial Sequence: Synthetic oligonucleotide
  Sense strand starting at position 3554 of SEQ ID NO: 1241427
guuaucagguguguagauu

SEQ ID NO: 1271759 - RNA, 19 nt, Artificial Sequence
  Description of Artificial Sequence: Synthetic oligonucleotide
  Antisense strand to SEQ ID NO: 1271758
aaucuacacaccugauaac

SEQ ID NO: 1271760 - RNA, 19 nt, Artificial Sequence
  Description of Artificial Sequence: Synthetic oligonucleotide
  Sense strand starting at position 3775 of SEQ ID NO: 1241427
ucagcauaaucccuugaga

SEQ ID NO: 1271761 - RNA, 19 nt, Artificial Sequence
  Description of Artificial Sequence: Synthetic oligonucleotide
  Antisense strand to SEQ ID NO: 1271760
ucucaagggauuaugcuga

SEQ ID NO: 1271762 - RNA, 19 nt, Artificial Sequence
  Description of Artificial Sequence: Synthetic oligonucleotide
  Sense strand starting at position 3777 of SEQ ID NO: 1241427
agcauaaucccuugagaua

SEQ ID NO: 1271763 - RNA, 19 nt, Artificial Sequence
  Description of Artificial Sequence: Synthetic oligonucleotide
  Antisense strand to SEQ ID NO: 1271762
uaucucaagggauuaugcu

SEQ ID NO: 1271764 - RNA, 19 nt, Artificial Sequence
  Description of Artificial Sequence: Synthetic oligonucleotide
  Sense strand starting at position 3778 of SEQ ID NO: 1241427
gcauaaucccuugagauau

SEQ ID NO: 1271765 - RNA, 19 nt, Artificial Sequence
  Description of Artificial Sequence: Synthetic oligonucleotide
  Antisense strand to SEQ ID NO: 1271764
auaucucaagggauuaugc

SEQ ID NO: 1271766 - RNA, 19 nt, Artificial Sequence
  Description of Artificial Sequence: Synthetic oligonucleotide
  Sense strand starting at position 3843 of SEQ ID NO: 1241427
agugguauuccauaaugua

SEQ ID NO: 1271767 - RNA, 19 nt, Artificial Sequence
  Description of Artificial Sequence: Synthetic oligonucleotide
  Antisense strand to SEQ ID NO: 1271766
uacauuauggaauaccacu

SEQ ID NO: 1271768 - RNA, 19 nt, Artificial Sequence
  Description of Artificial Sequence: Synthetic oligonucleotide
  Sense strand starting at position 3859 of SEQ ID NO: 1241427
guagauguacuacaguauu

SEQ ID NO: 1271769 - RNA, 19 nt, Artificial Sequence
  Description of Artificial Sequence: Synthetic oligonucleotide
  Antisense strand to SEQ ID NO: 1271768
aauacuguaguacaucuac

SEQ ID NO: 1271770 - RNA, 19 nt, Artificial Sequence
  Description of Artificial Sequence: Synthetic oligonucleotide
  Sense strand starting at position 3862 of SEQ ID NO: 1241427
gauguacuacaguauugau

SEQ ID NO: 1271771 - RNA, 19 nt, Artificial Sequence
  Description of Artificial Sequence: Synthetic oligonucleotide
  Antisense strand to SEQ ID NO: 1271770
aucaauacuguaguacauc

SEQ ID NO: 1271772 - RNA, 19 nt, Artificial Sequence
  Description of Artificial Sequence: Synthetic oligonucleotide
  Sense strand starting at position 3926 of SEQ ID NO: 1241427
ucaccauucccauguguug

SEQ ID NO: 1271773 - RNA, 19 nt, Artificial Sequence
  Description of Artificial Sequence: Synthetic oligonucleotide
  Antisense strand to SEQ ID NO: 1271772
caacacaugggaaugguga

SEQ ID NO: 1271774 - RNA, 19 nt, Artificial Sequence
  Description of Artificial Sequence: Synthetic oligonucleotide
  Sense strand starting at position 43 of SEQ ID NO: 1241428
aggucaagugguugacuga

SEQ ID NO: 1271775 - RNA, 19 nt, Artificial Sequence
  Description of Artificial Sequence: Synthetic oligonucleotide
  Antisense strand to SEQ ID NO: 1271774
ucagucaaccacuugaccu

SEQ ID NO: 1271776 - RNA, 19 nt, Artificial Sequence
  Description of Artificial Sequence: Synthetic oligonucleotide
  Sense strand starting at position 78 of SEQ ID NO: 1241428
ccagaaaugagauguaguu

SEQ ID NO: 1271777 - RNA, 19 nt, Artificial Sequence
  Description of Artificial Sequence: Synthetic oligonucleotide
  Antisense strand to SEQ ID NO: 1271776
aacuacaucucauuucugg

SEQ ID NO: 1271778 - RNA, 19 nt, Artificial Sequence
  Description of Artificial Sequence: Synthetic oligonucleotide
  Sense strand starting at position 94 of SEQ ID NO: 1241428
guuuguguuccugcugcca

SEQ ID NO: 1271779 - RNA, 19 nt, Artificial Sequence
  Description of Artificial Sequence: Synthetic oligonucleotide
  Antisense strand to SEQ ID NO: 1271778
uggcagcaggaacacaaac

SEQ ID NO: 1271780 - RNA, 19 nt, Artificial Sequence
  Description of Artificial Sequence: Synthetic oligonucleotide
  Sense strand starting at position 125 of SEQ ID NO: 1241428
uacagaagucuagaguguu

SEQ ID NO: 1271781 - RNA, 19 nt, Artificial Sequence
  Description of Artificial Sequence: Synthetic oligonucleotide
  Antisense strand to SEQ ID NO: 1271780
aacacucuagacuucugua

SEQ ID NO: 1271782 - RNA, 19 nt, Artificial Sequence
  Description of Artificial Sequence: Synthetic oligonucleotide
  Sense strand starting at position 128 of SEQ ID NO: 1241428
agaagucuagaguguuucu

SEQ ID NO: 1271783 - RNA, 19 nt, Artificial Sequence
  Description of Artificial Sequence: Synthetic oligonucleotide
  Antisense strand to SEQ ID NO: 1271782
agaaacacucuagacuucu

SEQ ID NO: 1271784 - RNA, 19 nt, Artificial Sequence
  Description of Artificial Sequence: Synthetic oligonucleotide
  Sense strand starting at position 133 of SEQ ID NO: 1241428
ucuagaguguuucuacucu

SEQ ID NO: 1271785 - RNA, 19 nt, Artificial Sequence
  Description of Artificial Sequence: Synthetic oligonucleotide
  Antisense strand to SEQ ID NO: 1271784
agaguagaaacacucuaga

SEQ ID NO: 1271786 - RNA, 19 nt, Artificial Sequence
  Description of Artificial Sequence: Synthetic oligonucleotide
  Sense strand starting at position 192 of SEQ ID NO: 1241428
aguuaaacuguugagguuu

SEQ ID NO: 1271787 - RNA, 19 nt, Artificial Sequence
  Description of Artificial Sequence: Synthetic oligonucleotide
  Antisense strand to SEQ ID NO: 1271786
aaaccucaacaguuuaacu

SEQ ID NO: 1271788 - RNA, 19 nt, Artificial Sequence
  Description of Artificial Sequence: Synthetic oligonucleotide
  Sense strand starting at position 318 of SEQ ID NO: 1241428
ucguuaacucguggauuuc

SEQ ID NO: 1271789 - RNA, 19 nt, Artificial Sequence
  Description of Artificial Sequence: Synthetic oligonucleotide
  Antisense strand to SEQ ID NO: 1271788
gaaauccacgaguuaacga

SEQ ID NO: 1271790 - RNA, 19 nt, Artificial Sequence
  Description of Artificial Sequence: Synthetic oligonucleotide
  Sense strand starting at position 363 of SEQ ID NO: 1241428
ccuguucuaucaguuauca

SEQ ID NO: 1271791 - RNA, 19 nt, Artificial Sequence
  Description of Artificial Sequence: Synthetic oligonucleotide
  Antisense strand to SEQ ID NO: 1271790
ugauaacugauagaacagg

SEQ ID NO: 1271792 - RNA, 19 nt, Artificial Sequence
  Description of Artificial Sequence: Synthetic oligonucleotide
  Sense strand starting at position 450 of SEQ ID NO: 1241428
uuugcauggcuugaagauu

SEQ ID NO: 1271793 - RNA, 19 nt, Artificial Sequence
  Description of Artificial Sequence: Synthetic oligonucleotide
  Antisense strand to SEQ ID NO: 1271792
aaucuucaagccaugcaaa

SEQ ID NO: 1271794 - RNA, 19 nt, Artificial Sequence
  Description of Artificial Sequence: Synthetic oligonucleotide
  Sense strand starting at position 479 of SEQ ID NO: 1241428
ggauaacucuauuccuggu

SEQ ID NO: 1271795 - RNA, 19 nt, Artificial Sequence
  Description of Artificial Sequence: Synthetic oligonucleotide
  Antisense strand to SEQ ID NO: 1271794
accaggaauagaguuaucc

SEQ ID NO: 1271796 - RNA, 19 nt, Artificial Sequence
  Description of Artificial Sequence: Synthetic oligonucleotide
  Sense strand starting at position 567 of SEQ ID NO: 1241428
gagguaguagucugaugag

SEQ ID NO: 1271797 - RNA, 19 nt, Artificial Sequence
  Description of Artificial Sequence: Synthetic oligonucleotide
  Antisense strand to SEQ ID NO: 1271796
cucaucagacuacuaccuc

SEQ ID NO: 1271798 - RNA, 19 nt, Artificial Sequence
  Description of Artificial Sequence: Synthetic oligonucleotide
  Sense strand starting at position 616 of SEQ ID NO: 1241428
uccuguaaggguuaugguu

SEQ ID NO: 1271799 - RNA, 19 nt, Artificial Sequence
  Description of Artificial Sequence: Synthetic oligonucleotide
  Antisense strand to SEQ ID NO: 1271798
aaccauaacccuuacagga

SEQ ID NO: 1271800 - RNA, 19 nt, Artificial Sequence
  Description of Artificial Sequence: Synthetic oligonucleotide
  Sense strand starting at position 708 of SEQ ID NO: 1241428
gcucaauaggccuagggaa

SEQ ID NO: 1271801 - RNA, 19 nt, Artificial Sequence
  Description of Artificial Sequence: Synthetic oligonucleotide
  Antisense strand to SEQ ID NO: 1271800
uucccuaggccuauugagc

SEQ ID NO: 1271802 - RNA, 19 nt, Artificial Sequence
  Description of Artificial Sequence: Synthetic oligonucleotide
  Sense strand starting at position 720 of SEQ ID NO: 1241428
uagggaacuuuagcgauca

SEQ ID NO: 1271803 - RNA, 19 nt, Artificial Sequence
  Description of Artificial Sequence: Synthetic oligonucleotide
  Antisense strand to SEQ ID NO: 1271802
ugaucgcuaaaguucccua

SEQ ID NO: 1271804 - RNA, 19 nt, Artificial Sequence
  Description of Artificial Sequence: Synthetic oligonucleotide
  Sense strand starting at position 722 of SEQ ID NO: 1241428
gggaacuuuagcgaucaua

SEQ ID NO: 1271805 - RNA, 19 nt, Artificial Sequence
  Description of Artificial Sequence: Synthetic oligonucleotide
  Antisense strand to SEQ ID NO: 1271804
uaugaucgcuaaaguuccc

SEQ ID NO: 1271806 - RNA, 19 nt, Artificial Sequence
  Description of Artificial Sequence: Synthetic oligonucleotide
  Sense strand starting at position 748 of SEQ ID NO: 1241428
ugcaaucuaucuccaggaa

SEQ ID NO: 1271807 - RNA, 19 nt, Artificial Sequence
  Description of Artificial Sequence: Synthetic oligonucleotide
  Antisense strand to SEQ ID NO: 1271806
uuccuggagauagauugca

SEQ ID NO: 1271808 - RNA, 19 nt, Artificial Sequence
  Description of Artificial Sequence: Synthetic oligonucleotide
  Sense strand starting at position 749 of SEQ ID NO: 1241428
gcaaucuaucuccaggaau

SEQ ID NO: 1271809 - RNA, 19 nt, Artificial Sequence
  Description of Artificial Sequence: Synthetic oligonucleotide
  Antisense strand to SEQ ID NO: 1271808
auuccuggagauagauugc

SEQ ID NO: 1271810 - RNA, 19 nt, Artificial Sequence
  Description of Artificial Sequence: Synthetic oligonucleotide
  Sense strand starting at position 763 of SEQ ID NO: 1241428
ggaauacaguaucuugcau

SEQ ID NO: 1271811 - RNA, 19 nt, Artificial Sequence
  Description of Artificial Sequence: Synthetic oligonucleotide
  Antisense strand to SEQ ID NO: 1271810
augcaagauacuguauucc

SEQ ID NO: 1271812 - RNA, 19 nt, Artificial Sequence
  Description of Artificial Sequence: Synthetic oligonucleotide
  Sense strand starting at position 910 of SEQ ID NO: 1241428
guguuccuguucuuaaaga

SEQ ID NO: 1271813 - RNA, 19 nt, Artificial Sequence
  Description of Artificial Sequence: Synthetic oligonucleotide
  Antisense strand to SEQ ID NO: 1271812
ucuuuaagaacaggaacac

SEQ ID NO: 1271814 - RNA, 19 nt, Artificial Sequence
  Description of Artificial Sequence: Synthetic oligonucleotide
  Sense strand starting at position 1032 of SEQ ID NO: 1241428
guaacuuauuaagugugau

SEQ ID NO: 1271815 - RNA, 19 nt, Artificial Sequence
  Description of Artificial Sequence: Synthetic oligonucleotide
  Antisense strand to SEQ ID NO: 1271814
aucacacuuaauaaguuac

SEQ ID NO: 1271816 - RNA, 19 nt, Artificial Sequence
  Description of Artificial Sequence: Synthetic oligonucleotide
  Sense strand starting at position 1035 of SEQ ID NO: 1241428
acuuauuaagugugauucu

SEQ ID NO: 1271817 - RNA, 19 nt, Artificial Sequence
  Description of Artificial Sequence: Synthetic oligonucleotide
  Antisense strand to SEQ ID NO: 1271816
agaaucacacuuaauaagu

SEQ ID NO: 1271818 - RNA, 19 nt, Artificial Sequence
  Description of Artificial Sequence: Synthetic oligonucleotide
  Sense strand starting at position 1046 of SEQ ID NO: 1241428
gugauucugugucuaccaa

SEQ ID NO: 1271819 - RNA, 19 nt, Artificial Sequence
  Description of Artificial Sequence: Synthetic oligonucleotide
  Antisense strand to SEQ ID NO: 1271818
uugguagacacagaaucac

SEQ ID NO: 1271820 - RNA, 19 nt, Artificial Sequence
  Description of Artificial Sequence: Synthetic oligonucleotide
  Sense strand starting at position 1140 of SEQ ID NO: 1241428
uuuauccaccggugaaauc

SEQ ID NO: 1271821 - RNA, 19 nt, Artificial Sequence
  Description of Artificial Sequence: Synthetic oligonucleotide
  Antisense strand to SEQ ID NO: 1271820
gauuucaccgguggauaaa

SEQ ID NO: 1271822 - RNA, 19 nt, Artificial Sequence
  Description of Artificial Sequence: Synthetic oligonucleotide
  Sense strand starting at position 1151 of SEQ ID NO: 1241428
gugaaaucucuaggaaugc

SEQ ID NO: 1271823 - RNA, 19 nt, Artificial Sequence
  Description of Artificial Sequence: Synthetic oligonucleotide
  Antisense strand to SEQ ID NO: 1271822
gcauuccuagagauuucac

SEQ ID NO: 1271824 - RNA, 19 nt, Artificial Sequence
  Description of Artificial Sequence: Synthetic oligonucleotide
  Sense strand starting at position 1160 of SEQ ID NO: 1241428
cuaggaaugccucaccagu

SEQ ID NO: 1271825 - RNA, 19 nt, Artificial Sequence
  Description of Artificial Sequence: Synthetic oligonucleotide
  Antisense strand to SEQ ID NO: 1271824
acuggugaggcauuccuag

SEQ ID NO: 1271826 - RNA, 19 nt, Artificial Sequence
  Description of Artificial Sequence: Synthetic oligonucleotide
  Sense strand starting at position 1305 of SEQ ID NO: 1241428
acacguuggcagugauuua

SEQ ID NO: 1271827 - RNA, 19 nt, Artificial Sequence
  Description of Artificial Sequence: Synthetic oligonucleotide
  Antisense strand to SEQ ID NO: 1271826
uaaaucacugccaacgugu

SEQ ID NO: 1271828 - RNA, 19 nt, Artificial Sequence
  Description of Artificial Sequence: Synthetic oligonucleotide
  Sense strand starting at position 1312 of SEQ ID NO: 1241428
ggcagugauuuaccuuucu

SEQ ID NO: 1271829 - RNA, 19 nt, Artificial Sequence
  Description of Artificial Sequence: Synthetic oligonucleotide
  Antisense strand to SEQ ID NO: 1271828
agaaagguaaaucacugcc

SEQ ID NO: 1271830 - RNA, 19 nt, Artificial Sequence
  Description of Artificial Sequence: Synthetic oligonucleotide
  Sense strand starting at position 1340 of SEQ ID NO: 1241428
aagguuucgcggaguaggu

SEQ ID NO: 1271831 - RNA, 19 nt, Artificial Sequence
  Description of Artificial Sequence: Synthetic oligonucleotide
  Antisense strand to SEQ ID NO: 1271830
accuacuccgcgaaaccuu

SEQ ID NO: 1271832 - RNA, 19 nt, Artificial Sequence
  Description of Artificial Sequence: Synthetic oligonucleotide
  Sense strand starting at position 2766 of SEQ ID NO: 1241428
gugauaggcuguuuauuuc

SEQ ID NO: 1271833 - RNA, 19 nt, Artificial Sequence
  Description of Artificial Sequence: Synthetic oligonucleotide
  Antisense strand to SEQ ID NO: 1271832
gaaauaaacagccuaucac

SEQ ID NO: 1271834 - RNA, 19 nt, Artificial Sequence
  Description of Artificial Sequence: Synthetic oligonucleotide
  Sense strand starting at position 2968 of SEQ ID NO: 1241428
ugauuacaauugguuacaa

SEQ ID NO: 1271835 - RNA, 19 nt, Artificial Sequence
  Description of Artificial Sequence: Synthetic oligonucleotide
  Antisense strand to SEQ ID NO: 1271834
uuguaaccaauuguaauca

SEQ ID NO: 1271836 - RNA, 19 nt, Artificial Sequence
  Description of Artificial Sequence: Synthetic oligonucleotide
  Sense strand starting at position 3172 of SEQ ID NO: 1241428
ggcagucuagauugugaau

SEQ ID NO: 1271837 - RNA, 19 nt, Artificial Sequence
  Description of Artificial Sequence: Synthetic oligonucleotide
  Antisense strand to SEQ ID NO: 1271836
auucacaaucuagacugcc

SEQ ID NO: 1271838 - RNA, 19 nt, Artificial Sequence
  Description of Artificial Sequence: Synthetic oligonucleotide
  Sense strand starting at position 3181 of SEQ ID NO: 1241428
gauugugaauucgugaaua

SEQ ID NO: 1271839 - RNA, 19 nt, Artificial Sequence
  Description of Artificial Sequence: Synthetic oligonucleotide
  Antisense strand to SEQ ID NO: 1271838
uauucacgaauucacaauc

SEQ ID NO: 1271840 - RNA, 19 nt, Artificial Sequence
  Description of Artificial Sequence: Synthetic oligonucleotide
  Sense strand starting at position 3183 of SEQ ID NO: 1241428
uugugaauucgugaauaau

SEQ ID NO: 1271841 - RNA, 19 nt, Artificial Sequence
  Description of Artificial Sequence: Synthetic oligonucleotide
  Antisense strand to SEQ ID NO: 1271840
auuauucacgaauucacaa

SEQ ID NO: 1271842 - RNA, 19 nt, Artificial Sequence
  Description of Artificial Sequence: Synthetic oligonucleotide
  Sense strand starting at position 3192 of SEQ ID NO: 1241428
cgugaauaauuugggaaau

SEQ ID NO: 1271843 - RNA, 19 nt, Artificial Sequence
  Description of Artificial Sequence: Synthetic oligonucleotide
  Antisense strand to SEQ ID NO: 1271842
auuucccaaauuauucacg

SEQ ID NO: 1271844 - RNA, 19 nt, Artificial Sequence
  Description of Artificial Sequence: Synthetic oligonucleotide
  Sense strand starting at position 3644 of SEQ ID NO: 1241428
ggucaaagacaacguauua

SEQ ID NO: 1271845 - RNA, 19 nt, Artificial Sequence
  Description of Artificial Sequence: Synthetic oligonucleotide
  Antisense strand to SEQ ID NO: 1271844
uaauacguugucuuugacc

SEQ ID NO: 1271846 - RNA, 19 nt, Artificial Sequence
  Description of Artificial Sequence: Synthetic oligonucleotide
  Sense strand starting at position 3768 of SEQ ID NO: 1241428
cagugacagccuugaugaa

SEQ ID NO: 1271847 - RNA, 19 nt, Artificial Sequence
  Description of Artificial Sequence: Synthetic oligonucleotide
  Antisense strand to SEQ ID NO: 1271846
uucaucaaggcugucacug

SEQ ID NO: 1271848 - RNA, 19 nt, Artificial Sequence
  Description of Artificial Sequence: Synthetic oligonucleotide
  Sense strand starting at position 3855 of SEQ ID NO: 1241428
uugcauaccucuguuauga

SEQ ID NO: 1271849 - RNA, 19 nt, Artificial Sequence
  Description of Artificial Sequence: Synthetic oligonucleotide
  Antisense strand to SEQ ID NO: 1271848
ucauaacagagguaugcaa

SEQ ID NO: 1271850 - RNA, 19 nt, Artificial Sequence
  Description of Artificial Sequence: Synthetic oligonucleotide
  Sense strand starting at position 3935 of SEQ ID NO: 1241428
ugauaauugugugucuaca

SEQ ID NO: 1271851 - RNA, 19 nt, Artificial Sequence
  Description of Artificial Sequence: Synthetic oligonucleotide
  Antisense strand to SEQ ID NO: 1271850
uguagacacacaauuauca

SEQ ID NO: 1271852 - RNA, 19 nt, Artificial Sequence
  Description of Artificial Sequence: Synthetic oligonucleotide
  Sense strand starting at position 3937 of SEQ ID NO: 1241428
auaauugugugucuacaug

SEQ ID NO: 1271853 - RNA, 19 nt, Artificial Sequence
  Description of Artificial Sequence: Synthetic oligonucleotide
  Antisense strand to SEQ ID NO: 1271852
cauguagacacacaauuau

SEQ ID NO: 1271854 - RNA, 19 nt, Artificial Sequence
  Description of Artificial Sequence: Synthetic oligonucleotide
  Sense strand starting at position 22 of SEQ ID NO: 1241429
acguaacuuagugaggcau

SEQ ID NO: 1271855 - RNA, 19 nt, Artificial Sequence
  Description of Artificial Sequence: Synthetic oligonucleotide
  Antisense strand to SEQ ID NO: 1271854
augccucacuaaguuacgu

SEQ ID NO: 1271856 - RNA, 19 nt, Artificial Sequence
  Description of Artificial Sequence: Synthetic oligonucleotide
  Sense strand starting at position 186 of SEQ ID NO: 1241429
guaugaucaucuuuagaau

SEQ ID NO: 1271857 - RNA, 19 nt, Artificial Sequence
  Description of Artificial Sequence: Synthetic oligonucleotide
  Antisense strand to SEQ ID NO: 1271856
auucuaaagaugaucauac

SEQ ID NO: 1271858 - RNA, 19 nt, Artificial Sequence
  Description of Artificial Sequence: Synthetic oligonucleotide
  Sense strand starting at position 214 of SEQ ID NO: 1241429
uacccuaaggauugagagu

SEQ ID NO: 1271859 - RNA, 19 nt, Artificial Sequence
  Description of Artificial Sequence: Synthetic oligonucleotide
  Antisense strand to SEQ ID NO: 1271858
acucucaauccuuagggua

SEQ ID NO: 1271860 - RNA, 19 nt, Artificial Sequence
  Description of Artificial Sequence: Synthetic oligonucleotide
  Sense strand starting at position 245 of SEQ ID NO: 1241429
gggagacuauuguuguaga

SEQ ID NO: 1271861 - RNA, 19 nt, Artificial Sequence
  Description of Artificial Sequence: Synthetic oligonucleotide
  Antisense strand to SEQ ID NO: 1271860
ucuacaacaauagucuccc

SEQ ID NO: 1271862 - RNA, 19 nt, Artificial Sequence
  Description of Artificial Sequence: Synthetic oligonucleotide
  Sense strand starting at position 847 of SEQ ID NO: 1241429
uucccagagucacuuuaca

SEQ ID NO: 1271863 - RNA, 19 nt, Artificial Sequence
  Description of Artificial Sequence: Synthetic oligonucleotide
  Antisense strand to SEQ ID NO: 1271862
uguaaagugacucugggaa

SEQ ID NO: 1271864 - RNA, 19 nt, Artificial Sequence
  Description of Artificial Sequence: Synthetic oligonucleotide
  Sense strand starting at position 994 of SEQ ID NO: 1241429
uaguguuucuauuugagca

SEQ ID NO: 1271865 - RNA, 19 nt, Artificial Sequence
  Description of Artificial Sequence: Synthetic oligonucleotide
  Antisense strand to SEQ ID NO: 1271864
ugcucaaauagaaacacua

SEQ ID NO: 1271866 - RNA, 19 nt, Artificial Sequence
  Description of Artificial Sequence: Synthetic oligonucleotide
  Sense strand starting at position 1657 of SEQ ID NO: 1241429
gacgugugugggucucgua

SEQ ID NO: 1271867 - RNA, 19 nt, Artificial Sequence
  Description of Artificial Sequence: Synthetic oligonucleotide
  Antisense strand to SEQ ID NO: 1271866
uacgagacccacacacguc

SEQ ID NO: 1271868 - RNA, 19 nt, Artificial Sequence
  Description of Artificial Sequence: Synthetic oligonucleotide
  Sense strand starting at position 1658 of SEQ ID NO: 1241429
acgugugugggucucguaa

SEQ ID NO: 1271869 - RNA, 19 nt, Artificial Sequence
  Description of Artificial Sequence: Synthetic oligonucleotide
  Antisense strand to SEQ ID NO: 1271868
uuacgagacccacacacgu

SEQ ID NO: 1271870 - RNA, 19 nt, Artificial Sequence
  Description of Artificial Sequence: Synthetic oligonucleotide
  Sense strand starting at position 2258 of SEQ ID NO: 1241429
agugaagaauucgcugaga

SEQ ID NO: 1271871 - RNA, 19 nt, Artificial Sequence
  Description of Artificial Sequence: Synthetic oligonucleotide
  Antisense strand to SEQ ID NO: 1271870
ucucagcgaauucuucacu

SEQ ID NO: 1271872 - RNA, 19 nt, Artificial Sequence
  Description of Artificial Sequence: Synthetic oligonucleotide
  Sense strand starting at position 2260 of SEQ ID NO: 1241429
ugaagaauucgcugagagg

SEQ ID NO: 1271873 - RNA, 19 nt, Artificial Sequence
  Description of Artificial Sequence: Synthetic oligonucleotide
  Antisense strand to SEQ ID NO: 1271872
ccucucagcgaauucuuca

SEQ ID NO: 1271874 - RNA, 19 nt, Artificial Sequence
  Description of Artificial Sequence: Synthetic oligonucleotide
  Sense strand starting at position 2292 of SEQ ID NO: 1241429
gguugcuuuauuuguagaa

SEQ ID NO: 1271875 - RNA, 19 nt, Artificial Sequence
  Description of Artificial Sequence: Synthetic oligonucleotide
  Antisense strand to SEQ ID NO: 1271874
uucuacaaauaaagcaacc

SEQ ID NO: 1271876 - RNA, 19 nt, Artificial Sequence
  Description of Artificial Sequence: Synthetic oligonucleotide
  Sense strand starting at position 2293 of SEQ ID NO: 1241429
guugcuuuauuuguagaau

SEQ ID NO: 1271877 - RNA, 19 nt, Artificial Sequence
  Description of Artificial Sequence: Synthetic oligonucleotide
  Antisense strand to SEQ ID NO: 1271876
auucuacaaauaaagcaac

SEQ ID NO: 1271878 - RNA, 19 nt, Artificial Sequence
  Description of Artificial Sequence: Synthetic oligonucleotide
  Sense strand starting at position 2332 of SEQ ID NO: 1241429
aaugucuauucccuaggga

SEQ ID NO: 1271879 - RNA, 19 nt, Artificial Sequence
  Description of Artificial Sequence: Synthetic oligonucleotide
  Antisense strand to SEQ ID NO: 1271878
ucccuagggaauagacauu

SEQ ID NO: 1271880 - RNA, 19 nt, Artificial Sequence
  Description of Artificial Sequence: Synthetic oligonucleotide
  Sense strand starting at position 2335 of SEQ ID NO: 1241429
gucuauucccuagggaacu

SEQ ID NO: 1271881 - RNA, 19 nt, Artificial Sequence
  Description of Artificial Sequence: Synthetic oligonucleotide
  Antisense strand to SEQ ID NO: 1271880
aguucccuagggaauagac

SEQ ID NO: 1271882 - RNA, 19 nt, Artificial Sequence
  Description of Artificial Sequence: Synthetic oligonucleotide
  Sense strand starting at position 2669 of SEQ ID NO: 1241429
gguccuuaugaaugagauu

SEQ ID NO: 1271883 - RNA, 19 nt, Artificial Sequence
  Description of Artificial Sequence: Synthetic oligonucleotide
  Antisense strand to SEQ ID NO: 1271882
aaucucauucauaaggacc

SEQ ID NO: 1271884 - RNA, 19 nt, Artificial Sequence
  Description of Artificial Sequence: Synthetic oligonucleotide
  Sense strand starting at position 2681 of SEQ ID NO: 1241429
ugagauuggugcccuaaua

SEQ ID NO: 1271885 - RNA, 19 nt, Artificial Sequence
  Description of Artificial Sequence: Synthetic oligonucleotide
  Antisense strand to SEQ ID NO: 1271884
uauuagggcaccaaucuca

SEQ ID NO: 1271886 - RNA, 19 nt, Artificial Sequence
  Description of Artificial Sequence: Synthetic oligonucleotide
  Sense strand starting at position 2841 of SEQ ID NO: 1241429
gugggaaauaaauguauau

SEQ ID NO: 1271887 - RNA, 19 nt, Artificial Sequence
  Description of Artificial Sequence: Synthetic oligonucleotide
  Antisense strand to SEQ ID NO: 1271886
auauacauuuauuucccac

SEQ ID NO: 1271888 - RNA, 19 nt, Artificial Sequence
  Description of Artificial Sequence: Synthetic oligonucleotide
  Sense strand starting at position 2852 of SEQ ID NO: 1241429
auguauauugccuauaagc

SEQ ID NO: 1271889 - RNA, 19 nt, Artificial Sequence
  Description of Artificial Sequence: Synthetic oligonucleotide
  Antisense strand to SEQ ID NO: 1271888
gcuuauaggcaauauacau

SEQ ID NO: 1271890 - RNA, 19 nt, Artificial Sequence
  Description of Artificial Sequence: Synthetic oligonucleotide
  Sense strand starting at position 2854 of SEQ ID NO: 1241429
guauauugccuauaagcua

SEQ ID NO: 1271891 - RNA, 19 nt, Artificial Sequence
  Description of Artificial Sequence: Synthetic oligonucleotide
  Antisense strand to SEQ ID NO: 1271890
uagcuuauaggcaauauac

SEQ ID NO: 1271892 - RNA, 19 nt, Artificial Sequence
  Description of Artificial Sequence: Synthetic oligonucleotide
  Sense strand starting at position 2940 of SEQ ID NO: 1241429
gcucacucaugucuaggaa

SEQ ID NO: 1271893 - RNA, 19 nt, Artificial Sequence
  Description of Artificial Sequence: Synthetic oligonucleotide
  Antisense strand to SEQ ID NO: 1271892
uuccuagacaugagugagc

SEQ ID NO: 1271894 - RNA, 19 nt, Artificial Sequence
  Description of Artificial Sequence: Synthetic oligonucleotide
  Sense strand starting at position 2964 of SEQ ID NO: 1241429
uccagaaauccuggcucuu

SEQ ID NO: 1271895 - RNA, 19 nt, Artificial Sequence
  Description of Artificial Sequence: Synthetic oligonucleotide
  Antisense strand to SEQ ID NO: 1271894
aagagccaggauuucugga

SEQ ID NO: 1271896 - RNA, 19 nt, Artificial Sequence
  Description of Artificial Sequence: Synthetic oligonucleotide
  Sense strand starting at position 3087 of SEQ ID NO: 1241429
cagggacuggcuuauguaa

SEQ ID NO: 1271897 - RNA, 19 nt, Artificial Sequence
  Description of Artificial Sequence: Synthetic oligonucleotide
  Antisense strand to SEQ ID NO: 1271896
uuacauaagccagucccug

SEQ ID NO: 1271898 - RNA, 19 nt, Artificial Sequence
  Description of Artificial Sequence: Synthetic oligonucleotide
  Sense strand starting at position 3122 of SEQ ID NO: 1241429
gguaucaucugguuccuaa

SEQ ID NO: 1271899 - RNA, 19 nt, Artificial Sequence
  Description of Artificial Sequence: Synthetic oligonucleotide
  Antisense strand to SEQ ID NO: 1271898
uuaggaaccagaugauacc

SEQ ID NO: 1271900 - RNA, 19 nt, Artificial Sequence
  Description of Artificial Sequence: Synthetic oligonucleotide
  Sense strand starting at position 3213 of SEQ ID NO: 1241429
agggaaauguuccugugaa

SEQ ID NO: 1271901 - RNA, 19 nt, Artificial Sequence
  Description of Artificial Sequence: Synthetic oligonucleotide
  Antisense strand to SEQ ID NO: 1271900
uucacaggaacauuucccu

SEQ ID NO: 1271902 - RNA, 19 nt, Artificial Sequence
  Description of Artificial Sequence: Synthetic oligonucleotide
  Sense strand starting at position 3261 of SEQ ID NO: 1241429
cuuggcauucucuaggaua

SEQ ID NO: 1271903 - RNA, 19 nt, Artificial Sequence
  Description of Artificial Sequence: Synthetic oligonucleotide
  Antisense strand to SEQ ID NO: 1271902
uauccuagagaaugccaag

SEQ ID NO: 1271904 - RNA, 19 nt, Artificial Sequence
  Description of Artificial Sequence: Synthetic oligonucleotide
  Sense strand starting at position 3263 of SEQ ID NO: 1241429
uggcauucucuaggauaaa

SEQ ID NO: 1271905 - RNA, 19 nt, Artificial Sequence
  Description of Artificial Sequence: Synthetic oligonucleotide
  Antisense strand to SEQ ID NO: 1271904
uuuauccuagagaaugcca

SEQ ID NO: 1271906 - RNA, 19 nt, Artificial Sequence
  Description of Artificial Sequence: Synthetic oligonucleotide
  Sense strand starting at position 3281 of SEQ ID NO: 1241429
acuugaaagugucuuagug

SEQ ID NO: 1271907 - RNA, 19 nt, Artificial Sequence
  Description of Artificial Sequence: Synthetic oligonucleotide
  Antisense strand to SEQ ID NO: 1271906
cacuaagacacuuucaagu

SEQ ID NO: 1271908 - RNA, 19 nt, Artificial Sequence
  Description of Artificial Sequence: Synthetic oligonucleotide
  Sense strand starting at position 3380 of SEQ ID NO: 1241429
uuugaacucuuaucugaag

SEQ ID NO: 1271909 - RNA, 19 nt, Artificial Sequence
  Description of Artificial Sequence: Synthetic oligonucleotide
  Antisense strand to SEQ ID NO: 1271908
cuucagauaagaguucaaa

SEQ ID NO: 1271910 - RNA, 19 nt, Artificial Sequence
  Description of Artificial Sequence: Synthetic oligonucleotide
  Sense strand starting at position 3446 of SEQ ID NO: 1241429
gacuaaccucuggguagua

SEQ ID NO: 1271911 - RNA, 19 nt, Artificial Sequence
  Description of Artificial Sequence: Synthetic oligonucleotide
  Antisense strand to SEQ ID NO: 1271910
uacuacccagagguuaguc

SEQ ID NO: 1271912 - RNA, 19 nt, Artificial Sequence
  Description of Artificial Sequence: Synthetic oligonucleotide
  Sense strand starting at position 3448 of SEQ ID NO: 1241429
cuaaccucuggguaguaaa

SEQ ID NO: 1271913 - RNA, 19 nt, Artificial Sequence
  Description of Artificial Sequence: Synthetic oligonucleotide
  Antisense strand to SEQ ID NO: 1271912
uuuacuacccagagguuag

SEQ ID NO: 1271914 - RNA, 19 nt, Artificial Sequence
  Description of Artificial Sequence: Synthetic oligonucleotide
  Sense strand starting at position 3487 of SEQ ID NO: 1241429
gcccuuggucuccagggaa

SEQ ID NO: 1271915 - RNA, 19 nt, Artificial Sequence
  Description of Artificial Sequence: Synthetic oligonucleotide
  Antisense strand to SEQ ID NO: 1271914
uucccuggagaccaagggc

SEQ ID NO: 1271916 - RNA, 19 nt, Artificial Sequence
  Description of Artificial Sequence: Synthetic oligonucleotide
  Sense strand starting at position 3516 of SEQ ID NO: 1241429
aucuuaagacuuugaguca

SEQ ID NO: 1271917 - RNA, 19 nt, Artificial Sequence
  Description of Artificial Sequence: Synthetic oligonucleotide
  Antisense strand to SEQ ID NO: 1271916
ugacucaaagucuuaagau

SEQ ID NO: 1271918 - RNA, 19 nt, Artificial Sequence
  Description of Artificial Sequence: Synthetic oligonucleotide
  Sense strand starting at position 3560 of SEQ ID NO: 1241429
cccuuagaggguuagccau

SEQ ID NO: 1271919 - RNA, 19 nt, Artificial Sequence
  Description of Artificial Sequence: Synthetic oligonucleotide
  Antisense strand to SEQ ID NO: 1271918
auggcuaacccucuaaggg

SEQ ID NO: 1271920 - RNA, 19 nt, Artificial Sequence
  Description of Artificial Sequence: Synthetic oligonucleotide
  Sense strand starting at position 3703 of SEQ ID NO: 1241429
uugcuuacaccugauugua

SEQ ID NO: 1271921 - RNA, 19 nt, Artificial Sequence
  Description of Artificial Sequence: Synthetic oligonucleotide
  Antisense strand to SEQ ID NO: 1271920
uacaaucagguguaagcaa

SEQ ID NO: 1271922 - RNA, 19 nt, Artificial Sequence
  Description of Artificial Sequence: Synthetic oligonucleotide
  Sense strand starting at position 3706 of SEQ ID NO: 1241429
cuuacaccugauuguauga

SEQ ID NO: 1271923 - RNA, 19 nt, Artificial Sequence
  Description of Artificial Sequence: Synthetic oligonucleotide
  Antisense strand to SEQ ID NO: 1271922
ucauacaaucagguguaag

SEQ ID NO: 1271924 - RNA, 19 nt, Artificial Sequence
  Description of Artificial Sequence: Synthetic oligonucleotide
  Sense strand starting at position 3713 of SEQ ID NO: 1241429
cugauuguaugaucagaca

SEQ ID NO: 1271925 - RNA, 19 nt, Artificial Sequence
  Description of Artificial Sequence: Synthetic oligonucleotide
  Antisense strand to SEQ ID NO: 1271924
ugucugaucauacaaucag

SEQ ID NO: 1271926 - RNA, 19 nt, Artificial Sequence
  Description of Artificial Sequence: Synthetic oligonucleotide
  Sense strand starting at position 3905 of SEQ ID NO: 1241429
uuucuaagauaagcguaaa

SEQ ID NO: 1271927 - RNA, 19 nt, Artificial Sequence
  Description of Artificial Sequence: Synthetic oligonucleotide
  Antisense strand to SEQ ID NO: 1271926
uuuacgcuuaucuuagaaa

SEQ ID NO: 1271928 - RNA, 19 nt, Artificial Sequence
  Description of Artificial Sequence: Synthetic oligonucleotide
  Sense strand starting at position 3947 of SEQ ID NO: 1241429
agauaucauugaguaacuu

SEQ ID NO: 1271929 - RNA, 19 nt, Artificial Sequence
  Description of Artificial Sequence: Synthetic oligonucleotide
  Antisense strand to SEQ ID NO: 1271928
aaguuacucaaugauaucu

SEQ ID NO: 1271930 - RNA, 19 nt, Artificial Sequence
  Description of Artificial Sequence: Synthetic oligonucleotide
  Sense strand starting at position 3957 of SEQ ID NO: 1241429
gaguaacuucuauguacag

SEQ ID NO: 1271931 - RNA, 19 nt, Artificial Sequence
  Description of Artificial Sequence: Synthetic oligonucleotide
  Antisense strand to SEQ ID NO: 1271930
cuguacauagaaguuacuc

SEQ ID NO: 1271932 - RNA, 19 nt, Artificial Sequence
  Description of Artificial Sequence: Synthetic oligonucleotide
  Sense strand starting at position 3972 of SEQ ID NO: 1241429
acagcucacuguguuauuu

SEQ ID NO: 1271933 - RNA, 19 nt, Artificial Sequence
  Description of Artificial Sequence: Synthetic oligonucleotide
  Antisense strand to SEQ ID NO: 1271932
aaauaacacagugagcugu

SEQ ID NO: 1271934 - RNA, 19 nt, Artificial Sequence
  Description of Artificial Sequence: Synthetic oligonucleotide
  Sense strand starting at position 511 of SEQ ID NO: 1241430
gcgagacguggugacucau

SEQ ID NO: 1271935 - RNA, 19 nt, Artificial Sequence
  Description of Artificial Sequence: Synthetic oligonucleotide
  Antisense strand to SEQ ID NO: 1271934
augagucaccacgucucgc

SEQ ID NO: 1271936 - RNA, 19 nt, Artificial Sequence
  Description of Artificial Sequence: Synthetic oligonucleotide
  Sense strand starting at position 917 of SEQ ID NO: 1241430
gcccuuuaacacuggaacu

SEQ ID NO: 1271937 - RNA, 19 nt, Artificial Sequence
  Description of Artificial Sequence: Synthetic oligonucleotide
  Antisense strand to SEQ ID NO: 1271936
aguuccaguguuaaagggc

SEQ ID NO: 1271938 - RNA, 19 nt, Artificial Sequence
  Description of Artificial Sequence: Synthetic oligonucleotide
  Sense strand starting at position 1147 of SEQ ID NO: 1241430
auacuauaaugcuuggcau

SEQ ID NO: 1271939 - RNA, 19 nt, Artificial Sequence
  Description of Artificial Sequence: Synthetic oligonucleotide
  Antisense strand to SEQ ID NO: 1271938
augccaagcauuauaguau

SEQ ID NO: 1271940 - RNA, 19 nt, Artificial Sequence
  Description of Artificial Sequence: Synthetic oligonucleotide
  Sense strand starting at position 1150 of SEQ ID NO: 1241430
cuauaaugcuuggcauaga

SEQ ID NO: 1271941 - RNA, 19 nt, Artificial Sequence
  Description of Artificial Sequence: Synthetic oligonucleotide
  Antisense strand to SEQ ID NO: 1271940
ucuaugccaagcauuauag

SEQ ID NO: 1271942 - RNA, 19 nt, Artificial Sequence
  Description of Artificial Sequence: Synthetic oligonucleotide
  Sense strand starting at position 1287 of SEQ ID NO: 1241430
accagagcuucccugacuu

SEQ ID NO: 1271943 - RNA, 19 nt, Artificial Sequence
  Description of Artificial Sequence: Synthetic oligonucleotide
  Antisense strand to SEQ ID NO: 1271942
aagucagggaagcucuggu

SEQ ID NO: 1271944 - RNA, 19 nt, Artificial Sequence
  Description of Artificial Sequence: Synthetic oligonucleotide
  Sense strand starting at position 1319 of SEQ ID NO: 1241430
ucuuuauaagcuuggguau

SEQ ID NO: 1271945 - RNA, 19 nt, Artificial Sequence
  Description of Artificial Sequence: Synthetic oligonucleotide
  Antisense strand to SEQ ID NO: 1271944
auacccaagcuuauaaaga

SEQ ID NO: 1271946 - RNA, 19 nt, Artificial Sequence
  Description of Artificial Sequence: Synthetic oligonucleotide
  Sense strand starting at position 1320 of SEQ ID NO: 1241430
cuuuauaagcuuggguauu

SEQ ID NO: 1271947 - RNA, 19 nt, Artificial Sequence
  Description of Artificial Sequence: Synthetic oligonucleotide
  Antisense strand to SEQ ID NO: 1271946
aauacccaagcuuauaaag

SEQ ID NO: 1271948 - RNA, 19 nt, Artificial Sequence
  Description of Artificial Sequence: Synthetic oligonucleotide
  Sense strand starting at position 1339 of SEQ ID NO: 1241430
ucuguugucgucguuaaua

SEQ ID NO: 1271949 - RNA, 19 nt, Artificial Sequence
  Description of Artificial Sequence: Synthetic oligonucleotide
  Antisense strand to SEQ ID NO: 1271948
uauuaacgacgacaacaga

SEQ ID NO: 1271950 - RNA, 19 nt, Artificial Sequence
  Description of Artificial Sequence: Synthetic oligonucleotide
  Sense strand starting at position 1371 of SEQ ID NO: 1241430
ggugcaauccuccacauua

SEQ ID NO: 1271951 - RNA, 19 nt, Artificial Sequence
  Description of Artificial Sequence: Synthetic oligonucleotide
  Antisense strand to SEQ ID NO: 1271950
uaauguggaggauugcacc

SEQ ID NO: 1271952 - RNA, 19 nt, Artificial Sequence
  Description of Artificial Sequence: Synthetic oligonucleotide
  Sense strand starting at position 1407 of SEQ ID NO: 1241430
aacuguuccuaggucguaa

SEQ ID NO: 1271953 - RNA, 19 nt, Artificial Sequence
  Description of Artificial Sequence: Synthetic oligonucleotide
  Antisense strand to SEQ ID NO: 1271952
uuacgaccuaggaacaguu

SEQ ID NO: 1271954 - RNA, 19 nt, Artificial Sequence
  Description of Artificial Sequence: Synthetic oligonucleotide
  Sense strand starting at position 1537 of SEQ ID NO: 1241430
ccacaacacgcgugagaaa

SEQ ID NO: 1271955 - RNA, 19 nt, Artificial Sequence
  Description of Artificial Sequence: Synthetic oligonucleotide
  Antisense strand to SEQ ID NO: 1271954
uuucucacgcguguugugg

SEQ ID NO: 1271956 - RNA, 19 nt, Artificial Sequence
  Description of Artificial Sequence: Synthetic oligonucleotide
  Sense strand starting at position 2106 of SEQ ID NO: 1241430
aguaguugcgcacugaagu

SEQ ID NO: 1271957 - RNA, 19 nt, Artificial Sequence
  Description of Artificial Sequence: Synthetic oligonucleotide
  Antisense strand to SEQ ID NO: 1271956
acuucagugcgcaacuacu

SEQ ID NO: 1271958 - RNA, 19 nt, Artificial Sequence
  Description of Artificial Sequence: Synthetic oligonucleotide
  Sense strand starting at position 2321 of SEQ ID NO: 1241430
ccuugaacugacuguaaug

SEQ ID NO: 1271959 - RNA, 19 nt, Artificial Sequence
  Description of Artificial Sequence: Synthetic oligonucleotide
  Antisense strand to SEQ ID NO: 1271958
cauuacagucaguucaagg

SEQ ID NO: 1271960 - RNA, 19 nt, Artificial Sequence
  Description of Artificial Sequence: Synthetic oligonucleotide
  Sense strand starting at position 2333 of SEQ ID NO: 1241430
uguaaugucagucacguau

SEQ ID NO: 1271961 - RNA, 19 nt, Artificial Sequence
  Description of Artificial Sequence: Synthetic oligonucleotide
  Antisense strand to SEQ ID NO: 1271960
auacgugacugacauuaca

SEQ ID NO: 1271962 - RNA, 19 nt, Artificial Sequence
  Description of Artificial Sequence: Synthetic oligonucleotide
  Sense strand starting at position 2394 of SEQ ID NO: 1241430
auugaacgaugucuaggaa

SEQ ID NO: 1271963 - RNA, 19 nt, Artificial Sequence
  Description of Artificial Sequence: Synthetic oligonucleotide
  Antisense strand to SEQ ID NO: 1271962
uuccuagacaucguucaau

SEQ ID NO: 1271964 - RNA, 19 nt, Artificial Sequence
  Description of Artificial Sequence: Synthetic oligonucleotide
  Sense strand starting at position 2442 of SEQ ID NO: 1241430
cugccuuguuaaguaauga

SEQ ID NO: 1271965 - RNA, 19 nt, Artificial Sequence
  Description of Artificial Sequence: Synthetic oligonucleotide
  Antisense strand to SEQ ID NO: 1271964
ucauuacuuaacaaggcag

SEQ ID NO: 1271966 - RNA, 19 nt, Artificial Sequence
  Description of Artificial Sequence: Synthetic oligonucleotide
  Sense strand starting at position 2453 of SEQ ID NO: 1241430
aguaaugaaccuuguuaua

SEQ ID NO: 1271967 - RNA, 19 nt, Artificial Sequence
  Description of Artificial Sequence: Synthetic oligonucleotide
  Antisense strand to SEQ ID NO: 1271966
uauaacaagguucauuacu

SEQ ID NO: 1271968 - RNA, 19 nt, Artificial Sequence
  Description of Artificial Sequence: Synthetic oligonucleotide
  Sense strand starting at position 2626 of SEQ ID NO: 1241430
ggaauacuguuauccugcu

SEQ ID NO: 1271969 - RNA, 19 nt, Artificial Sequence
  Description of Artificial Sequence: Synthetic oligonucleotide
  Antisense strand to SEQ ID NO: 1271968
agcaggauaacaguauucc

SEQ ID NO: 1271970 - RNA, 19 nt, Artificial Sequence
  Description of Artificial Sequence: Synthetic oligonucleotide
  Sense strand starting at position 2849 of SEQ ID NO: 1241430
uuuagaaagccucagguga

SEQ ID NO: 1271971 - RNA, 19 nt, Artificial Sequence
  Description of Artificial Sequence: Synthetic oligonucleotide
  Antisense strand to SEQ ID NO: 1271970
ucaccugaggcuuucuaaa

SEQ ID NO: 1271972 - RNA, 19 nt, Artificial Sequence
  Description of Artificial Sequence: Synthetic oligonucleotide
  Sense strand starting at position 2864 of SEQ ID NO: 1241430
gugauuuggacccguuuag

SEQ ID NO: 1271973 - RNA, 19 nt, Artificial Sequence
  Description of Artificial Sequence: Synthetic oligonucleotide
  Antisense strand to SEQ ID NO: 1271972
cuaaacggguccaaaucac

SEQ ID NO: 1271974 - RNA, 19 nt, Artificial Sequence
  Description of Artificial Sequence: Synthetic oligonucleotide
  Sense strand starting at position 2955 of SEQ ID NO: 1241430
agguuaagucagggagguu

SEQ ID NO: 1271975 - RNA, 19 nt, Artificial Sequence
  Description of Artificial Sequence: Synthetic oligonucleotide
  Antisense strand to SEQ ID NO: 1271974
aaccucccugacuuaaccu

SEQ ID NO: 1271976 - RNA, 19 nt, Artificial Sequence
  Description of Artificial Sequence: Synthetic oligonucleotide
  Sense strand starting at position 2956 of SEQ ID NO: 1241430
gguuaagucagggagguua

SEQ ID NO: 1271977 - RNA, 19 nt, Artificial Sequence
  Description of Artificial Sequence: Synthetic oligonucleotide
  Antisense strand to SEQ ID NO: 1271976
uaaccucccugacuuaacc

SEQ ID NO: 1271978 - RNA, 19 nt, Artificial Sequence
  Description of Artificial Sequence: Synthetic oligonucleotide
  Sense strand starting at position 2990 of SEQ ID NO: 1241430
ggucacauaugucuuaagu

SEQ ID NO: 1271979 - RNA, 19 nt, Artificial Sequence
  Description of Artificial Sequence: Synthetic oligonucleotide
  Antisense strand to SEQ ID NO: 1271978
acuuaagacauaugugacc

SEQ ID NO: 1271980 - RNA, 19 nt, Artificial Sequence
  Description of Artificial Sequence: Synthetic oligonucleotide
  Sense strand starting at position 2996 of SEQ ID NO: 1241430
auaugucuuaagugucaga

SEQ ID NO: 1271981 - RNA, 19 nt, Artificial Sequence
  Description of Artificial Sequence: Synthetic oligonucleotide
  Antisense strand to SEQ ID NO: 1271980
ucugacacuuaagacauau

SEQ ID NO: 1271982 - RNA, 19 nt, Artificial Sequence
  Description of Artificial Sequence: Synthetic oligonucleotide
  Sense strand starting at position 3007 of SEQ ID NO: 1241430
gugucagagccagaacuau

SEQ ID NO: 1271983 - RNA, 19 nt, Artificial Sequence
  Description of Artificial Sequence: Synthetic oligonucleotide
  Antisense strand to SEQ ID NO: 1271982
auaguucuggcucugacac

SEQ ID NO: 1271984 - RNA, 19 nt, Artificial Sequence
  Description of Artificial Sequence: Synthetic oligonucleotide
  Sense strand starting at position 3030 of SEQ ID NO: 1241430
uaagcaguaugguuccaga

SEQ ID NO: 1271985 - RNA, 19 nt, Artificial Sequence
  Description of Artificial Sequence: Synthetic oligonucleotide
  Antisense strand to SEQ ID NO: 1271984
ucuggaaccauacugcuua

SEQ ID NO: 1271986 - RNA, 19 nt, Artificial Sequence
  Description of Artificial Sequence: Synthetic oligonucleotide
  Sense strand starting at position 3083 of SEQ ID NO: 1241430
cucaaauguuugguggcau

SEQ ID NO: 1271987 - RNA, 19 nt, Artificial Sequence
  Description of Artificial Sequence: Synthetic oligonucleotide
  Antisense strand to SEQ ID NO: 1271986
augccaccaaacauuugag

SEQ ID NO: 1271988 - RNA, 19 nt, Artificial Sequence
  Description of Artificial Sequence: Synthetic oligonucleotide
  Sense strand starting at position 3137 of SEQ ID NO: 1241430
gauccauucgagugccaug

SEQ ID NO: 1271989 - RNA, 19 nt, Artificial Sequence
  Description of Artificial Sequence: Synthetic oligonucleotide
  Antisense strand to SEQ ID NO: 1271988
cauggcacucgaauggauc

SEQ ID NO: 1271990 - RNA, 19 nt, Artificial Sequence
  Description of Artificial Sequence: Synthetic oligonucleotide
  Sense strand starting at position 3154 of SEQ ID NO: 1241430
uguagugaggcucagucaa

SEQ ID NO: 1271991 - RNA, 19 nt, Artificial Sequence
  Description of Artificial Sequence: Synthetic oligonucleotide
  Antisense strand to SEQ ID NO: 1271990
uugacugagccucacuaca

SEQ ID NO: 1271992 - RNA, 19 nt, Artificial Sequence
  Description of Artificial Sequence: Synthetic oligonucleotide
  Sense strand starting at position 3156 of SEQ ID NO: 1241430
uagugaggcucagucaauu

SEQ ID NO: 1271993 - RNA, 19 nt, Artificial Sequence
  Description of Artificial Sequence: Synthetic oligonucleotide
  Antisense strand to SEQ ID NO: 1271992
aauugacugagccucacua

SEQ ID NO: 1271994 - RNA, 19 nt, Artificial Sequence
  Description of Artificial Sequence: Synthetic oligonucleotide
  Sense strand starting at position 3162 of SEQ ID NO: 1241430
ggcucagucaauugaguua

SEQ ID NO: 1271995 - RNA, 19 nt, Artificial Sequence
  Description of Artificial Sequence: Synthetic oligonucleotide
  Antisense strand to SEQ ID NO: 1271994
uaacucaauugacugagcc

SEQ ID NO: 1271996 - RNA, 19 nt, Artificial Sequence
  Description of Artificial Sequence: Synthetic oligonucleotide
  Sense strand starting at position 3165 of SEQ ID NO: 1241430
ucagucaauugaguuaaau

SEQ ID NO: 1271997 - RNA, 19 nt, Artificial Sequence
  Description of Artificial Sequence: Synthetic oligonucleotide
  Antisense strand to SEQ ID NO: 1271996
auuuaacucaauugacuga

SEQ ID NO: 1271998 - RNA, 19 nt, Artificial Sequence
  Description of Artificial Sequence: Synthetic oligonucleotide
  Sense strand starting at position 3182 of SEQ ID NO: 1241430
auggaauuaaugugaugua

SEQ ID NO: 1271999 - RNA, 19 nt, Artificial Sequence
  Description of Artificial Sequence: Synthetic oligonucleotide
  Antisense strand to SEQ ID NO: 1271998
uacaucacauuaauuccau

SEQ ID NO: 1272000 - RNA, 19 nt, Artificial Sequence
  Description of Artificial Sequence: Synthetic oligonucleotide
  Sense strand starting at position 3222 of SEQ ID NO: 1241430
gacauuccagcacaagagu

SEQ ID NO: 1272001 - RNA, 19 nt, Artificial Sequence
  Description of Artificial Sequence: Synthetic oligonucleotide
  Antisense strand to SEQ ID NO: 1272000
acucuugugcuggaauguc

SEQ ID NO: 1272002 - RNA, 19 nt, Artificial Sequence
  Description of Artificial Sequence: Synthetic oligonucleotide
  Sense strand starting at position 3301 of SEQ ID NO: 1241430
aguuauagaucagcacacu

SEQ ID NO: 1272003 - RNA, 19 nt, Artificial Sequence
  Description of Artificial Sequence: Synthetic oligonucleotide
  Antisense strand to SEQ ID NO: 1272002
agugugcugaucuauaacu

SEQ ID NO: 1272004 - RNA, 19 nt, Artificial Sequence
  Description of Artificial Sequence: Synthetic oligonucleotide
  Sense strand starting at position 3376 of SEQ ID NO: 1241430
uuagguauuauugagaggu

SEQ ID NO: 1272005 - RNA, 19 nt, Artificial Sequence
  Description of Artificial Sequence: Synthetic oligonucleotide
  Antisense strand to SEQ ID NO: 1272004
accucucaauaauaccuaa

SEQ ID NO: 1272006 - RNA, 19 nt, Artificial Sequence
  Description of Artificial Sequence: Synthetic oligonucleotide
  Sense strand starting at position 3783 of SEQ ID NO: 1241430
cuuuaugagcugcaauacu

SEQ ID NO: 1272007 - RNA, 19 nt, Artificial Sequence
  Description of Artificial Sequence: Synthetic oligonucleotide
  Antisense strand to SEQ ID NO: 1272006
aguauugcagcucauaaag

SEQ ID NO: 1272008 - RNA, 19 nt, Artificial Sequence
  Description of Artificial Sequence: Synthetic oligonucleotide
  Sense strand starting at position 3792 of SEQ ID NO: 1241430
cugcaauacucacugugaa

SEQ ID NO: 1272009 - RNA, 19 nt, Artificial Sequence
  Description of Artificial Sequence: Synthetic oligonucleotide
  Antisense strand to SEQ ID NO: 1272008
uucacagugaguauugcag

SEQ ID NO: 1272010 - RNA, 19 nt, Artificial Sequence
  Description of Artificial Sequence: Synthetic oligonucleotide
  Sense strand starting at position 3793 of SEQ ID NO: 1241430
ugcaauacucacugugaag

SEQ ID NO: 1272011 - RNA, 19 nt, Artificial Sequence
  Description of Artificial Sequence: Synthetic oligonucleotide
  Antisense strand to SEQ ID NO: 1272010
cuucacagugaguauugca

SEQ ID NO: 1272012 - RNA, 19 nt, Artificial Sequence
  Description of Artificial Sequence: Synthetic oligonucleotide
  Sense strand starting at position 3795 of SEQ ID NO: 1241430
caauacucacugugaaggu

SEQ ID NO: 1272013 - RNA, 19 nt, Artificial Sequence
  Description of Artificial Sequence: Synthetic oligonucleotide
  Antisense strand to SEQ ID NO: 1272012
accuucacagugaguauug

SEQ ID NO: 1272014 - RNA, 19 nt, Artificial Sequence
  Description of Artificial Sequence: Synthetic oligonucleotide
  Sense strand starting at position 622 of SEQ ID NO: 1241431
uuaagacucgguuaaacuu

SEQ ID NO: 1272015 - RNA, 19 nt, Artificial Sequence
  Description of Artificial Sequence: Synthetic oligonucleotide
  Antisense strand to SEQ ID NO: 1272014
aaguuuaaccgagucuuaa

SEQ ID NO: 1272016 - RNA, 19 nt, Artificial Sequence
  Description of Artificial Sequence: Synthetic oligonucleotide
  Sense strand starting at position 733 of SEQ ID NO: 1241431
gugcuaaaccuggauccaa

SEQ ID NO: 1272017 - RNA, 19 nt, Artificial Sequence
  Description of Artificial Sequence: Synthetic oligonucleotide
  Antisense strand to SEQ ID NO: 1272016
uuggauccagguuuagcac

SEQ ID NO: 1272018 - RNA, 19 nt, Artificial Sequence
  Description of Artificial Sequence: Synthetic oligonucleotide
  Sense strand starting at position 807 of SEQ ID NO: 1241431
cagaguaacuaugcugaca

SEQ ID NO: 1272019 - RNA, 19 nt, Artificial Sequence
  Description of Artificial Sequence: Synthetic oligonucleotide
  Antisense strand to SEQ ID NO: 1272018
ugucagcauaguuacucug

SEQ ID NO: 1272020 - RNA, 19 nt, Artificial Sequence
  Description of Artificial Sequence: Synthetic oligonucleotide
  Sense strand starting at position 824 of SEQ ID NO: 1241431
caaggaagauacugagaua

SEQ ID NO: 1272021 - RNA, 19 nt, Artificial Sequence
  Description of Artificial Sequence: Synthetic oligonucleotide
  Antisense strand to SEQ ID NO: 1272020
uaucucaguaucuuccuug

SEQ ID NO: 1272022 - RNA, 19 nt, Artificial Sequence
  Description of Artificial Sequence: Synthetic oligonucleotide
  Sense strand starting at position 868 of SEQ ID NO: 1241431
uccagauacuguguucuaa

SEQ ID NO: 1272023 - RNA, 19 nt, Artificial Sequence
  Description of Artificial Sequence: Synthetic oligonucleotide
  Antisense strand to SEQ ID NO: 1272022
uuagaacacaguaucugga

SEQ ID NO: 1272024 - RNA, 19 nt, Artificial Sequence
  Description of Artificial Sequence: Synthetic oligonucleotide
  Sense strand starting at position 870 of SEQ ID NO: 1241431
cagauacuguguucuaaga

SEQ ID NO: 1272025 - RNA, 19 nt, Artificial Sequence
  Description of Artificial Sequence: Synthetic oligonucleotide
  Antisense strand to SEQ ID NO: 1272024
ucuuagaacacaguaucug

SEQ ID NO: 1272026 - RNA, 19 nt, Artificial Sequence
  Description of Artificial Sequence: Synthetic oligonucleotide
  Sense strand starting at position 891 of SEQ ID NO: 1241431
gacucuuugggaggugaca

SEQ ID NO: 1272027 - RNA, 19 nt, Artificial Sequence
  Description of Artificial Sequence: Synthetic oligonucleotide
  Antisense strand to SEQ ID NO: 1272026
ugucaccucccaaagaguc

SEQ ID NO: 1272028 - RNA, 19 nt, Artificial Sequence
  Description of Artificial Sequence: Synthetic oligonucleotide
  Sense strand starting at position 943 of SEQ ID NO: 1241431
uguuuauauguuugaguca

SEQ ID NO: 1272029 - RNA, 19 nt, Artificial Sequence
  Description of Artificial Sequence: Synthetic oligonucleotide
  Antisense strand to SEQ ID NO: 1272028
ugacucaaacauauaaaca

SEQ ID NO: 1272030 - RNA, 19 nt, Artificial Sequence
  Description of Artificial Sequence: Synthetic oligonucleotide
  Sense strand starting at position 1001 of SEQ ID NO: 1241431
uguagcagguacuuaauau

SEQ ID NO: 1272031 - RNA, 19 nt, Artificial Sequence
  Description of Artificial Sequence: Synthetic oligonucleotide
  Antisense strand to SEQ ID NO: 1272030
auauuaaguaccugcuaca

SEQ ID NO: 1272032 - RNA, 19 nt, Artificial Sequence
  Description of Artificial Sequence: Synthetic oligonucleotide
  Sense strand starting at position 1126 of SEQ ID NO: 1241431
ucgauauauaguugggaug

SEQ ID NO: 1272033 - RNA, 19 nt, Artificial Sequence
  Description of Artificial Sequence: Synthetic oligonucleotide
  Antisense strand to SEQ ID NO: 1272032
caucccaacuauauaucga

SEQ ID NO: 1272034 - RNA, 19 nt, Artificial Sequence
  Description of Artificial Sequence: Synthetic oligonucleotide
  Sense strand starting at position 1127 of SEQ ID NO: 1241431
cgauauauaguugggauga

SEQ ID NO: 1272035 - RNA, 19 nt, Artificial Sequence
  Description of Artificial Sequence: Synthetic oligonucleotide
  Antisense strand to SEQ ID NO: 1272034
ucaucccaacuauauaucg

SEQ ID NO: 1272036 - RNA, 19 nt, Artificial Sequence
  Description of Artificial Sequence: Synthetic oligonucleotide
  Sense strand starting at position 1140 of SEQ ID NO: 1241431
ggaugaggaugguagaacu

SEQ ID NO: 1272037 - RNA, 19 nt, Artificial Sequence
  Description of Artificial Sequence: Synthetic oligonucleotide
  Antisense strand to SEQ ID NO: 1272036
aguucuaccauccucaucc

SEQ ID NO: 1272038 - RNA, 19 nt, Artificial Sequence
  Description of Artificial Sequence: Synthetic oligonucleotide
  Sense strand starting at position 1476 of SEQ ID NO: 1241431
gagagaucauguuucucuu

SEQ ID NO: 1272039 - RNA, 19 nt, Artificial Sequence
  Description of Artificial Sequence: Synthetic oligonucleotide
  Antisense strand to SEQ ID NO: 1272038
aagagaaacaugaucucuc

SEQ ID NO: 1272040 - RNA, 19 nt, Artificial Sequence
  Description of Artificial Sequence: Synthetic oligonucleotide
  Sense strand starting at position 1496 of SEQ ID NO: 1241431
cgguucaguaucgagauga

SEQ ID NO: 1272041 - RNA, 19 nt, Artificial Sequence
  Description of Artificial Sequence: Synthetic oligonucleotide
  Antisense strand to SEQ ID NO: 1272040
ucaucucgauacugaaccg

SEQ ID NO: 1272042 - RNA, 19 nt, Artificial Sequence
  Description of Artificial Sequence: Synthetic oligonucleotide
  Sense strand starting at position 1500 of SEQ ID NO: 1241431
ucaguaucgagaugagguc

SEQ ID NO: 1272043 - RNA, 19 nt, Artificial Sequence
  Description of Artificial Sequence: Synthetic oligonucleotide
  Antisense strand to SEQ ID NO: 1272042
gaccucaucucgauacuga

SEQ ID NO: 1272044 - RNA, 19 nt, Artificial Sequence
  Description of Artificial Sequence: Synthetic oligonucleotide
  Sense strand starting at position 1530 of SEQ ID NO: 1241431
cugcgaggguuugugagaa

SEQ ID NO: 1272045 - RNA, 19 nt, Artificial Sequence
  Description of Artificial Sequence: Synthetic oligonucleotide
  Antisense strand to SEQ ID NO: 1272044
uucucacaaacccucgcag

SEQ ID NO: 1272046 - RNA, 19 nt, Artificial Sequence
  Description of Artificial Sequence: Synthetic oligonucleotide
  Sense strand starting at position 1540 of SEQ ID NO: 1241431
uugugagaaucauuccauc

SEQ ID NO: 1272047 - RNA, 19 nt, Artificial Sequence
  Description of Artificial Sequence: Synthetic oligonucleotide
  Antisense strand to SEQ ID NO: 1272046
gauggaaugauucucacaa

SEQ ID NO: 1272048 - RNA, 19 nt, Artificial Sequence
  Description of Artificial Sequence: Synthetic oligonucleotide
  Sense strand starting at position 1624 of SEQ ID NO: 1241431
ccacguccuccagaaacau

SEQ ID NO: 1272049 - RNA, 19 nt, Artificial Sequence
  Description of Artificial Sequence: Synthetic oligonucleotide
  Antisense strand to SEQ ID NO: 1272048
auguuucuggaggacgugg

SEQ ID NO: 1272050 - RNA, 19 nt, Artificial Sequence
  Description of Artificial Sequence: Synthetic oligonucleotide
  Sense strand starting at position 1865 of SEQ ID NO: 1241431
gaaagaaauguauguucga

SEQ ID NO: 1272051 - RNA, 19 nt, Artificial Sequence
  Description of Artificial Sequence: Synthetic oligonucleotide
  Antisense strand to SEQ ID NO: 1272050
ucgaacauacauuucuuuc

SEQ ID NO: 1272052 - RNA, 19 nt, Artificial Sequence
  Description of Artificial Sequence: Synthetic oligonucleotide
  Sense strand starting at position 1900 of SEQ ID NO: 1241431
ggauguucccaguagagca

SEQ ID NO: 1272053 - RNA, 19 nt, Artificial Sequence
  Description of Artificial Sequence: Synthetic oligonucleotide
  Antisense strand to SEQ ID NO: 1272052
ugcucuacugggaacaucc

SEQ ID NO: 1272054 - RNA, 19 nt, Artificial Sequence
  Description of Artificial Sequence: Synthetic oligonucleotide
  Sense strand starting at position 2181 of SEQ ID NO: 1241431
cuugaagggucuuauuuac

SEQ ID NO: 1272055 - RNA, 19 nt, Artificial Sequence
  Description of Artificial Sequence: Synthetic oligonucleotide
  Antisense strand to SEQ ID NO: 1272054
guaaauaagacccuucaag

SEQ ID NO: 1272056 - RNA, 19 nt, Artificial Sequence
  Description of Artificial Sequence: Synthetic oligonucleotide
  Sense strand starting at position 2417 of SEQ ID NO: 1241431
agguguucggaccagugau

SEQ ID NO: 1272057 - RNA, 19 nt, Artificial Sequence
  Description of Artificial Sequence: Synthetic oligonucleotide
  Antisense strand to SEQ ID NO: 1272056
aucacugguccgaacaccu

SEQ ID NO: 1272058 - RNA, 19 nt, Artificial Sequence
  Description of Artificial Sequence: Synthetic oligonucleotide
  Sense strand starting at position 2427 of SEQ ID NO: 1241431
accagugauuggcuggaga

SEQ ID NO: 1272059 - RNA, 19 nt, Artificial Sequence
  Description of Artificial Sequence: Synthetic oligonucleotide
  Antisense strand to SEQ ID NO: 1272058
ucuccagccaaucacuggu

SEQ ID NO: 1272060 - RNA, 19 nt, Artificial Sequence
  Description of Artificial Sequence: Synthetic oligonucleotide
  Sense strand starting at position 2429 of SEQ ID NO: 1241431
cagugauuggcuggagaaa

SEQ ID NO: 1272061 - RNA, 19 nt, Artificial Sequence
  Description of Artificial Sequence: Synthetic oligonucleotide
  Antisense strand to SEQ ID NO: 1272060
uuucuccagccaaucacug

SEQ ID NO: 1272062 - RNA, 19 nt, Artificial Sequence
  Description of Artificial Sequence: Synthetic oligonucleotide
  Sense strand starting at position 2507 of SEQ ID NO: 1241431
agugcuucugggcaguaga

SEQ ID NO: 1272063 - RNA, 19 nt, Artificial Sequence
  Description of Artificial Sequence: Synthetic oligonucleotide
  Antisense strand to SEQ ID NO: 1272062
ucuacugcccagaagcacu

SEQ ID NO: 1272064 - RNA, 19 nt, Artificial Sequence
  Description of Artificial Sequence: Synthetic oligonucleotide
  Sense strand starting at position 3121 of SEQ ID NO: 1241431
ugaauuuccuucuagaggu

SEQ ID NO: 1272065 - RNA, 19 nt, Artificial Sequence
  Description of Artificial Sequence: Synthetic oligonucleotide
  Antisense strand to SEQ ID NO: 1272064
accucuagaaggaaauuca

SEQ ID NO: 1272066 - RNA, 19 nt, Artificial Sequence
  Description of Artificial Sequence: Synthetic oligonucleotide
  Sense strand starting at position 3339 of SEQ ID NO: 1241431
guauguuccauguauguuc

SEQ ID NO: 1272067 - RNA, 19 nt, Artificial Sequence
  Description of Artificial Sequence: Synthetic oligonucleotide
  Antisense strand to SEQ ID NO: 1272066
gaacauacauggaacauac

SEQ ID NO: 1272068 - RNA, 19 nt, Artificial Sequence
  Description of Artificial Sequence: Synthetic oligonucleotide
  Sense strand starting at position 3478 of SEQ ID NO: 1241431
gggauugaguccucucuga

SEQ ID NO: 1272069 - RNA, 19 nt, Artificial Sequence
  Description of Artificial Sequence: Synthetic oligonucleotide
  Antisense strand to SEQ ID NO: 1272068
ucagagaggacucaauccc

SEQ ID NO: 1272070 - RNA, 19 nt, Artificial Sequence
  Description of Artificial Sequence: Synthetic oligonucleotide
  Sense strand starting at position 3525 of SEQ ID NO: 1241431
acaggaguugcaugccuga

SEQ ID NO: 1272071 - RNA, 19 nt, Artificial Sequence
  Description of Artificial Sequence: Synthetic oligonucleotide
  Antisense strand to SEQ ID NO: 1272070
ucaggcaugcaacuccugu

SEQ ID NO: 1272072 - RNA, 19 nt, Artificial Sequence
  Description of Artificial Sequence: Synthetic oligonucleotide
  Sense strand starting at position 3538 of SEQ ID NO: 1241431
gccugaggccuguaaucuc

SEQ ID NO: 1272073 - RNA, 19 nt, Artificial Sequence
  Description of Artificial Sequence: Synthetic oligonucleotide
  Antisense strand to SEQ ID NO: 1272072
gagauuacaggccucaggc

SEQ ID NO: 1272074 - RNA, 19 nt, Artificial Sequence
  Description of Artificial Sequence: Synthetic oligonucleotide
  Sense strand starting at position 3554 of SEQ ID NO: 1241431
cuccaacucuguuuauagu

SEQ ID NO: 1272075 - RNA, 19 nt, Artificial Sequence
  Description of Artificial Sequence: Synthetic oligonucleotide
  Antisense strand to SEQ ID NO: 1272074
acuauaaacagaguuggag

SEQ ID NO: 1272076 - RNA, 19 nt, Artificial Sequence
  Description of Artificial Sequence: Synthetic oligonucleotide
  Sense strand starting at position 3673 of SEQ ID NO: 1241431
uuacauccagucugagaau

SEQ ID NO: 1272077 - RNA, 19 nt, Artificial Sequence
  Description of Artificial Sequence: Synthetic oligonucleotide
  Antisense strand to SEQ ID NO: 1272076
auucucagacuggauguaa

SEQ ID NO: 1272078 - RNA, 19 nt, Artificial Sequence
  Description of Artificial Sequence: Synthetic oligonucleotide
  Sense strand starting at position 3695 of SEQ ID NO: 1241431
cucuauauugcugagcuuu

SEQ ID NO: 1272079 - RNA, 19 nt, Artificial Sequence
  Description of Artificial Sequence: Synthetic oligonucleotide
  Antisense strand to SEQ ID NO: 1272078
aaagcucagcaauauagag

SEQ ID NO: 1272080 - RNA, 19 nt, Artificial Sequence
  Description of Artificial Sequence: Synthetic oligonucleotide
  Sense strand starting at position 3733 of SEQ ID NO: 1241431
ccagguuuccgugaguucu

SEQ ID NO: 1272081 - RNA, 19 nt, Artificial Sequence
  Description of Artificial Sequence: Synthetic oligonucleotide
  Antisense strand to SEQ ID NO: 1272080
agaacucacggaaaccugg

SEQ ID NO: 1272082 - RNA, 19 nt, Artificial Sequence
  Description of Artificial Sequence: Synthetic oligonucleotide
  Sense strand starting at position 3736 of SEQ ID NO: 1241431
gguuuccgugaguucuagu

SEQ ID NO: 1272083 - RNA, 19 nt, Artificial Sequence
  Description of Artificial Sequence: Synthetic oligonucleotide
  Antisense strand to SEQ ID NO: 1272082
acuagaacucacggaaacc

SEQ ID NO: 1272084 - RNA, 19 nt, Artificial Sequence
  Description of Artificial Sequence: Synthetic oligonucleotide
  Sense strand starting at position 3755 of SEQ ID NO: 1241431
aaagaaacuugggcaguuu

SEQ ID NO: 1272085 - RNA, 19 nt, Artificial Sequence
  Description of Artificial Sequence: Synthetic oligonucleotide
  Antisense strand to SEQ ID NO: 1272084
aaacugcccaaguuucuuu

SEQ ID NO: 1272086 - RNA, 19 nt, Artificial Sequence
  Description of Artificial Sequence: Synthetic oligonucleotide
  Sense strand starting at position 3773 of SEQ ID NO: 1241431
uuaagauucuuggcagagu

SEQ ID NO: 1272087 - RNA, 19 nt, Artificial Sequence
  Description of Artificial Sequence: Synthetic oligonucleotide
  Antisense strand to SEQ ID NO: 1272086
acucugccaagaaucuuaa

SEQ ID NO: 1272088 - RNA, 19 nt, Artificial Sequence
  Description of Artificial Sequence: Synthetic oligonucleotide
  Sense strand starting at position 3840 of SEQ ID NO: 1241431
ggaugaguuugaaggguuu

SEQ ID NO: 1272089 - RNA, 19 nt, Artificial Sequence
  Description of Artificial Sequence: Synthetic oligonucleotide
  Antisense strand to SEQ ID NO: 1272088
aaacccuucaaacucaucc

SEQ ID NO: 1272090 - RNA, 19 nt, Artificial Sequence
  Description of Artificial Sequence: Synthetic oligonucleotide
  Sense strand starting at position 3846 of SEQ ID NO: 1241431
guuugaaggguuuggcaga

SEQ ID NO: 1272091 - RNA, 19 nt, Artificial Sequence
  Description of Artificial Sequence: Synthetic oligonucleotide
  Antisense strand to SEQ ID NO: 1272090
ucugccaaacccuucaaac

SEQ ID NO: 1272092 - RNA, 19 nt, Artificial Sequence
  Description of Artificial Sequence: Synthetic oligonucleotide
  Sense strand starting at position 3879 of SEQ ID NO: 1241431
ucauauuucuugcugcgau

SEQ ID NO: 1272093 - RNA, 19 nt, Artificial Sequence
  Description of Artificial Sequence: Synthetic oligonucleotide
  Antisense strand to SEQ ID NO: 1272092
aucgcagcaagaaauauga

SEQ ID NO: 1272094 - RNA, 19 nt, Artificial Sequence
  Description of Artificial Sequence: Synthetic oligonucleotide
  Sense strand starting at position 44 of SEQ ID NO: 1241432
gguaaagggcuuuggaagu

SEQ ID NO: 1272095 - RNA, 19 nt, Artificial Sequence
  Description of Artificial Sequence: Synthetic oligonucleotide
  Antisense strand to SEQ ID NO: 1272094
acuuccaaagcccuuuacc

SEQ ID NO: 1272096 - RNA, 19 nt, Artificial Sequence
  Description of Artificial Sequence: Synthetic oligonucleotide
  Sense strand starting at position 51 of SEQ ID NO: 1241432
ggcuuuggaaguuaacuaa

SEQ ID NO: 1272097 - RNA, 19 nt, Artificial Sequence
  Description of Artificial Sequence: Synthetic oligonucleotide
  Antisense strand to SEQ ID NO: 1272096
uuaguuaacuuccaaagcc

SEQ ID NO: 1272098 - RNA, 19 nt, Artificial Sequence
  Description of Artificial Sequence: Synthetic oligonucleotide
  Sense strand starting at position 120 of SEQ ID NO: 1241432
ccaauauguuaauuaggca

SEQ ID NO: 1272099 - RNA, 19 nt, Artificial Sequence
  Description of Artificial Sequence: Synthetic oligonucleotide
  Antisense strand to SEQ ID NO: 1272098
ugccuaauuaacauauugg

SEQ ID NO: 1272100 - RNA, 19 nt, Artificial Sequence
  Description of Artificial Sequence: Synthetic oligonucleotide
  Sense strand starting at position 254 of SEQ ID NO: 1241432
aggaguugcguguccguga

SEQ ID NO: 1272101 - RNA, 19 nt, Artificial Sequence
  Description of Artificial Sequence: Synthetic oligonucleotide
  Antisense strand to SEQ ID NO: 1272100
ucacggacacgcaacuccu

SEQ ID NO: 1272102 - RNA, 19 nt, Artificial Sequence
  Description of Artificial Sequence: Synthetic oligonucleotide
  Sense strand starting at position 319 of SEQ ID NO: 1241432
uagccugguucugcuagau

SEQ ID NO: 1272103 - RNA, 19 nt, Artificial Sequence
  Description of Artificial Sequence: Synthetic oligonucleotide
  Antisense strand to SEQ ID NO: 1272102
aucuagcagaaccaggcua

SEQ ID NO: 1272104 - RNA, 19 nt, Artificial Sequence
  Description of Artificial Sequence: Synthetic oligonucleotide
  Sense strand starting at position 323 of SEQ ID NO: 1241432
cugguucugcuagauauaa

SEQ ID NO: 1272105 - RNA, 19 nt, Artificial Sequence
  Description of Artificial Sequence: Synthetic oligonucleotide
  Antisense strand to SEQ ID NO: 1272104
uuauaucuagcagaaccag

SEQ ID NO: 1272106 - RNA, 19 nt, Artificial Sequence
  Description of Artificial Sequence: Synthetic oligonucleotide
  Sense strand starting at position 356 of SEQ ID NO: 1241432
auggauuuauucugcuaca

SEQ ID NO: 1272107 - RNA, 19 nt, Artificial Sequence
  Description of Artificial Sequence: Synthetic oligonucleotide
  Antisense strand to SEQ ID NO: 1272106
uguagcagaauaaauccau

SEQ ID NO: 1272108 - RNA, 19 nt, Artificial Sequence
  Description of Artificial Sequence: Synthetic oligonucleotide
  Sense strand starting at position 412 of SEQ ID NO: 1241432
gacacacagccgugacaau

SEQ ID NO: 1272109 - RNA, 19 nt, Artificial Sequence
  Description of Artificial Sequence: Synthetic oligonucleotide
  Antisense strand to SEQ ID NO: 1272108
auugucacggcuguguguc

SEQ ID NO: 1272110 - RNA, 19 nt, Artificial Sequence
  Description of Artificial Sequence: Synthetic oligonucleotide
  Sense strand starting at position 477 of SEQ ID NO: 1241432
gagucaaagucuccagaug

SEQ ID NO: 1272111 - RNA, 19 nt, Artificial Sequence
  Description of Artificial Sequence: Synthetic oligonucleotide
  Antisense strand to SEQ ID NO: 1272110
caucuggagacuuugacuc

SEQ ID NO: 1272112 - RNA, 19 nt, Artificial Sequence
  Description of Artificial Sequence: Synthetic oligonucleotide
  Sense strand starting at position 484 of SEQ ID NO: 1241432
agucuccagaugcguaauu

SEQ ID NO: 1272113 - RNA, 19 nt, Artificial Sequence
  Description of Artificial Sequence: Synthetic oligonucleotide
  Antisense strand to SEQ ID NO: 1272112
aauuacgcaucuggagacu

SEQ ID NO: 1272114 - RNA, 19 nt, Artificial Sequence
  Description of Artificial Sequence: Synthetic oligonucleotide
  Sense strand starting at position 485 of SEQ ID NO: 1241432
gucuccagaugcguaauuu

SEQ ID NO: 1272115 - RNA, 19 nt, Artificial Sequence
  Description of Artificial Sequence: Synthetic oligonucleotide
  Antisense strand to SEQ ID NO: 1272114
aaauuacgcaucuggagac

SEQ ID NO: 1272116 - RNA, 19 nt, Artificial Sequence
  Description of Artificial Sequence: Synthetic oligonucleotide
  Sense strand starting at position 595 of SEQ ID NO: 1241432
gguuuaaaugaugggugga

SEQ ID NO: 1272117 - RNA, 19 nt, Artificial Sequence
  Description of Artificial Sequence: Synthetic oligonucleotide
  Antisense strand to SEQ ID NO: 1272116
uccacccaucauuuaaacc

SEQ ID NO: 1272118 - RNA, 19 nt, Artificial Sequence
  Description of Artificial Sequence: Synthetic oligonucleotide
  Sense strand starting at position 596 of SEQ ID NO: 1241432
guuuaaaugauggguggaa

SEQ ID NO: 1272119 - RNA, 19 nt, Artificial Sequence
  Description of Artificial Sequence: Synthetic oligonucleotide
  Antisense strand to SEQ ID NO: 1272118
uuccacccaucauuuaaac

SEQ ID NO: 1272120 - RNA, 19 nt, Artificial Sequence
  Description of Artificial Sequence: Synthetic oligonucleotide
  Sense strand starting at position 658 of SEQ ID NO: 1241432
accaaaugguccguggcaa

SEQ ID NO: 1272121 - RNA, 19 nt, Artificial Sequence
  Description of Artificial Sequence: Synthetic oligonucleotide
  Antisense strand to SEQ ID NO: 1272120
uugccacggaccauuuggu

SEQ ID NO: 1272122 - RNA, 19 nt, Artificial Sequence
  Description of Artificial Sequence: Synthetic oligonucleotide
  Sense strand starting at position 794 of SEQ ID NO: 1241432
cuacuagauuaagugcuua

SEQ ID NO: 1272123 - RNA, 19 nt, Artificial Sequence
  Description of Artificial Sequence: Synthetic oligonucleotide
  Antisense strand to SEQ ID NO: 1272122
uaagcacuuaaucuaguag

SEQ ID NO: 1272124 - RNA, 19 nt, Artificial Sequence
  Description of Artificial Sequence: Synthetic oligonucleotide
  Sense strand starting at position 798 of SEQ ID NO: 1241432
uagauuaagugcuuaggua

SEQ ID NO: 1272125 - RNA, 19 nt, Artificial Sequence
  Description of Artificial Sequence: Synthetic oligonucleotide
  Antisense strand to SEQ ID NO: 1272124
uaccuaagcacuuaaucua

SEQ ID NO: 1272126 - RNA, 19 nt, Artificial Sequence
  Description of Artificial Sequence: Synthetic oligonucleotide
  Sense strand starting at position 799 of SEQ ID NO: 1241432
agauuaagugcuuagguau

SEQ ID NO: 1272127 - RNA, 19 nt, Artificial Sequence
  Description of Artificial Sequence: Synthetic oligonucleotide
  Antisense strand to SEQ ID NO: 1272126
auaccuaagcacuuaaucu

SEQ ID NO: 1272128 - RNA, 19 nt, Artificial Sequence
  Description of Artificial Sequence: Synthetic oligonucleotide
  Sense strand starting at position 802 of SEQ ID NO: 1241432
uuaagugcuuagguauaga

SEQ ID NO: 1272129 - RNA, 19 nt, Artificial Sequence
  Description of Artificial Sequence: Synthetic oligonucleotide
  Antisense strand to SEQ ID NO: 1272128
ucuauaccuaagcacuuaa

SEQ ID NO: 1272130 - RNA, 19 nt, Artificial Sequence
  Description of Artificial Sequence: Synthetic oligonucleotide
  Sense strand starting at position 924 of SEQ ID NO: 1241432
gccugcaaugcagauaaga

SEQ ID NO: 1272131 - RNA, 19 nt, Artificial Sequence
  Description of Artificial Sequence: Synthetic oligonucleotide
  Antisense strand to SEQ ID NO: 1272130
ucuuaucugcauugcaggc

SEQ ID NO: 1272132 - RNA, 19 nt, Artificial Sequence
  Description of Artificial Sequence: Synthetic oligonucleotide
  Sense strand starting at position 970 of SEQ ID NO: 1241432
gggugaggcgaguaaucgu

SEQ ID NO: 1272133 - RNA, 19 nt, Artificial Sequence
  Description of Artificial Sequence: Synthetic oligonucleotide
  Antisense strand to SEQ ID NO: 1272132
acgauuacucgccucaccc

SEQ ID NO: 1272134 - RNA, 19 nt, Artificial Sequence
  Description of Artificial Sequence: Synthetic oligonucleotide
  Sense strand starting at position 975 of SEQ ID NO: 1241432
aggcgaguaaucguugguu

SEQ ID NO: 1272135 - RNA, 19 nt, Artificial Sequence
  Description of Artificial Sequence: Synthetic oligonucleotide
  Antisense strand to SEQ ID NO: 1272134
aaccaacgauuacucgccu

SEQ ID NO: 1272136 - RNA, 19 nt, Artificial Sequence
  Description of Artificial Sequence: Synthetic oligonucleotide
  Sense strand starting at position 2100 of SEQ ID NO: 1241432
gccaacauccaggaucuuu

SEQ ID NO: 1272137 - RNA, 19 nt, Artificial Sequence
  Description of Artificial Sequence: Synthetic oligonucleotide
  Antisense strand to SEQ ID NO: 1272136
aaagauccuggauguuggc

SEQ ID NO: 1272138 - RNA, 19 nt, Artificial Sequence
  Description of Artificial Sequence: Synthetic oligonucleotide
  Sense strand starting at position 2149 of SEQ ID NO: 1241432
aucaaagucuucucaaguc

SEQ ID NO: 1272139 - RNA, 19 nt, Artificial Sequence
  Description of Artificial Sequence: Synthetic oligonucleotide
  Antisense strand to SEQ ID NO: 1272138
gacuugagaagacuuugau

SEQ ID NO: 1272140 - RNA, 19 nt, Artificial Sequence
  Description of Artificial Sequence: Synthetic oligonucleotide
  Sense strand starting at position 2814 of SEQ ID NO: 1241432
cagccagacugguucugaa

SEQ ID NO: 1272141 - RNA, 19 nt, Artificial Sequence
  Description of Artificial Sequence: Synthetic oligonucleotide
  Antisense strand to SEQ ID NO: 1272140
uucagaaccagucuggcug

SEQ ID NO: 1272142 - RNA, 19 nt, Artificial Sequence
  Description of Artificial Sequence: Synthetic oligonucleotide
  Sense strand starting at position 2942 of SEQ ID NO: 1241432
ggagaaugaaagcgaacuu

SEQ ID NO: 1272143 - RNA, 19 nt, Artificial Sequence
  Description of Artificial Sequence: Synthetic oligonucleotide
  Antisense strand to SEQ ID NO: 1272142
aaguucgcuuucauucucc

SEQ ID NO: 1272144 - RNA, 19 nt, Artificial Sequence
  Description of Artificial Sequence: Synthetic oligonucleotide
  Sense strand starting at position 3033 of SEQ ID NO: 1241432
gagaaucaucacugaguca

SEQ ID NO: 1272145 - RNA, 19 nt, Artificial Sequence
  Description of Artificial Sequence: Synthetic oligonucleotide
  Antisense strand to SEQ ID NO: 1272144
ugacucagugaugauucuc

SEQ ID NO: 1272146 - RNA, 19 nt, Artificial Sequence
  Description of Artificial Sequence: Synthetic oligonucleotide
  Sense strand starting at position 3091 of SEQ ID NO: 1241432
auaauaacccgccggaaau

SEQ ID NO: 1272147 - RNA, 19 nt, Artificial Sequence
  Description of Artificial Sequence: Synthetic oligonucleotide
  Antisense strand to SEQ ID NO: 1272146
auuuccggcggguuauuau

SEQ ID NO: 1272148 - RNA, 19 nt, Artificial Sequence
  Description of Artificial Sequence: Synthetic oligonucleotide
  Sense strand starting at position 3092 of SEQ ID NO: 1241432
uaauaacccgccggaaauu

SEQ ID NO: 1272149 - RNA, 19 nt, Artificial Sequence
  Description of Artificial Sequence: Synthetic oligonucleotide
  Antisense strand to SEQ ID NO: 1272148
aauuuccggcggguuauua

SEQ ID NO: 1272150 - RNA, 19 nt, Artificial Sequence
  Description of Artificial Sequence: Synthetic oligonucleotide
  Sense strand starting at position 3133 of SEQ ID NO: 1241432
ggguuucagucaucugagg

SEQ ID NO: 1272151 - RNA, 19 nt, Artificial Sequence
  Description of Artificial Sequence: Synthetic oligonucleotide
  Antisense strand to SEQ ID NO: 1272150
ccucagaugacugaaaccc

SEQ ID NO: 1272152 - RNA, 19 nt, Artificial Sequence
  Description of Artificial Sequence: Synthetic oligonucleotide
  Sense strand starting at position 3169 of SEQ ID NO: 1241432
cuuaguuguggguggugau

SEQ ID NO: 1272153 - RNA, 19 nt, Artificial Sequence
  Description of Artificial Sequence: Synthetic oligonucleotide
  Antisense strand to SEQ ID NO: 1272152
aucaccacccacaacuaag

SEQ ID NO: 1272154 - RNA, 19 nt, Artificial Sequence
  Description of Artificial Sequence: Synthetic oligonucleotide
  Sense strand starting at position 3170 of SEQ ID NO: 1241432
uuaguuguggguggugauu

SEQ ID NO: 1272155 - RNA, 19 nt, Artificial Sequence
  Description of Artificial Sequence: Synthetic oligonucleotide
  Antisense strand to SEQ ID NO: 1272154
aaucaccacccacaacuaa

SEQ ID NO: 1272156 - RNA, 19 nt, Artificial Sequence
  Description of Artificial Sequence: Synthetic oligonucleotide
  Sense strand starting at position 3179 of SEQ ID NO: 1241432
gguggugauuugcuuacua

SEQ ID NO: 1272157 - RNA, 19 nt, Artificial Sequence
  Description of Artificial Sequence: Synthetic oligonucleotide
  Antisense strand to SEQ ID NO: 1272156
uaguaagcaaaucaccacc

SEQ ID NO: 1272158 - RNA, 19 nt, Artificial Sequence
  Description of Artificial Sequence: Synthetic oligonucleotide
  Sense strand starting at position 3187 of SEQ ID NO: 1241432
uuugcuuacuaaucagaug

SEQ ID NO: 1272159 - RNA, 19 nt, Artificial Sequence
  Description of Artificial Sequence: Synthetic oligonucleotide
  Antisense strand to SEQ ID NO: 1272158
caucugauuaguaagcaaa

SEQ ID NO: 1272160 - RNA, 19 nt, Artificial Sequence
  Description of Artificial Sequence: Synthetic oligonucleotide
  Sense strand starting at position 3254 of SEQ ID NO: 1241432
agcaucagacauuacgaau

SEQ ID NO: 1272161 - RNA, 19 nt, Artificial Sequence
  Description of Artificial Sequence: Synthetic oligonucleotide
  Antisense strand to SEQ ID NO: 1272160
auucguaaugucugaugcu

SEQ ID NO: 1272162 - RNA, 19 nt, Artificial Sequence
  Description of Artificial Sequence: Synthetic oligonucleotide
  Sense strand starting at position 3260 of SEQ ID NO: 1241432
agacauuacgaauacugca

SEQ ID NO: 1272163 - RNA, 19 nt, Artificial Sequence
  Description of Artificial Sequence: Synthetic oligonucleotide
  Antisense strand to SEQ ID NO: 1272162
ugcaguauucguaaugucu

SEQ ID NO: 1272164 - RNA, 19 nt, Artificial Sequence
  Description of Artificial Sequence: Synthetic oligonucleotide
  Sense strand starting at position 3572 of SEQ ID NO: 1241432
gugaaaucuugcucuuccu

SEQ ID NO: 1272165 - RNA, 19 nt, Artificial Sequence
  Description of Artificial Sequence: Synthetic oligonucleotide
  Antisense strand to SEQ ID NO: 1272164
aggaagagcaagauuucac

SEQ ID NO: 1272166 - RNA, 19 nt, Artificial Sequence
  Description of Artificial Sequence: Synthetic oligonucleotide
  Sense strand starting at position 3792 of SEQ ID NO: 1241432
ggguggccuccguggauau

SEQ ID NO: 1272167 - RNA, 19 nt, Artificial Sequence
  Description of Artificial Sequence: Synthetic oligonucleotide
  Antisense strand to SEQ ID NO: 1272166
auauccacggaggccaccc

SEQ ID NO: 1272168 - RNA, 19 nt, Artificial Sequence
  Description of Artificial Sequence: Synthetic oligonucleotide
  Sense strand starting at position 3836 of SEQ ID NO: 1241432
agagcucugccaggcuuua

SEQ ID NO: 1272169 - RNA, 19 nt, Artificial Sequence
  Description of Artificial Sequence: Synthetic oligonucleotide
  Antisense strand to SEQ ID NO: 1272168
uaaagccuggcagagcucu

SEQ ID NO: 1272170 - RNA, 19 nt, Artificial Sequence
  Description of Artificial Sequence: Synthetic oligonucleotide
  Sense strand starting at position 3879 of SEQ ID NO: 1241432
gcccguauacucgagcaca

SEQ ID NO: 1272171 - RNA, 19 nt, Artificial Sequence
  Description of Artificial Sequence: Synthetic oligonucleotide
  Antisense strand to SEQ ID NO: 1272170
ugugcucgaguauacgggc

SEQ ID NO: 1272172 - RNA, 19 nt, Artificial Sequence
  Description of Artificial Sequence: Synthetic oligonucleotide
  Sense strand starting at position 3979 of SEQ ID NO: 1241432
cgaggagugaagugcuuua

SEQ ID NO: 1272173 - RNA, 19 nt, Artificial Sequence
  Description of Artificial Sequence: Synthetic oligonucleotide
  Antisense strand to SEQ ID NO: 1272172
uaaagcacuucacuccucg

SEQ ID NO: 1272174 - RNA, 19 nt, Artificial Sequence
  Description of Artificial Sequence: Synthetic oligonucleotide
  Sense strand starting at position 900 of SEQ ID NO: 1241433
aacagagaguccuucucga

SEQ ID NO: 1272175 - RNA, 19 nt, Artificial Sequence
  Description of Artificial Sequence: Synthetic oligonucleotide
  Antisense strand to SEQ ID NO: 1272174
ucgagaaggacucucuguu

SEQ ID NO: 1272176 - RNA, 19 nt, Artificial Sequence
  Description of Artificial Sequence: Synthetic oligonucleotide
  Sense strand starting at position 948 of SEQ ID NO: 1241433
cccagagguucccucaacu

SEQ ID NO: 1272177 - RNA, 19 nt, Artificial Sequence
  Description of Artificial Sequence: Synthetic oligonucleotide
  Antisense strand to SEQ ID NO: 1272176
aguugagggaaccucuggg

SEQ ID NO: 1272178 - RNA, 19 nt, Artificial Sequence
  Description of Artificial Sequence: Synthetic oligonucleotide
  Sense strand starting at position 1044 of SEQ ID NO: 1241433
gugagacacuccuuaggag

SEQ ID NO: 1272179 - RNA, 19 nt, Artificial Sequence
  Description of Artificial Sequence: Synthetic oligonucleotide
  Antisense strand to SEQ ID NO: 1272178
cuccuaaggagugucucac

SEQ ID NO: 1272180 - RNA, 19 nt, Artificial Sequence
  Description of Artificial Sequence: Synthetic oligonucleotide
  Sense strand starting at position 1100 of SEQ ID NO: 1241433
gggacuuccgggcaguuaa

SEQ ID NO: 1272181 - RNA, 19 nt, Artificial Sequence
  Description of Artificial Sequence: Synthetic oligonucleotide
  Antisense strand to SEQ ID NO: 1272180
uuaacugcccggaaguccc

SEQ ID NO: 1272182 - RNA, 19 nt, Artificial Sequence
  Description of Artificial Sequence: Synthetic oligonucleotide
  Sense strand starting at position 1108 of SEQ ID NO: 1241433
cgggcaguuaaucggaaga

SEQ ID NO: 1272183 - RNA, 19 nt, Artificial Sequence
  Description of Artificial Sequence: Synthetic oligonucleotide
  Antisense strand to SEQ ID NO: 1272182
ucuuccgauuaacugcccg

SEQ ID NO: 1272184 - RNA, 19 nt, Artificial Sequence
  Description of Artificial Sequence: Synthetic oligonucleotide
  Sense strand starting at position 1391 of SEQ ID NO: 1241433
gguugguaucguuucgguu

SEQ ID NO: 1272185 - RNA, 19 nt, Artificial Sequence
  Description of Artificial Sequence: Synthetic oligonucleotide
  Antisense strand to SEQ ID NO: 1272184
aaccgaaacgauaccaacc

SEQ ID NO: 1272186 - RNA, 19 nt, Artificial Sequence
  Description of Artificial Sequence: Synthetic oligonucleotide
  Sense strand starting at position 2164 of SEQ ID NO: 1241433
gguguaacacguuugucgu

SEQ ID NO: 1272187 - RNA, 19 nt, Artificial Sequence
  Description of Artificial Sequence: Synthetic oligonucleotide
  Antisense strand to SEQ ID NO: 1272186
acgacaaacguguuacacc

SEQ ID NO: 1272188 - RNA, 19 nt, Artificial Sequence
  Description of Artificial Sequence: Synthetic oligonucleotide
  Sense strand starting at position 2171 of SEQ ID NO: 1241433
cacguuugucguuacagga

SEQ ID NO: 1272189 - RNA, 19 nt, Artificial Sequence
  Description of Artificial Sequence: Synthetic oligonucleotide
  Antisense strand to SEQ ID NO: 1272188
uccuguaacgacaaacgug

SEQ ID NO: 1272190 - RNA, 19 nt, Artificial Sequence
  Description of Artificial Sequence: Synthetic oligonucleotide
  Sense strand starting at position 2184 of SEQ ID NO: 1241433
acaggacauguuugucaua

SEQ ID NO: 1272191 - RNA, 19 nt, Artificial Sequence
  Description of Artificial Sequence: Synthetic oligonucleotide
  Antisense strand to SEQ ID NO: 1272190
uaugacaaacauguccugu

SEQ ID NO: 1272192 - RNA, 19 nt, Artificial Sequence
  Description of Artificial Sequence: Synthetic oligonucleotide
  Sense strand starting at position 2185 of SEQ ID NO: 1241433
caggacauguuugucauau

SEQ ID NO: 1272193 - RNA, 19 nt, Artificial Sequence
  Description of Artificial Sequence: Synthetic oligonucleotide
  Antisense strand to SEQ ID NO: 1272192
auaugacaaacauguccug

SEQ ID NO: 1272194 - RNA, 19 nt, Artificial Sequence
  Description of Artificial Sequence: Synthetic oligonucleotide
  Sense strand starting at position 2186 of SEQ ID NO: 1241433
aggacauguuugucauaug

SEQ ID NO: 1272195 - RNA, 19 nt, Artificial Sequence
  Description of Artificial Sequence: Synthetic oligonucleotide
  Antisense strand to SEQ ID NO: 1272194
cauaugacaaacauguccu

SEQ ID NO: 1272196 - RNA, 19 nt, Artificial Sequence
  Description of Artificial Sequence: Synthetic oligonucleotide
  Sense strand starting at position 2204 of SEQ ID NO: 1241433
guuugucacacguuuguca

SEQ ID NO: 1272197 - RNA, 19 nt, Artificial Sequence
  Description of Artificial Sequence: Synthetic oligonucleotide
  Antisense strand to SEQ ID NO: 1272196
ugacaaacgugugacaaac

SEQ ID NO: 1272198 - RNA, 19 nt, Artificial Sequence
  Description of Artificial Sequence: Synthetic oligonucleotide
  Sense strand starting at position 2237 of SEQ ID NO: 1241433
auuccauaacugugauguc

SEQ ID NO: 1272199 - RNA, 19 nt, Artificial Sequence
  Description of Artificial Sequence: Synthetic oligonucleotide
  Antisense strand to SEQ ID NO: 1272198
gacaucacaguuauggaau

SEQ ID NO: 1272200 - RNA, 19 nt, Artificial Sequence
  Description of Artificial Sequence: Synthetic oligonucleotide
  Sense strand starting at position 2340 of SEQ ID NO: 1241433
cagcuauuaccacacggua

SEQ ID NO: 1272201 - RNA, 19 nt, Artificial Sequence
  Description of Artificial Sequence: Synthetic oligonucleotide
  Antisense strand to SEQ ID NO: 1272200
uaccgugugguaauagcug

SEQ ID NO: 1272202 - RNA, 19 nt, Artificial Sequence
  Description of Artificial Sequence: Synthetic oligonucleotide
  Sense strand starting at position 2360 of SEQ ID NO: 1241433
gguaacuauuuauucguca

SEQ ID NO: 1272203 - RNA, 19 nt, Artificial Sequence
  Description of Artificial Sequence: Synthetic oligonucleotide
  Antisense strand to SEQ ID NO: 1272202
ugacgaauaaauaguuacc

SEQ ID NO: 1272204 - RNA, 19 nt, Artificial Sequence
  Description of Artificial Sequence: Synthetic oligonucleotide
  Sense strand starting at position 2361 of SEQ ID NO: 1241433
guaacuauuuauucgucau

SEQ ID NO: 1272205 - RNA, 19 nt, Artificial Sequence
  Description of Artificial Sequence: Synthetic oligonucleotide
  Antisense strand to SEQ ID NO: 1272204
augacgaauaaauaguuac

SEQ ID NO: 1272206 - RNA, 19 nt, Artificial Sequence
  Description of Artificial Sequence: Synthetic oligonucleotide
  Sense strand starting at position 2432 of SEQ ID NO: 1241433
ggccuagacuguuuaccuu

SEQ ID NO: 1272207 - RNA, 19 nt, Artificial Sequence
  Description of Artificial Sequence: Synthetic oligonucleotide
  Antisense strand to SEQ ID NO: 1272206
aagguaaacagucuaggcc

SEQ ID NO: 1272208 - RNA, 19 nt, Artificial Sequence
  Description of Artificial Sequence: Synthetic oligonucleotide
  Sense strand starting at position 2539 of SEQ ID NO: 1241433
ggcugugaccuccaggaaa

SEQ ID NO: 1272209 - RNA, 19 nt, Artificial Sequence
  Description of Artificial Sequence: Synthetic oligonucleotide
  Antisense strand to SEQ ID NO: 1272208
uuuccuggaggucacagcc

SEQ ID NO: 1272210 - RNA, 19 nt, Artificial Sequence
  Description of Artificial Sequence: Synthetic oligonucleotide
  Sense strand starting at position 2541 of SEQ ID NO: 1241433
cugugaccuccaggaaauu

SEQ ID NO: 1272211 - RNA, 19 nt, Artificial Sequence
  Description of Artificial Sequence: Synthetic oligonucleotide
  Antisense strand to SEQ ID NO: 1272210
aauuuccuggaggucacag

SEQ ID NO: 1272212 - RNA, 19 nt, Artificial Sequence
  Description of Artificial Sequence: Synthetic oligonucleotide
  Sense strand starting at position 2569 of SEQ ID NO: 1241433
cucuguucuccucagguau

SEQ ID NO: 1272213 - RNA, 19 nt, Artificial Sequence
  Description of Artificial Sequence: Synthetic oligonucleotide
  Antisense strand to SEQ ID NO: 1272212
auaccugaggagaacagag

SEQ ID NO: 1272214 - RNA, 19 nt, Artificial Sequence
  Description of Artificial Sequence: Synthetic oligonucleotide
  Sense strand starting at position 2605 of SEQ ID NO: 1241433
agugcaacuuccucuuaag

SEQ ID NO: 1272215 - RNA, 19 nt, Artificial Sequence
  Description of Artificial Sequence: Synthetic oligonucleotide
  Antisense strand to SEQ ID NO: 1272214
cuuaagaggaaguugcacu

SEQ ID NO: 1272216 - RNA, 19 nt, Artificial Sequence
  Description of Artificial Sequence: Synthetic oligonucleotide
  Sense strand starting at position 2643 of SEQ ID NO: 1241433
gagagcaaguucccugaca

SEQ ID NO: 1272217 - RNA, 19 nt, Artificial Sequence
  Description of Artificial Sequence: Synthetic oligonucleotide
  Antisense strand to SEQ ID NO: 1272216
ugucagggaacuugcucuc

SEQ ID NO: 1272218 - RNA, 19 nt, Artificial Sequence
  Description of Artificial Sequence: Synthetic oligonucleotide
  Sense strand starting at position 2644 of SEQ ID NO: 1241433
agagcaaguucccugacau

SEQ ID NO: 1272219 - RNA, 19 nt, Artificial Sequence
  Description of Artificial Sequence: Synthetic oligonucleotide
  Antisense strand to SEQ ID NO: 1272218
augucagggaacuugcucu

SEQ ID NO: 1272220 - RNA, 19 nt, Artificial Sequence
  Description of Artificial Sequence: Synthetic oligonucleotide
  Sense strand starting at position 2645 of SEQ ID NO: 1241433
gagcaaguucccugacaua

SEQ ID NO: 1272221 - RNA, 19 nt, Artificial Sequence
  Description of Artificial Sequence: Synthetic oligonucleotide
  Antisense strand to SEQ ID NO: 1272220
uaugucagggaacuugcuc

SEQ ID NO: 1272222 - RNA, 19 nt, Artificial Sequence
  Description of Artificial Sequence: Synthetic oligonucleotide
  Sense strand starting at position 2664 of SEQ ID NO: 1241433
caggaagugcuccauaucu

SEQ ID NO: 1272223 - RNA, 19 nt, Artificial Sequence
  Description of Artificial Sequence: Synthetic oligonucleotide
  Antisense strand to SEQ ID NO: 1272222
agauauggagcacuuccug

SEQ ID NO: 1272224 - RNA, 19 nt, Artificial Sequence
  Description of Artificial Sequence: Synthetic oligonucleotide
  Sense strand starting at position 2691 of SEQ ID NO: 1241433
cuauuauuaucagucacag

SEQ ID NO: 1272225 - RNA, 19 nt, Artificial Sequence
  Description of Artificial Sequence: Synthetic oligonucleotide
  Antisense strand to SEQ ID NO: 1272224
cugugacugauaauaauag

SEQ ID NO: 1272226 - RNA, 19 nt, Artificial Sequence
  Description of Artificial Sequence: Synthetic oligonucleotide
  Sense strand starting at position 2705 of SEQ ID NO: 1241433
cacagaagguguuucuaau

SEQ ID NO: 1272227 - RNA, 19 nt, Artificial Sequence
  Description of Artificial Sequence: Synthetic oligonucleotide
  Antisense strand to SEQ ID NO: 1272226
auuagaaacaccuucugug

SEQ ID NO: 1272228 - RNA, 19 nt, Artificial Sequence
  Description of Artificial Sequence: Synthetic oligonucleotide
  Sense strand starting at position 2716 of SEQ ID NO: 1241433
uuucuaauuugugugagcu

SEQ ID NO: 1272229 - RNA, 19 nt, Artificial Sequence
  Description of Artificial Sequence: Synthetic oligonucleotide
  Antisense strand to SEQ ID NO: 1272228
agcucacacaaauuagaaa

SEQ ID NO: 1272230 - RNA, 19 nt, Artificial Sequence
  Description of Artificial Sequence: Synthetic oligonucleotide
  Sense strand starting at position 2717 of SEQ ID NO: 1241433
uucuaauuugugugagcug

SEQ ID NO: 1272231 - RNA, 19 nt, Artificial Sequence
  Description of Artificial Sequence: Synthetic oligonucleotide
  Antisense strand to SEQ ID NO: 1272230
cagcucacacaaauuagaa

SEQ ID NO: 1272232 - RNA, 19 nt, Artificial Sequence
  Description of Artificial Sequence: Synthetic oligonucleotide
  Sense strand starting at position 2724 of SEQ ID NO: 1241433
uugugugagcuggagguua

SEQ ID NO: 1272233 - RNA, 19 nt, Artificial Sequence
  Description of Artificial Sequence: Synthetic oligonucleotide
  Antisense strand to SEQ ID NO: 1272232
uaaccuccagcucacacaa

SEQ ID NO: 1272234 - RNA, 19 nt, Artificial Sequence
  Description of Artificial Sequence: Synthetic oligonucleotide
  Sense strand starting at position 2742 of SEQ ID NO: 1241433
accgauuuccuguggcacu

SEQ ID NO: 1272235 - RNA, 19 nt, Artificial Sequence
  Description of Artificial Sequence: Synthetic oligonucleotide
  Antisense strand to SEQ ID NO: 1272234
agugccacaggaaaucggu

SEQ ID NO: 1272236 - RNA, 19 nt, Artificial Sequence
  Description of Artificial Sequence: Synthetic oligonucleotide
  Sense strand starting at position 2749 of SEQ ID NO: 1241433
uccuguggcacugauagau

SEQ ID NO: 1272237 - RNA, 19 nt, Artificial Sequence
  Description of Artificial Sequence: Synthetic oligonucleotide
  Antisense strand to SEQ ID NO: 1272236
aucuaucagugccacagga

SEQ ID NO: 1272238 - RNA, 19 nt, Artificial Sequence
  Description of Artificial Sequence: Synthetic oligonucleotide
  Sense strand starting at position 2933 of SEQ ID NO: 1241433
caagcauuugcggguuuaa

SEQ ID NO: 1272239 - RNA, 19 nt, Artificial Sequence
  Description of Artificial Sequence: Synthetic oligonucleotide
  Antisense strand to SEQ ID NO: 1272238
uuaaacccgcaaaugcuug

SEQ ID NO: 1272240 - RNA, 19 nt, Artificial Sequence
  Description of Artificial Sequence: Synthetic oligonucleotide
  Sense strand starting at position 2943 of SEQ ID NO: 1241433
cggguuuaauccucuaaac

SEQ ID NO: 1272241 - RNA, 19 nt, Artificial Sequence
  Description of Artificial Sequence: Synthetic oligonucleotide
  Antisense strand to SEQ ID NO: 1272240
guuuagaggauuaaacccg

SEQ ID NO: 1272242 - RNA, 19 nt, Artificial Sequence
  Description of Artificial Sequence: Synthetic oligonucleotide
  Sense strand starting at position 2957 of SEQ ID NO: 1241433
uaaacaacccugugaggua

SEQ ID NO: 1272243 - RNA, 19 nt, Artificial Sequence
  Description of Artificial Sequence: Synthetic oligonucleotide
  Antisense strand to SEQ ID NO: 1272242
uaccucacaggguuguuua

SEQ ID NO: 1272244 - RNA, 19 nt, Artificial Sequence
  Description of Artificial Sequence: Synthetic oligonucleotide
  Sense strand starting at position 2996 of SEQ ID NO: 1241433
uuuccaagguauuccgaga

SEQ ID NO: 1272245 - RNA, 19 nt, Artificial Sequence
  Description of Artificial Sequence: Synthetic oligonucleotide
  Antisense strand to SEQ ID NO: 1272244
ucucggaauaccuuggaaa

SEQ ID NO: 1272246 - RNA, 19 nt, Artificial Sequence
  Description of Artificial Sequence: Synthetic oligonucleotide
  Sense strand starting at position 3001 of SEQ ID NO: 1241433
aagguauuccgagaaaugc

SEQ ID NO: 1272247 - RNA, 19 nt, Artificial Sequence
  Description of Artificial Sequence: Synthetic oligonucleotide
  Antisense strand to SEQ ID NO: 1272246
gcauuucucggaauaccuu

SEQ ID NO: 1272248 - RNA, 19 nt, Artificial Sequence
  Description of Artificial Sequence: Synthetic oligonucleotide
  Sense strand starting at position 3091 of SEQ ID NO: 1241433
cgcagauuuaacugaucgu

SEQ ID NO: 1272249 - RNA, 19 nt, Artificial Sequence
  Description of Artificial Sequence: Synthetic oligonucleotide
  Antisense strand to SEQ ID NO: 1272248
acgaucaguuaaaucugcg

SEQ ID NO: 1272250 - RNA, 19 nt, Artificial Sequence
  Description of Artificial Sequence: Synthetic oligonucleotide
  Sense strand starting at position 3546 of SEQ ID NO: 1241433
ugacuauuccuauauguau

SEQ ID NO: 1272251 - RNA, 19 nt, Artificial Sequence
  Description of Artificial Sequence: Synthetic oligonucleotide
  Antisense strand to SEQ ID NO: 1272250
auacauauaggaauaguca

SEQ ID NO: 1272252 - RNA, 19 nt, Artificial Sequence
  Description of Artificial Sequence: Synthetic oligonucleotide
  Sense strand starting at position 3870 of SEQ ID NO: 1241433
guuugaacccagggaaucu

SEQ ID NO: 1272253 - RNA, 19 nt, Artificial Sequence
  Description of Artificial Sequence: Synthetic oligonucleotide
  Antisense strand to SEQ ID NO: 1272252
agauucccuggguucaaac

SEQ ID NO: 1272254 - RNA, 19 nt, Artificial Sequence
  Description of Artificial Sequence: Synthetic oligonucleotide
  Sense strand starting at position 503 of SEQ ID NO: 1241434
ccuguccggcgguguuaua

SEQ ID NO: 1272255 - RNA, 19 nt, Artificial Sequence
  Description of Artificial Sequence: Synthetic oligonucleotide
  Antisense strand to SEQ ID NO: 1272254
uauaacaccgccggacagg

SEQ ID NO: 1272256 - RNA, 19 nt, Artificial Sequence
  Description of Artificial Sequence: Synthetic oligonucleotide
  Sense strand starting at position 1085 of SEQ ID NO: 1241434
gggagaauauugugggaga

SEQ ID NO: 1272257 - RNA, 19 nt, Artificial Sequence
  Description of Artificial Sequence: Synthetic oligonucleotide
  Antisense strand to SEQ ID NO: 1272256
ucucccacaauauucuccc

SEQ ID NO: 1272258 - RNA, 19 nt, Artificial Sequence
  Description of Artificial Sequence: Synthetic oligonucleotide
  Sense strand starting at position 1086 of SEQ ID NO: 1241434
ggagaauauugugggagaa

SEQ ID NO: 1272259 - RNA, 19 nt, Artificial Sequence
  Description of Artificial Sequence: Synthetic oligonucleotide
  Antisense strand to SEQ ID NO: 1272258
uucucccacaauauucucc

SEQ ID NO: 1272260 - RNA, 19 nt, Artificial Sequence
  Description of Artificial Sequence: Synthetic oligonucleotide
  Sense strand starting at position 1088 of SEQ ID NO: 1241434
agaauauugugggagaaag

SEQ ID NO: 1272261 - RNA, 19 nt, Artificial Sequence
  Description of Artificial Sequence: Synthetic oligonucleotide
  Antisense strand to SEQ ID NO: 1272260
cuuucucccacaauauucu

SEQ ID NO: 1272262 - RNA, 19 nt, Artificial Sequence
  Description of Artificial Sequence: Synthetic oligonucleotide
  Sense strand starting at position 1114 of SEQ ID NO: 1241434
ugaacagaacugcaguuau

SEQ ID NO: 1272263 - RNA, 19 nt, Artificial Sequence
  Description of Artificial Sequence: Synthetic oligonucleotide
  Antisense strand to SEQ ID NO: 1272262
auaacugcaguucuguuca

SEQ ID NO: 1272264 - RNA, 19 nt, Artificial Sequence
  Description of Artificial Sequence: Synthetic oligonucleotide
  Sense strand starting at position 1344 of SEQ ID NO: 1241434
ggcugaugguaggucucaa

SEQ ID NO: 1272265 - RNA, 19 nt, Artificial Sequence
  Description of Artificial Sequence: Synthetic oligonucleotide
  Antisense strand to SEQ ID NO: 1272264
uugagaccuaccaucagcc

SEQ ID NO: 1272266 - RNA, 19 nt, Artificial Sequence
  Description of Artificial Sequence: Synthetic oligonucleotide
  Sense strand starting at position 1439 of SEQ ID NO: 1241434
gcgucucggcuuccaagaa

SEQ ID NO: 1272267 - RNA, 19 nt, Artificial Sequence
  Description of Artificial Sequence: Synthetic oligonucleotide
  Antisense strand to SEQ ID NO: 1272266
uucuuggaagccgagacgc

SEQ ID NO: 1272268 - RNA, 19 nt, Artificial Sequence
  Description of Artificial Sequence: Synthetic oligonucleotide
  Sense strand starting at position 2014 of SEQ ID NO: 1241434
ggaggauuccgaggguuuc

SEQ ID NO: 1272269 - RNA, 19 nt, Artificial Sequence
  Description of Artificial Sequence: Synthetic oligonucleotide
  Antisense strand to SEQ ID NO: 1272268
gaaacccucggaauccucc

SEQ ID NO: 1272270 - RNA, 19 nt, Artificial Sequence
  Description of Artificial Sequence: Synthetic oligonucleotide
  Sense strand starting at position 2015 of SEQ ID NO: 1241434
gaggauuccgaggguuuca

SEQ ID NO: 1272271 - RNA, 19 nt, Artificial Sequence
  Description of Artificial Sequence: Synthetic oligonucleotide
  Antisense strand to SEQ ID NO: 1272270
ugaaacccucggaauccuc

SEQ ID NO: 1272272 - RNA, 19 nt, Artificial Sequence
  Description of Artificial Sequence: Synthetic oligonucleotide
  Sense strand starting at position 2072 of SEQ ID NO: 1241434
cgcuguuucccgagggaag

SEQ ID NO: 1272273 - RNA, 19 nt, Artificial Sequence
  Description of Artificial Sequence: Synthetic oligonucleotide
  Antisense strand to SEQ ID NO: 1272272
cuucccucgggaaacagcg

SEQ ID NO: 1272274 - RNA, 19 nt, Artificial Sequence
  Description of Artificial Sequence: Synthetic oligonucleotide
  Sense strand starting at position 2119 of SEQ ID NO: 1241434
ggcacuuagaacugucuga

SEQ ID NO: 1272275 - RNA, 19 nt, Artificial Sequence
  Description of Artificial Sequence: Synthetic oligonucleotide
  Antisense strand to SEQ ID NO: 1272274
ucagacaguucuaagugcc

SEQ ID NO: 1272276 - RNA, 19 nt, Artificial Sequence
  Description of Artificial Sequence: Synthetic oligonucleotide
  Sense strand starting at position 2238 of SEQ ID NO: 1241434
ggcuuuauauggcuguauu

SEQ ID NO: 1272277 - RNA, 19 nt, Artificial Sequence
  Description of Artificial Sequence: Synthetic oligonucleotide
  Antisense strand to SEQ ID NO: 1272276
aauacagccauauaaagcc

SEQ ID NO: 1272278 - RNA, 19 nt, Artificial Sequence
  Description of Artificial Sequence: Synthetic oligonucleotide
  Sense strand starting at position 2263 of SEQ ID NO: 1241434
ggcaauuccugcugaacaa

SEQ ID NO: 1272279 - RNA, 19 nt, Artificial Sequence
  Description of Artificial Sequence: Synthetic oligonucleotide
  Antisense strand to SEQ ID NO: 1272278
uuguucagcaggaauugcc

SEQ ID NO: 1272280 - RNA, 19 nt, Artificial Sequence
  Description of Artificial Sequence: Synthetic oligonucleotide
  Sense strand starting at position 2264 of SEQ ID NO: 1241434
gcaauuccugcugaacaaa

SEQ ID NO: 1272281 - RNA, 19 nt, Artificial Sequence
  Description of Artificial Sequence: Synthetic oligonucleotide
  Antisense strand to SEQ ID NO: 1272280
uuuguucagcaggaauugc

SEQ ID NO: 1272282 - RNA, 19 nt, Artificial Sequence
  Description of Artificial Sequence: Synthetic oligonucleotide
  Sense strand starting at position 2308 of SEQ ID NO: 1241434
uggagugugacuggcuuaa

SEQ ID NO: 1272283 - RNA, 19 nt, Artificial Sequence
  Description of Artificial Sequence: Synthetic oligonucleotide
  Antisense strand to SEQ ID NO: 1272282
uuaagccagucacacucca

SEQ ID NO: 1272284 - RNA, 19 nt, Artificial Sequence
  Description of Artificial Sequence: Synthetic oligonucleotide
  Sense strand starting at position 2310 of SEQ ID NO: 1241434
gagugugacuggcuuaacu

SEQ ID NO: 1272285 - RNA, 19 nt, Artificial Sequence
  Description of Artificial Sequence: Synthetic oligonucleotide
  Antisense strand to SEQ ID NO: 1272284
aguuaagccagucacacuc

SEQ ID NO: 1272286 - RNA, 19 nt, Artificial Sequence
  Description of Artificial Sequence: Synthetic oligonucleotide
  Sense strand starting at position 2365 of SEQ ID NO: 1241434
aggccuucguacucuugau

SEQ ID NO: 1272287 - RNA, 19 nt, Artificial Sequence
  Description of Artificial Sequence: Synthetic oligonucleotide
  Antisense strand to SEQ ID NO: 1272286
aucaagaguacgaaggccu

SEQ ID NO: 1272288 - RNA, 19 nt, Artificial Sequence
  Description of Artificial Sequence: Synthetic oligonucleotide
  Sense strand starting at position 2384 of SEQ ID NO: 1241434
uuucuugauugauugaacu

SEQ ID NO: 1272289 - RNA, 19 nt, Artificial Sequence
  Description of Artificial Sequence: Synthetic oligonucleotide
  Antisense strand to SEQ ID NO: 1272288
aguucaaucaaucaagaaa

SEQ ID NO: 1272290 - RNA, 19 nt, Artificial Sequence
  Description of Artificial Sequence: Synthetic oligonucleotide
  Sense strand starting at position 2474 of SEQ ID NO: 1241434
cguggucuugccuccuuaa

SEQ ID NO: 1272291 - RNA, 19 nt, Artificial Sequence
  Description of Artificial Sequence: Synthetic oligonucleotide
  Antisense strand to SEQ ID NO: 1272290
uuaaggaggcaagaccacg

SEQ ID NO: 1272292 - RNA, 19 nt, Artificial Sequence
  Description of Artificial Sequence: Synthetic oligonucleotide
  Sense strand starting at position 2524 of SEQ ID NO: 1241434
accuaauccuagccguaua

SEQ ID NO: 1272293 - RNA, 19 nt, Artificial Sequence
  Description of Artificial Sequence: Synthetic oligonucleotide
  Antisense strand to SEQ ID NO: 1272292
uauacggcuaggauuaggu

SEQ ID NO: 1272294 - RNA, 19 nt, Artificial Sequence
  Description of Artificial Sequence: Synthetic oligonucleotide
  Sense strand starting at position 2529 of SEQ ID NO: 1241434
auccuagccguauauuaaa

SEQ ID NO: 1272295 - RNA, 19 nt, Artificial Sequence
  Description of Artificial Sequence: Synthetic oligonucleotide
  Antisense strand to SEQ ID NO: 1272294
uuuaauauacggcuaggau

SEQ ID NO: 1272296 - RNA, 19 nt, Artificial Sequence
  Description of Artificial Sequence: Synthetic oligonucleotide
  Sense strand starting at position 2553 of SEQ ID NO: 1241434
uauugugucugaguuauac

SEQ ID NO: 1272297 - RNA, 19 nt, Artificial Sequence
  Description of Artificial Sequence: Synthetic oligonucleotide
  Antisense strand to SEQ ID NO: 1272296
guauaacucagacacaaua

SEQ ID NO: 1272298 - RNA, 19 nt, Artificial Sequence
  Description of Artificial Sequence: Synthetic oligonucleotide
  Sense strand starting at position 2565 of SEQ ID NO: 1241434
guuauacuuccguaauggu

SEQ ID NO: 1272299 - RNA, 19 nt, Artificial Sequence
  Description of Artificial Sequence: Synthetic oligonucleotide
  Antisense strand to SEQ ID NO: 1272298
accauuacggaaguauaac

SEQ ID NO: 1272300 - RNA, 19 nt, Artificial Sequence
  Description of Artificial Sequence: Synthetic oligonucleotide
  Sense strand starting at position 2568 of SEQ ID NO: 1241434
auacuuccguaaugguaaa

SEQ ID NO: 1272301 - RNA, 19 nt, Artificial Sequence
  Description of Artificial Sequence: Synthetic oligonucleotide
  Antisense strand to SEQ ID NO: 1272300
uuuaccauuacggaaguau

SEQ ID NO: 1272302 - RNA, 19 nt, Artificial Sequence
  Description of Artificial Sequence: Synthetic oligonucleotide
  Sense strand starting at position 2632 of SEQ ID NO: 1241434
gugauuuauucucaaauga

SEQ ID NO: 1272303 - RNA, 19 nt, Artificial Sequence
  Description of Artificial Sequence: Synthetic oligonucleotide
  Antisense strand to SEQ ID NO: 1272302
ucauuugagaauaaaucac

SEQ ID NO: 1272304 - RNA, 19 nt, Artificial Sequence
  Description of Artificial Sequence: Synthetic oligonucleotide
  Sense strand starting at position 2673 of SEQ ID NO: 1241434
ccugaaguguugucaguua

SEQ ID NO: 1272305 - RNA, 19 nt, Artificial Sequence
  Description of Artificial Sequence: Synthetic oligonucleotide
  Antisense strand to SEQ ID NO: 1272304
uaacugacaacacuucagg

SEQ ID NO: 1272306 - RNA, 19 nt, Artificial Sequence
  Description of Artificial Sequence: Synthetic oligonucleotide
  Sense strand starting at position 2694 of SEQ ID NO: 1241434
uccucauucuuugaaacgu

SEQ ID NO: 1272307 - RNA, 19 nt, Artificial Sequence
  Description of Artificial Sequence: Synthetic oligonucleotide
  Antisense strand to SEQ ID NO: 1272306
acguuucaaagaaugagga

SEQ ID NO: 1272308 - RNA, 19 nt, Artificial Sequence
  Description of Artificial Sequence: Synthetic oligonucleotide
  Sense strand starting at position 2709 of SEQ ID NO: 1241434
acguaauaguuccuggaaa

SEQ ID NO: 1272309 - RNA, 19 nt, Artificial Sequence
  Description of Artificial Sequence: Synthetic oligonucleotide
  Antisense strand to SEQ ID NO: 1272308
uuuccaggaacuauuacgu

SEQ ID NO: 1272310 - RNA, 19 nt, Artificial Sequence
  Description of Artificial Sequence: Synthetic oligonucleotide
  Sense strand starting at position 3073 of SEQ ID NO: 1241434
guacaucuaguagagcauu

SEQ ID NO: 1272311 - RNA, 19 nt, Artificial Sequence
  Description of Artificial Sequence: Synthetic oligonucleotide
  Antisense strand to SEQ ID NO: 1272310
aaugcucuacuagauguac

SEQ ID NO: 1272312 - RNA, 19 nt, Artificial Sequence
  Description of Artificial Sequence: Synthetic oligonucleotide
  Sense strand starting at position 3093 of SEQ ID NO: 1241434
aaacgcgacucagcauuua

SEQ ID NO: 1272313 - RNA, 19 nt, Artificial Sequence
  Description of Artificial Sequence: Synthetic oligonucleotide
  Antisense strand to SEQ ID NO: 1272312
uaaaugcugagucgcguuu

SEQ ID NO: 1272314 - RNA, 19 nt, Artificial Sequence
  Description of Artificial Sequence: Synthetic oligonucleotide
  Sense strand starting at position 3187 of SEQ ID NO: 1241434
uuuguucuuugagagggua

SEQ ID NO: 1272315 - RNA, 19 nt, Artificial Sequence
  Description of Artificial Sequence: Synthetic oligonucleotide
  Antisense strand to SEQ ID NO: 1272314
uacccucucaaagaacaaa

SEQ ID NO: 1272316 - RNA, 19 nt, Artificial Sequence
  Description of Artificial Sequence: Synthetic oligonucleotide
  Sense strand starting at position 3189 of SEQ ID NO: 1241434
uguucuuugagaggguaau

SEQ ID NO: 1272317 - RNA, 19 nt, Artificial Sequence
  Description of Artificial Sequence: Synthetic oligonucleotide
  Antisense strand to SEQ ID NO: 1272316
auuacccucucaaagaaca

SEQ ID NO: 1272318 - RNA, 19 nt, Artificial Sequence
  Description of Artificial Sequence: Synthetic oligonucleotide
  Sense strand starting at position 3190 of SEQ ID NO: 1241434
guucuuugagaggguaaua

SEQ ID NO: 1272319 - RNA, 19 nt, Artificial Sequence
  Description of Artificial Sequence: Synthetic oligonucleotide
  Antisense strand to SEQ ID NO: 1272318
uauuacccucucaaagaac

SEQ ID NO: 1272320 - RNA, 19 nt, Artificial Sequence
  Description of Artificial Sequence: Synthetic oligonucleotide
  Sense strand starting at position 3195 of SEQ ID NO: 1241434
uugagaggguaauaaugua

SEQ ID NO: 1272321 - RNA, 19 nt, Artificial Sequence
  Description of Artificial Sequence: Synthetic oligonucleotide
  Antisense strand to SEQ ID NO: 1272320
uacauuauuacccucucaa

SEQ ID NO: 1272322 - RNA, 19 nt, Artificial Sequence
  Description of Artificial Sequence: Synthetic oligonucleotide
  Sense strand starting at position 3255 of SEQ ID NO: 1241434
uuaaauggacucugaacuu

SEQ ID NO: 1272323 - RNA, 19 nt, Artificial Sequence
  Description of Artificial Sequence: Synthetic oligonucleotide
  Antisense strand to SEQ ID NO: 1272322
aaguucagaguccauuuaa

SEQ ID NO: 1272324 - RNA, 19 nt, Artificial Sequence
  Description of Artificial Sequence: Synthetic oligonucleotide
  Sense strand starting at position 3330 of SEQ ID NO: 1241434
uagaaauguuccgccaggu

SEQ ID NO: 1272325 - RNA, 19 nt, Artificial Sequence
  Description of Artificial Sequence: Synthetic oligonucleotide
  Antisense strand to SEQ ID NO: 1272324
accuggcggaacauuucua

SEQ ID NO: 1272326 - RNA, 19 nt, Artificial Sequence
  Description of Artificial Sequence: Synthetic oligonucleotide
  Sense strand starting at position 3400 of SEQ ID NO: 1241434
gaucgcuuagcccagaagu

SEQ ID NO: 1272327 - RNA, 19 nt, Artificial Sequence
  Description of Artificial Sequence: Synthetic oligonucleotide
  Antisense strand to SEQ ID NO: 1272326
acuucugggcuaagcgauc

SEQ ID NO: 1272328 - RNA, 19 nt, Artificial Sequence
  Description of Artificial Sequence: Synthetic oligonucleotide
  Sense strand starting at position 3845 of SEQ ID NO: 1241434
agagguagugagcgaagaa

SEQ ID NO: 1272329 - RNA, 19 nt, Artificial Sequence
  Description of Artificial Sequence: Synthetic oligonucleotide
  Antisense strand to SEQ ID NO: 1272328
uucuucgcucacuaccucu

SEQ ID NO: 1272330 - RNA, 19 nt, Artificial Sequence
  Description of Artificial Sequence: Synthetic oligonucleotide
  Sense strand starting at position 3931 of SEQ ID NO: 1241434
aguccuuuauuugguguua

SEQ ID NO: 1272331 - RNA, 19 nt, Artificial Sequence
  Description of Artificial Sequence: Synthetic oligonucleotide
  Antisense strand to SEQ ID NO: 1272330
uaacaccaaauaaaggacu

SEQ ID NO: 1272332 - RNA, 19 nt, Artificial Sequence
  Description of Artificial Sequence: Synthetic oligonucleotide
  Sense strand starting at position 3933 of SEQ ID NO: 1241434
uccuuuauuugguguuacu

SEQ ID NO: 1272333 - RNA, 19 nt, Artificial Sequence
  Description of Artificial Sequence: Synthetic oligonucleotide
  Antisense strand to SEQ ID NO: 1272332
aguaacaccaaauaaagga

SEQ ID NO: 1272334 - RNA, 19 nt, Artificial Sequence
  Description of Artificial Sequence: Synthetic oligonucleotide
  Sense strand starting at position 24 of SEQ ID NO: 1241435
acccuagacuucuggacau

SEQ ID NO: 1272335 - RNA, 19 nt, Artificial Sequence
  Description of Artificial Sequence: Synthetic oligonucleotide
  Antisense strand to SEQ ID NO: 1272334
auguccagaagucuagggu

SEQ ID NO: 1272336 - RNA, 19 nt, Artificial Sequence
  Description of Artificial Sequence: Synthetic oligonucleotide
  Sense strand starting at position 433 of SEQ ID NO: 1241435
ggcauuccuucuuggguga

SEQ ID NO: 1272337 - RNA, 19 nt, Artificial Sequence
  Description of Artificial Sequence: Synthetic oligonucleotide
  Antisense strand to SEQ ID NO: 1272336
ucacccaagaaggaaugcc

SEQ ID NO: 1272338 - RNA, 19 nt, Artificial Sequence
  Description of Artificial Sequence: Synthetic oligonucleotide
  Sense strand starting at position 479 of SEQ ID NO: 1241435
uucucuuccuauuagagag

SEQ ID NO: 1272339 - RNA, 19 nt, Artificial Sequence
  Description of Artificial Sequence: Synthetic oligonucleotide
  Antisense strand to SEQ ID NO: 1272338
cucucuaauaggaagagaa

SEQ ID NO: 1272340 - RNA, 19 nt, Artificial Sequence
  Description of Artificial Sequence: Synthetic oligonucleotide
  Sense strand starting at position 525 of SEQ ID NO: 1241435
uccugaugucccugaguca

SEQ ID NO: 1272341 - RNA, 19 nt, Artificial Sequence
  Description of Artificial Sequence: Synthetic oligonucleotide
  Antisense strand to SEQ ID NO: 1272340
ugacucagggacaucagga

SEQ ID NO: 1272342 - RNA, 19 nt, Artificial Sequence
  Description of Artificial Sequence: Synthetic oligonucleotide
  Sense strand starting at position 569 of SEQ ID NO: 1241435
gagggugugucucacacuu

SEQ ID NO: 1272343 - RNA, 19 nt, Artificial Sequence
  Description of Artificial Sequence: Synthetic oligonucleotide
  Antisense strand to SEQ ID NO: 1272342
aagugugagacacacccuc

SEQ ID NO: 1272344 - RNA, 19 nt, Artificial Sequence
  Description of Artificial Sequence: Synthetic oligonucleotide
  Sense strand starting at position 586 of SEQ ID NO: 1241435
uucugagggugugaagaau

SEQ ID NO: 1272345 - RNA, 19 nt, Artificial Sequence
  Description of Artificial Sequence: Synthetic oligonucleotide
  Antisense strand to SEQ ID NO: 1272344
auucuucacacccucagaa

SEQ ID NO: 1272346 - RNA, 19 nt, Artificial Sequence
  Description of Artificial Sequence: Synthetic oligonucleotide
  Sense strand starting at position 670 of SEQ ID NO: 1241435
gggugucccuuugacuaua

SEQ ID NO: 1272347 - RNA, 19 nt, Artificial Sequence
  Description of Artificial Sequence: Synthetic oligonucleotide
  Antisense strand to SEQ ID NO: 1272346
uauagucaaagggacaccc

SEQ ID NO: 1272348 - RNA, 19 nt, Artificial Sequence
  Description of Artificial Sequence: Synthetic oligonucleotide
  Sense strand starting at position 672 of SEQ ID NO: 1241435
gugucccuuugacuauauu

SEQ ID NO: 1272349 - RNA, 19 nt, Artificial Sequence
  Description of Artificial Sequence: Synthetic oligonucleotide
  Antisense strand to SEQ ID NO: 1272348
aauauagucaaagggacac

SEQ ID NO: 1272350 - RNA, 19 nt, Artificial Sequence
  Description of Artificial Sequence: Synthetic oligonucleotide
  Sense strand starting at position 704 of SEQ ID NO: 1241435
gugugagugucugccuuua

SEQ ID NO: 1272351 - RNA, 19 nt, Artificial Sequence
  Description of Artificial Sequence: Synthetic oligonucleotide
  Antisense strand to SEQ ID NO: 1272350
uaaaggcagacacucacac

SEQ ID NO: 1272352 - RNA, 19 nt, Artificial Sequence
  Description of Artificial Sequence: Synthetic oligonucleotide
  Sense strand starting at position 706 of SEQ ID NO: 1241435
gugagugucugccuuuacu

SEQ ID NO: 1272353 - RNA, 19 nt, Artificial Sequence
  Description of Artificial Sequence: Synthetic oligonucleotide
  Antisense strand to SEQ ID NO: 1272352
aguaaaggcagacacucac

SEQ ID NO: 1272354 - RNA, 19 nt, Artificial Sequence
  Description of Artificial Sequence: Synthetic oligonucleotide
  Sense strand starting at position 712 of SEQ ID NO: 1241435
gucugccuuuacuaugaga

SEQ ID NO: 1272355 - RNA, 19 nt, Artificial Sequence
  Description of Artificial Sequence: Synthetic oligonucleotide
  Antisense strand to SEQ ID NO: 1272354
ucucauaguaaaggcagac

SEQ ID NO: 1272356 - RNA, 19 nt, Artificial Sequence
  Description of Artificial Sequence: Synthetic oligonucleotide
  Sense strand starting at position 714 of SEQ ID NO: 1241435
cugccuuuacuaugagagu

SEQ ID NO: 1272357 - RNA, 19 nt, Artificial Sequence
  Description of Artificial Sequence: Synthetic oligonucleotide
  Antisense strand to SEQ ID NO: 1272356
acucucauaguaaaggcag

SEQ ID NO: 1272358 - RNA, 19 nt, Artificial Sequence
  Description of Artificial Sequence: Synthetic oligonucleotide
  Sense strand starting at position 720 of SEQ ID NO: 1241435
uuacuaugagagugugcau

SEQ ID NO: 1272359 - RNA, 19 nt, Artificial Sequence
  Description of Artificial Sequence: Synthetic oligonucleotide
  Antisense strand to SEQ ID NO: 1272358
augcacacucucauaguaa

SEQ ID NO: 1272360 - RNA, 19 nt, Artificial Sequence
  Description of Artificial Sequence: Synthetic oligonucleotide
  Sense strand starting at position 780 of SEQ ID NO: 1241435
gggacagguaagugugaau

SEQ ID NO: 1272361 - RNA, 19 nt, Artificial Sequence
  Description of Artificial Sequence: Synthetic oligonucleotide
  Antisense strand to SEQ ID NO: 1272360
auucacacuuaccuguccc

SEQ ID NO: 1272362 - RNA, 19 nt, Artificial Sequence
  Description of Artificial Sequence: Synthetic oligonucleotide
  Sense strand starting at position 787 of SEQ ID NO: 1241435
guaagugugaaugaguaug

SEQ ID NO: 1272363 - RNA, 19 nt, Artificial Sequence
  Description of Artificial Sequence: Synthetic oligonucleotide
  Antisense strand to SEQ ID NO: 1272362
cauacucauucacacuuac

SEQ ID NO: 1272364 - RNA, 19 nt, Artificial Sequence
  Description of Artificial Sequence: Synthetic oligonucleotide
  Sense strand starting at position 795 of SEQ ID NO: 1241435
gaaugaguaugcuguggaa

SEQ ID NO: 1272365 - RNA, 19 nt, Artificial Sequence
  Description of Artificial Sequence: Synthetic oligonucleotide
  Antisense strand to SEQ ID NO: 1272364
uuccacagcauacucauuc

SEQ ID NO: 1272366 - RNA, 19 nt, Artificial Sequence
  Description of Artificial Sequence: Synthetic oligonucleotide
  Sense strand starting at position 951 of SEQ ID NO: 1241435
gggugccaucucugugaag

SEQ ID NO: 1272367 - RNA, 19 nt, Artificial Sequence
  Description of Artificial Sequence: Synthetic oligonucleotide
  Antisense strand to SEQ ID NO: 1272366
cuucacagagauggcaccc

SEQ ID NO: 1272368 - RNA, 19 nt, Artificial Sequence
  Description of Artificial Sequence: Synthetic oligonucleotide
  Sense strand starting at position 952 of SEQ ID NO: 1241435
ggugccaucucugugaaga

SEQ ID NO: 1272369 - RNA, 19 nt, Artificial Sequence
  Description of Artificial Sequence: Synthetic oligonucleotide
  Antisense strand to SEQ ID NO: 1272368
ucuucacagagauggcacc

SEQ ID NO: 1272370 - RNA, 19 nt, Artificial Sequence
  Description of Artificial Sequence: Synthetic oligonucleotide
  Sense strand starting at position 953 of SEQ ID NO: 1241435
gugccaucucugugaagau

SEQ ID NO: 1272371 - RNA, 19 nt, Artificial Sequence
  Description of Artificial Sequence: Synthetic oligonucleotide
  Antisense strand to SEQ ID NO: 1272370
aucuucacagagauggcac

SEQ ID NO: 1272372 - RNA, 19 nt, Artificial Sequence
  Description of Artificial Sequence: Synthetic oligonucleotide
  Sense strand starting at position 954 of SEQ ID NO: 1241435
ugccaucucugugaagaug

SEQ ID NO: 1272373 - RNA, 19 nt, Artificial Sequence
  Description of Artificial Sequence: Synthetic oligonucleotide
  Antisense strand to SEQ ID NO: 1272372
caucuucacagagauggca

SEQ ID NO: 1272374 - RNA, 19 nt, Artificial Sequence
  Description of Artificial Sequence: Synthetic oligonucleotide
  Sense strand starting at position 962 of SEQ ID NO: 1241435
cugugaagauguguuuaca

SEQ ID NO: 1272375 - RNA, 19 nt, Artificial Sequence
  Description of Artificial Sequence: Synthetic oligonucleotide
  Antisense strand to SEQ ID NO: 1272374
uguaaacacaucuucacag

SEQ ID NO: 1272376 - RNA, 19 nt, Artificial Sequence
  Description of Artificial Sequence: Synthetic oligonucleotide
  Sense strand starting at position 965 of SEQ ID NO: 1241435
ugaagauguguuuacacac

SEQ ID NO: 1272377 - RNA, 19 nt, Artificial Sequence
  Description of Artificial Sequence: Synthetic oligonucleotide
  Antisense strand to SEQ ID NO: 1272376
guguguaaacacaucuuca

SEQ ID NO: 1272378 - RNA, 19 nt, Artificial Sequence
  Description of Artificial Sequence: Synthetic oligonucleotide
  Sense strand starting at position 971 of SEQ ID NO: 1241435
uguguuuacacacgucuaa

SEQ ID NO: 1272379 - RNA, 19 nt, Artificial Sequence
  Description of Artificial Sequence: Synthetic oligonucleotide
  Antisense strand to SEQ ID NO: 1272378
uuagacguguguaaacaca

SEQ ID NO: 1272380 - RNA, 19 nt, Artificial Sequence
  Description of Artificial Sequence: Synthetic oligonucleotide
  Sense strand starting at position 975 of SEQ ID NO: 1241435
uuuacacacgucuaaugau

SEQ ID NO: 1272381 - RNA, 19 nt, Artificial Sequence
  Description of Artificial Sequence: Synthetic oligonucleotide
  Antisense strand to SEQ ID NO: 1272380
aucauuagacguguguaaa

SEQ ID NO: 1272382 - RNA, 19 nt, Artificial Sequence
  Description of Artificial Sequence: Synthetic oligonucleotide
  Sense strand starting at position 1033 of SEQ ID NO: 1241435
cgcagcaugccucugagua

SEQ ID NO: 1272383 - RNA, 19 nt, Artificial Sequence
  Description of Artificial Sequence: Synthetic oligonucleotide
  Antisense strand to SEQ ID NO: 1272382
uacucagaggcaugcugcg

SEQ ID NO: 1272384 - RNA, 19 nt, Artificial Sequence
  Description of Artificial Sequence: Synthetic oligonucleotide
  Sense strand starting at position 1034 of SEQ ID NO: 1241435
gcagcaugccucugaguau

SEQ ID NO: 1272385 - RNA, 19 nt, Artificial Sequence
  Description of Artificial Sequence: Synthetic oligonucleotide
  Antisense strand to SEQ ID NO: 1272384
auacucagaggcaugcugc

SEQ ID NO: 1272386 - RNA, 19 nt, Artificial Sequence
  Description of Artificial Sequence: Synthetic oligonucleotide
  Sense strand starting at position 1152 of SEQ ID NO: 1241435
gucugagaaccaugcaaac

SEQ ID NO: 1272387 - RNA, 19 nt, Artificial Sequence
  Description of Artificial Sequence: Synthetic oligonucleotide
  Antisense strand to SEQ ID NO: 1272386
guuugcaugguucucagac

SEQ ID NO: 1272388 - RNA, 19 nt, Artificial Sequence
  Description of Artificial Sequence: Synthetic oligonucleotide
  Sense strand starting at position 1171 of SEQ ID NO: 1241435
gggagaagccuugaugugu

SEQ ID NO: 1272389 - RNA, 19 nt, Artificial Sequence
  Description of Artificial Sequence: Synthetic oligonucleotide
  Antisense strand to SEQ ID NO: 1272388
acacaucaaggcuucuccc

SEQ ID NO: 1272390 - RNA, 19 nt, Artificial Sequence
  Description of Artificial Sequence: Synthetic oligonucleotide
  Sense strand starting at position 1472 of SEQ ID NO: 1241435
ggacucuccggaugggaga

SEQ ID NO: 1272391 - RNA, 19 nt, Artificial Sequence
  Description of Artificial Sequence: Synthetic oligonucleotide
  Antisense strand to SEQ ID NO: 1272390
ucucccauccggagagucc

SEQ ID NO: 1272392 - RNA, 19 nt, Artificial Sequence
  Description of Artificial Sequence: Synthetic oligonucleotide
  Sense strand starting at position 3265 of SEQ ID NO: 1241435
guacaaacuuuccgccuau

SEQ ID NO: 1272393 - RNA, 19 nt, Artificial Sequence
  Description of Artificial Sequence: Synthetic oligonucleotide
  Antisense strand to SEQ ID NO: 1272392
auaggcggaaaguuuguac

SEQ ID NO: 1272394 - RNA, 19 nt, Artificial Sequence
  Description of Artificial Sequence: Synthetic oligonucleotide
  Sense strand starting at position 3290 of SEQ ID NO: 1241435
ggguuaccaugaggauaug

SEQ ID NO: 1272395 - RNA, 19 nt, Artificial Sequence
  Description of Artificial Sequence: Synthetic oligonucleotide
  Antisense strand to SEQ ID NO: 1272394
cauauccucaugguaaccc

SEQ ID NO: 1272396 - RNA, 19 nt, Artificial Sequence
  Description of Artificial Sequence: Synthetic oligonucleotide
  Sense strand starting at position 3296 of SEQ ID NO: 1241435
ccaugaggauaugcuguua

SEQ ID NO: 1272397 - RNA, 19 nt, Artificial Sequence
  Description of Artificial Sequence: Synthetic oligonucleotide
  Antisense strand to SEQ ID NO: 1272396
uaacagcauauccucaugg

SEQ ID NO: 1272398 - RNA, 19 nt, Artificial Sequence
  Description of Artificial Sequence: Synthetic oligonucleotide
  Sense strand starting at position 3576 of SEQ ID NO: 1241435
auacuugucccuuaaaguc

SEQ ID NO: 1272399 - RNA, 19 nt, Artificial Sequence
  Description of Artificial Sequence: Synthetic oligonucleotide
  Antisense strand to SEQ ID NO: 1272398
gacuuuaagggacaaguau

SEQ ID NO: 1272400 - RNA, 19 nt, Artificial Sequence
  Description of Artificial Sequence: Synthetic oligonucleotide
  Sense strand starting at position 3584 of SEQ ID NO: 1241435
cccuuaaagucaggaucau

SEQ ID NO: 1272401 - RNA, 19 nt, Artificial Sequence
  Description of Artificial Sequence: Synthetic oligonucleotide
  Antisense strand to SEQ ID NO: 1272400
augauccugacuuuaaggg

SEQ ID NO: 1272402 - RNA, 19 nt, Artificial Sequence
  Description of Artificial Sequence: Synthetic oligonucleotide
  Sense strand starting at position 3593 of SEQ ID NO: 1241435
ucaggaucauuuggugaga

SEQ ID NO: 1272403 - RNA, 19 nt, Artificial Sequence
  Description of Artificial Sequence: Synthetic oligonucleotide
  Antisense strand to SEQ ID NO: 1272402
ucucaccaaaugauccuga

SEQ ID NO: 1272404 - RNA, 19 nt, Artificial Sequence
  Description of Artificial Sequence: Synthetic oligonucleotide
  Sense strand starting at position 3595 of SEQ ID NO: 1241435
aggaucauuuggugagaau

SEQ ID NO: 1272405 - RNA, 19 nt, Artificial Sequence
  Description of Artificial Sequence: Synthetic oligonucleotide
  Antisense strand to SEQ ID NO: 1272404
auucucaccaaaugauccu

SEQ ID NO: 1272406 - RNA, 19 nt, Artificial Sequence
  Description of Artificial Sequence: Synthetic oligonucleotide
  Sense strand starting at position 3604 of SEQ ID NO: 1241435
uggugagaaugugcuaauu

SEQ ID NO: 1272407 - RNA, 19 nt, Artificial Sequence
  Description of Artificial Sequence: Synthetic oligonucleotide
  Antisense strand to SEQ ID NO: 1272406
aauuagcacauucucacca

SEQ ID NO: 1272408 - RNA, 19 nt, Artificial Sequence
  Description of Artificial Sequence: Synthetic oligonucleotide
  Sense strand starting at position 3741 of SEQ ID NO: 1241435
agcuguaccuugcaaucau

SEQ ID NO: 1272409 - RNA, 19 nt, Artificial Sequence
  Description of Artificial Sequence: Synthetic oligonucleotide
  Antisense strand to SEQ ID NO: 1272408
augauugcaagguacagcu

SEQ ID NO: 1272410 - RNA, 19 nt, Artificial Sequence
  Description of Artificial Sequence: Synthetic oligonucleotide
  Sense strand starting at position 3953 of SEQ ID NO: 1241435
ggagcucuagguugacaau

SEQ ID NO: 1272411 - RNA, 19 nt, Artificial Sequence
  Description of Artificial Sequence: Synthetic oligonucleotide
  Antisense strand to SEQ ID NO: 1272410
auugucaaccuagagcucc

SEQ ID NO: 1272412 - RNA, 19 nt, Artificial Sequence
  Description of Artificial Sequence: Synthetic oligonucleotide
  Sense strand starting at position 3975 of SEQ ID NO: 1241435
cugacuuauuaaugaguua

SEQ ID NO: 1272413 - RNA, 19 nt, Artificial Sequence
  Description of Artificial Sequence: Synthetic oligonucleotide
  Antisense strand to SEQ ID NO: 1272412
uaacucauuaauaagucag

SEQ ID NO: 1272414 - RNA, 19 nt, Artificial Sequence
  Description of Artificial Sequence: Synthetic oligonucleotide
  Sense strand starting at position 492 of SEQ ID NO: 1241436
aauggugccagggaguaua

SEQ ID NO: 1272415 - RNA, 19 nt, Artificial Sequence
  Description of Artificial Sequence: Synthetic oligonucleotide
  Antisense strand to SEQ ID NO: 1272414
uauacucccuggcaccauu

SEQ ID NO: 1272416 - RNA, 19 nt, Artificial Sequence
  Description of Artificial Sequence: Synthetic oligonucleotide
  Sense strand starting at position 534 of SEQ ID NO: 1241436
gugacaacuuaggucaaau

SEQ ID NO: 1272417 - RNA, 19 nt, Artificial Sequence
  Description of Artificial Sequence: Synthetic oligonucleotide
  Antisense strand to SEQ ID NO: 1272416
auuugaccuaaguugucac

SEQ ID NO: 1272418 - RNA, 19 nt, Artificial Sequence
  Description of Artificial Sequence: Synthetic oligonucleotide
  Sense strand starting at position 571 of SEQ ID NO: 1241436
ggagcaguuccagagagca

SEQ ID NO: 1272419 - RNA, 19 nt, Artificial Sequence
  Description of Artificial Sequence: Synthetic oligonucleotide
  Antisense strand to SEQ ID NO: 1272418
ugcucucuggaacugcucc

SEQ ID NO: 1272420 - RNA, 19 nt, Artificial Sequence
  Description of Artificial Sequence: Synthetic oligonucleotide
  Sense strand starting at position 600 of SEQ ID NO: 1241436
cuugauuccuaagaauuug

SEQ ID NO: 1272421 - RNA, 19 nt, Artificial Sequence
  Description of Artificial Sequence: Synthetic oligonucleotide
  Antisense strand to SEQ ID NO: 1272420
caaauucuuaggaaucaag

SEQ ID NO: 1272422 - RNA, 19 nt, Artificial Sequence
  Description of Artificial Sequence: Synthetic oligonucleotide
  Sense strand starting at position 644 of SEQ ID NO: 1241436
aacauugauuugugauuag

SEQ ID NO: 1272423 - RNA, 19 nt, Artificial Sequence
  Description of Artificial Sequence: Synthetic oligonucleotide
  Antisense strand to SEQ ID NO: 1272422
cuaaucacaaaucaauguu

SEQ ID NO: 1272424 - RNA, 19 nt, Artificial Sequence
  Description of Artificial Sequence: Synthetic oligonucleotide
  Sense strand starting at position 651 of SEQ ID NO: 1241436
auuugugauuaggaagaag

SEQ ID NO: 1272425 - RNA, 19 nt, Artificial Sequence
  Description of Artificial Sequence: Synthetic oligonucleotide
  Antisense strand to SEQ ID NO: 1272424
cuucuuccuaaucacaaau

SEQ ID NO: 1272426 - RNA, 19 nt, Artificial Sequence
  Description of Artificial Sequence: Synthetic oligonucleotide
  Sense strand starting at position 811 of SEQ ID NO: 1241436
gggccauugaccugggauc

SEQ ID NO: 1272427 - RNA, 19 nt, Artificial Sequence
  Description of Artificial Sequence: Synthetic oligonucleotide
  Antisense strand to SEQ ID NO: 1272426
gaucccaggucaauggccc

SEQ ID NO: 1272428 - RNA, 19 nt, Artificial Sequence
  Description of Artificial Sequence: Synthetic oligonucleotide
  Sense strand starting at position 812 of SEQ ID NO: 1241436
ggccauugaccugggauca

SEQ ID NO: 1272429 - RNA, 19 nt, Artificial Sequence
  Description of Artificial Sequence: Synthetic oligonucleotide
  Antisense strand to SEQ ID NO: 1272428
ugaucccaggucaauggcc

SEQ ID NO: 1272430 - RNA, 19 nt, Artificial Sequence
  Description of Artificial Sequence: Synthetic oligonucleotide
  Sense strand starting at position 840 of SEQ ID NO: 1241436
uccugaaagccaugggcuu

SEQ ID NO: 1272431 - RNA, 19 nt, Artificial Sequence
  Description of Artificial Sequence: Synthetic oligonucleotide
  Antisense strand to SEQ ID NO: 1272430
aagcccauggcuuucagga

SEQ ID NO: 1272432 - RNA, 19 nt, Artificial Sequence
  Description of Artificial Sequence: Synthetic oligonucleotide
  Sense strand starting at position 881 of SEQ ID NO: 1241436
agagcucaauccuuaggca

SEQ ID NO: 1272433 - RNA, 19 nt, Artificial Sequence
  Description of Artificial Sequence: Synthetic oligonucleotide
  Antisense strand to SEQ ID NO: 1272432
ugccuaaggauugagcucu

SEQ ID NO: 1272434 - RNA, 19 nt, Artificial Sequence
  Description of Artificial Sequence: Synthetic oligonucleotide
  Sense strand starting at position 929 of SEQ ID NO: 1241436
augccaugccucugaauga

SEQ ID NO: 1272435 - RNA, 19 nt, Artificial Sequence
  Description of Artificial Sequence: Synthetic oligonucleotide
  Antisense strand to SEQ ID NO: 1272434
ucauucagaggcauggcau

SEQ ID NO: 1272436 - RNA, 19 nt, Artificial Sequence
  Description of Artificial Sequence: Synthetic oligonucleotide
  Sense strand starting at position 1054 of SEQ ID NO: 1241436
ccaugcaggucuuucuuaa

SEQ ID NO: 1272437 - RNA, 19 nt, Artificial Sequence
  Description of Artificial Sequence: Synthetic oligonucleotide
  Antisense strand to SEQ ID NO: 1272436
uuaagaaagaccugcaugg

SEQ ID NO: 1272438 - RNA, 19 nt, Artificial Sequence
  Description of Artificial Sequence: Synthetic oligonucleotide
  Sense strand starting at position 1109 of SEQ ID NO: 1241436
ccagacugucugggauaca

SEQ ID NO: 1272439 - RNA, 19 nt, Artificial Sequence
  Description of Artificial Sequence: Synthetic oligonucleotide
  Antisense strand to SEQ ID NO: 1272438
uguaucccagacagucugg

SEQ ID NO: 1272440 - RNA, 19 nt, Artificial Sequence
  Description of Artificial Sequence: Synthetic oligonucleotide
  Sense strand starting at position 1143 of SEQ ID NO: 1241436
uggccugguaguuagaaga

SEQ ID NO: 1272441 - RNA, 19 nt, Artificial Sequence
  Description of Artificial Sequence: Synthetic oligonucleotide
  Antisense strand to SEQ ID NO: 1272440
ucuucuaacuaccaggcca

SEQ ID NO: 1272442 - RNA, 19 nt, Artificial Sequence
  Description of Artificial Sequence: Synthetic oligonucleotide
  Sense strand starting at position 1213 of SEQ ID NO: 1241436
auuucugaguguuaauuuc

SEQ ID NO: 1272443 - RNA, 19 nt, Artificial Sequence
  Description of Artificial Sequence: Synthetic oligonucleotide
  Antisense strand to SEQ ID NO: 1272442
gaaauuaacacucagaaau

SEQ ID NO: 1272444 - RNA, 19 nt, Artificial Sequence
  Description of Artificial Sequence: Synthetic oligonucleotide
  Sense strand starting at position 1220 of SEQ ID NO: 1241436
aguguuaauuuccuuguca

SEQ ID NO: 1272445 - RNA, 19 nt, Artificial Sequence
  Description of Artificial Sequence: Synthetic oligonucleotide
  Antisense strand to SEQ ID NO: 1272444
ugacaaggaaauuaacacu

SEQ ID NO: 1272446 - RNA, 19 nt, Artificial Sequence
  Description of Artificial Sequence: Synthetic oligonucleotide
  Sense strand starting at position 1221 of SEQ ID NO: 1241436
guguuaauuuccuugucaa

SEQ ID NO: 1272447 - RNA, 19 nt, Artificial Sequence
  Description of Artificial Sequence: Synthetic oligonucleotide
  Antisense strand to SEQ ID NO: 1272446
uugacaaggaaauuaacac

SEQ ID NO: 1272448 - RNA, 19 nt, Artificial Sequence
  Description of Artificial Sequence: Synthetic oligonucleotide
  Sense strand starting at position 1357 of SEQ ID NO: 1241436
ugguguaaauauucccaau

SEQ ID NO: 1272449 - RNA, 19 nt, Artificial Sequence
  Description of Artificial Sequence: Synthetic oligonucleotide
  Antisense strand to SEQ ID NO: 1272448
auugggaauauuuacacca

SEQ ID NO: 1272450 - RNA, 19 nt, Artificial Sequence
  Description of Artificial Sequence: Synthetic oligonucleotide
  Sense strand starting at position 1359 of SEQ ID NO: 1241436
guguaaauauucccaaugu

SEQ ID NO: 1272451 - RNA, 19 nt, Artificial Sequence
  Description of Artificial Sequence: Synthetic oligonucleotide
  Antisense strand to SEQ ID NO: 1272450
acauugggaauauuuacac

SEQ ID NO: 1272452 - RNA, 19 nt, Artificial Sequence
  Description of Artificial Sequence: Synthetic oligonucleotide
  Sense strand starting at position 1575 of SEQ ID NO: 1241436
uccugugaucacuaggugu

SEQ ID NO: 1272453 - RNA, 19 nt, Artificial Sequence
  Description of Artificial Sequence: Synthetic oligonucleotide
  Antisense strand to SEQ ID NO: 1272452
acaccuagugaucacagga

SEQ ID NO: 1272454 - RNA, 19 nt, Artificial Sequence
  Description of Artificial Sequence: Synthetic oligonucleotide
  Sense strand starting at position 1615 of SEQ ID NO: 1241436
ggccugaguggugagagau

SEQ ID NO: 1272455 - RNA, 19 nt, Artificial Sequence
  Description of Artificial Sequence: Synthetic oligonucleotide
  Antisense strand to SEQ ID NO: 1272454
aucucucaccacucaggcc

SEQ ID NO: 1272456 - RNA, 19 nt, Artificial Sequence
  Description of Artificial Sequence: Synthetic oligonucleotide
  Sense strand starting at position 1663 of SEQ ID NO: 1241436
ugaagaggcuugucauugu

SEQ ID NO: 1272457 - RNA, 19 nt, Artificial Sequence
  Description of Artificial Sequence: Synthetic oligonucleotide
  Antisense strand to SEQ ID NO: 1272456
acaaugacaagccucuuca

SEQ ID NO: 1272458 - RNA, 19 nt, Artificial Sequence
  Description of Artificial Sequence: Synthetic oligonucleotide
  Sense strand starting at position 1732 of SEQ ID NO: 1241436
ucgacugcuucccuaagaa

SEQ ID NO: 1272459 - RNA, 19 nt, Artificial Sequence
  Description of Artificial Sequence: Synthetic oligonucleotide
  Antisense strand to SEQ ID NO: 1272458
uucuuagggaagcagucga

SEQ ID NO: 1272460 - RNA, 19 nt, Artificial Sequence
  Description of Artificial Sequence: Synthetic oligonucleotide
  Sense strand starting at position 1997 of SEQ ID NO: 1241436
gugacuuugugacucagga

SEQ ID NO: 1272461 - RNA, 19 nt, Artificial Sequence
  Description of Artificial Sequence: Synthetic oligonucleotide
  Antisense strand to SEQ ID NO: 1272460
uccugagucacaaagucac

SEQ ID NO: 1272462 - RNA, 19 nt, Artificial Sequence
  Description of Artificial Sequence: Synthetic oligonucleotide
  Sense strand starting at position 2209 of SEQ ID NO: 1241436
uguauuucccucugaguca

SEQ ID NO: 1272463 - RNA, 19 nt, Artificial Sequence
  Description of Artificial Sequence: Synthetic oligonucleotide
  Antisense strand to SEQ ID NO: 1272462
ugacucagagggaaauaca

SEQ ID NO: 1272464 - RNA, 19 nt, Artificial Sequence
  Description of Artificial Sequence: Synthetic oligonucleotide
  Sense strand starting at position 2246 of SEQ ID NO: 1241436
uuaauuaggugacugugaa

SEQ ID NO: 1272465 - RNA, 19 nt, Artificial Sequence
  Description of Artificial Sequence: Synthetic oligonucleotide
  Antisense strand to SEQ ID NO: 1272464
uucacagucaccuaauuaa

SEQ ID NO: 1272466 - RNA, 19 nt, Artificial Sequence
  Description of Artificial Sequence: Synthetic oligonucleotide
  Sense strand starting at position 2247 of SEQ ID NO: 1241436
uaauuaggugacugugaag

SEQ ID NO: 1272467 - RNA, 19 nt, Artificial Sequence
  Description of Artificial Sequence: Synthetic oligonucleotide
  Antisense strand to SEQ ID NO: 1272466
cuucacagucaccuaauua

SEQ ID NO: 1272468 - RNA, 19 nt, Artificial Sequence
  Description of Artificial Sequence: Synthetic oligonucleotide
  Sense strand starting at position 2435 of SEQ ID NO: 1241436
auguccuaucacuacaguu

SEQ ID NO: 1272469 - RNA, 19 nt, Artificial Sequence
  Description of Artificial Sequence: Synthetic oligonucleotide
  Antisense strand to SEQ ID NO: 1272468
aacuguagugauaggacau

SEQ ID NO: 1272470 - RNA, 19 nt, Artificial Sequence
  Description of Artificial Sequence: Synthetic oligonucleotide
  Sense strand starting at position 2601 of SEQ ID NO: 1241436
uuguucuuucuugauaagu

SEQ ID NO: 1272471 - RNA, 19 nt, Artificial Sequence
  Description of Artificial Sequence: Synthetic oligonucleotide
  Antisense strand to SEQ ID NO: 1272470
acuuaucaagaaagaacaa

SEQ ID NO: 1272472 - RNA, 19 nt, Artificial Sequence
  Description of Artificial Sequence: Synthetic oligonucleotide
  Sense strand starting at position 2653 of SEQ ID NO: 1241436
aggguuugaggaugugaaa

SEQ ID NO: 1272473 - RNA, 19 nt, Artificial Sequence
  Description of Artificial Sequence: Synthetic oligonucleotide
  Antisense strand to SEQ ID NO: 1272472
uuucacauccucaaacccu

SEQ ID NO: 1272474 - RNA, 19 nt, Artificial Sequence
  Description of Artificial Sequence: Synthetic oligonucleotide
  Sense strand starting at position 2718 of SEQ ID NO: 1241436
cuagaaaugugugcaagga

SEQ ID NO: 1272475 - RNA, 19 nt, Artificial Sequence
  Description of Artificial Sequence: Synthetic oligonucleotide
  Antisense strand to SEQ ID NO: 1272474
uccuugcacacauuucuag

SEQ ID NO: 1272476 - RNA, 19 nt, Artificial Sequence
  Description of Artificial Sequence: Synthetic oligonucleotide
  Sense strand starting at position 2767 of SEQ ID NO: 1241436
auauguauaccugagaugu

SEQ ID NO: 1272477 - RNA, 19 nt, Artificial Sequence
  Description of Artificial Sequence: Synthetic oligonucleotide
  Antisense strand to SEQ ID NO: 1272476
acaucucagguauacauau

SEQ ID NO: 1272478 - RNA, 19 nt, Artificial Sequence
  Description of Artificial Sequence: Synthetic oligonucleotide
  Sense strand starting at position 2911 of SEQ ID NO: 1241436
augugcaaugcauaauaga

SEQ ID NO: 1272479 - RNA, 19 nt, Artificial Sequence
  Description of Artificial Sequence: Synthetic oligonucleotide
  Antisense strand to SEQ ID NO: 1272478
ucuauuaugcauugcacau

SEQ ID NO: 1272480 - RNA, 19 nt, Artificial Sequence
  Description of Artificial Sequence: Synthetic oligonucleotide
  Sense strand starting at position 2953 of SEQ ID NO: 1241436
gaggguccugggcaaauau

SEQ ID NO: 1272481 - RNA, 19 nt, Artificial Sequence
  Description of Artificial Sequence: Synthetic oligonucleotide
  Antisense strand to SEQ ID NO: 1272480
auauuugcccaggacccuc

SEQ ID NO: 1272482 - RNA, 19 nt, Artificial Sequence
  Description of Artificial Sequence: Synthetic oligonucleotide
  Sense strand starting at position 3263 of SEQ ID NO: 1241436
ucuggucucagguacugaa

SEQ ID NO: 1272483 - RNA, 19 nt, Artificial Sequence
  Description of Artificial Sequence: Synthetic oligonucleotide
  Antisense strand to SEQ ID NO: 1272482
uucaguaccugagaccaga

SEQ ID NO: 1272484 - RNA, 19 nt, Artificial Sequence
  Description of Artificial Sequence: Synthetic oligonucleotide
  Sense strand starting at position 3412 of SEQ ID NO: 1241436
gggugagguuucuucauau

SEQ ID NO: 1272485 - RNA, 19 nt, Artificial Sequence
  Description of Artificial Sequence: Synthetic oligonucleotide
  Antisense strand to SEQ ID NO: 1272484
auaugaagaaaccucaccc

SEQ ID NO: 1272486 - RNA, 19 nt, Artificial Sequence
  Description of Artificial Sequence: Synthetic oligonucleotide
  Sense strand starting at position 3586 of SEQ ID NO: 1241436
gagagauccgaaugcaauu

SEQ ID NO: 1272487 - RNA, 19 nt, Artificial Sequence
  Description of Artificial Sequence: Synthetic oligonucleotide
  Antisense strand to SEQ ID NO: 1272486
aauugcauucggaucucuc

SEQ ID NO: 1272488 - RNA, 19 nt, Artificial Sequence
  Description of Artificial Sequence: Synthetic oligonucleotide
  Sense strand starting at position 3646 of SEQ ID NO: 1241436
gugacaucaucagauauuu

SEQ ID NO: 1272489 - RNA, 19 nt, Artificial Sequence
  Description of Artificial Sequence: Synthetic oligonucleotide
  Antisense strand to SEQ ID NO: 1272488
aaauaucugaugaugucac

SEQ ID NO: 1272490 - RNA, 19 nt, Artificial Sequence
  Description of Artificial Sequence: Synthetic oligonucleotide
  Sense strand starting at position 3665 of SEQ ID NO: 1241436
ucuuuagaaugguugacag

SEQ ID NO: 1272491 - RNA, 19 nt, Artificial Sequence
  Description of Artificial Sequence: Synthetic oligonucleotide
  Antisense strand to SEQ ID NO: 1272490
cugucaaccauucuaaaga

SEQ ID NO: 1272492 - RNA, 19 nt, Artificial Sequence
  Description of Artificial Sequence: Synthetic oligonucleotide
  Sense strand starting at position 3672 of SEQ ID NO: 1241436
aaugguugacagcaauauu

SEQ ID NO: 1272493 - RNA, 19 nt, Artificial Sequence
  Description of Artificial Sequence: Synthetic oligonucleotide
  Antisense strand to SEQ ID NO: 1272492
aauauugcugucaaccauu

SEQ ID NO: 1272494 - RNA, 19 nt, Artificial Sequence
  Description of Artificial Sequence: Synthetic oligonucleotide
  Sense strand starting at position 495 of SEQ ID NO: 1241437
uuugacuucugucugggaa

SEQ ID NO: 1272495 - RNA, 19 nt, Artificial Sequence
  Description of Artificial Sequence: Synthetic oligonucleotide
  Antisense strand to SEQ ID NO: 1272494
uucccagacagaagucaaa

SEQ ID NO: 1272496 - RNA, 19 nt, Artificial Sequence
  Description of Artificial Sequence: Synthetic oligonucleotide
  Sense strand starting at position 498 of SEQ ID NO: 1241437
gacuucugucugggaagca

SEQ ID NO: 1272497 - RNA, 19 nt, Artificial Sequence
  Description of Artificial Sequence: Synthetic oligonucleotide
  Antisense strand to SEQ ID NO: 1272496
ugcuucccagacagaaguc

SEQ ID NO: 1272498 - RNA, 19 nt, Artificial Sequence
  Description of Artificial Sequence: Synthetic oligonucleotide
  Sense strand starting at position 524 of SEQ ID NO: 1241437
gugagcagucgcuaaagua

SEQ ID NO: 1272499 - RNA, 19 nt, Artificial Sequence
  Description of Artificial Sequence: Synthetic oligonucleotide
  Antisense strand to SEQ ID NO: 1272498
uacuuuagcgacugcucac

SEQ ID NO: 1272500 - RNA, 19 nt, Artificial Sequence
  Description of Artificial Sequence: Synthetic oligonucleotide
  Sense strand starting at position 580 of SEQ ID NO: 1241437
ccaaccaucucaguuuguu

SEQ ID NO: 1272501 - RNA, 19 nt, Artificial Sequence
  Description of Artificial Sequence: Synthetic oligonucleotide
  Antisense strand to SEQ ID NO: 1272500
aacaaacugagaugguugg

SEQ ID NO: 1272502 - RNA, 19 nt, Artificial Sequence
  Description of Artificial Sequence: Synthetic oligonucleotide
  Sense strand starting at position 585 of SEQ ID NO: 1241437
caucucaguuuguugggaa

SEQ ID NO: 1272503 - RNA, 19 nt, Artificial Sequence
  Description of Artificial Sequence: Synthetic oligonucleotide
  Antisense strand to SEQ ID NO: 1272502
uucccaacaaacugagaug

SEQ ID NO: 1272504 - RNA, 19 nt, Artificial Sequence
  Description of Artificial Sequence: Synthetic oligonucleotide
  Sense strand starting at position 586 of SEQ ID NO: 1241437
aucucaguuuguugggaaa

SEQ ID NO: 1272505 - RNA, 19 nt, Artificial Sequence
  Description of Artificial Sequence: Synthetic oligonucleotide
  Antisense strand to SEQ ID NO: 1272504
uuucccaacaaacugagau

SEQ ID NO: 1272506 - RNA, 19 nt, Artificial Sequence
  Description of Artificial Sequence: Synthetic oligonucleotide
  Sense strand starting at position 633 of SEQ ID NO: 1241437
gugcuuaaacugggaaagu

SEQ ID NO: 1272507 - RNA, 19 nt, Artificial Sequence
  Description of Artificial Sequence: Synthetic oligonucleotide
  Antisense strand to SEQ ID NO: 1272506
acuuucccaguuuaagcac

SEQ ID NO: 1272508 - RNA, 19 nt, Artificial Sequence
  Description of Artificial Sequence: Synthetic oligonucleotide
  Sense strand starting at position 634 of SEQ ID NO: 1241437
ugcuuaaacugggaaaguu

SEQ ID NO: 1272509 - RNA, 19 nt, Artificial Sequence
  Description of Artificial Sequence: Synthetic oligonucleotide
  Antisense strand to SEQ ID NO: 1272508
aacuuucccaguuuaagca

SEQ ID NO: 1272510 - RNA, 19 nt, Artificial Sequence
  Description of Artificial Sequence: Synthetic oligonucleotide
  Sense strand starting at position 644 of SEQ ID NO: 1241437
gggaaaguuccaggccaac

SEQ ID NO: 1272511 - RNA, 19 nt, Artificial Sequence
  Description of Artificial Sequence: Synthetic oligonucleotide
  Antisense strand to SEQ ID NO: 1272510
guuggccuggaacuuuccc

SEQ ID NO: 1272512 - RNA, 19 nt, Artificial Sequence
  Description of Artificial Sequence: Synthetic oligonucleotide
  Sense strand starting at position 676 of SEQ ID NO: 1241437
ucaccuuagugaccacaga

SEQ ID NO: 1272513 - RNA, 19 nt, Artificial Sequence
  Description of Artificial Sequence: Synthetic oligonucleotide
  Antisense strand to SEQ ID NO: 1272512
ucuguggucacuaagguga

SEQ ID NO: 1272514 - RNA, 19 nt, Artificial Sequence
  Description of Artificial Sequence: Synthetic oligonucleotide
  Sense strand starting at position 690 of SEQ ID NO: 1241437
acagauguguacuugugga

SEQ ID NO: 1272515 - RNA, 19 nt, Artificial Sequence
  Description of Artificial Sequence: Synthetic oligonucleotide
  Antisense strand to SEQ ID NO: 1272514
uccacaaguacacaucugu

SEQ ID NO: 1272516 - RNA, 19 nt, Artificial Sequence
  Description of Artificial Sequence: Synthetic oligonucleotide
  Sense strand starting at position 1089 of SEQ ID NO: 1241437
ccuugugugccugucucau

SEQ ID NO: 1272517 - RNA, 19 nt, Artificial Sequence
  Description of Artificial Sequence: Synthetic oligonucleotide
  Antisense strand to SEQ ID NO: 1272516
augagacaggcacacaagg

SEQ ID NO: 1272518 - RNA, 19 nt, Artificial Sequence
  Description of Artificial Sequence: Synthetic oligonucleotide
  Sense strand starting at position 1204 of SEQ ID NO: 1241437
uuauaagccucagagaaug

SEQ ID NO: 1272519 - RNA, 19 nt, Artificial Sequence
  Description of Artificial Sequence: Synthetic oligonucleotide
  Antisense strand to SEQ ID NO: 1272518
cauucucugaggcuuauaa

SEQ ID NO: 1272520 - RNA, 19 nt, Artificial Sequence
  Description of Artificial Sequence: Synthetic oligonucleotide
  Sense strand starting at position 2903 of SEQ ID NO: 1241437
ugugaugcccgaugagaag

SEQ ID NO: 1272521 - RNA, 19 nt, Artificial Sequence
  Description of Artificial Sequence: Synthetic oligonucleotide
  Antisense strand to SEQ ID NO: 1272520
cuucucaucgggcaucaca

SEQ ID NO: 1272522 - RNA, 19 nt, Artificial Sequence
  Description of Artificial Sequence: Synthetic oligonucleotide
  Sense strand starting at position 3080 of SEQ ID NO: 1241437
cccagagcucagugguaaa

SEQ ID NO: 1272523 - RNA, 19 nt, Artificial Sequence
  Description of Artificial Sequence: Synthetic oligonucleotide
  Antisense strand to SEQ ID NO: 1272522
uuuaccacugagcucuggg

SEQ ID NO: 1272524 - RNA, 19 nt, Artificial Sequence
  Description of Artificial Sequence: Synthetic oligonucleotide
  Sense strand starting at position 3503 of SEQ ID NO: 1241437
guaagauucccugguggug

SEQ ID NO: 1272525 - RNA, 19 nt, Artificial Sequence
  Description of Artificial Sequence: Synthetic oligonucleotide
  Antisense strand to SEQ ID NO: 1272524
caccaccagggaaucuuac

SEQ ID NO: 1272526 - RNA, 19 nt, Artificial Sequence
  Description of Artificial Sequence: Synthetic oligonucleotide
  Sense strand starting at position 3529 of SEQ ID NO: 1241437
auaggaggacucugcugaa

SEQ ID NO: 1272527 - RNA, 19 nt, Artificial Sequence
  Description of Artificial Sequence: Synthetic oligonucleotide
  Antisense strand to SEQ ID NO: 1272526
uucagcagaguccuccuau

SEQ ID NO: 1272528 - RNA, 19 nt, Artificial Sequence
  Description of Artificial Sequence: Synthetic oligonucleotide
  Sense strand starting at position 3680 of SEQ ID NO: 1241437
gccuuauccuugccuguuu

SEQ ID NO: 1272529 - RNA, 19 nt, Artificial Sequence
  Description of Artificial Sequence: Synthetic oligonucleotide
  Antisense strand to SEQ ID NO: 1272528
aaacaggcaaggauaaggc

SEQ ID NO: 1272530 - RNA, 19 nt, Artificial Sequence
  Description of Artificial Sequence: Synthetic oligonucleotide
  Sense strand starting at position 3863 of SEQ ID NO: 1241437
gaggcauaaugguuaggga

SEQ ID NO: 1272531 - RNA, 19 nt, Artificial Sequence
  Description of Artificial Sequence: Synthetic oligonucleotide
  Antisense strand to SEQ ID NO: 1272530
ucccuaaccauuaugccuc

SEQ ID NO: 1272532 - RNA, 19 nt, Artificial Sequence
  Description of Artificial Sequence: Synthetic oligonucleotide
  Sense strand starting at position 3948 of SEQ ID NO: 1241437
aaggaugaguagggacaua

SEQ ID NO: 1272533 - RNA, 19 nt, Artificial Sequence
  Description of Artificial Sequence: Synthetic oligonucleotide
  Antisense strand to SEQ ID NO: 1272532
uaugucccuacucauccuu

SEQ ID NO: 1272534 - RNA, 19 nt, Artificial Sequence
  Description of Artificial Sequence: Synthetic oligonucleotide
  Sense strand starting at position 5 of SEQ ID NO: 1241438
uuuggagauuccuuugcac

SEQ ID NO: 1272535 - RNA, 19 nt, Artificial Sequence
  Description of Artificial Sequence: Synthetic oligonucleotide
  Antisense strand to SEQ ID NO: 1272534
gugcaaaggaaucuccaaa

SEQ ID NO: 1272536 - RNA, 19 nt, Artificial Sequence
  Description of Artificial Sequence: Synthetic oligonucleotide
  Sense strand starting at position 7 of SEQ ID NO: 1241438
uggagauuccuuugcaccu

SEQ ID NO: 1272537 - RNA, 19 nt, Artificial Sequence
  Description of Artificial Sequence: Synthetic oligonucleotide
  Antisense strand to SEQ ID NO: 1272536
aggugcaaaggaaucucca

SEQ ID NO: 1272538 - RNA, 19 nt, Artificial Sequence
  Description of Artificial Sequence: Synthetic oligonucleotide
  Sense strand starting at position 8 of SEQ ID NO: 1241438
ggagauuccuuugcaccuu

SEQ ID NO: 1272539 - RNA, 19 nt, Artificial Sequence
  Description of Artificial Sequence: Synthetic oligonucleotide
  Antisense strand to SEQ ID NO: 1272538
aaggugcaaaggaaucucc

SEQ ID NO: 1272540 - RNA, 19 nt, Artificial Sequence
  Description of Artificial Sequence: Synthetic oligonucleotide
  Sense strand starting at position 2103 of SEQ ID NO: 1241438
uuugacuucugucugggaa

SEQ ID NO: 1272541 - RNA, 19 nt, Artificial Sequence
  Description of Artificial Sequence: Synthetic oligonucleotide
  Antisense strand to SEQ ID NO: 1272540
uucccagacagaagucaaa

SEQ ID NO: 1272542 - RNA, 19 nt, Artificial Sequence
  Description of Artificial Sequence: Synthetic oligonucleotide
  Sense strand starting at position 2106 of SEQ ID NO: 1241438
gacuucugucugggaagca

SEQ ID NO: 1272543 - RNA, 19 nt, Artificial Sequence
  Description of Artificial Sequence: Synthetic oligonucleotide
  Antisense strand to SEQ ID NO: 1272542
ugcuucccagacagaaguc

SEQ ID NO: 1272544 - RNA, 19 nt, Artificial Sequence
  Description of Artificial Sequence: Synthetic oligonucleotide
  Sense strand starting at position 2132 of SEQ ID NO: 1241438
gugagcagucgcuaaagua

SEQ ID NO: 1272545 - RNA, 19 nt, Artificial Sequence
  Description of Artificial Sequence: Synthetic oligonucleotide
  Antisense strand to SEQ ID NO: 1272544
uacuuuagcgacugcucac

SEQ ID NO: 1272546 - RNA, 19 nt, Artificial Sequence
  Description of Artificial Sequence: Synthetic oligonucleotide
  Sense strand starting at position 2188 of SEQ ID NO: 1241438
ccaaccaucucaguuuguu

SEQ ID NO: 1272547 - RNA, 19 nt, Artificial Sequence
  Description of Artificial Sequence: Synthetic oligonucleotide
  Antisense strand to SEQ ID NO: 1272546
aacaaacugagaugguugg

SEQ ID NO: 1272548 - RNA, 19 nt, Artificial Sequence
  Description of Artificial Sequence: Synthetic oligonucleotide
  Sense strand starting at position 2193 of SEQ ID NO: 1241438
caucucaguuuguugggaa

SEQ ID NO: 1272549 - RNA, 19 nt, Artificial Sequence
  Description of Artificial Sequence: Synthetic oligonucleotide
  Antisense strand to SEQ ID NO: 1272548
uucccaacaaacugagaug

SEQ ID NO: 1272550 - RNA, 19 nt, Artificial Sequence
  Description of Artificial Sequence: Synthetic oligonucleotide
  Sense strand starting at position 2194 of SEQ ID NO: 1241438
aucucaguuuguugggaaa

SEQ ID NO: 1272551 - RNA, 19 nt, Artificial Sequence
  Description of Artificial Sequence: Synthetic oligonucleotide
  Antisense strand to SEQ ID NO: 1272550
uuucccaacaaacugagau

SEQ ID NO: 1272552 - RNA, 19 nt, Artificial Sequence
  Description of Artificial Sequence: Synthetic oligonucleotide
  Sense strand starting at position 2241 of SEQ ID NO: 1241438
gugcuuaaacugggaaagu

SEQ ID NO: 1272553 - RNA, 19 nt, Artificial Sequence
  Description of Artificial Sequence: Synthetic oligonucleotide
  Antisense strand to SEQ ID NO: 1272552
acuuucccaguuuaagcac

SEQ ID NO: 1272554 - RNA, 19 nt, Artificial Sequence
  Description of Artificial Sequence: Synthetic oligonucleotide
  Sense strand starting at position 2242 of SEQ ID NO: 1241438
ugcuuaaacugggaaaguu

SEQ ID NO: 1272555 - RNA, 19 nt, Artificial Sequence
  Description of Artificial Sequence: Synthetic oligonucleotide
  Antisense strand to SEQ ID NO: 1272554
aacuuucccaguuuaagca

SEQ ID NO: 1272556 - RNA, 19 nt, Artificial Sequence
  Description of Artificial Sequence: Synthetic oligonucleotide
  Sense strand starting at position 2252 of SEQ ID NO: 1241438
gggaaaguuccaggccaac

SEQ ID NO: 1272557 - RNA, 19 nt, Artificial Sequence
  Description of Artificial Sequence: Synthetic oligonucleotide
  Antisense strand to SEQ ID NO: 1272556
guuggccuggaacuuuccc

SEQ ID NO: 1272558 - RNA, 19 nt, Artificial Sequence
  Description of Artificial Sequence: Synthetic oligonucleotide
  Sense strand starting at position 2284 of SEQ ID NO: 1241438
ucaccuuagugaccacaga

SEQ ID NO: 1272559 - RNA, 19 nt, Artificial Sequence
  Description of Artificial Sequence: Synthetic oligonucleotide
  Antisense strand to SEQ ID NO: 1272558
ucuguggucacuaagguga

SEQ ID NO: 1272560 - RNA, 19 nt, Artificial Sequence
  Description of Artificial Sequence: Synthetic oligonucleotide
  Sense strand starting at position 2298 of SEQ ID NO: 1241438
acagauguguacuugugga

SEQ ID NO: 1272561 - RNA, 19 nt, Artificial Sequence
  Description of Artificial Sequence: Synthetic oligonucleotide
  Antisense strand to SEQ ID NO: 1272560
uccacaaguacacaucugu

SEQ ID NO: 1272562 - RNA, 19 nt, Artificial Sequence
  Description of Artificial Sequence: Synthetic oligonucleotide
  Sense strand starting at position 2697 of SEQ ID NO: 1241438
ccuugugugccugucucau

SEQ ID NO: 1272563 - RNA, 19 nt, Artificial Sequence
  Description of Artificial Sequence: Synthetic oligonucleotide
  Antisense strand to SEQ ID NO: 1272562
augagacaggcacacaagg

SEQ ID NO: 1272564 - RNA, 19 nt, Artificial Sequence
  Description of Artificial Sequence: Synthetic oligonucleotide
  Sense strand starting at position 2812 of SEQ ID NO: 1241438
uuauaagccucagagaaug

SEQ ID NO: 1272565 - RNA, 19 nt, Artificial Sequence
  Description of Artificial Sequence: Synthetic oligonucleotide
  Antisense strand to SEQ ID NO: 1272564
cauucucugaggcuuauaa

SEQ ID NO: 1272566 - RNA, 19 nt, Artificial Sequence
  Description of Artificial Sequence: Synthetic oligonucleotide
  Sense strand starting at position 1555 of SEQ ID NO: 1241439
ugugaugcccgaugagaag

SEQ ID NO: 1272567 - RNA, 19 nt, Artificial Sequence
  Description of Artificial Sequence: Synthetic oligonucleotide
  Antisense strand to SEQ ID NO: 1272566
cuucucaucgggcaucaca

SEQ ID NO: 1272568 - RNA, 19 nt, Artificial Sequence
  Description of Artificial Sequence: Synthetic oligonucleotide
  Sense strand starting at position 1732 of SEQ ID NO: 1241439
cccagagcucagugguaaa

SEQ ID NO: 1272569 - RNA, 19 nt, Artificial Sequence
  Description of Artificial Sequence: Synthetic oligonucleotide
  Antisense strand to SEQ ID NO: 1272568
uuuaccacugagcucuggg

SEQ ID NO: 1272570 - RNA, 19 nt, Artificial Sequence
  Description of Artificial Sequence: Synthetic oligonucleotide
  Sense strand starting at position 2155 of SEQ ID NO: 1241439
guaagauucccugguggug

SEQ ID NO: 1272571 - RNA, 19 nt, Artificial Sequence
  Description of Artificial Sequence: Synthetic oligonucleotide
  Antisense strand to SEQ ID NO: 1272570
caccaccagggaaucuuac

SEQ ID NO: 1272572 - RNA, 19 nt, Artificial Sequence
  Description of Artificial Sequence: Synthetic oligonucleotide
  Sense strand starting at position 2181 of SEQ ID NO: 1241439
auaggaggacucugcugaa

SEQ ID NO: 1272573 - RNA, 19 nt, Artificial Sequence
  Description of Artificial Sequence: Synthetic oligonucleotide
  Antisense strand to SEQ ID NO: 1272572
uucagcagaguccuccuau

SEQ ID NO: 1272574 - RNA, 19 nt, Artificial Sequence
  Description of Artificial Sequence: Synthetic oligonucleotide
  Sense strand starting at position 2332 of SEQ ID NO: 1241439
gccuuauccuugccuguuu

SEQ ID NO: 1272575 - RNA, 19 nt, Artificial Sequence
  Description of Artificial Sequence: Synthetic oligonucleotide
  Antisense strand to SEQ ID NO: 1272574
aaacaggcaaggauaaggc

SEQ ID NO: 1272576 - RNA, 19 nt, Artificial Sequence
  Description of Artificial Sequence: Synthetic oligonucleotide
  Sense strand starting at position 2515 of SEQ ID NO: 1241439
gaggcauaaugguuaggga

SEQ ID NO: 1272577 - RNA, 19 nt, Artificial Sequence
  Description of Artificial Sequence: Synthetic oligonucleotide
  Antisense strand to SEQ ID NO: 1272576
ucccuaaccauuaugccuc

SEQ ID NO: 1272578 - RNA, 19 nt, Artificial Sequence
  Description of Artificial Sequence: Synthetic oligonucleotide
  Sense strand starting at position 2600 of SEQ ID NO: 1241439
aaggaugaguagggacaua

SEQ ID NO: 1272579 - RNA, 19 nt, Artificial Sequence
  Description of Artificial Sequence: Synthetic oligonucleotide
  Antisense strand to SEQ ID NO: 1272578
uaugucccuacucauccuu

SEQ ID NO: 1272580 - RNA, 19 nt, Artificial Sequence
  Description of Artificial Sequence: Synthetic oligonucleotide
  Sense strand starting at position 2721 of SEQ ID NO: 1241439
aaaggccucugcucaagua

SEQ ID NO: 1272581 - RNA, 19 nt, Artificial Sequence
  Description of Artificial Sequence: Synthetic oligonucleotide
  Antisense strand to SEQ ID NO: 1272580
uacuugagcagaggccuuu

SEQ ID NO: 1272582 - RNA, 19 nt, Artificial Sequence
  Description of Artificial Sequence: Synthetic oligonucleotide
  Sense strand starting at position 2776 of SEQ ID NO: 1241439
ggagcacugucuuaguuug

SEQ ID NO: 1272583 - RNA, 19 nt, Artificial Sequence
  Description of Artificial Sequence: Synthetic oligonucleotide
  Antisense strand to SEQ ID NO: 1272582
caaacuaagacagugcucc

SEQ ID NO: 1272584 - RNA, 19 nt, Artificial Sequence
  Description of Artificial Sequence: Synthetic oligonucleotide
  Sense strand starting at position 2841 of SEQ ID NO: 1241439
uccuguauucuugagcuaa

SEQ ID NO: 1272585 - RNA, 19 nt, Artificial Sequence
  Description of Artificial Sequence: Synthetic oligonucleotide
  Antisense strand to SEQ ID NO: 1272584
uuagcucaagaauacagga

SEQ ID NO: 1272586 - RNA, 19 nt, Artificial Sequence
  Description of Artificial Sequence: Synthetic oligonucleotide
  Sense strand starting at position 2878 of SEQ ID NO: 1241439
uccuguauuugggagguua

SEQ ID NO: 1272587 - RNA, 19 nt, Artificial Sequence
  Description of Artificial Sequence: Synthetic oligonucleotide
  Antisense strand to SEQ ID NO: 1272586
uaaccucccaaauacagga

SEQ ID NO: 1272588 - RNA, 19 nt, Artificial Sequence
  Description of Artificial Sequence: Synthetic oligonucleotide
  Sense strand starting at position 2890 of SEQ ID NO: 1241439
gagguuaacucaggaagug

SEQ ID NO: 1272589 - RNA, 19 nt, Artificial Sequence
  Description of Artificial Sequence: Synthetic oligonucleotide
  Antisense strand to SEQ ID NO: 1272588
cacuuccugaguuaaccuc

SEQ ID NO: 1272590 - RNA, 19 nt, Artificial Sequence
  Description of Artificial Sequence: Synthetic oligonucleotide
  Sense strand starting at position 2938 of SEQ ID NO: 1241439
agccauuaagaguauguua

SEQ ID NO: 1272591 - RNA, 19 nt, Artificial Sequence
  Description of Artificial Sequence: Synthetic oligonucleotide
  Antisense strand to SEQ ID NO: 1272590
uaacauacucuuaauggcu

SEQ ID NO: 1272592 - RNA, 19 nt, Artificial Sequence
  Description of Artificial Sequence: Synthetic oligonucleotide
  Sense strand starting at position 2940 of SEQ ID NO: 1241439
ccauuaagaguauguuaag

SEQ ID NO: 1272593 - RNA, 19 nt, Artificial Sequence
  Description of Artificial Sequence: Synthetic oligonucleotide
  Antisense strand to SEQ ID NO: 1272592
cuuaacauacucuuaaugg

SEQ ID NO: 1272594 - RNA, 19 nt, Artificial Sequence
  Description of Artificial Sequence: Synthetic oligonucleotide
  Sense strand starting at position 2941 of SEQ ID NO: 1241439
cauuaagaguauguuaagu

SEQ ID NO: 1272595 - RNA, 19 nt, Artificial Sequence
  Description of Artificial Sequence: Synthetic oligonucleotide
  Antisense strand to SEQ ID NO: 1272594
acuuaacauacucuuaaug

SEQ ID NO: 1272596 - RNA, 19 nt, Artificial Sequence
  Description of Artificial Sequence: Synthetic oligonucleotide
  Sense strand starting at position 2991 of SEQ ID NO: 1241439
aaguauagauugcccaaga

SEQ ID NO: 1272597 - RNA, 19 nt, Artificial Sequence
  Description of Artificial Sequence: Synthetic oligonucleotide
  Antisense strand to SEQ ID NO: 1272596
ucuugggcaaucuauacuu

SEQ ID NO: 1272598 - RNA, 19 nt, Artificial Sequence
  Description of Artificial Sequence: Synthetic oligonucleotide
  Sense strand starting at position 79 of SEQ ID NO: 1241440
agugcaagguccuuggagu

SEQ ID NO: 1272599 - RNA, 19 nt, Artificial Sequence
  Description of Artificial Sequence: Synthetic oligonucleotide
  Antisense strand to SEQ ID NO: 1272598
acuccaaggaccuugcacu

SEQ ID NO: 1272600 - RNA, 19 nt, Artificial Sequence
  Description of Artificial Sequence: Synthetic oligonucleotide
  Sense strand starting at position 80 of SEQ ID NO: 1241440
gugcaagguccuuggagua

SEQ ID NO: 1272601 - RNA, 19 nt, Artificial Sequence
  Description of Artificial Sequence: Synthetic oligonucleotide
  Antisense strand to SEQ ID NO: 1272600
uacuccaaggaccuugcac

SEQ ID NO: 1272602 - RNA, 19 nt, Artificial Sequence
  Description of Artificial Sequence: Synthetic oligonucleotide
  Sense strand starting at position 297 of SEQ ID NO: 1241440
cagccaugaugauccgauu

SEQ ID NO: 1272603 - RNA, 19 nt, Artificial Sequence
  Description of Artificial Sequence: Synthetic oligonucleotide
  Antisense strand to SEQ ID NO: 1272602
aaucggaucaucauggcug

SEQ ID NO: 1272604 - RNA, 19 nt, Artificial Sequence
  Description of Artificial Sequence: Synthetic oligonucleotide
  Sense strand starting at position 470 of SEQ ID NO: 1241440
agagcacacugauccaauu

SEQ ID NO: 1272605 - RNA, 19 nt, Artificial Sequence
  Description of Artificial Sequence: Synthetic oligonucleotide
  Antisense strand to SEQ ID NO: 1272604
aauuggaucagugugcucu

SEQ ID NO: 1272606 - RNA, 19 nt, Artificial Sequence
  Description of Artificial Sequence: Synthetic oligonucleotide
  Sense strand starting at position 795 of SEQ ID NO: 1241440
gcugcaagagucuacaaga

SEQ ID NO: 1272607 - RNA, 19 nt, Artificial Sequence
  Description of Artificial Sequence: Synthetic oligonucleotide
  Antisense strand to SEQ ID NO: 1272606
ucuuguagacucuugcagc

SEQ ID NO: 1272608 - RNA, 19 nt, Artificial Sequence
  Description of Artificial Sequence: Synthetic oligonucleotide
  Sense strand starting at position 805 of SEQ ID NO: 1241440
ucuacaagagcucguuagu

SEQ ID NO: 1272609 - RNA, 19 nt, Artificial Sequence
  Description of Artificial Sequence: Synthetic oligonucleotide
  Antisense strand to SEQ ID NO: 1272608
acuaacgagcucuuguaga

SEQ ID NO: 1272610 - RNA, 19 nt, Artificial Sequence
  Description of Artificial Sequence: Synthetic oligonucleotide
  Sense strand starting at position 855 of SEQ ID NO: 1241440
ggcgccuugcgaaaggauu

SEQ ID NO: 1272611 - RNA, 19 nt, Artificial Sequence
  Description of Artificial Sequence: Synthetic oligonucleotide
  Antisense strand to SEQ ID NO: 1272610
aauccuuucgcaaggcgcc

SEQ ID NO: 1272612 - RNA, 19 nt, Artificial Sequence
  Description of Artificial Sequence: Synthetic oligonucleotide
  Sense strand starting at position 857 of SEQ ID NO: 1241440
cgccuugcgaaaggauuua

SEQ ID NO: 1272613 - RNA, 19 nt, Artificial Sequence
  Description of Artificial Sequence: Synthetic oligonucleotide
  Antisense strand to SEQ ID NO: 1272612
uaaauccuuucgcaaggcg

SEQ ID NO: 1272614 - RNA, 19 nt, Artificial Sequence
  Description of Artificial Sequence: Synthetic oligonucleotide
  Sense strand starting at position 887 of SEQ ID NO: 1241440
ccgggagaguugguaagaa

SEQ ID NO: 1272615 - RNA, 19 nt, Artificial Sequence
  Description of Artificial Sequence: Synthetic oligonucleotide
  Antisense strand to SEQ ID NO: 1272614
uucuuaccaacucucccgg

SEQ ID NO: 1272616 - RNA, 19 nt, Artificial Sequence
  Description of Artificial Sequence: Synthetic oligonucleotide
  Sense strand starting at position 891 of SEQ ID NO: 1241440
gagaguugguaagaaagga

SEQ ID NO: 1272617 - RNA, 19 nt, Artificial Sequence
  Description of Artificial Sequence: Synthetic oligonucleotide
  Antisense strand to SEQ ID NO: 1272616
uccuuucuuaccaacucuc

SEQ ID NO: 1272618 - RNA, 19 nt, Artificial Sequence
  Description of Artificial Sequence: Synthetic oligonucleotide
  Sense strand starting at position 948 of SEQ ID NO: 1241440
cggaucaaaucuuccaauc

SEQ ID NO: 1272619 - RNA, 19 nt, Artificial Sequence
  Description of Artificial Sequence: Synthetic oligonucleotide
  Antisense strand to SEQ ID NO: 1272618
gauuggaagauuugauccg

SEQ ID NO: 1272620 - RNA, 19 nt, Artificial Sequence
  Description of Artificial Sequence: Synthetic oligonucleotide
  Sense strand starting at position 1714 of SEQ ID NO: 1241440
gccagcuucucugagucua

SEQ ID NO: 1272621 - RNA, 19 nt, Artificial Sequence
  Description of Artificial Sequence: Synthetic oligonucleotide
  Antisense strand to SEQ ID NO: 1272620
uagacucagagaagcuggc

SEQ ID NO: 1272622 - RNA, 19 nt, Artificial Sequence
  Description of Artificial Sequence: Synthetic oligonucleotide
  Sense strand starting at position 2550 of SEQ ID NO: 1241440
gugauggcugccgguagaa

SEQ ID NO: 1272623 - RNA, 19 nt, Artificial Sequence
  Description of Artificial Sequence: Synthetic oligonucleotide
  Antisense strand to SEQ ID NO: 1272622
uucuaccggcagccaucac

SEQ ID NO: 1272624 - RNA, 19 nt, Artificial Sequence
  Description of Artificial Sequence: Synthetic oligonucleotide
  Sense strand starting at position 2552 of SEQ ID NO: 1241440
gauggcugccgguagaaga

SEQ ID NO: 1272625 - RNA, 19 nt, Artificial Sequence
  Description of Artificial Sequence: Synthetic oligonucleotide
  Antisense strand to SEQ ID NO: 1272624
ucuucuaccggcagccauc

SEQ ID NO: 1272626 - RNA, 19 nt, Artificial Sequence
  Description of Artificial Sequence: Synthetic oligonucleotide
  Sense strand starting at position 2950 of SEQ ID NO: 1241440
cacggagccucuugaguaa

SEQ ID NO: 1272627 - RNA, 19 nt, Artificial Sequence
  Description of Artificial Sequence: Synthetic oligonucleotide
  Antisense strand to SEQ ID NO: 1272626
uuacucaagaggcuccgug

SEQ ID NO: 1272628 - RNA, 19 nt, Artificial Sequence
  Description of Artificial Sequence: Synthetic oligonucleotide
  Sense strand starting at position 2954 of SEQ ID NO: 1241440
gagccucuugaguaaguca

SEQ ID NO: 1272629 - RNA, 19 nt, Artificial Sequence
  Description of Artificial Sequence: Synthetic oligonucleotide
  Antisense strand to SEQ ID NO: 1272628
ugacuuacucaagaggcuc

SEQ ID NO: 1272630 - RNA, 19 nt, Artificial Sequence
  Description of Artificial Sequence: Synthetic oligonucleotide
  Sense strand starting at position 2978 of SEQ ID NO: 1241440
ggagauagcgcaugugaaa

SEQ ID NO: 1272631 - RNA, 19 nt, Artificial Sequence
  Description of Artificial Sequence: Synthetic oligonucleotide
  Antisense strand to SEQ ID NO: 1272630
uuucacaugcgcuaucucc

SEQ ID NO: 1272632 - RNA, 19 nt, Artificial Sequence
  Description of Artificial Sequence: Synthetic oligonucleotide
  Sense strand starting at position 3234 of SEQ ID NO: 1241440
agccuaaaggcuuggauca

SEQ ID NO: 1272633 - RNA, 19 nt, Artificial Sequence
  Description of Artificial Sequence: Synthetic oligonucleotide
  Antisense strand to SEQ ID NO: 1272632
ugauccaagccuuuaggcu

SEQ ID NO: 1272634 - RNA, 19 nt, Artificial Sequence
  Description of Artificial Sequence: Synthetic oligonucleotide
  Sense strand starting at position 3235 of SEQ ID NO: 1241440
gccuaaaggcuuggaucaa

SEQ ID NO: 1272635 - RNA, 19 nt, Artificial Sequence
  Description of Artificial Sequence: Synthetic oligonucleotide
  Antisense strand to SEQ ID NO: 1272634
uugauccaagccuuuaggc

SEQ ID NO: 1272636 - RNA, 19 nt, Artificial Sequence
  Description of Artificial Sequence: Synthetic oligonucleotide
  Sense strand starting at position 3366 of SEQ ID NO: 1241440
gguaauaucuacuguugaa

SEQ ID NO: 1272637 - RNA, 19 nt, Artificial Sequence
  Description of Artificial Sequence: Synthetic oligonucleotide
  Antisense strand to SEQ ID NO: 1272636
uucaacaguagauauuacc

SEQ ID NO: 1272638 - RNA, 19 nt, Artificial Sequence
  Description of Artificial Sequence: Synthetic oligonucleotide
  Sense strand starting at position 3545 of SEQ ID NO: 1241440
gaagguuccucuccaggau

SEQ ID NO: 1272639 - RNA, 19 nt, Artificial Sequence
  Description of Artificial Sequence: Synthetic oligonucleotide
  Antisense strand to SEQ ID NO: 1272638
auccuggagaggaaccuuc

SEQ ID NO: 1272640 - RNA, 19 nt, Artificial Sequence
  Description of Artificial Sequence: Synthetic oligonucleotide
  Sense strand starting at position 3549 of SEQ ID NO: 1241440
guuccucuccaggauguua

SEQ ID NO: 1272641 - RNA, 19 nt, Artificial Sequence
  Description of Artificial Sequence: Synthetic oligonucleotide
  Antisense strand to SEQ ID NO: 1272640
uaacauccuggagaggaac

SEQ ID NO: 1272642 - RNA, 19 nt, Artificial Sequence
  Description of Artificial Sequence: Synthetic oligonucleotide
  Sense strand starting at position 3569 of SEQ ID NO: 1241440
aggguaguuccucaucacu

SEQ ID NO: 1272643 - RNA, 19 nt, Artificial Sequence
  Description of Artificial Sequence: Synthetic oligonucleotide
  Antisense strand to SEQ ID NO: 1272642
agugaugaggaacuacccu

SEQ ID NO: 1272644 - RNA, 19 nt, Artificial Sequence
  Description of Artificial Sequence: Synthetic oligonucleotide
  Sense strand starting at position 3603 of SEQ ID NO: 1241440
aauaucagcuccuggagua

SEQ ID NO: 1272645 - RNA, 19 nt, Artificial Sequence
  Description of Artificial Sequence: Synthetic oligonucleotide
  Antisense strand to SEQ ID NO: 1272644
uacuccaggagcugauauu

SEQ ID NO: 1272646 - RNA, 19 nt, Artificial Sequence
  Description of Artificial Sequence: Synthetic oligonucleotide
  Sense strand starting at position 3709 of SEQ ID NO: 1241440
uugacaucaucuuguuauu

SEQ ID NO: 1272647 - RNA, 19 nt, Artificial Sequence
  Description of Artificial Sequence: Synthetic oligonucleotide
  Antisense strand to SEQ ID NO: 1272646
aauaacaagaugaugucaa

SEQ ID NO: 1272648 - RNA, 19 nt, Artificial Sequence
  Description of Artificial Sequence: Synthetic oligonucleotide
  Sense strand starting at position 3712 of SEQ ID NO: 1241440
acaucaucuuguuauugau

SEQ ID NO: 1272649 - RNA, 19 nt, Artificial Sequence
  Description of Artificial Sequence: Synthetic oligonucleotide
  Antisense strand to SEQ ID NO: 1272648
aucaauaacaagaugaugu

SEQ ID NO: 1272650 - RNA, 19 nt, Artificial Sequence
  Description of Artificial Sequence: Synthetic oligonucleotide
  Sense strand starting at position 3724 of SEQ ID NO: 1241440
uauugauuuguuugcucgu

SEQ ID NO: 1272651 - RNA, 19 nt, Artificial Sequence
  Description of Artificial Sequence: Synthetic oligonucleotide
  Antisense strand to SEQ ID NO: 1272650
acgagcaaacaaaucaaua

SEQ ID NO: 1272652 - RNA, 19 nt, Artificial Sequence
  Description of Artificial Sequence: Synthetic oligonucleotide
  Sense strand starting at position 3727 of SEQ ID NO: 1241440
ugauuuguuugcucgugua

SEQ ID NO: 1272653 - RNA, 19 nt, Artificial Sequence
  Description of Artificial Sequence: Synthetic oligonucleotide
  Antisense strand to SEQ ID NO: 1272652
uacacgagcaaacaaauca

SEQ ID NO: 1272654 - RNA, 19 nt, Artificial Sequence
  Description of Artificial Sequence: Synthetic oligonucleotide
  Sense strand starting at position 3730 of SEQ ID NO: 1241440
uuuguuugcucguguaacu

SEQ ID NO: 1272655 - RNA, 19 nt, Artificial Sequence
  Description of Artificial Sequence: Synthetic oligonucleotide
  Antisense strand to SEQ ID NO: 1272654
aguuacacgagcaaacaaa

SEQ ID NO: 1272656 - RNA, 19 nt, Artificial Sequence
  Description of Artificial Sequence: Synthetic oligonucleotide
  Sense strand starting at position 3735 of SEQ ID NO: 1241440
uugcucguguaacugaauu

SEQ ID NO: 1272657 - RNA, 19 nt, Artificial Sequence
  Description of Artificial Sequence: Synthetic oligonucleotide
  Antisense strand to SEQ ID NO: 1272656
aauucaguuacacgagcaa

SEQ ID NO: 1272658 - RNA, 19 nt, Artificial Sequence
  Description of Artificial Sequence: Synthetic oligonucleotide
  Sense strand starting at position 3858 of SEQ ID NO: 1241440
ggcagaguccuuggcuuga

SEQ ID NO: 1272659 - RNA, 19 nt, Artificial Sequence
  Description of Artificial Sequence: Synthetic oligonucleotide
  Antisense strand to SEQ ID NO: 1272658
ucaagccaaggacucugcc

SEQ ID NO: 1272660 - RNA, 19 nt, Artificial Sequence
  Description of Artificial Sequence: Synthetic oligonucleotide
  Sense strand starting at position 3897 of SEQ ID NO: 1241440
cgagaacuauucuauuaau

SEQ ID NO: 1272661 - RNA, 19 nt, Artificial Sequence
  Description of Artificial Sequence: Synthetic oligonucleotide
  Antisense strand to SEQ ID NO: 1272660
auuaauagaauaguucucg

SEQ ID NO: 1272662 - RNA, 19 nt, Artificial Sequence
  Description of Artificial Sequence: Synthetic oligonucleotide
  Sense strand starting at position 3949 of SEQ ID NO: 1241440
ugcuccuguccagaucaaa
